United States Patent Application Publication US 2018/0118836 A1 - sequence listing, part 2

SEQ ID NO: 15504 - protein, 9 aa, Artificial Sequence
  Description of Artificial Sequence: Synthetic peptide
  XENP018487 vlCDR3
QQDYSVPRT

SEQ ID NO: 15505 - protein, 451 aa, Artificial Sequence; identical to SEQ ID NO: 11545
  Description of Artificial Sequence: Synthetic polypeptide
  XENP018488 1G6_H1_L1.141_IgG1_PVA_/S267K Heavy Chain

SEQ ID NO: 15506 - protein, 122 aa, Artificial Sequence; identical to SEQ ID NO: 6246
  Description of Artificial Sequence: Synthetic polypeptide
  VH of XENP018488

SEQ ID NO: 15507 - protein, 5 aa, Artificial Sequence
  Description of Artificial Sequence: Synthetic peptide
  XENP018488 vhCDR1
NYWMN

SEQ ID NO: 15508 - protein, 19 aa, Artificial Sequence
  Description of Artificial Sequence: Synthetic peptide
  XENP018488 vhCDR2
EIRLKSNNYATHYAEPVKG

SEQ ID NO: 15509 - protein, 11 aa, Artificial Sequence
  Description of Artificial Sequence: Synthetic peptide
  XENP018488 vhCDR3
YYGNYGGYFDV

SEQ ID NO: 15510 - protein, 214 aa, Artificial Sequence
  Description of Artificial Sequence: Synthetic polypeptide
  XENP018488 1G6_H1_L1.141_IgG1_PVA_/S267K Light Chain
SIVMTQSPATLSVSPGERATLSCRASQSVSNDVAWYQQKPGQSPRLLINYASHRYTGVPDRFTGSGYGTEFTLTISSLQSEDFAVYFCQQDYSHPRTFGGGTKVEIKRTVAAPSVFIFPPSDEQLKSGTASVVCLLNNFYPREAKVQWKVDNALQSGNSQESVTEQDSKDSTYSLSSTLTLSKADYEKHKVYACEVTHQGLSSPVTKSFNRGEC

SEQ ID NO: 15511 - protein, 107 aa, Artificial Sequence; identical to SEQ ID NO: 9763
  Description of Artificial Sequence: Synthetic polypeptide
  VL of XENP018488

SEQ ID NO: 15512 - protein, 11 aa, Artificial Sequence
  Description of Artificial Sequence: Synthetic peptide
  XENP018488 vlCDR1
RASQSVSNDVA

SEQ ID NO: 15513 - protein, 7 aa, Artificial Sequence
  Description of Artificial Sequence: Synthetic peptide
  XENP018488 vlCDR2
YASHRYT

SEQ ID NO: 15514 - protein, 9 aa, Artificial Sequence
  Description of Artificial Sequence: Synthetic peptide
  XENP018488 vlCDR3
QQDYSHPRT

SEQ ID NO: 15515 - protein, 451 aa, Artificial Sequence; identical to SEQ ID NO: 11545
  Description of Artificial Sequence: Synthetic polypeptide
  XENP018489 1G6_H1_L1.142_IgG1_PVA_/S267K Heavy Chain

SEQ ID NO: 15516 - protein, 122 aa, Artificial Sequence; identical to SEQ ID NO: 6246
  Description of Artificial Sequence: Synthetic polypeptide
  VH of XENP018489

SEQ ID NO: 15517 - protein, 5 aa, Artificial Sequence
  Description of Artificial Sequence: Synthetic peptide
  XENP018489 vhCDR1
NYWMN

SEQ ID NO: 15518 - protein, 19 aa, Artificial Sequence
  Description of Artificial Sequence: Synthetic peptide
  XENP018489 vhCDR2
EIRLKSNNYATHYAEPVKG

SEQ ID NO: 15519 - protein, 11 aa, Artificial Sequence
  Description of Artificial Sequence: Synthetic peptide
  XENP018489 vhCDR3
YYGNYGGYFDV

SEQ ID NO: 15520 - protein, 214 aa, Artificial Sequence
  Description of Artificial Sequence: Synthetic polypeptide
  XENP018489 1G6_H1_L1.142_IgG1_PVA_/S267K Light Chain
SIVMTQSPATLSVSPGERATLSCRASQSVSNDVAWYQQKPGQSPRLLINYASHRYTGVPDRFTGSGYGTEFTLTISSLQSEDFAVYFCQQDYSDPRTFGGGTKVEIKRTVAAPSVFIFPPSDEQLKSGTASVVCLLNNFYPREAKVQWKVDNALQSGNSQESVTEQDSKDSTYSLSSTLTLSKADYEKHKVYACEVTHQGLSSPVTKSFNRGEC

SEQ ID NO: 15521 - protein, 107 aa, Artificial Sequence; identical to SEQ ID NO: 9772
  Description of Artificial Sequence: Synthetic polypeptide
  VL of XENP018489

SEQ ID NO: 15522 - protein, 11 aa, Artificial Sequence
  Description of Artificial Sequence: Synthetic peptide
  XENP018489 vlCDR1
RASQSVSNDVA

SEQ ID NO: 15523 - protein, 7 aa, Artificial Sequence
  Description of Artificial Sequence: Synthetic peptide
  XENP018489 vlCDR2
YASHRYT

SEQ ID NO: 15524 - protein, 9 aa, Artificial Sequence
  Description of Artificial Sequence: Synthetic peptide
  XENP018489 vlCDR3
QQDYSDPRT

SEQ ID NO: 15525 - protein, 451 aa, Artificial Sequence; identical to SEQ ID NO: 11545
  Description of Artificial Sequence: Synthetic polypeptide
  XENP018490 1G6_H1_L1.143_IgG1_PVA_/S267K Heavy Chain

SEQ ID NO: 15526 - protein, 122 aa, Artificial Sequence; identical to SEQ ID NO: 6246
  Description of Artificial Sequence: Synthetic polypeptide
  VH of XENP018490

SEQ ID NO: 15527 - protein, 5 aa, Artificial Sequence
  Description of Artificial Sequence: Synthetic peptide
  XENP018490 vhCDR1
NYWMN

SEQ ID NO: 15528 - protein, 19 aa, Artificial Sequence
  Description of Artificial Sequence: Synthetic peptide
  XENP018490 vhCDR2
EIRLKSNNYATHYAEPVKG

SEQ ID NO: 15529 - protein, 11 aa, Artificial Sequence
  Description of Artificial Sequence: Synthetic peptide
  XENP018490 vhCDR3
YYGNYGGYFDV

SEQ ID NO: 15530 - protein, 214 aa, Artificial Sequence
  Description of Artificial Sequence: Synthetic polypeptide
  XENP018490 1G6_H1_L1.143_IgG1_PVA_/S267K Light Chain
SIVMTQSPATLSVSPGERATLSCRASQSVSNDVAWYQQKPGQSPRLLINYASHRYTGVPDRFTGSGYGTEFTLTISSLQSEDFAVYFCQQDYSKPRTFGGGTKVEIKRTVAAPSVFIFPPSDEQLKSGTASVVCLLNNFYPREAKVQWKVDNALQSGNSQESVTEQDSKDSTYSLSSTLTLSKADYEKHKVYACEVTHQGLSSPVTKSFNRGEC

SEQ ID NO: 15531 - protein, 107 aa, Artificial Sequence; identical to SEQ ID NO: 9781
  Description of Artificial Sequence: Synthetic polypeptide
  VL of XENP018490

SEQ ID NO: 15532 - protein, 11 aa, Artificial Sequence
  Description of Artificial Sequence: Synthetic peptide
  XENP018490 vlCDR1
RASQSVSNDVA

SEQ ID NO: 15533 - protein, 7 aa, Artificial Sequence
  Description of Artificial Sequence: Synthetic peptide
  XENP018490 vlCDR2
YASHRYT

SEQ ID NO: 15534 - protein, 9 aa, Artificial Sequence
  Description of Artificial Sequence: Synthetic peptide
  XENP018490 vlCDR3
QQDYSKPRT

SEQ ID NO: 15535 - protein, 451 aa, Artificial Sequence; identical to SEQ ID NO: 11545
  Description of Artificial Sequence: Synthetic polypeptide
  XENP018491 1G6_H1_L1.144_IgG1_PVA_/S267K Heavy Chain

SEQ ID NO: 15536 - protein, 122 aa, Artificial Sequence; identical to SEQ ID NO: 6246
  Description of Artificial Sequence: Synthetic polypeptide
  VH of XENP018491

SEQ ID NO: 15537 - protein, 5 aa, Artificial Sequence
  Description of Artificial Sequence: Synthetic peptide
  XENP018491 vhCDR1
NYWMN

SEQ ID NO: 15538 - protein, 19 aa, Artificial Sequence
  Description of Artificial Sequence: Synthetic peptide
  XENP018491 vhCDR2
EIRLKSNNYATHYAEPVKG

SEQ ID NO: 15539 - protein, 11 aa, Artificial Sequence
  Description of Artificial Sequence: Synthetic peptide
  XENP018491 vhCDR3
YYGNYGGYFDV

SEQ ID NO: 15540 - protein, 214 aa, Artificial Sequence
  Description of Artificial Sequence: Synthetic polypeptide
  XENP018491 1G6_H1_L1.144_IgG1_PVA_/S267K Light Chain
SIVMTQSPATLSVSPGERATLSCRASQSVSNDVAWYQQKPGQSPRLLINYASHRYTGVPDRFTGSGYGTEFTLTISSLQSEDFAVYFCQQDYSFPRTFGGGTKVEIKRTVAAPSVFIFPPSDEQLKSGTASVVCLLNNFYPREAKVQWKVDNALQSGNSQESVTEQDSKDSTYSLSSTLTLSKADYEKHKVYACEVTHQGLSSPVTKSFNRGEC

SEQ ID NO: 15541 - protein, 107 aa, Artificial Sequence; identical to SEQ ID NO: 9790
  Description of Artificial Sequence: Synthetic polypeptide
  VL of XENP018491

SEQ ID NO: 15542 - protein, 11 aa, Artificial Sequence
  Description of Artificial Sequence: Synthetic peptide
  XENP018491 vlCDR1
RASQSVSNDVA

SEQ ID NO: 15543 - protein, 7 aa, Artificial Sequence
  Description of Artificial Sequence: Synthetic peptide
  XENP018491 vlCDR2
YASHRYT

SEQ ID NO: 15544 - protein, 9 aa, Artificial Sequence
  Description of Artificial Sequence: Synthetic peptide
  XENP018491 vlCDR3
QQDYSFPRT

SEQ ID NO: 15545 - protein, 451 aa, Artificial Sequence; identical to SEQ ID NO: 11545
  Description of Artificial Sequence: Synthetic polypeptide
  XENP018492 1G6_H1_L1.145_IgG1_PVA_/S267K Heavy Chain

SEQ ID NO: 15546 - protein, 122 aa, Artificial Sequence; identical to SEQ ID NO: 6246
  Description of Artificial Sequence: Synthetic polypeptide
  VH of XENP018492

SEQ ID NO: 15547 - protein, 5 aa, Artificial Sequence
  Description of Artificial Sequence: Synthetic peptide
  XENP018492 vhCDR1
NYWMN

SEQ ID NO: 15548 - protein, 19 aa, Artificial Sequence
  Description of Artificial Sequence: Synthetic peptide
  XENP018492 vhCDR2
EIRLKSNNYATHYAEPVKG

SEQ ID NO: 15549 - protein, 11 aa, Artificial Sequence
  Description of Artificial Sequence: Synthetic peptide
  XENP018492 vhCDR3
YYGNYGGYFDV

SEQ ID NO: 15550 - protein, 214 aa, Artificial Sequence
  Description of Artificial Sequence: Synthetic polypeptide
  XENP018492 1G6_H1_L1.145_IgG1_PVA_/S267K Light Chain
SIVMTQSPATLSVSPGERATLSCRASQSVSNDVAWYQQKPGQSPRLLINYASHRYTGVPDRFTGSGYGTEFTLTISSLQSEDFAVYFCQQDYSSPRTFGGGTKLEIKRTVAAPSVFIFPPSDEQLKSGTASVVCLLNNFYPREAKVQWKVDNALQSGNSQESVTEQDSKDSTYSLSSTLTLSKADYEKHKVYACEVTHQGLSSPVTKSFNRGEC

SEQ ID NO: 15551 - protein, 107 aa, Artificial Sequence; identical to SEQ ID NO: 9799
  Description of Artificial Sequence: Synthetic polypeptide
  VL of XENP018492

SEQ ID NO: 15552 - protein, 11 aa, Artificial Sequence
  Description of Artificial Sequence: Synthetic peptide
  XENP018492 vlCDR1
RASQSVSNDVA

SEQ ID NO: 15553 - protein, 7 aa, Artificial Sequence
  Description of Artificial Sequence: Synthetic peptide
  XENP018492 vlCDR2
YASHRYT

SEQ ID NO: 15554 - protein, 9 aa, Artificial Sequence
  Description of Artificial Sequence: Synthetic peptide
  XENP018492 vlCDR3
QQDYSSPRT

SEQ ID NO: 15555 - protein, 451 aa, Artificial Sequence
  Description of Artificial Sequence: Synthetic polypeptide
  XENP018892 1G6_H0L0_IgG1_PVA_/S267K Heavy Chain
EVKLEESGGGLVQPGGSMKLSCVASGFTFSNYWMNWVRQSPEKGLEWVAEIRLKSNNYATHYAESVKGRFTISRDDSKSSVYLQMNNLRAEDTGIYYCTRYYGNYGGYFDVWGAGTTVTVSSASTKGPSVFPLAPSSKSTSGGTAALGCLVKDYFPEPVTVSWNSGALTSGVHTFPAVLQSSGLYSLSSVVTVPSSSLGTQTYICNVNHKPSNTKVDKKVEPKSCDKTHTCPPCPAPPVAGPSVFLFPPKPKDTLMISRTPEVTCVVVDVKHEDPEVKFNWYVDGVEVHNAKTKPREEQYNSTYRVVSVLTVLHQDWLNGKEYKCKVSNKALPAPIEKTISKAKGQPREPQVYTLPPSREEMTKNQVSLTCLVKGFYPSDIAVEWESNGQPENNYKTTPPVLDSDGSFFLYSKLTVDKSRWQQGNVFSCSVMHEALHNHYTQKSLSLSPGK

SEQ ID NO: 15556 - protein, 122 aa, Artificial Sequence; identical to SEQ ID NO: 9807
  Description of Artificial Sequence: Synthetic polypeptide
  VH of XENP018892

SEQ ID NO: 15557 - protein, 5 aa, Artificial Sequence
  Description of Artificial Sequence: Synthetic peptide
  XENP018892 vhCDR1
NYWMN

SEQ ID NO: 15558 - protein, 19 aa, Artificial Sequence
  Description of Artificial Sequence: Synthetic peptide
  XENP018892 vhCDR2
EIRLKSNNYATHYAESVKG

SEQ ID NO: 15559 - protein, 11 aa, Artificial Sequence
  Description of Artificial Sequence: Synthetic peptide
  XENP018892 vhCDR3
YYGNYGGYFDV

SEQ ID NO: 15560 - protein, 214 aa, Artificial Sequence
  Description of Artificial Sequence: Synthetic polypeptide
  XENP018892 1G6_H0L0_IgG1_PVA_/S267K Light Chain
SIVMTQTPKFLLVSAGDRVTITCKASQSVSNDVAWYQQKPGQSPKLLINYASHRYTGVPDRFTGSGYGTDFTFTISTVQAEDLAVYFCQQDYSSPRTFGGGTKLEIKRTVAAPSVFIFPPSDEQLKSGTASVVCLLNNFYPREAKVQWKVDNALQSGNSQESVTEQDSKDSTYSLSSTLTLSKADYEKHKVYACEVTHQGLSSPVTKSFNRGEC

SEQ ID NO: 15561 - protein, 107 aa, Artificial Sequence; identical to SEQ ID NO: 9808
  Description of Artificial Sequence: Synthetic polypeptide
  VL of XENP018892

SEQ ID NO: 15562 - protein, 11 aa, Artificial Sequence
  Description of Artificial Sequence: Synthetic peptide
  XENP018892 vlCDR1
KASQSVSNDVA

SEQ ID NO: 15563 - protein, 7 aa, Artificial Sequence
  Description of Artificial Sequence: Synthetic peptide
  XENP018892 vlCDR2
YASHRYT

SEQ ID NO: 15564 - protein, 9 aa, Artificial Sequence
  Description of Artificial Sequence: Synthetic peptide
  XENP018892 vlCDR3
QQDYSSPRT

SEQ ID NO: 15565 - protein, 449 aa, Artificial Sequence
  Description of Artificial Sequence: Synthetic polypeptide
  XENP018893 4C11_H0L0_IgG1_PVA_/S267K Heavy Chain
EIHLQQSGTVLAKPGASVKMSCTASGYTFTSYWMHWVKQRPGQGLEWIGAIYPGNSDTSYNQKFKGKAKLTAVTSASTAYMELSSLTNEDSAVYYCTNLYYGSSFAMDYWGQGTSVTVSSASTKGPSVFPLAPSSKSTSGGTAALGCLVKDYFPEPVTVSWNSGALTSGVHTFPAVLQSSGLYSLSSVVTVPSSSLGTQTYICNVNHKPSNTKVDKKVEPKSCDKTHTCPPCPAPPVAGPSVFLFPPKPKDTLMISRTPEVTCVVVDVKHEDPEVKFNWYVDGVEVHNAKTKPREEQYNSTYRVVSVLTVLHQDWLNGKEYKCKVSNKALPAPIEKTISKAKGQPREPQVYTLPPSREEMTKNQVSLTCLVKGFYPSDIAVEWESNGQPENNYKTTPPVLDSDGSFFLYSKLTVDKSRWQQGNVFSCSVMHEALHNHYTQKSLSLSPGK

SEQ ID NO: 15566 - protein, 120 aa, Artificial Sequence
  Description of Artificial Sequence: Synthetic polypeptide
  VH of XENP018893
EIHLQQSGTVLAKPGASVKMSCTASGYTFTSYWMHWVKQRPGQGLEWIGAIYPGNSDTSYNQKFKGKAKLTAVTSASTAYMELSSLTNEDSAVYYCTNLYYGSSFAMDYWGQGTSVTVSS

SEQ ID NO: 15567 - protein, 5 aa, Artificial Sequence
  Description of Artificial Sequence: Synthetic peptide
  XENP018893 vhCDR1
SYWMH

SEQ ID NO: 15568 - protein, 17 aa, Artificial Sequence
  Description of Artificial Sequence: Synthetic peptide
  XENP018893 vhCDR2
AIYPGNSDTSYNQKFKG

SEQ ID NO: 15569 - protein, 11 aa, Artificial Sequence
  Description of Artificial Sequence: Synthetic peptide
  XENP018893 vhCDR3
LYYGSSFAMDY

SEQ ID NO: 15570 - protein, 214 aa, Artificial Sequence
  Description of Artificial Sequence: Synthetic polypeptide
  XENP018893 4C11_H0L0_IgG1_PVA_/S267K Light Chain
DIKMTQSPSSIYASLGERVTVTCRASQDINTYLSWFQQLPGKSPKTLIYRANRLVDGVPSRFSGSGSGQDYSLTISSLEYEDMGIYYCLHYDDFPYTFGGGTKLEIKRTVAAPSVFIFPPSDEQLKSGTASVVCLLNNFYPREAKVQWKVDNALQSGNSQESVTEQDSKDSTYSLSSTLTLSKADYEKHKVYACEVTHQGLSSPVTKSFNRGEC

SEQ ID NO: 15571 - protein, 107 aa, Artificial Sequence
  Description of Artificial Sequence: Synthetic polypeptide
  VL of XENP018893
DIKMTQSPSSIYASLGERVTVTCRASQDINTYLSWFQQLPGKSPKTLIYRANRLVDGVPSRFSGSGSGQDYSLTISSLEYEDMGIYYCLHYDDFPYTFGGGTKLEIK

SEQ ID NO: 15572 - protein, 11 aa, Artificial Sequence
  Description of Artificial Sequence: Synthetic peptide
  XENP018893 vlCDR1
RASQDINTYLS

SEQ ID NO: 15573 - protein, 7 aa, Artificial Sequence
  Description of Artificial Sequence: Synthetic peptide
  XENP018893 vlCDR2
RANRLVD

SEQ ID NO: 15574 - protein, 9 aa, Artificial Sequence
  Description of Artificial Sequence: Synthetic peptide
  XENP018893 vlCDR3
LHYDDFPYT

SEQ ID NO: 15575 - protein, 446 aa, Artificial Sequence
  Description of Artificial Sequence: Synthetic polypeptide
  XENP018894 6A3_H0L0_IgG1_PVA_/S267K Heavy Chain
EVKLVESGGGLVKPGGSLKLSCAASGFTFSSYGMSWVRQTPEKRLEWVATISGGGRYTYYPDSVKGRFTISRDNAKNNLYLQMSSLRSEDTALYYCASYYDSSFDYWGQGTTLTVSSASTKGPSVFPLAPSSKSTSGGTAALGCLVKDYFPEPVTVSWNSGALTSGVHTFPAVLQSSGLYSLSSVVTVPSSSLGTQTYICNVNHKPSNTKVDKKVEPKSCDKTHTCPPCPAPPVAGPSVFLFPPKPKDTLMISRTPEVTCVVVDVKHEDPEVKFNWYVDGVEVHNAKTKPREEQYNSTYRVVSVLTVLHQDWLNGKEYKCKVSNKALPAPIEKTISKAKGQPREPQVYTLPPSREEMTKNQVSLTCLVKGFYPSDIAVEWESNGQPENNYKTTPPVLDSDGSFFLYSKLTVDKSRWQQGNVFSCSVMHEALHNHYTQKSLSLSPGK

SEQ ID NO: 15576 - protein, 117 aa, Artificial Sequence; identical to SEQ ID NO: 9825
  Description of Artificial Sequence: Synthetic polypeptide
  VH of XENP018894

SEQ ID NO: 15577 - protein, 5 aa, Artificial Sequence
  Description of Artificial Sequence: Synthetic peptide
  XENP018894 vhCDR1
SYGMS

SEQ ID NO: 15578 - protein, 17 aa, Artificial Sequence
  Description of Artificial Sequence: Synthetic peptide
  XENP018894 vhCDR2
TISGGGRYTYYPDSVKG

SEQ ID NO: 15579 - protein, 8 aa, Artificial Sequence
  Description of Artificial Sequence: Synthetic peptide
  XENP018894 vhCDR3
YYDSSFDY

SEQ ID NO: 15580 - protein, 214 aa, Artificial Sequence
  Description of Artificial Sequence: Synthetic polypeptide
  XENP018894 6A3_H0L0_IgG1_PVA_/S267K Light Chain
DIVMTQSHKFMSTSVGDRVSITCKASQDVGTAVAWYQQKPGQSPKLLIYWASTRHTGVPDRFTGSGSGTDFTLTISNVQSEDLADYFCQHYSIYPWTFGGGTKLEIKRTVAAPSVFIFPPSDEQLKSGTASVVCLLNNFYPREAKVQWKVDNALQSGNSQESVTEQDSKDSTYSLSSTLTLSKADYEKHKVYACEVTHQGLSSPVTKSFNRGEC

SEQ ID NO: 15581 - protein, 107 aa, Artificial Sequence; identical to SEQ ID NO: 9826
  Description of Artificial Sequence: Synthetic polypeptide
  VL of XENP018894

SEQ ID NO: 15582 - protein, 11 aa, Artificial Sequence
  Description of Artificial Sequence: Synthetic peptide
  XENP018894 vlCDR1
KASQDVGTAVA

SEQ ID NO: 15583 - protein, 7 aa, Artificial Sequence
  Description of Artificial Sequence: Synthetic peptide
  XENP018894 vlCDR2
WASTRHT

SEQ ID NO: 15584 - protein, 9 aa, Artificial Sequence
  Description of Artificial Sequence: Synthetic peptide
  XENP018894 vlCDR3
QHYSIYPWT

SEQ ID NO: 15585 - protein, 451 aa, Artificial Sequence; identical to SEQ ID NO: 12615
  Description of Artificial Sequence: Synthetic polypeptide
  XENP018910 1G6_H1.90_L1.119_IgG1_PVA_/S267K Heavy Chain

SEQ ID NO: 15586 - protein, 122 aa, Artificial Sequence; identical to SEQ ID NO: 7161
  Description of Artificial Sequence: Synthetic polypeptide
  VH of XENP018910

SEQ ID NO: 15587 - protein, 5 aa, Artificial Sequence
  Description of Artificial Sequence: Synthetic peptide
  XENP018910 vhCDR1
NYWMN

SEQ ID NO: 15588 - protein, 19 aa, Artificial Sequence
  Description of Artificial Sequence: Synthetic peptide
  XENP018910 vhCDR2
EIRLYSNNYATHYAEPVKG

SEQ ID NO: 15589 - protein, 11 aa, Artificial Sequence
  Description of Artificial Sequence: Synthetic peptide
  XENP018910 vhCDR3
YYGNYGGYFDV

SEQ ID NO: 15590 - protein, 214 aa, Artificial Sequence; identical to SEQ ID NO: 15290
  Description of Artificial Sequence: Synthetic polypeptide
  XENP018910 1G6_H1.90_L1.119_IgG1_PVA_/S267K Light Chain

SEQ ID NO: 15591 - protein, 107 aa, Artificial Sequence; identical to SEQ ID NO: 9565
  Description of Artificial Sequence: Synthetic polypeptide
  VL of XENP018910

SEQ ID NO: 15592 - protein, 11 aa, Artificial Sequence
  Description of Artificial Sequence: Synthetic peptide
  XENP018910 vlCDR1
RASQSVSNDVA

SEQ ID NO: 15593 - protein, 7 aa, Artificial Sequence
  Description of Artificial Sequence: Synthetic peptide
  XENP018910 vlCDR2
YASHRYT

SEQ ID NO: 15594 - protein, 9 aa, Artificial Sequence
  Description of Artificial Sequence: Synthetic peptide
  XENP018910 vlCDR3
QQDWSSPRT

SEQ ID NO: 15595 - protein, 451 aa, Artificial Sequence; identical to SEQ ID NO: 12615
  Description of Artificial Sequence: Synthetic polypeptide
  XENP018911 1G6_H1.90_L1.23_IgG1_PVA_/S267K Heavy Chain

SEQ ID NO: 15596 - protein, 122 aa, Artificial Sequence; identical to SEQ ID NO: 7161
  Description of Artificial Sequence: Synthetic polypeptide
  VH of XENP018911

SEQ ID NO: 15597 - protein, 5 aa, Artificial Sequence
  Description of Artificial Sequence: Synthetic peptide
  XENP018911 vhCDR1
NYWMN

SEQ ID NO: 15598 - protein, 19 aa, Artificial Sequence
  Description of Artificial Sequence: Synthetic peptide
  XENP018911 vhCDR2
EIRLYSNNYATHYAEPVKG

SEQ ID NO: 15599 - protein, 11 aa, Artificial Sequence
  Description of Artificial Sequence: Synthetic peptide
  XENP018911 vhCDR3
YYGNYGGYFDV

SEQ ID NO: 15600 - protein, 214 aa, Artificial Sequence; identical to SEQ ID NO: 14330
  Description of Artificial Sequence: Synthetic polypeptide
  XENP018911 1G6_H1.90_L1.23_IgG1_PVA_/S267K Light Chain

SEQ ID NO: 15601 - protein, 107 aa, Artificial Sequence; identical to SEQ ID NO: 8701
  Description of Artificial Sequence: Synthetic polypeptide
  VL of XENP018911

SEQ ID NO: 15602 - protein, 11 aa, Artificial Sequence
  Description of Artificial Sequence: Synthetic peptide
  XENP018911 vlCDR1
RASQSVGNDVA

SEQ ID NO: 15603 - protein, 7 aa, Artificial Sequence
  Description of Artificial Sequence: Synthetic peptide
  XENP018911 vlCDR2
YASHRYT

SEQ ID NO: 15604 - protein, 9 aa, Artificial Sequence
  Description of Artificial Sequence: Synthetic peptide
  XENP018911 vlCDR3
QQDYSSPRT

SEQ ID NO: 15605 - protein, 451 aa, Artificial Sequence; identical to SEQ ID NO: 12615
  Description of Artificial Sequence: Synthetic polypeptide
  XENP018912 1G6_H1.90_L1.67_IgG1_PVA_/S267K Heavy Chain

SEQ ID NO: 15606 - protein, 122 aa, Artificial Sequence; identical to SEQ ID NO: 7161
  Description of Artificial Sequence: Synthetic polypeptide
  VH of XENP018912

SEQ ID NO: 15607 - protein, 5 aa, Artificial Sequence
  Description of Artificial Sequence: Synthetic peptide
  XENP018912 vhCDR1
NYWMN

SEQ ID NO: 15608 - protein, 19 aa, Artificial Sequence
  Description of Artificial Sequence: Synthetic peptide
  XENP018912 vhCDR2
EIRLYSNNYATHYAEPVKG

SEQ ID NO: 15609 - protein, 11 aa, Artificial Sequence
  Description of Artificial Sequence: Synthetic peptide
  XENP018912 vhCDR3
YYGNYGGYFDV

SEQ ID NO: 15610 - protein, 214 aa, Artificial Sequence; identical to SEQ ID NO: 14770
  Description of Artificial Sequence: Synthetic polypeptide
  XENP018912 1G6_H1.90_L1.67_IgG1_PVA_/S267K Light Chain

SEQ ID NO: 15611 - protein, 107 aa, Artificial Sequence; identical to SEQ ID NO: 9097
  Description of Artificial Sequence: Synthetic polypeptide
  VL of XENP018912

SEQ ID NO: 15612 - protein, 11 aa, Artificial Sequence
  Description of Artificial Sequence: Synthetic peptide
  XENP018912 vlCDR1
RASQSVSNDVA

SEQ ID NO: 15613 - protein, 7 aa, Artificial Sequence
  Description of Artificial Sequence: Synthetic peptide
  XENP018912 vlCDR2
YASWRYT

SEQ ID NO: 15614 - protein, 9 aa, Artificial Sequence
  Description of Artificial Sequence: Synthetic peptide
  XENP018912 vlCDR3
QQDYSSPRT

SEQ ID NO: 15615 - protein, 451 aa, Artificial Sequence; identical to SEQ ID NO: 12615
  Description of Artificial Sequence: Synthetic polypeptide
  XENP018913 1G6_H1.90_L1.94_IgG1_PVA_/S267K Heavy Chain

SEQ ID NO: 15616 - protein, 122 aa, Artificial Sequence; identical to SEQ ID NO: 7161
  Description of Artificial Sequence: Synthetic polypeptide
  VH of XENP018913

SEQ ID NO: 15617 - protein, 5 aa, Artificial Sequence
  Description of Artificial Sequence: Synthetic peptide
  XENP018913 vhCDR1
NYWMN

SEQ ID NO: 15618 - protein, 19 aa, Artificial Sequence
  Description of Artificial Sequence: Synthetic peptide
  XENP018913 vhCDR2
EIRLYSNNYATHYAEPVKG

SEQ ID NO: 15619 - protein, 11 aa, Artificial Sequence
  Description of Artificial Sequence: Synthetic peptide
  XENP018913 vhCDR3
YYGNYGGYFDV

SEQ ID NO: 15620 - protein, 214 aa, Artificial Sequence; identical to SEQ ID NO: 15040
  Description of Artificial Sequence: Synthetic polypeptide
  XENP018913 1G6_H1.90_L1.94_IgG1_PVA_/S267K Light Chain

SEQ ID NO: 15621 - protein, 107 aa, Artificial Sequence; identical to SEQ ID NO: 9340
  Description of Artificial Sequence: Synthetic polypeptide
  VL of XENP018913

SEQ ID NO: 15622 - protein, 11 aa, Artificial Sequence
  Description of Artificial Sequence: Synthetic peptide
  XENP018913 vlCDR1
RASQSVSNDVA

SEQ ID NO: 15623 - protein, 7 aa, Artificial Sequence
  Description of Artificial Sequence: Synthetic peptide
  XENP018913 vlCDR2
YASHRYT

SEQ ID NO: 15624 - protein, 9 aa, Artificial Sequence
  Description of Artificial Sequence: Synthetic peptide
  XENP018913 vlCDR3
QQDYSSPRT

SEQ ID NO: 15625 - protein, 451 aa, Artificial Sequence; identical to SEQ ID NO: 12615
  Description of Artificial Sequence: Synthetic polypeptide
  XENP018914 1G6_H1.90_L1.116_IgG1_PVA_/S267K Heavy Chain

SEQ ID NO: 15626 - protein, 122 aa, Artificial Sequence; identical to SEQ ID NO: 7161
  Description of Artificial Sequence: Synthetic polypeptide
  VH of XENP018914

SEQ ID NO: 15627 - protein, 5 aa, Artificial Sequence
  Description of Artificial Sequence: Synthetic peptide
  XENP018914 vhCDR1
NYWMN

SEQ ID NO: 15628 - protein, 19 aa, Artificial Sequence
  Description of Artificial Sequence: Synthetic peptide
  XENP018914 vhCDR2
EIRLYSNNYATHYAEPVKG

SEQ ID NO: 15629 - protein, 11 aa, Artificial Sequence
  Description of Artificial Sequence: Synthetic peptide
  XENP018914 vhCDR3
YYGNYGGYFDV

SEQ ID NO: 15630 - protein, 214 aa, Artificial Sequence; identical to SEQ ID NO: 15260
  Description of Artificial Sequence: Synthetic polypeptide
  XENP018914 1G6_H1.90_L1.116_IgG1_PVA_/S267K Light Chain

SEQ ID NO: 15631 - protein, 107 aa, Artificial Sequence; identical to SEQ ID NO: 9538
  Description of Artificial Sequence: Synthetic polypeptide
  VL of XENP018914

SEQ ID NO: 15632 - protein, 11 aa, Artificial Sequence
  Description of Artificial Sequence: Synthetic peptide
  XENP018914 vlCDR1
RASQSVSNDVA

SEQ ID NO: 15633 - protein, 7 aa, Artificial Sequence
  Description of Artificial Sequence: Synthetic peptide
  XENP018914 vlCDR2
YASHRYT

SEQ ID NO: 15634 - protein, 9 aa, Artificial Sequence
  Description of Artificial Sequence: Synthetic peptide
  XENP018914 vlCDR3
QQDFSSPRT

SEQ ID NO: 15635 - protein, 451 aa, Artificial Sequence; identical to SEQ ID NO: 13265
  Description of Artificial Sequence: Synthetic polypeptide
  XENP018915 1G6_H1.155_L1.119_IgG1_PVA_/S267K Heavy Chain

SEQ ID NO: 15636 - protein, 122 aa, Artificial Sequence; identical to SEQ ID NO: 7746
  Description of Artificial Sequence: Synthetic polypeptide
  VH of XENP018915

SEQ ID NO: 15637 - protein, 5 aa, Artificial Sequence
  Description of Artificial Sequence: Synthetic peptide
  XENP018915 vhCDR1
NYWMN

SEQ ID NO: 15638 - protein, 19 aa, Artificial Sequence
  Description of Artificial Sequence: Synthetic peptide
  XENP018915 vhCDR2
EIRLKSNNYATHYAEPVKG

SEQ ID NO: 15639 - protein, 11 aa, Artificial Sequence
  Description of Artificial Sequence: Synthetic peptide
  XENP018915 vhCDR3
YYGNYGGYFDV

SEQ ID NO: 15640 - protein, 214 aa, Artificial Sequence; identical to SEQ ID NO: 15290
  Description of Artificial Sequence: Synthetic polypeptide
  XENP018915 1G6_H1.155_L1.119_IgG1_PVA_/S267K Light Chain

SEQ ID NO: 15641 - protein, 107 aa, Artificial Sequence; identical to SEQ ID NO: 9565
  Description of Artificial Sequence: Synthetic polypeptide
  VL of XENP018915

SEQ ID NO: 15642 - protein, 11 aa, Artificial Sequence
  Description of Artificial Sequence: Synthetic peptide
  XENP018915 vlCDR1
RASQSVSNDVA

SEQ ID NO: 15643 - protein, 7 aa, Artificial Sequence
  Description of Artificial Sequence: Synthetic peptide
  XENP018915 vlCDR2
YASHRYT

SEQ ID NO: 15644 - protein, 9 aa, Artificial Sequence
  Description of Artificial Sequence: Synthetic peptide
  XENP018915 vlCDR3
QQDWSSPRT

SEQ ID NO: 15645 - protein, 451 aa, Artificial Sequence
  Description of Artificial Sequence: Synthetic polypeptide
  XENP018980 1G6_H1.239_L1_IgG1_PVA_/S267K Heavy Chain
EVQLKESGGGLVKPGGSLRLSCAASGFTFSNYWMNWVRQAPGKGLEWVGEIRLKSNNYATHYAEPVKGRFTISRDDSKSTVYLQMNSLKTEDTAVYYCTRYYGNYGGYFDVWGAGTLVTVSSASTKGPSVFPLAPSSKSTSGGTAALGCLVKDYFPEPVTVSWNSGALTSGVHTFPAVLQSSGLYSLSSVVTVPSSSLGTQTYICNVNHKPSNTKVDKKVEPKSCDKTHTCPPCPAPPVAGPSVFLFPPKPKDTLMISRTPEVTCVVVDVKHEDPEVKFNWYVDGVEVHNAKTKPREEQYNSTYRVVSVLTVLHQDWLNGKEYKCKVSNKALPAPIEKTISKAKGQPREPQVYTLPPSREEMTKNQVSLTCLVKGFYPSDIAVEWESNGQPENNYKTTPPVLDSDGSFFLYSKLTVDKSRWQQGNVFSCSVMHEALHNHYTQKSLSLSPGK

SEQ ID NO: 15646 - protein, 122 aa, Artificial Sequence; identical to SEQ ID NO: 10005
  Description of Artificial Sequence: Synthetic polypeptide
  VH of XENP018980

SEQ ID NO: 15647 - protein, 5 aa, Artificial Sequence
  Description of Artificial Sequence: Synthetic peptide
  XENP018980 vhCDR1
NYWMN

SEQ ID NO: 15648 - protein, 19 aa, Artificial Sequence
  Description of Artificial Sequence: Synthetic peptide
  XENP018980 vhCDR2
EIRLKSNNYATHYAEPVKG

SEQ ID NO: 15649 - protein, 11 aa, Artificial Sequence
  Description of Artificial Sequence: Synthetic peptide
  XENP018980 vhCDR3
YYGNYGGYFDV

SEQ ID NO: 15650 - protein, 214 aa, Artificial Sequence; identical to SEQ ID NO: 11550
  Description of Artificial Sequence: Synthetic polypeptide
  XENP018980 1G6_H1.239_L1_IgG1_PVA_/S267K Light Chain

SEQ ID NO: 15651 - protein, 107 aa, Artificial Sequence; identical to SEQ ID NO: 6247
  Description of Artificial Sequence: Synthetic polypeptide
  VL of XENP018980

SEQ ID NO: 15652 - protein, 11 aa, Artificial Sequence
  Description of Artificial Sequence: Synthetic peptide
  XENP018980 vlCDR1
RASQSVSNDVA

SEQ ID NO: 15653 - protein, 7 aa, Artificial Sequence
  Description of Artificial Sequence: Synthetic peptide
  XENP018980 vlCDR2
YASHRYT

SEQ ID NO: 15654 - protein, 9 aa, Artificial Sequence
  Description of Artificial Sequence: Synthetic peptide
  XENP018980 vlCDR3
QQDYSSPRT

SEQ ID NO: 15655 - protein, 451 aa, Artificial Sequence
  Description of Artificial Sequence: Synthetic polypeptide
  XENP018981 1G6_H1.240_L1_IgG1_PVA_/S267K Heavy Chain
EVQLVESGGGLVKPGESLRLSCAASGFTFSNYWMNWVRQAPGKGLEWVGEIRLKSNNYATHYAEPVKGRFTISRDDSKSTVYLQMNSLKTEDTAVYYCTRYYGNYGGYFDVWGAGTLVTVSSASTKGPSVFPLAPSSKSTSGGTAALGCLVKDYFPEPVTVSWNSGALTSGVHTFPAVLQSSGLYSLSSVVTVPSSSLGTQTYICNVNHKPSNTKVDKKVEPKSCDKTHTCPPCPAPPVAGPSVFLFPPKPKDTLMISRTPEVTCVVVDVKHEDPEVKFNWYVDGVEVHNAKTKPREEQYNSTYRVVSVLTVLHQDWLNGKEYKCKVSNKALPAPIEKTISKAKGQPREPQVYTLPPSREEMTKNQVSLTCLVKGFYPSDIAVEWESNGQPENNYKTTPPVLDSDGSFFLYSKLTVDKSRWQQGNVFSCSVMHEALHNHYTQKSLSLSPGK

SEQ ID NO: 15656 - protein, 122 aa, Artificial Sequence; identical to SEQ ID NO: 10014
  Description of Artificial Sequence: Synthetic polypeptide
  VH of XENP018981

SEQ ID NO: 15657 - protein, 5 aa, Artificial Sequence
  Description of Artificial Sequence: Synthetic peptide
  XENP018981 vhCDR1
NYWMN

SEQ ID NO: 15658 - protein, 19 aa, Artificial Sequence
  Description of Artificial Sequence: Synthetic peptide
  XENP018981 vhCDR2
EIRLKSNNYATHYAEPVKG

SEQ ID NO: 15659 - protein, 11 aa, Artificial Sequence
  Description of Artificial Sequence: Synthetic peptide
  XENP018981 vhCDR3
YYGNYGGYFDV

SEQ ID NO: 15660 - protein, 214 aa, Artificial Sequence; identical to SEQ ID NO: 11550
  Description of Artificial Sequence: Synthetic polypeptide
  XENP018981 1G6_H1.240_L1_IgG1_PVA_/S267K Light Chain

SEQ ID NO: 15661 - protein, 107 aa, Artificial Sequence; identical to SEQ ID NO: 6247
  Description of Artificial Sequence: Synthetic polypeptide
  VL of XENP018981

SEQ ID NO: 15662 - protein, 11 aa, Artificial Sequence
  Description of Artificial Sequence: Synthetic peptide
  XENP018981 vlCDR1
RASQSVSNDVA

SEQ ID NO: 15663 - protein, 7 aa, Artificial Sequence
  Description of Artificial Sequence: Synthetic peptide
  XENP018981 vlCDR2
YASHRYT

SEQ ID NO: 15664 - protein, 9 aa, Artificial Sequence
  Description of Artificial Sequence: Synthetic peptide
  XENP018981 vlCDR3
QQDYSSPRT

SEQ ID NO: 15665 - protein, 451 aa, Artificial Sequence
  Description of Artificial Sequence: Synthetic polypeptide
  XENP018982 1G6_H1.241_L1_IgG1_PVA_/S267K Heavy Chain
EVQLVESGGGLVKPGGSLRLTCAASGFTFSNYWMNWVRQAPGKGLEWVGEIRLKSNNYATHYAEPVKGRFTISRDDSKSTVYLQMNSLKTEDTAVYYCTRYYGNYGGYFDVWGAGTLVTVSSASTKGPSVFPLAPSSKSTSGGTAALGCLVKDYFPEPVTVSWNSGALTSGVHTFPAVLQSSGLYSLSSVVTVPSSSLGTQTYICNVNHKPSNTKVDKKVEPKSCDKTHTCPPCPAPPVAGPSVFLFPPKPKDTLMISRTPEVTCVVVDVKHEDPEVKFNWYVDGVEVHNAKTKPREEQYNSTYRVVSVLTVLHQDWLNGKEYKCKVSNKALPAPIEKTISKAKGQPREPQVYTLPPSREEMTKNQVSLTCLVKGFYPSDIAVEWESNGQPENNYKTTPPVLDSDGSFFLYSKLTVDKSRWQQGNVFSCSVMHEALHNHYTQKSLSLSPGK

SEQ ID NO: 15666 - protein, 122 aa, Artificial Sequence; identical to SEQ ID NO: 10023
  Description of Artificial Sequence: Synthetic polypeptide
  VH of XENP018982

SEQ ID NO: 15667 - protein, 5 aa, Artificial Sequence
  Description of Artificial Sequence: Synthetic peptide
  XENP018982 vhCDR1
NYWMN

SEQ ID NO: 15668 - protein, 19 aa, Artificial Sequence
  Description of Artificial Sequence: Synthetic peptide
  XENP018982 vhCDR2
EIRLKSNNYATHYAEPVKG

SEQ ID NO: 15669 - protein, 11 aa, Artificial Sequence
  Description of Artificial Sequence: Synthetic peptide
  XENP018982 vhCDR3
YYGNYGGYFDV

SEQ ID NO: 15670 - protein, 214 aa, Artificial Sequence; identical to SEQ ID NO: 11550
  Description of Artificial Sequence: Synthetic polypeptide
  XENP018982 1G6_H1.241_L1_IgG1_PVA_/S267K Light Chain

SEQ ID NO: 15671 - protein, 107 aa, Artificial Sequence; identical to SEQ ID NO: 6247
  Description of Artificial Sequence: Synthetic polypeptide
  VL of XENP018982

SEQ ID NO: 15672 - protein, 11 aa, Artificial Sequence
  Description of Artificial Sequence: Synthetic peptide
  XENP018982 vlCDR1
RASQSVSNDVA

SEQ ID NO: 15673 - protein, 7 aa, Artificial Sequence
  Description of Artificial Sequence: Synthetic peptide
  XENP018982 vlCDR2
YASHRYT

SEQ ID NO: 15674 - protein, 9 aa, Artificial Sequence
  Description of Artificial Sequence: Synthetic peptide
  XENP018982 vlCDR3
QQDYSSPRT

SEQ ID NO: 15675 - protein, 451 aa, Artificial Sequence
  Description of Artificial Sequence: Synthetic polypeptide
  XENP018983 1G6_H1.242_L1_IgG1_PVA_/S267K Heavy Chain
EVQLVESGGGLVKPGGSLRLVCAASGFTFSNYWMNWVRQAPGKGLEWVGEIRLKSNNYATHYAEPVKGRFTISRDDSKSTVYLQMNSLKTEDTAVYYCTRYYGNYGGYFDVWGAGTLVTVSSASTKGPSVFPLAPSSKSTSGGTAALGCLVKDYFPEPVTVSWNSGALTSGVHTFPAVLQSSGLYSLSSVVTVPSSSLGTQTYICNVNHKPSNTKVDKKVEPKSCDKTHTCPPCPAPPVAGPSVFLFPPKPKDTLMISRTPEVTCVVVDVKHEDPEVKFNWYVDGVEVHNAKTKPREEQYNSTYRVVSVLTVLHQDWLNGKEYKCKVSNKALPAPIEKTISKAKGQPREPQVYTLPPSREEMTKNQVSLTCLVKGFYPSDIAVEWESNGQPENNYKTTPPVLDSDGSFFLYSKLTVDKSRWQQGNVFSCSVMHEALHNHYTQKSLSLSPGK

SEQ ID NO: 15676 - protein, 122 aa, Artificial Sequence; identical to SEQ ID NO: 10032
  Description of Artificial Sequence: Synthetic polypeptide
  VH of XENP018983

SEQ ID NO: 15677 - protein, 5 aa, Artificial Sequence
  Description of Artificial Sequence: Synthetic peptide
  XENP018983 vhCDR1
NYWMN

SEQ ID NO: 15678 - protein, 19 aa, Artificial Sequence
  Description of Artificial Sequence: Synthetic peptide
  XENP018983 vhCDR2
EIRLKSNNYATHYAEPVKG

SEQ ID NO: 15679 - protein, 11 aa, Artificial Sequence
  Description of Artificial Sequence: Synthetic peptide
  XENP018983 vhCDR3
YYGNYGGYFDV

SEQ ID NO: 15680 - protein, 214 aa, Artificial Sequence; identical to SEQ ID NO: 11550
  Description of Artificial Sequence: Synthetic polypeptide
  XENP018983 1G6_H1.242_L1_IgG1_PVA_/S267K Light Chain

SEQ ID NO: 15681 - protein, 107 aa, Artificial Sequence; identical to SEQ ID NO: 6247
  Description of Artificial Sequence: Synthetic polypeptide
  VL of XENP018983

SEQ ID NO: 15682 - protein, 11 aa, Artificial Sequence
  Description of Artificial Sequence: Synthetic peptide
  XENP018983 vlCDR1
RASQSVSNDVA

SEQ ID NO: 15683 - protein, 7 aa, Artificial Sequence
  Description of Artificial Sequence: Synthetic peptide
  XENP018983 vlCDR2
YASHRYT

SEQ ID NO: 15684 - protein, 9 aa, Artificial Sequence
  Description of Artificial Sequence: Synthetic peptide
  XENP018983 vlCDR3
QQDYSSPRT

SEQ ID NO: 15685 - protein, 451 aa, Artificial Sequence
  Description of Artificial Sequence: Synthetic polypeptide
  XENP018984 1G6_H1.243_L1_IgG1_PVA_/S267K Heavy Chain
EVQLVESGGGLVKPGGSLRLSCAASGFTLSNYWMNWVRQAPGKGLEWVGEIRLKSNNYATHYAEPVKGRFTISRDDSKSTVYLQMNSLKTEDTAVYYCTRYYGNYGGYFDVWGAGTLVTVSSASTKGPSVFPLAPSSKSTSGGTAALGCLVKDYFPEPVTVSWNSGALTSGVHTFPAVLQSSGLYSLSSVVTVPSSSLGTQTYICNVNHKPSNTKVDKKVEPKSCDKTHTCPPCPAPPVAGPSVFLFPPKPKDTLMISRTPEVTCVVVDVKHEDPEVKFNWYVDGVEVHNAKTKPREEQYNSTYRVVSVLTVLHQDWLNGKEYKCKVSNKALPAPIEKTISKAKGQPREPQVYTLPPSREEMTKNQVSLTCLVKGFYPSDIAVEWESNGQPENNYKTTPPVLDSDGSFFLYSKLTVDKSRWQQGNVFSCSVMHEALHNHYTQKSLSLSPGK

SEQ ID NO: 15686 - protein, 122 aa, Artificial Sequence; identical to SEQ ID NO: 10041
  Description of Artificial Sequence: Synthetic polypeptide
  VH of XENP018984

SEQ ID NO: 15687 - protein, 5 aa, Artificial Sequence
  Description of Artificial Sequence: Synthetic peptide
  XENP018984 vhCDR1
NYWMN

SEQ ID NO: 15688 - protein, 19 aa, Artificial Sequence
  Description of Artificial Sequence: Synthetic peptide
  XENP018984 vhCDR2
EIRLKSNNYATHYAEPVKG

SEQ ID NO: 15689 - protein, 11 aa, Artificial Sequence
  Description of Artificial Sequence: Synthetic peptide
  XENP018984 vhCDR3
YYGNYGGYFDV

SEQ ID NO: 15690 - protein, 214 aa, Artificial Sequence; identical to SEQ ID NO: 11550
  Description of Artificial Sequence: Synthetic polypeptide
  XENP018984 1G6_H1.243_L1_IgG1_PVA_/S267K Light Chain

SEQ ID NO: 15691 - protein, 107 aa, Artificial Sequence; identical to SEQ ID NO: 6247
  Description of Artificial Sequence: Synthetic polypeptide
  VL of XENP018984

SEQ ID NO: 15692 - protein, 11 aa, Artificial Sequence
  Description of Artificial Sequence: Synthetic peptide
  XENP018984 vlCDR1
RASQSVSNDVA

SEQ ID NO: 15693 - protein, 7 aa, Artificial Sequence
  Description of Artificial Sequence: Synthetic peptide
  XENP018984 vlCDR2
YASHRYT

SEQ ID NO: 15694 - protein, 9 aa, Artificial Sequence
  Description of Artificial Sequence: Synthetic peptide
  XENP018984 vlCDR3
QQDYSSPRT

SEQ ID NO: 15695 - protein, 451 aa, Artificial Sequence
  Description of Artificial Sequence: Synthetic polypeptide
  XENP018985 1G6_H1.244_L1_IgG1_PVA_/S267K Heavy Chain
EVQLVESGGGLVKPGGSLRLSCAASGFTFSNYWMNWVRQAPGKGLQWVGEIRLKSNNYATHYAEPVKGRFTISRDDSKSTVYLQMNSLKTEDTAVYYCTRYYGNYGGYFDVWGAGTLVTVSSASTKGPSVFPLAPSSKSTSGGTAALGCLVKDYFPEPVTVSWNSGALTSGVHTFPAVLQSSGLYSLSSVVTVPSSSLGTQTYICNVNHKPSNTKVDKKVEPKSCDKTHTCPPCPAPPVAGPSVFLFPPKPKDTLMISRTPEVTCVVVDVKHEDPEVKFNWYVDGVEVHNAKTKPREEQYNSTYRVVSVLTVLHQDWLNGKEYKCKVSNKALPAPIEKTISKAKGQPREPQVYTLPPSREEMTKNQVSLTCLVKGFYPSDIAVEWESNGQPENNYKTTPPVLDSDGSFFLYSKLTVDKSRWQQGNVFSCSVMHEALHNHYTQKSLSLSPGK

SEQ ID NO: 15696 - protein, 122 aa, Artificial Sequence; identical to SEQ ID NO: 10050
  Description of Artificial Sequence: Synthetic polypeptide
  VH of XENP018985

SEQ ID NO: 15697 - protein, 5 aa, Artificial Sequence
  Description of Artificial Sequence: Synthetic peptide
  XENP018985 vhCDR1
NYWMN

SEQ ID NO: 15698 - protein, 19 aa, Artificial Sequence
  Description of Artificial Sequence: Synthetic peptide
  XENP018985 vhCDR2
EIRLKSNNYATHYAEPVKG

SEQ ID NO: 15699 - protein, 11 aa, Artificial Sequence
  Description of Artificial Sequence: Synthetic peptide
  XENP018985 vhCDR3
YYGNYGGYFDV

SEQ ID NO: 15700 - protein, 214 aa, Artificial Sequence; identical to SEQ ID NO: 11550
  Description of Artificial Sequence: Synthetic polypeptide
  XENP018985 1G6_H1.244_L1_IgG1_PVA_/S267K Light Chain

SEQ ID NO: 15701 - protein, 107 aa, Artificial Sequence; identical to SEQ ID NO: 6247
  Description of Artificial Sequence: Synthetic polypeptide
  VL of XENP018985

SEQ ID NO: 15702 - protein, 11 aa, Artificial Sequence
  Description of Artificial Sequence: Synthetic peptide
  XENP018985 vlCDR1
RASQSVSNDVA

SEQ ID NO: 15703 - protein, 7 aa, Artificial Sequence
  Description of Artificial Sequence: Synthetic peptide
  XENP018985 vlCDR2
YASHRYT

SEQ ID NO: 15704 - protein, 9 aa, Artificial Sequence
  Description of Artificial Sequence: Synthetic peptide
  XENP018985 vlCDR3
QQDYSSPRT

SEQ ID NO: 15705 - protein, 451 aa, Artificial Sequence
  Description of Artificial Sequence: Synthetic polypeptide
  XENP018986 1G6_H1.245_L1_IgG1_PVA_/S267K Heavy Chain
EVQLVESGGGLVKPGGSLRLSCAASGFTFSNYWMNWVRQAPGKGLEWIGEIRLKSNNYATHYAEPVKGRFTISRDDSKSTVYLQMNSLKTEDTAVYYCTRYYGNYGGYFDVWGAGTLVTVSSASTKGPSVFPLAPSSKSTSGGTAALGCLVKDYFPEPVTVSWNSGALTSGVHTFPAVLQSSGLYSLSSVVTVPSSSLGTQTYICNVNHKPSNTKVDKKVEPKSCDKTHTCPPCPAPPVAGPSVFLFPPKPKDTLMISRTPEVTCVVVDVKHEDPEVKFNWYVDGVEVHNAKTKPREEQYNSTYRVVSVLTVLHQDWLNGKEYKCKVSNKALPAPIEKTISKAKGQPREPQVYTLPPSREEMTKNQVSLTCLVKGFYPSDIAVEWESNGQPENNYKTTPPVLDSDGSFFLYSKLTVDKSRWQQGNVFSCSVMHEALHNHYTQKSLSLSPGK

SEQ ID NO: 15706 - protein, 122 aa, Artificial Sequence; identical to SEQ ID NO: 10059
  Description of Artificial Sequence: Synthetic polypeptide
  VH of XENP018986

SEQ ID NO: 15707 - protein, 5 aa, Artificial Sequence
  Description of Artificial Sequence: Synthetic peptide
  XENP018986 vhCDR1
NYWMN

SEQ ID NO: 15708 - protein, 19 aa, Artificial Sequence
  Description of Artificial Sequence: Synthetic peptide
  XENP018986 vhCDR2
EIRLKSNNYATHYAEPVKG

SEQ ID NO: 15709 - protein, 11 aa, Artificial Sequence
  Description of Artificial Sequence: Synthetic peptide
  XENP018986 vhCDR3
YYGNYGGYFDV

SEQ ID NO: 15710 - protein, 214 aa, Artificial Sequence; identical to SEQ ID NO: 11550
  Description of Artificial Sequence: Synthetic polypeptide
  XENP018986 1G6_H1.245_L1_IgG1_PVA_/S267K Light Chain

SEQ ID NO: 15711 - protein, 107 aa, Artificial Sequence; identical to SEQ ID NO: 6247
  Description of Artificial Sequence: Synthetic polypeptide
  VL of XENP018986

SEQ ID NO: 15712 - protein, 11 aa, Artificial Sequence
  Description of Artificial Sequence: Synthetic peptide
  XENP018986 vlCDR1
RASQSVSNDVA

SEQ ID NO: 15713 - protein, 7 aa, Artificial Sequence
  Description of Artificial Sequence: Synthetic peptide
  XENP018986 vlCDR2
YASHRYT

SEQ ID NO: 15714 - protein, 9 aa, Artificial Sequence
  Description of Artificial Sequence: Synthetic peptide
  XENP018986 vlCDR3
QQDYSSPRT

SEQ ID NO: 15715 - protein, 451 aa, Artificial Sequence
  Description of Artificial Sequence: Synthetic polypeptide
  XENP018987 1G6_H1.246_L1_IgG1_PVA_/S267K Heavy Chain
EVQLVESGGGLVKPGGSLRLSCAASGFTFSNYWMNWVRQAPGKGLEWMGEIRLKSNNYATHYAEPVKGRFTISRDDSKSTVYLQMNSLKTEDTAVYYCTRYYGNYGGYFDVWGAGTLVTVSSASTKGPSVFPLAPSSKSTSGGTAALGCLVKDYFPEPVTVSWNSGALTSGVHTFPAVLQSSGLYSLSSVVTVPSSSLGTQTYICNVNHKPSNTKVDKKVEPKSCDKTHTCPPCPAPPVAGPSVFLFPPKPKDTLMISRTPEVTCVVVDVKHEDPEVKFNWYVDGVEVHNAKTKPREEQYNSTYRVVSVLTVLHQDWLNGKEYKCKVSNKALPAPIEKTISKAKGQPREPQVYTLPPSREEMTKNQVSLTCLVKGFYPSDIAVEWESNGQPENNYKTTPPVLDSDGSFFLYSKLTVDKSRWQQGNVFSCSVMHEALHNHYTQKSLSLSPGK

SEQ ID NO: 15716 - protein, 122 aa, Artificial Sequence; identical to SEQ ID NO: 10068
  Description of Artificial Sequence: Synthetic polypeptide
  VH of XENP018987

SEQ ID NO: 15717 - protein, 5 aa, Artificial Sequence
  Description of Artificial Sequence: Synthetic peptide
  XENP018987 vhCDR1
NYWMN

SEQ ID NO: 15718 - protein, 19 aa, Artificial Sequence
  Description of Artificial Sequence: Synthetic peptide
  XENP018987 vhCDR2
EIRLKSNNYATHYAEPVKG

SEQ ID NO: 15719 - protein, 11 aa, Artificial Sequence
  Description of Artificial Sequence: Synthetic peptide
  XENP018987 vhCDR3
YYGNYGGYFDV

SEQ ID NO: 15720 - protein, 214 aa, Artificial Sequence; identical to SEQ ID NO: 11550
  Description of Artificial Sequence: Synthetic polypeptide
  XENP018987 1G6_H1.246_L1_IgG1_PVA_/S267K Light Chain

SEQ ID NO: 15721 - protein, 107 aa, Artificial Sequence; identical to SEQ ID NO: 6247
  Description of Artificial Sequence: Synthetic polypeptide
  VL of XENP018987

SEQ ID NO: 15722 - protein, 11 aa, Artificial Sequence
  Description of Artificial Sequence: Synthetic peptide
  XENP018987 vlCDR1
RASQSVSNDVA

SEQ ID NO: 15723 - protein, 7 aa, Artificial Sequence
  Description of Artificial Sequence: Synthetic peptide
  XENP018987 vlCDR2
YASHRYT

SEQ ID NO: 15724 - protein, 9 aa, Artificial Sequence
  Description of Artificial Sequence: Synthetic peptide
  XENP018987 vlCDR3
QQDYSSPRT

SEQ ID NO: 15725 - protein, 451 aa, Artificial Sequence
  Description of Artificial Sequence: Synthetic polypeptide
  XENP018988 1G6_H1.247_L1_IgG1_PVA_/S267K Heavy Chain
EVQLVESGGGLVKPGGSLRLSCAASGFTFSNYWMNWVRQAPGKGLEWVGEIRLKSNNYATHYAEPFKGRFTISRDDSKSTVYLQMNSLKTEDTAVYYCTRYYGNYGGYFDVWGAGTLVTVSSASTKGPSVFPLAPSSKSTSGGTAALGCLVKDYFPEPVTVSWNSGALTSGVHTFPAVLQSSGLYSLSSVVTVPSSSLGTQTYICNVNHKPSNTKVDKKVEPKSCDKTHTCPPCPAPPVAGPSVFLFPPKPKDTLMISRTPEVTCVVVDVKHEDPEVKFNWYVDGVEVHNAKTKPREEQYNSTYRVVSVLTVLHQDWLNGKEYKCKVSNKALPAPIEKTISKAKGQPREPQVYTLPPSREEMTKNQVSLTCLVKGFYPSDIAVEWESNGQPENNYKTTPPVLDSDGSFFLYSKLTVDKSRWQQGNVFSCSVMHEALHNHYTQKSLSLSPGK

SEQ ID NO: 15726 - protein, 122 aa, Artificial Sequence; identical to SEQ ID NO: 10077
  Description of Artificial Sequence: Synthetic polypeptide
  VH of XENP018988

SEQ ID NO: 15727 - protein, 5 aa, Artificial Sequence
  Description of Artificial Sequence: Synthetic peptide
  XENP018988 vhCDR1
NYWMN

SEQ ID NO: 15728 - protein, 19 aa, Artificial Sequence
  Description of Artificial Sequence: Synthetic peptide
  XENP018988 vhCDR2
EIRLKSNNYATHYAEPFKG

SEQ ID NO: 15729 - protein, 11 aa, Artificial Sequence
  Description of Artificial Sequence: Synthetic peptide
  XENP018988 vhCDR3
YYGNYGGYFDV

SEQ ID NO: 15730 - protein, 214 aa, Artificial Sequence; identical to SEQ ID NO: 11550
  Description of Artificial Sequence: Synthetic polypeptide
  XENP018988 1G6_H1.247_L1_IgG1_PVA_/S267K Light Chain

SEQ ID NO: 15731 - protein, 107 aa, Artificial Sequence; identical to SEQ ID NO: 6247
  Description of Artificial Sequence: Synthetic polypeptide
  VL of XENP018988

SEQ ID NO: 15732 - protein, 11 aa, Artificial Sequence
  Description of Artificial Sequence: Synthetic peptide
  XENP018988 vlCDR1
RASQSVSNDVA

SEQ ID NO: 15733 - protein, 7 aa, Artificial Sequence
  Description of Artificial Sequence: Synthetic peptide
  XENP018988 vlCDR2
YASHRYT

SEQ ID NO: 15734 - protein, 9 aa, Artificial Sequence
  Description of Artificial Sequence: Synthetic peptide
  XENP018988 vlCDR3
QQDYSSPRT

SEQ ID NO: 15735 - protein, 451 aa, Artificial Sequence
  Description of Artificial Sequence: Synthetic polypeptide
  XENP018989 1G6_H1.248_L1_IgG1_PVA_/S267K Heavy Chain
EVQLVESGGGLVKPGGSLRLSCAASGFTFSNYWMNWVRQAPGKGLEWVGEIRLKSNNYATHYAEPVKGRATISRDDSKSTVYLQMNSLKTEDTAVYYCTRYYGNYGGYFDVWGAGTLVTVSSASTKGPSVFPLAPSSKSTSGGTAALGCLVKDYFPEPVTVSWNSGALTSGVHTFPAVLQSSGLYSLSSVVTVPSSSLGTQTYICNVNHKPSNTKVDKKVEPKSCDKTHTCPPCPAPPVAGPSVFLFPPKPKDTLMISRTPEVTCVVVDVKHEDPEVKFNWYVDGVEVHNAKTKPREEQYNSTYRVVSVLTVLHQDWLNGKEYKCKVSNKALPAPIEKTISKAKGQPREPQVYTLPPSREEMTKNQVSLTCLVKGFYPSDIAVEWESNGQPENNYKTTPPVLDSDGSFFLYSKLTVDKSRWQQGNVFSCSVMHEALHNHYTQKSLSLSPGK

SEQ ID NO: 15736 - protein, 122 aa, Artificial Sequence; identical to SEQ ID NO: 10086
  Description of Artificial Sequence: Synthetic polypeptide
  VH of XENP018989

SEQ ID NO: 15737 - protein, 5 aa, Artificial Sequence
  Description of Artificial Sequence: Synthetic peptide
  XENP018989 vhCDR1
NYWMN

SEQ ID NO: 15738 - protein, 19 aa, Artificial Sequence
  Description of Artificial Sequence: Synthetic peptide
  XENP018989 vhCDR2
EIRLKSNNYATHYAEPVKG

SEQ ID NO: 15739 - protein, 11 aa, Artificial Sequence
  Description of Artificial Sequence: Synthetic peptide
  XENP018989 vhCDR3
YYGNYGGYFDV

SEQ ID NO: 15740 - protein, 214 aa, Artificial Sequence; identical to SEQ ID NO: 11550
  Description of Artificial Sequence: Synthetic polypeptide
  XENP018989 1G6_H1.248_L1_IgG1_PVA_/S267K Light Chain

SEQ ID NO: 15741 - protein, 107 aa, Artificial Sequence; identical to SEQ ID NO: 6247
  Description of Artificial Sequence: Synthetic polypeptide
  VL of XENP018989

SEQ ID NO: 15742 - protein, 11 aa, Artificial Sequence
  Description of Artificial Sequence: Synthetic peptide
  XENP018989 vlCDR1
RASQSVSNDVA

SEQ ID NO: 15743 - protein, 7 aa, Artificial Sequence
  Description of Artificial Sequence: Synthetic peptide
  XENP018989 vlCDR2
YASHRYT

SEQ ID NO: 15744 - protein, 9 aa, Artificial Sequence
  Description of Artificial Sequence: Synthetic peptide
  XENP018989 vlCDR3
QQDYSSPRT

SEQ ID NO: 15745 - protein, 451 aa, Artificial Sequence
  Description of Artificial Sequence: Synthetic polypeptide
  XENP018990 1G6_H1.249_L1_IgG1_PVA_/S267K Heavy Chain
EVQLVESGGGLVKPGGSLRLSCAASGFTFSNYWMNWVRQAPGKGLEWVGEIRLKSNNYATHYAEPVKGRVTISRDDSKSTVYLQMNSLKTEDTAVYYCTRYYGNYGGYFDVWGAGTLVTVSSASTKGPSVFPLAPSSKSTSGGTAALGCLVKDYFPEPVTVSWNSGALTSGVHTFPAVLQSSGLYSLSSVVTVPSSSLGTQTYICNVNHKPSNTKVDKKVEPKSCDKTHTCPPCPAPPVAGPSVFLFPPKPKDTLMISRTPEVTCVVVDVKHEDPEVKFNWYVDGVEVHNAKTKPREEQYNSTYRVVSVLTVLHQDWLNGKEYKCKVSNKALPAPIEKTISKAKGQPREPQVYTLPPSREEMTKNQVSLTCLVKGFYPSDIAVEWESNGQPENNYKTTPPVLDSDGSFFLYSKLTVDKSRWQQGNVFSCSVMHEALHNHYTQKSLSLSPGK

SEQ ID NO: 15746 - protein, 122 aa, Artificial Sequence; identical to SEQ ID NO: 10095
  Description of Artificial Sequence: Synthetic polypeptide
  VH of XENP018990

SEQ ID NO: 15747 - protein, 5 aa, Artificial Sequence
  Description of Artificial Sequence: Synthetic peptide
  XENP018990 vhCDR1
NYWMN

SEQ ID NO: 15748 - protein, 19 aa, Artificial Sequence
  Description of Artificial Sequence: Synthetic peptide
  XENP018990 vhCDR2
EIRLKSNNYATHYAEPVKG

SEQ ID NO: 15749 - protein, 11 aa, Artificial Sequence
  Description of Artificial Sequence: Synthetic peptide
  XENP018990 vhCDR3
YYGNYGGYFDV

SEQ ID NO: 15750 - protein, 214 aa, Artificial Sequence; identical to SEQ ID NO: 11550
  Description of Artificial Sequence: Synthetic polypeptide
  XENP018990 1G6_H1.249_L1_IgG1_PVA_/S267K Light Chain

SEQ ID NO: 15751 - protein, 107 aa, Artificial Sequence; identical to SEQ ID NO: 6247
  Description of Artificial Sequence: Synthetic polypeptide
  VL of XENP018990

SEQ ID NO: 15752 - protein, 11 aa, Artificial Sequence
  Description of Artificial Sequence: Synthetic peptide
  XENP018990 vlCDR1
RASQSVSNDVA

SEQ ID NO: 15753 - protein, 7 aa, Artificial Sequence
  Description of Artificial Sequence: Synthetic peptide
  XENP018990 vlCDR2
YASHRYT

SEQ ID NO: 15754 - protein, 9 aa, Artificial Sequence
  Description of Artificial Sequence: Synthetic peptide
  XENP018990 vlCDR3
QQDYSSPRT

SEQ ID NO: 15755 - protein, 451 aa, Artificial Sequence
  Description of Artificial Sequence: Synthetic polypeptide
  XENP018991 1G6_H1.250_L1_IgG1_PVA_/S267K Heavy Chain
EVQLVESGGGLVKPGGSLRLSCAASGFTFSNYWMNWVRQAPGKGLEWVGEIRLKSNNYATHYAEPVKGRFTISRDDSSSTVYLQMNSLKTEDTAVYYCTRYYGNYGGYFDVWGAGTLVTVSSASTKGPSVFPLAPSSKSTSGGTAALGCLVKDYFPEPVTVSWNSGALTSGVHTFPAVLQSSGLYSLSSVVTVPSSSLGTQTYICNVNHKPSNTKVDKKVEPKSCDKTHTCPPCPAPPVAGPSVFLFPPKPKDTLMISRTPEVTCVVVDVKHEDPEVKFNWYVDGVEVHNAKTKPREEQYNSTYRVVSVLTVLHQDWLNGKEYKCKVSNKALPAPIEKTISKAKGQPREPQVYTLPPSREEMTKNQVSLTCLVKGFYPSDIAVEWESNGQPENNYKTTPPVLDSDGSFFLYSKLTVDKSRWQQGNVFSCSVMHEALHNHYTQKSLSLSPGK

SEQ ID NO: 15756 - protein, 122 aa, Artificial Sequence; identical to SEQ ID NO: 10104
  Description of Artificial Sequence: Synthetic polypeptide
  VH of XENP018991

SEQ ID NO: 15757 - protein, 5 aa, Artificial Sequence
  Description of Artificial Sequence: Synthetic peptide
  XENP018991 vhCDR1
NYWMN

SEQ ID NO: 15758 - protein, 19 aa, Artificial Sequence
  Description of Artificial Sequence: Synthetic peptide
  XENP018991 vhCDR2
EIRLKSNNYATHYAEPVKG

SEQ ID NO: 15759 - protein, 11 aa, Artificial Sequence
  Description of Artificial Sequence: Synthetic peptide
  XENP018991 vhCDR3
YYGNYGGYFDV

SEQ ID NO: 15760 - protein, 214 aa, Artificial Sequence; identical to SEQ ID NO: 11550
  Description of Artificial Sequence: Synthetic polypeptide
  XENP018991 1G6_H1.250_L1_IgG1_PVA_/S267K Light Chain

SEQ ID NO: 15761 - protein, 107 aa, Artificial Sequence; identical to SEQ ID NO: 6247
  Description of Artificial Sequence: Synthetic polypeptide
  VL of XENP018991

SEQ ID NO: 15762 - protein, 11 aa, Artificial Sequence
  Description of Artificial Sequence: Synthetic peptide
  XENP018991 vlCDR1
RASQSVSNDVA

SEQ ID NO: 15763 - protein, 7 aa, Artificial Sequence
  Description of Artificial Sequence: Synthetic peptide
  XENP018991 vlCDR2
YASHRYT

SEQ ID NO: 15764 - protein, 9 aa, Artificial Sequence
  Description of Artificial Sequence: Synthetic peptide
  XENP018991 vlCDR3
QQDYSSPRT

SEQ ID NO: 15765 - protein, 451 aa, Artificial Sequence
  Description of Artificial Sequence: Synthetic polypeptide
  XENP018992 1G6_H1.251_L1_IgG1_PVA_/S267K Heavy Chain
EVQLVESGGGLVKPGGSLRLSCAASGFTFSNYWMNWVRQAPGKGLEWVGEIRLKSNNYATHYAEPVKGRFTISRDDSKSMVYLQMNSLKTEDTAVYYCTRYYGNYGGYFDVWGAGTLVTVSSASTKGPSVFPLAPSSKSTSGGTAALGCLVKDYFPEPVTVSWNSGALTSGVHTFPAVLQSSGLYSLSSVVTVPSSSLGTQTYICNVNHKPSNTKVDKKVEPKSCDKTHTCPPCPAPPVAGPSVFLFPPKPKDTLMISRTPEVTCVVVDVKHEDPEVKFNWYVDGVEVHNAKTKPREEQYNSTYRVVSVLTVLHQDWLNGKEYKCKVSNKALPAPIEKTISKAKGQPREPQVYTLPPSREEMTKNQVSLTCLVKGFYPSDIAVEWESNGQPENNYKTTPPVLDSDGSFFLYSKLTVDKSRWQQGNVFSCSVMHEALHNHYTQKSLSLSPGK

SEQ ID NO: 15766 - protein, 122 aa, Artificial Sequence; identical to SEQ ID NO: 10113
  Description of Artificial Sequence: Synthetic polypeptide
  VH of XENP018992

SEQ ID NO: 15767 - protein, 5 aa, Artificial Sequence
  Description of Artificial Sequence: Synthetic peptide
  XENP018992 vhCDR1
NYWMN

SEQ ID NO: 15768 - protein, 19 aa, Artificial Sequence
  Description of Artificial Sequence: Synthetic peptide
  XENP018992 vhCDR2
EIRLKSNNYATHYAEPVKG

SEQ ID NO: 15769 - protein, 11 aa, Artificial Sequence
  Description of Artificial Sequence: Synthetic peptide
  XENP018992 vhCDR3
YYGNYGGYFDV

SEQ ID NO: 15770 - protein, 214 aa, Artificial Sequence; identical to SEQ ID NO: 11550
  Description of Artificial Sequence: Synthetic polypeptide
  XENP018992 1G6_H1.251_L1_IgG1_PVA_/S267K Light Chain

SEQ ID NO: 15771 - protein, 107 aa, Artificial Sequence; identical to SEQ ID NO: 6247
  Description of Artificial Sequence: Synthetic polypeptide
  VL of XENP018992

SEQ ID NO: 15772 - protein, 11 aa, Artificial Sequence
  Description of Artificial Sequence: Synthetic peptide
  XENP018992 vlCDR1
RASQSVSNDVA

SEQ ID NO: 15773 - protein, 7 aa, Artificial Sequence
  Description of Artificial Sequence: Synthetic peptide
  XENP018992 vlCDR2
YASHRYT

SEQ ID NO: 15774 - protein, 9 aa, Artificial Sequence
  Description of Artificial Sequence: Synthetic peptide
  XENP018992 vlCDR3
QQDYSSPRT

SEQ ID NO: 15775 - protein, 451 aa, Artificial Sequence
  Description of Artificial Sequence: Synthetic polypeptide
  XENP018993 1G6_H1.252_L1_IgG1_PVA_/S267K Heavy Chain
EVQLVESGGGLVKPGGSLRLSCAASGFTFSNYWMNWVRQAPGKGLEWVGEIRLKSNNYATHYAEPVKGRFTISRDDSKSQVYLQMNSLKTEDTAVYYCTRYYGNYGGYFDVWGAGTLVTVSSASTKGPSVFPLAPSSKSTSGGTAALGCLVKDYFPEPVTVSWNSGALTSGVHTFPAVLQSSGLYSLSSVVTVPSSSLGTQTYICNVNHKPSNTKVDKKVEPKSCDKTHTCPPCPAPPVAGPSVFLFPPKPKDTLMISRTPEVTCVVVDVKHEDPEVKFNWYVDGVEVHNAKTKPREEQYNSTYRVVSVLTVLHQDWLNGKEYKCKVSNKALPAPIEKTISKAKGQPREPQVYTLPPSREEMTKNQVSLTCLVKGFYPSDIAVEWESNGQPENNYKTTPPVLDSDGSFFLYSKLTVDKSRWQQGNVFSCSVMHEALHNHYTQKSLSLSPGK

SEQ ID NO: 15776 - protein, 122 aa, Artificial Sequence; identical to SEQ ID NO: 10122
  Description of Artificial Sequence: Synthetic polypeptide
  VH of XENP018993

SEQ ID NO: 15777 - protein, 5 aa, Artificial Sequence
  Description of Artificial Sequence: Synthetic peptide
  XENP018993 vhCDR1
NYWMN

SEQ ID NO: 15778 - protein, 19 aa, Artificial Sequence
  Description of Artificial Sequence: Synthetic peptide
  XENP018993 vhCDR2
EIRLKSNNYATHYAEPVKG

SEQ ID NO: 15779 - protein, 11 aa, Artificial Sequence
  Description of Artificial Sequence: Synthetic peptide
  XENP018993 vhCDR3
YYGNYGGYFDV

SEQ ID NO: 15780 - protein, 214 aa, Artificial Sequence; identical to SEQ ID NO: 11550
  Description of Artificial Sequence: Synthetic polypeptide
  XENP018993 1G6_H1.252_L1_IgG1_PVA_/S267K Light Chain

SEQ ID NO: 15781 - protein, 107 aa, Artificial Sequence; identical to SEQ ID NO: 6247
  Description of Artificial Sequence: Synthetic polypeptide
  VL of XENP018993

SEQ ID NO: 15782 - protein, 11 aa, Artificial Sequence
  Description of Artificial Sequence: Synthetic peptide
  XENP018993 vlCDR1
RASQSVSNDVA

SEQ ID NO: 15783 - protein, 7 aa, Artificial Sequence
  Description of Artificial Sequence: Synthetic peptide
  XENP018993 vlCDR2
YASHRYT

SEQ ID NO: 15784 - protein, 9 aa, Artificial Sequence
  Description of Artificial Sequence: Synthetic peptide
  XENP018993 vlCDR3
QQDYSSPRT

SEQ ID NO: 15785 - protein, 451 aa, Artificial Sequence
  Description of Artificial Sequence: Synthetic polypeptide
  XENP018994 1G6_H1.253_L1_IgG1_PVA_/S267K Heavy Chain
EVQLVESGGGLVKPGGSLRLSCAASGFTFSNYWMNWVRQAPGKGLEWVGEIRLKSNNYATHYAEPVKGRFTISRDDSKSTVVLQMNSLKTEDTAVYYCTRYYGNYGGYFDVWGAGTLVTVSSASTKGPSVFPLAPSSKSTSGGTAALGCLVKDYFPEPVTVSWNSGALTSGVHTFPAVLQSSGLYSLSSVVTVPSSSLGTQTYICNVNHKPSNTKVDKKVEPKSCDKTHTCPPCPAPPVAGPSVFLFPPKPKDTLMISRTPEVTCVVVDVKHEDPEVKFNWYVDGVEVHNAKTKPREEQYNSTYRVVSVLTVLHQDWLNGKEYKCKVSNKALPAPIEKTISKAKGQPREPQVYTLPPSREEMTKNQVSLTCLVKGFYPSDIAVEWESNGQPENNYKTTPPVLDSDGSFFLYSKLTVDKSRWQQGNVFSCSVMHEALHNHYTQKSLSLSPGK

SEQ ID NO: 15786 - protein, 122 aa, Artificial Sequence; identical to SEQ ID NO: 10131
  Description of Artificial Sequence: Synthetic polypeptide
  VH of XENP018994

SEQ ID NO: 15787 - protein, 5 aa, Artificial Sequence
  Description of Artificial Sequence: Synthetic peptide
  XENP018994 vhCDR1
NYWMN

SEQ ID NO: 15788 - protein, 19 aa, Artificial Sequence
  Description of Artificial Sequence: Synthetic peptide
  XENP018994 vhCDR2
EIRLKSNNYATHYAEPVKG

SEQ ID NO: 15789 - protein, 11 aa, Artificial Sequence
  Description of Artificial Sequence: Synthetic peptide
  XENP018994 vhCDR3
YYGNYGGYFDV

SEQ ID NO: 15790 - protein, 214 aa, Artificial Sequence; identical to SEQ ID NO: 11550
  Description of Artificial Sequence: Synthetic polypeptide
  XENP018994 1G6_H1.253_L1_IgG1_PVA_/S267K Light Chain

SEQ ID NO: 15791 - protein, 107 aa, Artificial Sequence; identical to SEQ ID NO: 6247
  Description of Artificial Sequence: Synthetic polypeptide
  VL of XENP018994

SEQ ID NO: 15792 - protein, 11 aa, Artificial Sequence
  Description of Artificial Sequence: Synthetic peptide
  XENP018994 vlCDR1
RASQSVSNDVA

SEQ ID NO: 15793 - protein, 7 aa, Artificial Sequence
  Description of Artificial Sequence: Synthetic peptide
  XENP018994 vlCDR2
YASHRYT

SEQ ID NO: 15794 - protein, 9 aa, Artificial Sequence
  Description of Artificial Sequence: Synthetic peptide
  XENP018994 vlCDR3
QQDYSSPRT

SEQ ID NO: 15795 - protein, 451 aa, Artificial Sequence
  Description of Artificial Sequence: Synthetic polypeptide
  XENP018995 1G6_H1.254_L1_IgG1_PVA_/S267K Heavy Chain
EVQLVESGGGLVKPGGSLRLSCAASGFTFSNYWMNWVRQAPGKGLEWVGEIRLKSNNYATHYAEPVKGRFTISRDDSKSTVYLEMNSLKTEDTAVYYCTRYYGNYGGYFDVWGAGTLVTVSSASTKGPSVFPLAPSSKSTSGGTAALGCLVKDYFPEPVTVSWNSGALTSGVHTFPAVLQSSGLYSLSSVVTVPSSSLGTQTYICNVNHKPSNTKVDKKVEPKSCDKTHTCPPCPAPPVAGPSVFLFPPKPKDTLMISRTPEVTCVVVDVKHEDPEVKFNWYVDGVEVHNAKTKPREEQYNSTYRVVSVLTVLHQDWLNGKEYKCKVSNKALPAPIEKTISKAKGQPREPQVYTLPPSREEMTKNQVSLTCLVKGFYPSDIAVEWESNGQPENNYKTTPPVLDSDGSFFLYSKLTVDKSRWQQGNVFSCSVMHEALHNHYTQKSLSLSPGK

SEQ ID NO: 15796 - protein, 122 aa, Artificial Sequence; identical to SEQ ID NO: 10140
  Description of Artificial Sequence: Synthetic polypeptide
  VH of XENP018995

SEQ ID NO: 15797 - protein, 5 aa, Artificial Sequence
  Description of Artificial Sequence: Synthetic peptide
  XENP018995 vhCDR1
NYWMN

SEQ ID NO: 15798 - protein, 19 aa, Artificial Sequence
  Description of Artificial Sequence: Synthetic peptide
  XENP018995 vhCDR2
EIRLKSNNYATHYAEPVKG

SEQ ID NO: 15799 - protein, 11 aa, Artificial Sequence
  Description of Artificial Sequence: Synthetic peptide
  XENP018995 vhCDR3
YYGNYGGYFDV

SEQ ID NO: 15800 - protein, 214 aa, Artificial Sequence; identical to SEQ ID NO: 11550
  Description of Artificial Sequence: Synthetic polypeptide
  XENP018995 1G6_H1.254_L1_IgG1_PVA_/S267K Light Chain

SEQ ID NO: 15801 - protein, 107 aa, Artificial Sequence; identical to SEQ ID NO: 6247
  Description of Artificial Sequence: Synthetic polypeptide
  VL of XENP018995

SEQ ID NO: 15802 - protein, 11 aa, Artificial Sequence
  Description of Artificial Sequence: Synthetic peptide
  XENP018995 vlCDR1
RASQSVSNDVA

SEQ ID NO: 15803 - protein, 7 aa, Artificial Sequence
  Description of Artificial Sequence: Synthetic peptide
  XENP018995 vlCDR2
YASHRYT

SEQ ID NO: 15804 - protein, 9 aa, Artificial Sequence
  Description of Artificial Sequence: Synthetic peptide
  XENP018995 vlCDR3
QQDYSSPRT

SEQ ID NO: 15805 - protein, 451 aa, Artificial Sequence
  Description of Artificial Sequence: Synthetic polypeptide
  XENP018996 1G6_H1.255_L1_IgG1_PVA_/S267K Heavy Chain
EVQLVESGGGLVKPGGSLRLSCAASGFTFSNYWMNWVRQAPGKGLEWVGEIRLKSNNYATHYAEPVKGRFTISRDDSKSTVYLQMNSEKTEDTAVYYCTRYYGNYGGYFDVWGAGTLVTVSSASTKGPSVFPLAPSSKSTSGGTAALGCLVKDYFPEPVTVSWNSGALTSGVHTFPAVLQSSGLYSLSSVVTVPSSSLGTQTYICNVNHKPSNTKVDKKVEPKSCDKTHTCPPCPAPPVAGPSVFLFPPKPKDTLMISRTPEVTCVVVDVKHEDPEVKFNWYVDGVEVHNAKTKPREEQYNSTYRVVSVLTVLHQDWLNGKEYKCKVSNKALPAPIEKTISKAKGQPREPQVYTLPPSREEMTKNQVSLTCLVKGFYPSDIAVEWESNGQPENNYKTTPPVLDSDGSFFLYSKLTVDKSRWQQGNVFSCSVMHEALHNHYTQKSLSLSPGK

SEQ ID NO: 15806 - protein, 122 aa, Artificial Sequence; identical to SEQ ID NO: 10149
  Description of Artificial Sequence: Synthetic polypeptide
  VH of XENP018996

SEQ ID NO: 15807 - protein, 5 aa, Artificial Sequence
  Description of Artificial Sequence: Synthetic peptide
  XENP018996 vhCDR1
NYWMN

SEQ ID NO: 15808 - protein, 19 aa, Artificial Sequence
  Description of Artificial Sequence: Synthetic peptide
  XENP018996 vhCDR2
EIRLKSNNYATHYAEPVKG

SEQ ID NO: 15809 - protein, 11 aa, Artificial Sequence
  Description of Artificial Sequence: Synthetic peptide
  XENP018996 vhCDR3
YYGNYGGYFDV

SEQ ID NO: 15810 - protein, 214 aa, Artificial Sequence; identical to SEQ ID NO: 11550
  Description of Artificial Sequence: Synthetic polypeptide
  XENP018996 1G6_H1.255_L1_IgG1_PVA_/S267K Light Chain

SEQ ID NO: 15811 - protein, 107 aa, Artificial Sequence; identical to SEQ ID NO: 6247
  Description of Artificial Sequence: Synthetic polypeptide
  VL of XENP018996

SEQ ID NO: 15812 - protein, 11 aa, Artificial Sequence
  Description of Artificial Sequence: Synthetic peptide
  XENP018996 vlCDR1
RASQSVSNDVA

SEQ ID NO: 15813 - protein, 7 aa, Artificial Sequence
  Description of Artificial Sequence: Synthetic peptide
  XENP018996 vlCDR2
YASHRYT

SEQ ID NO: 15814 - protein, 9 aa, Artificial Sequence
  Description of Artificial Sequence: Synthetic peptide
  XENP018996 vlCDR3
QQDYSSPRT

SEQ ID NO: 15815 - protein, 451 aa, Artificial Sequence
  Description of Artificial Sequence: Synthetic polypeptide
  XENP019001 1G6_H1.256_L1_IgG1_PVA_/S267K Heavy Chain
EVQLVESGGGLVKPGGSLRLSCAASGFTFSNYWMNWVRQAPGKGLEWVGEIRLKSNNYATHYAEPVKGRFTISRDDSKSTVYLQMNSVKTEDTAVYYCTRYYGNYGGYFDVWGAGTLVTVSSASTKGPSVFPLAPSSKSTSGGTAALGCLVKDYFPEPVTVSWNSGALTSGVHTFPAVLQSSGLYSLSSVVTVPSSSLGTQTYICNVNHKPSNTKVDKKVEPKSCDKTHTCPPCPAPPVAGPSVFLFPPKPKDTLMISRTPEVTCVVVDVKHEDPEVKFNWYVDGVEVHNAKTKPREEQYNSTYRVVSVLTVLHQDWLNGKEYKCKVSNKALPAPIEKTISKAKGQPREPQVYTLPPSREEMTKNQVSLTCLVKGFYPSDIAVEWESNGQPENNYKTTPPVLDSDGSFFLYSKLTVDKSRWQQGNVFSCSVMHEALHNHYTQKSLSLSPGK

SEQ ID NO: 15816 - protein, 122 aa, Artificial Sequence; identical to SEQ ID NO: 10158
  Description of Artificial Sequence: Synthetic polypeptide
  VH of XENP019001

SEQ ID NO: 15817 - protein, 5 aa, Artificial Sequence
  Description of Artificial Sequence: Synthetic peptide
  XENP019001 vhCDR1
NYWMN

SEQ ID NO: 15818 - protein, 19 aa, Artificial Sequence
  Description of Artificial Sequence: Synthetic peptide
  XENP019001 vhCDR2
EIRLKSNNYATHYAEPVKG

SEQ ID NO: 15819 - protein, 11 aa, Artificial Sequence
  Description of Artificial Sequence: Synthetic peptide
  XENP019001 vhCDR3
YYGNYGGYFDV

SEQ ID NO: 15820 - protein, 214 aa, Artificial Sequence; identical to SEQ ID NO: 11550
  Description of Artificial Sequence: Synthetic polypeptide
  XENP019001 1G6_H1.256_L1_IgG1_PVA_/S267K Light Chain

SEQ ID NO: 15821 - protein, 107 aa, Artificial Sequence; identical to SEQ ID NO: 6247
  Description of Artificial Sequence: Synthetic polypeptide
  VL of XENP019001

SEQ ID NO: 15822 - protein, 11 aa, Artificial Sequence
  Description of Artificial Sequence: Synthetic peptide
  XENP019001 vlCDR1
RASQSVSNDVA

SEQ ID NO: 15823 - protein, 7 aa, Artificial Sequence
  Description of Artificial Sequence: Synthetic peptide
  XENP019001 vlCDR2
YASHRYT

SEQ ID NO: 15824 - protein, 9 aa, Artificial Sequence
  Description of Artificial Sequence: Synthetic peptide
  XENP019001 vlCDR3
QQDYSSPRT

SEQ ID NO: 15825 - protein, 451 aa, Artificial Sequence
  Description of Artificial Sequence: Synthetic polypeptide
  XENP019002 1G6_H1.257_L1_IgG1_PVA_/S267K Heavy Chain
EVQLVESGGGLVKPGGSLRLSCAASGFTFSNYWMNWVRQAPGKGLEWVGEIRLKSNNYATHYAEPVKGRFTISRDDSKSTVYLQMNSLKTEDTAVYYCTRYYGNYGGYFDVWGRGTLVTVSSASTKGPSVFPLAPSSKSTSGGTAALGCLVKDYFPEPVTVSWNSGALTSGVHTFPAVLQSSGLYSLSSVVTVPSSSLGTQTYICNVNHKPSNTKVDKKVEPKSCDKTHTCPPCPAPPVAGPSVFLFPPKPKDTLMISRTPEVTCVVVDVKHEDPEVKFNWYVDGVEVHNAKTKPREEQYNSTYRVVSVLTVLHQDWLNGKEYKCKVSNKALPAPIEKTISKAKGQPREPQVYTLPPSREEMTKNQVSLTCLVKGFYPSDIAVEWESNGQPENNYKTTPPVLDSDGSFFLYSKLTVDKSRWQQGNVFSCSVMHEALHNHYTQKSLSLSPGK

SEQ ID NO: 15826 - protein, 122 aa, Artificial Sequence; identical to SEQ ID NO: 10167
  Description of Artificial Sequence: Synthetic polypeptide
  VH of XENP019002

SEQ ID NO: 15827 - protein, 5 aa, Artificial Sequence
  Description of Artificial Sequence: Synthetic peptide
  XENP019002 vhCDR1
NYWMN

SEQ ID NO: 15828 - protein, 19 aa, Artificial Sequence
  Description of Artificial Sequence: Synthetic peptide
  XENP019002 vhCDR2
EIRLKSNNYATHYAEPVKG

SEQ ID NO: 15829 - protein, 11 aa, Artificial Sequence
  Description of Artificial Sequence: Synthetic peptide
  XENP019002 vhCDR3
YYGNYGGYFDV

SEQ ID NO: 15830 - protein, 214 aa, Artificial Sequence; identical to SEQ ID NO: 11550
  Description of Artificial Sequence: Synthetic polypeptide
  XENP019002 1G6_H1.257_L1_IgG1_PVA_/S267K Light Chain

SEQ ID NO: 15831 - protein, 107 aa, Artificial Sequence; identical to SEQ ID NO: 6247
  Description of Artificial Sequence: Synthetic polypeptide
  VL of XENP019002

SEQ ID NO: 15832 - protein, 11 aa, Artificial Sequence
  Description of Artificial Sequence: Synthetic peptide
  XENP019002 vlCDR1
RASQSVSNDVA

SEQ ID NO: 15833 - protein, 7 aa, Artificial Sequence
  Description of Artificial Sequence: Synthetic peptide
  XENP019002 vlCDR2
YASHRYT

SEQ ID NO: 15834 - protein, 9 aa, Artificial Sequence
  Description of Artificial Sequence: Synthetic peptide
  XENP019002 vlCDR3
QQDYSSPRT

SEQ ID NO: 15835 - protein, 451 aa, Artificial Sequence
  Description of Artificial Sequence: Synthetic polypeptide
  XENP019003 1G6_H1.258_L1_IgG1_PVA_/S267K Heavy Chain
EVQLVESGGGLKKPGESLRLSCAASGFTFSNYWMNWVRQAPGKGLEWVGEIRLKSNNYATHYAEPVKGRFTISRDDSKSTVYLQMNSLKTEDTAVYYCTRYYGNYGGYFDVWGAGTLVTVSSASTKGPSVFPLAPSSKSTSGGTAALGCLVKDYFPEPVTVSWNSGALTSGVHTFPAVLQSSGLYSLSSVVTVPSSSLGTQTYICNVNHKPSNTKVDKKVEPKSCDKTHTCPPCPAPPVAGPSVFLFPPKPKDTLMISRTPEVTCVVVDVKHEDPEVKFNWYVDGVEVHNAKTKPREEQYNSTYRVVSVLTVLHQDWLNGKEYKCKVSNKALPAPIEKTISKAKGQPREPQVYTLPPSREEMTKNQVSLTCLVKGFYPSDIAVEWESNGQPENNYKTTPPVLDSDGSFFLYSKLTVDKSRWQQGNVFSCSVMHEALHNHYTQKSLSLSPGK

SEQ ID NO: 15836 - protein, 122 aa, Artificial Sequence; identical to SEQ ID NO: 10176
  Description of Artificial Sequence: Synthetic polypeptide
  VH of XENP019003

SEQ ID NO: 15837 - protein, 5 aa, Artificial Sequence
  Description of Artificial Sequence: Synthetic peptide
  XENP019003 vhCDR1
NYWMN

SEQ ID NO: 15838 - protein, 19 aa, Artificial Sequence
  Description of Artificial Sequence: Synthetic peptide
  XENP019003 vhCDR2
EIRLKSNNYATHYAEPVKG

SEQ ID NO: 15839 - protein, 11 aa, Artificial Sequence
  Description of Artificial Sequence: Synthetic peptide
  XENP019003 vhCDR3
YYGNYGGYFDV

SEQ ID NO: 15840 - protein, 214 aa, Artificial Sequence; identical to SEQ ID NO: 11550
  Description of Artificial Sequence: Synthetic polypeptide
  XENP019003 1G6_H1.258_L1_IgG1_PVA_/S267K Light Chain

SEQ ID NO: 15841 - protein, 107 aa, Artificial Sequence; identical to SEQ ID NO: 6247
  Description of Artificial Sequence: Synthetic polypeptide
  VL of XENP019003

SEQ ID NO: 15842 - protein, 11 aa, Artificial Sequence
  Description of Artificial Sequence: Synthetic peptide
  XENP019003 vlCDR1
RASQSVSNDVA

SEQ ID NO: 15843 - protein, 7 aa, Artificial Sequence
  Description of Artificial Sequence: Synthetic peptide
  XENP019003 vlCDR2
YASHRYT

SEQ ID NO: 15844 - protein, 9 aa, Artificial Sequence
  Description of Artificial Sequence: Synthetic peptide
  XENP019003 vlCDR3
QQDYSSPRT

SEQ ID NO: 15845 - protein, 451 aa, Artificial Sequence
  Description of Artificial Sequence: Synthetic polypeptide
  XENP019004 1G6_H1.259_L1_IgG1_PVA_/S267K Heavy Chain
EVQLVESGGGLVKPGGSLRLSCAASGFTFSNYWMDWVRQAPGKGLEWVGEIRLKSNNYATHYAEPVKGRFTISRDDSKSTVYLQMNSLKTEDTAVYYCKRYYGNYGGYFDVWGAGTLVTVSSASTKGPSVFPLAPSSKSTSGGTAALGCLVKDYFPEPVTVSWNSGALTSGVHTFPAVLQSSGLYSLSSVVTVPSSSLGTQTYICNVNHKPSNTKVDKKVEPKSCDKTHTCPPCPAPPVAGPSVFLFPPKPKDTLMISRTPEVTCVVVDVKHEDPEVKFNWYVDGVEVHNAKTKPREEQYNSTYRVVSVLTVLHQDWLNGKEYKCKVSNKALPAPIEKTISKAKGQPREPQVYTLPPSREEMTKNQVSLTCLVKGFYPSDIAVEWESNGQPENNYKTTPPVLDSDGSFFLYSKLTVDKSRWQQGNVFSCSVMHEALHNHYTQKSLSLSPGK

SEQ ID NO: 15846 - protein, 122 aa, Artificial Sequence; identical to SEQ ID NO: 10185
  Description of Artificial Sequence: Synthetic polypeptide
  VH of XENP019004

SEQ ID NO: 15847 - protein, 5 aa, Artificial Sequence
  Description of Artificial Sequence: Synthetic peptide
  XENP019004 vhCDR1
NYWMD

SEQ ID NO: 15848 - protein, 19 aa, Artificial Sequence
  Description of Artificial Sequence: Synthetic peptide
  XENP019004 vhCDR2
EIRLKSNNYATHYAEPVKG

SEQ ID NO: 15849 - protein, 11 aa, Artificial Sequence
  Description of Artificial Sequence: Synthetic peptide
  XENP019004 vhCDR3
YYGNYGGYFDV

SEQ ID NO: 15850 - protein, 214 aa, Artificial Sequence; identical to SEQ ID NO: 11550
  Description of Artificial Sequence: Synthetic polypeptide
  XENP019004 1G6_H1.259_L1_IgG1_PVA_/S267K Light Chain

SEQ ID NO: 15851 - protein, 107 aa, Artificial Sequence; identical to SEQ ID NO: 6247
  Description of Artificial Sequence: Synthetic polypeptide
  VL of XENP019004

SEQ ID NO: 15852 - protein, 11 aa, Artificial Sequence
  Description of Artificial Sequence: Synthetic peptide
  XENP019004 vlCDR1
RASQSVSNDVA

SEQ ID NO: 15853 - protein, 7 aa, Artificial Sequence
  Description of Artificial Sequence: Synthetic peptide
  XENP019004 vlCDR2
YASHRYT

SEQ ID NO: 15854 - protein, 9 aa, Artificial Sequence
  Description of Artificial Sequence: Synthetic peptide
  XENP019004 vlCDR3
QQDYSSPRT

SEQ ID NO: 15855 - protein, 451 aa, Artificial Sequence
  Description of Artificial Sequence: Synthetic polypeptide
  XENP019005 1G6_H1.260_L1_IgG1_PVA_/S267K Heavy Chain
EVQLVESGGGLVKPGESLRLSCAASGFTFSNYWMNWVRQAPGKGLEWVGEIRLKSNNYATHYAEPVKGRFTISRDDSKSTVYLQMNSRKTEDTAVYYCTRYYGNYGGYFDVWGAGTLVTVSSASTKGPSVFPLAPSSKSTSGGTAALGCLVKDYFPEPVTVSWNSGALTSGVHTFPAVLQSSGLYSLSSVVTVPSSSLGTQTYICNVNHKPSNTKVDKKVEPKSCDKTHTCPPCPAPPVAGPSVFLFPPKPKDTLMISRTPEVTCVVVDVKHEDPEVKFNWYVDGVEVHNAKTKPREEQYNSTYRVVSVLTVLHQDWLNGKEYKCKVSNKALPAPIEKTISKAKGQPREPQVYTLPPSREEMTKNQVSLTCLVKGFYPSDIAVEWESNGQPENNYKTTPPVLDSDGSFFLYSKLTVDKSRWQQGNVFSCSVMHEALHNHYTQKSLSLSPGK

SEQ ID NO: 15856 - protein, 122 aa, Artificial Sequence; identical to SEQ ID NO: 10194
  Description of Artificial Sequence: Synthetic polypeptide
  VH of XENP019005

SEQ ID NO: 15857 - protein, 5 aa, Artificial Sequence
  Description of Artificial Sequence: Synthetic peptide
  XENP019005 vhCDR1
NYWMN

SEQ ID NO: 15858 - protein, 19 aa, Artificial Sequence
  Description of Artificial Sequence: Synthetic peptide
  XENP019005 vhCDR2
EIRLKSNNYATHYAEPVKG

SEQ ID NO: 15859 - protein, 11 aa, Artificial Sequence
  Description of Artificial Sequence: Synthetic peptide
  XENP019005 vhCDR3
YYGNYGGYFDV

SEQ ID NO: 15860 - protein, 214 aa, Artificial Sequence; identical to SEQ ID NO: 11550
  Description of Artificial Sequence: Synthetic polypeptide
  XENP019005 1G6_H1.260_L1_IgG1_PVA_/S267K Light Chain

SEQ ID NO: 15861 - protein, 107 aa, Artificial Sequence; identical to SEQ ID NO: 6247
  Description of Artificial Sequence: Synthetic polypeptide
  VL of XENP019005

SEQ ID NO: 15862 - protein, 11 aa, Artificial Sequence
  Description of Artificial Sequence: Synthetic peptide
  XENP019005 vlCDR1
RASQSVSNDVA

SEQ ID NO: 15863 - protein, 7 aa, Artificial Sequence
  Description of Artificial Sequence: Synthetic peptide
  XENP019005 vlCDR2
YASHRYT

SEQ ID NO: 15864 - protein, 9 aa, Artificial Sequence
  Description of Artificial Sequence: Synthetic peptide
  XENP019005 vlCDR3
QQDYSSPRT

SEQ ID NO: 15865 - protein, 451 aa, Artificial Sequence
  Description of Artificial Sequence: Synthetic polypeptide
  XENP019006 1G6_H1.261_L1_IgG1_PVA_/S267K Heavy Chain
EVQLVESGGGLVKPGGSLRLSCKASGFTFSNYWMNWVRQAPGKGLEWVGEIRLKSNNYATHYAEPVKGRFTISRDDSKDTVYLQMNSLKTEDTAVYYCTRYYGNYGGYFDVWGAGTLVTVSSASTKGPSVFPLAPSSKSTSGGTAALGCLVKDYFPEPVTVSWNSGALTSGVHTFPAVLQSSGLYSLSSVVTVPSSSLGTQTYICNVNHKPSNTKVDKKVEPKSCDKTHTCPPCPAPPVAGPSVFLFPPKPKDTLMISRTPEVTCVVVDVKHEDPEVKFNWYVDGVEVHNAKTKPREEQYNSTYRVVSVLTVLHQDWLNGKEYKCKVSNKALPAPIEKTISKAKGQPREPQVYTLPPSREEMTKNQVSLTCLVKGFYPSDIAVEWESNGQPENNYKTTPPVLDSDGSFFLYSKLTVDKSRWQQGNVFSCSVMHEALHNHYTQKSLSLSPGK

SEQ ID NO: 15866 - protein, 122 aa, Artificial Sequence; identical to SEQ ID NO: 10203
  Description of Artificial Sequence: Synthetic polypeptide
  VH of XENP019006

SEQ ID NO: 15867 - protein, 5 aa, Artificial Sequence
  Description of Artificial Sequence: Synthetic peptide
  XENP019006 vhCDR1
NYWMN

SEQ ID NO: 15868 - protein, 19 aa, Artificial Sequence
  Description of Artificial Sequence: Synthetic peptide
  XENP019006 vhCDR2
EIRLKSNNYATHYAEPVKG

SEQ ID NO: 15869 - protein, 11 aa, Artificial Sequence
  Description of Artificial Sequence: Synthetic peptide
  XENP019006 vhCDR3
YYGNYGGYFDV

SEQ ID NO: 15870 - protein, 214 aa, Artificial Sequence; identical to SEQ ID NO: 11550
  Description of Artificial Sequence: Synthetic polypeptide
  XENP019006 1G6_H1.261_L1_IgG1_PVA_/S267K Light Chain

SEQ ID NO: 15871 - protein, 107 aa, Artificial Sequence; identical to SEQ ID NO: 6247
  Description of Artificial Sequence: Synthetic polypeptide
  VL of XENP019006

SEQ ID NO: 15872 - protein, 11 aa, Artificial Sequence
  Description of Artificial Sequence: Synthetic peptide
  XENP019006 vlCDR1
RASQSVSNDVA

SEQ ID NO: 15873 - protein, 7 aa, Artificial Sequence
  Description of Artificial Sequence: Synthetic peptide
  XENP019006 vlCDR2
YASHRYT

SEQ ID NO: 15874 - protein, 9 aa, Artificial Sequence
  Description of Artificial Sequence: Synthetic peptide
  XENP019006 vlCDR3
QQDYSSPRT

SEQ ID NO: 15875 - protein, 451 aa, Artificial Sequence
  Description of Artificial Sequence: Synthetic polypeptide
  XENP019007 1G6_H1.262_L1_IgG1_PVA_/S267K Heavy Chain
EVQLVESGGGLVKPGESLRLSCAASGFTFSNYWMNWVRQAPGKGLEWVGEIRLKSNNYATHYAEPVKGRFTISRDDSKSTVYLQMNRLKTEDTAVYYCTRYYGNYGGYFDVWGAGTLVTVSSASTKGPSVFPLAPSSKSTSGGTAALGCLVKDYFPEPVTVSWNSGALTSGVHTFPAVLQSSGLYSLSSVVTVPSSSLGTQTYICNVNHKPSNTKVDKKVEPKSCDKTHTCPPCPAPPVAGPSVFLFPPKPKDTLMISRTPEVTCVVVDVKHEDPEVKFNWYVDGVEVHNAKTKPREEQYNSTYRVVSVLTVLHQDWLNGKEYKCKVSNKALPAPIEKTISKAKGQPREPQVYTLPPSREEMTKNQVSLTCLVKGFYPSDIAVEWESNGQPENNYKTTPPVLDSDGSFFLYSKLTVDKSRWQQGNVFSCSVMHEALHNHYTQKSLSLSPGK

SEQ ID NO: 15876 - protein, 122 aa, Artificial Sequence; identical to SEQ ID NO: 10212
  Description of Artificial Sequence: Synthetic polypeptide
  VH of XENP019007

SEQ ID NO: 15877 - protein, 5 aa, Artificial Sequence
  Description of Artificial Sequence: Synthetic peptide
  XENP019007 vhCDR1
NYWMN

SEQ ID NO: 15878 - protein, 19 aa, Artificial Sequence
  Description of Artificial Sequence: Synthetic peptide
  XENP019007 vhCDR2
EIRLKSNNYATHYAEPVKG

SEQ ID NO: 15879 - protein, 11 aa, Artificial Sequence
  Description of Artificial Sequence: Synthetic peptide
  XENP019007 vhCDR3
YYGNYGGYFDV

SEQ ID NO: 15880 - protein, 214 aa, Artificial Sequence; identical to SEQ ID NO: 11550
  Description of Artificial Sequence: Synthetic polypeptide
  XENP019007 1G6_H1.262_L1_IgG1_PVA_/S267K Light Chain

SEQ ID NO: 15881 - protein, 107 aa, Artificial Sequence; identical to SEQ ID NO: 6247
  Description of Artificial Sequence: Synthetic polypeptide
  VL of XENP019007

SEQ ID NO: 15882 - protein, 11 aa, Artificial Sequence
  Description of Artificial Sequence: Synthetic peptide
  XENP019007 vlCDR1
RASQSVSNDVA

SEQ ID NO: 15883 - protein, 7 aa, Artificial Sequence
  Description of Artificial Sequence: Synthetic peptide
  XENP019007 vlCDR2
YASHRYT

SEQ ID NO: 15884 - protein, 9 aa, Artificial Sequence
  Description of Artificial Sequence: Synthetic peptide
  XENP019007 vlCDR3
QQDYSSPRT

SEQ ID NO: 15885 - protein, 451 aa, Artificial Sequence
  Description of Artificial Sequence: Synthetic polypeptide
  XENP019008 1G6_H1.263_L1_IgG1_PVA_/S267K Heavy Chain
EVQLVESGGGLVKPGGSLRLSCAASGFTFSNYWMNWVRQAPGKGLEWVGEIRLKSNNYATHYAEKVKGLFTISRDDSKSTVYLQMNSLKTEDTAVYYCTRYYGNYGGYFDVWGAGTLVTVSSASTKGPSVFPLAPSSKSTSGGTAALGCLVKDYFPEPVTVSWNSGALTSGVHTFPAVLQSSGLYSLSSVVTVPSSSLGTQTYICNVNHKPSNTKVDKKVEPKSCDKTHTCPPCPAPPVAGPSVFLFPPKPKDTLMISRTPEVTCVVVDVKHEDPEVKFNWYVDGVEVHNAKTKPREEQYNSTYRVVSVLTVLHQDWLNGKEYKCKVSNKALPAPIEKTISKAKGQPREPQVYTLPPSREEMTKNQVSLTCLVKGFYPSDIAVEWESNGQPENNYKTTPPVLDSDGSFFLYSKLTVDKSRWQQGNVFSCSVMHEALHNHYTQKSLSLSPGK

SEQ ID NO: 15886 - protein, 122 aa, Artificial Sequence; identical to SEQ ID NO: 10221
  Description of Artificial Sequence: Synthetic polypeptide
  VH of XENP019008

SEQ ID NO: 15887 - protein, 5 aa, Artificial Sequence
  Description of Artificial Sequence: Synthetic peptide
  XENP019008 vhCDR1
NYWMN

SEQ ID NO: 15888 - protein, 19 aa, Artificial Sequence
  Description of Artificial Sequence: Synthetic peptide
  XENP019008 vhCDR2
EIRLKSNNYATHYAEKVKG

SEQ ID NO: 15889 - protein, 11 aa, Artificial Sequence
  Description of Artificial Sequence: Synthetic peptide
  XENP019008 vhCDR3
YYGNYGGYFDV

SEQ ID NO: 15890 - protein, 214 aa, Artificial Sequence; identical to SEQ ID NO: 11550
  Description of Artificial Sequence: Synthetic polypeptide
  XENP019008 1G6_H1.263_L1_IgG1_PVA_/S267K Light Chain

SEQ ID NO: 15891 - protein, 107 aa, Artificial Sequence; identical to SEQ ID NO: 6247
  Description of Artificial Sequence: Synthetic polypeptide
  VL of XENP019008

SEQ ID NO: 15892 - protein, 11 aa, Artificial Sequence
  Description of Artificial Sequence: Synthetic peptide
  XENP019008 vlCDR1
RASQSVSNDVA

SEQ ID NO: 15893 - protein, 7 aa, Artificial Sequence
  Description of Artificial Sequence: Synthetic peptide
  XENP019008 vlCDR2
YASHRYT

SEQ ID NO: 15894 - protein, 9 aa, Artificial Sequence
  Description of Artificial Sequence: Synthetic peptide
  XENP019008 vlCDR3
QQDYSSPRT

SEQ ID NO: 15895 - protein, 451 aa, Artificial Sequence
  Description of Artificial Sequence: Synthetic polypeptide
  XENP019009 1G6_H1.264_L1_IgG1_PVA_/S267K Heavy Chain
EVQLVESGGGLVKPGGSLRLSCKASGDTFSNYWMNWVRQAPGKGLEWVGEIRLKSNNYATHYAEPVKGRFTISRDDSKSTVYLQMNSLKTEDTAVYYCTRYYGNYGGYFDVWGAGTLVTVSSASTKGPSVFPLAPSSKSTSGGTAALGCLVKDYFPEPVTVSWNSGALTSGVHTFPAVLQSSGLYSLSSVVTVPSSSLGTQTYICNVNHKPSNTKVDKKVEPKSCDKTHTCPPCPAPPVAGPSVFLFPPKPKDTLMISRTPEVTCVVVDVKHEDPEVKFNWYVDGVEVHNAKTKPREEQYNSTYRVVSVLTVLHQDWLNGKEYKCKVSNKALPAPIEKTISKAKGQPREPQVYTLPPSREEMTKNQVSLTCLVKGFYPSDIAVEWESNGQPENNYKTTPPVLDSDGSFFLYSKLTVDKSRWQQGNVFSCSVMHEALHNHYTQKSLSLSPGK

SEQ ID NO: 15896 - protein, 122 aa, Artificial Sequence; identical to SEQ ID NO: 10230
  Description of Artificial Sequence: Synthetic polypeptide
  VH of XENP019009

SEQ ID NO: 15897 - protein, 5 aa, Artificial Sequence
  Description of Artificial Sequence: Synthetic peptide
  XENP019009 vhCDR1
NYWMN

SEQ ID NO: 15898 - protein, 19 aa, Artificial Sequence
  Description of Artificial Sequence: Synthetic peptide
  XENP019009 vhCDR2
EIRLKSNNYATHYAEPVKG

SEQ ID NO: 15899 - protein, 11 aa, Artificial Sequence
  Description of Artificial Sequence: Synthetic peptide
  XENP019009 vhCDR3
YYGNYGGYFDV

SEQ ID NO: 15900 - protein, 214 aa, Artificial Sequence; identical to SEQ ID NO: 11550
  Description of Artificial Sequence: Synthetic polypeptide
  XENP019009 1G6_H1.264_L1_IgG1_PVA_/S267K Light Chain

SEQ ID NO: 15901 - protein, 107 aa, Artificial Sequence; identical to SEQ ID NO: 6247
  Description of Artificial Sequence: Synthetic polypeptide
  VL of XENP019009

SEQ ID NO: 15902 - protein, 11 aa, Artificial Sequence
  Description of Artificial Sequence: Synthetic peptide
  XENP019009 vlCDR1
RASQSVSNDVA

SEQ ID NO: 15903 - protein, 7 aa, Artificial Sequence
  Description of Artificial Sequence: Synthetic peptide
  XENP019009 vlCDR2
YASHRYT

SEQ ID NO: 15904 - protein, 9 aa, Artificial Sequence
  Description of Artificial Sequence: Synthetic peptide
  XENP019009 vlCDR3
QQDYSSPRT

SEQ ID NO: 15905 - protein, 451 aa, Artificial Sequence
  Description of Artificial Sequence: Synthetic polypeptide
  XENP019010 1G6_H1.265_L1_IgG1_PVA_/S267K Heavy Chain
EVQLVESGGGLVKPGESLRLSCAASGFTFSNYWMNWVRQAPGKGLEWVGEIRLKSNNYATHYAEPVKGRFTISRDDSKSTVYLKMNSLKTEDTAVYYCTRYYGNYGGYFDVWGAGTLVTVSSASTKGPSVFPLAPSSKSTSGGTAALGCLVKDYFPEPVTVSWNSGALTSGVHTFPAVLQSSGLYSLSSVVTVPSSSLGTQTYICNVNHKPSNTKVDKKVEPKSCDKTHTCPPCPAPPVAGPSVFLFPPKPKDTLMISRTPEVTCVVVDVKHEDPEVKFNWYVDGVEVHNAKTKPREEQYNSTYRVVSVLTVLHQDWLNGKEYKCKVSNKALPAPIEKTISKAKGQPREPQVYTLPPSREEMTKNQVSLTCLVKGFYPSDIAVEWESNGQPENNYKTTPPVLDSDGSFFLYSKLTVDKSRWQQGNVFSCSVMHEALHNHYTQKSLSLSPGK

SEQ ID NO: 15906 - protein, 122 aa, Artificial Sequence; identical to SEQ ID NO: 10239
  Description of Artificial Sequence: Synthetic polypeptide
  VH of XENP019010

SEQ ID NO: 15907 - protein, 5 aa, Artificial Sequence
  Description of Artificial Sequence: Synthetic peptide
  XENP019010 vhCDR1
NYWMN

SEQ ID NO: 15908 - protein, 19 aa, Artificial Sequence
  Description of Artificial Sequence: Synthetic peptide
  XENP019010 vhCDR2
EIRLKSNNYATHYAEPVKG

SEQ ID NO: 15909 - protein, 11 aa, Artificial Sequence
  Description of Artificial Sequence: Synthetic peptide
  XENP019010 vhCDR3
YYGNYGGYFDV

SEQ ID NO: 15910 - protein, 214 aa, Artificial Sequence; identical to SEQ ID NO: 11550
  Description of Artificial Sequence: Synthetic polypeptide
  XENP019010 1G6_H1.265_L1_IgG1_PVA_/S267K Light Chain

SEQ ID NO: 15911 - protein, 107 aa, Artificial Sequence; identical to SEQ ID NO: 6247
  Description of Artificial Sequence: Synthetic polypeptide
  VL of XENP019010

SEQ ID NO: 15912 - protein, 11 aa, Artificial Sequence
  Description of Artificial Sequence: Synthetic peptide
  XENP019010 vlCDR1
RASQSVSNDVA

SEQ ID NO: 15913 - protein, 7 aa, Artificial Sequence
  Description of Artificial Sequence: Synthetic peptide
  XENP019010 vlCDR2
YASHRYT

SEQ ID NO: 15914 - protein, 9 aa, Artificial Sequence
  Description of Artificial Sequence: Synthetic peptide
  XENP019010 vlCDR3
QQDYSSPRT

SEQ ID NO: 15915 - protein, 451 aa, Artificial Sequence
  Description of Artificial Sequence: Synthetic polypeptide
  XENP019011 1G6_H1.266_L1_IgG1_PVA_/S267K Heavy Chain
EVQLVESGGGLVKPGGSLRLSCAASGFTFSNYWMNWVRQAPGKGLEWVGEIRLKSNNYATHYAQPVKDRFTISRDDSKSTVYLQMNSLKTEDTAVYYCTRYYGNYGGYFDVWGAGTLVTVSSASTKGPSVFPLAPSSKSTSGGTAALGCLVKDYFPEPVTVSWNSGALTSGVHTFPAVLQSSGLYSLSSVVTVPSSSLGTQTYICNVNHKPSNTKVDKKVEPKSCDKTHTCPPCPAPPVAGPSVFLFPPKPKDTLMISRTPEVTCVVVDVKHEDPEVKFNWYVDGVEVHNAKTKPREEQYNSTYRVVSVLTVLHQDWLNGKEYKCKVSNKALPAPIEKTISKAKGQPREPQVYTLPPSREEMTKNQVSLTCLVKGFYPSDIAVEWESNGQPENNYKTTPPVLDSDGSFFLYSKLTVDKSRWQQGNVFSCSVMHEALHNHYTQKSLSLSPGK

SEQ ID NO: 15916 - protein, 122 aa, Artificial Sequence; identical to SEQ ID NO: 10248
  Description of Artificial Sequence: Synthetic polypeptide
  VH of XENP019011

SEQ ID NO: 15917 - protein, 5 aa, Artificial Sequence
  Description of Artificial Sequence: Synthetic peptide
  XENP019011 vhCDR1
NYWMN

SEQ ID NO: 15918 - protein, 19 aa, Artificial Sequence
  Description of Artificial Sequence: Synthetic peptide
  XENP019011 vhCDR2
EIRLKSNNYATHYAQPVKD

SEQ ID NO: 15919 - protein, 11 aa, Artificial Sequence
  Description of Artificial Sequence: Synthetic peptide
  XENP019011 vhCDR3
YYGNYGGYFDV

SEQ ID NO: 15920 - protein, 214 aa, Artificial Sequence; identical to SEQ ID NO: 11550
  Description of Artificial Sequence: Synthetic polypeptide
  XENP019011 1G6_H1.266_L1_IgG1_PVA_/S267K Light Chain

SEQ ID NO: 15921 - protein, 107 aa, Artificial Sequence; identical to SEQ ID NO: 6247
  Description of Artificial Sequence: Synthetic polypeptide
  VL of XENP019011

SEQ ID NO: 15922 - protein, 11 aa, Artificial Sequence
  Description of Artificial Sequence: Synthetic peptide
  XENP019011 vlCDR1
RASQSVSNDVA

SEQ ID NO: 15923 - protein, 7 aa, Artificial Sequence
  Description of Artificial Sequence: Synthetic peptide
  XENP019011 vlCDR2
YASHRYT

SEQ ID NO: 15924 - protein, 9 aa, Artificial Sequence
  Description of Artificial Sequence: Synthetic peptide
  XENP019011 vlCDR3
QQDYSSPRT

SEQ ID NO: 15925 - protein, 451 aa, Artificial Sequence
  Description of Artificial Sequence: Synthetic polypeptide
  XENP019012 1G6_H1.267_L1_IgG1_PVA_/S267K Heavy Chain
EVQLVESGGGLVKPGGSLRLSCAASGFTFSNYWMNWVRQAPGKGLEWVGEIRLKSNNYATHYAEPVKGRFTISRDDSKSTVYLEMNSRKTEDTAVYYCTRYYGNYGGYFDVWGAGTLVTVSSASTKGPSVFPLAPSSKSTSGGTAALGCLVKDYFPEPVTVSWNSGALTSGVHTFPAVLQSSGLYSLSSVVTVPSSSLGTQTYICNVNHKPSNTKVDKKVEPKSCDKTHTCPPCPAPPVAGPSVFLFPPKPKDTLMISRTPEVTCVVVDVKHEDPEVKFNWYVDGVEVHNAKTKPREEQYNSTYRVVSVLTVLHQDWLNGKEYKCKVSNKALPAPIEKTISKAKGQPREPQVYTLPPSREEMTKNQVSLTCLVKGFYPSDIAVEWESNGQPENNYKTTPPVLDSDGSFFLYSKLTVDKSRWQQGNVFSCSVMHEALHNHYTQKSLSLSPGK

SEQ ID NO: 15926 - protein, 122 aa, Artificial Sequence; identical to SEQ ID NO: 10257
  Description of Artificial Sequence: Synthetic polypeptide
  VH of XENP019012

SEQ ID NO: 15927 - protein, 5 aa, Artificial Sequence
  Description of Artificial Sequence: Synthetic peptide
  XENP019012 vhCDR1
NYWMN

SEQ ID NO: 15928 - protein, 19 aa, Artificial Sequence
  Description of Artificial Sequence: Synthetic peptide
  XENP019012 vhCDR2
EIRLKSNNYATHYAEPVKG

SEQ ID NO: 15929 - protein, 11 aa, Artificial Sequence
  Description of Artificial Sequence: Synthetic peptide
  XENP019012 vhCDR3
YYGNYGGYFDV

SEQ ID NO: 15930 - protein, 214 aa, Artificial Sequence; identical to SEQ ID NO: 11550
  Description of Artificial Sequence: Synthetic polypeptide
  XENP019012 1G6_H1.267_L1_IgG1_PVA_/S267K Light Chain

SEQ ID NO: 15931 - protein, 107 aa, Artificial Sequence; identical to SEQ ID NO: 6247
  Description of Artificial Sequence: Synthetic polypeptide
  VL of XENP019012

SEQ ID NO: 15932 - protein, 11 aa, Artificial Sequence
  Description of Artificial Sequence: Synthetic peptide
  XENP019012 vlCDR1
RASQSVSNDVA

SEQ ID NO: 15933 - protein, 7 aa, Artificial Sequence
  Description of Artificial Sequence: Synthetic peptide
  XENP019012 vlCDR2
YASHRYT

SEQ ID NO: 15934 - protein, 9 aa, Artificial Sequence
  Description of Artificial Sequence: Synthetic peptide
  XENP019012 vlCDR3
QQDYSSPRT

SEQ ID NO: 15935 - protein, 451 aa, Artificial Sequence
  Description of Artificial Sequence: Synthetic polypeptide
  XENP019013 1G6_H1.268_L1_IgG1_PVA_/S267K Heavy Chain
EVQLVESGGGLVKPGESLRLSCAASGFTFSNYWMNWVRQAPGKGLEWVGEIRLKSNNYATHYAEPVKGRFTISRDDSKSTVYLQMRSLKTEDTAVYYCTRYYGNYGGYFDVWGAGTLVTVSSASTKGPSVFPLAPSSKSTSGGTAALGCLVKDYFPEPVTVSWNSGALTSGVHTFPAVLQSSGLYSLSSVVTVPSSSLGTQTYICNVNHKPSNTKVDKKVEPKSCDKTHTCPPCPAPPVAGPSVFLFPPKPKDTLMISRTPEVTCVVVDVKHEDPEVKFNWYVDGVEVHNAKTKPREEQYNSTYRVVSVLTVLHQDWLNGKEYKCKVSNKALPAPIEKTISKAKGQPREPQVYTLPPSREEMTKNQVSLTCLVKGFYPSDIAVEWESNGQPENNYKTTPPVLDSDGSFFLYSKLTVDKSRWQQGNVFSCSVMHEALHNHYTQKSLSLSPGK

SEQ ID NO: 15936 - protein, 122 aa, Artificial Sequence; identical to SEQ ID NO: 10266
  Description of Artificial Sequence: Synthetic polypeptide
  VH of XENP019013

SEQ ID NO: 15937 - protein, 5 aa, Artificial Sequence
  Description of Artificial Sequence: Synthetic peptide
  XENP019013 vhCDR1
NYWMN

SEQ ID NO: 15938 - protein, 19 aa, Artificial Sequence
  Description of Artificial Sequence: Synthetic peptide
  XENP019013 vhCDR2
EIRLKSNNYATHYAEPVKG

SEQ ID NO: 15939 - protein, 11 aa, Artificial Sequence
  Description of Artificial Sequence: Synthetic peptide
  XENP019013 vhCDR3
YYGNYGGYFDV

SEQ ID NO: 15940 - protein, 214 aa, Artificial Sequence; identical to SEQ ID NO: 11550
  Description of Artificial Sequence: Synthetic polypeptide
  XENP019013 1G6_H1.268_L1_IgG1_PVA_/S267K Light Chain

SEQ ID NO: 15941 - protein, 107 aa, Artificial Sequence; identical to SEQ ID NO: 6247
  Description of Artificial Sequence: Synthetic polypeptide
  VL of XENP019013

SEQ ID NO: 15942 - protein, 11 aa, Artificial Sequence
  Description of Artificial Sequence: Synthetic peptide
  XENP019013 vlCDR1
RASQSVSNDVA

SEQ ID NO: 15943 - protein, 7 aa, Artificial Sequence
  Description of Artificial Sequence: Synthetic peptide
  XENP019013 vlCDR2
YASHRYT

SEQ ID NO: 15944 - protein, 9 aa, Artificial Sequence
  Description of Artificial Sequence: Synthetic peptide
  XENP019013 vlCDR3
QQDYSSPRT

SEQ ID NO: 15945 - protein, 451 aa, Artificial Sequence
  Description of Artificial Sequence: Synthetic polypeptide
  XENP019014 1G6_H1.269_L1_IgG1_PVA_/S267K Heavy Chain
EVQLVESGGGLVKPGGSLRLSCAASGFTFSNFWMNWVRQAPGKGLEWVGEIRLYSNNYATHYAEPVKGRFTISRDDSKSTVYLQMNSLKTEDTAVYYCTRYYGNYGGYFDVWGAGTLVTVSSASTKGPSVFPLAPSSKSTSGGTAALGCLVKDYFPEPVTVSWNSGALTSGVHTFPAVLQSSGLYSLSSVVTVPSSSLGTQTYICNVNHKPSNTKVDKKVEPKSCDKTHTCPPCPAPPVAGPSVFLFPPKPKDTLMISRTPEVTCVVVDVKHEDPEVKFNWYVDGVEVHNAKTKPREEQYNSTYRVVSVLTVLHQDWLNGKEYKCKVSNKALPAPIEKTISKAKGQPREPQVYTLPPSREEMTKNQVSLTCLVKGFYPSDIAVEWESNGQPENNYKTTPPVLDSDGSFFLYSKLTVDKSRWQQGNVFSCSVMHEALHNHYTQKSLSLSPGK

SEQ ID NO: 15946 - protein, 122 aa, Artificial Sequence; identical to SEQ ID NO: 10275
  Description of Artificial Sequence: Synthetic polypeptide
  VH of XENP019014

SEQ ID NO: 15947 - protein, 5 aa, Artificial Sequence
  Description of Artificial Sequence: Synthetic peptide
  XENP019014 vhCDR1
NFWMN

SEQ ID NO: 15948 - protein, 19 aa, Artificial Sequence
  Description of Artificial Sequence: Synthetic peptide
  XENP019014 vhCDR2
EIRLYSNNYATHYAEPVKG

SEQ ID NO: 15949 - protein, 11 aa, Artificial Sequence
  Description of Artificial Sequence: Synthetic peptide
  XENP019014 vhCDR3
YYGNYGGYFDV

SEQ ID NO: 15950 - protein, 214 aa, Artificial Sequence; identical to SEQ ID NO: 11550
  Description of Artificial Sequence: Synthetic polypeptide
  XENP019014 1G6_H1.269_L1_IgG1_PVA_/S267K Light Chain

SEQ ID NO: 15951 - protein, 107 aa, Artificial Sequence; identical to SEQ ID NO: 6247
  Description of Artificial Sequence: Synthetic polypeptide
  VL of XENP019014

SEQ ID NO: 15952 - protein, 11 aa, Artificial Sequence
  Description of Artificial Sequence: Synthetic peptide
  XENP019014 vlCDR1
RASQSVSNDVA

SEQ ID NO: 15953 - protein, 7 aa, Artificial Sequence
  Description of Artificial Sequence: Synthetic peptide
  XENP019014 vlCDR2
YASHRYT

SEQ ID NO: 15954 - protein, 9 aa, Artificial Sequence
  Description of Artificial Sequence: Synthetic peptide
  XENP019014 vlCDR3
QQDYSSPRT

SEQ ID NO: 15955 - protein, 451 aa, Artificial Sequence
  Description of Artificial Sequence: Synthetic polypeptide
  XENP019015 1G6_H1.270_L1_IgG1_PVA_/S267K Heavy Chain
EVQLVESGGGLVKPGGSLRLSCAASGFTFSNYWMNWVRQAPGKGLEWVGEIRWYSNNYATHYAEPVKGRFTISRDDSKSTVYLQMNSLKTEDTAVYYCTRYYGNYGGYFDVWGAGTLVTVSSASTKGPSVFPLAPSSKSTSGGTAALGCLVKDYFPEPVTVSWNSGALTSGVHTFPAVLQSSGLYSLSSVVTVPSSSLGTQTYICNVNHKPSNTKVDKKVEPKSCDKTHTCPPCPAPPVAGPSVFLFPPKPKDTLMISRTPEVTCVVVDVKHEDPEVKFNWYVDGVEVHNAKTKPREEQYNSTYRVVSVLTVLHQDWLNGKEYKCKVSNKALPAPIEKTISKAKGQPREPQVYTLPPSREEMTKNQVSLTCLVKGFYPSDIAVEWESNGQPENNYKTTPPVLDSDGSFFLYSKLTVDKSRWQQGNVFSCSVMHEALHNHYTQKSLSLSPGK

SEQ ID NO: 15956 - protein, 122 aa, Artificial Sequence; identical to SEQ ID NO: 10284
  Description of Artificial Sequence: Synthetic polypeptide
  VH of XENP019015

SEQ ID NO: 15957 - protein, 5 aa, Artificial Sequence
  Description of Artificial Sequence: Synthetic peptide
  XENP019015 vhCDR1
NYWMN

SEQ ID NO: 15958 - protein, 19 aa, Artificial Sequence
  Description of Artificial Sequence: Synthetic peptide
  XENP019015 vhCDR2
EIRWYSNNYATHYAEPVKG

SEQ ID NO: 15959 - protein, 11 aa, Artificial Sequence
  Description of Artificial Sequence: Synthetic peptide
  XENP019015 vhCDR3
YYGNYGGYFDV

SEQ ID NO: 15960 - protein, 214 aa, Artificial Sequence; identical to SEQ ID NO: 11550
  Description of Artificial Sequence: Synthetic polypeptide
  XENP019015 1G6_H1.270_L1_IgG1_PVA_/S267K Light Chain

SEQ ID NO: 15961 - protein, 107 aa, Artificial Sequence; identical to SEQ ID NO: 6247
  Description of Artificial Sequence: Synthetic polypeptide
  VL of XENP019015

SEQ ID NO: 15962 - protein, 11 aa, Artificial Sequence
  Description of Artificial Sequence: Synthetic peptide
  XENP019015 vlCDR1
RASQSVSNDVA

SEQ ID NO: 15963 - protein, 7 aa, Artificial Sequence
  Description of Artificial Sequence: Synthetic peptide
  XENP019015 vlCDR2
YASHRYT

SEQ ID NO: 15964 - protein, 9 aa, Artificial Sequence
  Description of Artificial Sequence: Synthetic peptide
  XENP019015 vlCDR3
QQDYSSPRT

SEQ ID NO: 15965 - protein, 451 aa, Artificial Sequence
  Description of Artificial Sequence: Synthetic polypeptide
  XENP019016 1G6_H1.271_L1_IgG1_PVA_/S267K Heavy Chain
EVQLVESGGGLVKPGGSLRLSCAASGFTFSNYWMNWVRQAPGKGLEWVGEIRLYSNNYATHYAEPVKGRFTISRDDSKSTLYLQMNSLKTEDTAVYYCTRYYGNYGGYFDVWGAGTLVTVSSASTKGPSVFPLAPSSKSTSGGTAALGCLVKDYFPEPVTVSWNSGALTSGVHTFPAVLQSSGLYSLSSVVTVPSSSLGTQTYICNVNHKPSNTKVDKKVEPKSCDKTHTCPPCPAPPVAGPSVFLFPPKPKDTLMISRTPEVTCVVVDVKHEDPEVKFNWYVDGVEVHNAKTKPREEQYNSTYRVVSVLTVLHQDWLNGKEYKCKVSNKALPAPIEKTISKAKGQPREPQVYTLPPSREEMTKNQVSLTCLVKGFYPSDIAVEWESNGQPENNYKTTPPVLDSDGSFFLYSKLTVDKSRWQQGNVFSCSVMHEALHNHYTQKSLSLSPGK

SEQ ID NO: 15966 - protein, 122 aa, Artificial Sequence; identical to SEQ ID NO: 10293
  Description of Artificial Sequence: Synthetic polypeptide
  VH of XENP019016

SEQ ID NO: 15967 - protein, 5 aa, Artificial Sequence
  Description of Artificial Sequence: Synthetic peptide
  XENP019016 vhCDR1
NYWMN

SEQ ID NO: 15968 - protein, 19 aa, Artificial Sequence
  Description of Artificial Sequence: Synthetic peptide
  XENP019016 vhCDR2
EIRLYSNNYATHYAEPVKG

SEQ ID NO: 15969 - protein, 11 aa, Artificial Sequence
  Description of Artificial Sequence: Synthetic peptide
  XENP019016 vhCDR3
YYGNYGGYFDV

SEQ ID NO: 15970 - protein, 214 aa, Artificial Sequence; identical to SEQ ID NO: 11550
  Description of Artificial Sequence: Synthetic polypeptide
  XENP019016 1G6_H1.271_L1_IgG1_PVA_/S267K Light Chain

SEQ ID NO: 15971 - protein, 107 aa, Artificial Sequence; identical to SEQ ID NO: 6247
  Description of Artificial Sequence: Synthetic polypeptide
  VL of XENP019016

SEQ ID NO: 15972 - protein, 11 aa, Artificial Sequence
  Description of Artificial Sequence: Synthetic peptide
  XENP019016 vlCDR1
RASQSVSNDVA

SEQ ID NO: 15973 - protein, 7 aa, Artificial Sequence
  Description of Artificial Sequence: Synthetic peptide
  XENP019016 vlCDR2
YASHRYT

SEQ ID NO: 15974 - protein, 9 aa, Artificial Sequence
  Description of Artificial Sequence: Synthetic peptide
  XENP019016 vlCDR3
QQDYSSPRT

SEQ ID NO: 15975 - protein, 451 aa, Artificial Sequence
  Description of Artificial Sequence: Synthetic polypeptide
  XENP019017 1G6_H1.272_L1_IgG1_PVA_/S267K Heavy Chain
EVQLVESGGGLVKPGGSLRLSCAASGFTFSNFWMNWVRQAPGKGLEWVGEIRLYSNNYATHYAEPVKGRFTISRDDSKSTLYLQMNSLKTEDTAVYYCTRYYGNYGGYFDVWGAGTLVTVSSASTKGPSVFPLAPSSKSTSGGTAALGCLVKDYFPEPVTVSWNSGALTSGVHTFPAVLQSSGLYSLSSVVTVPSSSLGTQTYICNVNHKPSNTKVDKKVEPKSCDKTHTCPPCPAPPVAGPSVFLFPPKPKDTLMISRTPEVTCVVVDVKHEDPEVKFNWYVDGVEVHNAKTKPREEQYNSTYRVVSVLTVLHQDWLNGKEYKCKVSNKALPAPIEKTISKAKGQPREPQVYTLPPSREEMTKNQVSLTCLVKGFYPSDIAVEWESNGQPENNYKTTPPVLDSDGSFFLYSKLTVDKSRWQQGNVFSCSVMHEALHNHYTQKSLSLSPGK

SEQ ID NO: 15976 - protein, 122 aa, Artificial Sequence; identical to SEQ ID NO: 10302
  Description of Artificial Sequence: Synthetic polypeptide
  VH of XENP019017

SEQ ID NO: 15977 - protein, 5 aa, Artificial Sequence
  Description of Artificial Sequence: Synthetic peptide
  XENP019017 vhCDR1
NFWMN

SEQ ID NO: 15978 - protein, 19 aa, Artificial Sequence
  Description of Artificial Sequence: Synthetic peptide
  XENP019017 vhCDR2
EIRLYSNNYATHYAEPVKG

SEQ ID NO: 15979 - protein, 11 aa, Artificial Sequence
  Description of Artificial Sequence: Synthetic peptide
  XENP019017 vhCDR3
YYGNYGGYFDV

SEQ ID NO: 15980 - protein, 214 aa, Artificial Sequence; identical to SEQ ID NO: 11550
  Description of Artificial Sequence: Synthetic polypeptide
  XENP019017 1G6_H1.272_L1_IgG1_PVA_/S267K Light Chain

SEQ ID NO: 15981 - protein, 107 aa, Artificial Sequence; identical to SEQ ID NO: 6247
  Description of Artificial Sequence: Synthetic polypeptide
  VL of XENP019017

SEQ ID NO: 15982 - protein, 11 aa, Artificial Sequence
  Description of Artificial Sequence: Synthetic peptide
  XENP019017 vlCDR1
RASQSVSNDVA

SEQ ID NO: 15983 - protein, 7 aa, Artificial Sequence
  Description of Artificial Sequence: Synthetic peptide
  XENP019017 vlCDR2
YASHRYT

SEQ ID NO: 15984 - protein, 9 aa, Artificial Sequence
  Description of Artificial Sequence: Synthetic peptide
  XENP019017 vlCDR3
QQDYSSPRT

SEQ ID NO: 15985 - protein, 451 aa, Artificial Sequence
  Description of Artificial Sequence: Synthetic polypeptide
  XENP019018 1G6_H1.273_L1_IgG1_PVA_/S267K Heavy Chain
EVQLVESGGGLVKPGGSLRLSCAASGFTFSNFWMNWVRQAPGKGLEWVGEIRWKSNNYATHYAEPVKGRFTISRDDSKSTLYLQMNSLKTEDTAVYYCTRYYGNYGGYFDVWGAGTLVTVSSASTKGPSVFPLAPSSKSTSGGTAALGCLVKDYFPEPVTVSWNSGALTSGVHTFPAVLQSSGLYSLSSVVTVPSSSLGTQTYICNVNHKPSNTKVDKKVEPKSCDKTHTCPPCPAPPVAGPSVFLFPPKPKDTLMISRTPEVTCVVVDVKHEDPEVKFNWYVDGVEVHNAKTKPREEQYNSTYRVVSVLTVLHQDWLNGKEYKCKVSNKALPAPIEKTISKAKGQPREPQVYTLPPSREEMTKNQVSLTCLVKGFYPSDIAVEWESNGQPENNYKTTPPVLDSDGSFFLYSKLTVDKSRWQQGNVFSCSVMHEALHNHYTQKSLSLSPGK

SEQ ID NO: 15986 - protein, 122 aa, Artificial Sequence; identical to SEQ ID NO: 10311
  Description of Artificial Sequence: Synthetic polypeptide
  VH of XENP019018

SEQ ID NO: 15987 - protein, 5 aa, Artificial Sequence
  Description of Artificial Sequence: Synthetic peptide
  XENP019018 vhCDR1
NFWMN

SEQ ID NO: 15988 - protein, 19 aa, Artificial Sequence
  Description of Artificial Sequence: Synthetic peptide
  XENP019018 vhCDR2
EIRWKSNNYATHYAEPVKG

SEQ ID NO: 15989 - protein, 11 aa, Artificial Sequence
  Description of Artificial Sequence: Synthetic peptide
  XENP019018 vhCDR3
YYGNYGGYFDV

SEQ ID NO: 15990 - protein, 214 aa, Artificial Sequence; identical to SEQ ID NO: 11550
  Description of Artificial Sequence: Synthetic polypeptide
  XENP019018 1G6_H1.273_L1_IgG1_PVA_/S267K Light Chain

SEQ ID NO: 15991 - protein, 107 aa, Artificial Sequence; identical to SEQ ID NO: 6247
  Description of Artificial Sequence: Synthetic polypeptide
  VL of XENP019018

SEQ ID NO: 15992 - protein, 11 aa, Artificial Sequence
  Description of Artificial Sequence: Synthetic peptide
  XENP019018 vlCDR1
RASQSVSNDVA

SEQ ID NO: 15993 - protein, 7 aa, Artificial Sequence
  Description of Artificial Sequence: Synthetic peptide
  XENP019018 vlCDR2
YASHRYT

SEQ ID NO: 15994 - protein, 9 aa, Artificial Sequence
  Description of Artificial Sequence: Synthetic peptide
  XENP019018 vlCDR3
QQDYSSPRT

SEQ ID NO: 15995 - protein, 451 aa, Artificial Sequence
  Description of Artificial Sequence: Synthetic polypeptide
  XENP019019 1G6_H1.274_L1_IgG1_PVA_/S267K Heavy Chain
EVQLVESGGGLVKPGGSLRLSCAASGFTFSNFWMNWVRQAPGKGLEWVGEIRLKKNNYATHYAEPVKGRFTISRDDSKSTLYLQMNSLKTEDTAVYYCTRYYGNYGGYFDVWGAGTLVTVSSASTKGPSVFPLAPSSKSTSGGTAALGCLVKDYFPEPVTVSWNSGALTSGVHTFPAVLQSSGLYSLSSVVTVPSSSLGTQTYICNVNHKPSNTKVDKKVEPKSCDKTHTCPPCPAPPVAGPSVFLFPPKPKDTLMISRTPEVTCVVVDVKHEDPEVKFNWYVDGVEVHNAKTKPREEQYNSTYRVVSVLTVLHQDWLNGKEYKCKVSNKALPAPIEKTISKAKGQPREPQVYTLPPSREEMTKNQVSLTCLVKGFYPSDIAVEWESNGQPENNYKTTPPVLDSDGSFFLYSKLTVDKSRWQQGNVFSCSVMHEALHNHYTQKSLSLSPGK

SEQ ID NO: 15996 - protein, 122 aa, Artificial Sequence; identical to SEQ ID NO: 10320
  Description of Artificial Sequence: Synthetic polypeptide
  VH of XENP019019

SEQ ID NO: 15997 - protein, 5 aa, Artificial Sequence
  Description of Artificial Sequence: Synthetic peptide
  XENP019019 vhCDR1
NFWMN

SEQ ID NO: 15998 - protein, 19 aa, Artificial Sequence
  Description of Artificial Sequence: Synthetic peptide
  XENP019019 vhCDR2
EIRLKKNNYATHYAEPVKG

SEQ ID NO: 15999 - protein, 11 aa, Artificial Sequence
  Description of Artificial Sequence: Synthetic peptide
  XENP019019 vhCDR3
YYGNYGGYFDV

SEQ ID NO: 16000 - protein, 214 aa, Artificial Sequence; identical to SEQ ID NO: 11550
  Description of Artificial Sequence: Synthetic polypeptide
  XENP019019 1G6_H1.274_L1_IgG1_PVA_/S267K Light Chain

SEQ ID NO: 16001 - protein, 107 aa, Artificial Sequence; identical to SEQ ID NO: 6247
  Description of Artificial Sequence: Synthetic polypeptide
  VL of XENP019019

SEQ ID NO: 16002 - protein, 11 aa, Artificial Sequence
  Description of Artificial Sequence: Synthetic peptide
  XENP019019 vlCDR1
RASQSVSNDVA

SEQ ID NO: 16003 - protein, 7 aa, Artificial Sequence
  Description of Artificial Sequence: Synthetic peptide
  XENP019019 vlCDR2
YASHRYT

SEQ ID NO: 16004 - protein, 9 aa, Artificial Sequence
  Description of Artificial Sequence: Synthetic peptide
  XENP019019 vlCDR3
QQDYSSPRT

SEQ ID NO: 16005 - protein, 451 aa, Artificial Sequence
  Description of Artificial Sequence: Synthetic polypeptide
  XENP019020 1G6_H1.275_L1_IgG1_PVA_/S267K Heavy Chain
EVQLVESGGGLVKPGGSLRLSCAASGFTFSNFWMNWVRQAPGKGLEWVGEIRWYSNNYATHYAEPVKGRFTISRDDSKSTLYLQMNSLKTEDTAVYYCTRYYGNYGGYFDVWGAGTLVTVSSASTKGPSVFPLAPSSKSTSGGTAALGCLVKDYFPEPVTVSWNSGALTSGVHTFPAVLQSSGLYSLSSVVTVPSSSLGTQTYICNVNHKPSNTKVDKKVEPKSCDKTHTCPPCPAPPVAGPSVFLFPPKPKDTLMISRTPEVTCVVVDVKHEDPEVKFNWYVDGVEVHNAKTKPREEQYNSTYRVVSVLTVLHQDWLNGKEYKCKVSNKALPAPIEKTISKAKGQPREPQVYTLPPSREEMTKNQVSLTCLVKGFYPSDIAVEWESNGQPENNYKTTPPVLDSDGSFFLYSKLTVDKSRWQQGNVFSCSVMHEALHNHYTQKSLSLSPGK

SEQ ID NO: 16006 - protein, 122 aa, Artificial Sequence; identical to SEQ ID NO: 10329
  Description of Artificial Sequence: Synthetic polypeptide
  VH of XENP019020

SEQ ID NO: 16007 - protein, 5 aa, Artificial Sequence
  Description of Artificial Sequence: Synthetic peptide
  XENP019020 vhCDR1
NFWMN

SEQ ID NO: 16008 - protein, 19 aa, Artificial Sequence
  Description of Artificial Sequence: Synthetic peptide
  XENP019020 vhCDR2
EIRWYSNNYATHYAEPVKG

SEQ ID NO: 16009 - protein, 11 aa, Artificial Sequence
  Description of Artificial Sequence: Synthetic peptide
  XENP019020 vhCDR3
YYGNYGGYFDV

SEQ ID NO: 16010 - protein, 214 aa, Artificial Sequence; identical to SEQ ID NO: 11550
  Description of Artificial Sequence: Synthetic polypeptide
  XENP019020 1G6_H1.275_L1_IgG1_PVA_/S267K Light Chain

SEQ ID NO: 16011 - protein, 107 aa, Artificial Sequence; identical to SEQ ID NO: 6247
  Description of Artificial Sequence: Synthetic polypeptide
  VL of XENP019020

SEQ ID NO: 16012 - protein, 11 aa, Artificial Sequence
  Description of Artificial Sequence: Synthetic peptide
  XENP019020 vlCDR1
RASQSVSNDVA

SEQ ID NO: 16013 - protein, 7 aa, Artificial Sequence
  Description of Artificial Sequence: Synthetic peptide
  XENP019020 vlCDR2
YASHRYT

SEQ ID NO: 16014 - protein, 9 aa, Artificial Sequence
  Description of Artificial Sequence: Synthetic peptide
  XENP019020 vlCDR3
QQDYSSPRT

SEQ ID NO: 16015 - protein, 451 aa, Artificial Sequence
  Description of Artificial Sequence: Synthetic polypeptide
  XENP019021 1G6_H1.276_L1_IgG1_PVA_/S267K Heavy Chain
EVQLVESGGGLVQPGGSLKLSCAASGFTFSNYWMNWVRQAPGKGLEWVGEIRLKSNNYATHYAASVKGRFTISRDDSKSTLYLQMNSLKTEDTAVYYCTRYYGNYGGYFDVWGQGTLVTVSSASTKGPSVFPLAPSSKSTSGGTAALGCLVKDYFPEPVTVSWNSGALTSGVHTFPAVLQSSGLYSLSSVVTVPSSSLGTQTYICNVNHKPSNTKVDKKVEPKSCDKTHTCPPCPAPPVAGPSVFLFPPKPKDTLMISRTPEVTCVVVDVKHEDPEVKFNWYVDGVEVHNAKTKPREEQYNSTYRVVSVLTVLHQDWLNGKEYKCKVSNKALPAPIEKTISKAKGQPREPQVYTLPPSREEMTKNQVSLTCLVKGFYPSDIAVEWESNGQPENNYKTTPPVLDSDGSFFLYSKLTVDKSRWQQGNVFSCSVMHEALHNHYTQKSLSLSPGK

SEQ ID NO: 16016 - protein, 122 aa, Artificial Sequence; identical to SEQ ID NO: 10338
  Description of Artificial Sequence: Synthetic polypeptide
  VH of XENP019021

SEQ ID NO: 16017 - protein, 5 aa, Artificial Sequence
  Description of Artificial Sequence: Synthetic peptide
  XENP019021 vhCDR1
NYWMN

SEQ ID NO: 16018 - protein, 19 aa, Artificial Sequence
  Description of Artificial Sequence: Synthetic peptide
  XENP019021 vhCDR2
EIRLKSNNYATHYAASVKG

SEQ ID NO: 16019 - protein, 11 aa, Artificial Sequence
  Description of Artificial Sequence: Synthetic peptide
  XENP019021 vhCDR3
YYGNYGGYFDV

SEQ ID NO: 16020 - protein, 214 aa, Artificial Sequence; identical to SEQ ID NO: 11550
  Description of Artificial Sequence: Synthetic polypeptide
  XENP019021 1G6_H1.276_L1_IgG1_PVA_/S267K Light Chain

SEQ ID NO: 16021 - protein, 107 aa, Artificial Sequence; identical to SEQ ID NO: 6247
  Description of Artificial Sequence: Synthetic polypeptide
  VL of XENP019021

SEQ ID NO: 16022 - protein, 11 aa, Artificial Sequence
  Description of Artificial Sequence: Synthetic peptide
  XENP019021 vlCDR1
RASQSVSNDVA

SEQ ID NO: 16023 - protein, 7 aa, Artificial Sequence
  Description of Artificial Sequence: Synthetic peptide
  XENP019021 vlCDR2
YASHRYT

SEQ ID NO: 16024 - protein, 9 aa, Artificial Sequence
  Description of Artificial Sequence: Synthetic peptide
  XENP019021 vlCDR3
QQDYSSPRT

SEQ ID NO: 16025 - protein, 451 aa, Artificial Sequence
  Description of Artificial Sequence: Synthetic polypeptide
  XENP019022 1G6_H1.277_L1_IgG1_PVA_/S267K Heavy Chain
EVQLVESGGGLVKPGGSLKLSCAASGFTFSNYWMNWVRQAPGKGLEWVGEIRLKSNNYATHYADSVKGRFTISRDDSKSTLYLQMNSLKTEDTAVYYCTRYYGNYGGYFDVWGQGTLVTVSSASTKGPSVFPLAPSSKSTSGGTAALGCLVKDYFPEPVTVSWNSGALTSGVHTFPAVLQSSGLYSLSSVVTVPSSSLGTQTYICNVNHKPSNTKVDKKVEPKSCDKTHTCPPCPAPPVAGPSVFLFPPKPKDTLMISRTPEVTCVVVDVKHEDPEVKFNWYVDGVEVHNAKTKPREEQYNSTYRVVSVLTVLHQDWLNGKEYKCKVSNKALPAPIEKTISKAKGQPREPQVYTLPPSREEMTKNQVSLTCLVKGFYPSDIAVEWESNGQPENNYKTTPPVLDSDGSFFLYSKLTVDKSRWQQGNVFSCSVMHEALHNHYTQKSLSLSPGK

SEQ ID NO: 16026 - protein, 122 aa, Artificial Sequence; identical to SEQ ID NO: 10347
  Description of Artificial Sequence: Synthetic polypeptide
  VH of XENP019022

SEQ ID NO: 16027 - protein, 5 aa, Artificial Sequence
  Description of Artificial Sequence: Synthetic peptide
  XENP019022 vhCDR1
NYWMN

SEQ ID NO: 16028 - protein, 19 aa, Artificial Sequence
  Description of Artificial Sequence: Synthetic peptide
  XENP019022 vhCDR2
EIRLKSNNYATHYADSVKG

SEQ ID NO: 16029 - protein, 11 aa, Artificial Sequence
  Description of Artificial Sequence: Synthetic peptide
  XENP019022 vhCDR3
YYGNYGGYFDV

SEQ ID NO: 16030 - protein, 214 aa, Artificial Sequence; identical to SEQ ID NO: 11550
  Description of Artificial Sequence: Synthetic polypeptide
  XENP019022 1G6_H1.277_L1_IgG1_PVA_/S267K Light Chain

SEQ ID NO: 16031 - protein, 107 aa, Artificial Sequence; identical to SEQ ID NO: 6247
  Description of Artificial Sequence: Synthetic polypeptide
  VL of XENP019022

SEQ ID NO: 16032 - protein, 11 aa, Artificial Sequence
  Description of Artificial Sequence: Synthetic peptide
  XENP019022 vlCDR1
RASQSVSNDVA

SEQ ID NO: 16033 - protein, 7 aa, Artificial Sequence
  Description of Artificial Sequence: Synthetic peptide
  XENP019022 vlCDR2
YASHRYT

SEQ ID NO: 16034 - protein, 9 aa, Artificial Sequence
  Description of Artificial Sequence: Synthetic peptide
  XENP019022 vlCDR3
QQDYSSPRT

SEQ ID NO: 16035 - protein, 451 aa, Artificial Sequence; identical to SEQ ID NO: 11545
  Description of Artificial Sequence: Synthetic polypeptide
  XENP019023 1G6_H1_L1.146_IgG1_PVA_/S267K Heavy Chain

SEQ ID NO: 16036 - protein, 122 aa, Artificial Sequence; identical to SEQ ID NO: 6246
  Description of Artificial Sequence: Synthetic polypeptide
  VH of XENP019023

SEQ ID NO: 16037 - protein, 5 aa, Artificial Sequence
  Description of Artificial Sequence: Synthetic peptide
  XENP019023 vhCDR1
NYWMN

SEQ ID NO: 16038 - protein, 19 aa, Artificial Sequence
  Description of Artificial Sequence: Synthetic peptide
  XENP019023 vhCDR2
EIRLKSNNYATHYAEPVKG

SEQ ID NO: 16039 - protein, 11 aa, Artificial Sequence
  Description of Artificial Sequence: Synthetic peptide
  XENP019023 vhCDR3
YYGNYGGYFDV

SEQ ID NO: 16040 - protein, 214 aa, Artificial Sequence
  Description of Artificial Sequence: Synthetic polypeptide
  XENP019023 1G6_H1_L1.146_IgG1_PVA_/S267K Light Chain
SIVMTQSPATLAVSPGERATLSCRASQSVSNDVAWYQQKPGQSPRLLINYASHRYTGVPDRFTGSGYGTEFTLTISSLQSEDFAVYFCQQDYSSPRTFGGGTKVEIKRTVAAPSVFIFPPSDEQLKSGTASVVCLLNNFYPREAKVQWKVDNALQSGNSQESVTEQDSKDSTYSLSSTLTLSKADYEKHKVYACEVTHQGLSSPVTKSFNRGEC

SEQ ID NO: 16041 - protein, 107 aa, Artificial Sequence; identical to SEQ ID NO: 10357
  Description of Artificial Sequence: Synthetic polypeptide
  VL of XENP019023

SEQ ID NO: 16042 - protein, 11 aa, Artificial Sequence
  Description of Artificial Sequence: Synthetic peptide
  XENP019023 vlCDR1
RASQSVSNDVA

SEQ ID NO: 16043 - protein, 7 aa, Artificial Sequence
  Description of Artificial Sequence: Synthetic peptide
  XENP019023 vlCDR2
YASHRYT

SEQ ID NO: 16044 - protein, 9 aa, Artificial Sequence
  Description of Artificial Sequence: Synthetic peptide
  XENP019023 vlCDR3
QQDYSSPRT

SEQ ID NO: 16045 - protein, 451 aa, Artificial Sequence; identical to SEQ ID NO: 11545
  Description of Artificial Sequence: Synthetic polypeptide
  XENP019024 1G6_H1_L1.147_IgG1_PVA_/S267K Heavy Chain

SEQ ID NO: 16046 - protein, 122 aa, Artificial Sequence; identical to SEQ ID NO: 6246
  Description of Artificial Sequence: Synthetic polypeptide
  VH of XENP019024

SEQ ID NO: 16047 - protein, 5 aa, Artificial Sequence
  Description of Artificial Sequence: Synthetic peptide
  XENP019024 vhCDR1
NYWMN

SEQ ID NO: 16048 - protein, 19 aa, Artificial Sequence
  Description of Artificial Sequence: Synthetic peptide
  XENP019024 vhCDR2
EIRLKSNNYATHYAEPVKG

SEQ ID NO: 16049 - protein, 11 aa, Artificial Sequence
  Description of Artificial Sequence: Synthetic peptide
  XENP019024 vhCDR3
YYGNYGGYFDV

SEQ ID NO: 16050 - protein, 214 aa, Artificial Sequence
  Description of Artificial Sequence: Synthetic polypeptide
  XENP019024 1G6_H1_L1.147_IgG1_PVA_/S267K Light Chain
SIVMTQSPATLPVSPGERATLSCRASQSVSNDVAWYQQKPGQSPRLLINYASHRYTGVPDRFTGSGYGTEFTLTISSLQSEDFAVYFCQQDYSSPRTFGGGTKVEIKRTVAAPSVFIFPPSDEQLKSGTASVVCLLNNFYPREAKVQWKVDNALQSGNSQESVTEQDSKDSTYSLSSTLTLSKADYEKHKVYACEVTHQGLSSPVTKSFNRGEC

SEQ ID NO: 16051 - protein, 107 aa, Artificial Sequence; identical to SEQ ID NO: 10366
  Description of Artificial Sequence: Synthetic polypeptide
  VL of XENP019024

SEQ ID NO: 16052 - protein, 11 aa, Artificial Sequence
  Description of Artificial Sequence: Synthetic peptide
  XENP019024 vlCDR1
RASQSVSNDVA

SEQ ID NO: 16053 - protein, 7 aa, Artificial Sequence
  Description of Artificial Sequence: Synthetic peptide
  XENP019024 vlCDR2
YASHRYT

SEQ ID NO: 16054 - protein, 9 aa, Artificial Sequence
  Description of Artificial Sequence: Synthetic peptide
  XENP019024 vlCDR3
QQDYSSPRT

SEQ ID NO: 16055 - protein, 451 aa, Artificial Sequence; identical to SEQ ID NO: 11545
  Description of Artificial Sequence: Synthetic polypeptide
  XENP019025 1G6_H1_L1.148_IgG1_PVA_/S267K Heavy Chain

SEQ ID NO: 16056 - protein, 122 aa, Artificial Sequence; identical to SEQ ID NO: 6246
  Description of Artificial Sequence: Synthetic polypeptide
  VH of XENP019025

SEQ ID NO: 16057 - protein, 5 aa, Artificial Sequence
  Description of Artificial Sequence: Synthetic peptide
  XENP019025 vhCDR1
NYWMN

SEQ ID NO: 16058 - protein, 19 aa, Artificial Sequence
  Description of Artificial Sequence: Synthetic peptide
  XENP019025 vhCDR2
EIRLKSNNYATHYAEPVKG

SEQ ID NO: 16059 - protein, 11 aa, Artificial Sequence
  Description of Artificial Sequence: Synthetic peptide
  XENP019025 vhCDR3
YYGNYGGYFDV

SEQ ID NO: 16060 - protein, 214 aa, Artificial Sequence
  Description of Artificial Sequence: Synthetic polypeptide
  XENP019025 1G6_H1_L1.148_IgG1_PVA_/S267K Light Chain
SIVMTQSPATLSASPGERATLSCRASQSVSNDVAWYQQKPGQSPRLLINYASHRYTGVPDRFTGSGYGTEFTLTISSLQSEDFAVYFCQQDYSSPRTFGGGTKVEIKRTVAAPSVFIFPPSDEQLKSGTASVVCLLNNFYPREAKVQWKVDNALQSGNSQESVTEQDSKDSTYSLSSTLTLSKADYEKHKVYACEVTHQGLSSPVTKSFNRGEC

SEQ ID NO: 16061 - protein, 107 aa, Artificial Sequence; identical to SEQ ID NO: 10375
  Description of Artificial Sequence: Synthetic polypeptide
  VL of XENP019025

SEQ ID NO: 16062 - protein, 11 aa, Artificial Sequence
  Description of Artificial Sequence: Synthetic peptide
  XENP019025 vlCDR1
RASQSVSNDVA

SEQ ID NO: 16063 - protein, 7 aa, Artificial Sequence
  Description of Artificial Sequence: Synthetic peptide
  XENP019025 vlCDR2
YASHRYT

SEQ ID NO: 16064 - protein, 9 aa, Artificial Sequence
  Description of Artificial Sequence: Synthetic peptide
  XENP019025 vlCDR3
QQDYSSPRT

SEQ ID NO: 16065 - protein, 451 aa, Artificial Sequence; identical to SEQ ID NO: 11545
  Description of Artificial Sequence: Synthetic polypeptide
  XENP019026 1G6_H1_L1.149_IgG1_PVA_/S267K Heavy Chain

SEQ ID NO: 16066 - protein, 122 aa, Artificial Sequence; identical to SEQ ID NO: 6246
  Description of Artificial Sequence: Synthetic polypeptide
  VH of XENP019026

SEQ ID NO: 16067 - protein, 5 aa, Artificial Sequence
  Description of Artificial Sequence: Synthetic peptide
  XENP019026 vhCDR1
NYWMN

SEQ ID NO: 16068 - protein, 19 aa, Artificial Sequence
  Description of Artificial Sequence: Synthetic peptide
  XENP019026 vhCDR2
EIRLKSNNYATHYAEPVKG

SEQ ID NO: 16069 - protein, 11 aa, Artificial Sequence
  Description of Artificial Sequence: Synthetic peptide
  XENP019026 vhCDR3
YYGNYGGYFDV

SEQ ID NO: 16070 - protein, 214 aa, Artificial Sequence
  Description of Artificial Sequence: Synthetic polypeptide
  XENP019026 1G6_H1_L1.149_IgG1_PVA_/S267K Light Chain
SIVMTQSPATLSVSPGERASLSCRASQSVSNDVAWYQQKPGQSPRLLINYASHRYTGVPDRFTGSGYGTEFTLTISSLQSEDFAVYFCQQDYSSPRTFGGGTKVEIKRTVAAPSVFIFPPSDEQLKSGTASVVCLLNNFYPREAKVQWKVDNALQSGNSQESVTEQDSKDSTYSLSSTLTLSKADYEKHKVYACEVTHQGLSSPVTKSFNRGEC

SEQ ID NO: 16071 - protein, 107 aa, Artificial Sequence; identical to SEQ ID NO: 10384
  Description of Artificial Sequence: Synthetic polypeptide
  VL of XENP019026

SEQ ID NO: 16072 - protein, 11 aa, Artificial Sequence
  Description of Artificial Sequence: Synthetic peptide
  XENP019026 vlCDR1
RASQSVSNDVA

SEQ ID NO: 16073 - protein, 7 aa, Artificial Sequence
  Description of Artificial Sequence: Synthetic peptide
  XENP019026 vlCDR2
YASHRYT

SEQ ID NO: 16074 - protein, 9 aa, Artificial Sequence
  Description of Artificial Sequence: Synthetic peptide
  XENP019026 vlCDR3
QQDYSSPRT

SEQ ID NO: 16075 - protein, 451 aa, Artificial Sequence; identical to SEQ ID NO: 11545
  Description of Artificial Sequence: Synthetic polypeptide
  XENP019027 1G6_H1_L1.150_IgG1_PVA_/S267K Heavy Chain

SEQ ID NO: 16076 - protein, 122 aa, Artificial Sequence; identical to SEQ ID NO: 6246
  Description of Artificial Sequence: Synthetic polypeptide
  VH of XENP019027

SEQ ID NO: 16077 - protein, 5 aa, Artificial Sequence
  Description of Artificial Sequence: Synthetic peptide
  XENP019027 vhCDR1
NYWMN

SEQ ID NO: 16078 - protein, 19 aa, Artificial Sequence
  Description of Artificial Sequence: Synthetic peptide
  XENP019027 vhCDR2
EIRLKSNNYATHYAEPVKG

SEQ ID NO: 16079 - protein, 11 aa, Artificial Sequence
  Description of Artificial Sequence: Synthetic peptide
  XENP019027 vhCDR3
YYGNYGGYFDV

SEQ ID NO: 16080 - protein, 214 aa, Artificial Sequence
  Description of Artificial Sequence: Synthetic polypeptide
  XENP019027 1G6_H1_L1.150_IgG1_PVA_/S267K Light Chain
SIVMTQSPATLSVSPGERATLKCRASQSVSNDVAWYQQKPGQSPRLLINYASHRYTGVPDRFTGSGYGTEFTLTISSLQSEDFAVYFCQQDYSSPRTFGGGTKVEIKRTVAAPSVFIFPPSDEQLKSGTASVVCLLNNFYPREAKVQWKVDNALQSGNSQESVTEQDSKDSTYSLSSTLTLSKADYEKHKVYACEVTHQGLSSPVTKSFNRGEC

SEQ ID NO: 16081 - protein, 107 aa, Artificial Sequence; identical to SEQ ID NO: 10393
  Description of Artificial Sequence: Synthetic polypeptide
  VL of XENP019027

SEQ ID NO: 16082 - protein, 11 aa, Artificial Sequence
  Description of Artificial Sequence: Synthetic peptide
  XENP019027 vlCDR1
RASQSVSNDVA

SEQ ID NO: 16083 - protein, 7 aa, Artificial Sequence
  Description of Artificial Sequence: Synthetic peptide
  XENP019027 vlCDR2
YASHRYT

SEQ ID NO: 16084 - protein, 9 aa, Artificial Sequence
  Description of Artificial Sequence: Synthetic peptide
  XENP019027 vlCDR3
QQDYSSPRT

SEQ ID NO: 16085 - protein, 451 aa, Artificial Sequence; identical to SEQ ID NO: 11545
  Description of Artificial Sequence: Synthetic polypeptide
  XENP019028 1G6_H1_L1.151_IgG1_PVA_/S267K Heavy Chain

SEQ ID NO: 16086 - protein, 122 aa, Artificial Sequence; identical to SEQ ID NO: 6246
  Description of Artificial Sequence: Synthetic polypeptide
  VH of XENP019028

SEQ ID NO: 16087 - protein, 5 aa, Artificial Sequence
  Description of Artificial Sequence: Synthetic peptide
  XENP019028 vhCDR1
NYWMN

SEQ ID NO: 16088 - protein, 19 aa, Artificial Sequence
  Description of Artificial Sequence: Synthetic peptide
  XENP019028 vhCDR2
EIRLKSNNYATHYAEPVKG

SEQ ID NO: 16089 - protein, 11 aa, Artificial Sequence
  Description of Artificial Sequence: Synthetic peptide
  XENP019028 vhCDR3
YYGNYGGYFDV

SEQ ID NO: 16090 - protein, 214 aa, Artificial Sequence
  Description of Artificial Sequence: Synthetic polypeptide
  XENP019028 1G6_H1_L1.151_IgG1_PVA_/S267K Light Chain
SIVMTQSPATLSVSPGERATLSCRASQSVSNDVAWYQQKPEQSPRLLINYASHRYTGVPDRFTGSGYGTEFTLTISSLQSEDFAVYFCQQDYSSPRTFGGGTKVEIKRTVAAPSVFIFPPSDEQLKSGTASVVCLLNNFYPREAKVQWKVDNALQSGNSQESVTEQDSKDSTYSLSSTLTLSKADYEKHKVYACEVTHQGLSSPVTKSFNRGEC

SEQ ID NO: 16091 - protein, 107 aa, Artificial Sequence; identical to SEQ ID NO: 10402
  Description of Artificial Sequence: Synthetic polypeptide
  VL of XENP019028

SEQ ID NO: 16092 - protein, 11 aa, Artificial Sequence
  Description of Artificial Sequence: Synthetic peptide
  XENP019028 vlCDR1
RASQSVSNDVA

SEQ ID NO: 16093 - protein, 7 aa, Artificial Sequence
  Description of Artificial Sequence: Synthetic peptide
  XENP019028 vlCDR2
YASHRYT

SEQ ID NO: 16094 - protein, 9 aa, Artificial Sequence
  Description of Artificial Sequence: Synthetic peptide
  XENP019028 vlCDR3
QQDYSSPRT

SEQ ID NO: 16095 - protein, 451 aa, Artificial Sequence; identical to SEQ ID NO: 11545
  Description of Artificial Sequence: Synthetic polypeptide
  XENP019029 1G6_H1_L1.152_IgG1_PVA_/S267K Heavy Chain

SEQ ID NO: 16096 - protein, 122 aa, Artificial Sequence; identical to SEQ ID NO: 6246
  Description of Artificial Sequence: Synthetic polypeptide
  VH of XENP019029

SEQ ID NO: 16097 - protein, 5 aa, Artificial Sequence
  Description of Artificial Sequence: Synthetic peptide
  XENP019029 vhCDR1
NYWMN

SEQ ID NO: 16098 - protein, 19 aa, Artificial Sequence
  Description of Artificial Sequence: Synthetic peptide
  XENP019029 vhCDR2
EIRLKSNNYATHYAEPVKG

SEQ ID NO: 16099 - protein, 11 aa, Artificial Sequence
  Description of Artificial Sequence: Synthetic peptide
  XENP019029 vhCDR3
YYGNYGGYFDV

SEQ ID NO: 16100 - protein, 214 aa, Artificial Sequence
  Description of Artificial Sequence: Synthetic polypeptide
  XENP019029 1G6_H1_L1.152_IgG1_PVA_/S267K Light Chain
SIVMTQSPATLSVSPGERATLSCRASQSVSNDVAWYQQKPGESPRLLINYASHRYTGVPDRFTGSGYGTEFTLTISSLQSEDFAVYFCQQDYSSPRTFGGGTKVEIKRTVAAPSVFIFPPSDEQLKSGTASVVCLLNNFYPREAKVQWKVDNALQSGNSQESVTEQDSKDSTYSLSSTLTLSKADYEKHKVYACEVTHQGLSSPVTKSFNRGEC

SEQ ID NO: 16101 - protein, 107 aa, Artificial Sequence; identical to SEQ ID NO: 10411
  Description of Artificial Sequence: Synthetic polypeptide
  VL of XENP019029

SEQ ID NO: 16102 - protein, 11 aa, Artificial Sequence
  Description of Artificial Sequence: Synthetic peptide
  XENP019029 vlCDR1
RASQSVSNDVA

SEQ ID NO: 16103 - protein, 7 aa, Artificial Sequence
  Description of Artificial Sequence: Synthetic peptide
  XENP019029 vlCDR2
YASHRYT

SEQ ID NO: 16104 - protein, 9 aa, Artificial Sequence
  Description of Artificial Sequence: Synthetic peptide
  XENP019029 vlCDR3
QQDYSSPRT

SEQ ID NO: 16105 - protein, 451 aa, Artificial Sequence; identical to SEQ ID NO: 11545
  Description of Artificial Sequence: Synthetic polypeptide
  XENP019030 1G6_H1_L1.153_IgG1_PVA_/S267K Heavy Chain

SEQ ID NO: 16106 - protein, 122 aa, Artificial Sequence; identical to SEQ ID NO: 6246
  Description of Artificial Sequence: Synthetic polypeptide
  VH of XENP019030

SEQ ID NO: 16107 - protein, 5 aa, Artificial Sequence
  Description of Artificial Sequence: Synthetic peptide
  XENP019030 vhCDR1
NYWMN

SEQ ID NO: 16108 - protein, 19 aa, Artificial Sequence
  Description of Artificial Sequence: Synthetic peptide
  XENP019030 vhCDR2
EIRLKSNNYATHYAEPVKG

SEQ ID NO: 16109 - protein, 11 aa, Artificial Sequence
  Description of Artificial Sequence: Synthetic peptide
  XENP019030 vhCDR3
YYGNYGGYFDV

SEQ ID NO: 16110 - protein, 214 aa, Artificial Sequence
  Description of Artificial Sequence: Synthetic polypeptide
  XENP019030 1G6_H1_L1.153_IgG1_PVA_/S267K Light Chain
SIVMTQSPATLSVSPGERATLSCRASQSVSNDVAWYQQKPGQSPRVLINYASHRYTGVPDRFTGSGYGTEFTLTISSLQSEDFAVYFCQQDYSSPRTFGGGTKVEIKRTVAAPSVFIFPPSDEQLKSGTASVVCLLNNFYPREAKVQWKVDNALQSGNSQESVTEQDSKDSTYSLSSTLTLSKADYEKHKVYACEVTHQGLSSPVTKSFNRGEC

SEQ ID NO: 16111 - protein, 107 aa, Artificial Sequence; identical to SEQ ID NO: 10420
  Description of Artificial Sequence: Synthetic polypeptide
  VL of XENP019030

SEQ ID NO: 16112 - protein, 11 aa, Artificial Sequence
  Description of Artificial Sequence: Synthetic peptide
  XENP019030 vlCDR1
RASQSVSNDVA

SEQ ID NO: 16113 - protein, 7 aa, Artificial Sequence
  Description of Artificial Sequence: Synthetic peptide
  XENP019030 vlCDR2
YASHRYT

SEQ ID NO: 16114 - protein, 9 aa, Artificial Sequence
  Description of Artificial Sequence: Synthetic peptide
  XENP019030 vlCDR3
QQDYSSPRT

SEQ ID NO: 16115 - protein, 451 aa, Artificial Sequence; identical to SEQ ID NO: 11545
  Description of Artificial Sequence: Synthetic polypeptide
  XENP019031 1G6_H1_L1.154_IgG1_PVA_/S267K Heavy Chain

SEQ ID NO: 16116 - protein, 122 aa, Artificial Sequence; identical to SEQ ID NO: 6246
  Description of Artificial Sequence: Synthetic polypeptide
  VH of XENP019031

SEQ ID NO: 16117 - protein, 5 aa, Artificial Sequence
  Description of Artificial Sequence: Synthetic peptide
  XENP019031 vhCDR1
NYWMN

SEQ ID NO: 16118 - protein, 19 aa, Artificial Sequence
  Description of Artificial Sequence: Synthetic peptide
  XENP019031 vhCDR2
EIRLKSNNYATHYAEPVKG

SEQ ID NO: 16119 - protein, 11 aa, Artificial Sequence
  Description of Artificial Sequence: Synthetic peptide
  XENP019031 vhCDR3
YYGNYGGYFDV

SEQ ID NO: 16120 - protein, 214 aa, Artificial Sequence
  Description of Artificial Sequence: Synthetic polypeptide
  XENP019031 1G6_H1_L1.154_IgG1_PVA_/S267K Light Chain
SIVMTQSPATLSVSPGERATLSCRASQSVSNDVAWYQQKPGQSPRLLVNYASHRYTGVPDRFTGSGYGTEFTLTISSLQSEDFAVYFCQQDYSSPRTFGGGTKVEIKRTVAAPSVFIFPPSDEQLKSGTASVVCLLNNFYPREAKVQWKVDNALQSGNSQESVTEQDSKDSTYSLSSTLTLSKADYEKHKVYACEVTHQGLSSPVTKSFNRGEC

SEQ ID NO: 16121 - protein, 107 aa, Artificial Sequence; identical to SEQ ID NO: 10429
  Description of Artificial Sequence: Synthetic polypeptide
  VL of XENP019031

SEQ ID NO: 16122 - protein, 11 aa, Artificial Sequence
  Description of Artificial Sequence: Synthetic peptide
  XENP019031 vlCDR1
RASQSVSNDVA

SEQ ID NO: 16123 - protein, 7 aa, Artificial Sequence
  Description of Artificial Sequence: Synthetic peptide
  XENP019031 vlCDR2
YASHRYT

SEQ ID NO: 16124 - protein, 9 aa, Artificial Sequence
  Description of Artificial Sequence: Synthetic peptide
  XENP019031 vlCDR3
QQDYSSPRT

SEQ ID NO: 16125 - protein, 451 aa, Artificial Sequence; identical to SEQ ID NO: 11545
  Description of Artificial Sequence: Synthetic polypeptide
  XENP019032 1G6_H1_L1.155_IgG1_PVA_/S267K Heavy Chain

SEQ ID NO: 16126 - protein, 122 aa, Artificial Sequence; identical to SEQ ID NO: 6246
  Description of Artificial Sequence: Synthetic polypeptide
  VH of XENP019032

SEQ ID NO: 16127 - protein, 5 aa, Artificial Sequence
  Description of Artificial Sequence: Synthetic peptide
  XENP019032 vhCDR1
NYWMN

SEQ ID NO: 16128 - protein, 19 aa, Artificial Sequence
  Description of Artificial Sequence: Synthetic peptide
  XENP019032 vhCDR2
EIRLKSNNYATHYAEPVKG

SEQ ID NO: 16129 - protein, 11 aa, Artificial Sequence
  Description of Artificial Sequence: Synthetic peptide
  XENP019032 vhCDR3
YYGNYGGYFDV

SEQ ID NO: 16130 - protein, 214 aa, Artificial Sequence
  Description of Artificial Sequence: Synthetic polypeptide
  XENP019032 1G6_H1_L1.155_IgG1_PVA_/S267K Light Chain
SIVMTQSPATLSVSPGERATLSCRASQSVSNDVAWYQQKPGQSPRLLINYANHRYTGVPDRFTGSGYGTEFTLTISSLQSEDFAVYFCQQDYSSPRTFGGGTKVEIKRTVAAPSVFIFPPSDEQLKSGTASVVCLLNNFYPREAKVQWKVDNALQSGNSQESVTEQDSKDSTYSLSSTLTLSKADYEKHKVYACEVTHQGLSSPVTKSFNRGEC

SEQ ID NO: 16131 - protein, 107 aa, Artificial Sequence; identical to SEQ ID NO: 10438
  Description of Artificial Sequence: Synthetic polypeptide
  VL of XENP019032

SEQ ID NO: 16132 - protein, 11 aa, Artificial Sequence
  Description of Artificial Sequence: Synthetic peptide
  XENP019032 vlCDR1
RASQSVSNDVA

SEQ ID NO: 16133 - protein, 7 aa, Artificial Sequence
  Description of Artificial Sequence: Synthetic peptide
  XENP019032 vlCDR2
YANHRYT

SEQ ID NO: 16134 - protein, 9 aa, Artificial Sequence
  Description of Artificial Sequence: Synthetic peptide
  XENP019032 vlCDR3
QQDYSSPRT

SEQ ID NO: 16135 - protein, 451 aa, Artificial Sequence; identical to SEQ ID NO: 11545
  Description of Artificial Sequence: Synthetic polypeptide
  XENP019033 1G6_H1_L1.156_IgG1_PVA_/S267K Heavy Chain

SEQ ID NO: 16136 - protein, 122 aa, Artificial Sequence; identical to SEQ ID NO: 6246
  Description of Artificial Sequence: Synthetic polypeptide
  VH of XENP019033

SEQ ID NO: 16137 - protein, 5 aa, Artificial Sequence
  Description of Artificial Sequence: Synthetic peptide
  XENP019033 vhCDR1
NYWMN

SEQ ID NO: 16138 - protein, 19 aa, Artificial Sequence
  Description of Artificial Sequence: Synthetic peptide
  XENP019033 vhCDR2
EIRLKSNNYATHYAEPVKG

SEQ ID NO: 16139 - protein, 11 aa, Artificial Sequence
  Description of Artificial Sequence: Synthetic peptide
  XENP019033 vhCDR3
YYGNYGGYFDV

SEQ ID NO: 16140 - protein, 214 aa, Artificial Sequence
  Description of Artificial Sequence: Synthetic polypeptide
  XENP019033 1G6_H1_L1.156_IgG1_PVA_/S267K Light Chain
SIVMTQSPATLSVSPGERATLSCRASQSVSNDVAWYQQKPGQSPRLLINYASHRYTGVPDRFTGSGYGTEFTLTISSLESEDFAVYFCQQDYSSPRTFGGGTKVEIKRTVAAPSVFIFPPSDEQLKSGTASVVCLLNNFYPREAKVQWKVDNALQSGNSQESVTEQDSKDSTYSLSSTLTLSKADYEKHKVYACEVTHQGLSSPVTKSFNRGEC

SEQ ID NO: 16141 - protein, 107 aa, Artificial Sequence; identical to SEQ ID NO: 10447
  Description of Artificial Sequence: Synthetic polypeptide
  VL of XENP019033

SEQ ID NO: 16142 - protein, 11 aa, Artificial Sequence
  Description of Artificial Sequence: Synthetic peptide
  XENP019033 vlCDR1
RASQSVSNDVA

SEQ ID NO: 16143 - protein, 7 aa, Artificial Sequence
  Description of Artificial Sequence: Synthetic peptide
  XENP019033 vlCDR2
YASHRYT

SEQ ID NO: 16144 - protein, 9 aa, Artificial Sequence
  Description of Artificial Sequence: Synthetic peptide
  XENP019033 vlCDR3
QQDYSSPRT

SEQ ID NO: 16145 - protein, 451 aa, Artificial Sequence; identical to SEQ ID NO: 11545
  Description of Artificial Sequence: Synthetic polypeptide
  XENP019034 1G6_H1_L1.157_IgG1_PVA_/S267K Heavy Chain

SEQ ID NO: 16146 - protein, 122 aa, Artificial Sequence; identical to SEQ ID NO: 6246
  Description of Artificial Sequence: Synthetic polypeptide
  VH of XENP019034

SEQ ID NO: 16147 - protein, 5 aa, Artificial Sequence
  Description of Artificial Sequence: Synthetic peptide
  XENP019034 vhCDR1
NYWMN

SEQ ID NO: 16148 - protein, 19 aa, Artificial Sequence
  Description of Artificial Sequence: Synthetic peptide
  XENP019034 vhCDR2
EIRLKSNNYATHYAEPVKG

SEQ ID NO: 16149 - protein, 11 aa, Artificial Sequence
  Description of Artificial Sequence: Synthetic peptide
  XENP019034 vhCDR3
YYGNYGGYFDV

SEQ ID NO: 16150 - protein, 214 aa, Artificial Sequence
  Description of Artificial Sequence: Synthetic polypeptide
  XENP019034 1G6_H1_L1.157_IgG1_PVA_/S267K Light Chain
SIVMTQSPATLSVSPGERATLSCRASQSVSNDVAWYQQKPGQSPRLLINYASHRYTGVPDRFTGSGYGTEFTLTISSLKSEDFAVYFCQQDYSSPRTFGGGTKVEIKRTVAAPSVFIFPPSDEQLKSGTASVVCLLNNFYPREAKVQWKVDNALQSGNSQESVTEQDSKDSTYSLSSTLTLSKADYEKHKVYACEVTHQGLSSPVTKSFNRGEC

SEQ ID NO: 16151 - protein, 107 aa, Artificial Sequence; identical to SEQ ID NO: 10456
  Description of Artificial Sequence: Synthetic polypeptide
  VL of XENP019034

SEQ ID NO: 16152 - protein, 11 aa, Artificial Sequence
  Description of Artificial Sequence: Synthetic peptide
  XENP019034 vlCDR1
RASQSVSNDVA

SEQ ID NO: 16153 - protein, 7 aa, Artificial Sequence
  Description of Artificial Sequence: Synthetic peptide
  XENP019034 vlCDR2
YASHRYT

SEQ ID NO: 16154 - protein, 9 aa, Artificial Sequence
  Description of Artificial Sequence: Synthetic peptide
  XENP019034 vlCDR3
QQDYSSPRT

SEQ ID NO: 16155 - protein, 451 aa, Artificial Sequence; identical to SEQ ID NO: 11545
  Description of Artificial Sequence: Synthetic polypeptide
  XENP019035 1G6_H1_L1.158_IgG1_PVA_/S267K Heavy Chain

SEQ ID NO: 16156 - protein, 122 aa, Artificial Sequence; identical to SEQ ID NO: 6246
  Description of Artificial Sequence: Synthetic polypeptide
  VH of XENP019035

SEQ ID NO: 16157 - protein, 5 aa, Artificial Sequence
  Description of Artificial Sequence: Synthetic peptide
  XENP019035 vhCDR1
NYWMN

SEQ ID NO: 16158 - protein, 19 aa, Artificial Sequence
  Description of Artificial Sequence: Synthetic peptide
  XENP019035 vhCDR2
EIRLKSNNYATHYAEPVKG

SEQ ID NO: 16159 - protein, 11 aa, Artificial Sequence
  Description of Artificial Sequence: Synthetic peptide
  XENP019035 vhCDR3
YYGNYGGYFDV

SEQ ID NO: 16160 - protein, 214 aa, Artificial Sequence
  Description of Artificial Sequence: Synthetic polypeptide
  XENP019035 1G6_H1_L1.158_IgG1_PVA_/S267K Light Chain
SIVMTQSPATLSVSPGERATLSCRASQSVSNDVAWYQQKPGQSPRLLINYASHRYTGVPDRFTGSGYGTEFTLTISSLQSEDFGVYFCQQDYSSPRTFGGGTKVEIKRTVAAPSVFIFPPSDEQLKSGTASVVCLLNNFYPREAKVQWKVDNALQSGNSQESVTEQDSKDSTYSLSSTLTLSKADYEKHKVYACEVTHQGLSSPVTKSFNRGEC

SEQ ID NO: 16161 - protein, 107 aa, Artificial Sequence; identical to SEQ ID NO: 10465
  Description of Artificial Sequence: Synthetic polypeptide
  VL of XENP019035

SEQ ID NO: 16162 - protein, 11 aa, Artificial Sequence
  Description of Artificial Sequence: Synthetic peptide
  XENP019035 vlCDR1
RASQSVSNDVA

SEQ ID NO: 16163 - protein, 7 aa, Artificial Sequence
  Description of Artificial Sequence: Synthetic peptide
  XENP019035 vlCDR2
YASHRYT

SEQ ID NO: 16164 - protein, 9 aa, Artificial Sequence
  Description of Artificial Sequence: Synthetic peptide
  XENP019035 vlCDR3
QQDYSSPRT

SEQ ID NO: 16165 - protein, 451 aa, Artificial Sequence; identical to SEQ ID NO: 11545
  Description of Artificial Sequence: Synthetic polypeptide
  XENP019036 1G6_H1_L1.159_IgG1_PVA_/S267K Heavy Chain

SEQ ID NO: 16166 - protein, 122 aa, Artificial Sequence; identical to SEQ ID NO: 6246
  Description of Artificial Sequence: Synthetic polypeptide
  VH of XENP019036

SEQ ID NO: 16167 - protein, 5 aa, Artificial Sequence
  Description of Artificial Sequence: Synthetic peptide
  XENP019036 vhCDR1
NYWMN

SEQ ID NO: 16168 - protein, 19 aa, Artificial Sequence
  Description of Artificial Sequence: Synthetic peptide
  XENP019036 vhCDR2
EIRLKSNNYATHYAEPVKG

SEQ ID NO: 16169 - protein, 11 aa, Artificial Sequence
  Description of Artificial Sequence: Synthetic peptide
  XENP019036 vhCDR3
YYGNYGGYFDV

SEQ ID NO: 16170 - protein, 214 aa, Artificial Sequence
  Description of Artificial Sequence: Synthetic polypeptide
  XENP019036 1G6_H1_L1.159_IgG1_PVA_/S267K Light Chain
SIVMTQSPATLSVSPGERATLSCRASQSVSNDVAWYQQKPGQSPRLLINYASHRYTGVPDRFTGSGYGTEFTLTISSLQSEDFAVYFCKQDYSSPRTFGGGTKVEIKRTVAAPSVFIFPPSDEQLKSGTASVVCLLNNFYPREAKVQWKVDNALQSGNSQESVTEQDSKDSTYSLSSTLTLSKADYEKHKVYACEVTHQGLSSPVTKSFNRGEC

SEQ ID NO: 16171 - protein, 107 aa, Artificial Sequence; identical to SEQ ID NO: 10474
  Description of Artificial Sequence: Synthetic polypeptide
  VL of XENP019036

SEQ ID NO: 16172 - protein, 11 aa, Artificial Sequence
  Description of Artificial Sequence: Synthetic peptide
  XENP019036 vlCDR1
RASQSVSNDVA

SEQ ID NO: 16173 - protein, 7 aa, Artificial Sequence
  Description of Artificial Sequence: Synthetic peptide
  XENP019036 vlCDR2
YASHRYT

SEQ ID NO: 16174 - protein, 9 aa, Artificial Sequence
  Description of Artificial Sequence: Synthetic peptide
  XENP019036 vlCDR3
KQDYSSPRT

SEQ ID NO: 16175 - protein, 451 aa, Artificial Sequence; identical to SEQ ID NO: 11545
  Description of Artificial Sequence: Synthetic polypeptide
  XENP019037 1G6_H1_L1.160_IgG1_PVA_/S267K Heavy Chain

SEQ ID NO: 16176 - protein, 122 aa, Artificial Sequence; identical to SEQ ID NO: 6246
  Description of Artificial Sequence: Synthetic polypeptide
  VH of XENP019037

SEQ ID NO: 16177 - protein, 5 aa, Artificial Sequence
  Description of Artificial Sequence: Synthetic peptide
  XENP019037 vhCDR1
NYWMN

SEQ ID NO: 16178 - protein, 19 aa, Artificial Sequence
  Description of Artificial Sequence: Synthetic peptide
  XENP019037 vhCDR2
EIRLKSNNYATHYAEPVKG

SEQ ID NO: 16179 - protein, 11 aa, Artificial Sequence
  Description of Artificial Sequence: Synthetic peptide
  XENP019037 vhCDR3
YYGNYGGYFDV

SEQ ID NO: 16180 - protein, 214 aa, Artificial Sequence
  Description of Artificial Sequence: Synthetic polypeptide
  XENP019037 1G6_H1_L1.160_IgG1_PVA_/S267K Light Chain
SIVMTQSPATLSVSPGERATLSCRASQSVSNDVAWYQQKPGQSPRLLINYASHRYTGVPDRFTGSGYGTEFTLTISSLQSEDFAVYFCQKDYSSPRTFGGGTKVEIKRTVAAPSVFIFPPSDEQLKSGTASVVCLLNNFYPREAKVQWKVDNALQSGNSQESVTEQDSKDSTYSLSSTLTLSKADYEKHKVYACEVTHQGLSSPVTKSFNRGEC

SEQ ID NO: 16181 - protein, 107 aa, Artificial Sequence; identical to SEQ ID NO: 10483
  Description of Artificial Sequence: Synthetic polypeptide
  VL of XENP019037

SEQ ID NO: 16182 - protein, 11 aa, Artificial Sequence
  Description of Artificial Sequence: Synthetic peptide
  XENP019037 vlCDR1
RASQSVSNDVA

SEQ ID NO: 16183 - protein, 7 aa, Artificial Sequence
  Description of Artificial Sequence: Synthetic peptide
  XENP019037 vlCDR2
YASHRYT

SEQ ID NO: 16184 - protein, 9 aa, Artificial Sequence
  Description of Artificial Sequence: Synthetic peptide
  XENP019037 vlCDR3
QKDYSSPRT

SEQ ID NO: 16185 - protein, 451 aa, Artificial Sequence; identical to SEQ ID NO: 11545
  Description of Artificial Sequence: Synthetic polypeptide
  XENP019038 1G6_H1_L1.161_IgG1_PVA_/S267K Heavy Chain

SEQ ID NO: 16186 - protein, 122 aa, Artificial Sequence; identical to SEQ ID NO: 6246
  Description of Artificial Sequence: Synthetic polypeptide
  VH of XENP019038

SEQ ID NO: 16187 - protein, 5 aa, Artificial Sequence
  Description of Artificial Sequence: Synthetic peptide
  XENP019038 vhCDR1
NYWMN

SEQ ID NO: 16188 - protein, 19 aa, Artificial Sequence
  Description of Artificial Sequence: Synthetic peptide
  XENP019038 vhCDR2
EIRLKSNNYATHYAEPVKG

SEQ ID NO: 16189 - protein, 11 aa, Artificial Sequence
  Description of Artificial Sequence: Synthetic peptide
  XENP019038 vhCDR3
YYGNYGGYFDV

SEQ ID NO: 16190 - protein, 214 aa, Artificial Sequence
  Description of Artificial Sequence: Synthetic polypeptide
  XENP019038 1G6_H1_L1.161_IgG1_PVA_/S267K Light Chain
SIVMTQSPATLSVSPGERATLSCRASQSVSNDVAWYQQKPGQSPRLLINYASHRYTGVPDRFTGSGYGTEFTLTISSLQSEDFAVYFCQNDYSSPRTFGGGTKVEIKRTVAAPSVFIFPPSDEQLKSGTASVVCLLNNFYPREAKVQWKVDNALQSGNSQESVTEQDSKDSTYSLSSTLTLSKADYEKHKVYACEVTHQGLSSPVTKSFNRGEC

SEQ ID NO: 16191 - protein, 107 aa, Artificial Sequence; identical to SEQ ID NO: 10492
  Description of Artificial Sequence: Synthetic polypeptide
  VL of XENP019038

SEQ ID NO: 16192 - protein, 11 aa, Artificial Sequence
  Description of Artificial Sequence: Synthetic peptide
  XENP019038 vlCDR1
RASQSVSNDVA

SEQ ID NO: 16193 - protein, 7 aa, Artificial Sequence
  Description of Artificial Sequence: Synthetic peptide
  XENP019038 vlCDR2
YASHRYT

SEQ ID NO: 16194 - protein, 9 aa, Artificial Sequence
  Description of Artificial Sequence: Synthetic peptide
  XENP019038 vlCDR3
QNDYSSPRT

SEQ ID NO: 16195 - protein, 451 aa, Artificial Sequence; identical to SEQ ID NO: 11545
  Description of Artificial Sequence: Synthetic polypeptide
  XENP019039 1G6_H1_L1.162_IgG1_PVA_/S267K Heavy Chain

SEQ ID NO: 16196 - protein, 122 aa, Artificial Sequence; identical to SEQ ID NO: 6246
  Description of Artificial Sequence: Synthetic polypeptide
  VH of XENP019039

SEQ ID NO: 16197 - protein, 5 aa, Artificial Sequence
  Description of Artificial Sequence: Synthetic peptide
  XENP019039 vhCDR1
NYWMN

SEQ ID NO: 16198 - protein, 19 aa, Artificial Sequence
  Description of Artificial Sequence: Synthetic peptide
  XENP019039 vhCDR2
EIRLKSNNYATHYAEPVKG

SEQ ID NO: 16199 - protein, 11 aa, Artificial Sequence
  Description of Artificial Sequence: Synthetic peptide
  XENP019039 vhCDR3
YYGNYGGYFDV

SEQ ID NO: 16200 - protein, 214 aa, Artificial Sequence
  Description of Artificial Sequence: Synthetic polypeptide
  XENP019039 1G6_H1_L1.162_IgG1_PVA_/S267K Light Chain
SIVMTQSPATLSVSPGERATLSCRASQSVSNDVAWYQQKPGQSPRLLINYASHRYTGVPDRFTGSGYGTEFTLTISSLQSEDFAVYFCQRDYSSPRTFGGGTKVEIKRTVAAPSVFIFPPSDEQLKSGTASVVCLLNNFYPREAKVQWKVDNALQSGNSQESVTEQDSKDSTYSLSSTLTLSKADYEKHKVYACEVTHQGLSSPVTKSFNRGEC

SEQ ID NO: 16201 - protein, 107 aa, Artificial Sequence; identical to SEQ ID NO: 10501
  Description of Artificial Sequence: Synthetic polypeptide
  VL of XENP019039

SEQ ID NO: 16202 - protein, 11 aa, Artificial Sequence
  Description of Artificial Sequence: Synthetic peptide
  XENP019039 vlCDR1
RASQSVSNDVA

SEQ ID NO: 16203 - protein, 7 aa, Artificial Sequence
  Description of Artificial Sequence: Synthetic peptide
  XENP019039 vlCDR2
YASHRYT

SEQ ID NO: 16204 - protein, 9 aa, Artificial Sequence
  Description of Artificial Sequence: Synthetic peptide
  XENP019039 vlCDR3
QRDYSSPRT

SEQ ID NO: 16205 - protein, 451 aa, Artificial Sequence; identical to SEQ ID NO: 11545
  Description of Artificial Sequence: Synthetic polypeptide
  XENP019040 1G6_H1_L1.163_IgG1_PVA_/S267K Heavy Chain

SEQ ID NO: 16206 - protein, 122 aa, Artificial Sequence; identical to SEQ ID NO: 6246
  Description of Artificial Sequence: Synthetic polypeptide
  VH of XENP019040

SEQ ID NO: 16207 - protein, 5 aa, Artificial Sequence
  Description of Artificial Sequence: Synthetic peptide
  XENP019040 vhCDR1
NYWMN

SEQ ID NO: 16208 - protein, 19 aa, Artificial Sequence
  Description of Artificial Sequence: Synthetic peptide
  XENP019040 vhCDR2
EIRLKSNNYATHYAEPVKG

SEQ ID NO: 16209 - protein, 11 aa, Artificial Sequence
  Description of Artificial Sequence: Synthetic peptide
  XENP019040 vhCDR3
YYGNYGGYFDV

SEQ ID NO: 16210 - protein, 214 aa, Artificial Sequence
  Description of Artificial Sequence: Synthetic polypeptide
  XENP019040 1G6_H1_L1.163_IgG1_PVA_/S267K Light Chain
SIVMTQSPATLSVSPGEPATLSCRASQSVSNDVAWYQQKPGQSPRLLINYASHRYTGVPDRFTGSGYGTEFTLTISRLQSEDFAVYFCQQDYSSPRTFGGGTKVEIKRTVAAPSVFIFPPSDEQLKSGTASVVCLLNNFYPREAKVQWKVDNALQSGNSQESVTEQDSKDSTYSLSSTLTLSKADYEKHKVYACEVTHQGLSSPVTKSFNRGEC

SEQ ID NO: 16211 - protein, 107 aa, Artificial Sequence; identical to SEQ ID NO: 10510
  Description of Artificial Sequence: Synthetic polypeptide
  VL of XENP019040

SEQ ID NO: 16212 - protein, 11 aa, Artificial Sequence
  Description of Artificial Sequence: Synthetic peptide
  XENP019040 vlCDR1
RASQSVSNDVA

SEQ ID NO: 16213 - protein, 7 aa, Artificial Sequence
  Description of Artificial Sequence: Synthetic peptide
  XENP019040 vlCDR2
YASHRYT

SEQ ID NO: 16214 - protein, 9 aa, Artificial Sequence
  Description of Artificial Sequence: Synthetic peptide
  XENP019040 vlCDR3
QQDYSSPRT

SEQ ID NO: 16215 - protein, 451 aa, Artificial Sequence; identical to SEQ ID NO: 11545
  Description of Artificial Sequence: Synthetic polypeptide
  XENP019041 1G6_H1_L1.164_IgG1_PVA_/S267K Heavy Chain

SEQ ID NO: 16216 - protein, 122 aa, Artificial Sequence; identical to SEQ ID NO: 6246
  Description of Artificial Sequence: Synthetic polypeptide
  VH of XENP019041

SEQ ID NO: 16217 - protein, 5 aa, Artificial Sequence
  Description of Artificial Sequence: Synthetic peptide
  XENP019041 vhCDR1
NYWMN

SEQ ID NO: 16218 - protein, 19 aa, Artificial Sequence
  Description of Artificial Sequence: Synthetic peptide
  XENP019041 vhCDR2
EIRLKSNNYATHYAEPVKG

SEQ ID NO: 16219 - protein, 11 aa, Artificial Sequence
  Description of Artificial Sequence: Synthetic peptide
  XENP019041 vhCDR3
YYGNYGGYFDV

SEQ ID NO: 16220 - protein, 214 aa, Artificial Sequence
  Description of Artificial Sequence: Synthetic polypeptide
  XENP019041 1G6_H1_L1.164_IgG1_PVA_/S267K Light Chain
SIVMTQSPATLSVSPGERATLSCRASESVSNDVAWYQQKPGQSPRLLINYASHRYTGVPDRFTGSGYGTEFTLTISSLQSEDFAVYFCQKDYSSPRTFGGGTKVEIKRTVAAPSVFIFPPSDEQLKSGTASVVCLLNNFYPREAKVQWKVDNALQSGNSQESVTEQDSKDSTYSLSSTLTLSKADYEKHKVYACEVTHQGLSSPVTKSFNRGEC

SEQ ID NO: 16221 - protein, 107 aa, Artificial Sequence; identical to SEQ ID NO: 10519
  Description of Artificial Sequence: Synthetic polypeptide
  VL of XENP019041

SEQ ID NO: 16222 - protein, 11 aa, Artificial Sequence
  Description of Artificial Sequence: Synthetic peptide
  XENP019041 vlCDR1
RASESVSNDVA

SEQ ID NO: 16223 - protein, 7 aa, Artificial Sequence
  Description of Artificial Sequence: Synthetic peptide
  XENP019041 vlCDR2
YASHRYT

SEQ ID NO: 16224 - protein, 9 aa, Artificial Sequence
  Description of Artificial Sequence: Synthetic peptide
  XENP019041 vlCDR3
QKDYSSPRT

SEQ ID NO: 16225 - protein, 451 aa, Artificial Sequence; identical to SEQ ID NO: 11545
  Description of Artificial Sequence: Synthetic polypeptide
  XENP019042 1G6_H1_L1.165_IgG1_PVA_/S267K Heavy Chain

SEQ ID NO: 16226 - protein, 122 aa, Artificial Sequence; identical to SEQ ID NO: 6246
  Description of Artificial Sequence: Synthetic polypeptide
  VH of XENP019042

SEQ ID NO: 16227 - protein, 5 aa, Artificial Sequence
  Description of Artificial Sequence: Synthetic peptide
  XENP019042 vhCDR1
NYWMN

SEQ ID NO: 16228 - protein, 19 aa, Artificial Sequence
  Description of Artificial Sequence: Synthetic peptide
  XENP019042 vhCDR2
EIRLKSNNYATHYAEPVKG

SEQ ID NO: 16229 - protein, 11 aa, Artificial Sequence
  Description of Artificial Sequence: Synthetic peptide
  XENP019042 vhCDR3
YYGNYGGYFDV

SEQ ID NO: 16230 - protein, 214 aa, Artificial Sequence
  Description of Artificial Sequence: Synthetic polypeptide
  XENP019042 1G6_H1_L1.165_IgG1_PVA_/S267K Light Chain
SIVMTQSPATLSVSPGERATLSCRASESVSNDVAWYQQKPGQSPRLLINYASHRYTGVPDRFTGSGYGTEFTLTISSLQSEDFAVYFCQQDYKSPRTFGGGTKVEIKRTVAAPSVFIFPPSDEQLKSGTASVVCLLNNFYPREAKVQWKVDNALQSGNSQESVTEQDSKDSTYSLSSTLTLSKADYEKHKVYACEVTHQGLSSPVTKSFNRGEC

SEQ ID NO: 16231 - protein, 107 aa, Artificial Sequence; identical to SEQ ID NO: 10528
  Description of Artificial Sequence: Synthetic polypeptide
  VL of XENP019042

SEQ ID NO: 16232 - protein, 11 aa, Artificial Sequence
  Description of Artificial Sequence: Synthetic peptide
  XENP019042 vlCDR1
RASESVSNDVA

SEQ ID NO: 16233 - protein, 7 aa, Artificial Sequence
  Description of Artificial Sequence: Synthetic peptide
  XENP019042 vlCDR2
YASHRYT

SEQ ID NO: 16234 - protein, 9 aa, Artificial Sequence
  Description of Artificial Sequence: Synthetic peptide
  XENP019042 vlCDR3
QQDYKSPRT

SEQ ID NO: 16235 - protein, 451 aa, Artificial Sequence; identical to SEQ ID NO: 11545
  Description of Artificial Sequence: Synthetic polypeptide
  XENP019043 1G6_H1_L1.166_IgG1_PVA_/S267K Heavy Chain

SEQ ID NO: 16236 - protein, 122 aa, Artificial Sequence; identical to SEQ ID NO: 6246
  Description of Artificial Sequence: Synthetic polypeptide
  VH of XENP019043

SEQ ID NO: 16237 - protein, 5 aa, Artificial Sequence
  Description of Artificial Sequence: Synthetic peptide
  XENP019043 vhCDR1
NYWMN

SEQ ID NO: 16238 - protein, 19 aa, Artificial Sequence
  Description of Artificial Sequence: Synthetic peptide
  XENP019043 vhCDR2
EIRLKSNNYATHYAEPVKG

SEQ ID NO: 16239 - protein, 11 aa, Artificial Sequence
  Description of Artificial Sequence: Synthetic peptide
  XENP019043 vhCDR3
YYGNYGGYFDV

SEQ ID NO: 16240 - protein, 214 aa, Artificial Sequence
  Description of Artificial Sequence: Synthetic polypeptide
  XENP019043 1G6_H1_L1.166_IgG1_PVA_/S267K Light Chain
SIVMTQSPATLSVSPGERATLSCRASQSVSNDVAWYRQKPEQSPRLLINYASHRYTGVPDRFTGSGYGTEFTLTISSLQSEDFAVYFCQQDYSSPRTFGGGTKVEIKRTVAAPSVFIFPPSDEQLKSGTASVVCLLNNFYPREAKVQWKVDNALQSGNSQESVTEQDSKDSTYSLSSTLTLSKADYEKHKVYACEVTHQGLSSPVTKSFNRGEC

SEQ ID NO: 16241 - protein, 107 aa, Artificial Sequence; identical to SEQ ID NO: 10537
  Description of Artificial Sequence: Synthetic polypeptide
  VL of XENP019043

SEQ ID NO: 16242 - protein, 11 aa, Artificial Sequence
  Description of Artificial Sequence: Synthetic peptide
  XENP019043 vlCDR1
RASQSVSNDVA

SEQ ID NO: 16243 - protein, 7 aa, Artificial Sequence
  Description of Artificial Sequence: Synthetic peptide
  XENP019043 vlCDR2
YASHRYT

SEQ ID NO: 16244 - protein, 9 aa, Artificial Sequence
  Description of Artificial Sequence: Synthetic peptide
  XENP019043 vlCDR3
QQDYSSPRT

SEQ ID NO: 16245 - protein, 451 aa, Artificial Sequence; identical to SEQ ID NO: 11545
  Description of Artificial Sequence: Synthetic polypeptide
  XENP019044 1G6_H1_L1.167_IgG1_PVA_/S267K Heavy Chain

SEQ ID NO: 16246 - protein, 122 aa, Artificial Sequence; identical to SEQ ID NO: 6246
  Description of Artificial Sequence: Synthetic polypeptide
  VH of XENP019044

SEQ ID NO: 16247 - protein, 5 aa, Artificial Sequence
  Description of Artificial Sequence: Synthetic peptide
  XENP019044 vhCDR1
NYWMN

SEQ ID NO: 16248 - protein, 19 aa, Artificial Sequence
  Description of Artificial Sequence: Synthetic peptide
  XENP019044 vhCDR2
EIRLKSNNYATHYAEPVKG

SEQ ID NO: 16249 - protein, 11 aa, Artificial Sequence
  Description of Artificial Sequence: Synthetic peptide
  XENP019044 vhCDR3
YYGNYGGYFDV

SEQ ID NO: 16250 - protein, 214 aa, Artificial Sequence
  Description of Artificial Sequence: Synthetic polypeptide
  XENP019044 1G6_H1_L1.167_IgG1_PVA_/S267K Light Chain
SIVMTQSPATLSVSPGERATLSCRASQSVSNDVAWYRQKPGESPRLLINYASHRYTGVPDRFTGSGYGTEFTLTISSLQSEDFAVYFCQQDYSSPRTFGGGTKVEIKRTVAAPSVFIFPPSDEQLKSGTASVVCLLNNFYPREAKVQWKVDNALQSGNSQESVTEQDSKDSTYSLSSTLTLSKADYEKHKVYACEVTHQGLSSPVTKSFNRGEC

SEQ ID NO: 16251 - protein, 107 aa, Artificial Sequence; identical to SEQ ID NO: 10546
  Description of Artificial Sequence: Synthetic polypeptide
  VL of XENP019044

SEQ ID NO: 16252 - protein, 11 aa, Artificial Sequence
  Description of Artificial Sequence: Synthetic peptide
  XENP019044 vlCDR1
RASQSVSNDVA

SEQ ID NO: 16253 - protein, 7 aa, Artificial Sequence
  Description of Artificial Sequence: Synthetic peptide
  XENP019044 vlCDR2
YASHRYT

SEQ ID NO: 16254 - protein, 9 aa, Artificial Sequence
  Description of Artificial Sequence: Synthetic peptide
  XENP019044 vlCDR3
QQDYSSPRT

SEQ ID NO: 16255 - protein, 451 aa, Artificial Sequence; identical to SEQ ID NO: 11545
  Description of Artificial Sequence: Synthetic polypeptide
  XENP019045 1G6_H1_L1.168_IgG1_PVA_/S267K Heavy Chain

SEQ ID NO: 16256 - protein, 122 aa, Artificial Sequence; identical to SEQ ID NO: 6246
  Description of Artificial Sequence: Synthetic polypeptide
  VH of XENP019045

SEQ ID NO: 16257 - protein, 5 aa, Artificial Sequence
  Description of Artificial Sequence: Synthetic peptide
  XENP019045 vhCDR1
NYWMN

SEQ ID NO: 16258 - protein, 19 aa, Artificial Sequence
  Description of Artificial Sequence: Synthetic peptide
  XENP019045 vhCDR2
EIRLKSNNYATHYAEPVKG

SEQ ID NO: 16259 - protein, 11 aa, Artificial Sequence
  Description of Artificial Sequence: Synthetic peptide
  XENP019045 vhCDR3
YYGNYGGYFDV

SEQ ID NO: 16260 - protein, 214 aa, Artificial Sequence
  Description of Artificial Sequence: Synthetic polypeptide
  XENP019045 1G6_H1_L1.168_IgG1_PVA_/S267K Light Chain
SIVMTQSPATLSVSPGERATLSCRASQSVSNDVAWYQQKPGQSPRLLINYASWRYTGVPDRFTGSGYGTEFTLTISSLQSEDFAVYFCQQDFSSPRTFGGGTKVEIKRTVAAPSVFIFPPSDEQLKSGTASVVCLLNNFYPREAKVQWKVDNALQSGNSQESVTEQDSKDSTYSLSSTLTLSKADYEKHKVYACEVTHQGLSSPVTKSFNRGEC

SEQ ID NO: 16261 - protein, 107 aa, Artificial Sequence; identical to SEQ ID NO: 10555
  Description of Artificial Sequence: Synthetic polypeptide
  VL of XENP019045

SEQ ID NO: 16262 - protein, 11 aa, Artificial Sequence
  Description of Artificial Sequence: Synthetic peptide
  XENP019045 vlCDR1
RASQSVSNDVA

SEQ ID NO: 16263 - protein, 7 aa, Artificial Sequence
  Description of Artificial Sequence: Synthetic peptide
  XENP019045 vlCDR2
YASWRYT

SEQ ID NO: 16264 - protein, 9 aa, Artificial Sequence
  Description of Artificial Sequence: Synthetic peptide
  XENP019045 vlCDR3
QQDFSSPRT

SEQ ID NO: 16265 - protein, 451 aa, Artificial Sequence; identical to SEQ ID NO: 11545
  Description of Artificial Sequence: Synthetic polypeptide
  XENP019046 1G6_H1_L1.169_IgG1_PVA_/S267K Heavy Chain

SEQ ID NO: 16266 - protein, 122 aa, Artificial Sequence; identical to SEQ ID NO: 6246
  Description of Artificial Sequence: Synthetic polypeptide
  VH of XENP019046

SEQ ID NO: 16267 - protein, 5 aa, Artificial Sequence
  Description of Artificial Sequence: Synthetic peptide
  XENP019046 vhCDR1
NYWMN

SEQ ID NO: 16268 - protein, 19 aa, Artificial Sequence
  Description of Artificial Sequence: Synthetic peptide
  XENP019046 vhCDR2
EIRLKSNNYATHYAEPVKG

SEQ ID NO: 16269 - protein, 11 aa, Artificial Sequence
  Description of Artificial Sequence: Synthetic peptide
  XENP019046 vhCDR3
YYGNYGGYFDV

SEQ ID NO: 16270 - protein, 214 aa, Artificial Sequence
  Description of Artificial Sequence: Synthetic polypeptide
  XENP019046 1G6_H1_L1.169_IgG1_PVA_/S267K Light Chain
SIVMTQSPATLSVSPGERATLSCRASQSVSNDVAWYQQKPGQSPRLLINYASWRYTGVPDRFTGSGYGTEFTLTISSLQSEDFAVYFCQQDWSSPRTFGGGTKVEIKRTVAAPSVFIFPPSDEQLKSGTASVVCLLNNFYPREAKVQWKVDNALQSGNSQESVTEQDSKDSTYSLSSTLTLSKADYEKHKVYACEVTHQGLSSPVTKSFNRGEC

SEQ ID NO: 16271 - protein, 107 aa, Artificial Sequence; identical to SEQ ID NO: 10564
  Description of Artificial Sequence: Synthetic polypeptide
  VL of XENP019046

SEQ ID NO: 16272 - protein, 11 aa, Artificial Sequence
  Description of Artificial Sequence: Synthetic peptide
  XENP019046 vlCDR1
RASQSVSNDVA

SEQ ID NO: 16273 - protein, 7 aa, Artificial Sequence
  Description of Artificial Sequence: Synthetic peptide
  XENP019046 vlCDR2
YASWRYT

SEQ ID NO: 16274 - protein, 9 aa, Artificial Sequence
  Description of Artificial Sequence: Synthetic peptide
  XENP019046 vlCDR3
QQDWSSPRT

SEQ ID NO: 16275 - protein, 451 aa, Artificial Sequence; identical to SEQ ID NO: 11545
  Description of Artificial Sequence: Synthetic polypeptide
  XENP019047 1G6_H1_L1.170_IgG1_PVA_/S267K Heavy Chain

SEQ ID NO: 16276 - protein, 122 aa, Artificial Sequence; identical to SEQ ID NO: 6246
  Description of Artificial Sequence: Synthetic polypeptide
  VH of XENP019047

SEQ ID NO: 16277 - protein, 5 aa, Artificial Sequence
  Description of Artificial Sequence: Synthetic peptide
  XENP019047 vhCDR1
NYWMN

SEQ ID NO: 16278 - protein, 19 aa, Artificial Sequence
  Description of Artificial Sequence: Synthetic peptide
  XENP019047 vhCDR2
EIRLKSNNYATHYAEPVKG

SEQ ID NO: 16279 - protein, 11 aa, Artificial Sequence
  Description of Artificial Sequence: Synthetic peptide
  XENP019047 vhCDR3
YYGNYGGYFDV

SEQ ID NO: 16280 - protein, 214 aa, Artificial Sequence
  Description of Artificial Sequence: Synthetic polypeptide
  XENP019047 1G6_H1_L1.170_IgG1_PVA_/S267K Light Chain
SIVMTQSPATLSVSPGERATLSCRASQSVSNDVAWYQQKPGQSPRLLINYASWRYTGVPDRFTGSGYGTEFTLTISSLQSEDFAVYFCQQDGSSPRTFGGGTKVEIKRTVAAPSVFIFPPSDEQLKSGTASVVCLLNNFYPREAKVQWKVDNALQSGNSQESVTEQDSKDSTYSLSSTLTLSKADYEKHKVYACEVTHQGLSSPVTKSFNRGEC

SEQ ID NO: 16281 - protein, 107 aa, Artificial Sequence; identical to SEQ ID NO: 10573
  Description of Artificial Sequence: Synthetic polypeptide
  VL of XENP019047

SEQ ID NO: 16282 - protein, 11 aa, Artificial Sequence
  Description of Artificial Sequence: Synthetic peptide
  XENP019047 vlCDR1
RASQSVSNDVA

SEQ ID NO: 16283 - protein, 7 aa, Artificial Sequence
  Description of Artificial Sequence: Synthetic peptide
  XENP019047 vlCDR2
YASWRYT

SEQ ID NO: 16284 - protein, 9 aa, Artificial Sequence
  Description of Artificial Sequence: Synthetic peptide
  XENP019047 vlCDR3
QQDGSSPRT

SEQ ID NO: 16285 - protein, 451 aa, Artificial Sequence; identical to SEQ ID NO: 11545
  Description of Artificial Sequence: Synthetic polypeptide
  XENP019048 1G6_H1_L1.171_IgG1_PVA_/S267K Heavy Chain

SEQ ID NO: 16286 - protein, 122 aa, Artificial Sequence; identical to SEQ ID NO: 6246
  Description of Artificial Sequence: Synthetic polypeptide
  VH of XENP019048

SEQ ID NO: 16287 - protein, 5 aa, Artificial Sequence
  Description of Artificial Sequence: Synthetic peptide
  XENP019048 vhCDR1
NYWMN

SEQ ID NO: 16288 - protein, 19 aa, Artificial Sequence
  Description of Artificial Sequence: Synthetic peptide
  XENP019048 vhCDR2
EIRLKSNNYATHYAEPVKG

SEQ ID NO: 16289 - protein, 11 aa, Artificial Sequence
  Description of Artificial Sequence: Synthetic peptide
  XENP019048 vhCDR3
YYGNYGGYFDV

SEQ ID NO: 16290 - protein, 214 aa, Artificial Sequence
  Description of Artificial Sequence: Synthetic polypeptide
  XENP019048 1G6_H1_L1.171_IgG1_PVA_/S267K Light Chain
SIVMTQSPATLSVSPGERATLSCRASQSVSNDVAWYQQKPGQSPRLLINYASHRYTSVPDRFTGSGYGTEFTLTISSLQSEDFAVYFCQQDWSSPRTFGGGTKVEIKRTVAAPSVFIFPPSDEQLKSGTASVVCLLNNFYPREAKVQWKVDNALQSGNSQESVTEQDSKDSTYSLSSTLTLSKADYEKHKVYACEVTHQGLSSPVTKSFNRGEC

SEQ ID NO: 16291 - protein, 107 aa, Artificial Sequence; identical to SEQ ID NO: 10582
  Description of Artificial Sequence: Synthetic polypeptide
  VL of XENP019048

SEQ ID NO: 16292 - protein, 11 aa, Artificial Sequence
  Description of Artificial Sequence: Synthetic peptide
  XENP019048 vlCDR1
RASQSVSNDVA

SEQ ID NO: 16293 - protein, 7 aa, Artificial Sequence
  Description of Artificial Sequence: Synthetic peptide
  XENP019048 vlCDR2
YASHRYT

SEQ ID NO: 16294 - protein, 9 aa, Artificial Sequence
  Description of Artificial Sequence: Synthetic peptide
  XENP019048 vlCDR3
QQDWSSPRT

SEQ ID NO: 16295 - protein, 451 aa, Artificial Sequence; identical to SEQ ID NO: 11545
  Description of Artificial Sequence: Synthetic polypeptide
  XENP019049 1G6_H1_L1.172_IgG1_PVA_/S267K Heavy Chain

SEQ ID NO: 16296 - protein, 122 aa, Artificial Sequence; identical to SEQ ID NO: 6246
  Description of Artificial Sequence: Synthetic polypeptide
  VH of XENP019049

SEQ ID NO: 16297 - protein, 5 aa, Artificial Sequence
  Description of Artificial Sequence: Synthetic peptide
  XENP019049 vhCDR1
NYWMN

SEQ ID NO: 16298 - protein, 19 aa, Artificial Sequence
  Description of Artificial Sequence: Synthetic peptide
  XENP019049 vhCDR2
EIRLKSNNYATHYAEPVKG

SEQ ID NO: 16299 - protein, 11 aa, Artificial Sequence
  Description of Artificial Sequence: Synthetic peptide
  XENP019049 vhCDR3
YYGNYGGYFDV

SEQ ID NO: 16300 - protein, 214 aa, Artificial Sequence
  Description of Artificial Sequence: Synthetic polypeptide
  XENP019049 1G6_H1_L1.172_IgG1_PVA_/S267K Light Chain
SIVMTQSPATLSVSPGERATLSCRASQSVSNDVAWYQQKPGQSPRLLINYASHRYTSVPDRFTGSGYGTEFTLTISSLQSEDFAVYFCQQDFSSPRTFGGGTKVEIKRTVAAPSVFIFPPSDEQLKSGTASVVCLLNNFYPREAKVQWKVDNALQSGNSQESVTEQDSKDSTYSLSSTLTLSKADYEKHKVYACEVTHQGLSSPVTKSFNRGEC

SEQ ID NO: 16301 - protein, 107 aa, Artificial Sequence; identical to SEQ ID NO: 10591
  Description of Artificial Sequence: Synthetic polypeptide
  VL of XENP019049

SEQ ID NO: 16302 - protein, 11 aa, Artificial Sequence
  Description of Artificial Sequence: Synthetic peptide
  XENP019049 vlCDR1
RASQSVSNDVA

SEQ ID NO: 16303 - protein, 7 aa, Artificial Sequence
  Description of Artificial Sequence: Synthetic peptide
  XENP019049 vlCDR2
YASHRYT

SEQ ID NO: 16304 - protein, 9 aa, Artificial Sequence
  Description of Artificial Sequence: Synthetic peptide
  XENP019049 vlCDR3
QQDFSSPRT

SEQ ID NO: 16305 - protein, 451 aa, Artificial Sequence; identical to SEQ ID NO: 11545
  Description of Artificial Sequence: Synthetic polypeptide
  XENP019050 1G6_H1_L1.173_IgG1_PVA_/S267K Heavy Chain

SEQ ID NO: 16306 - protein, 122 aa, Artificial Sequence; identical to SEQ ID NO: 6246
  Description of Artificial Sequence: Synthetic polypeptide
  VH of XENP019050

SEQ ID NO: 16307 - protein, 5 aa, Artificial Sequence
  Description of Artificial Sequence: Synthetic peptide
  XENP019050 vhCDR1
NYWMN

SEQ ID NO: 16308 - protein, 19 aa, Artificial Sequence
  Description of Artificial Sequence: Synthetic peptide
  XENP019050 vhCDR2
EIRLKSNNYATHYAEPVKG

SEQ ID NO: 16309 - protein, 11 aa, Artificial Sequence
  Description of Artificial Sequence: Synthetic peptide
  XENP019050 vhCDR3
YYGNYGGYFDV

SEQ ID NO: 16310 - protein, 214 aa, Artificial Sequence
  Description of Artificial Sequence: Synthetic polypeptide
  XENP019050 1G6_H1_L1.173_IgG1_PVA_/S267K Light Chain
SIVMTQSPATLSVSPGERATLSCRASQSVSNDVAWYQQKPGQSPRLLINYASHRYTGVPDRFTGSGYGTEFTLTISSLQSEDFAVYFCQQDFGSPRTFGGGTKVEIKRTVAAPSVFIFPPSDEQLKSGTASVVCLLNNFYPREAKVQWKVDNALQSGNSQESVTEQDSKDSTYSLSSTLTLSKADYEKHKVYACEVTHQGLSSPVTKSFNRGEC

SEQ ID NO: 16311 - protein, 107 aa, Artificial Sequence; identical to SEQ ID NO: 10600
  Description of Artificial Sequence: Synthetic polypeptide
  VL of XENP019050

SEQ ID NO: 16312 - protein, 11 aa, Artificial Sequence
  Description of Artificial Sequence: Synthetic peptide
  XENP019050 vlCDR1
RASQSVSNDVA

SEQ ID NO: 16313 - protein, 7 aa, Artificial Sequence
  Description of Artificial Sequence: Synthetic peptide
  XENP019050 vlCDR2
YASHRYT

SEQ ID NO: 16314 - protein, 9 aa, Artificial Sequence
  Description of Artificial Sequence: Synthetic peptide
  XENP019050 vlCDR3
QQDFGSPRT

SEQ ID NO: 16315 - protein, 451 aa, Artificial Sequence; identical to SEQ ID NO: 11545
  Description of Artificial Sequence: Synthetic polypeptide
  XENP019051 1G6_H1_L1.174_IgG1_PVA_/S267K Heavy Chain

SEQ ID NO: 16316 - protein, 122 aa, Artificial Sequence; identical to SEQ ID NO: 6246
  Description of Artificial Sequence: Synthetic polypeptide
  VH of XENP019051

SEQ ID NO: 16317 - protein, 5 aa, Artificial Sequence
  Description of Artificial Sequence: Synthetic peptide
  XENP019051 vhCDR1
NYWMN

SEQ ID NO: 16318 - protein, 19 aa, Artificial Sequence
  Description of Artificial Sequence: Synthetic peptide
  XENP019051 vhCDR2
EIRLKSNNYATHYAEPVKG

SEQ ID NO: 16319 - protein, 11 aa, Artificial Sequence
  Description of Artificial Sequence: Synthetic peptide
  XENP019051 vhCDR3
YYGNYGGYFDV

SEQ ID NO: 16320 - protein, 214 aa, Artificial Sequence
  Description of Artificial Sequence: Synthetic polypeptide
  XENP019051 1G6_H1_L1.174_IgG1_PVA_/S267K Light Chain
SIVMTQSPATLSVSPGERATLSCRASQSVSNDVAWYQQKPGQSPRLLINYASHRYTGVPDRFTGSGYGTEFTLTISSLQSEDFAVYFCQQDWGSPRTFGGGTKVEIKRTVAAPSVFIFPPSDEQLKSGTASVVCLLNNFYPREAKVQWKVDNALQSGNSQESVTEQDSKDSTYSLSSTLTLSKADYEKHKVYACEVTHQGLSSPVTKSFNRGEC

SEQ ID NO: 16321 - protein, 107 aa, Artificial Sequence; identical to SEQ ID NO: 10609
  Description of Artificial Sequence: Synthetic polypeptide
  VL of XENP019051

SEQ ID NO: 16322 - protein, 11 aa, Artificial Sequence
  Description of Artificial Sequence: Synthetic peptide
  XENP019051 vlCDR1
RASQSVSNDVA

SEQ ID NO: 16323 - protein, 7 aa, Artificial Sequence
  Description of Artificial Sequence: Synthetic peptide
  XENP019051 vlCDR2
YASHRYT

SEQ ID NO: 16324 - protein, 9 aa, Artificial Sequence
  Description of Artificial Sequence: Synthetic peptide
  XENP019051 vlCDR3
QQDWGSPRT

SEQ ID NO: 16325 - protein, 451 aa, Artificial Sequence; identical to SEQ ID NO: 11545
  Description of Artificial Sequence: Synthetic polypeptide
  XENP019052 1G6_H1_L1.175_IgG1_PVA_/S267K Heavy Chain

SEQ ID NO: 16326 - protein, 122 aa, Artificial Sequence; identical to SEQ ID NO: 6246
  Description of Artificial Sequence: Synthetic polypeptide
  VH of XENP019052

SEQ ID NO: 16327 - protein, 5 aa, Artificial Sequence
  Description of Artificial Sequence: Synthetic peptide
  XENP019052 vhCDR1
NYWMN

SEQ ID NO: 16328 - protein, 19 aa, Artificial Sequence
  Description of Artificial Sequence: Synthetic peptide
  XENP019052 vhCDR2
EIRLKSNNYATHYAEPVKG

SEQ ID NO: 16329 - protein, 11 aa, Artificial Sequence
  Description of Artificial Sequence: Synthetic peptide
  XENP019052 vhCDR3
YYGNYGGYFDV

SEQ ID NO: 16330 - protein, 214 aa, Artificial Sequence
  Description of Artificial Sequence: Synthetic polypeptide
  XENP019052 1G6_H1_L1.175_IgG1_PVA_/S267K Light Chain
SIVMTQSPATLSVSPGERATLSCRASQSVGNDVAWYQQKPGQSPRLLINYASHRYTSVPDRFTGSGYGTEFTLTISSLQSEDFAVYFCQQDWSSPRTFGGGTKVEIKRTVAAPSVFIFPPSDEQLKSGTASVVCLLNNFYPREAKVQWKVDNALQSGNSQESVTEQDSKDSTYSLSSTLTLSKADYEKHKVYACEVTHQGLSSPVTKSFNRGEC

SEQ ID NO: 16331 - protein, 107 aa, Artificial Sequence; identical to SEQ ID NO: 10618
  Description of Artificial Sequence: Synthetic polypeptide
  VL of XENP019052

SEQ ID NO: 16332 - protein, 11 aa, Artificial Sequence
  Description of Artificial Sequence: Synthetic peptide
  XENP019052 vlCDR1
RASQSVGNDVA

SEQ ID NO: 16333 - protein, 7 aa, Artificial Sequence
  Description of Artificial Sequence: Synthetic peptide
  XENP019052 vlCDR2
YASHRYT

SEQ ID NO: 16334 - protein, 9 aa, Artificial Sequence
  Description of Artificial Sequence: Synthetic peptide
  XENP019052 vlCDR3
QQDWSSPRT

SEQ ID NO: 16335 - protein, 451 aa, Artificial Sequence; identical to SEQ ID NO: 11545
  Description of Artificial Sequence: Synthetic polypeptide
  XENP019053 1G6_H1_L1.176_IgG1_PVA_/S267K Heavy Chain

SEQ ID NO: 16336 - protein, 122 aa, Artificial Sequence; identical to SEQ ID NO: 6246
  Description of Artificial Sequence: Synthetic polypeptide
  VH of XENP019053

SEQ ID NO: 16337 - protein, 5 aa, Artificial Sequence
  Description of Artificial Sequence: Synthetic peptide
  XENP019053 vhCDR1
NYWMN

SEQ ID NO: 16338 - protein, 19 aa, Artificial Sequence
  Description of Artificial Sequence: Synthetic peptide
  XENP019053 vhCDR2
EIRLKSNNYATHYAEPVKG

SEQ ID NO: 16339 - protein, 11 aa, Artificial Sequence
  Description of Artificial Sequence: Synthetic peptide
  XENP019053 vhCDR3
YYGNYGGYFDV

SEQ ID NO: 16340 - protein, 214 aa, Artificial Sequence
  Description of Artificial Sequence: Synthetic polypeptide
  XENP019053 1G6_H1_L1.176_IgG1_PVA_/S267K Light Chain
SIVMTQSPATLSVSPGERATLSCRASQSVGNDVAWYQQKPGQSPRLLINYASWRYTSVPDRFTGSGYGTEFTLTISSLQSEDFAVYFCQQDYSSPRTFGGGTKVEIKRTVAAPSVFIFPPSDEQLKSGTASVVCLLNNFYPREAKVQWKVDNALQSGNSQESVTEQDSKDSTYSLSSTLTLSKADYEKHKVYACEVTHQGLSSPVTKSFNRGEC

SEQ ID NO: 16341 - protein, 107 aa, Artificial Sequence; identical to SEQ ID NO: 10627
  Description of Artificial Sequence: Synthetic polypeptide
  VL of XENP019053

SEQ ID NO: 16342 - protein, 11 aa, Artificial Sequence
  Description of Artificial Sequence: Synthetic peptide
  XENP019053 vlCDR1
RASQSVGNDVA

SEQ ID NO: 16343 - protein, 7 aa, Artificial Sequence
  Description of Artificial Sequence: Synthetic peptide
  XENP019053 vlCDR2
YASWRYT

SEQ ID NO: 16344 - protein, 9 aa, Artificial Sequence
  Description of Artificial Sequence: Synthetic peptide
  XENP019053 vlCDR3
QQDYSSPRT

SEQ ID NO: 16345 - protein, 451 aa, Artificial Sequence; identical to SEQ ID NO: 11545
  Description of Artificial Sequence: Synthetic polypeptide
  XENP019054 1G6_H1_L1.177_IgG1_PVA_/S267K Heavy Chain

SEQ ID NO: 16346 - protein, 122 aa, Artificial Sequence; identical to SEQ ID NO: 6246
  Description of Artificial Sequence: Synthetic polypeptide
  VH of XENP019054

SEQ ID NO: 16347 - protein, 5 aa, Artificial Sequence
  Description of Artificial Sequence: Synthetic peptide
  XENP019054 vhCDR1
NYWMN

SEQ ID NO: 16348 - protein, 19 aa, Artificial Sequence
  Description of Artificial Sequence: Synthetic peptide
  XENP019054 vhCDR2
EIRLKSNNYATHYAEPVKG

SEQ ID NO: 16349 - protein, 11 aa, Artificial Sequence
  Description of Artificial Sequence: Synthetic peptide
  XENP019054 vhCDR3
YYGNYGGYFDV

SEQ ID NO: 16350 - protein, 214 aa, Artificial Sequence
  Description of Artificial Sequence: Synthetic polypeptide
  XENP019054 1G6_H1_L1.177_IgG1_PVA_/S267K Light Chain
SIVMTQSPATLSVSPGERATLSCRASQSVGNDVAWYQQKPGQSPRLLINYASHRYTSVPDRFTGSGYGTEFTLTISSLQSEDFAVYFCQQDFSSPRTFGGGTKVEIKRTVAAPSVFIFPPSDEQLKSGTASVVCLLNNFYPREAKVQWKVDNALQSGNSQESVTEQDSKDSTYSLSSTLTLSKADYEKHKVYACEVTHQGLSSPVTKSFNRGEC

SEQ ID NO: 16351 - protein, 107 aa, Artificial Sequence; identical to SEQ ID NO: 10636
  Description of Artificial Sequence: Synthetic polypeptide
  VL of XENP019054

SEQ ID NO: 16352 - protein, 11 aa, Artificial Sequence
  Description of Artificial Sequence: Synthetic peptide
  XENP019054 vlCDR1
RASQSVGNDVA

SEQ ID NO: 16353 - protein, 7 aa, Artificial Sequence
  Description of Artificial Sequence: Synthetic peptide
  XENP019054 vlCDR2
YASHRYT

SEQ ID NO: 16354 - protein, 9 aa, Artificial Sequence
  Description of Artificial Sequence: Synthetic peptide
  XENP019054 vlCDR3
QQDFSSPRT

SEQ ID NO: 16355 - protein, 451 aa, Artificial Sequence; identical to SEQ ID NO: 11545
  Description of Artificial Sequence: Synthetic polypeptide
  XENP019055 1G6_H1_L1.178_IgG1_PVA_/S267K Heavy Chain

SEQ ID NO: 16356 - protein, 122 aa, Artificial Sequence; identical to SEQ ID NO: 6246
  Description of Artificial Sequence: Synthetic polypeptide
  VH of XENP019055

SEQ ID NO: 16357 - protein, 5 aa, Artificial Sequence
  Description of Artificial Sequence: Synthetic peptide
  XENP019055 vhCDR1
NYWMN

SEQ ID NO: 16358 - protein, 19 aa, Artificial Sequence
  Description of Artificial Sequence: Synthetic peptide
  XENP019055 vhCDR2
EIRLKSNNYATHYAEPVKG

SEQ ID NO: 16359 - protein, 11 aa, Artificial Sequence
  Description of Artificial Sequence: Synthetic peptide
  XENP019055 vhCDR3
YYGNYGGYFDV

SEQ ID NO: 16360 - protein, 214 aa, Artificial Sequence
  Description of Artificial Sequence: Synthetic polypeptide
  XENP019055 1G6_H1_L1.178_IgG1_PVA_/S267K Light Chain
SIVMTQSPATLSVSPGERATLSCRASQSVGNDVAWYQQKPGQSPRLLINYASHRYTSVPDRFTGSGYGTEFTLTISSLQSEDFAVYFCQQDGSSPRTFGGGTKVEIKRTVAAPSVFIFPPSDEQLKSGTASVVCLLNNFYPREAKVQWKVDNALQSGNSQESVTEQDSKDSTYSLSSTLTLSKADYEKHKVYACEVTHQGLSSPVTKSFNRGEC

SEQ ID NO: 16361 - protein, 107 aa, Artificial Sequence; identical to SEQ ID NO: 10645
  Description of Artificial Sequence: Synthetic polypeptide
  VL of XENP019055

SEQ ID NO: 16362 - protein, 11 aa, Artificial Sequence
  Description of Artificial Sequence: Synthetic peptide
  XENP019055 vlCDR1
RASQSVGNDVA

SEQ ID NO: 16363 - protein, 7 aa, Artificial Sequence
  Description of Artificial Sequence: Synthetic peptide
  XENP019055 vlCDR2
YASHRYT

SEQ ID NO: 16364 - protein, 9 aa, Artificial Sequence
  Description of Artificial Sequence: Synthetic peptide
  XENP019055 vlCDR3
QQDGSSPRT

SEQ ID NO: 16365 - protein, 451 aa, Artificial Sequence; identical to SEQ ID NO: 11545
  Description of Artificial Sequence: Synthetic polypeptide
  XENP019056 1G6_H1_L1.179_IgG1_PVA_/S267K Heavy Chain

SEQ ID NO: 16366 - protein, 122 aa, Artificial Sequence; identical to SEQ ID NO: 6246
  Description of Artificial Sequence: Synthetic polypeptide
  VH of XENP019056

SEQ ID NO: 16367 - protein, 5 aa, Artificial Sequence
  Description of Artificial Sequence: Synthetic peptide
  XENP019056 vhCDR1
NYWMN

SEQ ID NO: 16368 - protein, 19 aa, Artificial Sequence
  Description of Artificial Sequence: Synthetic peptide
  XENP019056 vhCDR2
EIRLKSNNYATHYAEPVKG

SEQ ID NO: 16369 - protein, 11 aa, Artificial Sequence
  Description of Artificial Sequence: Synthetic peptide
  XENP019056 vhCDR3
YYGNYGGYFDV

SEQ ID NO: 16370 - protein, 214 aa, Artificial Sequence
  Description of Artificial Sequence: Synthetic polypeptide
  XENP019056 1G6_H1_L1.179_IgG1_PVA_/S267K Light Chain
SIVMTQSPATLSVSPGERATLSCRASQSVSNDVAWYQQKPGQSPRLLINYASWRYTSVPDRFTGSGYGTEFTLTISSLQSEDFAVYFCQQDFSSPRTFGGGTKVEIKRTVAAPSVFIFPPSDEQLKSGTASVVCLLNNFYPREAKVQWKVDNALQSGNSQESVTEQDSKDSTYSLSSTLTLSKADYEKHKVYACEVTHQGLSSPVTKSFNRGEC

SEQ ID NO: 16371 - protein, 107 aa, Artificial Sequence; identical to SEQ ID NO: 10654
  Description of Artificial Sequence: Synthetic polypeptide
  VL of XENP019056

SEQ ID NO: 16372 - protein, 11 aa, Artificial Sequence
  Description of Artificial Sequence: Synthetic peptide
  XENP019056 vlCDR1
RASQSVSNDVA

SEQ ID NO: 16373 - protein, 7 aa, Artificial Sequence
  Description of Artificial Sequence: Synthetic peptide
  XENP019056 vlCDR2
YASWRYT

SEQ ID NO: 16374 - protein, 9 aa, Artificial Sequence
  Description of Artificial Sequence: Synthetic peptide
  XENP019056 vlCDR3
QQDFSSPRT

SEQ ID NO: 16375 - protein, 451 aa, Artificial Sequence; identical to SEQ ID NO: 11545
  Description of Artificial Sequence: Synthetic polypeptide
  XENP019057 1G6_H1_L1.180_IgG1_PVA_/S267K Heavy Chain

SEQ ID NO: 16376 - protein, 122 aa, Artificial Sequence; identical to SEQ ID NO: 6246
  Description of Artificial Sequence: Synthetic polypeptide
  VH of XENP019057

SEQ ID NO: 16377 - protein, 5 aa, Artificial Sequence
  Description of Artificial Sequence: Synthetic peptide
  XENP019057 vhCDR1
NYWMN

SEQ ID NO: 16378 - protein, 19 aa, Artificial Sequence
  Description of Artificial Sequence: Synthetic peptide
  XENP019057 vhCDR2
EIRLKSNNYATHYAEPVKG

SEQ ID NO: 16379 - protein, 11 aa, Artificial Sequence
  Description of Artificial Sequence: Synthetic peptide
  XENP019057 vhCDR3
YYGNYGGYFDV

SEQ ID NO: 16380 - protein, 214 aa, Artificial Sequence
  Description of Artificial Sequence: Synthetic polypeptide
  XENP019057 1G6_H1_L1.180_IgG1_PVA_/S267K Light Chain
SIVMTQSPATLSVSPGERATLSCRASQSVSNDVAWYQQKPGQSPRLLINYASWRYTSVPDRFTGSGYGTEFTLTISSLQSEDFAVYFCQQDWSSPRTFGGGTKVEIKRTVAAPSVFIFPPSDEQLKSGTASVVCLLNNFYPREAKVQWKVDNALQSGNSQESVTEQDSKDSTYSLSSTLTLSKADYEKHKVYACEVTHQGLSSPVTKSFNRGEC

SEQ ID NO: 16381 - protein, 107 aa, Artificial Sequence; identical to SEQ ID NO: 10663
  Description of Artificial Sequence: Synthetic polypeptide
  VL of XENP019057

SEQ ID NO: 16382 - protein, 11 aa, Artificial Sequence
  Description of Artificial Sequence: Synthetic peptide
  XENP019057 vlCDR1
RASQSVSNDVA

SEQ ID NO: 16383 - protein, 7 aa, Artificial Sequence
  Description of Artificial Sequence: Synthetic peptide
  XENP019057 vlCDR2
YASWRYT

SEQ ID NO: 16384 - protein, 9 aa, Artificial Sequence
  Description of Artificial Sequence: Synthetic peptide
  XENP019057 vlCDR3
QQDWSSPRT

SEQ ID NO: 16385 - protein, 451 aa, Artificial Sequence; identical to SEQ ID NO: 11545
  Description of Artificial Sequence: Synthetic polypeptide
  XENP019058 1G6_H1_L1.181_IgG1_PVA_/S267K Heavy Chain

SEQ ID NO: 16386 - protein, 122 aa, Artificial Sequence; identical to SEQ ID NO: 6246
  Description of Artificial Sequence: Synthetic polypeptide
  VH of XENP019058

SEQ ID NO: 16387 - protein, 5 aa, Artificial Sequence
  Description of Artificial Sequence: Synthetic peptide
  XENP019058 vhCDR1
NYWMN

SEQ ID NO: 16388 - protein, 19 aa, Artificial Sequence
  Description of Artificial Sequence: Synthetic peptide
  XENP019058 vhCDR2
EIRLKSNNYATHYAEPVKG

SEQ ID NO: 16389 - protein, 11 aa, Artificial Sequence
  Description of Artificial Sequence: Synthetic peptide
  XENP019058 vhCDR3
YYGNYGGYFDV

SEQ ID NO: 16390 - protein, 214 aa, Artificial Sequence
  Description of Artificial Sequence: Synthetic polypeptide
  XENP019058 1G6_H1_L1.181_IgG1_PVA_/S267K Light Chain
SIVMTQSPATLSVSPGERATLSCRASQSVSNDVAWYQQKPGQSPRLLINYASWRYTSVPDRFTGSGYGTEFTLTISSLQSEDFAVYFCQQDGSSPRTFGGGTKVEIKRTVAAPSVFIFPPSDEQLKSGTASVVCLLNNFYPREAKVQWKVDNALQSGNSQESVTEQDSKDSTYSLSSTLTLSKADYEKHKVYACEVTHQGLSSPVTKSFNRGEC

SEQ ID NO: 16391 - protein, 107 aa, Artificial Sequence; identical to SEQ ID NO: 10672
  Description of Artificial Sequence: Synthetic polypeptide
  VL of XENP019058

SEQ ID NO: 16392 - protein, 11 aa, Artificial Sequence
  Description of Artificial Sequence: Synthetic peptide
  XENP019058 vlCDR1
RASQSVSNDVA

SEQ ID NO: 16393 - protein, 7 aa, Artificial Sequence
  Description of Artificial Sequence: Synthetic peptide
  XENP019058 vlCDR2
YASWRYT

SEQ ID NO: 16394 - protein, 9 aa, Artificial Sequence
  Description of Artificial Sequence: Synthetic peptide
  XENP019058 vlCDR3
QQDGSSPRT

SEQ ID NO: 16395 - protein, 451 aa, Artificial Sequence; identical to SEQ ID NO: 11545
  Description of Artificial Sequence: Synthetic polypeptide
  XENP019059 1G6_H1_L1.182_IgG1_PVA_/S267K Heavy Chain

SEQ ID NO: 16396 - protein, 122 aa, Artificial Sequence; identical to SEQ ID NO: 6246
  Description of Artificial Sequence: Synthetic polypeptide
  VH of XENP019059

SEQ ID NO: 16397 - protein, 5 aa, Artificial Sequence
  Description of Artificial Sequence: Synthetic peptide
  XENP019059 vhCDR1
NYWMN

SEQ ID NO: 16398 - protein, 19 aa, Artificial Sequence
  Description of Artificial Sequence: Synthetic peptide
  XENP019059 vhCDR2
EIRLKSNNYATHYAEPVKG

SEQ ID NO: 16399 - protein, 11 aa, Artificial Sequence
  Description of Artificial Sequence: Synthetic peptide
  XENP019059 vhCDR3
YYGNYGGYFDV

SEQ ID NO: 16400 - protein, 214 aa, Artificial Sequence
  Description of Artificial Sequence: Synthetic polypeptide
  XENP019059 1G6_H1_L1.182_IgG1_PVA_/S267K Light Chain
SIVMTQSPATLSVSPGERATLSCRASQSVGNDVAWYQQKPGQSPRLLINYASWRYTSVPDRFTGSGYGTEFTLTISSLQSEDFAVYFCQQDWSSPRTFGGGTKVEIKRTVAAPSVFIFPPSDEQLKSGTASVVCLLNNFYPREAKVQWKVDNALQSGNSQESVTEQDSKDSTYSLSSTLTLSKADYEKHKVYACEVTHQGLSSPVTKSFNRGEC

SEQ ID NO: 16401 - protein, 107 aa, Artificial Sequence; identical to SEQ ID NO: 10681
  Description of Artificial Sequence: Synthetic polypeptide
  VL of XENP019059

SEQ ID NO: 16402 - protein, 11 aa, Artificial Sequence
  Description of Artificial Sequence: Synthetic peptide
  XENP019059 vlCDR1
RASQSVGNDVA

SEQ ID NO: 16403 - protein, 7 aa, Artificial Sequence
  Description of Artificial Sequence: Synthetic peptide
  XENP019059 vlCDR2
YASWRYT

SEQ ID NO: 16404 - protein, 9 aa, Artificial Sequence
  Description of Artificial Sequence: Synthetic peptide
  XENP019059 vlCDR3
QQDWSSPRT

SEQ ID NO: 16405 - protein, 451 aa, Artificial Sequence; identical to SEQ ID NO: 11545
  Description of Artificial Sequence: Synthetic polypeptide
  XENP019060 1G6_H1_L1.183_IgG1_PVA_/S267K Heavy Chain

SEQ ID NO: 16406 - protein, 122 aa, Artificial Sequence; identical to SEQ ID NO: 6246
  Description of Artificial Sequence: Synthetic polypeptide
  VH of XENP019060

SEQ ID NO: 16407 - protein, 5 aa, Artificial Sequence
  Description of Artificial Sequence: Synthetic peptide
  XENP019060 vhCDR1
NYWMN

SEQ ID NO: 16408 - protein, 19 aa, Artificial Sequence
  Description of Artificial Sequence: Synthetic peptide
  XENP019060 vhCDR2
EIRLKSNNYATHYAEPVKG

SEQ ID NO: 16409 - protein, 11 aa, Artificial Sequence
  Description of Artificial Sequence: Synthetic peptide
  XENP019060 vhCDR3
YYGNYGGYFDV

SEQ ID NO: 16410 - protein, 214 aa, Artificial Sequence
  Description of Artificial Sequence: Synthetic polypeptide
  XENP019060 1G6_H1_L1.183_IgG1_PVA_/S267K Light Chain
SIVMTQSPATLSVSPGERATLSCRASQSVGNDVAWYQQKPGQSPRLLINYASWRYTSVPDRFTGSGYGTEFTLTISSLQSEDFAVYFCQQDFSSPRTFGGGTKVEIKRTVAAPSVFIFPPSDEQLKSGTASVVCLLNNFYPREAKVQWKVDNALQSGNSQESVTEQDSKDSTYSLSSTLTLSKADYEKHKVYACEVTHQGLSSPVTKSFNRGEC

SEQ ID NO: 16411 - protein, 107 aa, Artificial Sequence; identical to SEQ ID NO: 10690
  Description of Artificial Sequence: Synthetic polypeptide
  VL of XENP019060

SEQ ID NO: 16412 - protein, 11 aa, Artificial Sequence
  Description of Artificial Sequence: Synthetic peptide
  XENP019060 vlCDR1
RASQSVGNDVA

SEQ ID NO: 16413 - protein, 7 aa, Artificial Sequence
  Description of Artificial Sequence: Synthetic peptide
  XENP019060 vlCDR2
YASWRYT

SEQ ID NO: 16414 - protein, 9 aa, Artificial Sequence
  Description of Artificial Sequence: Synthetic peptide
  XENP019060 vlCDR3
QQDFSSPRT

SEQ ID NO: 16415 - protein, 451 aa, Artificial Sequence; identical to SEQ ID NO: 11545
  Description of Artificial Sequence: Synthetic polypeptide
  XENP019061 1G6_H1_L1.184_IgG1_PVA_/S267K Heavy Chain

SEQ ID NO: 16416 - protein, 122 aa, Artificial Sequence; identical to SEQ ID NO: 6246
  Description of Artificial Sequence: Synthetic polypeptide
  VH of XENP019061

SEQ ID NO: 16417 - protein, 5 aa, Artificial Sequence
  Description of Artificial Sequence: Synthetic peptide
  XENP019061 vhCDR1
NYWMN

SEQ ID NO: 16418 - protein, 19 aa, Artificial Sequence
  Description of Artificial Sequence: Synthetic peptide
  XENP019061 vhCDR2
EIRLKSNNYATHYAEPVKG

SEQ ID NO: 16419 - protein, 11 aa, Artificial Sequence
  Description of Artificial Sequence: Synthetic peptide
  XENP019061 vhCDR3
YYGNYGGYFDV

SEQ ID NO: 16420 - protein, 214 aa, Artificial Sequence
  Description of Artificial Sequence: Synthetic polypeptide
  XENP019061 1G6_H1_L1.184_IgG1_PVA_/S267K Light Chain
SIVMTQSPATLSVSPGERATLSCRASQSVGNDVAWYQQKPGQSPRLLINYASWRYTSVPDRFTGSGYGTEFTLTISSLQSEDFAVYFCQQDGSSPRTFGGGTKVEIKRTVAAPSVFIFPPSDEQLKSGTASVVCLLNNFYPREAKVQWKVDNALQSGNSQESVTEQDSKDSTYSLSSTLTLSKADYEKHKVYACEVTHQGLSSPVTKSFNRGEC

SEQ ID NO: 16421 - protein, 107 aa, Artificial Sequence; identical to SEQ ID NO: 10699
  Description of Artificial Sequence: Synthetic polypeptide
  VL of XENP019061

SEQ ID NO: 16422 - protein, 11 aa, Artificial Sequence
  Description of Artificial Sequence: Synthetic peptide
  XENP019061 vlCDR1
RASQSVGNDVA

SEQ ID NO: 16423 - protein, 7 aa, Artificial Sequence
  Description of Artificial Sequence: Synthetic peptide
  XENP019061 vlCDR2
YASWRYT

SEQ ID NO: 16424 - protein, 9 aa, Artificial Sequence
  Description of Artificial Sequence: Synthetic peptide
  XENP019061 vlCDR3
QQDGSSPRT

SEQ ID NO: 16425 - protein, 451 aa, Artificial Sequence; identical to SEQ ID NO: 11545
  Description of Artificial Sequence: Synthetic polypeptide
  XENP019062 1G6_H1_L1.185_IgG1_PVA_/S267K Heavy Chain

SEQ ID NO: 16426 - protein, 122 aa, Artificial Sequence; identical to SEQ ID NO: 6246
  Description of Artificial Sequence: Synthetic polypeptide
  VH of XENP019062

SEQ ID NO: 16427 - protein, 5 aa, Artificial Sequence
  Description of Artificial Sequence: Synthetic peptide
  XENP019062 vhCDR1
NYWMN

SEQ ID NO: 16428 - protein, 19 aa, Artificial Sequence
  Description of Artificial Sequence: Synthetic peptide
  XENP019062 vhCDR2
EIRLKSNNYATHYAEPVKG

SEQ ID NO: 16429 - protein, 11 aa, Artificial Sequence
  Description of Artificial Sequence: Synthetic peptide
  XENP019062 vhCDR3
YYGNYGGYFDV

SEQ ID NO: 16430 - protein, 214 aa, Artificial Sequence
  Description of Artificial Sequence: Synthetic polypeptide
  XENP019062 1G6_H1_L1.185_IgG1_PVA_/S267K Light Chain
EIVMTQSPATLSVSPGERATLSCRASQSVSNDLAWYQQKPGQSPRLLINYASHRYTGVPARFSGSGYGTEFTLTISSLQSEDFAVYYCQQDYSSPRTFGGGTKVEIKRTVAAPSVFIFPPSDEQLKSGTASVVCLLNNFYPREAKVQWKVDNALQSGNSQESVTEQDSKDSTYSLSSTLTLSKADYEKHKVYACEVTHQGLSSPVTKSFNRGEC

SEQ ID NO: 16431 - protein, 107 aa, Artificial Sequence; identical to SEQ ID NO: 10708
  Description of Artificial Sequence: Synthetic polypeptide
  VL of XENP019062

SEQ ID NO: 16432 - protein, 11 aa, Artificial Sequence
  Description of Artificial Sequence: Synthetic peptide
  XENP019062 vlCDR1
RASQSVSNDLA

SEQ ID NO: 16433 - protein, 7 aa, Artificial Sequence
  Description of Artificial Sequence: Synthetic peptide
  XENP019062 vlCDR2
YASHRYT

SEQ ID NO: 16434 - protein, 9 aa, Artificial Sequence
  Description of Artificial Sequence: Synthetic peptide
  XENP019062 vlCDR3
QQDYSSPRT

SEQ ID NO: 16435 - protein, 451 aa, Artificial Sequence; identical to SEQ ID NO: 11545
  Description of Artificial Sequence: Synthetic polypeptide
  XENP019063 1G6_H1_L1.186_IgG1_PVA_/S267K Heavy Chain

SEQ ID NO: 16436 - protein, 122 aa, Artificial Sequence; identical to SEQ ID NO: 6246
  Description of Artificial Sequence: Synthetic polypeptide
  VH of XENP019063

SEQ ID NO: 16437 - protein, 5 aa, Artificial Sequence
  Description of Artificial Sequence: Synthetic peptide
  XENP019063 vhCDR1
NYWMN

SEQ ID NO: 16438 - protein, 19 aa, Artificial Sequence
  Description of Artificial Sequence: Synthetic peptide
  XENP019063 vhCDR2
EIRLKSNNYATHYAEPVKG

SEQ ID NO: 16439 - protein, 11 aa, Artificial Sequence
  Description of Artificial Sequence: Synthetic peptide
  XENP019063 vhCDR3
YYGNYGGYFDV

SEQ ID NO: 16440 - protein, 214 aa, Artificial Sequence
  Description of Artificial Sequence: Synthetic polypeptide
  XENP019063 1G6_H1_L1.186_IgG1_PVA_/S267K Light Chain
DIVMTQSPATLSVSPGERATLSCRASQSVSNDLAWYQQKPGQSPRLLINYASHRYTGVPDRFSGSGYGTEFTLTISSLQSEDFAVYYCQQDYSSPRTFGGGTKVEIKRTVAAPSVFIFPPSDEQLKSGTASVVCLLNNFYPREAKVQWKVDNALQSGNSQESVTEQDSKDSTYSLSSTLTLSKADYEKHKVYACEVTHQGLSSPVTKSFNRGEC

SEQ ID NO: 16441 - protein, 107 aa, Artificial Sequence; identical to SEQ ID NO: 10717
  Description of Artificial Sequence: Synthetic polypeptide
  VL of XENP019063

SEQ ID NO: 16442 - protein, 11 aa, Artificial Sequence
  Description of Artificial Sequence: Synthetic peptide
  XENP019063 vlCDR1
RASQSVSNDLA

SEQ ID NO: 16443 - protein, 7 aa, Artificial Sequence
  Description of Artificial Sequence: Synthetic peptide
  XENP019063 vlCDR2
YASHRYT

SEQ ID NO: 16444 - protein, 9 aa, Artificial Sequence
  Description of Artificial Sequence: Synthetic peptide
  XENP019063 vlCDR3
QQDYSSPRT

SEQ ID NO: 16445 - protein, 451 aa, Artificial Sequence; identical to SEQ ID NO: 15945
  Description of Artificial Sequence: Synthetic polypeptide
  XENP019160 1G6_H1.269_L1.116_IgG1_PVA_/S267K Heavy Chain

SEQ ID NO: 16446 - protein, 122 aa, Artificial Sequence; identical to SEQ ID NO: 10275
  Description of Artificial Sequence: Synthetic polypeptide
  VH of XENP019160

SEQ ID NO: 16447 - protein, 5 aa, Artificial Sequence
  Description of Artificial Sequence: Synthetic peptide
  XENP019160 vhCDR1
NFWMN

SEQ ID NO: 16448 - protein, 19 aa, Artificial Sequence
  Description of Artificial Sequence: Synthetic peptide
  XENP019160 vhCDR2
EIRLYSNNYATHYAEPVKG

SEQ ID NO: 16449 - protein, 11 aa, Artificial Sequence
  Description of Artificial Sequence: Synthetic peptide
  XENP019160 vhCDR3
YYGNYGGYFDV

SEQ ID NO: 16450 - protein, 214 aa, Artificial Sequence; identical to SEQ ID NO: 15260
  Description of Artificial Sequence: Synthetic polypeptide
  XENP019160 1G6_H1.269_L1.116_IgG1_PVA_/S267K Light Chain

SEQ ID NO: 16451 - protein, 107 aa, Artificial Sequence; identical to SEQ ID NO: 9538
  Description of Artificial Sequence: Synthetic polypeptide
  VL of XENP019160

SEQ ID NO: 16452 - protein, 11 aa, Artificial Sequence
  Description of Artificial Sequence: Synthetic peptide
  XENP019160 vlCDR1
RASQSVSNDVA

SEQ ID NO: 16453 - protein, 7 aa, Artificial Sequence
  Description of Artificial Sequence: Synthetic peptide
  XENP019160 vlCDR2
YASHRYT

SEQ ID NO: 16454 - protein, 9 aa, Artificial Sequence
  Description of Artificial Sequence: Synthetic peptide
  XENP019160 vlCDR3
QQDFSSPRT

SEQ ID NO: 16455 - protein, 451 aa, Artificial Sequence; identical to SEQ ID NO: 15965
  Description of Artificial Sequence: Synthetic polypeptide
  XENP019161 1G6_H1.271_L1.116_IgG1_PVA_/S267K Heavy Chain

SEQ ID NO: 16456 - protein, 122 aa, Artificial Sequence; identical to SEQ ID NO: 10293
  Description of Artificial Sequence: Synthetic polypeptide
  VH of XENP019161

SEQ ID NO: 16457 - protein, 5 aa, Artificial Sequence
  Description of Artificial Sequence: Synthetic peptide
  XENP019161 vhCDR1
NYWMN

SEQ ID NO: 16458 - protein, 19 aa, Artificial Sequence
  Description of Artificial Sequence: Synthetic peptide
  XENP019161 vhCDR2
EIRLYSNNYATHYAEPVKG

SEQ ID NO: 16459 - protein, 11 aa, Artificial Sequence
  Description of Artificial Sequence: Synthetic peptide
  XENP019161 vhCDR3
YYGNYGGYFDV

SEQ ID NO: 16460 - protein, 214 aa, Artificial Sequence; identical to SEQ ID NO: 15260
  Description of Artificial Sequence: Synthetic polypeptide
  XENP019161 1G6_H1.271_L1.116_IgG1_PVA_/S267K Light Chain

SEQ ID NO: 16461 - protein, 107 aa, Artificial Sequence; identical to SEQ ID NO: 9538
  Description of Artificial Sequence: Synthetic polypeptide
  VL of XENP019161

SEQ ID NO: 16462 - protein, 11 aa, Artificial Sequence
  Description of Artificial Sequence: Synthetic peptide
  XENP019161 vlCDR1
RASQSVSNDVA

SEQ ID NO: 16463 - protein, 7 aa, Artificial Sequence
  Description of Artificial Sequence: Synthetic peptide
  XENP019161 vlCDR2
YASHRYT

SEQ ID NO: 16464 - protein, 9 aa, Artificial Sequence
  Description of Artificial Sequence: Synthetic peptide
  XENP019161 vlCDR3
QQDFSSPRT

SEQ ID NO: 16465 - protein, 451 aa, Artificial Sequence; identical to SEQ ID NO: 15975
  Description of Artificial Sequence: Synthetic polypeptide
  XENP019162 1G6_H1.272_L1.116_IgG1_PVA_/S267K Heavy Chain

SEQ ID NO: 16466 - protein, 122 aa, Artificial Sequence; identical to SEQ ID NO: 10302
  Description of Artificial Sequence: Synthetic polypeptide
  VH of XENP019162

SEQ ID NO: 16467 - protein, 5 aa, Artificial Sequence
  Description of Artificial Sequence: Synthetic peptide
  XENP019162 vhCDR1
NFWMN

SEQ ID NO: 16468 - protein, 19 aa, Artificial Sequence
  Description of Artificial Sequence: Synthetic peptide
  XENP019162 vhCDR2
EIRLYSNNYATHYAEPVKG

SEQ ID NO: 16469 - protein, 11 aa, Artificial Sequence
  Description of Artificial Sequence: Synthetic peptide
  XENP019162 vhCDR3
YYGNYGGYFDV

SEQ ID NO: 16470 - protein, 214 aa, Artificial Sequence; identical to SEQ ID NO: 15260
  Description of Artificial Sequence: Synthetic polypeptide
  XENP019162 1G6_H1.272_L1.116_IgG1_PVA_/S267K Light Chain

SEQ ID NO: 16471 - protein, 107 aa, Artificial Sequence; identical to SEQ ID NO: 9538
  Description of Artificial Sequence: Synthetic polypeptide
  VL of XENP019162

SEQ ID NO: 16472 - protein, 11 aa, Artificial Sequence
  Description of Artificial Sequence: Synthetic peptide
  XENP019162 vlCDR1
RASQSVSNDVA

SEQ ID NO: 16473 - protein, 7 aa, Artificial Sequence
  Description of Artificial Sequence: Synthetic peptide
  XENP019162 vlCDR2
YASHRYT

SEQ ID NO: 16474 - protein, 9 aa, Artificial Sequence
  Description of Artificial Sequence: Synthetic peptide
  XENP019162 vlCDR3
QQDFSSPRT

SEQ ID NO: 16475 - protein, 451 aa, Artificial Sequence; identical to SEQ ID NO: 12615
  Description of Artificial Sequence: Synthetic polypeptide
  XENP019163 1G6_H1.90_L1.177_IgG1_PVA_/S267K Heavy Chain

SEQ ID NO: 16476 - protein, 122 aa, Artificial Sequence; identical to SEQ ID NO: 7161
  Description of Artificial Sequence: Synthetic polypeptide
  VH of XENP019163

SEQ ID NO: 16477 - protein, 5 aa, Artificial Sequence
  Description of Artificial Sequence: Synthetic peptide
  XENP019163 vhCDR1
NYWMN

SEQ ID NO: 16478 - protein, 19 aa, Artificial Sequence
  Description of Artificial Sequence: Synthetic peptide
  XENP019163 vhCDR2
EIRLYSNNYATHYAEPVKG

SEQ ID NO: 16479 - protein, 11 aa, Artificial Sequence
  Description of Artificial Sequence: Synthetic peptide
  XENP019163 vhCDR3
YYGNYGGYFDV

SEQ ID NO: 16480 - protein, 214 aa, Artificial Sequence; identical to SEQ ID NO: 16350
  Description of Artificial Sequence: Synthetic polypeptide
  XENP019163 1G6_H1.90_L1.177_IgG1_PVA_/S267K Light Chain

SEQ ID NO: 16481 - protein, 107 aa, Artificial Sequence; identical to SEQ ID NO: 10636
  Description of Artificial Sequence: Synthetic polypeptide
  VL of XENP019163

SEQ ID NO: 16482 - protein, 11 aa, Artificial Sequence
  Description of Artificial Sequence: Synthetic peptide
  XENP019163 vlCDR1
RASQSVGNDVA

SEQ ID NO: 16483 - protein, 7 aa, Artificial Sequence
  Description of Artificial Sequence: Synthetic peptide
  XENP019163 vlCDR2
YASHRYT

SEQ ID NO: 16484 - protein, 9 aa, Artificial Sequence
  Description of Artificial Sequence: Synthetic peptide
  XENP019163 vlCDR3
QQDFSSPRT

SEQ ID NO: 16485 - protein, 451 aa, Artificial Sequence; identical to SEQ ID NO: 15945
  Description of Artificial Sequence: Synthetic polypeptide
  XENP019164 1G6_H1.269_L1.177_IgG1_PVA_/S267K Heavy Chain

SEQ ID NO: 16486 - protein, 122 aa, Artificial Sequence; identical to SEQ ID NO: 10275
  Description of Artificial Sequence: Synthetic polypeptide
  VH of XENP019164

SEQ ID NO: 16487 - protein, 5 aa, Artificial Sequence
  Description of Artificial Sequence: Synthetic peptide
  XENP019164 vhCDR1
NFWMN

SEQ ID NO: 16488 - protein, 19 aa, Artificial Sequence
  Description of Artificial Sequence: Synthetic peptide
  XENP019164 vhCDR2
EIRLYSNNYATHYAEPVKG

SEQ ID NO: 16489 - protein, 11 aa, Artificial Sequence
  Description of Artificial Sequence: Synthetic peptide
  XENP019164 vhCDR3
YYGNYGGYFDV

SEQ ID NO: 16490 - protein, 214 aa, Artificial Sequence; identical to SEQ ID NO: 16350
  Description of Artificial Sequence: Synthetic polypeptide
  XENP019164 1G6_H1.269_L1.177_IgG1_PVA_/S267K Light Chain

SEQ ID NO: 16491 - protein, 107 aa, Artificial Sequence; identical to SEQ ID NO: 10636
  Description of Artificial Sequence: Synthetic polypeptide
  VL of XENP019164

SEQ ID NO: 16492 - protein, 11 aa, Artificial Sequence
  Description of Artificial Sequence: Synthetic peptide
  XENP019164 vlCDR1
RASQSVGNDVA

SEQ ID NO: 16493 - protein, 7 aa, Artificial Sequence
  Description of Artificial Sequence: Synthetic peptide
  XENP019164 vlCDR2
YASHRYT

SEQ ID NO: 16494 - protein, 9 aa, Artificial Sequence
  Description of Artificial Sequence: Synthetic peptide
  XENP019164 vlCDR3
QQDFSSPRT

SEQ ID NO: 16495 - protein, 451 aa, Artificial Sequence; identical to SEQ ID NO: 15965
  Description of Artificial Sequence: Synthetic polypeptide
  XENP019165 1G6_H1.271_L1.177_IgG1_PVA_/S267K Heavy Chain

SEQ ID NO: 16496 - protein, 122 aa, Artificial Sequence; identical to SEQ ID NO: 10293
  Description of Artificial Sequence: Synthetic polypeptide
  VH of XENP019165

SEQ ID NO: 16497 - protein, 5 aa, Artificial Sequence
  Description of Artificial Sequence: Synthetic peptide
  XENP019165 vhCDR1
NYWMN

SEQ ID NO: 16498 - protein, 19 aa, Artificial Sequence
  Description of Artificial Sequence: Synthetic peptide
  XENP019165 vhCDR2
EIRLYSNNYATHYAEPVKG

SEQ ID NO: 16499 - protein, 11 aa, Artificial Sequence
  Description of Artificial Sequence: Synthetic peptide
  XENP019165 vhCDR3
YYGNYGGYFDV

SEQ ID NO: 16500 - protein, 214 aa, Artificial Sequence; identical to SEQ ID NO: 16350
  Description of Artificial Sequence: Synthetic polypeptide
  XENP019165 1G6_H1.271_L1.177_IgG1_PVA_/S267K Light Chain

SEQ ID NO: 16501 - protein, 107 aa, Artificial Sequence; identical to SEQ ID NO: 10636
  Description of Artificial Sequence: Synthetic polypeptide
  VL of XENP019165

SEQ ID NO: 16502 - protein, 11 aa, Artificial Sequence
  Description of Artificial Sequence: Synthetic peptide
  XENP019165 vlCDR1
RASQSVGNDVA

SEQ ID NO: 16503 - protein, 7 aa, Artificial Sequence
  Description of Artificial Sequence: Synthetic peptide
  XENP019165 vlCDR2
YASHRYT

SEQ ID NO: 16504 - protein, 9 aa, Artificial Sequence
  Description of Artificial Sequence: Synthetic peptide
  XENP019165 vlCDR3
QQDFSSPRT

SEQ ID NO: 16505 - protein, 451 aa, Artificial Sequence; identical to SEQ ID NO: 15975
  Description of Artificial Sequence: Synthetic polypeptide
  XENP019166 1G6_H1.272_L1.177_IgG1_PVA_/S267K Heavy Chain

SEQ ID NO: 16506 - protein, 122 aa, Artificial Sequence; identical to SEQ ID NO: 10302
  Description of Artificial Sequence: Synthetic polypeptide
  VH of XENP019166

SEQ ID NO: 16507 - protein, 5 aa, Artificial Sequence
  Description of Artificial Sequence: Synthetic peptide
  XENP019166 vhCDR1
NFWMN

SEQ ID NO: 16508 - protein, 19 aa, Artificial Sequence
  Description of Artificial Sequence: Synthetic peptide
  XENP019166 vhCDR2
EIRLYSNNYATHYAEPVKG

SEQ ID NO: 16509 - protein, 11 aa, Artificial Sequence
  Description of Artificial Sequence: Synthetic peptide
  XENP019166 vhCDR3
YYGNYGGYFDV

SEQ ID NO: 16510 - protein, 214 aa, Artificial Sequence; identical to SEQ ID NO: 16350
  Description of Artificial Sequence: Synthetic polypeptide
  XENP019166 1G6_H1.272_L1.177_IgG1_PVA_/S267K Light Chain

SEQ ID NO: 16511 - protein, 107 aa, Artificial Sequence; identical to SEQ ID NO: 10636
  Description of Artificial Sequence: Synthetic polypeptide
  VL of XENP019166

SEQ ID NO: 16512 - protein, 11 aa, Artificial Sequence
  Description of Artificial Sequence: Synthetic peptide
  XENP019166 vlCDR1
RASQSVGNDVA

SEQ ID NO: 16513 - protein, 7 aa, Artificial Sequence
  Description of Artificial Sequence: Synthetic peptide
  XENP019166 vlCDR2
YASHRYT

SEQ ID NO: 16514 - protein, 9 aa, Artificial Sequence
  Description of Artificial Sequence: Synthetic peptide
  XENP019166 vlCDR3
QQDFSSPRT

SEQ ID NO: 16515 - protein, 451 aa, Artificial Sequence; identical to SEQ ID NO: 12615
  Description of Artificial Sequence: Synthetic polypeptide
  XENP019167 1G6_H1.90_L1.175_IgG1_PVA_/S267K Heavy Chain

SEQ ID NO: 16516 - protein, 122 aa, Artificial Sequence; identical to SEQ ID NO: 7161
  Description of Artificial Sequence: Synthetic polypeptide
  VH of XENP019167

SEQ ID NO: 16517 - protein, 5 aa, Artificial Sequence
  Description of Artificial Sequence: Synthetic peptide
  XENP019167 vhCDR1
NYWMN

SEQ ID NO: 16518 - protein, 19 aa, Artificial Sequence
  Description of Artificial Sequence: Synthetic peptide
  XENP019167 vhCDR2
EIRLYSNNYATHYAEPVKG

SEQ ID NO: 16519 - protein, 11 aa, Artificial Sequence
  Description of Artificial Sequence: Synthetic peptide
  XENP019167 vhCDR3
YYGNYGGYFDV

SEQ ID NO: 16520 - protein, 214 aa, Artificial Sequence; identical to SEQ ID NO: 16330
  Description of Artificial Sequence: Synthetic polypeptide
  XENP019167 1G6_H1.90_L1.175_IgG1_PVA_/S267K Light Chain

SEQ ID NO: 16521 - protein, 107 aa, Artificial Sequence; identical to SEQ ID NO: 10618
  Description of Artificial Sequence: Synthetic polypeptide
  VL of XENP019167

SEQ ID NO: 16522 - protein, 11 aa, Artificial Sequence
  Description of Artificial Sequence: Synthetic peptide
  XENP019167 vlCDR1
RASQSVGNDVA

SEQ ID NO: 16523 - protein, 7 aa, Artificial Sequence
  Description of Artificial Sequence: Synthetic peptide
  XENP019167 vlCDR2
YASHRYT

SEQ ID NO: 16524 - protein, 9 aa, Artificial Sequence
  Description of Artificial Sequence: Synthetic peptide
  XENP019167 vlCDR3
QQDWSSPRT

SEQ ID NO: 16525 - protein, 451 aa, Artificial Sequence; identical to SEQ ID NO: 15945
  Description of Artificial Sequence: Synthetic polypeptide
  XENP019168 1G6_H1.269_L1.175_IgG1_PVA_/S267K Heavy Chain

SEQ ID NO: 16526 - protein, 122 aa, Artificial Sequence; identical to SEQ ID NO: 10275
  Description of Artificial Sequence: Synthetic polypeptide
  VH of XENP019168

SEQ ID NO: 16527 - protein, 5 aa, Artificial Sequence
  Description of Artificial Sequence: Synthetic peptide
  XENP019168 vhCDR1
NFWMN

SEQ ID NO: 16528 - protein, 19 aa, Artificial Sequence
  Description of Artificial Sequence: Synthetic peptide
  XENP019168 vhCDR2
EIRLYSNNYATHYAEPVKG

SEQ ID NO: 16529 - protein, 11 aa, Artificial Sequence
  Description of Artificial Sequence: Synthetic peptide
  XENP019168 vhCDR3
YYGNYGGYFDV

SEQ ID NO: 16530 - protein, 214 aa, Artificial Sequence; identical to SEQ ID NO: 16330
  Description of Artificial Sequence: Synthetic polypeptide
  XENP019168 1G6_H1.269_L1.175_IgG1_PVA_/S267K Light Chain

SEQ ID NO: 16531 - protein, 107 aa, Artificial Sequence; identical to SEQ ID NO: 10618
  Description of Artificial Sequence: Synthetic polypeptide
  VL of XENP019168

SEQ ID NO: 16532 - protein, 11 aa, Artificial Sequence
  Description of Artificial Sequence: Synthetic peptide
  XENP019168 vlCDR1
RASQSVGNDVA

SEQ ID NO: 16533 - protein, 7 aa, Artificial Sequence
  Description of Artificial Sequence: Synthetic peptide
  XENP019168 vlCDR2
YASHRYT

SEQ ID NO: 16534 - protein, 9 aa, Artificial Sequence
  Description of Artificial Sequence: Synthetic peptide
  XENP019168 vlCDR3
QQDWSSPRT

SEQ ID NO: 16535 - protein, 451 aa, Artificial Sequence; identical to SEQ ID NO: 15965
  Description of Artificial Sequence: Synthetic polypeptide
  XENP019169 1G6_H1.271_L1.175_IgG1_PVA_/S267K Heavy Chain

SEQ ID NO: 16536 - protein, 122 aa, Artificial Sequence; identical to SEQ ID NO: 10293
  Description of Artificial Sequence: Synthetic polypeptide
  VH of XENP019169

SEQ ID NO: 16537 - protein, 5 aa, Artificial Sequence
  Description of Artificial Sequence: Synthetic peptide
  XENP019169 vhCDR1
NYWMN

SEQ ID NO: 16538 - protein, 19 aa, Artificial Sequence
  Description of Artificial Sequence: Synthetic peptide
  XENP019169 vhCDR2
EIRLYSNNYATHYAEPVKG

SEQ ID NO: 16539 - protein, 11 aa, Artificial Sequence
  Description of Artificial Sequence: Synthetic peptide
  XENP019169 vhCDR3
YYGNYGGYFDV

SEQ ID NO: 16540 - protein, 214 aa, Artificial Sequence; identical to SEQ ID NO: 16330
  Description of Artificial Sequence: Synthetic polypeptide
  XENP019169 1G6_H1.271_L1.175_IgG1_PVA_/S267K Light Chain

SEQ ID NO: 16541 - protein, 107 aa, Artificial Sequence; identical to SEQ ID NO: 10618
  Description of Artificial Sequence: Synthetic polypeptide
  VL of XENP019169

SEQ ID NO: 16542 - protein, 11 aa, Artificial Sequence
  Description of Artificial Sequence: Synthetic peptide
  XENP019169 vlCDR1
RASQSVGNDVA

SEQ ID NO: 16543 - protein, 7 aa, Artificial Sequence
  Description of Artificial Sequence: Synthetic peptide
  XENP019169 vlCDR2
YASHRYT

SEQ ID NO: 16544 - protein, 9 aa, Artificial Sequence
  Description of Artificial Sequence: Synthetic peptide
  XENP019169 vlCDR3
QQDWSSPRT

SEQ ID NO: 16545 - protein, 451 aa, Artificial Sequence; identical to SEQ ID NO: 15975
  Description of Artificial Sequence: Synthetic polypeptide
  XENP019170 1G6_H1.272_L1.175_IgG1_PVA_/S267K Heavy Chain

SEQ ID NO: 16546 - protein, 122 aa, Artificial Sequence; identical to SEQ ID NO: 10302
  Description of Artificial Sequence: Synthetic polypeptide
  VH of XENP019170

SEQ ID NO: 16547 - protein, 5 aa, Artificial Sequence
  Description of Artificial Sequence: Synthetic peptide
  XENP019170 vhCDR1
NFWMN

SEQ ID NO: 16548 - protein, 19 aa, Artificial Sequence
  Description of Artificial Sequence: Synthetic peptide
  XENP019170 vhCDR2
EIRLYSNNYATHYAEPVKG

SEQ ID NO: 16549 - protein, 11 aa, Artificial Sequence
  Description of Artificial Sequence: Synthetic peptide
  XENP019170 vhCDR3
YYGNYGGYFDV

SEQ ID NO: 16550 - protein, 214 aa, Artificial Sequence; identical to SEQ ID NO: 16330
  Description of Artificial Sequence: Synthetic polypeptide
  XENP019170 1G6_H1.272_L1.175_IgG1_PVA_/S267K Light Chain

SEQ ID NO: 16551 - protein, 107 aa, Artificial Sequence; identical to SEQ ID NO: 10618
  Description of Artificial Sequence: Synthetic polypeptide
  VL of XENP019170

SEQ ID NO: 16552 - protein, 11 aa, Artificial Sequence
  Description of Artificial Sequence: Synthetic peptide
  XENP019170 vlCDR1
RASQSVGNDVA

SEQ ID NO: 16553 - protein, 7 aa, Artificial Sequence
  Description of Artificial Sequence: Synthetic peptide
  XENP019170 vlCDR2
YASHRYT

SEQ ID NO: 16554 - protein, 9 aa, Artificial Sequence
  Description of Artificial Sequence: Synthetic peptide
  XENP019170 vlCDR3
QQDWSSPRT

SEQ ID NO: 16555 - protein, 451 aa, Artificial Sequence; identical to SEQ ID NO: 11545
  Description of Artificial Sequence: Synthetic polypeptide
  XENP019172 1G6_H1_L1.190_IgG1_PVA_/S267K Heavy Chain

SEQ ID NO: 16556 - protein, 122 aa, Artificial Sequence; identical to SEQ ID NO: 6246
  Description of Artificial Sequence: Synthetic polypeptide
  VH of XENP019172

SEQ ID NO: 16557 - protein, 5 aa, Artificial Sequence
  Description of Artificial Sequence: Synthetic peptide
  XENP019172 vhCDR1
NYWMN

SEQ ID NO: 16558 - protein, 19 aa, Artificial Sequence
  Description of Artificial Sequence: Synthetic peptide
  XENP019172 vhCDR2
EIRLKSNNYATHYAEPVKG

SEQ ID NO: 16559 - protein, 11 aa, Artificial Sequence
  Description of Artificial Sequence: Synthetic peptide
  XENP019172 vhCDR3
YYGNYGGYFDV

SEQ ID NO: 16560 - protein, 214 aa, Artificial Sequence
  Description of Artificial Sequence: Synthetic polypeptide
  XENP019172 1G6_H1_L1.190_IgG1_PVA_/S267K Light Chain
SIVMTQSPATLSVSPGERATLSCRASQSVGNDVAWYQQKPGQSPRLLINYASHRYTGVPDRFTGSGYGTEFTLTISSLQSEDFAVYFCQQDFSSPRTFGGGTKVEIKRTVAAPSVFIFPPSDEQLKSGTASVVCLLNNFYPREAKVQWKVDNALQSGNSQESVTEQDSKDSTYSLSSTLTLSKADYEKHKVYACEVTHQGLSSPVTKSFNRGEC

SEQ ID NO: 16561 - protein, 107 aa, Artificial Sequence; identical to SEQ ID NO: 10828
  Description of Artificial Sequence: Synthetic polypeptide
  VL of XENP019172

SEQ ID NO: 16562 - protein, 11 aa, Artificial Sequence
  Description of Artificial Sequence: Synthetic peptide
  XENP019172 vlCDR1
RASQSVGNDVA

SEQ ID NO: 16563 - protein, 7 aa, Artificial Sequence
  Description of Artificial Sequence: Synthetic peptide
  XENP019172 vlCDR2
YASHRYT

SEQ ID NO: 16564 - protein, 9 aa, Artificial Sequence
  Description of Artificial Sequence: Synthetic peptide
  XENP019172 vlCDR3
QQDFSSPRT

SEQ ID NO: 16565 - protein, 451 aa, Artificial Sequence; identical to SEQ ID NO: 11545
  Description of Artificial Sequence: Synthetic polypeptide
  XENP019173 1G6_H1_L1.191_IgG1_PVA_/S267K Heavy Chain

SEQ ID NO: 16566 - protein, 122 aa, Artificial Sequence; identical to SEQ ID NO: 6246
  Description of Artificial Sequence: Synthetic polypeptide
  VH of XENP019173

SEQ ID NO: 16567 - protein, 5 aa, Artificial Sequence
  Description of Artificial Sequence: Synthetic peptide
  XENP019173 vhCDR1
NYWMN

SEQ ID NO: 16568 - protein, 19 aa, Artificial Sequence
  Description of Artificial Sequence: Synthetic peptide
  XENP019173 vhCDR2
EIRLKSNNYATHYAEPVKG

SEQ ID NO: 16569 - protein, 11 aa, Artificial Sequence
  Description of Artificial Sequence: Synthetic peptide
  XENP019173 vhCDR3
YYGNYGGYFDV

SEQ ID NO: 16570 - protein, 214 aa, Artificial Sequence
  Description of Artificial Sequence: Synthetic polypeptide
  XENP019173 1G6_H1_L1.191_IgG1_PVA_/S267K Light Chain
SIVMTQSPATLSVSPGERATLSCRASQSVGNDVAWYQQKPGQSPRLLINYASHRYTGVPDRFTGSGYGTEFTLTISSLQSEDFAVYFCQQDWSSPRTFGGGTKVEIKRTVAAPSVFIFPPSDEQLKSGTASVVCLLNNFYPREAKVQWKVDNALQSGNSQESVTEQDSKDSTYSLSSTLTLSKADYEKHKVYACEVTHQGLSSPVTKSFNRGEC

SEQ ID NO: 16571 - protein, 107 aa, Artificial Sequence; identical to SEQ ID NO: 10837
  Description of Artificial Sequence: Synthetic polypeptide
  VL of XENP019173

SEQ ID NO: 16572 - protein, 11 aa, Artificial Sequence
  Description of Artificial Sequence: Synthetic peptide
  XENP019173 vlCDR1
RASQSVGNDVA

SEQ ID NO: 16573 - protein, 7 aa, Artificial Sequence
  Description of Artificial Sequence: Synthetic peptide
  XENP019173 vlCDR2
YASHRYT

SEQ ID NO: 16574 - protein, 9 aa, Artificial Sequence
  Description of Artificial Sequence: Synthetic peptide
  XENP019173 vlCDR3
QQDWSSPRT

SEQ ID NO: 16575 - protein, 451 aa, Artificial Sequence; identical to SEQ ID NO: 12615
  Description of Artificial Sequence: Synthetic polypeptide
  XENP019174 1G6_H1.90_L1.190_IgG1_PVA_/S267K Heavy Chain

SEQ ID NO: 16576 - protein, 122 aa, Artificial Sequence; identical to SEQ ID NO: 7161
  Description of Artificial Sequence: Synthetic polypeptide
  VH of XENP019174

SEQ ID NO: 16577 - protein, 5 aa, Artificial Sequence
  Description of Artificial Sequence: Synthetic peptide
  XENP019174 vhCDR1
NYWMN

SEQ ID NO: 16578 - protein, 19 aa, Artificial Sequence
  Description of Artificial Sequence: Synthetic peptide
  XENP019174 vhCDR2
EIRLYSNNYATHYAEPVKG

SEQ ID NO: 16579 - protein, 11 aa, Artificial Sequence
  Description of Artificial Sequence: Synthetic peptide
  XENP019174 vhCDR3
YYGNYGGYFDV

SEQ ID NO: 16580 - protein, 214 aa, Artificial Sequence; identical to SEQ ID NO: 16560
  Description of Artificial Sequence: Synthetic polypeptide
  XENP019174 1G6_H1.90_L1.190_IgG1_PVA_/S267K Light Chain

SEQ ID NO: 16581 - protein, 107 aa, Artificial Sequence; identical to SEQ ID NO: 10828
  Description of Artificial Sequence: Synthetic polypeptide
  VL of XENP019174

SEQ ID NO: 16582 - protein, 11 aa, Artificial Sequence
  Description of Artificial Sequence: Synthetic peptide
  XENP019174 vlCDR1
RASQSVGNDVA

SEQ ID NO: 16583 - protein, 7 aa, Artificial Sequence
  Description of Artificial Sequence: Synthetic peptide
  XENP019174 vlCDR2
YASHRYT

SEQ ID NO: 16584 - protein, 9 aa, Artificial Sequence
  Description of Artificial Sequence: Synthetic peptide
  XENP019174 vlCDR3
QQDFSSPRT

SEQ ID NO: 16585 - protein, 451 aa, Artificial Sequence; identical to SEQ ID NO: 12615
  Description of Artificial Sequence: Synthetic polypeptide
  XENP019175 1G6_H1.90_L1.191_IgG1_PVA_/S267K Heavy Chain

SEQ ID NO: 16586 - protein, 122 aa, Artificial Sequence; identical to SEQ ID NO: 7161
  Description of Artificial Sequence: Synthetic polypeptide
  VH of XENP019175

SEQ ID NO: 16587 - protein, 5 aa, Artificial Sequence
  Description of Artificial Sequence: Synthetic peptide
  XENP019175 vhCDR1
NYWMN

SEQ ID NO: 16588 - protein, 19 aa, Artificial Sequence
  Description of Artificial Sequence: Synthetic peptide
  XENP019175 vhCDR2
EIRLYSNNYATHYAEPVKG

SEQ ID NO: 16589 - protein, 11 aa, Artificial Sequence
  Description of Artificial Sequence: Synthetic peptide
  XENP019175 vhCDR3
YYGNYGGYFDV

SEQ ID NO: 16590 - protein, 214 aa, Artificial Sequence; identical to SEQ ID NO: 16570
  Description of Artificial Sequence: Synthetic polypeptide
  XENP019175 1G6_H1.90_L1.191_IgG1_PVA_/S267K Light Chain

SEQ ID NO: 16591 - protein, 107 aa, Artificial Sequence; identical to SEQ ID NO: 10837
  Description of Artificial Sequence: Synthetic polypeptide
  VL of XENP019175

SEQ ID NO: 16592 - protein, 11 aa, Artificial Sequence
  Description of Artificial Sequence: Synthetic peptide
  XENP019175 vlCDR1
RASQSVGNDVA

SEQ ID NO: 16593 - protein, 7 aa, Artificial Sequence
  Description of Artificial Sequence: Synthetic peptide
  XENP019175 vlCDR2
YASHRYT

SEQ ID NO: 16594 - protein, 9 aa, Artificial Sequence
  Description of Artificial Sequence: Synthetic peptide
  XENP019175 vlCDR3
QQDWSSPRT

SEQ ID NO: 16595 - protein, 451 aa, Artificial Sequence; identical to SEQ ID NO: 15945
  Description of Artificial Sequence: Synthetic polypeptide
  XENP019176 1G6_H1.269_L1.190_IgG1_PVA_/S267K Heavy Chain

SEQ ID NO: 16596 - protein, 122 aa, Artificial Sequence; identical to SEQ ID NO: 10275
  Description of Artificial Sequence: Synthetic polypeptide
  VH of XENP019176

SEQ ID NO: 16597 - protein, 5 aa, Artificial Sequence
  Description of Artificial Sequence: Synthetic peptide
  XENP019176 vhCDR1
NFWMN

SEQ ID NO: 16598 - protein, 19 aa, Artificial Sequence
  Description of Artificial Sequence: Synthetic peptide
  XENP019176 vhCDR2
EIRLYSNNYATHYAEPVKG

SEQ ID NO: 16599 - protein, 11 aa, Artificial Sequence
  Description of Artificial Sequence: Synthetic peptide
  XENP019176 vhCDR3
YYGNYGGYFDV

SEQ ID NO: 16600 - protein, 214 aa, Artificial Sequence; identical to SEQ ID NO: 16560
  Description of Artificial Sequence: Synthetic polypeptide
  XENP019176 1G6_H1.269_L1.190_IgG1_PVA_/S267K Light Chain

SEQ ID NO: 16601 - protein, 107 aa, Artificial Sequence; identical to SEQ ID NO: 10828
  Description of Artificial Sequence: Synthetic polypeptide
  VL of XENP019176

SEQ ID NO: 16602 - protein, 11 aa, Artificial Sequence
  Description of Artificial Sequence: Synthetic peptide
  XENP019176 vlCDR1
RASQSVGNDVA

SEQ ID NO: 16603 - protein, 7 aa, Artificial Sequence
  Description of Artificial Sequence: Synthetic peptide
  XENP019176 vlCDR2
YASHRYT

SEQ ID NO: 16604 - protein, 9 aa, Artificial Sequence
  Description of Artificial Sequence: Synthetic peptide
  XENP019176 vlCDR3
QQDFSSPRT

SEQ ID NO: 16605 - protein, 451 aa, Artificial Sequence; identical to SEQ ID NO: 15965
  Description of Artificial Sequence: Synthetic polypeptide
  XENP019177 1G6_H1.271_L1.190_IgG1_PVA_/S267K Heavy Chain

SEQ ID NO: 16606 - protein, 122 aa, Artificial Sequence; identical to SEQ ID NO: 10293
  Description of Artificial Sequence: Synthetic polypeptide
  VH of XENP019177

SEQ ID NO: 16607 - protein, 5 aa, Artificial Sequence
  Description of Artificial Sequence: Synthetic peptide
  XENP019177 vhCDR1
NYWMN

SEQ ID NO: 16608 - protein, 19 aa, Artificial Sequence
  Description of Artificial Sequence: Synthetic peptide
  XENP019177 vhCDR2
EIRLYSNNYATHYAEPVKG

SEQ ID NO: 16609 - protein, 11 aa, Artificial Sequence
  Description of Artificial Sequence: Synthetic peptide
  XENP019177 vhCDR3
YYGNYGGYFDV

SEQ ID NO: 16610 - protein, 214 aa, Artificial Sequence; identical to SEQ ID NO: 16560
  Description of Artificial Sequence: Synthetic polypeptide
  XENP019177 1G6_H1.271_L1.190_IgG1_PVA_/S267K Light Chain

SEQ ID NO: 16611 - protein, 107 aa, Artificial Sequence; identical to SEQ ID NO: 10828
  Description of Artificial Sequence: Synthetic polypeptide
  VL of XENP019177

SEQ ID NO: 16612 - protein, 11 aa, Artificial Sequence
  Description of Artificial Sequence: Synthetic peptide
  XENP019177 vlCDR1
RASQSVGNDVA

SEQ ID NO: 16613 - protein, 7 aa, Artificial Sequence
  Description of Artificial Sequence: Synthetic peptide
  XENP019177 vlCDR2
YASHRYT

SEQ ID NO: 16614 - protein, 9 aa, Artificial Sequence
  Description of Artificial Sequence: Synthetic peptide
  XENP019177 vlCDR3
QQDFSSPRT

SEQ ID NO: 16615 - protein, 451 aa, Artificial Sequence; identical to SEQ ID NO: 15975
  Description of Artificial Sequence: Synthetic polypeptide
  XENP019178 1G6_H1.272_L1.190_IgG1_PVA_/S267K Heavy Chain

SEQ ID NO: 16616 - protein, 122 aa, Artificial Sequence; identical to SEQ ID NO: 10302
  Description of Artificial Sequence: Synthetic polypeptide
  VH of XENP019178

SEQ ID NO: 16617 - protein, 5 aa, Artificial Sequence
  Description of Artificial Sequence: Synthetic peptide
  XENP019178 vhCDR1
NFWMN

SEQ ID NO: 16618 - protein, 19 aa, Artificial Sequence
  Description of Artificial Sequence: Synthetic peptide
  XENP019178 vhCDR2
EIRLYSNNYATHYAEPVKG

SEQ ID NO: 16619 - protein, 11 aa, Artificial Sequence
  Description of Artificial Sequence: Synthetic peptide
  XENP019178 vhCDR3
YYGNYGGYFDV

SEQ ID NO: 16620 - protein, 214 aa, Artificial Sequence; identical to SEQ ID NO: 16560
  Description of Artificial Sequence: Synthetic polypeptide
  XENP019178 1G6_H1.272_L1.190_IgG1_PVA_/S267K Light Chain

SEQ ID NO: 16621 - protein, 107 aa, Artificial Sequence; identical to SEQ ID NO: 10828
  Description of Artificial Sequence: Synthetic polypeptide
  VL of XENP019178

SEQ ID NO: 16622 - protein, 11 aa, Artificial Sequence
  Description of Artificial Sequence: Synthetic peptide
  XENP019178 vlCDR1
RASQSVGNDVA

SEQ ID NO: 16623 - protein, 7 aa, Artificial Sequence
  Description of Artificial Sequence: Synthetic peptide
  XENP019178 vlCDR2
YASHRYT

SEQ ID NO: 16624 - protein, 9 aa, Artificial Sequence
  Description of Artificial Sequence: Synthetic peptide
  XENP019178 vlCDR3
QQDFSSPRT

SEQ ID NO: 16625 - protein, 451 aa, Artificial Sequence; identical to SEQ ID NO: 15945
  Description of Artificial Sequence: Synthetic polypeptide
  XENP019179 1G6_H1.269_L1.191_IgG1_PVA_/S267K Heavy Chain

SEQ ID NO: 16626 - protein, 122 aa, Artificial Sequence; identical to SEQ ID NO: 10275
  Description of Artificial Sequence: Synthetic polypeptide
  VH of XENP019179

SEQ ID NO: 16627 - protein, 5 aa, Artificial Sequence
  Description of Artificial Sequence: Synthetic peptide
  XENP019179 vhCDR1
NFWMN

SEQ ID NO: 16628 - protein, 19 aa, Artificial Sequence
  Description of Artificial Sequence: Synthetic peptide
  XENP019179 vhCDR2
EIRLYSNNYATHYAEPVKG

SEQ ID NO: 16629 - protein, 11 aa, Artificial Sequence
  Description of Artificial Sequence: Synthetic peptide
  XENP019179 vhCDR3
YYGNYGGYFDV

SEQ ID NO: 16630 - protein, 214 aa, Artificial Sequence; identical to SEQ ID NO: 16570
  Description of Artificial Sequence: Synthetic polypeptide
  XENP019179 1G6_H1.269_L1.191_IgG1_PVA_/S267K Light Chain

SEQ ID NO: 16631 - protein, 107 aa, Artificial Sequence; identical to SEQ ID NO: 10837
  Description of Artificial Sequence: Synthetic polypeptide
  VL of XENP019179

SEQ ID NO: 16632 - protein, 11 aa, Artificial Sequence
  Description of Artificial Sequence: Synthetic peptide
  XENP019179 vlCDR1
RASQSVGNDVA

SEQ ID NO: 16633 - protein, 7 aa, Artificial Sequence
  Description of Artificial Sequence: Synthetic peptide
  XENP019179 vlCDR2
YASHRYT

SEQ ID NO: 16634 - protein, 9 aa, Artificial Sequence
  Description of Artificial Sequence: Synthetic peptide
  XENP019179 vlCDR3
QQDWSSPRT

SEQ ID NO: 16635 - protein, 451 aa, Artificial Sequence; identical to SEQ ID NO: 15965
  Description of Artificial Sequence: Synthetic polypeptide
  XENP019180 1G6_H1.271_L1.191_IgG1_PVA_/S267K Heavy Chain

SEQ ID NO: 16636 - protein, 122 aa, Artificial Sequence; identical to SEQ ID NO: 10293
  Description of Artificial Sequence: Synthetic polypeptide
  VH of XENP019180

SEQ ID NO: 16637 - protein, 5 aa, Artificial Sequence
  Description of Artificial Sequence: Synthetic peptide
  XENP019180 vhCDR1
NYWMN

SEQ ID NO: 16638 - protein, 19 aa, Artificial Sequence
  Description of Artificial Sequence: Synthetic peptide
  XENP019180 vhCDR2
EIRLYSNNYATHYAEPVKG

SEQ ID NO: 16639 - protein, 11 aa, Artificial Sequence
  Description of Artificial Sequence: Synthetic peptide
  XENP019180 vhCDR3
YYGNYGGYFDV

SEQ ID NO: 16640 - protein, 214 aa, Artificial Sequence; identical to SEQ ID NO: 16570
  Description of Artificial Sequence: Synthetic polypeptide
  XENP019180 1G6_H1.271_L1.191_IgG1_PVA_/S267K Light Chain

SEQ ID NO: 16641 - protein, 107 aa, Artificial Sequence; identical to SEQ ID NO: 10837
  Description of Artificial Sequence: Synthetic polypeptide
  VL of XENP019180

SEQ ID NO: 16642 - protein, 11 aa, Artificial Sequence
  Description of Artificial Sequence: Synthetic peptide
  XENP019180 vlCDR1
RASQSVGNDVA

SEQ ID NO: 16643 - protein, 7 aa, Artificial Sequence
  Description of Artificial Sequence: Synthetic peptide
  XENP019180 vlCDR2
YASHRYT

SEQ ID NO: 16644 - protein, 9 aa, Artificial Sequence
  Description of Artificial Sequence: Synthetic peptide
  XENP019180 vlCDR3
QQDWSSPRT

SEQ ID NO: 16645 - protein, 451 aa, Artificial Sequence; identical to SEQ ID NO: 15975
  Description of Artificial Sequence: Synthetic polypeptide
  XENP019181 1G6_H1.272_L1.191_IgG1_PVA_/S267K Heavy Chain

SEQ ID NO: 16646 - protein, 122 aa, Artificial Sequence; identical to SEQ ID NO: 10302
  Description of Artificial Sequence: Synthetic polypeptide
  VH of XENP019181

SEQ ID NO: 16647 - protein, 5 aa, Artificial Sequence
  Description of Artificial Sequence: Synthetic peptide
  XENP019181 vhCDR1
NFWMN

SEQ ID NO: 16648 - protein, 19 aa, Artificial Sequence
  Description of Artificial Sequence: Synthetic peptide
  XENP019181 vhCDR2
EIRLYSNNYATHYAEPVKG

SEQ ID NO: 16649 - protein, 11 aa, Artificial Sequence
  Description of Artificial Sequence: Synthetic peptide
  XENP019181 vhCDR3
YYGNYGGYFDV

SEQ ID NO: 16650 - protein, 214 aa, Artificial Sequence; identical to SEQ ID NO: 16570
  Description of Artificial Sequence: Synthetic polypeptide
  XENP019181 1G6_H1.272_L1.191_IgG1_PVA_/S267K Light Chain

SEQ ID NO: 16651 - protein, 107 aa, Artificial Sequence; identical to SEQ ID NO: 10837
  Description of Artificial Sequence: Synthetic polypeptide
  VL of XENP019181

SEQ ID NO: 16652 - protein, 11 aa, Artificial Sequence
  Description of Artificial Sequence: Synthetic peptide
  XENP019181 vlCDR1
RASQSVGNDVA

SEQ ID NO: 16653 - protein, 7 aa, Artificial Sequence
  Description of Artificial Sequence: Synthetic peptide
  XENP019181 vlCDR2
YASHRYT

SEQ ID NO: 16654 - protein, 9 aa, Artificial Sequence
  Description of Artificial Sequence: Synthetic peptide
  XENP019181 vlCDR3
QQDWSSPRT

SEQ ID NO: 16655 - protein, 451 aa, Artificial Sequence; identical to SEQ ID NO: 11545
  Description of Artificial Sequence: Synthetic polypeptide
  XENP019193 1G6_H1_L1.188_IgG1_PVA_/S267K Heavy Chain

SEQ ID NO: 16656 - protein, 122 aa, Artificial Sequence; identical to SEQ ID NO: 6246
  Description of Artificial Sequence: Synthetic polypeptide
  VH of XENP019193

SEQ ID NO: 16657 - protein, 5 aa, Artificial Sequence
  Description of Artificial Sequence: Synthetic peptide
  XENP019193 vhCDR1
NYWMN

SEQ ID NO: 16658 - protein, 19 aa, Artificial Sequence
  Description of Artificial Sequence: Synthetic peptide
  XENP019193 vhCDR2
EIRLKSNNYATHYAEPVKG

SEQ ID NO: 16659 - protein, 11 aa, Artificial Sequence
  Description of Artificial Sequence: Synthetic peptide
  XENP019193 vhCDR3
YYGNYGGYFDV

SEQ ID NO: 16660 - protein, 214 aa, Artificial Sequence
  Description of Artificial Sequence: Synthetic polypeptide
  XENP019193 1G6_H1_L1.188_IgG1_PVA_/S267K Light Chain
EIVMTQSPATLSVSPGERVTLTCRASQSVGNDVAWYQQKPGQSPRLLINYASHRYTGVPDRFTGSGYGTEFTLTISSVQSEDFAVYFCQQDFSSPRTFGGGTKVEIKRTVAAPSVFIFPPSDEQLKSGTASVVCLLNNFYPREAKVQWKVDNALQSGNSQESVTEQDSKDSTYSLSSTLTLSKADYEKHKVYACEVTHQGLSSPVTKSFNRGEC

SEQ ID NO: 16661 - protein, 107 aa, Artificial Sequence; identical to SEQ ID NO: 10855
  Description of Artificial Sequence: Synthetic polypeptide
  VL of XENP019193

SEQ ID NO: 16662 - protein, 11 aa, Artificial Sequence
  Description of Artificial Sequence: Synthetic peptide
  XENP019193 vlCDR1
RASQSVGNDVA

SEQ ID NO: 16663 - protein, 7 aa, Artificial Sequence
  Description of Artificial Sequence: Synthetic peptide
  XENP019193 vlCDR2
YASHRYT

SEQ ID NO: 16664 - protein, 9 aa, Artificial Sequence
  Description of Artificial Sequence: Synthetic peptide
  XENP019193 vlCDR3
QQDFSSPRT

SEQ ID NO: 16665 - protein, 451 aa, Artificial Sequence; identical to SEQ ID NO: 11545
  Description of Artificial Sequence: Synthetic polypeptide
  XENP019194 1G6_H1_L1.189_IgG1_PVA_/S267K Heavy Chain

SEQ ID NO: 16666 - protein, 122 aa, Artificial Sequence; identical to SEQ ID NO: 6246
  Description of Artificial Sequence: Synthetic polypeptide
  VH of XENP019194

SEQ ID NO: 16667 - protein, 5 aa, Artificial Sequence
  Description of Artificial Sequence: Synthetic peptide
  XENP019194 vhCDR1
NYWMN

SEQ ID NO: 16668 - protein, 19 aa, Artificial Sequence
  Description of Artificial Sequence: Synthetic peptide
  XENP019194 vhCDR2
EIRLKSNNYATHYAEPVKG

SEQ ID NO: 16669 - protein, 11 aa, Artificial Sequence
  Description of Artificial Sequence: Synthetic peptide
  XENP019194 vhCDR3
YYGNYGGYFDV

SEQ ID NO: 16670 - protein, 214 aa, Artificial Sequence
  Description of Artificial Sequence: Synthetic polypeptide
  XENP019194 1G6_H1_L1.189_IgG1_PVA_/S267K Light Chain
EIVLTQSPATLSVSPGERVTLTCRASQSVGNDVAWYQQKPGQAPRLLINYASHRYTGVPDRFTGSGYGTEFTLTISSVQSEDFAVYYCQQDFSSPRTFGGGTKVEIKRTVAAPSVFIFPPSDEQLKSGTASVVCLLNNFYPREAKVQWKVDNALQSGNSQESVTEQDSKDSTYSLSSTLTLSKADYEKHKVYACEVTHQGLSSPVTKSFNRGEC

SEQ ID NO: 16671 - protein, 107 aa, Artificial Sequence; identical to SEQ ID NO: 10864
  Description of Artificial Sequence: Synthetic polypeptide
  VL of XENP019194

SEQ ID NO: 16672 - protein, 11 aa, Artificial Sequence
  Description of Artificial Sequence: Synthetic peptide
  XENP019194 vlCDR1
RASQSVGNDVA

SEQ ID NO: 16673 - protein, 7 aa, Artificial Sequence
  Description of Artificial Sequence: Synthetic peptide
  XENP019194 vlCDR2
YASHRYT

SEQ ID NO: 16674 - protein, 9 aa, Artificial Sequence
  Description of Artificial Sequence: Synthetic peptide
  XENP019194 vlCDR3
QQDFSSPRT

SEQ ID NO: 16675 - protein, 451 aa, Artificial Sequence
  Description of Artificial Sequence: Synthetic polypeptide
  XENP019195 1G6_H1.278_L1.188_IgG1_PVA_/S267K Heavy Chain
EVQLVESGGGLVKPGGSLRLSCVASGFTFSNYWMNWVRQAPGKGLEWVAEIRLYSNNYATHYAESVKGRFTISRDDSKSTLYLQMNNLKTEDTGVYYCTRYYGNYGGYFDVWGQGTLVTVSSASTKGPSVFPLAPSSKSTSGGTAALGCLVKDYFPEPVTVSWNSGALTSGVHTFPAVLQSSGLYSLSSVVTVPSSSLGTQTYICNVNHKPSNTKVDKKVEPKSCDKTHTCPPCPAPPVAGPSVFLFPPKPKDTLMISRTPEVTCVVVDVKHEDPEVKFNWYVDGVEVHNAKTKPREEQYNSTYRVVSVLTVLHQDWLNGKEYKCKVSNKALPAPIEKTISKAKGQPREPQVYTLPPSREEMTKNQVSLTCLVKGFYPSDIAVEWESNGQPENNYKTTPPVLDSDGSFFLYSKLTVDKSRWQQGNVFSCSVMHEALHNHYTQKSLSLSPGK

SEQ ID NO: 16676 - protein, 122 aa, Artificial Sequence; identical to SEQ ID NO: 10845
  Description of Artificial Sequence: Synthetic polypeptide
  VH of XENP019195

SEQ ID NO: 16677 - protein, 5 aa, Artificial Sequence
  Description of Artificial Sequence: Synthetic peptide
  XENP019195 vhCDR1
NYWMN

SEQ ID NO: 16678 - protein, 19 aa, Artificial Sequence
  Description of Artificial Sequence: Synthetic peptide
  XENP019195 vhCDR2
EIRLYSNNYATHYAESVKG

SEQ ID NO: 16679 - protein, 11 aa, Artificial Sequence
  Description of Artificial Sequence: Synthetic peptide
  XENP019195 vhCDR3
YYGNYGGYFDV

SEQ ID NO: 16680 - protein, 214 aa, Artificial Sequence; identical to SEQ ID NO: 16660
  Description of Artificial Sequence: Synthetic polypeptide
  XENP019195 1G6_H1.278_L1.188_IgG1_PVA_/S267K Light Chain

SEQ ID NO: 16681 - protein, 107 aa, Artificial Sequence; identical to SEQ ID NO: 10855
  Description of Artificial Sequence: Synthetic polypeptide
  VL of XENP019195

SEQ ID NO: 16682 - protein, 11 aa, Artificial Sequence
  Description of Artificial Sequence: Synthetic peptide
  XENP019195 vlCDR1
RASQSVGNDVA

SEQ ID NO: 16683 - protein, 7 aa, Artificial Sequence
  Description of Artificial Sequence: Synthetic peptide
  XENP019195 vlCDR2
YASHRYT

SEQ ID NO: 16684 - protein, 9 aa, Artificial Sequence
  Description of Artificial Sequence: Synthetic peptide
  XENP019195 vlCDR3
QQDFSSPRT

SEQ ID NO: 16685 - protein, 451 aa, Artificial Sequence; identical to SEQ ID NO: 16675
  Description of Artificial Sequence: Synthetic polypeptide
  XENP019196 1G6_H1.278_L1.189_IgG1_PVA_/S267K Heavy Chain

SEQ ID NO: 16686 - protein, 122 aa, Artificial Sequence; identical to SEQ ID NO: 10845
  Description of Artificial Sequence: Synthetic polypeptide
  VH of XENP019196

SEQ ID NO: 16687 - protein, 5 aa, Artificial Sequence
  Description of Artificial Sequence: Synthetic peptide
  XENP019196 vhCDR1
NYWMN

SEQ ID NO: 16688 - protein, 19 aa, Artificial Sequence
  Description of Artificial Sequence: Synthetic peptide
  XENP019196 vhCDR2
EIRLYSNNYATHYAESVKG

SEQ ID NO: 16689 - protein, 11 aa, Artificial Sequence
  Description of Artificial Sequence: Synthetic peptide
  XENP019196 vhCDR3
YYGNYGGYFDV

SEQ ID NO: 16690 - protein, 214 aa, Artificial Sequence; identical to SEQ ID NO: 16670
  Description of Artificial Sequence: Synthetic polypeptide
  XENP019196 1G6_H1.278_L1.189_IgG1_PVA_/S267K Light Chain

SEQ ID NO: 16691 - protein, 107 aa, Artificial Sequence; identical to SEQ ID NO: 10864
  Description of Artificial Sequence: Synthetic polypeptide
  VL of XENP019196

SEQ ID NO: 16692 - protein, 11 aa, Artificial Sequence
  Description of Artificial Sequence: Synthetic peptide
  XENP019196 vlCDR1
RASQSVGNDVA

SEQ ID NO: 16693 - protein, 7 aa, Artificial Sequence
  Description of Artificial Sequence: Synthetic peptide
  XENP019196 vlCDR2
YASHRYT

SEQ ID NO: 16694 - protein, 9 aa, Artificial Sequence
  Description of Artificial Sequence: Synthetic peptide
  XENP019196 vlCDR3
QQDFSSPRT

SEQ ID NO: 16695 - protein, 451 aa, Artificial Sequence; identical to SEQ ID NO: 16675
  Description of Artificial Sequence: Synthetic polypeptide
  XENP019201 1G6_H1.278_L1_IgG1_PVA_/S267K Heavy Chain

SEQ ID NO: 16696 - protein, 122 aa, Artificial Sequence; identical to SEQ ID NO: 10845
  Description of Artificial Sequence: Synthetic polypeptide
  VH of XENP019201

SEQ ID NO: 16697 - protein, 5 aa, Artificial Sequence
  Description of Artificial Sequence: Synthetic peptide
  XENP019201 vhCDR1
NYWMN

SEQ ID NO: 16698 - protein, 19 aa, Artificial Sequence
  Description of Artificial Sequence: Synthetic peptide
  XENP019201 vhCDR2
EIRLYSNNYATHYAESVKG

SEQ ID NO: 16699 - protein, 11 aa, Artificial Sequence
  Description of Artificial Sequence: Synthetic peptide
  XENP019201 vhCDR3
YYGNYGGYFDV

SEQ ID NO: 16700 - protein, 214 aa, Artificial Sequence; identical to SEQ ID NO: 11550
  Description of Artificial Sequence: Synthetic polypeptide
  XENP019201 1G6_H1.278_L1_IgG1_PVA_/S267K Light Chain

SEQ ID NO: 16701 - protein, 107 aa, Artificial Sequence; identical to SEQ ID NO: 6247
  Description of Artificial Sequence: Synthetic polypeptide
  VL of XENP019201

SEQ ID NO: 16702 - protein, 11 aa, Artificial Sequence
  Description of Artificial Sequence: Synthetic peptide
  XENP019201 vlCDR1
RASQSVSNDVA

SEQ ID NO: 16703 - protein, 7 aa, Artificial Sequence
  Description of Artificial Sequence: Synthetic peptide
  XENP019201 vlCDR2
YASHRYT

SEQ ID NO: 16704 - protein, 9 aa, Artificial Sequence
  Description of Artificial Sequence: Synthetic peptide
  XENP019201 vlCDR3
QQDYSSPRT

SEQ ID NO: 16705 - protein, 451 aa, Artificial Sequence
  Description of Artificial Sequence: Synthetic polypeptide
  XENP019589 1G6_H1.279_L1.189_IgG1_PVA_/S267K Heavy Chain
EVQLVESGGGLVKPGGSLRLSCVASGFTFSNYWMNWVRQAPGKGLEWVAEIRLYSNNYATHYAESVKGRFTISRDDSKSTLYLQMNNLKTEDTGVYYCTRYYGNYGGYFDVWGRGTLVTVSSASTKGPSVFPLAPSSKSTSGGTAALGCLVKDYFPEPVTVSWNSGALTSGVHTFPAVLQSSGLYSLSSVVTVPSSSLGTQTYICNVNHKPSNTKVDKKVEPKSCDKTHTCPPCPAPPVAGPSVFLFPPKPKDTLMISRTPEVTCVVVDVKHEDPEVKFNWYVDGVEVHNAKTKPREEQYNSTYRVVSVLTVLHQDWLNGKEYKCKVSNKALPAPIEKTISKAKGQPREPQVYTLPPSREEMTKNQVSLTCLVKGFYPSDIAVEWESNGQPENNYKTTPPVLDSDGSFFLYSKLTVDKSRWQQGNVFSCSVMHEALHNHYTQKSLSLSPGK

SEQ ID NO: 16706 - protein, 122 aa, Artificial Sequence; identical to SEQ ID NO: 10908
  Description of Artificial Sequence: Synthetic polypeptide
  VH of XENP019589

SEQ ID NO: 16707 - protein, 5 aa, Artificial Sequence
  Description of Artificial Sequence: Synthetic peptide
  XENP019589 vhCDR1
NYWMN

SEQ ID NO: 16708 - protein, 19 aa, Artificial Sequence
  Description of Artificial Sequence: Synthetic peptide
  XENP019589 vhCDR2
EIRLYSNNYATHYAESVKG

SEQ ID NO: 16709 - protein, 11 aa, Artificial Sequence
  Description of Artificial Sequence: Synthetic peptide
  XENP019589 vhCDR3
YYGNYGGYFDV

SEQ ID NO: 16710 - protein, 214 aa, Artificial Sequence; identical to SEQ ID NO: 16670
  Description of Artificial Sequence: Synthetic polypeptide
  XENP019589 1G6_H1.279_L1.189_IgG1_PVA_/S267K Light Chain

SEQ ID NO: 16711 - protein, 107 aa, Artificial Sequence; identical to SEQ ID NO: 10864
  Description of Artificial Sequence: Synthetic polypeptide
  VL of XENP019589

SEQ ID NO: 16712 - protein, 11 aa, Artificial Sequence
  Description of Artificial Sequence: Synthetic peptide
  XENP019589 vlCDR1
RASQSVGNDVA

SEQ ID NO: 16713 - protein, 7 aa, Artificial Sequence
  Description of Artificial Sequence: Synthetic peptide
  XENP019589 vlCDR2
YASHRYT

SEQ ID NO: 16714 - protein, 9 aa, Artificial Sequence
  Description of Artificial Sequence: Synthetic peptide
  XENP019589 vlCDR3
QQDFSSPRT

SEQ ID NO: 16715 - protein, 451 aa, Artificial Sequence
  Description of Artificial Sequence: Synthetic polypeptide
  XENP019590 1G6_H1.280_L1.189_IgG1_PVA_/S267K Heavy Chain
EVQLVESGGGLVKPGGSLRLTCVASGFTFSNYWMNWVRQAPGKGLEWVAEIRLYSNNYATHYAESVKGRFTISRDDSKSTLYLQMNNLKTEDTGVYYCTRYYGNYGGYFDVWGRGTLVTVSSASTKGPSVFPLAPSSKSTSGGTAALGCLVKDYFPEPVTVSWNSGALTSGVHTFPAVLQSSGLYSLSSVVTVPSSSLGTQTYICNVNHKPSNTKVDKKVEPKSCDKTHTCPPCPAPPVAGPSVFLFPPKPKDTLMISRTPEVTCVVVDVKHEDPEVKFNWYVDGVEVHNAKTKPREEQYNSTYRVVSVLTVLHQDWLNGKEYKCKVSNKALPAPIEKTISKAKGQPREPQVYTLPPSREEMTKNQVSLTCLVKGFYPSDIAVEWESNGQPENNYKTTPPVLDSDGSFFLYSKLTVDKSRWQQGNVFSCSVMHEALHNHYTQKSLSLSPGK

SEQ ID NO: 16716 - protein, 122 aa, Artificial Sequence; identical to SEQ ID NO: 10917
  Description of Artificial Sequence: Synthetic polypeptide
  VH of XENP019590

SEQ ID NO: 16717 - protein, 5 aa, Artificial Sequence
  Description of Artificial Sequence: Synthetic peptide
  XENP019590 vhCDR1
NYWMN

SEQ ID NO: 16718 - protein, 19 aa, Artificial Sequence
  Description of Artificial Sequence: Synthetic peptide
  XENP019590 vhCDR2
EIRLYSNNYATHYAESVKG

SEQ ID NO: 16719 - protein, 11 aa, Artificial Sequence
  Description of Artificial Sequence: Synthetic peptide
  XENP019590 vhCDR3
YYGNYGGYFDV

SEQ ID NO: 16720 - protein, 214 aa, Artificial Sequence; identical to SEQ ID NO: 16670
  Description of Artificial Sequence: Synthetic polypeptide
  XENP019590 1G6_H1.280_L1.189_IgG1_PVA_/S267K Light Chain

SEQ ID NO: 16721 - protein, 107 aa, Artificial Sequence; identical to SEQ ID NO: 10864
  Description of Artificial Sequence: Synthetic polypeptide
  VL of XENP019590

SEQ ID NO: 16722 - protein, 11 aa, Artificial Sequence
  Description of Artificial Sequence: Synthetic peptide
  XENP019590 vlCDR1
RASQSVGNDVA

SEQ ID NO: 16723 - protein, 7 aa, Artificial Sequence
  Description of Artificial Sequence: Synthetic peptide
  XENP019590 vlCDR2
YASHRYT

SEQ ID NO: 16724 - protein, 9 aa, Artificial Sequence
  Description of Artificial Sequence: Synthetic peptide
  XENP019590 vlCDR3
QQDFSSPRT

SEQ ID NO: 16725 - protein, 451 aa, Artificial Sequence
  Description of Artificial Sequence: Synthetic polypeptide
  XENP019591 1G6_H1.281_L1.189_IgG1_PVA_/S267K Heavy Chain
EVQLVESGGGLVKPGGSLRLSCVASGFTFSNYWMNWVRQAPGKGLEWVAEIRLYSNNYATHYAESVKGRFTISRDDSKSMLYLQMNNLKTEDTGVYYCTRYYGNYGGYFDVWGRGTLVTVSSASTKGPSVFPLAPSSKSTSGGTAALGCLVKDYFPEPVTVSWNSGALTSGVHTFPAVLQSSGLYSLSSVVTVPSSSLGTQTYICNVNHKPSNTKVDKKVEPKSCDKTHTCPPCPAPPVAGPSVFLFPPKPKDTLMISRTPEVTCVVVDVKHEDPEVKFNWYVDGVEVHNAKTKPREEQYNSTYRVVSVLTVLHQDWLNGKEYKCKVSNKALPAPIEKTISKAKGQPREPQVYTLPPSREEMTKNQVSLTCLVKGFYPSDIAVEWESNGQPENNYKTTPPVLDSDGSFFLYSKLTVDKSRWQQGNVFSCSVMHEALHNHYTQKSLSLSPGK

SEQ ID NO: 16726 - protein, 122 aa, Artificial Sequence; identical to SEQ ID NO: 10926
  Description of Artificial Sequence: Synthetic polypeptide
  VH of XENP019591

SEQ ID NO: 16727 - protein, 5 aa, Artificial Sequence
  Description of Artificial Sequence: Synthetic peptide
  XENP019591 vhCDR1
NYWMN

SEQ ID NO: 16728 - protein, 19 aa, Artificial Sequence
  Description of Artificial Sequence: Synthetic peptide
  XENP019591 vhCDR2
EIRLYSNNYATHYAESVKG

SEQ ID NO: 16729 - protein, 11 aa, Artificial Sequence
  Description of Artificial Sequence: Synthetic peptide
  XENP019591 vhCDR3
YYGNYGGYFDV

SEQ ID NO: 16730 - protein, 214 aa, Artificial Sequence; identical to SEQ ID NO: 16670
  Description of Artificial Sequence: Synthetic polypeptide
  XENP019591 1G6_H1.281_L1.189_IgG1_PVA_/S267K Light Chain

SEQ ID NO: 16731 - protein, 107 aa, Artificial Sequence; identical to SEQ ID NO: 10864
  Description of Artificial Sequence: Synthetic polypeptide
  VL of XENP019591

SEQ ID NO: 16732 - protein, 11 aa, Artificial Sequence
  Description of Artificial Sequence: Synthetic peptide
  XENP019591 vlCDR1
RASQSVGNDVA

SEQ ID NO: 16733 - protein, 7 aa, Artificial Sequence
  Description of Artificial Sequence: Synthetic peptide
  XENP019591 vlCDR2
YASHRYT

SEQ ID NO: 16734 - protein, 9 aa, Artificial Sequence
  Description of Artificial Sequence: Synthetic peptide
  XENP019591 vlCDR3
QQDFSSPRT

SEQ ID NO: 16735 - protein, 451 aa, Artificial Sequence
  Description of Artificial Sequence: Synthetic polypeptide
  XENP019592 1G6_H1.282_L1.189_IgG1_PVA_/S267K Heavy Chain
EVQLVESGGGLVKPGGSLRLTCVASGFTFSNYWMNWVRQAPGKGLEWVAEIRLYSNNYATHYAESVKGRFTISRDDSKSMLYLQMNNLKTEDTGVYYCTRYYGNYGGYFDVWGRGTLVTVSSASTKGPSVFPLAPSSKSTSGGTAALGCLVKDYFPEPVTVSWNSGALTSGVHTFPAVLQSSGLYSLSSVVTVPSSSLGTQTYICNVNHKPSNTKVDKKVEPKSCDKTHTCPPCPAPPVAGPSVFLFPPKPKDTLMISRTPEVTCVVVDVKHEDPEVKFNWYVDGVEVHNAKTKPREEQYNSTYRVVSVLTVLHQDWLNGKEYKCKVSNKALPAPIEKTISKAKGQPREPQVYTLPPSREEMTKNQVSLTCLVKGFYPSDIAVEWESNGQPENNYKTTPPVLDSDGSFFLYSKLTVDKSRWQQGNVFSCSVMHEALHNHYTQKSLSLSPGK

SEQ ID NO: 16736 - protein, 122 aa, Artificial Sequence; identical to SEQ ID NO: 10935
  Description of Artificial Sequence: Synthetic polypeptide
  VH of XENP019592

SEQ ID NO: 16737 - protein, 5 aa, Artificial Sequence
  Description of Artificial Sequence: Synthetic peptide
  XENP019592 vhCDR1
NYWMN

SEQ ID NO: 16738 - protein, 19 aa, Artificial Sequence
  Description of Artificial Sequence: Synthetic peptide
  XENP019592 vhCDR2
EIRLYSNNYATHYAESVKG

SEQ ID NO: 16739 - protein, 11 aa, Artificial Sequence
  Description of Artificial Sequence: Synthetic peptide
  XENP019592 vhCDR3
YYGNYGGYFDV

SEQ ID NO: 16740 - protein, 214 aa, Artificial Sequence; identical to SEQ ID NO: 16670
  Description of Artificial Sequence: Synthetic polypeptide
  XENP019592 1G6_H1.282_L1.189_IgG1_PVA_/S267K Light Chain

SEQ ID NO: 16741 - protein, 107 aa, Artificial Sequence; identical to SEQ ID NO: 10864
  Description of Artificial Sequence: Synthetic polypeptide
  VL of XENP019592

SEQ ID NO: 16742 - protein, 11 aa, Artificial Sequence
  Description of Artificial Sequence: Synthetic peptide
  XENP019592 vlCDR1
RASQSVGNDVA

SEQ ID NO: 16743 - protein, 7 aa, Artificial Sequence
  Description of Artificial Sequence: Synthetic peptide
  XENP019592 vlCDR2
YASHRYT

SEQ ID NO: 16744 - protein, 9 aa, Artificial Sequence
  Description of Artificial Sequence: Synthetic peptide
  XENP019592 vlCDR3
QQDFSSPRT

SEQ ID NO: 16745 - protein, 451 aa, Artificial Sequence
  Description of Artificial Sequence: Synthetic polypeptide
  XENP019593 1G6_H1.283_L1.189_IgG1_PVA_/S267K Heavy Chain
EVQLVESGGGLVKPGGSLRLSCVASGFTFSNYWMNWVRQAPGKGLEWVCEIRLYSNNYATHYAESVKGRFTCSRDDSKSTLYLQMNNLKTEDTGVYYCTRYYGNYGGYFDVWGQGTLVTVSSASTKGPSVFPLAPSSKSTSGGTAALGCLVKDYFPEPVTVSWNSGALTSGVHTFPAVLQSSGLYSLSSVVTVPSSSLGTQTYICNVNHKPSNTKVDKKVEPKSCDKTHTCPPCPAPPVAGPSVFLFPPKPKDTLMISRTPEVTCVVVDVKHEDPEVKFNWYVDGVEVHNAKTKPREEQYNSTYRVVSVLTVLHQDWLNGKEYKCKVSNKALPAPIEKTISKAKGQPREPQVYTLPPSREEMTKNQVSLTCLVKGFYPSDIAVEWESNGQPENNYKTTPPVLDSDGSFFLYSKLTVDKSRWQQGNVFSCSVMHEALHNHYTQKSLSLSPGK

SEQ ID NO: 16746 - protein, 122 aa, Artificial Sequence; identical to SEQ ID NO: 10944
  Description of Artificial Sequence: Synthetic polypeptide
  VH of XENP019593

SEQ ID NO: 16747 - protein, 5 aa, Artificial Sequence
  Description of Artificial Sequence: Synthetic peptide
  XENP019593 vhCDR1
NYWMN

SEQ ID NO: 16748 - protein, 19 aa, Artificial Sequence
  Description of Artificial Sequence: Synthetic peptide
  XENP019593 vhCDR2
EIRLYSNNYATHYAESVKG

SEQ ID NO: 16749 - protein, 11 aa, Artificial Sequence
  Description of Artificial Sequence: Synthetic peptide
  XENP019593 vhCDR3
YYGNYGGYFDV

SEQ ID NO: 16750 - protein, 214 aa, Artificial Sequence; identical to SEQ ID NO: 16670
  Description of Artificial Sequence: Synthetic polypeptide
  XENP019593 1G6_H1.283_L1.189_IgG1_PVA_/S267K Light Chain

SEQ ID NO: 16751 - protein, 107 aa, Artificial Sequence; identical to SEQ ID NO: 10864
  Description of Artificial Sequence: Synthetic polypeptide
  VL of XENP019593

SEQ ID NO: 16752 - protein, 11 aa, Artificial Sequence
  Description of Artificial Sequence: Synthetic peptide
  XENP019593 vlCDR1
RASQSVGNDVA

SEQ ID NO: 16753 - protein, 7 aa, Artificial Sequence
  Description of Artificial Sequence: Synthetic peptide
  XENP019593 vlCDR2
YASHRYT

SEQ ID NO: 16754 - protein, 9 aa, Artificial Sequence
  Description of Artificial Sequence: Synthetic peptide
  XENP019593 vlCDR3
QQDFSSPRT

SEQ ID NO: 16755 - protein, 451 aa, Artificial Sequence
  Description of Artificial Sequence: Synthetic polypeptide
  XENP019594 1G6_H1.284_L1.189_IgG1_PVA_/S267K Heavy Chain
EVQLVESGGGLVKPGGSLRLSCVASGFTFSNYWMNWVRQAPGKGLEWVCEIRLYSNNYATHYAESVKGRFTCSRDDSKSTLYLQMNNLKTEDTGVYYCTRYYGNYGGYFDVWGRGTLVTVSSASTKGPSVFPLAPSSKSTSGGTAALGCLVKDYFPEPVTVSWNSGALTSGVHTFPAVLQSSGLYSLSSVVTVPSSSLGTQTYICNVNHKPSNTKVDKKVEPKSCDKTHTCPPCPAPPVAGPSVFLFPPKPKDTLMISRTPEVTCVVVDVKHEDPEVKFNWYVDGVEVHNAKTKPREEQYNSTYRVVSVLTVLHQDWLNGKEYKCKVSNKALPAPIEKTISKAKGQPREPQVYTLPPSREEMTKNQVSLTCLVKGFYPSDIAVEWESNGQPENNYKTTPPVLDSDGSFFLYSKLTVDKSRWQQGNVFSCSVMHEALHNHYTQKSLSLSPGK

SEQ ID NO: 16756 - protein, 122 aa, Artificial Sequence; identical to SEQ ID NO: 10953
  Description of Artificial Sequence: Synthetic polypeptide
  VH of XENP019594

SEQ ID NO: 16757 - protein, 5 aa, Artificial Sequence
  Description of Artificial Sequence: Synthetic peptide
  XENP019594 vhCDR1
NYWMN

SEQ ID NO: 16758 - protein, 19 aa, Artificial Sequence
  Description of Artificial Sequence: Synthetic peptide
  XENP019594 vhCDR2
EIRLYSNNYATHYAESVKG

SEQ ID NO: 16759 - protein, 11 aa, Artificial Sequence
  Description of Artificial Sequence: Synthetic peptide
  XENP019594 vhCDR3
YYGNYGGYFDV

SEQ ID NO: 16760 - protein, 214 aa, Artificial Sequence; identical to SEQ ID NO: 16670
  Description of Artificial Sequence: Synthetic polypeptide
  XENP019594 1G6_H1.284_L1.189_IgG1_PVA_/S267K Light Chain

SEQ ID NO: 16761 - protein, 107 aa, Artificial Sequence; identical to SEQ ID NO: 10864
  Description of Artificial Sequence: Synthetic polypeptide
  VL of XENP019594

SEQ ID NO: 16762 - protein, 11 aa, Artificial Sequence
  Description of Artificial Sequence: Synthetic peptide
  XENP019594 vlCDR1
RASQSVGNDVA

SEQ ID NO: 16763 - protein, 7 aa, Artificial Sequence
  Description of Artificial Sequence: Synthetic peptide
  XENP019594 vlCDR2
YASHRYT

SEQ ID NO: 16764 - protein, 9 aa, Artificial Sequence
  Description of Artificial Sequence: Synthetic peptide
  XENP019594 vlCDR3
QQDFSSPRT

SEQ ID NO: 16765 - protein, 451 aa, Artificial Sequence
  Description of Artificial Sequence: Synthetic polypeptide
  XENP019595 1G6_H1.285_L1.189_IgG1_PVA_/S267K Heavy Chain
EVQLVESGGGLVKPGGSLRLTCVASGFTFSNYWMNWVRQAPGKGLEWVCEIRLYSNNYATHYAESVKGRFTCSRDDSKSMLYLQMNNLKTEDTGVYYCTRYYGNYGGYFDVWGRGTLVTVSSASTKGPSVFPLAPSSKSTSGGTAALGCLVKDYFPEPVTVSWNSGALTSGVHTFPAVLQSSGLYSLSSVVTVPSSSLGTQTYICNVNHKPSNTKVDKKVEPKSCDKTHTCPPCPAPPVAGPSVFLFPPKPKDTLMISRTPEVTCVVVDVKHEDPEVKFNWYVDGVEVHNAKTKPREEQYNSTYRVVSVLTVLHQDWLNGKEYKCKVSNKALPAPIEKTISKAKGQPREPQVYTLPPSREEMTKNQVSLTCLVKGFYPSDIAVEWESNGQPENNYKTTPPVLDSDGSFFLYSKLTVDKSRWQQGNVFSCSVMHEALHNHYTQKSLSLSPGK

SEQ ID NO: 16766 - protein, 122 aa, Artificial Sequence; identical to SEQ ID NO: 10962
  Description of Artificial Sequence: Synthetic polypeptide
  VH of XENP019595

SEQ ID NO: 16767 - protein, 5 aa, Artificial Sequence
  Description of Artificial Sequence: Synthetic peptide
  XENP019595 vhCDR1
NYWMN

SEQ ID NO: 16768 - protein, 19 aa, Artificial Sequence
  Description of Artificial Sequence: Synthetic peptide
  XENP019595 vhCDR2
EIRLYSNNYATHYAESVKG

SEQ ID NO: 16769 - protein, 11 aa, Artificial Sequence
  Description of Artificial Sequence: Synthetic peptide
  XENP019595 vhCDR3
YYGNYGGYFDV

SEQ ID NO: 16770 - protein, 214 aa, Artificial Sequence; identical to SEQ ID NO: 16670
  Description of Artificial Sequence: Synthetic polypeptide
  XENP019595 1G6_H1.285_L1.189_IgG1_PVA_/S267K Light Chain

SEQ ID NO: 16771 - protein, 107 aa, Artificial Sequence; identical to SEQ ID NO: 10864
  Description of Artificial Sequence: Synthetic polypeptide
  VL of XENP019595

SEQ ID NO: 16772 - protein, 11 aa, Artificial Sequence
  Description of Artificial Sequence: Synthetic peptide
  XENP019595 vlCDR1
RASQSVGNDVA

SEQ ID NO: 16773 - protein, 7 aa, Artificial Sequence
  Description of Artificial Sequence: Synthetic peptide
  XENP019595 vlCDR2
YASHRYT

SEQ ID NO: 16774 - protein, 9 aa, Artificial Sequence
  Description of Artificial Sequence: Synthetic peptide
  XENP019595 vlCDR3
QQDFSSPRT

SEQ ID NO: 16775 - protein, 451 aa, Artificial Sequence
  Description of Artificial Sequence: Synthetic polypeptide
  XENP019596 1G6_H1.286_L1.189_IgG1_PVA_/S267K Heavy Chain
EVQLVESGGGLVKPGGSLRLSCVASGFTFSNYWMNWVRQAPGKGLEWVAEIRLYSDNYATHYAESVKGRFTISRDDSKSTLYLQMNNLKTEDTGVYYCTRYYGNYGGYFDVWGQGTLVTVSSASTKGPSVFPLAPSSKSTSGGTAALGCLVKDYFPEPVTVSWNSGALTSGVHTFPAVLQSSGLYSLSSVVTVPSSSLGTQTYICNVNHKPSNTKVDKKVEPKSCDKTHTCPPCPAPPVAGPSVFLFPPKPKDTLMISRTPEVTCVVVDVKHEDPEVKFNWYVDGVEVHNAKTKPREEQYNSTYRVVSVLTVLHQDWLNGKEYKCKVSNKALPAPIEKTISKAKGQPREPQVYTLPPSREEMTKNQVSLTCLVKGFYPSDIAVEWESNGQPENNYKTTPPVLDSDGSFFLYSKLTVDKSRWQQGNVFSCSVMHEALHNHYTQKSLSLSPGK

SEQ ID NO: 16776 - protein, 122 aa, Artificial Sequence; identical to SEQ ID NO: 10971
  Description of Artificial Sequence: Synthetic polypeptide
  VH of XENP019596

SEQ ID NO: 16777 - protein, 5 aa, Artificial Sequence
  Description of Artificial Sequence: Synthetic peptide
  XENP019596 vhCDR1
NYWMN

SEQ ID NO: 16778 - protein, 19 aa, Artificial Sequence
  Description of Artificial Sequence: Synthetic peptide
  XENP019596 vhCDR2
EIRLYSDNYATHYAESVKG

SEQ ID NO: 16779 - protein, 11 aa, Artificial Sequence
  Description of Artificial Sequence: Synthetic peptide
  XENP019596 vhCDR3
YYGNYGGYFDV

SEQ ID NO: 16780 - protein, 214 aa, Artificial Sequence; identical to SEQ ID NO: 16670
  Description of Artificial Sequence: Synthetic polypeptide
  XENP019596 1G6_H1.286_L1.189_IgG1_PVA_/S267K Light Chain

SEQ ID NO: 16781 - protein, 107 aa, Artificial Sequence; identical to SEQ ID NO: 10864
  Description of Artificial Sequence: Synthetic polypeptide
  VL of XENP019596

SEQ ID NO: 16782 - protein, 11 aa, Artificial Sequence
  Description of Artificial Sequence: Synthetic peptide
  XENP019596 vlCDR1
RASQSVGNDVA

SEQ ID NO: 16783 - protein, 7 aa, Artificial Sequence
  Description of Artificial Sequence: Synthetic peptide
  XENP019596 vlCDR2
YASHRYT

SEQ ID NO: 16784 - protein, 9 aa, Artificial Sequence
  Description of Artificial Sequence: Synthetic peptide
  XENP019596 vlCDR3
QQDFSSPRT

SEQ ID NO: 16785 - protein, 451 aa, Artificial Sequence; identical to SEQ ID NO: 16675
  Description of Artificial Sequence: Synthetic polypeptide
  XENP019601 1G6_H1.278_L1.192_IgG1_PVA_/S267K Heavy Chain

SEQ ID NO: 16786 - protein, 122 aa, Artificial Sequence; identical to SEQ ID NO: 10845
  Description of Artificial Sequence: Synthetic polypeptide
  VH of XENP019601

SEQ ID NO: 16787 - protein, 5 aa, Artificial Sequence
  Description of Artificial Sequence: Synthetic peptide
  XENP019601 vhCDR1
NYWMN

SEQ ID NO: 16788 - protein, 19 aa, Artificial Sequence
  Description of Artificial Sequence: Synthetic peptide
  XENP019601 vhCDR2
EIRLYSNNYATHYAESVKG

SEQ ID NO: 16789 - protein, 11 aa, Artificial Sequence
  Description of Artificial Sequence: Synthetic peptide
  XENP019601 vhCDR3
YYGNYGGYFDV

SEQ ID NO: 16790 - protein, 214 aa, Artificial Sequence
  Description of Artificial Sequence: Synthetic polypeptide
  XENP019601 1G6_H1.278_L1.192_IgG1_PVA_/S267K Light Chain
EIVLTQSPATLSASPGERVTLTCRASQSVGNDVAWYQQKPGQAPRLLINYASHRYTGVPDRFTGSGYGTEFTLTISSVQSEDFAVYYCQQDFSSPRTFGGGTKVEIKRTVAAPSVFIFPPSDEQLKSGTASVVCLLNNFYPREAKVQWKVDNALQSGNSQESVTEQDSKDSTYSLSSTLTLSKADYEKHKVYACEVTHQGLSSPVTKSFNRGEC

SEQ ID NO: 16791 - protein, 107 aa, Artificial Sequence; identical to SEQ ID NO: 10981
  Description of Artificial Sequence: Synthetic polypeptide
  VL of XENP019601

SEQ ID NO: 16792 - protein, 11 aa, Artificial Sequence
  Description of Artificial Sequence: Synthetic peptide
  XENP019601 vlCDR1
RASQSVGNDVA

SEQ ID NO: 16793 - protein, 7 aa, Artificial Sequence
  Description of Artificial Sequence: Synthetic peptide
  XENP019601 vlCDR2
YASHRYT

SEQ ID NO: 16794 - protein, 9 aa, Artificial Sequence
  Description of Artificial Sequence: Synthetic peptide
  XENP019601 vlCDR3
QQDFSSPRT

SEQ ID NO: 16795 - protein, 451 aa, Artificial Sequence; identical to SEQ ID NO: 16675
  Description of Artificial Sequence: Synthetic polypeptide
  XENP019602 1G6_H1.278_L1.193_IgG1_PVA_/S267K Heavy Chain

SEQ ID NO: 16796 - protein, 122 aa, Artificial Sequence; identical to SEQ ID NO: 10845
  Description of Artificial Sequence: Synthetic polypeptide
  VH of XENP019602

SEQ ID NO: 16797 - protein, 5 aa, Artificial Sequence
  Description of Artificial Sequence: Synthetic peptide
  XENP019602 vhCDR1
NYWMN

SEQ ID NO: 16798 - protein, 19 aa, Artificial Sequence
  Description of Artificial Sequence: Synthetic peptide
  XENP019602 vhCDR2
EIRLYSNNYATHYAESVKG

SEQ ID NO: 16799 - protein, 11 aa, Artificial Sequence
  Description of Artificial Sequence: Synthetic peptide
  XENP019602 vhCDR3
YYGNYGGYFDV

SEQ ID NO: 16800 - protein, 214 aa, Artificial Sequence
  Description of Artificial Sequence: Synthetic polypeptide
  XENP019602 1G6_H1.278_L1.193_IgG1_PVA_/S267K Light Chain
EIVLTQSPATLSVSPGERVTLTCRASQSVGNDVAWYQQKPGQAPRLLINYASHRYTGVPDRFTGSGYGTEFTLTISSVQSEDFGVYYCQQDFSSPRTFGGGTKVEIKRTVAAPSVFIFPPSDEQLKSGTASVVCLLNNFYPREAKVQWKVDNALQSGNSQESVTEQDSKDSTYSLSSTLTLSKADYEKHKVYACEVTHQGLSSPVTKSFNRGEC

SEQ ID NO: 16801 - protein, 107 aa, Artificial Sequence; identical to SEQ ID NO: 10990
  Description of Artificial Sequence: Synthetic polypeptide
  VL of XENP019602

SEQ ID NO: 16802 - protein, 11 aa, Artificial Sequence
  Description of Artificial Sequence: Synthetic peptide
  XENP019602 vlCDR1
RASQSVGNDVA

SEQ ID NO: 16803 - protein, 7 aa, Artificial Sequence
  Description of Artificial Sequence: Synthetic peptide
  XENP019602 vlCDR2
YASHRYT

SEQ ID NO: 16804 - protein, 9 aa, Artificial Sequence
  Description of Artificial Sequence: Synthetic peptide
  XENP019602 vlCDR3
QQDFSSPRT

SEQ ID NO: 16805 - protein, 451 aa, Artificial Sequence; identical to SEQ ID NO: 16675
  Description of Artificial Sequence: Synthetic polypeptide
  XENP019603 1G6_H1.278_L1.194_IgG1_PVA_/S267K Heavy Chain

SEQ ID NO: 16806 - protein, 122 aa, Artificial Sequence; identical to SEQ ID NO: 10845
  Description of Artificial Sequence: Synthetic polypeptide
  VH of XENP019603

SEQ ID NO: 16807 - protein, 5 aa, Artificial Sequence
  Description of Artificial Sequence: Synthetic peptide
  XENP019603 vhCDR1
NYWMN

SEQ ID NO: 16808 - protein, 19 aa, Artificial Sequence
  Description of Artificial Sequence: Synthetic peptide
  XENP019603 vhCDR2
EIRLYSNNYATHYAESVKG

SEQ ID NO: 16809 - protein, 11 aa, Artificial Sequence
  Description of Artificial Sequence: Synthetic peptide
  XENP019603 vhCDR3
YYGNYGGYFDV

SEQ ID NO: 16810 - protein, 214 aa, Artificial Sequence
  Description of Artificial Sequence: Synthetic polypeptide
  XENP019603 1G6_H1.278_L1.194_IgG1_PVA_/S267K Light Chain
EIVLTQSPATLSASPGERVTLTCRASQSVGNDVAWYQQKPGQAPRLLINYASHRYTGVPDRFTGSGYGTEFTLTISSVQSEDFGVYYCQQDFSSPRTFGGGTKVEIKRTVAAPSVFIFPPSDEQLKSGTASVVCLLNNFYPREAKVQWKVDNALQSGNSQESVTEQDSKDSTYSLSSTLTLSKADYEKHKVYACEVTHQGLSSPVTKSFNRGEC

SEQ ID NO: 16811 - protein, 107 aa, Artificial Sequence; identical to SEQ ID NO: 10999
  Description of Artificial Sequence: Synthetic polypeptide
  VL of XENP019603

SEQ ID NO: 16812 - protein, 11 aa, Artificial Sequence
  Description of Artificial Sequence: Synthetic peptide
  XENP019603 vlCDR1
RASQSVGNDVA

SEQ ID NO: 16813 - protein, 7 aa, Artificial Sequence
  Description of Artificial Sequence: Synthetic peptide
  XENP019603 vlCDR2
YASHRYT

SEQ ID NO: 16814 - protein, 9 aa, Artificial Sequence
  Description of Artificial Sequence: Synthetic peptide
  XENP019603 vlCDR3
QQDFSSPRT

SEQ ID NO: 16815 - protein, 451 aa, Artificial Sequence; identical to SEQ ID NO: 16675
  Description of Artificial Sequence: Synthetic polypeptide
  XENP019604 1G6_H1.278_L1.195_IgG1_PVA_/S267K Heavy Chain

SEQ ID NO: 16816 - protein, 122 aa, Artificial Sequence; identical to SEQ ID NO: 10845
  Description of Artificial Sequence: Synthetic polypeptide
  VH of XENP019604

SEQ ID NO: 16817 - protein, 5 aa, Artificial Sequence
  Description of Artificial Sequence: Synthetic peptide
  XENP019604 vhCDR1
NYWMN

SEQ ID NO: 16818 - protein, 19 aa, Artificial Sequence
  Description of Artificial Sequence: Synthetic peptide
  XENP019604 vhCDR2
EIRLYSNNYATHYAESVKG

SEQ ID NO: 16819 - protein, 11 aa, Artificial Sequence
  Description of Artificial Sequence: Synthetic peptide
  XENP019604 vhCDR3
YYGNYGGYFDV

SEQ ID NO: 16820 - protein, 214 aa, Artificial Sequence
  Description of Artificial Sequence: Synthetic polypeptide
  XENP019604 1G6_H1.278_L1.195_IgG1_PVA_/S267K Light Chain
EIVLTQSPATLSVSPGERVTLTCRASQSVGNDVAWYQQKPGQAPRLLCNYASHRYTGVPDRFTCSGYGTEFTLTISSVQSEDFAVYYCQQDFSSPRTFGGGTKVEIKRTVAAPSVFIFPPSDEQLKSGTASVVCLLNNFYPREAKVQWKVDNALQSGNSQESVTEQDSKDSTYSLSSTLTLSKADYEKHKVYACEVTHQGLSSPVTKSFNRGEC

SEQ ID NO: 16821 - protein, 107 aa, Artificial Sequence; identical to SEQ ID NO: 11008
  Description of Artificial Sequence: Synthetic polypeptide
  VL of XENP019604

SEQ ID NO: 16822 - protein, 11 aa, Artificial Sequence
  Description of Artificial Sequence: Synthetic peptide
  XENP019604 vlCDR1
RASQSVGNDVA

SEQ ID NO: 16823 - protein, 7 aa, Artificial Sequence
  Description of Artificial Sequence: Synthetic peptide
  XENP019604 vlCDR2
YASHRYT

SEQ ID NO: 16824 - protein, 9 aa, Artificial Sequence
  Description of Artificial Sequence: Synthetic peptide
  XENP019604 vlCDR3
QQDFSSPRT

SEQ ID NO: 16825 - protein, 451 aa, Artificial Sequence; identical to SEQ ID NO: 16675
  Description of Artificial Sequence: Synthetic polypeptide
  XENP019605 1G6_H1.278_L1.196_IgG1_PVA_/S267K Heavy Chain

SEQ ID NO: 16826 - protein, 122 aa, Artificial Sequence; identical to SEQ ID NO: 10845
  Description of Artificial Sequence: Synthetic polypeptide
  VH of XENP019605

SEQ ID NO: 16827 - protein, 5 aa, Artificial Sequence
  Description of Artificial Sequence: Synthetic peptide
  XENP019605 vhCDR1
NYWMN

SEQ ID NO: 16828 - protein, 19 aa, Artificial Sequence
  Description of Artificial Sequence: Synthetic peptide
  XENP019605 vhCDR2
EIRLYSNNYATHYAESVKG

SEQ ID NO: 16829 - protein, 11 aa, Artificial Sequence
  Description of Artificial Sequence: Synthetic peptide
  XENP019605 vhCDR3
YYGNYGGYFDV

SEQ ID NO: 16830 - protein, 214 aa, Artificial Sequence
  Description of Artificial Sequence: Synthetic polypeptide
  XENP019605 1G6_H1.278_L1.196_IgG1_PVA_/S267K Light Chain
EIVLTQSPATLSASPGERVTLTCRASQSVGNDVAWYQQKPGQAPRLLCNYASHRYTGVPDRFTCSGYGTEFTLTISSVQSEDFGVYYCQQDFSSPRTFGGGTKVEIKRTVAAPSVFIFPPSDEQLKSGTASVVCLLNNFYPREAKVQWKVDNALQSGNSQESVTEQDSKDSTYSLSSTLTLSKADYEKHKVYACEVTHQGLSSPVTKSFNRGEC

SEQ ID NO: 16831 - protein, 107 aa, Artificial Sequence; identical to SEQ ID NO: 11017
  Description of Artificial Sequence: Synthetic polypeptide
  VL of XENP019605

SEQ ID NO: 16832 - protein, 11 aa, Artificial Sequence
  Description of Artificial Sequence: Synthetic peptide
  XENP019605 vlCDR1
RASQSVGNDVA

SEQ ID NO: 16833 - protein, 7 aa, Artificial Sequence
  Description of Artificial Sequence: Synthetic peptide
  XENP019605 vlCDR2
YASHRYT

SEQ ID NO: 16834 - protein, 9 aa, Artificial Sequence
  Description of Artificial Sequence: Synthetic peptide
  XENP019605 vlCDR3
QQDFSSPRT

SEQ ID NO: 16835 - protein, 451 aa, Artificial Sequence; identical to SEQ ID NO: 16675
  Description of Artificial Sequence: Synthetic polypeptide
  XENP019606 1G6_H1.278_L1.197_IgG1_PVA_/S267K Heavy Chain

SEQ ID NO: 16836 - protein, 122 aa, Artificial Sequence; identical to SEQ ID NO: 10845
  Description of Artificial Sequence: Synthetic polypeptide
  VH of XENP019606

SEQ ID NO: 16837 - protein, 5 aa, Artificial Sequence
  Description of Artificial Sequence: Synthetic peptide
  XENP019606 vhCDR1
NYWMN

SEQ ID NO: 16838 - protein, 19 aa, Artificial Sequence
  Description of Artificial Sequence: Synthetic peptide
  XENP019606 vhCDR2
EIRLYSNNYATHYAESVKG

SEQ ID NO: 16839 - protein, 11 aa, Artificial Sequence
  Description of Artificial Sequence: Synthetic peptide
  XENP019606 vhCDR3
YYGNYGGYFDV

SEQ ID NO: 16840 - protein, 214 aa, Artificial Sequence
  Description of Artificial Sequence: Synthetic polypeptide
  XENP019606 1G6_H1.278_L1.197_IgG1_PVA_/S267K Light Chain
EIVLTQSPATLSASPGERVTLTCRASQSVGNDVAWYQQKPGQAPRLLCNYASHRYTSVPDRFTCSGYGTEFTLTISSVQSEDFGVYYCQQDFSSPRTFGGGTKVEIKRTVAAPSVFIFPPSDEQLKSGTASVVCLLNNFYPREAKVQWKVDNALQSGNSQESVTEQDSKDSTYSLSSTLTLSKADYEKHKVYACEVTHQGLSSPVTKSFNRGEC

SEQ ID NO: 16841 - protein, 107 aa, Artificial Sequence; identical to SEQ ID NO: 11026
  Description of Artificial Sequence: Synthetic polypeptide
  VL of XENP019606

SEQ ID NO: 16842 - protein, 11 aa, Artificial Sequence
  Description of Artificial Sequence: Synthetic peptide
  XENP019606 vlCDR1
RASQSVGNDVA

SEQ ID NO: 16843 - protein, 7 aa, Artificial Sequence
  Description of Artificial Sequence: Synthetic peptide
  XENP019606 vlCDR2
YASHRYT

SEQ ID NO: 16844 - protein, 9 aa, Artificial Sequence
  Description of Artificial Sequence: Synthetic peptide
  XENP019606 vlCDR3
QQDFSSPRT

SEQ ID NO: 16845 - protein, 451 aa, Artificial Sequence; identical to SEQ ID NO: 16675
  Description of Artificial Sequence: Synthetic polypeptide
  XENP019607 1G6_H1.278_L1.198_IgG1_PVA_/S267K Heavy Chain

SEQ ID NO: 16846 - protein, 122 aa, Artificial Sequence; identical to SEQ ID NO: 10845
  Description of Artificial Sequence: Synthetic polypeptide
  VH of XENP019607

SEQ ID NO: 16847 - protein, 5 aa, Artificial Sequence
  Description of Artificial Sequence: Synthetic peptide
  XENP019607 vhCDR1
NYWMN

SEQ ID NO: 16848 - protein, 19 aa, Artificial Sequence
  Description of Artificial Sequence: Synthetic peptide
  XENP019607 vhCDR2
EIRLYSNNYATHYAESVKG

SEQ ID NO: 16849 - protein, 11 aa, Artificial Sequence
  Description of Artificial Sequence: Synthetic peptide
  XENP019607 vhCDR3
YYGNYGGYFDV

SEQ ID NO: 16850 - protein, 214 aa, Artificial Sequence
  Description of Artificial Sequence: Synthetic polypeptide
  XENP019607 1G6_H1.278_L1.198_IgG1_PVA_/S267K Light Chain
EIVLTQSPSTLSVSPGERVTLTCRASQSVGNDVAWYQQKPGQAPRLLINYASHRYTGVPDRFTGSGYGTEFTLTISSVQSEDFAVYYCQQDFSSPRTFGGGTKVEIKRTVAAPSVFIFPPSDEQLKSGTASVVCLLNNFYPREAKVQWKVDNALQSGNSQESVTEQDSKDSTYSLSSTLTLSKADYEKHKVYACEVTHQGLSSPVTKSFNRGEC

SEQ ID NO: 16851 - protein, 107 aa, Artificial Sequence; identical to SEQ ID NO: 11035
  Description of Artificial Sequence: Synthetic polypeptide
  VL of XENP019607

SEQ ID NO: 16852 - protein, 11 aa, Artificial Sequence
  Description of Artificial Sequence: Synthetic peptide
  XENP019607 vlCDR1
RASQSVGNDVA

SEQ ID NO: 16853 - protein, 7 aa, Artificial Sequence
  Description of Artificial Sequence: Synthetic peptide
  XENP019607 vlCDR2
YASHRYT

SEQ ID NO: 16854 - protein, 9 aa, Artificial Sequence
  Description of Artificial Sequence: Synthetic peptide
  XENP019607 vlCDR3
QQDFSSPRT

SEQ ID NO: 16855 - protein, 451 aa, Artificial Sequence; identical to SEQ ID NO: 16675
  Description of Artificial Sequence: Synthetic polypeptide
  XENP019608 1G6_H1.278_L1.199_IgG1_PVA_/S267K Heavy Chain

SEQ ID NO: 16856 - protein, 122 aa, Artificial Sequence; identical to SEQ ID NO: 10845
  Description of Artificial Sequence: Synthetic polypeptide
  VH of XENP019608

SEQ ID NO: 16857 - protein, 5 aa, Artificial Sequence
  Description of Artificial Sequence: Synthetic peptide
  XENP019608 vhCDR1
NYWMN

SEQ ID NO: 16858 - protein, 19 aa, Artificial Sequence
  Description of Artificial Sequence: Synthetic peptide
  XENP019608 vhCDR2
EIRLYSNNYATHYAESVKG

SEQ ID NO: 16859 - protein, 11 aa, Artificial Sequence
  Description of Artificial Sequence: Synthetic peptide
  XENP019608 vhCDR3
YYGNYGGYFDV

SEQ ID NO: 16860 - protein, 214 aa, Artificial Sequence
  Description of Artificial Sequence: Synthetic polypeptide
  XENP019608 1G6_H1.278_L1.199_IgG1_PVA_/S267K Light Chain
EIVLTQSPDTLSVSPGERVTLTCRASQSVGNDVAWYQQKPGQAPRLLINYASHRYTGVPDRFTGSGYGTEFTLTISSVQSEDFAVYYCQQDFSSPRTFGGGTKVEIKRTVAAPSVFIFPPSDEQLKSGTASVVCLLNNFYPREAKVQWKVDNALQSGNSQESVTEQDSKDSTYSLSSTLTLSKADYEKHKVYACEVTHQGLSSPVTKSFNRGEC

SEQ ID NO: 16861 - protein, 107 aa, Artificial Sequence; identical to SEQ ID NO: 11044
  Description of Artificial Sequence: Synthetic polypeptide
  VL of XENP019608

SEQ ID NO: 16862 - protein, 11 aa, Artificial Sequence
  Description of Artificial Sequence: Synthetic peptide
  XENP019608 vlCDR1
RASQSVGNDVA

SEQ ID NO: 16863 - protein, 7 aa, Artificial Sequence
  Description of Artificial Sequence: Synthetic peptide
  XENP019608 vlCDR2
YASHRYT

SEQ ID NO: 16864 - protein, 9 aa, Artificial Sequence
  Description of Artificial Sequence: Synthetic peptide
  XENP019608 vlCDR3
QQDFSSPRT

SEQ ID NO: 16865 - protein, 451 aa, Artificial Sequence; identical to SEQ ID NO: 16675
  Description of Artificial Sequence: Synthetic polypeptide
  XENP019609 1G6_H1.278_L1.200_IgG1_PVA_/S267K Heavy Chain

SEQ ID NO: 16866 - protein, 122 aa, Artificial Sequence; identical to SEQ ID NO: 10845
  Description of Artificial Sequence: Synthetic polypeptide
  VH of XENP019609

SEQ ID NO: 16867 - protein, 5 aa, Artificial Sequence
  Description of Artificial Sequence: Synthetic peptide
  XENP019609 vhCDR1
NYWMN

SEQ ID NO: 16868 - protein, 19 aa, Artificial Sequence
  Description of Artificial Sequence: Synthetic peptide
  XENP019609 vhCDR2
EIRLYSNNYATHYAESVKG

SEQ ID NO: 16869 - protein, 11 aa, Artificial Sequence
  Description of Artificial Sequence: Synthetic peptide
  XENP019609 vhCDR3
YYGNYGGYFDV

SEQ ID NO: 16870 - protein, 214 aa, Artificial Sequence
  Description of Artificial Sequence: Synthetic polypeptide
  XENP019609 1G6_H1.278_L1.200_IgG1_PVA_/S267K Light Chain
EIVLTQSPATLAVSPGERVTLTCRASQSVGNDVAWYQQKPGQAPRLLINYASHRYTGVPDRFTGSGYGTEFTLTISSVQSEDFAVYYCQQDFSSPRTFGGGTKVEIKRTVAAPSVFIFPPSDEQLKSGTASVVCLLNNFYPREAKVQWKVDNALQSGNSQESVTEQDSKDSTYSLSSTLTLSKADYEKHKVYACEVTHQGLSSPVTKSFNRGEC

SEQ ID NO: 16871 - protein, 107 aa, Artificial Sequence; identical to SEQ ID NO: 11053
  Description of Artificial Sequence: Synthetic polypeptide
  VL of XENP019609

SEQ ID NO: 16872 - protein, 11 aa, Artificial Sequence
  Description of Artificial Sequence: Synthetic peptide
  XENP019609 vlCDR1
RASQSVGNDVA

SEQ ID NO: 16873 - protein, 7 aa, Artificial Sequence
  Description of Artificial Sequence: Synthetic peptide
  XENP019609 vlCDR2
YASHRYT

SEQ ID NO: 16874 - protein, 9 aa, Artificial Sequence
  Description of Artificial Sequence: Synthetic peptide
  XENP019609 vlCDR3
QQDFSSPRT

SEQ ID NO: 16875 - protein, 451 aa, Artificial Sequence; identical to SEQ ID NO: 16675
  Description of Artificial Sequence: Synthetic polypeptide
  XENP019610 1G6_H1.278_L1.201_IgG1_PVA_/S267K Heavy Chain

SEQ ID NO: 16876 - protein, 122 aa, Artificial Sequence; identical to SEQ ID NO: 10845
  Description of Artificial Sequence: Synthetic polypeptide
  VH of XENP019610

SEQ ID NO: 16877 - protein, 5 aa, Artificial Sequence
  Description of Artificial Sequence: Synthetic peptide
  XENP019610 vhCDR1
NYWMN

SEQ ID NO: 16878 - protein, 19 aa, Artificial Sequence
  Description of Artificial Sequence: Synthetic peptide
  XENP019610 vhCDR2
EIRLYSNNYATHYAESVKG

SEQ ID NO: 16879 - protein, 11 aa, Artificial Sequence
  Description of Artificial Sequence: Synthetic peptide
  XENP019610 vhCDR3
YYGNYGGYFDV

SEQ ID NO: 16880 - protein, 214 aa, Artificial Sequence; identical to SEQ ID NO: 16790
  Description of Artificial Sequence: Synthetic polypeptide
  XENP019610 1G6_H1.278_L1.201_IgG1_PVA_/S267K Light Chain

SEQ ID NO: 16881 - protein, 107 aa, Artificial Sequence; identical to SEQ ID NO: 10981
  Description of Artificial Sequence: Synthetic polypeptide
  VL of XENP019610

SEQ ID NO: 16882 - protein, 11 aa, Artificial Sequence
  Description of Artificial Sequence: Synthetic peptide
  XENP019610 vlCDR1
RASQSVGNDVA

SEQ ID NO: 16883 - protein, 7 aa, Artificial Sequence
  Description of Artificial Sequence: Synthetic peptide
  XENP019610 vlCDR2
YASHRYT

SEQ ID NO: 16884 - protein, 9 aa, Artificial Sequence
  Description of Artificial Sequence: Synthetic peptide
  XENP019610 vlCDR3
QQDFSSPRT

SEQ ID NO: 16885 - protein, 451 aa, Artificial Sequence; identical to SEQ ID NO: 16675
  Description of Artificial Sequence: Synthetic polypeptide
  XENP019611 1G6_H1.278_L1.202_IgG1_PVA_/S267K Heavy Chain

SEQ ID NO: 16886 - protein, 122 aa, Artificial Sequence; identical to SEQ ID NO: 10845
  Description of Artificial Sequence: Synthetic polypeptide
  VH of XENP019611

SEQ ID NO: 16887 - protein, 5 aa, Artificial Sequence
  Description of Artificial Sequence: Synthetic peptide
  XENP019611 vhCDR1
NYWMN

SEQ ID NO: 16888 - protein, 19 aa, Artificial Sequence
  Description of Artificial Sequence: Synthetic peptide
  XENP019611 vhCDR2
EIRLYSNNYATHYAESVKG

SEQ ID NO: 16889 - protein, 11 aa, Artificial Sequence
  Description of Artificial Sequence: Synthetic peptide
  XENP019611 vhCDR3
YYGNYGGYFDV

SEQ ID NO: 16890 - protein, 214 aa, Artificial Sequence
  Description of Artificial Sequence: Synthetic polypeptide
  XENP019611 1G6_H1.278_L1.202_IgG1_PVA_/S267K Light Chain
EIVLTQSPATLSVSVGERVTLTCRASQSVGNDVAWYQQKPGQAPRLLINYASHRYTGVPDRFTGSGYGTEFTLTISSVQSEDFAVYYCQQDFSSPRTFGGGTKVEIKRTVAAPSVFIFPPSDEQLKSGTASVVCLLNNFYPREAKVQWKVDNALQSGNSQESVTEQDSKDSTYSLSSTLTLSKADYEKHKVYACEVTHQGLSSPVTKSFNRGEC

SEQ ID NO: 16891 - protein, 107 aa, Artificial Sequence; identical to SEQ ID NO: 11071
  Description of Artificial Sequence: Synthetic polypeptide
  VL of XENP019611

SEQ ID NO: 16892 - protein, 11 aa, Artificial Sequence
  Description of Artificial Sequence: Synthetic peptide
  XENP019611 vlCDR1
RASQSVGNDVA

SEQ ID NO: 16893 - protein, 7 aa, Artificial Sequence
  Description of Artificial Sequence: Synthetic peptide
  XENP019611 vlCDR2
YASHRYT

SEQ ID NO: 16894 - protein, 9 aa, Artificial Sequence
  Description of Artificial Sequence: Synthetic peptide
  XENP019611 vlCDR3
QQDFSSPRT

SEQ ID NO: 16895 - protein, 451 aa, Artificial Sequence; identical to SEQ ID NO: 16675
  Description of Artificial Sequence: Synthetic polypeptide
  XENP019612 1G6_H1.278_L1.203_IgG1_PVA_/S267K Heavy Chain

SEQ ID NO: 16896 - protein, 122 aa, Artificial Sequence; identical to SEQ ID NO: 10845
  Description of Artificial Sequence: Synthetic polypeptide
  VH of XENP019612

SEQ ID NO: 16897 - protein, 5 aa, Artificial Sequence
  Description of Artificial Sequence: Synthetic peptide
  XENP019612 vhCDR1
NYWMN

SEQ ID NO: 16898 - protein, 19 aa, Artificial Sequence
  Description of Artificial Sequence: Synthetic peptide
  XENP019612 vhCDR2
EIRLYSNNYATHYAESVKG

SEQ ID NO: 16899 - protein, 11 aa, Artificial Sequence
  Description of Artificial Sequence: Synthetic peptide
  XENP019612 vhCDR3
YYGNYGGYFDV

SEQ ID NO: 16900 - protein, 214 aa, Artificial Sequence
  Description of Artificial Sequence: Synthetic polypeptide
  XENP019612 1G6_H1.278_L1.203_IgG1_PVA_/S267K Light Chain
EIVLTQSPATLSVSLGERVTLTCRASQSVGNDVAWYQQKPGQAPRLLINYASHRYTGVPDRFTGSGYGTEFTLTISSVQSEDFAVYYCQQDFSSPRTFGGGTKVEIKRTVAAPSVFIFPPSDEQLKSGTASVVCLLNNFYPREAKVQWKVDNALQSGNSQESVTEQDSKDSTYSLSSTLTLSKADYEKHKVYACEVTHQGLSSPVTKSFNRGEC

SEQ ID NO: 16901 - protein, 107 aa, Artificial Sequence; identical to SEQ ID NO: 11080
  Description of Artificial Sequence: Synthetic polypeptide
  VL of XENP019612

SEQ ID NO: 16902 - protein, 11 aa, Artificial Sequence
  Description of Artificial Sequence: Synthetic peptide
  XENP019612 vlCDR1
RASQSVGNDVA

SEQ ID NO: 16903 - protein, 7 aa, Artificial Sequence
  Description of Artificial Sequence: Synthetic peptide
  XENP019612 vlCDR2
YASHRYT

SEQ ID NO: 16904 - protein, 9 aa, Artificial Sequence
  Description of Artificial Sequence: Synthetic peptide
  XENP019612 vlCDR3
QQDFSSPRT

SEQ ID NO: 16905 - protein, 451 aa, Artificial Sequence; identical to SEQ ID NO: 16675
  Description of Artificial Sequence: Synthetic polypeptide
  XENP019613 1G6_H1.278_L1.204_IgG1_PVA_/S267K Heavy Chain

SEQ ID NO: 16906 - protein, 122 aa, Artificial Sequence; identical to SEQ ID NO: 10845
  Description of Artificial Sequence: Synthetic polypeptide
  VH of XENP019613

SEQ ID NO: 16907 - protein, 5 aa, Artificial Sequence
  Description of Artificial Sequence: Synthetic peptide
  XENP019613 vhCDR1
NYWMN

SEQ ID NO: 16908 - protein, 19 aa, Artificial Sequence
  Description of Artificial Sequence: Synthetic peptide
  XENP019613 vhCDR2
EIRLYSNNYATHYAESVKG

SEQ ID NO: 16909 - protein, 11 aa, Artificial Sequence
  Description of Artificial Sequence: Synthetic peptide
  XENP019613 vhCDR3
YYGNYGGYFDV

SEQ ID NO: 16910 - protein, 214 aa, Artificial Sequence
  Description of Artificial Sequence: Synthetic polypeptide
  XENP019613 1G6_H1.278_L1.204_IgG1_PVA_/S267K Light Chain
EIVLTQSPATLSVSPGERVTLNCRASQSVGNDVAWYQQKPGQAPRLLINYASHRYTGVPDRFTGSGYGTEFTLTISSVQSEDFAVYYCQQDFSSPRTFGGGTKVEIKRTVAAPSVFIFPPSDEQLKSGTASVVCLLNNFYPREAKVQWKVDNALQSGNSQESVTEQDSKDSTYSLSSTLTLSKADYEKHKVYACEVTHQGLSSPVTKSFNRGEC

SEQ ID NO: 16911 - protein, 107 aa, Artificial Sequence; identical to SEQ ID NO: 11089
  Description of Artificial Sequence: Synthetic polypeptide
  VL of XENP019613

SEQ ID NO: 16912 - protein, 11 aa, Artificial Sequence
  Description of Artificial Sequence: Synthetic peptide
  XENP019613 vlCDR1
RASQSVGNDVA

SEQ ID NO: 16913 - protein, 7 aa, Artificial Sequence
  Description of Artificial Sequence: Synthetic peptide
  XENP019613 vlCDR2
YASHRYT

SEQ ID NO: 16914 - protein, 9 aa, Artificial Sequence
  Description of Artificial Sequence: Synthetic peptide
  XENP019613 vlCDR3
QQDFSSPRT

SEQ ID NO: 16915 - protein, 451 aa, Artificial Sequence; identical to SEQ ID NO: 16675
  Description of Artificial Sequence: Synthetic polypeptide
  XENP019614 1G6_H1.278_L1.205_IgG1_PVA_/S267K Heavy Chain

SEQ ID NO: 16916 - protein, 122 aa, Artificial Sequence; identical to SEQ ID NO: 10845
  Description of Artificial Sequence: Synthetic polypeptide
  VH of XENP019614

SEQ ID NO: 16917 - protein, 5 aa, Artificial Sequence
  Description of Artificial Sequence: Synthetic peptide
  XENP019614 vhCDR1
NYWMN

SEQ ID NO: 16918 - protein, 19 aa, Artificial Sequence
  Description of Artificial Sequence: Synthetic peptide
  XENP019614 vhCDR2
EIRLYSNNYATHYAESVKG

SEQ ID NO: 16919 - protein, 11 aa, Artificial Sequence
  Description of Artificial Sequence: Synthetic peptide
  XENP019614 vhCDR3
YYGNYGGYFDV

SEQ ID NO: 16920 - protein, 214 aa, Artificial Sequence
  Description of Artificial Sequence: Synthetic polypeptide
  XENP019614 1G6_H1.278_L1.205_IgG1_PVA_/S267K Light Chain
EIVLTQSPATLSVSPGERVTLTCRASQSVGNDVAWYQQKPGKAPRLLINYASHRYTGVPDRFTGSGYGTEFTLTISSVQSEDFAVYYCQQDFSSPRTFGGGTKVEIKRTVAAPSVFIFPPSDEQLKSGTASVVCLLNNFYPREAKVQWKVDNALQSGNSQESVTEQDSKDSTYSLSSTLTLSKADYEKHKVYACEVTHQGLSSPVTKSFNRGEC

SEQ ID NO: 16921 - protein, 107 aa, Artificial Sequence; identical to SEQ ID NO: 11098
  Description of Artificial Sequence: Synthetic polypeptide
  VL of XENP019614

SEQ ID NO: 16922 - protein, 11 aa, Artificial Sequence
  Description of Artificial Sequence: Synthetic peptide
  XENP019614 vlCDR1
RASQSVGNDVA

SEQ ID NO: 16923 - protein, 7 aa, Artificial Sequence
  Description of Artificial Sequence: Synthetic peptide
  XENP019614 vlCDR2
YASHRYT

SEQ ID NO: 16924 - protein, 9 aa, Artificial Sequence
  Description of Artificial Sequence: Synthetic peptide
  XENP019614 vlCDR3
QQDFSSPRT

SEQ ID NO: 16925 - protein, 451 aa, Artificial Sequence; identical to SEQ ID NO: 16675
  Description of Artificial Sequence: Synthetic polypeptide
  XENP019615 1G6_H1.278_L1.206_IgG1_PVA_/S267K Heavy Chain

SEQ ID NO: 16926 - protein, 122 aa, Artificial Sequence; identical to SEQ ID NO: 10845
  Description of Artificial Sequence: Synthetic polypeptide
  VH of XENP019615

SEQ ID NO: 16927 - protein, 5 aa, Artificial Sequence
  Description of Artificial Sequence: Synthetic peptide
  XENP019615 vhCDR1
NYWMN

SEQ ID NO: 16928 - protein, 19 aa, Artificial Sequence
  Description of Artificial Sequence: Synthetic peptide
  XENP019615 vhCDR2
EIRLYSNNYATHYAESVKG

SEQ ID NO: 16929 - protein, 11 aa, Artificial Sequence
  Description of Artificial Sequence: Synthetic peptide
  XENP019615 vhCDR3
YYGNYGGYFDV

SEQ ID NO: 16930 - protein, 214 aa, Artificial Sequence
  Description of Artificial Sequence: Synthetic polypeptide
  XENP019615 1G6_H1.278_L1.206_IgG1_PVA_/S267K Light Chain
EIVLTQSPATLSVSPGERVTLTCRASQSVGNDVAWYQQKPGQAPRLLINYASHRYTGVPDRFTGSGYGTEFTLTISSVQPEDFAVYYCQQDFSSPRTFGGGTKVEIKRTVAAPSVFIFPPSDEQLKSGTASVVCLLNNFYPREAKVQWKVDNALQSGNSQESVTEQDSKDSTYSLSSTLTLSKADYEKHKVYACEVTHQGLSSPVTKSFNRGEC

SEQ ID NO: 16931 - protein, 107 aa, Artificial Sequence; identical to SEQ ID NO: 11107
  Description of Artificial Sequence: Synthetic polypeptide
  VL of XENP019615

SEQ ID NO: 16932 - protein, 11 aa, Artificial Sequence
  Description of Artificial Sequence: Synthetic peptide
  XENP019615 vlCDR1
RASQSVGNDVA

SEQ ID NO: 16933 - protein, 7 aa, Artificial Sequence
  Description of Artificial Sequence: Synthetic peptide
  XENP019615 vlCDR2
YASHRYT

SEQ ID NO: 16934 - protein, 9 aa, Artificial Sequence
  Description of Artificial Sequence: Synthetic peptide
  XENP019615 vlCDR3
QQDFSSPRT

SEQ ID NO: 16935 - protein, 451 aa, Artificial Sequence; identical to SEQ ID NO: 16675
  Description of Artificial Sequence: Synthetic polypeptide
  XENP019616 1G6_H1.278_L1.207_IgG1_PVA_/S267K Heavy Chain

SEQ ID NO: 16936 - protein, 122 aa, Artificial Sequence; identical to SEQ ID NO: 10845
  Description of Artificial Sequence: Synthetic polypeptide
  VH of XENP019616

SEQ ID NO: 16937 - protein, 5 aa, Artificial Sequence
  Description of Artificial Sequence: Synthetic peptide
  XENP019616 vhCDR1
NYWMN

SEQ ID NO: 16938 - protein, 19 aa, Artificial Sequence
  Description of Artificial Sequence: Synthetic peptide
  XENP019616 vhCDR2
EIRLYSNNYATHYAESVKG

SEQ ID NO: 16939 - protein, 11 aa, Artificial Sequence
  Description of Artificial Sequence: Synthetic peptide
  XENP019616 vhCDR3
YYGNYGGYFDV

SEQ ID NO: 16940 - protein, 214 aa, Artificial Sequence
  Description of Artificial Sequence: Synthetic polypeptide
  XENP019616 1G6_H1.278_L1.207_IgG1_PVA_/S267K Light Chain
EIVLTQSPATLSVSPGERVTLTCRASQSVGNDVAWYQQKPGQAPRLLINYASHRYTGVPDRFTGSGYGTEFTLTISSVQSEDVAVYYCQQDFSSPRTFGGGTKVEIKRTVAAPSVFIFPPSDEQLKSGTASVVCLLNNFYPREAKVQWKVDNALQSGNSQESVTEQDSKDSTYSLSSTLTLSKADYEKHKVYACEVTHQGLSSPVTKSFNRGEC

SEQ ID NO: 16941 - protein, 107 aa, Artificial Sequence; identical to SEQ ID NO: 11116
  Description of Artificial Sequence: Synthetic polypeptide
  VL of XENP019616

SEQ ID NO: 16942 - protein, 11 aa, Artificial Sequence
  Description of Artificial Sequence: Synthetic peptide
  XENP019616 vlCDR1
RASQSVGNDVA

SEQ ID NO: 16943 - protein, 7 aa, Artificial Sequence
  Description of Artificial Sequence: Synthetic peptide
  XENP019616 vlCDR2
YASHRYT

SEQ ID NO: 16944 - protein, 9 aa, Artificial Sequence
  Description of Artificial Sequence: Synthetic peptide
  XENP019616 vlCDR3
QQDFSSPRT

SEQ ID NO: 16945 - protein, 451 aa, Artificial Sequence; identical to SEQ ID NO: 16675
  Description of Artificial Sequence: Synthetic polypeptide
  XENP019617 1G6_H1.278_L1.208_IgG1_PVA_/S267K Heavy Chain

SEQ ID NO: 16946 - protein, 122 aa, Artificial Sequence; identical to SEQ ID NO: 10845
  Description of Artificial Sequence: Synthetic polypeptide
  VH of XENP019617

SEQ ID NO: 16947 - protein, 5 aa, Artificial Sequence
  Description of Artificial Sequence: Synthetic peptide
  XENP019617 vhCDR1
NYWMN

SEQ ID NO: 16948 - protein, 19 aa, Artificial Sequence
  Description of Artificial Sequence: Synthetic peptide
  XENP019617 vhCDR2
EIRLYSNNYATHYAESVKG

SEQ ID NO: 16949 - protein, 11 aa, Artificial Sequence
  Description of Artificial Sequence: Synthetic peptide
  XENP019617 vhCDR3
YYGNYGGYFDV

SEQ ID NO: 16950 - protein, 214 aa, Artificial Sequence
  Description of Artificial Sequence: Synthetic polypeptide
  XENP019617 1G6_H1.278_L1.208_IgG1_PVA_/S267K Light Chain
EIVLTQSPATLSVSPGERVTLTCRASQSVGNDVAWYQQKPGQAPRLLINYASHRYTGVPDRFTGSGYGTEFTLTISSVQSEDFATYYCQQDFSSPRTFGGGTKVEIKRTVAAPSVFIFPPSDEQLKSGTASVVCLLNNFYPREAKVQWKVDNALQSGNSQESVTEQDSKDSTYSLSSTLTLSKADYEKHKVYACEVTHQGLSSPVTKSFNRGEC

SEQ ID NO: 16951 - protein, 107 aa, Artificial Sequence; identical to SEQ ID NO: 11125
  Description of Artificial Sequence: Synthetic polypeptide
  VL of XENP019617

SEQ ID NO: 16952 - protein, 11 aa, Artificial Sequence
  Description of Artificial Sequence: Synthetic peptide
  XENP019617 vlCDR1
RASQSVGNDVA

SEQ ID NO: 16953 - protein, 7 aa, Artificial Sequence
  Description of Artificial Sequence: Synthetic peptide
  XENP019617 vlCDR2
YASHRYT

SEQ ID NO: 16954 - protein, 9 aa, Artificial Sequence
  Description of Artificial Sequence: Synthetic peptide
  XENP019617 vlCDR3
QQDFSSPRT

SEQ ID NO: 16955 - protein, 451 aa, Artificial Sequence; identical to SEQ ID NO: 16705
  Description of Artificial Sequence: Synthetic polypeptide
  XENP019678 1G6_H1.279_L1.192_IgG1_PVA_/S267K Heavy Chain

SEQ ID NO: 16956 - protein, 122 aa, Artificial Sequence; identical to SEQ ID NO: 10908
  Description of Artificial Sequence: Synthetic polypeptide
  VH of XENP019678

SEQ ID NO: 16957 - protein, 5 aa, Artificial Sequence
  Description of Artificial Sequence: Synthetic peptide
  XENP019678 vhCDR1
NYWMN

SEQ ID NO: 16958 - protein, 19 aa, Artificial Sequence
  Description of Artificial Sequence: Synthetic peptide
  XENP019678 vhCDR2
EIRLYSNNYATHYAESVKG

SEQ ID NO: 16959 - protein, 11 aa, Artificial Sequence
  Description of Artificial Sequence: Synthetic peptide
  XENP019678 vhCDR3
YYGNYGGYFDV

SEQ ID NO: 16960 - protein, 214 aa, Artificial Sequence; identical to SEQ ID NO: 16790
  Description of Artificial Sequence: Synthetic polypeptide
  XENP019678 1G6_H1.279_L1.192_IgG1_PVA_/S267K Light Chain

SEQ ID NO: 16961 - protein, 107 aa, Artificial Sequence; identical to SEQ ID NO: 10981
  Description of Artificial Sequence: Synthetic polypeptide
  VL of XENP019678

SEQ ID NO: 16962 - protein, 11 aa, Artificial Sequence
  Description of Artificial Sequence: Synthetic peptide
  XENP019678 vlCDR1
RASQSVGNDVA

SEQ ID NO: 16963 - protein, 7 aa, Artificial Sequence
  Description of Artificial Sequence: Synthetic peptide
  XENP019678 vlCDR2
YASHRYT

SEQ ID NO: 16964 - protein, 9 aa, Artificial Sequence
  Description of Artificial Sequence: Synthetic peptide
  XENP019678 vlCDR3
QQDFSSPRT

SEQ ID NO: 16965 - protein, 451 aa, Artificial Sequence; identical to SEQ ID NO: 16715
  Description of Artificial Sequence: Synthetic polypeptide
  XENP019679 1G6_H1.280_L1.192_IgG1_PVA_/S267K Heavy Chain

SEQ ID NO: 16966 - protein, 122 aa, Artificial Sequence; identical to SEQ ID NO: 10917
  Description of Artificial Sequence: Synthetic polypeptide
  VH of XENP019679

SEQ ID NO: 16967 - protein, 5 aa, Artificial Sequence
  Description of Artificial Sequence: Synthetic peptide
  XENP019679 vhCDR1
NYWMN

SEQ ID NO: 16968 - protein, 19 aa, Artificial Sequence
  Description of Artificial Sequence: Synthetic peptide
  XENP019679 vhCDR2
EIRLYSNNYATHYAESVKG

SEQ ID NO: 16969 - protein, 11 aa, Artificial Sequence
  Description of Artificial Sequence: Synthetic peptide
  XENP019679 vhCDR3
YYGNYGGYFDV

SEQ ID NO: 16970 - protein, 214 aa, Artificial Sequence; identical to SEQ ID NO: 16790
  Description of Artificial Sequence: Synthetic polypeptide
  XENP019679 1G6_H1.280_L1.192_IgG1_PVA_/S267K Light Chain

SEQ ID NO: 16971 - protein, 107 aa, Artificial Sequence; identical to SEQ ID NO: 10981
  Description of Artificial Sequence: Synthetic polypeptide
  VL of XENP019679

SEQ ID NO: 16972 - protein, 11 aa, Artificial Sequence
  Description of Artificial Sequence: Synthetic peptide
  XENP019679 vlCDR1
RASQSVGNDVA

SEQ ID NO: 16973 - protein, 7 aa, Artificial Sequence
  Description of Artificial Sequence: Synthetic peptide
  XENP019679 vlCDR2
YASHRYT

SEQ ID NO: 16974 - protein, 9 aa, Artificial Sequence
  Description of Artificial Sequence: Synthetic peptide
  XENP019679 vlCDR3
QQDFSSPRT

SEQ ID NO: 16975 - protein, 451 aa, Artificial Sequence; identical to SEQ ID NO: 16725
  Description of Artificial Sequence: Synthetic polypeptide
  XENP019680 1G6_H1.281_L1.192_IgG1_PVA_/S267K Heavy Chain

SEQ ID NO: 16976 - protein, 122 aa, Artificial Sequence; identical to SEQ ID NO: 10926
  Description of Artificial Sequence: Synthetic polypeptide
  VH of XENP019680

SEQ ID NO: 16977 - protein, 5 aa, Artificial Sequence
  Description of Artificial Sequence: Synthetic peptide
  XENP019680 vhCDR1
NYWMN

SEQ ID NO: 16978 - protein, 19 aa, Artificial Sequence
  Description of Artificial Sequence: Synthetic peptide
  XENP019680 vhCDR2
EIRLYSNNYATHYAESVKG

SEQ ID NO: 16979 - protein, 11 aa, Artificial Sequence
  Description of Artificial Sequence: Synthetic peptide
  XENP019680 vhCDR3
YYGNYGGYFDV

SEQ ID NO: 16980 - protein, 214 aa, Artificial Sequence; identical to SEQ ID NO: 16790
  Description of Artificial Sequence: Synthetic polypeptide
  XENP019680 1G6_H1.281_L1.192_IgG1_PVA_/S267K Light Chain

SEQ ID NO: 16981 - protein, 107 aa, Artificial Sequence; identical to SEQ ID NO: 10981
  Description of Artificial Sequence: Synthetic polypeptide
  VL of XENP019680

SEQ ID NO: 16982 - protein, 11 aa, Artificial Sequence
  Description of Artificial Sequence: Synthetic peptide
  XENP019680 vlCDR1
RASQSVGNDVA

SEQ ID NO: 16983 - protein, 7 aa, Artificial Sequence
  Description of Artificial Sequence: Synthetic peptide
  XENP019680 vlCDR2
YASHRYT

SEQ ID NO: 16984 - protein, 9 aa, Artificial Sequence
  Description of Artificial Sequence: Synthetic peptide
  XENP019680 vlCDR3
QQDFSSPRT

SEQ ID NO: 16985 - protein, 451 aa, Artificial Sequence; identical to SEQ ID NO: 16735
  Description of Artificial Sequence: Synthetic polypeptide
  XENP019681 1G6_H1.282_L1.192_IgG1_PVA_/S267K Heavy Chain

SEQ ID NO: 16986 - protein, 122 aa, Artificial Sequence; identical to SEQ ID NO: 10935
  Description of Artificial Sequence: Synthetic polypeptide
  VH of XENP019681

SEQ ID NO: 16987 - protein, 5 aa, Artificial Sequence
  Description of Artificial Sequence: Synthetic peptide
  XENP019681 vhCDR1
NYWMN

SEQ ID NO: 16988 - protein, 19 aa, Artificial Sequence
  Description of Artificial Sequence: Synthetic peptide
  XENP019681 vhCDR2
EIRLYSNNYATHYAESVKG

SEQ ID NO: 16989 - protein, 11 aa, Artificial Sequence
  Description of Artificial Sequence: Synthetic peptide
  XENP019681 vhCDR3
YYGNYGGYFDV

SEQ ID NO: 16990 - protein, 214 aa, Artificial Sequence; identical to SEQ ID NO: 16790
  Description of Artificial Sequence: Synthetic polypeptide
  XENP019681 1G6_H1.282_L1.192_IgG1_PVA_/S267K Light Chain

SEQ ID NO: 16991 - protein, 107 aa, Artificial Sequence; identical to SEQ ID NO: 10981
  Description of Artificial Sequence: Synthetic polypeptide
  VL of XENP019681

SEQ ID NO: 16992 - protein, 11 aa, Artificial Sequence
  Description of Artificial Sequence: Synthetic peptide
  XENP019681 vlCDR1
RASQSVGNDVA

SEQ ID NO: 16993 - protein, 7 aa, Artificial Sequence
  Description of Artificial Sequence: Synthetic peptide
  XENP019681 vlCDR2
YASHRYT

SEQ ID NO: 16994 - protein, 9 aa, Artificial Sequence
  Description of Artificial Sequence: Synthetic peptide
  XENP019681 vlCDR3
QQDFSSPRT

SEQ ID NO: 16995 - protein, 451 aa, Artificial Sequence; identical to SEQ ID NO: 16705
  Description of Artificial Sequence: Synthetic polypeptide
  XENP019682 1G6_H1.279_L1.193_IgG1_PVA_/S267K Heavy Chain

SEQ ID NO: 16996 - protein, 122 aa, Artificial Sequence; identical to SEQ ID NO: 10908
  Description of Artificial Sequence: Synthetic polypeptide
  VH of XENP019682

SEQ ID NO: 16997 - protein, 5 aa, Artificial Sequence
  Description of Artificial Sequence: Synthetic peptide
  XENP019682 vhCDR1
NYWMN

SEQ ID NO: 16998 - protein, 19 aa, Artificial Sequence
  Description of Artificial Sequence: Synthetic peptide
  XENP019682 vhCDR2
EIRLYSNNYATHYAESVKG

SEQ ID NO: 16999 - protein, 11 aa, Artificial Sequence
  Description of Artificial Sequence: Synthetic peptide
  XENP019682 vhCDR3
YYGNYGGYFDV

SEQ ID NO: 17000 - protein, 214 aa, Artificial Sequence; identical to SEQ ID NO: 16800
  Description of Artificial Sequence: Synthetic polypeptide
  XENP019682 1G6_H1.279_L1.193_IgG1_PVA_/S267K Light Chain

SEQ ID NO: 17001 - protein, 107 aa, Artificial Sequence; identical to SEQ ID NO: 10990
  Description of Artificial Sequence: Synthetic polypeptide
  VL of XENP019682

SEQ ID NO: 17002 - protein, 11 aa, Artificial Sequence
  Description of Artificial Sequence: Synthetic peptide
  XENP019682 vlCDR1
RASQSVGNDVA

SEQ ID NO: 17003 - protein, 7 aa, Artificial Sequence
  Description of Artificial Sequence: Synthetic peptide
  XENP019682 vlCDR2
YASHRYT

SEQ ID NO: 17004 - protein, 9 aa, Artificial Sequence
  Description of Artificial Sequence: Synthetic peptide
  XENP019682 vlCDR3
QQDFSSPRT

SEQ ID NO: 17005 - protein, 451 aa, Artificial Sequence; identical to SEQ ID NO: 16715
  Description of Artificial Sequence: Synthetic polypeptide
  XENP019683 1G6_H1.280_L1.193_IgG1_PVA_/S267K Heavy Chain

SEQ ID NO: 17006 - protein, 122 aa, Artificial Sequence; identical to SEQ ID NO: 10917
  Description of Artificial Sequence: Synthetic polypeptide
  VH of XENP019683

SEQ ID NO: 17007 - protein, 5 aa, Artificial Sequence
  Description of Artificial Sequence: Synthetic peptide
  XENP019683 vhCDR1
NYWMN

SEQ ID NO: 17008 - protein, 19 aa, Artificial Sequence
  Description of Artificial Sequence: Synthetic peptide
  XENP019683 vhCDR2
EIRLYSNNYATHYAESVKG

SEQ ID NO: 17009 - protein, 11 aa, Artificial Sequence
  Description of Artificial Sequence: Synthetic peptide
  XENP019683 vhCDR3
YYGNYGGYFDV

SEQ ID NO: 17010 - protein, 214 aa, Artificial Sequence; identical to SEQ ID NO: 16800
  Description of Artificial Sequence: Synthetic polypeptide
  XENP019683 1G6_H1.280_L1.193_IgG1_PVA_/S267K Light Chain

SEQ ID NO: 17011 - protein, 107 aa, Artificial Sequence; identical to SEQ ID NO: 10990
  Description of Artificial Sequence: Synthetic polypeptide
  VL of XENP019683

SEQ ID NO: 17012 - protein, 11 aa, Artificial Sequence
  Description of Artificial Sequence: Synthetic peptide
  XENP019683 vlCDR1
RASQSVGNDVA

SEQ ID NO: 17013 - protein, 7 aa, Artificial Sequence
  Description of Artificial Sequence: Synthetic peptide
  XENP019683 vlCDR2
YASHRYT

SEQ ID NO: 17014 - protein, 9 aa, Artificial Sequence
  Description of Artificial Sequence: Synthetic peptide
  XENP019683 vlCDR3
QQDFSSPRT

SEQ ID NO: 17015 - protein, 451 aa, Artificial Sequence; identical to SEQ ID NO: 16725
  Description of Artificial Sequence: Synthetic polypeptide
  XENP019684 1G6_H1.281_L1.193_IgG1_PVA_/S267K Heavy Chain

SEQ ID NO: 17016 - protein, 122 aa, Artificial Sequence; identical to SEQ ID NO: 10926
  Description of Artificial Sequence: Synthetic polypeptide
  VH of XENP019684

SEQ ID NO: 17017 - protein, 5 aa, Artificial Sequence
  Description of Artificial Sequence: Synthetic peptide
  XENP019684 vhCDR1
NYWMN

SEQ ID NO: 17018 - protein, 19 aa, Artificial Sequence
  Description of Artificial Sequence: Synthetic peptide
  XENP019684 vhCDR2
EIRLYSNNYATHYAESVKG

SEQ ID NO: 17019 - protein, 11 aa, Artificial Sequence
  Description of Artificial Sequence: Synthetic peptide
  XENP019684 vhCDR3
YYGNYGGYFDV

SEQ ID NO: 17020 - protein, 214 aa, Artificial Sequence; identical to SEQ ID NO: 16800
  Description of Artificial Sequence: Synthetic polypeptide
  XENP019684 1G6_H1.281_L1.193_IgG1_PVA_/S267K Light Chain

SEQ ID NO: 17021 - protein, 107 aa, Artificial Sequence; identical to SEQ ID NO: 10990
  Description of Artificial Sequence: Synthetic polypeptide
  VL of XENP019684

SEQ ID NO: 17022 - protein, 11 aa, Artificial Sequence
  Description of Artificial Sequence: Synthetic peptide
  XENP019684 vlCDR1
RASQSVGNDVA

SEQ ID NO: 17023 - protein, 7 aa, Artificial Sequence
  Description of Artificial Sequence: Synthetic peptide
  XENP019684 vlCDR2
YASHRYT

SEQ ID NO: 17024 - protein, 9 aa, Artificial Sequence
  Description of Artificial Sequence: Synthetic peptide
  XENP019684 vlCDR3
QQDFSSPRT

SEQ ID NO: 17025 - protein, 451 aa, Artificial Sequence; identical to SEQ ID NO: 16735
  Description of Artificial Sequence: Synthetic polypeptide
  XENP019685 1G6_H1.282_L1.193_IgG1_PVA_/S267K Heavy Chain

SEQ ID NO: 17026 - protein, 122 aa, Artificial Sequence; identical to SEQ ID NO: 10935
  Description of Artificial Sequence: Synthetic polypeptide
  VH of XENP019685

SEQ ID NO: 17027 - protein, 5 aa, Artificial Sequence
  Description of Artificial Sequence: Synthetic peptide
  XENP019685 vhCDR1
NYWMN

SEQ ID NO: 17028 - protein, 19 aa, Artificial Sequence
  Description of Artificial Sequence: Synthetic peptide
  XENP019685 vhCDR2
EIRLYSNNYATHYAESVKG

SEQ ID NO: 17029 - protein, 11 aa, Artificial Sequence
  Description of Artificial Sequence: Synthetic peptide
  XENP019685 vhCDR3
YYGNYGGYFDV

SEQ ID NO: 17030 - protein, 214 aa, Artificial Sequence; identical to SEQ ID NO: 16800
  Description of Artificial Sequence: Synthetic polypeptide
  XENP019685 1G6_H1.282_L1.193_IgG1_PVA_/S267K Light Chain

SEQ ID NO: 17031 - protein, 107 aa, Artificial Sequence; identical to SEQ ID NO: 10990
  Description of Artificial Sequence: Synthetic polypeptide
  VL of XENP019685

SEQ ID NO: 17032 - protein, 11 aa, Artificial Sequence
  Description of Artificial Sequence: Synthetic peptide
  XENP019685 vlCDR1
RASQSVGNDVA

SEQ ID NO: 17033 - protein, 7 aa, Artificial Sequence
  Description of Artificial Sequence: Synthetic peptide
  XENP019685 vlCDR2
YASHRYT

SEQ ID NO: 17034 - protein, 9 aa, Artificial Sequence
  Description of Artificial Sequence: Synthetic peptide
  XENP019685 vlCDR3
QQDFSSPRT

SEQ ID NO: 17035 - protein, 451 aa, Artificial Sequence; identical to SEQ ID NO: 16705
  Description of Artificial Sequence: Synthetic polypeptide
  XENP019686 1G6_H1.279_L1.194_IgG1_PVA_/S267K Heavy Chain

SEQ ID NO: 17036 - protein, 122 aa, Artificial Sequence; identical to SEQ ID NO: 10908
  Description of Artificial Sequence: Synthetic polypeptide
  VH of XENP019686

SEQ ID NO: 17037 - protein, 5 aa, Artificial Sequence
  Description of Artificial Sequence: Synthetic peptide
  XENP019686 vhCDR1
NYWMN

SEQ ID NO: 17038 - protein, 19 aa, Artificial Sequence
  Description of Artificial Sequence: Synthetic peptide
  XENP019686 vhCDR2
EIRLYSNNYATHYAESVKG

SEQ ID NO: 17039 - protein, 11 aa, Artificial Sequence
  Description of Artificial Sequence: Synthetic peptide
  XENP019686 vhCDR3
YYGNYGGYFDV

SEQ ID NO: 17040 - protein, 214 aa, Artificial Sequence; identical to SEQ ID NO: 16810
  Description of Artificial Sequence: Synthetic polypeptide
  XENP019686 1G6_H1.279_L1.194_IgG1_PVA_/S267K Light Chain

SEQ ID NO: 17041 - protein, 107 aa, Artificial Sequence; identical to SEQ ID NO: 10999
  Description of Artificial Sequence: Synthetic polypeptide
  VL of XENP019686

SEQ ID NO: 17042 - protein, 11 aa, Artificial Sequence
  Description of Artificial Sequence: Synthetic peptide
  XENP019686 vlCDR1
RASQSVGNDVA

SEQ ID NO: 17043 - protein, 7 aa, Artificial Sequence
  Description of Artificial Sequence: Synthetic peptide
  XENP019686 vlCDR2
YASHRYT

SEQ ID NO: 17044 - protein, 9 aa, Artificial Sequence
  Description of Artificial Sequence: Synthetic peptide
  XENP019686 vlCDR3
QQDFSSPRT

SEQ ID NO: 17045 - protein, 451 aa, Artificial Sequence; identical to SEQ ID NO: 16715
  Description of Artificial Sequence: Synthetic polypeptide
  XENP019687 1G6_H1.280_L1.194_IgG1_PVA_/S267K Heavy Chain

SEQ ID NO: 17046 - protein, 122 aa, Artificial Sequence; identical to SEQ ID NO: 10917
  Description of Artificial Sequence: Synthetic polypeptide
  VH of XENP019687

SEQ ID NO: 17047 - protein, 5 aa, Artificial Sequence
  Description of Artificial Sequence: Synthetic peptide
  XENP019687 vhCDR1
NYWMN

SEQ ID NO: 17048 - protein, 19 aa, Artificial Sequence
  Description of Artificial Sequence: Synthetic peptide
  XENP019687 vhCDR2
EIRLYSNNYATHYAESVKG

SEQ ID NO: 17049 - protein, 11 aa, Artificial Sequence
  Description of Artificial Sequence: Synthetic peptide
  XENP019687 vhCDR3
YYGNYGGYFDV

SEQ ID NO: 17050 - protein, 214 aa, Artificial Sequence; identical to SEQ ID NO: 16810
  Description of Artificial Sequence: Synthetic polypeptide
  XENP019687 1G6_H1.280_L1.194_IgG1_PVA_/S267K Light Chain

SEQ ID NO: 17051 - protein, 107 aa, Artificial Sequence; identical to SEQ ID NO: 10999
  Description of Artificial Sequence: Synthetic polypeptide
  VL of XENP019687

SEQ ID NO: 17052 - protein, 11 aa, Artificial Sequence
  Description of Artificial Sequence: Synthetic peptide
  XENP019687 vlCDR1
RASQSVGNDVA

SEQ ID NO: 17053 - protein, 7 aa, Artificial Sequence
  Description of Artificial Sequence: Synthetic peptide
  XENP019687 vlCDR2
YASHRYT

SEQ ID NO: 17054 - protein, 9 aa, Artificial Sequence
  Description of Artificial Sequence: Synthetic peptide
  XENP019687 vlCDR3
QQDFSSPRT

SEQ ID NO: 17055 - protein, 451 aa, Artificial Sequence; identical to SEQ ID NO: 16725
  Description of Artificial Sequence: Synthetic polypeptide
  XENP019688 1G6_H1.281_L1.194_IgG1_PVA_/S267K Heavy Chain

SEQ ID NO: 17056 - protein, 122 aa, Artificial Sequence; identical to SEQ ID NO: 10926
  Description of Artificial Sequence: Synthetic polypeptide
  VH of XENP019688

SEQ ID NO: 17057 - protein, 5 aa, Artificial Sequence
  Description of Artificial Sequence: Synthetic peptide
  XENP019688 vhCDR1
NYWMN

SEQ ID NO: 17058 - protein, 19 aa, Artificial Sequence
  Description of Artificial Sequence: Synthetic peptide
  XENP019688 vhCDR2
EIRLYSNNYATHYAESVKG

SEQ ID NO: 17059 - protein, 11 aa, Artificial Sequence
  Description of Artificial Sequence: Synthetic peptide
  XENP019688 vhCDR3
YYGNYGGYFDV

SEQ ID NO: 17060 - protein, 214 aa, Artificial Sequence; identical to SEQ ID NO: 16810
  Description of Artificial Sequence: Synthetic polypeptide
  XENP019688 1G6_H1.281_L1.194_IgG1_PVA_/S267K Light Chain

SEQ ID NO: 17061 - protein, 107 aa, Artificial Sequence; identical to SEQ ID NO: 10999
  Description of Artificial Sequence: Synthetic polypeptide
  VL of XENP019688

SEQ ID NO: 17062 - protein, 11 aa, Artificial Sequence
  Description of Artificial Sequence: Synthetic peptide
  XENP019688 vlCDR1
RASQSVGNDVA

SEQ ID NO: 17063 - protein, 7 aa, Artificial Sequence
  Description of Artificial Sequence: Synthetic peptide
  XENP019688 vlCDR2
YASHRYT

SEQ ID NO: 17064 - protein, 9 aa, Artificial Sequence
  Description of Artificial Sequence: Synthetic peptide
  XENP019688 vlCDR3
QQDFSSPRT

SEQ ID NO: 17065 - protein, 451 aa, Artificial Sequence; identical to SEQ ID NO: 16735
  Description of Artificial Sequence: Synthetic polypeptide
  XENP019689 1G6_H1.282_L1.194_IgG1_PVA_/S267K Heavy Chain

SEQ ID NO: 17066 - protein, 122 aa, Artificial Sequence; identical to SEQ ID NO: 10935
  Description of Artificial Sequence: Synthetic polypeptide
  VH of XENP019689

SEQ ID NO: 17067 - protein, 5 aa, Artificial Sequence
  Description of Artificial Sequence: Synthetic peptide
  XENP019689 vhCDR1
NYWMN

SEQ ID NO: 17068 - protein, 19 aa, Artificial Sequence
  Description of Artificial Sequence: Synthetic peptide
  XENP019689 vhCDR2
EIRLYSNNYATHYAESVKG

SEQ ID NO: 17069 - protein, 11 aa, Artificial Sequence
  Description of Artificial Sequence: Synthetic peptide
  XENP019689 vhCDR3
YYGNYGGYFDV

SEQ ID NO: 17070 - protein, 214 aa, Artificial Sequence; identical to SEQ ID NO: 16810
  Description of Artificial Sequence: Synthetic polypeptide
  XENP019689 1G6_H1.282_L1.194_IgG1_PVA_/S267K Light Chain

SEQ ID NO: 17071 - protein, 107 aa, Artificial Sequence; identical to SEQ ID NO: 10999
  Description of Artificial Sequence: Synthetic polypeptide
  VL of XENP019689

SEQ ID NO: 17072 - protein, 11 aa, Artificial Sequence
  Description of Artificial Sequence: Synthetic peptide
  XENP019689 vlCDR1
RASQSVGNDVA

SEQ ID NO: 17073 - protein, 7 aa, Artificial Sequence
  Description of Artificial Sequence: Synthetic peptide
  XENP019689 vlCDR2
YASHRYT

SEQ ID NO: 17074 - protein, 9 aa, Artificial Sequence
  Description of Artificial Sequence: Synthetic peptide
  XENP019689 vlCDR3
QQDFSSPRT

SEQ ID NO: 17075 - protein, 449 aa, Artificial Sequence
  Description of Artificial Sequence: Synthetic polypeptide
  XENP020156 2E9_H1L1_IgG1_PVA_/S267K Heavy Chain
QVQLVQSGAEVKKPGASVKVSCKASGYAFTNYWLGWVRQAPGQGLEWMGNFYPGSSNTYYNEKFQGRVTMTADKSISTAYMELSRLRSDDTAVYFCARHYGTNYRYFDVWGAGTLVTVSSASTKGPSVFPLAPSSKSTSGGTAALGCLVKDYFPEPVTVSWNSGALTSGVHTFPAVLQSSGLYSLSSVVTVPSSSLGTQTYICNVNHKPSNTKVDKKVEPKSCDKTHTCPPCPAPPVAGPSVFLFPPKPKDTLMISRTPEVTCVVVDVKHEDPEVKFNWYVDGVEVHNAKTKPREEQYNSTYRVVSVLTVLHQDWLNGKEYKCKVSNKALPAPIEKTISKAKGQPREPQVYTLPPSREEMTKNQVSLTCLVKGFYPSDIAVEWESNGQPENNYKTTPPVLDSDGSFFLYSKLTVDKSRWQQGNVFSCSVMHEALHNHYTQKSLSLSPGK

SEQ ID NO: 17076 - protein, 120 aa, Artificial Sequence; identical to SEQ ID NO: 11412
  Description of Artificial Sequence: Synthetic polypeptide
  VH of XENP020156

SEQ ID NO: 17077 - protein, 5 aa, Artificial Sequence
  Description of Artificial Sequence: Synthetic peptide
  XENP020156 vhCDR1
NYWLG

SEQ ID NO: 17078 - protein, 17 aa, Artificial Sequence
  Description of Artificial Sequence: Synthetic peptide
  XENP020156 vhCDR2
NFYPGSSNTYYNEKFQG

SEQ ID NO: 17079 - protein, 11 aa, Artificial Sequence
  Description of Artificial Sequence: Synthetic peptide
  XENP020156 vhCDR3
HYGTNYRYFDV

SEQ ID NO: 17080 - protein, 214 aa, Artificial Sequence
  Description of Artificial Sequence: Synthetic polypeptide
  XENP020156 2E9_H1L1_IgG1_PVA_/S267K Light Chain
DIVLTQSPGTLSLSPGERATLSCRASQSVSNDVAWYQQKPGQSPRLLIYYASNRYTGVPDRFTGSGYGTDFTLTISRLEPEDFAVYFCQQDYSSPYTFGGGTKVEIKRTVAAPSVFIFPPSDEQLKSGTASVVCLLNNFYPREAKVQWKVDNALQSGNSQESVTEQDSKDSTYSLSSTLTLSKADYEKHKVYACEVTHQGLSSPVTKSFNRGEC

SEQ ID NO: 17081 - protein, 107 aa, Artificial Sequence; identical to SEQ ID NO: 11413
  Description of Artificial Sequence: Synthetic polypeptide
  VL of XENP020156

SEQ ID NO: 17082 - protein, 11 aa, Artificial Sequence
  Description of Artificial Sequence: Synthetic peptide
  XENP020156 vlCDR1
RASQSVSNDVA

SEQ ID NO: 17083 - protein, 7 aa, Artificial Sequence
  Description of Artificial Sequence: Synthetic peptide
  XENP020156 vlCDR2
YASNRYT

SEQ ID NO: 17084 - protein, 9 aa, Artificial Sequence
  Description of Artificial Sequence: Synthetic peptide
  XENP020156 vlCDR3
QQDYSSPYT

SEQ ID NO: 17085 - protein, 449 aa, Artificial Sequence
  Description of Artificial Sequence: Synthetic polypeptide
  XENP020157 2E9_H2L1_IgG1_PVA_/S267K Heavy Chain
EVQLVQSGAEVKKPGESLKISCKASGYAFTNYWLGWVRQMPGKGLEWMGNFYPGSSNTYYNPSFQGQVTISADKSISTAYLQWSSLKASDTAMYFCARHYGTNYRYFDVWGAGTLVTVSSASTKGPSVFPLAPSSKSTSGGTAALGCLVKDYFPEPVTVSWNSGALTSGVHTFPAVLQSSGLYSLSSVVTVPSSSLGTQTYICNVNHKPSNTKVDKKVEPKSCDKTHTCPPCPAPPVAGPSVFLFPPKPKDTLMISRTPEVTCVVVDVKHEDPEVKFNWYVDGVEVHNAKTKPREEQYNSTYRVVSVLTVLHQDWLNGKEYKCKVSNKALPAPIEKTISKAKGQPREPQVYTLPPSREEMTKNQVSLTCLVKGFYPSDIAVEWESNGQPENNYKTTPPVLDSDGSFFLYSKLTVDKSRWQQGNVFSCSVMHEALHNHYTQKSLSLSPGK

SEQ ID NO: 17086 - protein, 120 aa, Artificial Sequence; identical to SEQ ID NO: 11421
  Description of Artificial Sequence: Synthetic polypeptide
  VH of XENP020157

SEQ ID NO: 17087 - protein, 5 aa, Artificial Sequence
  Description of Artificial Sequence: Synthetic peptide
  XENP020157 vhCDR1
NYWLG

SEQ ID NO: 17088 - protein, 17 aa, Artificial Sequence
  Description of Artificial Sequence: Synthetic peptide
  XENP020157 vhCDR2
NFYPGSSNTYYNPSFQG

SEQ ID NO: 17089 - protein, 11 aa, Artificial Sequence
  Description of Artificial Sequence: Synthetic peptide
  XENP020157 vhCDR3
HYGTNYRYFDV

SEQ ID NO: 17090 - protein, 214 aa, Artificial Sequence; identical to SEQ ID NO: 17080
  Description of Artificial Sequence: Synthetic polypeptide
  XENP020157 2E9_H2L1_IgG1_PVA_/S267K Light Chain

SEQ ID NO: 17091 - protein, 107 aa, Artificial Sequence; identical to SEQ ID NO: 11413
  Description of Artificial Sequence: Synthetic polypeptide
  VL of XENP020157

SEQ ID NO: 17092 - protein, 11 aa, Artificial Sequence
  Description of Artificial Sequence: Synthetic peptide
  XENP020157 vlCDR1
RASQSVSNDVA

SEQ ID NO: 17093 - protein, 7 aa, Artificial Sequence
  Description of Artificial Sequence: Synthetic peptide
  XENP020157 vlCDR2
YASNRYT

SEQ ID NO: 17094 - protein, 9 aa, Artificial Sequence
  Description of Artificial Sequence: Synthetic peptide
  XENP020157 vlCDR3
QQDYSSPYT

SEQ ID NO: 17095 - protein, 444 aa, Artificial Sequence
  Description of Artificial Sequence: Synthetic polypeptide
  XENP020158 3C11(PD-1)_H1L1_IgG1_PVA_/S267K Heavy Chain
QVQLVQSGAEVKKPGASVKVSCKASGYTFTSYWMHWVRQAPGQGLEWMGAIYPGNIATSYNQKFQGRVTMTADTSTSTAYMELSSLRSEDTAVYYCTTSYVMDYWGQGTLVTVSSASTKGPSVFPLAPSSKSTSGGTAALGCLVKDYFPEPVTVSWNSGALTSGVHTFPAVLQSSGLYSLSSVVTVPSSSLGTQTYICNVNHKPSNTKVDKKVEPKSCDKTHTCPPCPAPPVAGPSVFLFPPKPKDTLMISRTPEVTCVVVDVKHEDPEVKFNWYVDGVEVHNAKTKPREEQYNSTYRVVSVLTVLHQDWLNGKEYKCKVSNKALPAPIEKTISKAKGQPREPQVYTLPPSREEMTKNQVSLTCLVKGFYPSDIAVEWESNGQPENNYKTTPPVLDSDGSFFLYSKLTVDKSRWQQGNVFSCSVMHEALHNHYTQKSLSLSPGK

SEQ ID NO: 17096 - protein, 115 aa, Artificial Sequence; identical to SEQ ID NO: 11430
  Description of Artificial Sequence: Synthetic polypeptide
  VH of XENP020158

SEQ ID NO: 17097 - protein, 5 aa, Artificial Sequence
  Description of Artificial Sequence: Synthetic peptide
  XENP020158 vhCDR1
SYWMH

SEQ ID NO: 17098 - protein, 17 aa, Artificial Sequence
  Description of Artificial Sequence: Synthetic peptide
  XENP020158 vhCDR2
AIYPGNIATSYNQKFQG

SEQ ID NO: 17099 - protein, 6 aa, Artificial Sequence
  Description of Artificial Sequence: Synthetic peptide
  XENP020158 vhCDR3
SYVMDY

SEQ ID NO: 17100 - protein, 214 aa, Artificial Sequence
  Description of Artificial Sequence: Synthetic polypeptide
  XENP020158 3C11(PD-1)_H1L1_IgG1_PVA_/S267K Light Chain
DIVMTQSPSSLSASVGDRVTITCQASQDINSYLSWFQQKPGKSPKTLIYRANRLVDGVPSRFSGSGSGQDYTFTISSLQPEDIATYYCLQYDEFPYTFGGGTKVEIKRTVAAPSVFIFPPSDEQLKSGTASVVCLLNNFYPREAKVQWKVDNALQSGNSQESVTEQDSKDSTYSLSSTLTLSKADYEKHKVYACEVTHQGLSSPVTKSFNRGEC

SEQ ID NO: 17101 - protein, 107 aa, Artificial Sequence; identical to SEQ ID NO: 11431
  Description of Artificial Sequence: Synthetic polypeptide
  VL of XENP020158

SEQ ID NO: 17102 - protein, 11 aa, Artificial Sequence
  Description of Artificial Sequence: Synthetic peptide
  XENP020158 vlCDR1
QASQDINSYLS

SEQ ID NO: 17103 - protein, 7 aa, Artificial Sequence
  Description of Artificial Sequence: Synthetic peptide
  XENP020158 vlCDR2
RANRLVD

SEQ ID NO: 17104 - protein, 9 aa, Artificial Sequence
  Description of Artificial Sequence: Synthetic peptide
  XENP020158 vlCDR3
LQYDEFPYT

SEQ ID NO: 17105 - protein, 441 aa, Artificial Sequence
  Description of Artificial Sequence: Synthetic polypeptide
  XENP020159 3G12_H1L1_IgG1_PVA_/S267K Heavy Chain
QVQLVQSGAEVKKPGASVKVSCKASGYTFTSYWMHWVRQAPGQGLEWMGVIDPSDSYTSYNQKFQGRVTMTVDTSTSTAYMELSSLRSEDTAVYYCTGAYYWGQGTLVTVSSASTKGPSVFPLAPSSKSTSGGTAALGCLVKDYFPEPVTVSWNSGALTSGVHTFPAVLQSSGLYSLSSVVTVPSSSLGTQTYICNVNHKPSNTKVDKKVEPKSCDKTHTCPPCPAPPVAGPSVFLFPPKPKDTLMISRTPEVTCVVVDVKHEDPEVKFNWYVDGVEVHNAKTKPREEQYNSTYRVVSVLTVLHQDWLNGKEYKCKVSNKALPAPIEKTISKAKGQPREPQVYTLPPSREEMTKNQVSLTCLVKGFYPSDIAVEWESNGQPENNYKTTPPVLDSDGSFFLYSKLTVDKSRWQQGNVFSCSVMHEALHNHYTQKSLSLSPGK

SEQ ID NO: 17106 - protein, 112 aa, Artificial Sequence; identical to SEQ ID NO: 11439
  Description of Artificial Sequence: Synthetic polypeptide
  VH of XENP020159

SEQ ID NO: 17107 - protein, 5 aa, Artificial Sequence
  Description of Artificial Sequence: Synthetic peptide
  XENP020159 vhCDR1
SYWMH

SEQ ID NO: 17108 - protein, 17 aa, Artificial Sequence
  Description of Artificial Sequence: Synthetic peptide
  XENP020159 vhCDR2
VIDPSDSYTSYNQKFQG

SEQ ID NO: 17109 - protein, 3 aa, Artificial Sequence
  Description of Artificial Sequence: Synthetic peptide
  XENP020159 vhCDR3
AYY

SEQ ID NO: 17110 - protein, 214 aa, Artificial Sequence
  Description of Artificial Sequence: Synthetic polypeptide
  XENP020159 3G12_H1L1_IgG1_PVA_/S267K Light Chain
DIVLTQSPSSLSASVGDRVTITCRASQGISSNIGWLQQKPGKSFKGLIYHGTNLEDGVPSRFTGSGSGADYTLTISSLQPEDFATYYCVQYAQSPWTFGGGTKVEIKRTVAAPSVFIFPPSDEQLKSGTASVVCLLNNFYPREAKVQWKVDNALQSGNSQESVTEQDSKDSTYSLSSTLTLSKADYEKHKVYACEVTHQGLSSPVTKSFNRGEC

SEQ ID NO: 17111 - protein, 107 aa, Artificial Sequence; identical to SEQ ID NO: 11440
  Description of Artificial Sequence: Synthetic polypeptide
  VL of XENP020159

SEQ ID NO: 17112 - protein, 11 aa, Artificial Sequence
  Description of Artificial Sequence: Synthetic peptide
  XENP020159 vlCDR1
RASQGISSNIG

SEQ ID NO: 17113 - protein, 7 aa, Artificial Sequence
  Description of Artificial Sequence: Synthetic peptide
  XENP020159 vlCDR2
HGTNLED

SEQ ID NO: 17114 - protein, 9 aa, Artificial Sequence
  Description of Artificial Sequence: Synthetic peptide
  XENP020159 vlCDR3
VQYAQSPWT

SEQ ID NO: 17115 - protein, 441 aa, Artificial Sequence
  Description of Artificial Sequence: Synthetic polypeptide
  XENP020160 5C4_H1L1_IgG1_PVA_/S267K Heavy Chain
QVQLVQSGAEVKKPGASVKVSCKASGYTFTDYWMHWLRQAPGQGLEWMGAIDTSDSYPTYNQKFQGRVTMTVDDSTSTAYMELSSLRSEDTAVYYCTRFDYWGQGTLVTVSSASTKGPSVFPLAPSSKSTSGGTAALGCLVKDYFPEPVTVSWNSGALTSGVHTFPAVLQSSGLYSLSSVVTVPSSSLGTQTYICNVNHKPSNTKVDKKVEPKSCDKTHTCPPCPAPPVAGPSVFLFPPKPKDTLMISRTPEVTCVVVDVKHEDPEVKFNWYVDGVEVHNAKTKPREEQYNSTYRVVSVLTVLHQDWLNGKEYKCKVSNKALPAPIEKTISKAKGQPREPQVYTLPPSREEMTKNQVSLTCLVKGFYPSDIAVEWESNGQPENNYKTTPPVLDSDGSFFLYSKLTVDKSRWQQGNVFSCSVMHEALHNHYTQKSLSLSPGK

SEQ ID NO: 17116 - protein, 112 aa, Artificial Sequence; identical to SEQ ID NO: 11448
  Description of Artificial Sequence: Synthetic polypeptide
  VH of XENP020160

SEQ ID NO: 17117 - protein, 5 aa, Artificial Sequence
  Description of Artificial Sequence: Synthetic peptide
  XENP020160 vhCDR1
DYWMH

SEQ ID NO: 17118 - protein, 17 aa, Artificial Sequence
  Description of Artificial Sequence: Synthetic peptide
  XENP020160 vhCDR2
AIDTSDSYPTYNQKFQG

SEQ ID NO: 17119 - protein, 3 aa, Artificial Sequence
  Description of Artificial Sequence: Synthetic peptide
  XENP020160 vhCDR3
FDY

SEQ ID NO: 17120 - protein, 214 aa, Artificial Sequence
  Description of Artificial Sequence: Synthetic polypeptide
  XENP020160 5C4_H1L1_IgG1_PVA_/S267K Light Chain
DIVMTQSPDSLAVSLGERATINCKASQSVSNDVAWYQQKPGQSPKLLIYYASNRYTGVPDRFTGSGYGTDFTLTISSLQAEDVAVYFCQQDYSSPYTFGGGTKVEIKRTVAAPSVFIFPPSDEQLKSGTASVVCLLNNFYPREAKVQWKVDNALQSGNSQESVTEQDSKDSTYSLSSTLTLSKADYEKHKVYACEVTHQGLSSPVTKSFNRGEC

SEQ ID NO: 17121 - protein, 107 aa, Artificial Sequence; identical to SEQ ID NO: 11449
  Description of Artificial Sequence: Synthetic polypeptide
  VL of XENP020160

SEQ ID NO: 17122 - protein, 11 aa, Artificial Sequence
  Description of Artificial Sequence: Synthetic peptide
  XENP020160 vlCDR1
KASQSVSNDVA

SEQ ID NO: 17123 - protein, 7 aa, Artificial Sequence
  Description of Artificial Sequence: Synthetic peptide
  XENP020160 vlCDR2
YASNRYT

SEQ ID NO: 17124 - protein, 9 aa, Artificial Sequence
  Description of Artificial Sequence: Synthetic peptide
  XENP020160 vlCDR3
QQDYSSPYT

SEQ ID NO: 17125 - protein, 441 aa, Artificial Sequence
  Description of Artificial Sequence: Synthetic polypeptide
  XENP020161 5C4_H2L1_IgG1_PVA_/S267K Heavy Chain
QVQLVQSGSELKKPGASVKVSCKASGYTFTDYWMHWLRQAPGQGLEWMGAIDTSDSYPTYNQGFTGRFVFSVDDSVSTAYLQISSLKAEDTAVYYCTRFDYWGQGTLVTVSSASTKGPSVFPLAPSSKSTSGGTAALGCLVKDYFPEPVTVSWNSGALTSGVHTFPAVLQSSGLYSLSSVVTVPSSSLGTQTYICNVNHKPSNTKVDKKVEPKSCDKTHTCPPCPAPPVAGPSVFLFPPKPKDTLMISRTPEVTCVVVDVKHEDPEVKFNWYVDGVEVHNAKTKPREEQYNSTYRVVSVLTVLHQDWLNGKEYKCKVSNKALPAPIEKTISKAKGQPREPQVYTLPPSREEMTKNQVSLTCLVKGFYPSDIAVEWESNGQPENNYKTTPPVLDSDGSFFLYSKLTVDKSRWQQGNVFSCSVMHEALHNHYTQKSLSLSPGK

SEQ ID NO: 17126 - protein, 112 aa, Artificial Sequence; identical to SEQ ID NO: 11457
  Description of Artificial Sequence: Synthetic polypeptide
  VH of XENP020161

SEQ ID NO: 17127 - protein, 5 aa, Artificial Sequence
  Description of Artificial Sequence: Synthetic peptide
  XENP020161 vhCDR1
DYWMH

SEQ ID NO: 17128 - protein, 17 aa, Artificial Sequence
  Description of Artificial Sequence: Synthetic peptide
  XENP020161 vhCDR2
AIDTSDSYPTYNQGFTG

SEQ ID NO: 17129 - protein, 3 aa, Artificial Sequence
  Description of Artificial Sequence: Synthetic peptide
  XENP020161 vhCDR3
FDY

SEQ ID NO: 17130 - protein, 214 aa, Artificial Sequence; identical to SEQ ID NO: 17120
  Description of Artificial Sequence: Synthetic polypeptide
  XENP020161 5C4_H2L1_IgG1_PVA_/S267K Light Chain

SEQ ID NO: 17131 - protein, 107 aa, Artificial Sequence; identical to SEQ ID NO: 11449
  Description of Artificial Sequence: Synthetic polypeptide
  VL of XENP020161

SEQ ID NO: 17132 - protein, 11 aa, Artificial Sequence
  Description of Artificial Sequence: Synthetic peptide
  XENP020161 vlCDR1
KASQSVSNDVA

SEQ ID NO: 17133 - protein, 7 aa, Artificial Sequence
  Description of Artificial Sequence: Synthetic peptide
  XENP020161 vlCDR2
YASNRYT

SEQ ID NO: 17134 - protein, 9 aa, Artificial Sequence
  Description of Artificial Sequence: Synthetic peptide
  XENP020161 vlCDR3
QQDYSSPYT

SEQ ID NO: 17135 - protein, 449 aa, Artificial Sequence
  Description of Artificial Sequence: Synthetic polypeptide
  XENP016436 25F7_H0L0_IgG1_PVA_/S267K Heavy Chain
QVQLQQWGAGLLKPSETLSLTCAVYGGSFSDYYWNWIRQPPGKGLEWIGEINHNGNTNSNPSLKSRVTLSLDTSKNQFSLKLRSVTAADTAVYYCAFGYSDYEYNWFDPWGQGTLVTVSSASTKGPSVFPLAPSSKSTSGGTAALGCLVKDYFPEPVTVSWNSGALTSGVHTFPAVLQSSGLYSLSSVVTVPSSSLGTQTYICNVNHKPSNTKVDKKVEPKSCDKTHTCPPCPAPPVAGPSVFLFPPKPKDTLMISRTPEVTCVVVDVKHEDPEVKFNWYVDGVEVHNAKTKPREEQYNSTYRVVSVLTVLHQDWLNGKEYKCKVSNKALPAPIEKTISKAKGQPREPQVYTLPPSREEMTKNQVSLTCLVKGFYPSDIAVEWESNGQPENNYKTTPPVLDSDGSFFLYSKLTVDKSRWQQGNVFSCSVMHEALHNHYTQKSLSLSPGK

SEQ ID NO: 17136 - protein, 120 aa, Artificial Sequence
  Description of Artificial Sequence: Synthetic polypeptide
  VH of XENP016436
QVQLQQWGAGLLKPSETLSLTCAVYGGSFSDYYWNWIRQPPGKGLEWIGEINHNGNTNSNPSLKSRVTLSLDTSKNQFSLKLRSVTAADTAVYYCAFGYSDYEYNWFDPWGQGTLVTVSS

SEQ ID NO: 17137 - protein, 5 aa, Artificial Sequence
  Description of Artificial Sequence: Synthetic peptide
  XENP016436 vhCDR1
DYYWN

SEQ ID NO: 17138 - protein, 16 aa, Artificial Sequence
  Description of Artificial Sequence: Synthetic peptide
  XENP016436 vhCDR2
EINHNGNTNSNPSLKS

SEQ ID NO: 17139 - protein, 12 aa, Artificial Sequence
  Description of Artificial Sequence: Synthetic peptide
  XENP016436 vhCDR3
GYSDYEYNWFDP

SEQ ID NO: 17140 - protein, 214 aa, Artificial Sequence
  Description of Artificial Sequence: Synthetic polypeptide
  XENP016436 25F7_H0L0_IgG1_PVA_/S267K Light Chain
EIVLTQSPATLSLSPGERATLSCRASQSISSYLAWYQQKPGQAPRLLIYDASNRATGIPARFSGSGSGTDFTLTISSLEPEDFAVYYCQQRSNWPLTFGQGTNLEIKRTVAAPSVFIFPPSDEQLKSGTASVVCLLNNFYPREAKVQWKVDNALQSGNSQESVTEQDSKDSTYSLSSTLTLSKADYEKHKVYACEVTHQGLSSPVTKSFNRGEC

SEQ ID NO: 17141 - protein, 107 aa, Artificial Sequence
  Description of Artificial Sequence: Synthetic polypeptide
  VL of XENP016436
EIVLTQSPATLSLSPGERATLSCRASQSISSYLAWYQQKPGQAPRLLIYDASNRATGIPARFSGSGSGTDFTLTISSLEPEDFAVYYCQQRSNWPLTFGQGTNLEIK

SEQ ID NO: 17142 - protein, 11 aa, Artificial Sequence
  Description of Artificial Sequence: Synthetic peptide
  XENP016436 vlCDR1
RASQSISSYLA

SEQ ID NO: 17143 - protein, 7 aa, Artificial Sequence
  Description of Artificial Sequence: Synthetic peptide
  XENP016436 vlCDR2
DASNRAT

SEQ ID NO: 17144 - protein, 9 aa, Artificial Sequence
  Description of Artificial Sequence: Synthetic peptide
  XENP016436 vlCDR3
QQRSNWPLT

SEQ ID NO: 17145 - protein, 447 aa, Artificial Sequence
  Description of Artificial Sequence: Synthetic polypeptide
  XENP019353 1H11_H0L0_IgG1_PVA_/S267K Heavy Chain
QIQLVQSGPELKKPGETVKISCKASGYTFTNYGMNWVKQAPGKGLKWMGWINTYTGEPTYADDFKGRFAFSLETSASTAYLQINNLKNEDTATYFCARGRGMGYFDYWGQGTTLTVSSASTKGPSVFPLAPSSKSTSGGTAALGCLVKDYFPEPVTVSWNSGALTSGVHTFPAVLQSSGLYSLSSVVTVPSSSLGTQTYICNVNHKPSDTKVDKKVEPKSCDKTHTCPPCPAPPVAGPSVFLFPPKPKDTLMISRTPEVTCVVVDVKHEDPEVKFNWYVDGVEVHNAKTKPREEEYNSTYRVVSVLTVLHQDWLNGKEYKCKVSNKALPAPIEKTISKAKGQPREPQVYTLPPSREEMTKNQVSLTCDVSGFYPSDIAVEWESDGQPENNYKTTPPVLDSDGSFFLYSKLTVDKSRWEQGDVFSCSVMHEALHNHYTQKSLSLSPGK

SEQ ID NO: 17146 - protein, 118 aa, Artificial Sequence
  Description of Artificial Sequence: Synthetic polypeptide
  VH of XENP019353
QIQLVQSGPELKKPGETVKISCKASGYTFTNYGMNWVKQAPGKGLKWMGWINTYTGEPTYADDFKGRFAFSLETSASTAYLQINNLKNEDTATYFCARGRGMGYFDYWGQGTTLTVSS

SEQ ID NO: 17147 - protein, 5 aa, Artificial Sequence
  Description of Artificial Sequence: Synthetic peptide
  XENP019353 vhCDR1
NYGMN

SEQ ID NO: 17148 - protein, 17 aa, Artificial Sequence
  Description of Artificial Sequence: Synthetic peptide
  XENP019353 vhCDR2
WINTYTGEPTYADDFKG

SEQ ID NO: 17149 - protein, 9 aa, Artificial Sequence
  Description of Artificial Sequence: Synthetic peptide
  XENP019353 vhCDR3
GRGMGYFDY

SEQ ID NO: 17150 - protein, 214 aa, Artificial Sequence
  Description of Artificial Sequence: Synthetic polypeptide
  XENP019353 1H11_H0L0_IgG1_PVA_/S267K Light Chain
DIQMTQSPASLSVSVGETVTITCRASENIYSNLAWYQQKQGKSPQLLVYAATNLADGVPSRFSGSGSGTQYSLKINSLQSGDFGNYYCQHFWTTPRTFGGGTKLEIKRTVAAPSVFIFPPSDEQLKSGTASVVCLLNNFYPREAKVQWKVDNALQSGNSQESVTEQDSKDSTYSLSSTLTLSKADYEKHKVYACEVTHQGLSSPVTKSFNRGEC

SEQ ID NO: 17151 - protein, 107 aa, Artificial Sequence
  Description of Artificial Sequence: Synthetic polypeptide
  VL of XENP019353
DIQMTQSPASLSVSVGETVTITCRASENIYSNLAWYQQKQGKSPQLLVYAATNLADGVPSRFSGSGSGTQYSLKINSLQSGDFGNYYCQHFWTTPRTFGGGTKLEIK

SEQ ID NO: 17152 - protein, 11 aa, Artificial Sequence
  Description of Artificial Sequence: Synthetic peptide
  XENP019353 vlCDR1
RASENIYSNLA

SEQ ID NO: 17153 - protein, 7 aa, Artificial Sequence
  Description of Artificial Sequence: Synthetic peptide
  XENP019353 vlCDR2
AATNLAD

SEQ ID NO: 17154 - protein, 9 aa, Artificial Sequence
  Description of Artificial Sequence: Synthetic peptide
  XENP019353 vlCDR3
QHFWTTPRT

SEQ ID NO: 17155 - protein, 447 aa, Artificial Sequence
  Description of Artificial Sequence: Synthetic polypeptide
  XENP019354 1H11_H1L1_IgG1_PVA_/S267K Heavy Chain
QIQLVQSGAEVKKPGASVKVSCKASGYTFTNYGMNWVRQAPGQGLEWMGWINTYTGEPTYADKFQGRVTMTLDTSTSTAYMELSSLRSEDTAVYFCARGRGMGYFDYWGQGTLVTVSSASTKGPSVFPLAPSSKSTSGGTAALGCLVKDYFPEPVTVSWNSGALTSGVHTFPAVLQSSGLYSLSSVVTVPSSSLGTQTYICNVNHKPSDTKVDKKVEPKSCDKTHTCPPCPAPPVAGPSVFLFPPKPKDTLMISRTPEVTCVVVDVKHEDPEVKFNWYVDGVEVHNAKTKPREEEYNSTYRVVSVLTVLHQDWLNGKEYKCKVSNKALPAPIEKTISKAKGQPREPQVYTLPPSREEMTKNQVSLTCDVSGFYPSDIAVEWESDGQPENNYKTTPPVLDSDGSFFLYSKLTVDKSRWEQGDVFSCSVMHEALHNHYTQKSLSLSPGK

SEQ ID NO: 17156 - protein, 118 aa, Artificial Sequence
  Description of Artificial Sequence: Synthetic polypeptide
  VH of XENP019354
QIQLVQSGAEVKKPGASVKVSCKASGYTFTNYGMNWVRQAPGQGLEWMGWINTYTGEPTYADKFQGRVTMTLDTSTSTAYMELSSLRSEDTAVYFCARGRGMGYFDYWGQGTLVTVSS

SEQ ID NO: 17157 - protein, 5 aa, Artificial Sequence
  Description of Artificial Sequence: Synthetic peptide
  XENP019354 vhCDR1
NYGMN

SEQ ID NO: 17158 - protein, 17 aa, Artificial Sequence
  Description of Artificial Sequence: Synthetic peptide
  XENP019354 vhCDR2
WINTYTGEPTYADKFQG

SEQ ID NO: 17159 - protein, 9 aa, Artificial Sequence
  Description of Artificial Sequence: Synthetic peptide
  XENP019354 vhCDR3
GRGMGYFDY

SEQ ID NO: 17160 - protein, 214 aa, Artificial Sequence
  Description of Artificial Sequence: Synthetic polypeptide
  XENP019354 1H11_H1L1_IgG1_PVA_/S267K Light Chain
DIQMTQSPSSLSASVGDRVTITCRASENIYSNLAWYQQKPGKSPKLLVYAATNLADGVPSRFSGSGSGTDYTLTISSLQPEDFATYYCQHFWTTPRTFGGGTKVEIKRTVAAPSVFIFPPSDEQLKSGTASVVCLLNNFYPREAKVQWKVDNALQSGNSQESVTEQDSKDSTYSLSSTLTLSKADYEKHKVYACEVTHQGLSSPVTKSFNRGEC

SEQ ID NO: 17161 - protein, 107 aa, Artificial Sequence
  Description of Artificial Sequence: Synthetic polypeptide
  VL of XENP019354
DIQMTQSPSSLSASVGDRVTITCRASENIYSNLAWYQQKPGKSPKLLVYAATNLADGVPSRFSGSGSGTDYTLTISSLQPEDFATYYCQHFWTTPRTFGGGTKVEIK

SEQ ID NO: 17162 - protein, 11 aa, Artificial Sequence
  Description of Artificial Sequence: Synthetic peptide
  XENP019354 vlCDR1
RASENIYSNLA

SEQ ID NO: 17163 - protein, 7 aa, Artificial Sequence
  Description of Artificial Sequence: Synthetic peptide
  XENP019354 vlCDR2
AATNLAD

SEQ ID NO: 17164 - protein, 9 aa, Artificial Sequence
  Description of Artificial Sequence: Synthetic peptide
  XENP019354 vlCDR3
QHFWTTPRT

SEQ ID NO: 17165 - protein, 447 aa, Artificial Sequence; identical to SEQ ID NO: 17155
  Description of Artificial Sequence: Synthetic polypeptide
  XENP019355 1H11_H1L2_IgG1_PVA_/S267K Heavy Chain

SEQ ID NO: 17166 - protein, 118 aa, Artificial Sequence; identical to SEQ ID NO: 17156
  Description of Artificial Sequence: Synthetic polypeptide
  VH of XENP019355

SEQ ID NO: 17167 - protein, 5 aa, Artificial Sequence
  Description of Artificial Sequence: Synthetic peptide
  XENP019355 vhCDR1
NYGMN

SEQ ID NO: 17168 - protein, 17 aa, Artificial Sequence
  Description of Artificial Sequence: Synthetic peptide
  XENP019355 vhCDR2
WINTYTGEPTYADKFQG

SEQ ID NO: 17169 - protein, 9 aa, Artificial Sequence
  Description of Artificial Sequence: Synthetic peptide
  XENP019355 vhCDR3
GRGMGYFDY

SEQ ID NO: 17170 - protein, 214 aa, Artificial Sequence
  Description of Artificial Sequence: Synthetic polypeptide
  XENP019355 1H11_H1L2_IgG1_PVA_/S267K Light Chain
DIQMTQSPATLSVSPGERATLSCRASENIYSNLAWYQQKPGQSPRLLVYAATNLADGVPSRFSGSGSGTEYTLTISSLQSEDFAVYYCQHFWTTPRTFGGGTKVEIKRTVAAPSVFIFPPSDEQLKSGTASVVCLLNNFYPREAKVQWKVDNALQSGNSQESVTEQDSKDSTYSLSSTLTLSKADYEKHKVYACEVTHQGLSSPVTKSFNRGEC

SEQ ID NO: 17171 - protein, 107 aa, Artificial Sequence
  Description of Artificial Sequence: Synthetic polypeptide
  VL of XENP019355
DIQMTQSPATLSVSPGERATLSCRASENIYSNLAWYQQKPGQSPRLLVYAATNLADGVPSRFSGSGSGTEYTLTISSLQSEDFAVYYCQHFWTTPRTFGGGTKVEIK

SEQ ID NO: 17172 - protein, 11 aa, Artificial Sequence
  Description of Artificial Sequence: Synthetic peptide
  XENP019355 vlCDR1
RASENIYSNLA

SEQ ID NO: 17173 - protein, 7 aa, Artificial Sequence
  Description of Artificial Sequence: Synthetic peptide
  XENP019355 vlCDR2
AATNLAD

SEQ ID NO: 17174 - protein, 9 aa, Artificial Sequence
  Description of Artificial Sequence: Synthetic peptide
  XENP019355 vlCDR3
QHFWTTPRT

SEQ ID NO: 17175 - protein, 447 aa, Artificial Sequence
  Description of Artificial Sequence: Synthetic polypeptide
  XENP019356 1H11_H2L1_IgG1_PVA_/S267K Heavy Chain
QIQLVQSGSELKKPGASVKVSCKASGYTFTNYGMNWVRQAPGQGLEWMGWINTYTGEPTYADGFTGRFVFSLDTSVSTAYLQISSLKAEDTAVYFCARGRGMGYFDYWGQGTLVTVSSASTKGPSVFPLAPSSKSTSGGTAALGCLVKDYFPEPVTVSWNSGALTSGVHTFPAVLQSSGLYSLSSVVTVPSSSLGTQTYICNVNHKPSDTKVDKKVEPKSCDKTHTCPPCPAPPVAGPSVFLFPPKPKDTLMISRTPEVTCVVVDVKHEDPEVKFNWYVDGVEVHNAKTKPREEEYNSTYRVVSVLTVLHQDWLNGKEYKCKVSNKALPAPIEKTISKAKGQPREPQVYTLPPSREEMTKNQVSLTCDVSGFYPSDIAVEWESDGQPENNYKTTPPVLDSDGSFFLYSKLTVDKSRWEQGDVFSCSVMHEALHNHYTQKSLSLSPGK

SEQ ID NO: 17176 - protein, 118 aa, Artificial Sequence
  Description of Artificial Sequence: Synthetic polypeptide
  VH of XENP019356
QIQLVQSGSELKKPGASVKVSCKASGYTFTNYGMNWVRQAPGQGLEWMGWINTYTGEPTYADGFTGRFVFSLDTSVSTAYLQISSLKAEDTAVYFCARGRGMGYFDYWGQGTLVTVSS

SEQ ID NO: 17177 - protein, 5 aa, Artificial Sequence
  Description of Artificial Sequence: Synthetic peptide
  XENP019356 vhCDR1
NYGMN

SEQ ID NO: 17178 - protein, 17 aa, Artificial Sequence
  Description of Artificial Sequence: Synthetic peptide
  XENP019356 vhCDR2
WINTYTGEPTYADGFTG

SEQ ID NO: 17179 - protein, 9 aa, Artificial Sequence
  Description of Artificial Sequence: Synthetic peptide
  XENP019356 vhCDR3
GRGMGYFDY

SEQ ID NO: 17180 - protein, 214 aa, Artificial Sequence; identical to SEQ ID NO: 17160
  Description of Artificial Sequence: Synthetic polypeptide
  XENP019356 1H11_H2L1_IgG1_PVA_/S267K Light Chain

SEQ ID NO: 17181 - protein, 107 aa, Artificial Sequence; identical to SEQ ID NO: 17161
  Description of Artificial Sequence: Synthetic polypeptide
  VL of XENP019356

SEQ ID NO: 17182 - protein, 11 aa, Artificial Sequence
  Description of Artificial Sequence: Synthetic peptide
  XENP019356 vlCDR1
RASENIYSNLA

SEQ ID NO: 17183 - protein, 7 aa, Artificial Sequence
  Description of Artificial Sequence: Synthetic peptide
  XENP019356 vlCDR2
AATNLAD

SEQ ID NO: 17184 - protein, 9 aa, Artificial Sequence
  Description of Artificial Sequence: Synthetic peptide
  XENP019356 vlCDR3
QHFWTTPRT

SEQ ID NO: 17185 - protein, 447 aa, Artificial Sequence; identical to SEQ ID NO: 17175
  Description of Artificial Sequence: Synthetic polypeptide
  XENP019357 1H11_H2L2_IgG1_PVA_/S267K Heavy Chain

SEQ ID NO: 17186 - protein, 118 aa, Artificial Sequence; identical to SEQ ID NO: 17176
  Description of Artificial Sequence: Synthetic polypeptide
  VH of XENP019357

SEQ ID NO: 17187 - protein, 5 aa, Artificial Sequence
  Description of Artificial Sequence: Synthetic peptide
  XENP019357 vhCDR1
NYGMN

SEQ ID NO: 17188 - protein, 17 aa, Artificial Sequence
  Description of Artificial Sequence: Synthetic peptide
  XENP019357 vhCDR2
WINTYTGEPTYADGFTG

SEQ ID NO: 17189 - protein, 9 aa, Artificial Sequence
  Description of Artificial Sequence: Synthetic peptide
  XENP019357 vhCDR3
GRGMGYFDY

SEQ ID NO: 17190 - protein, 214 aa, Artificial Sequence; identical to SEQ ID NO: 17170
  Description of Artificial Sequence: Synthetic polypeptide
  XENP019357 1H11_H2L2_IgG1_PVA_/S267K Light Chain

SEQ ID NO: 17191 - protein, 107 aa, Artificial Sequence; identical to SEQ ID NO: 17171
  Description of Artificial Sequence: Synthetic polypeptide
  VL of XENP019357

SEQ ID NO: 17192 - protein, 11 aa, Artificial Sequence
  Description of Artificial Sequence: Synthetic peptide
  XENP019357 vlCDR1
RASENIYSNLA

SEQ ID NO: 17193 - protein, 7 aa, Artificial Sequence
  Description of Artificial Sequence: Synthetic peptide
  XENP019357 vlCDR2
AATNLAD

SEQ ID NO: 17194 - protein, 9 aa, Artificial Sequence
  Description of Artificial Sequence: Synthetic peptide
  XENP019357 vlCDR3
QHFWTTPRT

SEQ ID NO: 17195 - protein, 450 aa, Artificial Sequence
  Description of Artificial Sequence: Synthetic polypeptide
  XENP019358 3C11_H1L1_IgG1_PVA_/S267K Heavy Chain
QVQLQESGPGLVKPSETLSLTCTVSGYSITSDYAWNWIRQPPGKKLEWIGYISYSSTSYNPSLKSRVTISRDTSKNQFSLKLSSVTAADTAVYFCARNNLLWSYYYAMDYWGQGTLVTVSSASTKGPSVFPLAPSSKSTSGGTAALGCLVKDYFPEPVTVSWNSGALTSGVHTFPAVLQSSGLYSLSSVVTVPSSSLGTQTYICNVNHKPSDTKVDKKVEPKSCDKTHTCPPCPAPPVAGPSVFLFPPKPKDTLMISRTPEVTCVVVDVKHEDPEVKFNWYVDGVEVHNAKTKPREEEYNSTYRVVSVLTVLHQDWLNGKEYKCKVSNKALPAPIEKTISKAKGQPREPQVYTLPPSREEMTKNQVSLTCDVSGFYPSDIAVEWESDGQPENNYKTTPPVLDSDGSFFLYSKLTVDKSRWEQGDVFSCSVMHEALHNHYTQKSLSLSPGK

SEQ ID NO: 17196 - protein, 121 aa, Artificial Sequence
  Description of Artificial Sequence: Synthetic polypeptide
  VH of XENP019358
QVQLQESGPGLVKPSETLSLTCTVSGYSITSDYAWNWIRQPPGKKLEWIGYISYSSTSYNPSLKSRVTISRDTSKNQFSLKLSSVTAADTAVYFCARNNLLWSYYYAMDYWGQGTLVTVSS

SEQ ID NO: 17197 - protein, 6 aa, Artificial Sequence
  Description of Artificial Sequence: Synthetic peptide
  XENP019358 vhCDR1
SDYAWN

SEQ ID NO: 17198 - protein, 15 aa, Artificial Sequence
  Description of Artificial Sequence: Synthetic peptide
  XENP019358 vhCDR2
YISYSSTSYNPSLKS

SEQ ID NO: 17199 - protein, 13 aa, Artificial Sequence
  Description of Artificial Sequence: Synthetic peptide
  XENP019358 vhCDR3
NNLLWSYYYAMDY

SEQ ID NO: 17200 - protein, 218 aa, Artificial Sequence
  Description of Artificial Sequence: Synthetic polypeptide
  XENP019358 3C11_H1L1_IgG1_PVA_/S267K Light Chain
DIVLTQSPATLSLSPGERATLSCRASESVDSYGNSFMHWYQQKPGQPPRLLIYRASNLESGIPARFSGSGSGTDFTLTISSLEPEDFAVYYCQQSNEDPYTFGGGTKVEIKRTVAAPSVFIFPPSDEQLKSGTASVVCLLNNFYPREAKVQWKVDNALQSGNSQESVTEQDSKDSTYSLSSTLTLSKADYEKHKVYACEVTHQGLSSPVTKSFNRGEC

SEQ ID NO: 17201 - protein, 111 aa, Artificial Sequence
  Description of Artificial Sequence: Synthetic polypeptide
  VL of XENP019358
DIVLTQSPATLSLSPGERATLSCRASESVDSYGNSFMHWYQQKPGQPPRLLIYRASNLESGIPARFSGSGSGTDFTLTISSLEPEDFAVYYCQQSNEDPYTFGGGTKVEIK

SEQ ID NO: 17202 - protein, 15 aa, Artificial Sequence
  Description of Artificial Sequence: Synthetic peptide
  XENP019358 vlCDR1
RASESVDSYGNSFMH

SEQ ID NO: 17203 - protein, 7 aa, Artificial Sequence
  Description of Artificial Sequence: Synthetic peptide
  XENP019358 vlCDR2
RASNLES

SEQ ID NO: 17204 - protein, 9 aa, Artificial Sequence
  Description of Artificial Sequence: Synthetic peptide
  XENP019358 vlCDR3
QQSNEDPYT

SEQ ID NO: 17205 - protein, 447 aa, Artificial Sequence; identical to SEQ ID NO: 17155
  Description of Artificial Sequence: Synthetic polypeptide
  XENP019359 1H11_H1_5D8_L1_IgG1_PVA_/S267K Heavy Chain

SEQ ID NO: 17206 - protein, 118 aa, Artificial Sequence; identical to SEQ ID NO: 17156
  Description of Artificial Sequence: Synthetic polypeptide
  VH of XENP019359

SEQ ID NO: 17207 - protein, 5 aa, Artificial Sequence
  Description of Artificial Sequence: Synthetic peptide
  XENP019359 vhCDR1
NYGMN

SEQ ID NO: 17208 - protein, 17 aa, Artificial Sequence
  Description of Artificial Sequence: Synthetic peptide
  XENP019359 vhCDR2
WINTYTGEPTYADKFQG

SEQ ID NO: 17209 - protein, 9 aa, Artificial Sequence
  Description of Artificial Sequence: Synthetic peptide
  XENP019359 vhCDR3
GRGMGYFDY

SEQ ID NO: 17210 - protein, 214 aa, Artificial Sequence
  Description of Artificial Sequence: Synthetic polypeptide
  XENP019359 1H11_H1_5D8_L1_IgG1_PVA_/S267K Light Chain
DIQMTQSPSSLSASVGDRVTITCRASENIYSNLAWYQQKPGKSPKLLVYAATNLGDGVPSRFSGSGSGTDYTLTISSLQPEDFATYYCQHFWATPRTFGGGTKVEIKRTVAAPSVFIFPPSDEQLKSGTASVVCLLNNFYPREAKVQWKVDNALQSGNSQESVTEQDSKDSTYSLSSTLTLSKADYEKHKVYACEVTHQGLSSPVTKSFNRGEC

SEQ ID NO: 17211 - protein, 107 aa, Artificial Sequence
  Description of Artificial Sequence: Synthetic polypeptide
  VL of XENP019359
DIQMTQSPSSLSASVGDRVTITCRASENIYSNLAWYQQKPGKSPKLLVYAATNLGDGVPSRFSGSGSGTDYTLTISSLQPEDFATYYCQHFWATPRTFGGGTKVEIK

SEQ ID NO: 17212 - protein, 11 aa, Artificial Sequence
  Description of Artificial Sequence: Synthetic peptide
  XENP019359 vlCDR1
RASENIYSNLA

SEQ ID NO: 17213 - protein, 7 aa, Artificial Sequence
  Description of Artificial Sequence: Synthetic peptide
  XENP019359 vlCDR2
AATNLGD

SEQ ID NO: 17214 - protein, 9 aa, Artificial Sequence
  Description of Artificial Sequence: Synthetic peptide
  XENP019359 vlCDR3
QHFWATPRT

SEQ ID NO: 17215 - protein, 444 aa, Artificial Sequence
  Description of Artificial Sequence: Synthetic polypeptide
  XENP019360 8D7_H1L1_IgG1_PVA_/S267K Heavy Chain
QVTLKESGPVLVKPTETLTLTCTVSGFSLSSYGVHWVRQPPGKGLEWLAVIWSGSTDYNPSLKSRLTISKDNSKSQVVLTMTNMDPVDTATYYCARTYYYAMDYWGQGTLVTVSSASTKGPSVFPLAPSSKSTSGGTAALGCLVKDYFPEPVTVSWNSGALTSGVHTFPAVLQSSGLYSLSSVVTVPSSSLGTQTYICNVNHKPSDTKVDKKVEPKSCDKTHTCPPCPAPPVAGPSVFLFPPKPKDTLMISRTPEVTCVVVDVKHEDPEVKFNWYVDGVEVHNAKTKPREEEYNSTYRVVSVLTVLHQDWLNGKEYKCKVSNKALPAPIEKTISKAKGQPREPQVYTLPPSREEMTKNQVSLTCDVSGFYPSDIAVEWESDGQPENNYKTTPPVLDSDGSFFLYSKLTVDKSRWEQGDVFSCSVMHEALHNHYTQKSLSLSPGK

SEQ ID NO: 17216 - protein, 115 aa, Artificial Sequence
  Description of Artificial Sequence: Synthetic polypeptide
  VH of XENP019360
QVTLKESGPVLVKPTETLTLTCTVSGFSLSSYGVHWVRQPPGKGLEWLAVIWSGSTDYNPSLKSRLTISKDNSKSQVVLTMTNMDPVDTATYYCARTYYYAMDYWGQGTLVTVSS

SEQ ID NO: 17217 - protein, 5 aa, Artificial Sequence
  Description of Artificial Sequence: Synthetic peptide
  XENP019360 vhCDR1
SYGVH

SEQ ID NO: 17218 - protein, 15 aa, Artificial Sequence
  Description of Artificial Sequence: Synthetic peptide
  XENP019360 vhCDR2
VIWSGSTDYNPSLKS

SEQ ID NO: 17219 - protein, 8 aa, Artificial Sequence
  Description of Artificial Sequence: Synthetic peptide
  XENP019360 vhCDR3
TYYYAMDY

SEQ ID NO: 17220 - protein, 214 aa, Artificial Sequence
  Description of Artificial Sequence: Synthetic polypeptide
  XENP019360 8D7_H1L1_IgG1_PVA_/S267K Light Chain
DIQMTQSPSSLSASVGDRVTITCRASENIYSNLAWYQQKPGKSPKFLIYAATNLADGVPSRFSGSGSGTDYTLTISSLQPEDFATYYCQHFWGTPWTFGGGTKVEIKRTVAAPSVFIFPPSDEQLKSGTASVVCLLNNFYPREAKVQWKVDNALQSGNSQESVTEQDSKDSTYSLSSTLTLSKADYEKHKVYACEVTHQGLSSPVTKSFNRGEC

SEQ ID NO: 17221 - protein, 107 aa, Artificial Sequence
  Description of Artificial Sequence: Synthetic polypeptide
  VL of XENP019360
DIQMTQSPSSLSASVGDRVTITCRASENIYSNLAWYQQKPGKSPKFLIYAATNLADGVPSRFSGSGSGTDYTLTISSLQPEDFATYYCQHFWGTPWTFGGGTKVEIK

SEQ ID NO: 17222 - protein, 11 aa, Artificial Sequence
  Description of Artificial Sequence: Synthetic peptide
  XENP019360 vlCDR1
RASENIYSNLA

SEQ ID NO: 17223 - protein, 7 aa, Artificial Sequence
  Description of Artificial Sequence: Synthetic peptide
  XENP019360 vlCDR2
AATNLAD

SEQ ID NO: 17224 - protein, 9 aa, Artificial Sequence
  Description of Artificial Sequence: Synthetic peptide
  XENP019360 vlCDR3
QHFWGTPWT

SEQ ID NO: 17225 - protein, 447 aa, Artificial Sequence
  Description of Artificial Sequence: Synthetic polypeptide
  XENP019361 2A11_H0L0_IgG1_PVA_/S267K Heavy Chain
EVQLQQSGAELVRSGASVKLSCTASGFNIKDYYMHWVKQRPEQGLEWIGWIDPENGDTEYAPKFQGKATMTADTSSNTAYLQLSSLTSEDTAVYYCYARGVRQALDYWGQGTSVTVSSASTKGPSVFPLAPSSKSTSGGTAALGCLVKDYFPEPVTVSWNSGALTSGVHTFPAVLQSSGLYSLSSVVTVPSSSLGTQTYICNVNHKPSDTKVDKKVEPKSCDKTHTCPPCPAPPVAGPSVFLFPPKPKDTLMISRTPEVTCVVVDVKHEDPEVKFNWYVDGVEVHNAKTKPREEEYNSTYRVVSVLTVLHQDWLNGKEYKCKVSNKALPAPIEKTISKAKGQPREPQVYTLPPSREEMTKNQVSLTCDVSGFYPSDIAVEWESDGQPENNYKTTPPVLDSDGSFFLYSKLTVDKSRWEQGDVFSCSVMHEALHNHYTQKSLSLSPGK

SEQ ID NO: 17226 - protein, 118 aa, Artificial Sequence
  Description of Artificial Sequence: Synthetic polypeptide
  VH of XENP019361
EVQLQQSGAELVRSGASVKLSCTASGFNIKDYYMHWVKQRPEQGLEWIGWIDPENGDTEYAPKFQGKATMTADTSSNTAYLQLSSLTSEDTAVYYCYARGVRQALDYWGQGTSVTVSS

SEQ ID NO: 17227 - protein, 5 aa, Artificial Sequence
  Description of Artificial Sequence: Synthetic peptide
  XENP019361 vhCDR1
DYYMH

SEQ ID NO: 17228 - protein, 17 aa, Artificial Sequence
  Description of Artificial Sequence: Synthetic peptide
  XENP019361 vhCDR2
WIDPENGDTEYAPKFQG

SEQ ID NO: 17229 - protein, 9 aa, Artificial Sequence
  Description of Artificial Sequence: Synthetic peptide
  XENP019361 vhCDR3
RGVRQALDY

SEQ ID NO: 17230 - protein, 214 aa, Artificial Sequence
  Description of Artificial Sequence: Synthetic polypeptide
  XENP019361 2A11_H0L0_IgG1_PVA_/S267K Light Chain
DIQMTQTTSSLSASLGDRVTISCRASQDIGNYLNWFQQKPDGTVKLLIYYTSRLHSGVPSRFSGSGSGTDYSLTISNLEQEDIATYFCQQGNTLPYTFGGGTKLEIKRTVAAPSVFIFPPSDEQLKSGTASVVCLLNNFYPREAKVQWKVDNALQSGNSQESVTEQDSKDSTYSLSSTLTLSKADYEKHKVYACEVTHQGLSSPVTKSFNRGEC

SEQ ID NO: 17231 - protein, 107 aa, Artificial Sequence
  Description of Artificial Sequence: Synthetic polypeptide
  VL of XENP019361
DIQMTQTTSSLSASLGDRVTISCRASQDIGNYLNWFQQKPDGTVKLLIYYTSRLHSGVPSRFSGSGSGTDYSLTISNLEQEDIATYFCQQGNTLPYTFGGGTKLEIK

SEQ ID NO: 17232 - protein, 11 aa, Artificial Sequence
  Description of Artificial Sequence: Synthetic peptide
  XENP019361 vlCDR1
RASQDIGNYLN

SEQ ID NO: 17233 - protein, 7 aa, Artificial Sequence
  Description of Artificial Sequence: Synthetic peptide
  XENP019361 vlCDR2
YTSRLHS

SEQ ID NO: 17234 - protein, 9 aa, Artificial Sequence
  Description of Artificial Sequence: Synthetic peptide
  XENP019361 vlCDR3
QQGNTLPYT

SEQ ID NO: 17235 - protein, 447 aa, Artificial Sequence
  Description of Artificial Sequence: Synthetic polypeptide
  XENP019362 2A11_H1L1_IgG1_PVA_/S267K Heavy Chain
EVQLVQSGAEVKKPGATVKISCKASGFNIKDYYMHWVQQAPGKGLEWMGWIDPENGDTEYAPKFQGRVTITADTSTNTAYMELSSLRSEDTAVYYCYARGVRQALDYWGQGTLVTVSSASTKGPSVFPLAPSSKSTSGGTAALGCLVKDYFPEPVTVSWNSGALTSGVHTFPAVLQSSGLYSLSSVVTVPSSSLGTQTYICNVNHKPSDTKVDKKVEPKSCDKTHTCPPCPAPPVAGPSVFLFPPKPKDTLMISRTPEVTCVVVDVKHEDPEVKFNWYVDGVEVHNAKTKPREEEYNSTYRVVSVLTVLHQDWLNGKEYKCKVSNKALPAPIEKTISKAKGQPREPQVYTLPPSREEMTKNQVSLTCDVSGFYPSDIAVEWESDGQPENNYKTTPPVLDSDGSFFLYSKLTVDKSRWEQGDVFSCSVMHEALHNHYTQKSLSLSPGK

SEQ ID NO: 17236 - protein, 118 aa, Artificial Sequence
  Description of Artificial Sequence: Synthetic polypeptide
  VH of XENP019362
EVQLVQSGAEVKKPGATVKISCKASGFNIKDYYMHWVQQAPGKGLEWMGWIDPENGDTEYAPKFQGRVTITADTSTNTAYMELSSLRSEDTAVYYCYARGVRQALDYWGQGTLVTVSS

SEQ ID NO: 17237 - protein, 5 aa, Artificial Sequence
  Description of Artificial Sequence: Synthetic peptide
  XENP019362 vhCDR1
DYYMH

SEQ ID NO: 17238 - protein, 17 aa, Artificial Sequence
  Description of Artificial Sequence: Synthetic peptide
  XENP019362 vhCDR2
WIDPENGDTEYAPKFQG

SEQ ID NO: 17239 - protein, 9 aa, Artificial Sequence
  Description of Artificial Sequence: Synthetic peptide
  XENP019362 vhCDR3
RGVRQALDY

SEQ ID NO: 17240 - protein, 214 aa, Artificial Sequence
  Description of Artificial Sequence: Synthetic polypeptide
  XENP019362 2A11_H1L1_IgG1_PVA_/S267K Light Chain
DIQMTQSPSSLSASVGDRVTITCRASQDIGNYLNWFQQKPGKTVKLLIYYTSRLHSGVPSRFSGSGSGTDYTLTISSLQPEDFATYFCQQGNTLPYTFGGGTKVEIKRTVAAPSVFIFPPSDEQLKSGTASVVCLLNNFYPREAKVQWKVDNALQSGNSQESVTEQDSKDSTYSLSSTLTLSKADYEKHKVYACEVTHQGLSSPVTKSFNRGEC

SEQ ID NO: 17241 - protein, 107 aa, Artificial Sequence
  Description of Artificial Sequence: Synthetic polypeptide
  VL of XENP019362
DIQMTQSPSSLSASVGDRVTITCRASQDIGNYLNWFQQKPGKTVKLLIYYTSRLHSGVPSRFSGSGSGTDYTLTISSLQPEDFATYFCQQGNTLPYTFGGGTKVEIK

SEQ ID NO: 17242 - protein, 11 aa, Artificial Sequence
  Description of Artificial Sequence: Synthetic peptide
  XENP019362 vlCDR1
RASQDIGNYLN

SEQ ID NO: 17243 - protein, 7 aa, Artificial Sequence
  Description of Artificial Sequence: Synthetic peptide
  XENP019362 vlCDR2
YTSRLHS

SEQ ID NO: 17244 - protein, 9 aa, Artificial Sequence
  Description of Artificial Sequence: Synthetic peptide
  XENP019362 vlCDR3
QQGNTLPYT

SEQ ID NO: 17245 - protein, 447 aa, Artificial Sequence; identical to SEQ ID NO: 17235
  Description of Artificial Sequence: Synthetic polypeptide
  XENP019363 2A11_H1L2_IgG1_PVA_/S267K Heavy Chain

SEQ ID NO: 17246 - protein, 118 aa, Artificial Sequence; identical to SEQ ID NO: 17236
  Description of Artificial Sequence: Synthetic polypeptide
  VH of XENP019363

SEQ ID NO: 17247 - protein, 5 aa, Artificial Sequence
  Description of Artificial Sequence: Synthetic peptide
  XENP019363 vhCDR1
DYYMH

SEQ ID NO: 17248 - protein, 17 aa, Artificial Sequence
  Description of Artificial Sequence: Synthetic peptide
  XENP019363 vhCDR2
WIDPENGDTEYAPKFQG

SEQ ID NO: 17249 - protein, 9 aa, Artificial Sequence
  Description of Artificial Sequence: Synthetic peptide
  XENP019363 vhCDR3
RGVRQALDY

SEQ ID NO: 17250 - protein, 214 aa, Artificial Sequence
  Description of Artificial Sequence: Synthetic polypeptide
  XENP019363 2A11_H1L2_IgG1_PVA_/S267K Light Chain
DIQMTQSPAFLSVTPGEKVTITCQASQDIGNYLNWFQQKPDQTVKLLIYYTSRLHSGVPSRFSGSGSGTDYTFTISSLEAEDAATYFCQQGNTLPYTFGGGTKVEIKRTVAAPSVFIFPPSDEQLKSGTASVVCLLNNFYPREAKVQWKVDNALQSGNSQESVTEQDSKDSTYSLSSTLTLSKADYEKHKVYACEVTHQGLSSPVTKSFNRGEC

SEQ ID NO: 17251 - protein, 107 aa, Artificial Sequence
  Description of Artificial Sequence: Synthetic polypeptide
  VL of XENP019363
DIQMTQSPAFLSVTPGEKVTITCQASQDIGNYLNWFQQKPDQTVKLLIYYTSRLHSGVPSRFSGSGSGTDYTFTISSLEAEDAATYFCQQGNTLPYTFGGGTKVEIK

SEQ ID NO: 17252 - protein, 11 aa, Artificial Sequence
  Description of Artificial Sequence: Synthetic peptide
  XENP019363 vlCDR1
QASQDIGNYLN

SEQ ID NO: 17253 - protein, 7 aa, Artificial Sequence
  Description of Artificial Sequence: Synthetic peptide
  XENP019363 vlCDR2
YTSRLHS

SEQ ID NO: 17254 - protein, 9 aa, Artificial Sequence
  Description of Artificial Sequence: Synthetic peptide
  XENP019363 vlCDR3
QQGNTLPYT

SEQ ID NO: 17255 - protein, 446 aa, Artificial Sequence
  Description of Artificial Sequence: Synthetic polypeptide
  XENP019364 2A11_H2L1_IgG1_PVA_/S267K Heavy Chain
EVQLVQSGAEVKKPGATVKISCKASGFNIKDYYMHWVQQAPGKGLEWMGWIDPENGDTEYAPKFQGRVTITADTSTNTAYMELSSLRSEDTAVYYCARGVRQALDYWGQGTLVTVSSASTKGPSVFPLAPSSKSTSGGTAALGCLVKDYFPEPVTVSWNSGALTSGVHTFPAVLQSSGLYSLSSVVTVPSSSLGTQTYICNVNHKPSDTKVDKKVEPKSCDKTHTCPPCPAPPVAGPSVFLFPPKPKDTLMISRTPEVTCVVVDVKHEDPEVKFNWYVDGVEVHNAKTKPREEEYNSTYRVVSVLTVLHQDWLNGKEYKCKVSNKALPAPIEKTISKAKGQPREPQVYTLPPSREEMTKNQVSLTCDVSGFYPSDIAVEWESDGQPENNYKTTPPVLDSDGSFFLYSKLTVDKSRWEQGDVFSCSVMHEALHNHYTQKSLSLSPGK

SEQ ID NO: 17256 - protein, 117 aa, Artificial Sequence
  Description of Artificial Sequence: Synthetic polypeptide
  VH of XENP019364
EVQLVQSGAEVKKPGATVKISCKASGFNIKDYYMHWVQQAPGKGLEWMGWIDPENGDTEYAPKFQGRVTITADTSTNTAYMELSSLRSEDTAVYYCARGVRQALDYWGQGTLVTVSS

SEQ ID NO: 17257 - protein, 5 aa, Artificial Sequence
  Description of Artificial Sequence: Synthetic peptide
  XENP019364 vhCDR1
DYYMH

SEQ ID NO: 17258 - protein, 17 aa, Artificial Sequence
  Description of Artificial Sequence: Synthetic peptide
  XENP019364 vhCDR2
WIDPENGDTEYAPKFQG

SEQ ID NO: 17259 - protein, 8 aa, Artificial Sequence
  Description of Artificial Sequence: Synthetic peptide
  XENP019364 vhCDR3
GVRQALDY

SEQ ID NO: 17260 - protein, 214 aa, Artificial Sequence; identical to SEQ ID NO: 17240
  Description of Artificial Sequence: Synthetic polypeptide
  XENP019364 2A11_H2L1_IgG1_PVA_/S267K Light Chain

SEQ ID NO: 17261 - protein, 107 aa, Artificial Sequence; identical to SEQ ID NO: 17241
  Description of Artificial Sequence: Synthetic polypeptide
  VL of XENP019364

SEQ ID NO: 17262 - protein, 11 aa, Artificial Sequence
  Description of Artificial Sequence: Synthetic peptide
  XENP019364 vlCDR1
RASQDIGNYLN

SEQ ID NO: 17263 - protein, 7 aa, Artificial Sequence
  Description of Artificial Sequence: Synthetic peptide
  XENP019364 vlCDR2
YTSRLHS

SEQ ID NO: 17264 - protein, 9 aa, Artificial Sequence
  Description of Artificial Sequence: Synthetic peptide
  XENP019364 vlCDR3
QQGNTLPYT

SEQ ID NO: 17265 - protein, 446 aa, Artificial Sequence; identical to SEQ ID NO: 17255
  Description of Artificial Sequence: Synthetic polypeptide
  XENP019365 2A11_H2L2_IgG1_PVA_/S267K Heavy Chain

SEQ ID NO: 17266 - protein, 117 aa, Artificial Sequence; identical to SEQ ID NO: 17256
  Description of Artificial Sequence: Synthetic polypeptide
  VH of XENP019365

SEQ ID NO: 17267 - protein, 5 aa, Artificial Sequence
  Description of Artificial Sequence: Synthetic peptide
  XENP019365 vhCDR1
DYYMH

SEQ ID NO: 17268 - protein, 17 aa, Artificial Sequence
  Description of Artificial Sequence: Synthetic peptide
  XENP019365 vhCDR2
WIDPENGDTEYAPKFQG

SEQ ID NO: 17269 - protein, 8 aa, Artificial Sequence
  Description of Artificial Sequence: Synthetic peptide
  XENP019365 vhCDR3
GVRQALDY

SEQ ID NO: 17270 - protein, 214 aa, Artificial Sequence; identical to SEQ ID NO: 17250
  Description of Artificial Sequence: Synthetic polypeptide
  XENP019365 2A11_H2L2_IgG1_PVA_/S267K Light Chain

SEQ ID NO: 17271 - protein, 107 aa, Artificial Sequence; identical to SEQ ID NO: 17251
  Description of Artificial Sequence: Synthetic polypeptide
  VL of XENP019365

SEQ ID NO: 17272 - protein, 11 aa, Artificial Sequence
  Description of Artificial Sequence: Synthetic peptide
  XENP019365 vlCDR1
QASQDIGNYLN

SEQ ID NO: 17273 - protein, 7 aa, Artificial Sequence
  Description of Artificial Sequence: Synthetic peptide
  XENP019365 vlCDR2
YTSRLHS

SEQ ID NO: 17274 - protein, 9 aa, Artificial Sequence
  Description of Artificial Sequence: Synthetic peptide
  XENP019365 vlCDR3
QQGNTLPYT

SEQ ID NO: 17275 - protein, 447 aa, Artificial Sequence
  Description of Artificial Sequence: Synthetic polypeptide
  XENP019366 2A11_H3L1_IgG1_PVA_/S267K Heavy Chain
EVQLVESGGGVVQPGGSLRLSCAASGFNIKDYYMHWVRQAPGKGLEWVSWIDPENGDTEYAPSVKGRFTISADTSKNSAYLQMNSLRTEDTALYYCYARGVRQALDYWGQGTLVTVSSASTKGPSVFPLAPSSKSTSGGTAALGCLVKDYFPEPVTVSWNSGALTSGVHTFPAVLQSSGLYSLSSVVTVPSSSLGTQTYICNVNHKPSDTKVDKKVEPKSCDKTHTCPPCPAPPVAGPSVFLFPPKPKDTLMISRTPEVTCVVVDVKHEDPEVKFNWYVDGVEVHNAKTKPREEEYNSTYRVVSVLTVLHQDWLNGKEYKCKVSNKALPAPIEKTISKAKGQPREPQVYTLPPSREEMTKNQVSLTCDVSGFYPSDIAVEWESDGQPENNYKTTPPVLDSDGSFFLYSKLTVDKSRWEQGDVFSCSVMHEALHNHYTQKSLSLSPGK

SEQ ID NO: 17276 - protein, 118 aa, Artificial Sequence
  Description of Artificial Sequence: Synthetic polypeptide
  VH of XENP019366
EVQLVESGGGVVQPGGSLRLSCAASGFNIKDYYMHWVRQAPGKGLEWVSWIDPENGDTEYAPSVKGRFTISADTSKNSAYLQMNSLRTEDTALYYCYARGVRQALDYWGQGTLVTVSS

SEQ ID NO: 17277 - protein, 5 aa, Artificial Sequence
  Description of Artificial Sequence: Synthetic peptide
  XENP019366 vhCDR1
DYYMH

SEQ ID NO: 17278 - protein, 17 aa, Artificial Sequence
  Description of Artificial Sequence: Synthetic peptide
  XENP019366 vhCDR2
WIDPENGDTEYAPSVKG

SEQ ID NO: 17279 - protein, 9 aa, Artificial Sequence
  Description of Artificial Sequence: Synthetic peptide
  XENP019366 vhCDR3
RGVRQALDY

SEQ ID NO: 17280 - protein, 214 aa, Artificial Sequence; identical to SEQ ID NO: 17240
  Description of Artificial Sequence: Synthetic polypeptide
  XENP019366 2A11_H3L1_IgG1_PVA_/S267K Light Chain

SEQ ID NO: 17281 - protein, 107 aa, Artificial Sequence; identical to SEQ ID NO: 17241
  Description of Artificial Sequence: Synthetic polypeptide
  VL of XENP019366

SEQ ID NO: 17282 - protein, 11 aa, Artificial Sequence
  Description of Artificial Sequence: Synthetic peptide
  XENP019366 vlCDR1
RASQDIGNYLN

SEQ ID NO: 17283 - protein, 7 aa, Artificial Sequence
  Description of Artificial Sequence: Synthetic peptide
  XENP019366 vlCDR2
YTSRLHS

SEQ ID NO: 17284 - protein, 9 aa, Artificial Sequence
  Description of Artificial Sequence: Synthetic peptide
  XENP019366 vlCDR3
QQGNTLPYT

SEQ ID NO: 17285 - protein, 447 aa, Artificial Sequence; identical to SEQ ID NO: 17275
  Description of Artificial Sequence: Synthetic polypeptide
  XENP019367 2A11_H3L2_IgG1_PVA_/S267K Heavy Chain

SEQ ID NO: 17286 - protein, 118 aa, Artificial Sequence; identical to SEQ ID NO: 17276
  Description of Artificial Sequence: Synthetic polypeptide
  VH of XENP019367

SEQ ID NO: 17287 - protein, 5 aa, Artificial Sequence
  Description of Artificial Sequence: Synthetic peptide
  XENP019367 vhCDR1
DYYMH

SEQ ID NO: 17288 - protein, 17 aa, Artificial Sequence
  Description of Artificial Sequence: Synthetic peptide
  XENP019367 vhCDR2
WIDPENGDTEYAPSVKG

SEQ ID NO: 17289 - protein, 9 aa, Artificial Sequence
  Description of Artificial Sequence: Synthetic peptide
  XENP019367 vhCDR3
RGVRQALDY

SEQ ID NO: 17290 - protein, 214 aa, Artificial Sequence; identical to SEQ ID NO: 17250
  Description of Artificial Sequence: Synthetic polypeptide
  XENP019367 2A11_H3L2_IgG1_PVA_/S267K Light Chain

SEQ ID NO: 17291 - protein, 107 aa, Artificial Sequence; identical to SEQ ID NO: 17251
  Description of Artificial Sequence: Synthetic polypeptide
  VL of XENP019367

SEQ ID NO: 17292 - protein, 11 aa, Artificial Sequence
  Description of Artificial Sequence: Synthetic peptide
  XENP019367 vlCDR1
QASQDIGNYLN

SEQ ID NO: 17293 - protein, 7 aa, Artificial Sequence
  Description of Artificial Sequence: Synthetic peptide
  XENP019367 vlCDR2
YTSRLHS

SEQ ID NO: 17294 - protein, 9 aa, Artificial Sequence
  Description of Artificial Sequence: Synthetic peptide
  XENP019367 vlCDR3
QQGNTLPYT

SEQ ID NO: 17295 - protein, 446 aa, Artificial Sequence
  Description of Artificial Sequence: Synthetic polypeptide
  XENP019368 2A11_H4L1_IgG1_PVA_/S267K Heavy Chain
EVQLVESGGGVVQPGGSLRLSCAASGFNIKDYYMHWVRQAPGKGLEWVSWIDPENGDTEYAPSVKGRFTISADTSKNSAYLQMNSLRTEDTALYYCARGVRQALDYWGQGTLVTVSSASTKGPSVFPLAPSSKSTSGGTAALGCLVKDYFPEPVTVSWNSGALTSGVHTFPAVLQSSGLYSLSSVVTVPSSSLGTQTYICNVNHKPSDTKVDKKVEPKSCDKTHTCPPCPAPPVAGPSVFLFPPKPKDTLMISRTPEVTCVVVDVKHEDPEVKFNWYVDGVEVHNAKTKPREEEYNSTYRVVSVLTVLHQDWLNGKEYKCKVSNKALPAPIEKTISKAKGQPREPQVYTLPPSREEMTKNQVSLTCDVSGFYPSDIAVEWESDGQPENNYKTTPPVLDSDGSFFLYSKLTVDKSRWEQGDVFSCSVMHEALHNHYTQKSLSLSPGK

SEQ ID NO: 17296 - protein, 117 aa, Artificial Sequence
  Description of Artificial Sequence: Synthetic polypeptide
  VH of XENP019368
EVQLVESGGGVVQPGGSLRLSCAASGFNIKDYYMHWVRQAPGKGLEWVSWIDPENGDTEYAPSVKGRFTISADTSKNSAYLQMNSLRTEDTALYYCARGVRQALDYWGQGTLVTVSS

SEQ ID NO: 17297 - protein, 5 aa, Artificial Sequence
  Description of Artificial Sequence: Synthetic peptide
  XENP019368 vhCDR1
DYYMH

SEQ ID NO: 17298 - protein, 17 aa, Artificial Sequence
  Description of Artificial Sequence: Synthetic peptide
  XENP019368 vhCDR2
WIDPENGDTEYAPSVKG

SEQ ID NO: 17299 - protein, 8 aa, Artificial Sequence
  Description of Artificial Sequence: Synthetic peptide
  XENP019368 vhCDR3
GVRQALDY

SEQ ID NO: 17300 - protein, 214 aa, Artificial Sequence; identical to SEQ ID NO: 17240
  Description of Artificial Sequence: Synthetic polypeptide
  XENP019368 2A11_H4L1_IgG1_PVA_/S267K Light Chain

SEQ ID NO: 17301 - protein, 107 aa, Artificial Sequence; identical to SEQ ID NO: 17241
  Description of Artificial Sequence: Synthetic polypeptide
  VL of XENP019368

SEQ ID NO: 17302 - protein, 11 aa, Artificial Sequence
  Description of Artificial Sequence: Synthetic peptide
  XENP019368 vlCDR1
RASQDIGNYLN

SEQ ID NO: 17303 - protein, 7 aa, Artificial Sequence
  Description of Artificial Sequence: Synthetic peptide
  XENP019368 vlCDR2
YTSRLHS

SEQ ID NO: 17304 - protein, 9 aa, Artificial Sequence
  Description of Artificial Sequence: Synthetic peptide
  XENP019368 vlCDR3
QQGNTLPYT

SEQ ID NO: 17305 - protein, 446 aa, Artificial Sequence; identical to SEQ ID NO: 17295
  Description of Artificial Sequence: Synthetic polypeptide
  XENP019369 2A11_H4L2_IgG1_PVA_/S267K Heavy Chain

SEQ ID NO: 17306 - protein, 117 aa, Artificial Sequence; identical to SEQ ID NO: 17296
  Description of Artificial Sequence: Synthetic polypeptide
  VH of XENP019369

SEQ ID NO: 17307 - protein, 5 aa, Artificial Sequence
  Description of Artificial Sequence: Synthetic peptide
  XENP019369 vhCDR1
DYYMH

SEQ ID NO: 17308 - protein, 17 aa, Artificial Sequence
  Description of Artificial Sequence: Synthetic peptide
  XENP019369 vhCDR2
WIDPENGDTEYAPSVKG

SEQ ID NO: 17309 - protein, 8 aa, Artificial Sequence
  Description of Artificial Sequence: Synthetic peptide
  XENP019369 vhCDR3
GVRQALDY

SEQ ID NO: 17310 - protein, 214 aa, Artificial Sequence; identical to SEQ ID NO: 17250
  Description of Artificial Sequence: Synthetic polypeptide
  XENP019369 2A11_H4L2_IgG1_PVA_/S267K Light Chain

SEQ ID NO: 17311 - protein, 107 aa, Artificial Sequence; identical to SEQ ID NO: 17251
  Description of Artificial Sequence: Synthetic polypeptide
  VL of XENP019369

SEQ ID NO: 17312 - protein, 11 aa, Artificial Sequence
  Description of Artificial Sequence: Synthetic peptide
  XENP019369 vlCDR1
QASQDIGNYLN

SEQ ID NO: 17313 - protein, 7 aa, Artificial Sequence
  Description of Artificial Sequence: Synthetic peptide
  XENP019369 vlCDR2
YTSRLHS

SEQ ID NO: 17314 - protein, 9 aa, Artificial Sequence
  Description of Artificial Sequence: Synthetic peptide
  XENP019369 vlCDR3
QQGNTLPYT

SEQ ID NO: 17315 - protein, 445 aa, Artificial Sequence
  Description of Artificial Sequence: Synthetic polypeptide
  XENP019370 3F9_H1_7A6_L2_IgG1_PVA_/S267K Heavy Chain
QVQLQESGPGLVKPSQTLSLTCTVSDFSITSAYYWNWIRQPPGKKLEWIGYISYDSNYYNPSLKSRVTISRDTSKNQFSLKLSSVTAADTAVYYCARGGITTFDYWGQGTLVTVSSASTKGPSVFPLAPSSKSTSGGTAALGCLVKDYFPEPVTVSWNSGALTSGVHTFPAVLQSSGLYSLSSVVTVPSSSLGTQTYICNVNHKPSDTKVDKKVEPKSCDKTHTCPPCPAPPVAGPSVFLFPPKPKDTLMISRTPEVTCVVVDVKHEDPEVKFNWYVDGVEVHNAKTKPREEEYNSTYRVVSVLTVLHQDWLNGKEYKCKVSNKALPAPIEKTISKAKGQPREPQVYTLPPSREEMTKNQVSLTCDVSGFYPSDIAVEWESDGQPENNYKTTPPVLDSDGSFFLYSKLTVDKSRWEQGDVFSCSVMHEALHNHYTQKSLSLSPGK

SEQ ID NO: 17316 - protein, 116 aa, Artificial Sequence
  Description of Artificial Sequence: Synthetic polypeptide
  VH of XENP019370
QVQLQESGPGLVKPSQTLSLTCTVSDFSITSAYYWNWIRQPPGKKLEWIGYISYDSNYYNPSLKSRVTISRDTSKNQFSLKLSSVTAADTAVYYCARGGITTFDYWGQGTLVTVSS

SEQ ID NO: 17317 - protein, 6 aa, Artificial Sequence
  Description of Artificial Sequence: Synthetic peptide
  XENP019370 vhCDR1
SAYYWN

SEQ ID NO: 17318 - protein, 15 aa, Artificial Sequence
  Description of Artificial Sequence: Synthetic peptide
  XENP019370 vhCDR2
YISYDSNYYNPSLKS

SEQ ID NO: 17319 - protein, 8 aa, Artificial Sequence
  Description of Artificial Sequence: Synthetic peptide
  XENP019370 vhCDR3
GGITTFDY

SEQ ID NO: 17320 - protein, 218 aa, Artificial Sequence
  Description of Artificial Sequence: Synthetic polypeptide
  XENP019370 3F9_H1_7A6_L2_IgG1_PVA_/S267K Light Chain
DIVLTQSPATLSLSPGERATLSCRASQSVDYDGDSYMNWYQQKPGQPPRLLIYAASNLESGIPARFSGSGSGTDFTLTISSLEPEDFAVYYCQQSNEDPRTFGGGTKVEIKRTVAAPSVFIFPPSDEQLKSGTASVVCLLNNFYPREAKVQWKVDNALQSGNSQESVTEQDSKDSTYSLSSTLTLSKADYEKHKVYACEVTHQGLSSPVTKSFNRGEC

SEQ ID NO: 17321 - protein, 111 aa, Artificial Sequence
  Description of Artificial Sequence: Synthetic polypeptide
  VL of XENP019370
DIVLTQSPATLSLSPGERATLSCRASQSVDYDGDSYMNWYQQKPGQPPRLLIYAASNLESGIPARFSGSGSGTDFTLTISSLEPEDFAVYYCQQSNEDPRTFGGGTKVEIK

SEQ ID NO: 17322 - protein, 15 aa, Artificial Sequence
  Description of Artificial Sequence: Synthetic peptide
  XENP019370 vlCDR1
RASQSVDYDGDSYMN

SEQ ID NO: 17323 - protein, 7 aa, Artificial Sequence
  Description of Artificial Sequence: Synthetic peptide
  XENP019370 vlCDR2
AASNLES

SEQ ID NO: 17324 - protein, 9 aa, Artificial Sequence
  Description of Artificial Sequence: Synthetic peptide
  XENP019370 vlCDR3
QQSNEDPRT

SEQ ID NO: 17325 - protein, 444 aa, Artificial Sequence
  Description of Artificial Sequence: Synthetic polypeptide
  XENP019371 6A6_H1L1_IgG1_PVA_/S267K Heavy Chain
EVQLVQSGAEVKKPGATVKISCKASGFNIKDYYMHWVQQAPGKGLEWMGWIDPENGDTEYAPKFQGRVTITADTSTNTAYMELSSLRSEDTAVYYCARAAAMDYWGQGTLVTVSSASTKGPSVFPLAPSSKSTSGGTAALGCLVKDYFPEPVTVSWNSGALTSGVHTFPAVLQSSGLYSLSSVVTVPSSSLGTQTYICNVNHKPSDTKVDKKVEPKSCDKTHTCPPCPAPPVAGPSVFLFPPKPKDTLMISRTPEVTCVVVDVKHEDPEVKFNWYVDGVEVHNAKTKPREEEYNSTYRVVSVLTVLHQDWLNGKEYKCKVSNKALPAPIEKTISKAKGQPREPQVYTLPPSREEMTKNQVSLTCDVSGFYPSDIAVEWESDGQPENNYKTTPPVLDSDGSFFLYSKLTVDKSRWEQGDVFSCSVMHEALHNHYTQKSLSLSPGK

SEQ ID NO: 17326 - protein, 115 aa, Artificial Sequence
  Description of Artificial Sequence: Synthetic polypeptide
  VH of XENP019371
EVQLVQSGAEVKKPGATVKISCKASGFNIKDYYMHWVQQAPGKGLEWMGWIDPENGDTEYAPKFQGRVTITADTSTNTAYMELSSLRSEDTAVYYCARAAAMDYWGQGTLVTVSS

SEQ ID NO: 17327 - protein, 5 aa, Artificial Sequence
  Description of Artificial Sequence: Synthetic peptide
  XENP019371 vhCDR1
DYYMH

SEQ ID NO: 17328 - protein, 17 aa, Artificial Sequence
  Description of Artificial Sequence: Synthetic peptide
  XENP019371 vhCDR2
WIDPENGDTEYAPKFQG

SEQ ID NO: 17329 - protein, 6 aa, Artificial Sequence
  Description of Artificial Sequence: Synthetic peptide
  XENP019371 vhCDR3
AAAMDY

SEQ ID NO: 17330 - protein, 214 aa, Artificial Sequence
  Description of Artificial Sequence: Synthetic polypeptide
  XENP019371 6A6_H1L1_IgG1_PVA_/S267K Light Chain
DIQMTQSPSSLSASVGDRVTITCRASQDISNYLNWFQQKPGKTFKLLIYYTSRLHSGVPSRFSGSGSGTDYTLTISSLQPEDFATYFCQQGNTLPYTFGGGTKVEIKRTVAAPSVFIFPPSDEQLKSGTASVVCLLNNFYPREAKVQWKVDNALQSGNSQESVTEQDSKDSTYSLSSTLTLSKADYEKHKVYACEVTHQGLSSPVTKSFNRGEC

SEQ ID NO: 17331 - protein, 107 aa, Artificial Sequence
  Description of Artificial Sequence: Synthetic polypeptide
  VL of XENP019371
DIQMTQSPSSLSASVGDRVTITCRASQDISNYLNWFQQKPGKTFKLLIYYTSRLHSGVPSRFSGSGSGTDYTLTISSLQPEDFATYFCQQGNTLPYTFGGGTKVEIK

SEQ ID NO: 17332 - protein, 11 aa, Artificial Sequence
  Description of Artificial Sequence: Synthetic peptide
  XENP019371 vlCDR1
RASQDISNYLN

SEQ ID NO: 17333 - protein, 7 aa, Artificial Sequence
  Description of Artificial Sequence: Synthetic peptide
  XENP019371 vlCDR2
YTSRLHS

SEQ ID NO: 17334 - protein, 9 aa, Artificial Sequence
  Description of Artificial Sequence: Synthetic peptide
  XENP019371 vlCDR3
QQGNTLPYT

SEQ ID NO: 17335 - protein, 444 aa, Artificial Sequence
  Description of Artificial Sequence: Synthetic polypeptide
  XENP019372 9E7_H0L0_IgG1_PVA_/S267K Heavy Chain
QVQLKQSGPGLVQPSQSLSITCTVSGFSLTRYGIHWVRQSPGKGLEWLGVIWSGVTDYNAAFISRLSISKDNSKSQVFFKLNSLQANDTAIYYCARPYYYAMDYWGQGTSVTVSSASTKGPSVFPLAPSSKSTSGGTAALGCLVKDYFPEPVTVSWNSGALTSGVHTFPAVLQSSGLYSLSSVVTVPSSSLGTQTYICNVNHKPSDTKVDKKVEPKSCDKTHTCPPCPAPPVAGPSVFLFPPKPKDTLMISRTPEVTCVVVDVKHEDPEVKFNWYVDGVEVHNAKTKPREEEYNSTYRVVSVLTVLHQDWLNGKEYKCKVSNKALPAPIEKTISKAKGQPREPQVYTLPPSREEMTKNQVSLTCDVSGFYPSDIAVEWESDGQPENNYKTTPPVLDSDGSFFLYSKLTVDKSRWEQGDVFSCSVMHEALHNHYTQKSLSLSPGK

SEQ ID NO: 17336 - protein, 115 aa, Artificial Sequence
  Description of Artificial Sequence: Synthetic polypeptide
  VH of XENP019372
QVQLKQSGPGLVQPSQSLSITCTVSGFSLTRYGIHWVRQSPGKGLEWLGVIWSGVTDYNAAFISRLSISKDNSKSQVFFKLNSLQANDTAIYYCARPYYYAMDYWGQGTSVTVSS

SEQ ID NO: 17337 - protein, 5 aa, Artificial Sequence
  Description of Artificial Sequence: Synthetic peptide
  XENP019372 vhCDR1
RYGIH

SEQ ID NO: 17338 - protein, 15 aa, Artificial Sequence
  Description of Artificial Sequence: Synthetic peptide
  XENP019372 vhCDR2
VIWSGVTDYNAAFIS

SEQ ID NO: 17339 - protein, 8 aa, Artificial Sequence
  Description of Artificial Sequence: Synthetic peptide
  XENP019372 vhCDR3
PYYYAMDY

SEQ ID NO: 17340 - protein, 214 aa, Artificial Sequence
  Description of Artificial Sequence: Synthetic polypeptide
  XENP019372 9E7_H0L0_IgG1_PVA_/S267K Light Chain
DIQMTQSPASLSVSVGETVTITCRASENIYSNLAWYQQKQGKSPQLLVYAATTLADGVPSRFSGSGSGTQYSLKINSLQSEDFGSYYCQHFWGTPWTFGGGTKLEIKRTVAAPSVFIFPPSDEQLKSGTASVVCLLNNFYPREAKVQWKVDNALQSGNSQESVTEQDSKDSTYSLSSTLTLSKADYEKHKVYACEVTHQGLSSPVTKSFNRGEC

SEQ ID NO: 17341 - protein, 107 aa, Artificial Sequence
  Description of Artificial Sequence: Synthetic polypeptide
  VL of XENP019372
DIQMTQSPASLSVSVGETVTITCRASENIYSNLAWYQQKQGKSPQLLVYAATTLADGVPSRFSGSGSGTQYSLKINSLQSEDFGSYYCQHFWGTPWTFGGGTKLEIK

SEQ ID NO: 17342 - protein, 11 aa, Artificial Sequence
  Description of Artificial Sequence: Synthetic peptide
  XENP019372 vlCDR1
RASENIYSNLA

SEQ ID NO: 17343 - protein, 7 aa, Artificial Sequence
  Description of Artificial Sequence: Synthetic peptide
  XENP019372 vlCDR2
AATTLAD

SEQ ID NO: 17344 - protein, 9 aa, Artificial Sequence
  Description of Artificial Sequence: Synthetic peptide
  XENP019372 vlCDR3
QHFWGTPWT

SEQ ID NO: 17345 - protein, 444 aa, Artificial Sequence
  Description of Artificial Sequence: Synthetic polypeptide
  XENP019373 9E7_H1L1_IgG1_PVA_/S267K Heavy Chain
QVQLVQSGAEVKKPGASVKVSCKVSGFSLTRYGIHWVRQAPGQGLEWMGVIWSGVTDYNAKFQGRVTMTKDNSKSTVYMELSSLRSEDTAVYYCARPYYYAMDYWGQGTLVTVSSASTKGPSVFPLAPSSKSTSGGTAALGCLVKDYFPEPVTVSWNSGALTSGVHTFPAVLQSSGLYSLSSVVTVPSSSLGTQTYICNVNHKPSDTKVDKKVEPKSCDKTHTCPPCPAPPVAGPSVFLFPPKPKDTLMISRTPEVTCVVVDVKHEDPEVKFNWYVDGVEVHNAKTKPREEEYNSTYRVVSVLTVLHQDWLNGKEYKCKVSNKALPAPIEKTISKAKGQPREPQVYTLPPSREEMTKNQVSLTCDVSGFYPSDIAVEWESDGQPENNYKTTPPVLDSDGSFFLYSKLTVDKSRWEQGDVFSCSVMHEALHNHYTQKSLSLSPGK

SEQ ID NO: 17346 - protein, 115 aa, Artificial Sequence
  Description of Artificial Sequence: Synthetic polypeptide
  VH of XENP019373
QVQLVQSGAEVKKPGASVKVSCKVSGFSLTRYGIHWVRQAPGQGLEWMGVIWSGVTDYNAKFQGRVTMTKDNSKSTVYMELSSLRSEDTAVYYCARPYYYAMDYWGQGTLVTVSS

SEQ ID NO: 17347 - protein, 5 aa, Artificial Sequence
  Description of Artificial Sequence: Synthetic peptide
  XENP019373 vhCDR1
RYGIH

SEQ ID NO: 17348 - protein, 15 aa, Artificial Sequence
  Description of Artificial Sequence: Synthetic peptide
  XENP019373 vhCDR2
VIWSGVTDYNAKFQG

SEQ ID NO: 17349 - protein, 8 aa, Artificial Sequence
  Description of Artificial Sequence: Synthetic peptide
  XENP019373 vhCDR3
PYYYAMDY

SEQ ID NO: 17350 - protein, 214 aa, Artificial Sequence
  Description of Artificial Sequence: Synthetic polypeptide
  XENP019373 9E7_H1L1_IgG1_PVA_/S267K Light Chain
DIQMTQSPSSLSASVGDRVTITCRASENIYSNLAWYQQKPGKSPKLLVYAATTLADGVPSRFSGSGSGTDYTLTISSLQPEDFATYYCQHFWGTPWTFGGGTKVEIKRTVAAPSVFIFPPSDEQLKSGTASVVCLLNNFYPREAKVQWKVDNALQSGNSQESVTEQDSKDSTYSLSSTLTLSKADYEKHKVYACEVTHQGLSSPVTKSFNRGEC

SEQ ID NO: 17351 - protein, 107 aa, Artificial Sequence
  Description of Artificial Sequence: Synthetic polypeptide
  VL of XENP019373
DIQMTQSPSSLSASVGDRVTITCRASENIYSNLAWYQQKPGKSPKLLVYAATTLADGVPSRFSGSGSGTDYTLTISSLQPEDFATYYCQHFWGTPWTFGGGTKVEIK

SEQ ID NO: 17352 - protein, 11 aa, Artificial Sequence
  Description of Artificial Sequence: Synthetic peptide
  XENP019373 vlCDR1
RASENIYSNLA

SEQ ID NO: 17353 - protein, 7 aa, Artificial Sequence
  Description of Artificial Sequence: Synthetic peptide
  XENP019373 vlCDR2
AATTLAD

SEQ ID NO: 17354 - protein, 9 aa, Artificial Sequence
  Description of Artificial Sequence: Synthetic peptide
  XENP019373 vlCDR3
QHFWGTPWT

SEQ ID NO: 17355 - protein, 444 aa, Artificial Sequence; identical to SEQ ID NO: 17345
  Description of Artificial Sequence: Synthetic polypeptide
  XENP019374 9E7_H1L2_IgG1_PVA_/S267K Heavy Chain

SEQ ID NO: 17356 - protein, 115 aa, Artificial Sequence; identical to SEQ ID NO: 17346
  Description of Artificial Sequence: Synthetic polypeptide
  VH of XENP019374

SEQ ID NO: 17357 - protein, 5 aa, Artificial Sequence
  Description of Artificial Sequence: Synthetic peptide
  XENP019374 vhCDR1
RYGIH

SEQ ID NO: 17358 - protein, 15 aa, Artificial Sequence
  Description of Artificial Sequence: Synthetic peptide
  XENP019374 vhCDR2
VIWSGVTDYNAKFQG

SEQ ID NO: 17359 - protein, 8 aa, Artificial Sequence
  Description of Artificial Sequence: Synthetic peptide
  XENP019374 vhCDR3
PYYYAMDY

SEQ ID NO: 17360 - protein, 214 aa, Artificial Sequence
  Description of Artificial Sequence: Synthetic polypeptide
  XENP019374 9E7_H1L2_IgG1_PVA_/S267K Light Chain
DIQMTQSPATLSVSPGERATLSCRASENIYSNLAWYQQKPGQSPRLLVYAATTLADGVPSRFSGSGSGTEYTLTISSLQSEDFAVYYCQHFWGTPWTFGGGTKVEIKRTVAAPSVFIFPPSDEQLKSGTASVVCLLNNFYPREAKVQWKVDNALQSGNSQESVTEQDSKDSTYSLSSTLTLSKADYEKHKVYACEVTHQGLSSPVTKSFNRGEC

SEQ ID NO: 17361 - protein, 107 aa, Artificial Sequence
  Description of Artificial Sequence: Synthetic polypeptide
  VL of XENP019374
DIQMTQSPATLSVSPGERATLSCRASENIYSNLAWYQQKPGQSPRLLVYAATTLADGVPSRFSGSGSGTEYTLTISSLQSEDFAVYYCQHFWGTPWTFGGGTKVEIK

SEQ ID NO: 17362 - protein, 11 aa, Artificial Sequence
  Description of Artificial Sequence: Synthetic peptide
  XENP019374 vlCDR1
RASENIYSNLA

SEQ ID NO: 17363 - protein, 7 aa, Artificial Sequence
  Description of Artificial Sequence: Synthetic peptide
  XENP019374 vlCDR2
AATTLAD

SEQ ID NO: 17364 - protein, 9 aa, Artificial Sequence
  Description of Artificial Sequence: Synthetic peptide
  XENP019374 vlCDR3
QHFWGTPWT

SEQ ID NO: 17365 - protein, 444 aa, Artificial Sequence
  Description of Artificial Sequence: Synthetic polypeptide
  XENP019375 9E7_H2L1_IgG1_PVA_/S267K Heavy Chain
QVTLKESGPVLVKPTETLTLTCTVSGFSLTRYGIHWVRQPPGKGLEWLAVIWSGVTDYNPSLKSRLTISKDNSKSQVVLTMTNMDPVDTATYYCARPYYYAMDYWGQGTLVTVSSASTKGPSVFPLAPSSKSTSGGTAALGCLVKDYFPEPVTVSWNSGALTSGVHTFPAVLQSSGLYSLSSVVTVPSSSLGTQTYICNVNHKPSDTKVDKKVEPKSCDKTHTCPPCPAPPVAGPSVFLFPPKPKDTLMISRTPEVTCVVVDVKHEDPEVKFNWYVDGVEVHNAKTKPREEEYNSTYRVVSVLTVLHQDWLNGKEYKCKVSNKALPAPIEKTISKAKGQPREPQVYTLPPSREEMTKNQVSLTCDVSGFYPSDIAVEWESDGQPENNYKTTPPVLDSDGSFFLYSKLTVDKSRWEQGDVFSCSVMHEALHNHYTQKSLSLSPGK

SEQ ID NO: 17366 - protein, 115 aa, Artificial Sequence
  Description of Artificial Sequence: Synthetic polypeptide
  VH of XENP019375
QVTLKESGPVLVKPTETLTLTCTVSGFSLTRYGIHWVRQPPGKGLEWLAVIWSGVTDYNPSLKSRLTISKDNSKSQVVLTMTNMDPVDTATYYCARPYYYAMDYWGQGTLVTVSS

SEQ ID NO: 17367 - protein, 5 aa, Artificial Sequence
  Description of Artificial Sequence: Synthetic peptide
  XENP019375 vhCDR1
RYGIH

SEQ ID NO: 17368 - protein, 15 aa, Artificial Sequence
  Description of Artificial Sequence: Synthetic peptide
  XENP019375 vhCDR2
VIWSGVTDYNPSLKS

SEQ ID NO: 17369 - protein, 8 aa, Artificial Sequence
  Description of Artificial Sequence: Synthetic peptide
  XENP019375 vhCDR3
PYYYAMDY

SEQ ID NO: 17370 - protein, 214 aa, Artificial Sequence; identical to SEQ ID NO: 17350
  Description of Artificial Sequence: Synthetic polypeptide
  XENP019375 9E7_H2L1_IgG1_PVA_/S267K Light Chain

SEQ ID NO: 17371 - protein, 107 aa, Artificial Sequence; identical to SEQ ID NO: 17351
  Description of Artificial Sequence: Synthetic polypeptide
  VL of XENP019375

SEQ ID NO: 17372 - protein, 11 aa, Artificial Sequence
  Description of Artificial Sequence: Synthetic peptide
  XENP019375 vlCDR1
RASENIYSNLA

SEQ ID NO: 17373 - protein, 7 aa, Artificial Sequence
  Description of Artificial Sequence: Synthetic peptide
  XENP019375 vlCDR2
AATTLAD

SEQ ID NO: 17374 - protein, 9 aa, Artificial Sequence
  Description of Artificial Sequence: Synthetic peptide
  XENP019375 vlCDR3
QHFWGTPWT

SEQ ID NO: 17375 - protein, 444 aa, Artificial Sequence; identical to SEQ ID NO: 17365
  Description of Artificial Sequence: Synthetic polypeptide
  XENP019376 9E7_H2L2_IgG1_PVA_/S267K Heavy Chain

SEQ ID NO: 17376 - protein, 115 aa, Artificial Sequence; identical to SEQ ID NO: 17366
  Description of Artificial Sequence: Synthetic polypeptide
  VH of XENP019376

SEQ ID NO: 17377 - protein, 5 aa, Artificial Sequence
  Description of Artificial Sequence: Synthetic peptide
  XENP019376 vhCDR1
RYGIH

SEQ ID NO: 17378 - protein, 15 aa, Artificial Sequence
  Description of Artificial Sequence: Synthetic peptide
  XENP019376 vhCDR2
VIWSGVTDYNPSLKS

SEQ ID NO: 17379 - protein, 8 aa, Artificial Sequence
  Description of Artificial Sequence: Synthetic peptide
  XENP019376 vhCDR3
PYYYAMDY

SEQ ID NO: 17380 - protein, 214 aa, Artificial Sequence; identical to SEQ ID NO: 17360
  Description of Artificial Sequence: Synthetic polypeptide
  XENP019376 9E7_H2L2_IgG1_PVA_/S267K Light Chain

SEQ ID NO: 17381 - protein, 107 aa, Artificial Sequence; identical to SEQ ID NO: 17361
  Description of Artificial Sequence: Synthetic polypeptide
  VL of XENP019376

SEQ ID NO: 17382 - protein, 11 aa, Artificial Sequence
  Description of Artificial Sequence: Synthetic peptide
  XENP019376 vlCDR1
RASENIYSNLA

SEQ ID NO: 17383 - protein, 7 aa, Artificial Sequence
  Description of Artificial Sequence: Synthetic peptide
  XENP019376 vlCDR2
AATTLAD

SEQ ID NO: 17384 - protein, 9 aa, Artificial Sequence
  Description of Artificial Sequence: Synthetic peptide
  XENP019376 vlCDR3
QHFWGTPWT

SEQ ID NO: 17385 - protein, 444 aa, Artificial Sequence
  Description of Artificial Sequence: Synthetic polypeptide
  XENP019377 9E7_H3L1_IgG1_PVA_/S267K Heavy Chain
EVQLVESGGGLVQPGGSLRLSCAVSGFSLTRYGIHWVRQAPGKGLEWVSVIWSGVTDYNPSVKGRFTISKDNSKSTVYLQMNSLRAEDTAVYYCARPYYYAMDYWGQGTLVTVSSASTKGPSVFPLAPSSKSTSGGTAALGCLVKDYFPEPVTVSWNSGALTSGVHTFPAVLQSSGLYSLSSVVTVPSSSLGTQTYICNVNHKPSDTKVDKKVEPKSCDKTHTCPPCPAPPVAGPSVFLFPPKPKDTLMISRTPEVTCVVVDVKHEDPEVKFNWYVDGVEVHNAKTKPREEEYNSTYRVVSVLTVLHQDWLNGKEYKCKVSNKALPAPIEKTISKAKGQPREPQVYTLPPSREEMTKNQVSLTCDVSGFYPSDIAVEWESDGQPENNYKTTPPVLDSDGSFFLYSKLTVDKSRWEQGDVFSCSVMHEALHNHYTQKSLSLSPGK

SEQ ID NO: 17386 - protein, 115 aa, Artificial Sequence
  Description of Artificial Sequence: Synthetic polypeptide
  VH of XENP019377
EVQLVESGGGLVQPGGSLRLSCAVSGFSLTRYGIHWVRQAPGKGLEWVSVIWSGVTDYNPSVKGRFTISKDNSKSTVYLQMNSLRAEDTAVYYCARPYYYAMDYWGQGTLVTVSS

SEQ ID NO: 17387 - protein, 5 aa, Artificial Sequence
  Description of Artificial Sequence: Synthetic peptide
  XENP019377 vhCDR1
RYGIH

SEQ ID NO: 17388 - protein, 15 aa, Artificial Sequence
  Description of Artificial Sequence: Synthetic peptide
  XENP019377 vhCDR2
VIWSGVTDYNPSVKG

SEQ ID NO: 17389 - protein, 8 aa, Artificial Sequence
  Description of Artificial Sequence: Synthetic peptide
  XENP019377 vhCDR3
PYYYAMDY

SEQ ID NO: 17390 - protein, 214 aa, Artificial Sequence; identical to SEQ ID NO: 17350
  Description of Artificial Sequence: Synthetic polypeptide
  XENP019377 9E7_H3L1_IgG1_PVA_/S267K Light Chain

SEQ ID NO: 17391 - protein, 107 aa, Artificial Sequence; identical to SEQ ID NO: 17351
  Description of Artificial Sequence: Synthetic polypeptide
  VL of XENP019377

SEQ ID NO: 17392 - protein, 11 aa, Artificial Sequence
  Description of Artificial Sequence: Synthetic peptide
  XENP019377 vlCDR1
RASENIYSNLA

SEQ ID NO: 17393 - protein, 7 aa, Artificial Sequence
  Description of Artificial Sequence: Synthetic peptide
  XENP019377 vlCDR2
AATTLAD

SEQ ID NO: 17394 - protein, 9 aa, Artificial Sequence
  Description of Artificial Sequence: Synthetic peptide
  XENP019377 vlCDR3
QHFWGTPWT

SEQ ID NO: 17395 - protein, 444 aa, Artificial Sequence; identical to SEQ ID NO: 17385
  Description of Artificial Sequence: Synthetic polypeptide
  XENP019378 9E7_H3L2_IgG1_PVA_/S267K Heavy Chain

SEQ ID NO: 17396 - protein, 115 aa, Artificial Sequence; identical to SEQ ID NO: 17386
  Description of Artificial Sequence: Synthetic polypeptide
  VH of XENP019378

SEQ ID NO: 17397 - protein, 5 aa, Artificial Sequence
  Description of Artificial Sequence: Synthetic peptide
  XENP019378 vhCDR1
RYGIH

SEQ ID NO: 17398 - protein, 15 aa, Artificial Sequence
  Description of Artificial Sequence: Synthetic peptide
  XENP019378 vhCDR2
VIWSGVTDYNPSVKG

SEQ ID NO: 17399 - protein, 8 aa, Artificial Sequence
  Description of Artificial Sequence: Synthetic peptide
  XENP019378 vhCDR3
PYYYAMDY

SEQ ID NO: 17400 - protein, 214 aa, Artificial Sequence; identical to SEQ ID NO: 17360
  Description of Artificial Sequence: Synthetic polypeptide
  XENP019378 9E7_H3L2_IgG1_PVA_/S267K Light Chain

SEQ ID NO: 17401 - protein, 107 aa, Artificial Sequence; identical to SEQ ID NO: 17361
  Description of Artificial Sequence: Synthetic polypeptide
  VL of XENP019378

SEQ ID NO: 17402 - protein, 11 aa, Artificial Sequence
  Description of Artificial Sequence: Synthetic peptide
  XENP019378 vlCDR1
RASENIYSNLA

SEQ ID NO: 17403 - protein, 7 aa, Artificial Sequence
  Description of Artificial Sequence: Synthetic peptide
  XENP019378 vlCDR2
AATTLAD

SEQ ID NO: 17404 - protein, 9 aa, Artificial Sequence
  Description of Artificial Sequence: Synthetic peptide
  XENP019378 vlCDR3
QHFWGTPWT

SEQ ID NO: 17405 - protein, 444 aa, Artificial Sequence
  Description of Artificial Sequence: Synthetic polypeptide
  XENP019379 9E7_H4L1_IgG1_PVA_/S267K Heavy Chain
EVQLVQSGAEVKKPGESLKISCKVSGFSLTRYGIHWVRQMPGKGLEWMGVIWSGVTDYNPSFQGQVTISKDNSISTVYLQWSSLKASDTAMYYCARPYYYAMDYWGQGTLVTVSSASTKGPSVFPLAPSSKSTSGGTAALGCLVKDYFPEPVTVSWNSGALTSGVHTFPAVLQSSGLYSLSSVVTVPSSSLGTQTYICNVNHKPSDTKVDKKVEPKSCDKTHTCPPCPAPPVAGPSVFLFPPKPKDTLMISRTPEVTCVVVDVKHEDPEVKFNWYVDGVEVHNAKTKPREEEYNSTYRVVSVLTVLHQDWLNGKEYKCKVSNKALPAPIEKTISKAKGQPREPQVYTLPPSREEMTKNQVSLTCDVSGFYPSDIAVEWESDGQPENNYKTTPPVLDSDGSFFLYSKLTVDKSRWEQGDVFSCSVMHEALHNHYTQKSLSLSPGK

SEQ ID NO: 17406 - protein, 115 aa, Artificial Sequence
  Description of Artificial Sequence: Synthetic polypeptide
  VH of XENP019379
EVQLVQSGAEVKKPGESLKISCKVSGFSLTRYGIHWVRQMPGKGLEWMGVIWSGVTDYNPSFQGQVTISKDNSISTVYLQWSSLKASDTAMYYCARPYYYAMDYWGQGTLVTVSS

SEQ ID NO: 17407 - protein, 5 aa, Artificial Sequence
  Description of Artificial Sequence: Synthetic peptide
  XENP019379 vhCDR1
RYGIH

SEQ ID NO: 17408 - protein, 15 aa, Artificial Sequence
  Description of Artificial Sequence: Synthetic peptide
  XENP019379 vhCDR2
VIWSGVTDYNPSFQG

SEQ ID NO: 17409 - protein, 8 aa, Artificial Sequence
  Description of Artificial Sequence: Synthetic peptide
  XENP019379 vhCDR3
PYYYAMDY

SEQ ID NO: 17410 - protein, 214 aa, Artificial Sequence; identical to SEQ ID NO: 17350
  Description of Artificial Sequence: Synthetic polypeptide
  XENP019379 9E7_H4L1_IgG1_PVA_/S267K Light Chain

SEQ ID NO: 17411 - protein, 107 aa, Artificial Sequence; identical to SEQ ID NO: 17351
  Description of Artificial Sequence: Synthetic polypeptide
  VL of XENP019379

SEQ ID NO: 17412 - protein, 11 aa, Artificial Sequence
  Description of Artificial Sequence: Synthetic peptide
  XENP019379 vlCDR1
RASENIYSNLA

SEQ ID NO: 17413 - protein, 7 aa, Artificial Sequence
  Description of Artificial Sequence: Synthetic peptide
  XENP019379 vlCDR2
AATTLAD

SEQ ID NO: 17414 - protein, 9 aa, Artificial Sequence
  Description of Artificial Sequence: Synthetic peptide
  XENP019379 vlCDR3
QHFWGTPWT

SEQ ID NO: 17415 - protein, 444 aa, Artificial Sequence; identical to SEQ ID NO: 17405
  Description of Artificial Sequence: Synthetic polypeptide
  XENP019380 9E7_H4L2_IgG1_PVA_/S267K Heavy Chain

SEQ ID NO: 17416 - protein, 115 aa, Artificial Sequence; identical to SEQ ID NO: 17406
  Description of Artificial Sequence: Synthetic polypeptide
  VH of XENP019380

SEQ ID NO: 17417 - protein, 5 aa, Artificial Sequence
  Description of Artificial Sequence: Synthetic peptide
  XENP019380 vhCDR1
RYGIH

SEQ ID NO: 17418 - protein, 15 aa, Artificial Sequence
  Description of Artificial Sequence: Synthetic peptide
  XENP019380 vhCDR2
VIWSGVTDYNPSFQG

SEQ ID NO: 17419 - protein, 8 aa, Artificial Sequence
  Description of Artificial Sequence: Synthetic peptide
  XENP019380 vhCDR3
PYYYAMDY

SEQ ID NO: 17420 - protein, 214 aa, Artificial Sequence; identical to SEQ ID NO: 17360
  Description of Artificial Sequence: Synthetic polypeptide
  XENP019380 9E7_H4L2_IgG1_PVA_/S267K Light Chain

SEQ ID NO: 17421 - protein, 107 aa, Artificial Sequence; identical to SEQ ID NO: 17361
  Description of Artificial Sequence: Synthetic polypeptide
  VL of XENP019380

SEQ ID NO: 17422 - protein, 11 aa, Artificial Sequence
  Description of Artificial Sequence: Synthetic peptide
  XENP019380 vlCDR1
RASENIYSNLA

SEQ ID NO: 17423 - protein, 7 aa, Artificial Sequence
  Description of Artificial Sequence: Synthetic peptide
  XENP019380 vlCDR2
AATTLAD

SEQ ID NO: 17424 - protein, 9 aa, Artificial Sequence
  Description of Artificial Sequence: Synthetic peptide
  XENP019380 vlCDR3
QHFWGTPWT

SEQ ID NO: 17425 - protein, 447 aa, Artificial Sequence
  Description of Artificial Sequence: Synthetic polypeptide
  XENP019381 2A12_H1L1_IgG1_PVA_/S267K Heavy Chain
QIQLVQSGSELKKPGASVKVSCKASGYTFTNYGMNWVRQAPGQGLEWMGWINTYTGEPTYADGFTGRFVFSLDTSVSTAYLQISSLKAEDTAVYFCARLEAIYGSDYWGQGTLVTVSSASTKGPSVFPLAPSSKSTSGGTAALGCLVKDYFPEPVTVSWNSGALTSGVHTFPAVLQSSGLYSLSSVVTVPSSSLGTQTYICNVNHKPSDTKVDKKVEPKSCDKTHTCPPCPAPPVAGPSVFLFPPKPKDTLMISRTPEVTCVVVDVKHEDPEVKFNWYVDGVEVHNAKTKPREEEYNSTYRVVSVLTVLHQDWLNGKEYKCKVSNKALPAPIEKTISKAKGQPREPQVYTLPPSREEMTKNQVSLTCDVSGFYPSDIAVEWESDGQPENNYKTTPPVLDSDGSFFLYSKLTVDKSRWEQGDVFSCSVMHEALHNHYTQKSLSLSPGK

SEQ ID NO: 17426 - protein, 118 aa, Artificial Sequence
  Description of Artificial Sequence: Synthetic polypeptide
  VH of XENP019381
QIQLVQSGSELKKPGASVKVSCKASGYTFTNYGMNWVRQAPGQGLEWMGWINTYTGEPTYADGFTGRFVFSLDTSVSTAYLQISSLKAEDTAVYFCARLEAIYGSDYWGQGTLVTVSS

SEQ ID NO: 17427 - protein, 5 aa, Artificial Sequence
  Description of Artificial Sequence: Synthetic peptide
  XENP019381 vhCDR1
NYGMN

SEQ ID NO: 17428 - protein, 17 aa, Artificial Sequence
  Description of Artificial Sequence: Synthetic peptide
  XENP019381 vhCDR2
WINTYTGEPTYADGFTG

SEQ ID NO: 17429 - protein, 9 aa, Artificial Sequence
  Description of Artificial Sequence: Synthetic peptide
  XENP019381 vhCDR3
LEAIYGSDY

SEQ ID NO: 17430 - protein, 214 aa, Artificial Sequence
  Description of Artificial Sequence: Synthetic polypeptide
  XENP019381 2A12_H1L1_IgG1_PVA_/S267K Light Chain
DIQMTQSPSSLSASVGDRVTITCRASQEISGYLSWLQQKPGKTIKRLIYAASTLDSGVPKRFSDSRSGSDYTLTISSLQPEDFATYYCLQYTSYPFTFGSGTKLEIKRTVAAPSVFIFPPSDEQLKSGTASVVCLLNNFYPREAKVQWKVDNALQSGNSQESVTEQDSKDSTYSLSSTLTLSKADYEKHKVYACEVTHQGLSSPVTKSFNRGEC

SEQ ID NO: 17431 - protein, 107 aa, Artificial Sequence
  Description of Artificial Sequence: Synthetic polypeptide
  VL of XENP019381
DIQMTQSPSSLSASVGDRVTITCRASQEISGYLSWLQQKPGKTIKRLIYAASTLDSGVPKRFSDSRSGSDYTLTISSLQPEDFATYYCLQYTSYPFTFGSGTKLEIK

SEQ ID NO: 17432 - protein, 11 aa, Artificial Sequence
  Description of Artificial Sequence: Synthetic peptide
  XENP019381 vlCDR1
RASQEISGYLS

SEQ ID NO: 17433 - protein, 7 aa, Artificial Sequence
  Description of Artificial Sequence: Synthetic peptide
  XENP019381 vlCDR2
AASTLDS

SEQ ID NO: 17434 - protein, 9 aa, Artificial Sequence
  Description of Artificial Sequence: Synthetic peptide
  XENP019381 vlCDR3
LQYTSYPFT

SEQ ID NO: 17435 - protein, 449 aa, Artificial Sequence
  Description of Artificial Sequence: Synthetic polypeptide
  XENP019382 4C8_H1L1_IgG1_PVA_/S267K Heavy Chain
QVQLVQSGAEVKKPGASVKVSCKASGYTFTDYNMHWVRQAPGQSLEWMGYIYPYTGGTGYNQKFQGRVTMTVDNSISTAYMELSRLRSDDTAVYYCARSDDGYSYAMDYWGQGTLVTVSSASTKGPSVFPLAPSSKSTSGGTAALGCLVKDYFPEPVTVSWNSGALTSGVHTFPAVLQSSGLYSLSSVVTVPSSSLGTQTYICNVNHKPSDTKVDKKVEPKSCDKTHTCPPCPAPPVAGPSVFLFPPKPKDTLMISRTPEVTCVVVDVKHEDPEVKFNWYVDGVEVHNAKTKPREEEYNSTYRVVSVLTVLHQDWLNGKEYKCKVSNKALPAPIEKTISKAKGQPREPQVYTLPPSREEMTKNQVSLTCDVSGFYPSDIAVEWESDGQPENNYKTTPPVLDSDGSFFLYSKLTVDKSRWEQGDVFSCSVMHEALHNHYTQKSLSLSPGK

SEQ ID NO: 17436 - protein, 120 aa, Artificial Sequence
  Description of Artificial Sequence: Synthetic polypeptide
  VH of XENP019382
QVQLVQSGAEVKKPGASVKVSCKASGYTFTDYNMHWVRQAPGQSLEWMGYIYPYTGGTGYNQKFQGRVTMTVDNSISTAYMELSRLRSDDTAVYYCARSDDGYSYAMDYWGQGTLVTVSS

SEQ ID NO: 17437 - protein, 5 aa, Artificial Sequence
  Description of Artificial Sequence: Synthetic peptide
  XENP019382 vhCDR1
DYNMH

SEQ ID NO: 17438 - protein, 17 aa, Artificial Sequence
  Description of Artificial Sequence: Synthetic peptide
  XENP019382 vhCDR2
YIYPYTGGTGYNQKFQG

SEQ ID NO: 17439 - protein, 11 aa, Artificial Sequence
  Description of Artificial Sequence: Synthetic peptide
  XENP019382 vhCDR3
SDDGYSYAMDY

SEQ ID NO: 17440 - protein, 213 aa, Artificial Sequence
  Description of Artificial Sequence: Synthetic polypeptide
  XENP019382 4C8_H1L1_IgG1_PVA_/S267K Light Chain
DIQMTQSPSSLSASVGDRVTITCQASQDISNYLNWYQQKPGKTVKLLIYYTSRLHSGVPSRFSGSGSGTDYTFTISSLQPEDIATYFCQQGNTLWTFGGGTKVEIKRTVAAPSVFIFPPSDEQLKSGTASVVCLLNNFYPREAKVQWKVDNALQSGNSQESVTEQDSKDSTYSLSSTLTLSKADYEKHKVYACEVTHQGLSSPVTKSFNRGEC

SEQ ID NO: 17441 - protein, 106 aa, Artificial Sequence
  Description of Artificial Sequence: Synthetic polypeptide
  VL of XENP019382
DIQMTQSPSSLSASVGDRVTITCQASQDISNYLNWYQQKPGKTVKLLIYYTSRLHSGVPSRFSGSGSGTDYTFTISSLQPEDIATYFCQQGNTLWTFGGGTKVEIK

SEQ ID NO: 17442 - protein, 11 aa, Artificial Sequence
  Description of Artificial Sequence: Synthetic peptide
  XENP019382 vlCDR1
QASQDISNYLN

SEQ ID NO: 17443 - protein, 7 aa, Artificial Sequence
  Description of Artificial Sequence: Synthetic peptide
  XENP019382 vlCDR2
YTSRLHS

SEQ ID NO: 17444 - protein, 8 aa, Artificial Sequence
  Description of Artificial Sequence: Synthetic peptide
  XENP019382 vlCDR3
QQGNTLWT

SEQ ID NO: 17445 - protein, 445 aa, Artificial Sequence
  Description of Artificial Sequence: Synthetic polypeptide
  XENP019383 7A6_H0L0_IgG1_PVA_/S267K Heavy Chain
DVQLQESGPGLVKPSQSLSLTCSVTGYSITSGYFWNWIRQFPGNKLEWMGYISYDSNYYNPSLKNRISITRDTSKNQFFLKLNSVTTEDTATYYCARGGITTFDYWGQGTTLTVSSASTKGPSVFPLAPSSKSTSGGTAALGCLVKDYFPEPVTVSWNSGALTSGVHTFPAVLQSSGLYSLSSVVTVPSSSLGTQTYICNVNHKPSDTKVDKKVEPKSCDKTHTCPPCPAPPVAGPSVFLFPPKPKDTLMISRTPEVTCVVVDVKHEDPEVKFNWYVDGVEVHNAKTKPREEEYNSTYRVVSVLTVLHQDWLNGKEYKCKVSNKALPAPIEKTISKAKGQPREPQVYTLPPSREEMTKNQVSLTCDVSGFYPSDIAVEWESDGQPENNYKTTPPVLDSDGSFFLYSKLTVDKSRWEQGDVFSCSVMHEALHNHYTQKSLSLSPGK

SEQ ID NO: 17446 - protein, 116 aa, Artificial Sequence
  Description of Artificial Sequence: Synthetic polypeptide
  VH of XENP019383
DVQLQESGPGLVKPSQSLSLTCSVTGYSITSGYFWNWIRQFPGNKLEWMGYISYDSNYYNPSLKNRISITRDTSKNQFFLKLNSVTTEDTATYYCARGGITTFDYWGQGTTLTVSS

SEQ ID NO: 17447 - protein, 6 aa, Artificial Sequence
  Description of Artificial Sequence: Synthetic peptide
  XENP019383 vhCDR1
SGYFWN

SEQ ID NO: 17448 - protein, 15 aa, Artificial Sequence
  Description of Artificial Sequence: Synthetic peptide
  XENP019383 vhCDR2
YISYDSNYYNPSLKN

SEQ ID NO: 17449 - protein, 8 aa, Artificial Sequence
  Description of Artificial Sequence: Synthetic peptide
  XENP019383 vhCDR3
GGITTFDY

SEQ ID NO: 17450 - protein, 218 aa, Artificial Sequence
  Description of Artificial Sequence: Synthetic polypeptide
  XENP019383 7A6_H0L0_IgG1_PVA_/S267K Light Chain
DIVLTQSPASLAVSLGQRATISCKASQSVDYDGDSYMNWYQQKPGQPPKLLIYAASNLESGIPARFSGSGSGTDFTLNIHPVEEEDAATYYCQQSNEDPRTFGGGTKLEIKRTVAAPSVFIFPPSDEQLKSGTASVVCLLNNFYPREAKVQWKVDNALQSGNSQESVTEQDSKDSTYSLSSTLTLSKADYEKHKVYACEVTHQGLSSPVTKSFNRGEC

SEQ ID NO: 17451 - protein, 111 aa, Artificial Sequence
  Description of Artificial Sequence: Synthetic polypeptide
  VL of XENP019383
DIVLTQSPASLAVSLGQRATISCKASQSVDYDGDSYMNWYQQKPGQPPKLLIYAASNLESGIPARFSGSGSGTDFTLNIHPVEEEDAATYYCQQSNEDPRTFGGGTKLEIK

SEQ ID NO: 17452 - protein, 15 aa, Artificial Sequence
  Description of Artificial Sequence: Synthetic peptide
  XENP019383 vlCDR1
KASQSVDYDGDSYMN

SEQ ID NO: 17453 - protein, 7 aa, Artificial Sequence
  Description of Artificial Sequence: Synthetic peptide
  XENP019383 vlCDR2
AASNLES

SEQ ID NO: 17454 - protein, 9 aa, Artificial Sequence
  Description of Artificial Sequence: Synthetic peptide
  XENP019383 vlCDR3
QQSNEDPRT

SEQ ID NO: 17455 - protein, 445 aa, Artificial Sequence
  Description of Artificial Sequence: Synthetic polypeptide
  XENP019384 7A6_H1L1_IgG1_PVA_/S267K Heavy Chain
QVQLVESGGGVVQPGRSLRLSCAVSGYSITSGYFWNWIRQAPGKKLEWVAYISYDSNYYNPSVKGRFTISRDTSKNTFYLQMNSLRAEDTAVYYCARGGITTFDYWGQGTLVTVSSASTKGPSVFPLAPSSKSTSGGTAALGCLVKDYFPEPVTVSWNSGALTSGVHTFPAVLQSSGLYSLSSVVTVPSSSLGTQTYICNVNHKPSDTKVDKKVEPKSCDKTHTCPPCPAPPVAGPSVFLFPPKPKDTLMISRTPEVTCVVVDVKHEDPEVKFNWYVDGVEVHNAKTKPREEEYNSTYRVVSVLTVLHQDWLNGKEYKCKVSNKALPAPIEKTISKAKGQPREPQVYTLPPSREEMTKNQVSLTCDVSGFYPSDIAVEWESDGQPENNYKTTPPVLDSDGSFFLYSKLTVDKSRWEQGDVFSCSVMHEALHNHYTQKSLSLSPGK

SEQ ID NO: 17456 - protein, 116 aa, Artificial Sequence
  Description of Artificial Sequence: Synthetic polypeptide
  VH of XENP019384
QVQLVESGGGVVQPGRSLRLSCAVSGYSITSGYFWNWIRQAPGKKLEWVAYISYDSNYYNPSVKGRFTISRDTSKNTFYLQMNSLRAEDTAVYYCARGGITTFDYWGQGTLVTVSS

SEQ ID NO: 17457 - protein, 6 aa, Artificial Sequence
  Description of Artificial Sequence: Synthetic peptide
  XENP019384 vhCDR1
SGYFWN

SEQ ID NO: 17458 - protein, 15 aa, Artificial Sequence
  Description of Artificial Sequence: Synthetic peptide
  XENP019384 vhCDR2
YISYDSNYYNPSVKG

SEQ ID NO: 17459 - protein, 8 aa, Artificial Sequence
  Description of Artificial Sequence: Synthetic peptide
  XENP019384 vhCDR3
GGITTFDY

SEQ ID NO: 17460 - protein, 218 aa, Artificial Sequence
  Description of Artificial Sequence: Synthetic polypeptide
  XENP019384 7A6_H1L1_IgG1_PVA_/S267K Light Chain
DIVLTQSPSSLSASVGDRVTITCRASQSVDYDGDSYMNWYQQKPGKPPKLLIYAASNLESGIPARFSGSGSGTDFTLTISSLQPEDFATYYCQQSNEDPRTFGGGTKVEIKRTVAAPSVFIFPPSDEQLKSGTASVVCLLNNFYPREAKVQWKVDNALQSGNSQESVTEQDSKDSTYSLSSTLTLSKADYEKHKVYACEVTHQGLSSPVTKSFNRGEC

SEQ ID NO: 17461 - protein, 111 aa, Artificial Sequence
  Description of Artificial Sequence: Synthetic polypeptide
  VL of XENP019384
DIVLTQSPSSLSASVGDRVTITCRASQSVDYDGDSYMNWYQQKPGKPPKLLIYAASNLESGIPARFSGSGSGTDFTLTISSLQPEDFATYYCQQSNEDPRTFGGGTKVEIK

SEQ ID NO: 17462 - protein, 15 aa, Artificial Sequence
  Description of Artificial Sequence: Synthetic peptide
  XENP019384 vlCDR1
RASQSVDYDGDSYMN

SEQ ID NO: 17463 - protein, 7 aa, Artificial Sequence
  Description of Artificial Sequence: Synthetic peptide
  XENP019384 vlCDR2
AASNLES

SEQ ID NO: 17464 - protein, 9 aa, Artificial Sequence
  Description of Artificial Sequence: Synthetic peptide
  XENP019384 vlCDR3
QQSNEDPRT

SEQ ID NO: 17465 - protein, 445 aa, Artificial Sequence; identical to SEQ ID NO: 17455
  Description of Artificial Sequence: Synthetic polypeptide
  XENP019385 7A6_H1L2_IgG1_PVA_/S267K Heavy Chain

SEQ ID NO: 17466 - protein, 116 aa, Artificial Sequence; identical to SEQ ID NO: 17456
  Description of Artificial Sequence: Synthetic polypeptide
  VH of XENP019385

SEQ ID NO: 17467 - protein, 6 aa, Artificial Sequence
  Description of Artificial Sequence: Synthetic peptide
  XENP019385 vhCDR1
SGYFWN

SEQ ID NO: 17468 - protein, 15 aa, Artificial Sequence
  Description of Artificial Sequence: Synthetic peptide
  XENP019385 vhCDR2
YISYDSNYYNPSVKG

SEQ ID NO: 17469 - protein, 8 aa, Artificial Sequence
  Description of Artificial Sequence: Synthetic peptide
  XENP019385 vhCDR3
GGITTFDY

SEQ ID NO: 17470 - protein, 218 aa, Artificial Sequence; identical to SEQ ID NO: 17320
  Description of Artificial Sequence: Synthetic polypeptide
  XENP019385 7A6_H1L2_IgG1_PVA_/S267K Light Chain

SEQ ID NO: 17471 - protein, 111 aa, Artificial Sequence; identical to SEQ ID NO: 17321
  Description of Artificial Sequence: Synthetic polypeptide
  VL of XENP019385

SEQ ID NO: 17472 - protein, 15 aa, Artificial Sequence
  Description of Artificial Sequence: Synthetic peptide
  XENP019385 vlCDR1
RASQSVDYDGDSYMN

SEQ ID NO: 17473 - protein, 7 aa, Artificial Sequence
  Description of Artificial Sequence: Synthetic peptide
  XENP019385 vlCDR2
AASNLES

SEQ ID NO: 17474 - protein, 9 aa, Artificial Sequence
  Description of Artificial Sequence: Synthetic peptide
  XENP019385 vlCDR3
QQSNEDPRT

SEQ ID NO: 17475 - protein, 445 aa, Artificial Sequence; identical to SEQ ID NO: 17455
  Description of Artificial Sequence: Synthetic polypeptide
  XENP019386 7A6_H1L3_IgG1_PVA_/S267K Heavy Chain

SEQ ID NO: 17476 - protein, 116 aa, Artificial Sequence; identical to SEQ ID NO: 17456
  Description of Artificial Sequence: Synthetic polypeptide
  VH of XENP019386

SEQ ID NO: 17477 - protein, 6 aa, Artificial Sequence
  Description of Artificial Sequence: Synthetic peptide
  XENP019386 vhCDR1
SGYFWN

SEQ ID NO: 17478 - protein, 15 aa, Artificial Sequence
  Description of Artificial Sequence: Synthetic peptide
  XENP019386 vhCDR2
YISYDSNYYNPSVKG

SEQ ID NO: 17479 - protein, 8 aa, Artificial Sequence
  Description of Artificial Sequence: Synthetic peptide
  XENP019386 vhCDR3
GGITTFDY

SEQ ID NO: 17480 - protein, 218 aa, Artificial Sequence
  Description of Artificial Sequence: Synthetic polypeptide
  XENP019386 7A6_H1L3_IgG1_PVA_/S267K Light Chain
DIVLTQSPDSLAVSLGERATINCKASQSVDYDGDSYMNWYQQKPGQPPKLLIYAASNLESGIPARFSGSGSGTDFTLTISSLQAEDVAVYYCQQSNEDPRTFGGGTKVEIKRTVAAPSVFIFPPSDEQLKSGTASVVCLLNNFYPREAKVQWKVDNALQSGNSQESVTEQDSKDSTYSLSSTLTLSKADYEKHKVYACEVTHQGLSSPVTKSFNRGEC

SEQ ID NO: 17481 - protein, 111 aa, Artificial Sequence
  Description of Artificial Sequence: Synthetic polypeptide
  VL of XENP019386
DIVLTQSPDSLAVSLGERATINCKASQSVDYDGDSYMNWYQQKPGQPPKLLIYAASNLESGIPARFSGSGSGTDFTLTISSLQAEDVAVYYCQQSNEDPRTFGGGTKVEIK

SEQ ID NO: 17482 - protein, 15 aa, Artificial Sequence
  Description of Artificial Sequence: Synthetic peptide
  XENP019386 vlCDR1
KASQSVDYDGDSYMN

SEQ ID NO: 17483 - protein, 7 aa, Artificial Sequence
  Description of Artificial Sequence: Synthetic peptide
  XENP019386 vlCDR2
AASNLES

SEQ ID NO: 17484 - protein, 9 aa, Artificial Sequence
  Description of Artificial Sequence: Synthetic peptide
  XENP019386 vlCDR3
QQSNEDPRT

SEQ ID NO: 17485 - protein, 445 aa, Artificial Sequence
  Description of Artificial Sequence: Synthetic polypeptide
  XENP019387 7A6_H2L1_IgG1_PVA_/S267K Heavy Chain
QVQLQESGPGLVKPSQTLSLTCTVSGYSITSGYFWNWIRQHPGKKLEWIGYISYDSNYYNPSLKSLVTISRDTSKNQFSLKLSSVTAADTAVYYCARGGITTFDYWGQGTLVTVSSASTKGPSVFPLAPSSKSTSGGTAALGCLVKDYFPEPVTVSWNSGALTSGVHTFPAVLQSSGLYSLSSVVTVPSSSLGTQTYICNVNHKPSDTKVDKKVEPKSCDKTHTCPPCPAPPVAGPSVFLFPPKPKDTLMISRTPEVTCVVVDVKHEDPEVKFNWYVDGVEVHNAKTKPREEEYNSTYRVVSVLTVLHQDWLNGKEYKCKVSNKALPAPIEKTISKAKGQPREPQVYTLPPSREEMTKNQVSLTCDVSGFYPSDIAVEWESDGQPENNYKTTPPVLDSDGSFFLYSKLTVDKSRWEQGDVFSCSVMHEALHNHYTQKSLSLSPGK

SEQ ID NO: 17486 - protein, 116 aa, Artificial Sequence
  Description of Artificial Sequence: Synthetic polypeptide
  VH of XENP019387
QVQLQESGPGLVKPSQTLSLTCTVSGYSITSGYFWNWIRQHPGKKLEWIGYISYDSNYYNPSLKSLVTISRDTSKNQFSLKLSSVTAADTAVYYCARGGITTFDYWGQGTLVTVSS

SEQ ID NO: 17487 - protein, 6 aa, Artificial Sequence
  Description of Artificial Sequence: Synthetic peptide
  XENP019387 vhCDR1
SGYFWN

SEQ ID NO: 17488 - protein, 15 aa, Artificial Sequence
  Description of Artificial Sequence: Synthetic peptide
  XENP019387 vhCDR2
YISYDSNYYNPSLKS

SEQ ID NO: 17489 - protein, 8 aa, Artificial Sequence
  Description of Artificial Sequence: Synthetic peptide
  XENP019387 vhCDR3
GGITTFDY

SEQ ID NO: 17490 - protein, 218 aa, Artificial Sequence; identical to SEQ ID NO: 17460
  Description of Artificial Sequence: Synthetic polypeptide
  XENP019387 7A6_H2L1_IgG1_PVA_/S267K Light Chain

SEQ ID NO: 17491 - protein, 111 aa, Artificial Sequence; identical to SEQ ID NO: 17461
  Description of Artificial Sequence: Synthetic polypeptide
  VL of XENP019387

SEQ ID NO: 17492 - protein, 15 aa, Artificial Sequence
  Description of Artificial Sequence: Synthetic peptide
  XENP019387 vlCDR1
RASQSVDYDGDSYMN

SEQ ID NO: 17493 - protein, 7 aa, Artificial Sequence
  Description of Artificial Sequence: Synthetic peptide
  XENP019387 vlCDR2
AASNLES

SEQ ID NO: 17494 - protein, 9 aa, Artificial Sequence
  Description of Artificial Sequence: Synthetic peptide
  XENP019387 vlCDR3
QQSNEDPRT

SEQ ID NO: 17495 - protein, 445 aa, Artificial Sequence; identical to SEQ ID NO: 17485
  Description of Artificial Sequence: Synthetic polypeptide
  XENP019388 7A6_H2L2_IgG1_PVA_/S267K Heavy Chain

SEQ ID NO: 17496 - protein, 116 aa, Artificial Sequence; identical to SEQ ID NO: 17486
  Description of Artificial Sequence: Synthetic polypeptide
  VH of XENP019388

SEQ ID NO: 17497 - protein, 6 aa, Artificial Sequence
  Description of Artificial Sequence: Synthetic peptide
  XENP019388 vhCDR1
SGYFWN

SEQ ID NO: 17498 - protein, 15 aa, Artificial Sequence
  Description of Artificial Sequence: Synthetic peptide
  XENP019388 vhCDR2
YISYDSNYYNPSLKS

SEQ ID NO: 17499 - protein, 8 aa, Artificial Sequence
  Description of Artificial Sequence: Synthetic peptide
  XENP019388 vhCDR3
GGITTFDY

SEQ ID NO: 17500 - protein, 218 aa, Artificial Sequence; identical to SEQ ID NO: 17320
  Description of Artificial Sequence: Synthetic polypeptide
  XENP019388 7A6_H2L2_IgG1_PVA_/S267K Light Chain

SEQ ID NO: 17501 - protein, 111 aa, Artificial Sequence; identical to SEQ ID NO: 17321
  Description of Artificial Sequence: Synthetic polypeptide
  VL of XENP019388

SEQ ID NO: 17502 - protein, 15 aa, Artificial Sequence
  Description of Artificial Sequence: Synthetic peptide
  XENP019388 vlCDR1
RASQSVDYDGDSYMN

SEQ ID NO: 17503 - protein, 7 aa, Artificial Sequence
  Description of Artificial Sequence: Synthetic peptide
  XENP019388 vlCDR2
AASNLES

SEQ ID NO: 17504 - protein, 9 aa, Artificial Sequence
  Description of Artificial Sequence: Synthetic peptide
  XENP019388 vlCDR3
QQSNEDPRT

SEQ ID NO: 17505 - protein, 445 aa, Artificial Sequence; identical to SEQ ID NO: 17485
  Description of Artificial Sequence: Synthetic polypeptide
  XENP019389 7A6_H2L3_IgG1_PVA_/S267K Heavy Chain

SEQ ID NO: 17506 - protein, 116 aa, Artificial Sequence; identical to SEQ ID NO: 17486
  Description of Artificial Sequence: Synthetic polypeptide
  VH of XENP019389

SEQ ID NO: 17507 - protein, 6 aa, Artificial Sequence
  Description of Artificial Sequence: Synthetic peptide
  XENP019389 vhCDR1
SGYFWN

SEQ ID NO: 17508 - protein, 15 aa, Artificial Sequence
  Description of Artificial Sequence: Synthetic peptide
  XENP019389 vhCDR2
YISYDSNYYNPSLKS

SEQ ID NO: 17509 - protein, 8 aa, Artificial Sequence
  Description of Artificial Sequence: Synthetic peptide
  XENP019389 vhCDR3
GGITTFDY

SEQ ID NO: 17510 - protein, 218 aa, Artificial Sequence; identical to SEQ ID NO: 17480
  Description of Artificial Sequence: Synthetic polypeptide
  XENP019389 7A6_H2L3_IgG1_PVA_/S267K Light Chain

SEQ ID NO: 17511 - protein, 111 aa, Artificial Sequence; identical to SEQ ID NO: 17481
  Description of Artificial Sequence: Synthetic polypeptide
  VL of XENP019389

SEQ ID NO: 17512 - protein, 15 aa, Artificial Sequence
  Description of Artificial Sequence: Synthetic peptide
  XENP019389 vlCDR1
KASQSVDYDGDSYMN

SEQ ID NO: 17513 - protein, 7 aa, Artificial Sequence
  Description of Artificial Sequence: Synthetic peptide
  XENP019389 vlCDR2
AASNLES

SEQ ID NO: 17514 - protein, 9 aa, Artificial Sequence
  Description of Artificial Sequence: Synthetic peptide
  XENP019389 vlCDR3
QQSNEDPRT

SEQ ID NO: 17515 - protein, 445 aa, Artificial Sequence
  Description of Artificial Sequence: Synthetic polypeptide
  XENP019390 7A6_H3L1_IgG1_PVA_/S267K Heavy Chain
QVQLQQSGPGLVKPSQTLSLTCAVSGYSITSGYFWNWIRQSPSRKLEWLGYISYDSNYYNPSVKSRITINRDTSKNQFSLQLNSVTPEDTAVYYCARGGITTFDYWGQGTLVTVSSASTKGPSVFPLAPSSKSTSGGTAALGCLVKDYFPEPVTVSWNSGALTSGVHTFPAVLQSSGLYSLSSVVTVPSSSLGTQTYICNVNHKPSDTKVDKKVEPKSCDKTHTCPPCPAPPVAGPSVFLFPPKPKDTLMISRTPEVTCVVVDVKHEDPEVKFNWYVDGVEVHNAKTKPREEEYNSTYRVVSVLTVLHQDWLNGKEYKCKVSNKALPAPIEKTISKAKGQPREPQVYTLPPSREEMTKNQVSLTCDVSGFYPSDIAVEWESDGQPENNYKTTPPVLDSDGSFFLYSKLTVDKSRWEQGDVFSCSVMHEALHNHYTQKSLSLSPGK

SEQ ID NO: 17516 - protein, 116 aa, Artificial Sequence
  Description of Artificial Sequence: Synthetic polypeptide
  VH of XENP019390
QVQLQQSGPGLVKPSQTLSLTCAVSGYSITSGYFWNWIRQSPSRKLEWLGYISYDSNYYNPSVKSRITINRDTSKNQFSLQLNSVTPEDTAVYYCARGGITTFDYWGQGTLVTVSS

SEQ ID NO: 17517 - protein, 6 aa, Artificial Sequence
  Description of Artificial Sequence: Synthetic peptide
  XENP019390 vhCDR1
SGYFWN

SEQ ID NO: 17518 - protein, 15 aa, Artificial Sequence
  Description of Artificial Sequence: Synthetic peptide
  XENP019390 vhCDR2
YISYDSNYYNPSVKS

SEQ ID NO: 17519 - protein, 8 aa, Artificial Sequence
  Description of Artificial Sequence: Synthetic peptide
  XENP019390 vhCDR3
GGITTFDY

SEQ ID NO: 17520 - protein, 218 aa, Artificial Sequence; identical to SEQ ID NO: 17460
  Description of Artificial Sequence: Synthetic polypeptide
  XENP019390 7A6_H3L1_IgG1_PVA_/S267K Light Chain

SEQ ID NO: 17521 - protein, 111 aa, Artificial Sequence; identical to SEQ ID NO: 17461
  Description of Artificial Sequence: Synthetic polypeptide
  VL of XENP019390

SEQ ID NO: 17522 - protein, 15 aa, Artificial Sequence
  Description of Artificial Sequence: Synthetic peptide
  XENP019390 vlCDR1
RASQSVDYDGDSYMN

SEQ ID NO: 17523 - protein, 7 aa, Artificial Sequence
  Description of Artificial Sequence: Synthetic peptide
  XENP019390 vlCDR2
AASNLES

SEQ ID NO: 17524 - protein, 9 aa, Artificial Sequence
  Description of Artificial Sequence: Synthetic peptide
  XENP019390 vlCDR3
QQSNEDPRT

SEQ ID NO: 17525 - protein, 445 aa, Artificial Sequence; identical to SEQ ID NO: 17515
  Description of Artificial Sequence: Synthetic polypeptide
  XENP019391 7A6_H3L2_IgG1_PVA_/S267K Heavy Chain

SEQ ID NO: 17526 - protein, 116 aa, Artificial Sequence; identical to SEQ ID NO: 17516
  Description of Artificial Sequence: Synthetic polypeptide
  VH of XENP019391

SEQ ID NO: 17527 - protein, 6 aa, Artificial Sequence
  Description of Artificial Sequence: Synthetic peptide
  XENP019391 vhCDR1
SGYFWN

SEQ ID NO: 17528 - protein, 15 aa, Artificial Sequence
  Description of Artificial Sequence: Synthetic peptide
  XENP019391 vhCDR2
YISYDSNYYNPSVKS

SEQ ID NO: 17529 - protein, 8 aa, Artificial Sequence
  Description of Artificial Sequence: Synthetic peptide
  XENP019391 vhCDR3
GGITTFDY

SEQ ID NO: 17530 - protein, 218 aa, Artificial Sequence; identical to SEQ ID NO: 17320
  Description of Artificial Sequence: Synthetic polypeptide
  XENP019391 7A6_H3L2_IgG1_PVA_/S267K Light Chain

SEQ ID NO: 17531 - protein, 111 aa, Artificial Sequence; identical to SEQ ID NO: 17321
  Description of Artificial Sequence: Synthetic polypeptide
  VL of XENP019391

SEQ ID NO: 17532 - protein, 15 aa, Artificial Sequence
  Description of Artificial Sequence: Synthetic peptide
  XENP019391 vlCDR1
RASQSVDYDGDSYMN

SEQ ID NO: 17533 - protein, 7 aa, Artificial Sequence
  Description of Artificial Sequence: Synthetic peptide
  XENP019391 vlCDR2
AASNLES

SEQ ID NO: 17534 - protein, 9 aa, Artificial Sequence
  Description of Artificial Sequence: Synthetic peptide
  XENP019391 vlCDR3
QQSNEDPRT

SEQ ID NO: 17535 - protein, 445 aa, Artificial Sequence; identical to SEQ ID NO: 17515
  Description of Artificial Sequence: Synthetic polypeptide
  XENP019392 7A6_H3L3_IgG1_PVA_/S267K Heavy Chain

SEQ ID NO: 17536 - protein, 116 aa, Artificial Sequence; identical to SEQ ID NO: 17516
  Description of Artificial Sequence: Synthetic polypeptide
  VH of XENP019392

SEQ ID NO: 17537 - protein, 6 aa, Artificial Sequence
  Description of Artificial Sequence: Synthetic peptide
  XENP019392 vhCDR1
SGYFWN

SEQ ID NO: 17538 - protein, 15 aa, Artificial Sequence
  Description of Artificial Sequence: Synthetic peptide
  XENP019392 vhCDR2
YISYDSNYYNPSVKS

SEQ ID NO: 17539 - protein, 8 aa, Artificial Sequence
  Description of Artificial Sequence: Synthetic peptide
  XENP019392 vhCDR3
GGITTFDY

SEQ ID NO: 17540 - protein, 218 aa, Artificial Sequence; identical to SEQ ID NO: 17480
  Description of Artificial Sequence: Synthetic polypeptide
  XENP019392 7A6_H3L3_IgG1_PVA_/S267K Light Chain

SEQ ID NO: 17541 - protein, 111 aa, Artificial Sequence; identical to SEQ ID NO: 17481
  Description of Artificial Sequence: Synthetic polypeptide
  VL of XENP019392

SEQ ID NO: 17542 - protein, 15 aa, Artificial Sequence
  Description of Artificial Sequence: Synthetic peptide
  XENP019392 vlCDR1
KASQSVDYDGDSYMN

SEQ ID NO: 17543 - protein, 7 aa, Artificial Sequence
  Description of Artificial Sequence: Synthetic peptide
  XENP019392 vlCDR2
AASNLES

SEQ ID NO: 17544 - protein, 9 aa, Artificial Sequence
  Description of Artificial Sequence: Synthetic peptide
  XENP019392 vlCDR3
QQSNEDPRT

SEQ ID NO: 17545 - protein, 447 aa, Artificial Sequence
  Description of Artificial Sequence: Synthetic polypeptide
  XENP019393 11B2_H1_1H11_L1_IgG1_PVA_/S267K Heavy Chain
QIQLVQSGSELKKPGASVKVSCKTSGYTFTNYGMNWVRQAPGQGLEWMGWINTYTGEPTYADGFTGRFVFSLDTSVSTAYLQISSLKAEDTAVYFCARGRGMGYFDYWGQGTLVTVSSASTKGPSVFPLAPSSKSTSGGTAALGCLVKDYFPEPVTVSWNSGALTSGVHTFPAVLQSSGLYSLSSVVTVPSSSLGTQTYICNVNHKPSDTKVDKKVEPKSCDKTHTCPPCPAPPVAGPSVFLFPPKPKDTLMISRTPEVTCVVVDVKHEDPEVKFNWYVDGVEVHNAKTKPREEEYNSTYRVVSVLTVLHQDWLNGKEYKCKVSNKALPAPIEKTISKAKGQPREPQVYTLPPSREEMTKNQVSLTCDVSGFYPSDIAVEWESDGQPENNYKTTPPVLDSDGSFFLYSKLTVDKSRWEQGDVFSCSVMHEALHNHYTQKSLSLSPGK

SEQ ID NO: 17546 - protein, 118 aa, Artificial Sequence
  Description of Artificial Sequence: Synthetic polypeptide
  VH of XENP019393
QIQLVQSGSELKKPGASVKVSCKTSGYTFTNYGMNWVRQAPGQGLEWMGWINTYTGEPTYADGFTGRFVFSLDTSVSTAYLQISSLKAEDTAVYFCARGRGMGYFDYWGQGTLVTVSS

SEQ ID NO: 17547 - protein, 5 aa, Artificial Sequence
  Description of Artificial Sequence: Synthetic peptide
  XENP019393 vhCDR1
NYGMN

SEQ ID NO: 17548 - protein, 17 aa, Artificial Sequence
  Description of Artificial Sequence: Synthetic peptide
  XENP019393 vhCDR2
WINTYTGEPTYADGFTG

SEQ ID NO: 17549 - protein, 9 aa, Artificial Sequence
  Description of Artificial Sequence: Synthetic peptide
  XENP019393 vhCDR3
GRGMGYFDY

SEQ ID NO: 17550 - protein, 214 aa, Artificial Sequence; identical to SEQ ID NO: 17160
  Description of Artificial Sequence: Synthetic polypeptide
  XENP019393 11B2_H1_1H11_L1_IgG1_PVA_/S267K Light Chain

SEQ ID NO: 17551 - protein, 107 aa, Artificial Sequence; identical to SEQ ID NO: 17161
  Description of Artificial Sequence: Synthetic polypeptide
  VL of XENP019393

SEQ ID NO: 17552 - protein, 11 aa, Artificial Sequence
  Description of Artificial Sequence: Synthetic peptide
  XENP019393 vlCDR1
RASENIYSNLA

SEQ ID NO: 17553 - protein, 7 aa, Artificial Sequence
  Description of Artificial Sequence: Synthetic peptide
  XENP019393 vlCDR2
AATNLAD

SEQ ID NO: 17554 - protein, 9 aa, Artificial Sequence
  Description of Artificial Sequence: Synthetic peptide
  XENP019393 vlCDR3
QHFWTTPRT

SEQ ID NO: 17555 - protein, 447 aa, Artificial Sequence
  Description of Artificial Sequence: Synthetic polypeptide
  XENP019394 2D4_H1L1_IgG1_PVA_/S267K Heavy Chain
QIQLVQSGSELKKPGASVKVSCKASGYTFTNYGMNWVRQAPGQGLEWMGWINTYTGEPTYADGFTGRFVFSLDTSVSTAYLQISSLKAEDTAVYFCARGRGTGYFDNWGQGTLVTVSSASTKGPSVFPLAPSSKSTSGGTAALGCLVKDYFPEPVTVSWNSGALTSGVHTFPAVLQSSGLYSLSSVVTVPSSSLGTQTYICNVNHKPSDTKVDKKVEPKSCDKTHTCPPCPAPPVAGPSVFLFPPKPKDTLMISRTPEVTCVVVDVKHEDPEVKFNWYVDGVEVHNAKTKPREEEYNSTYRVVSVLTVLHQDWLNGKEYKCKVSNKALPAPIEKTISKAKGQPREPQVYTLPPSREEMTKNQVSLTCDVSGFYPSDIAVEWESDGQPENNYKTTPPVLDSDGSFFLYSKLTVDKSRWEQGDVFSCSVMHEALHNHYTQKSLSLSPGK

SEQ ID NO: 17556 - protein, 118 aa, Artificial Sequence
  Description of Artificial Sequence: Synthetic polypeptide
  VH of XENP019394
QIQLVQSGSELKKPGASVKVSCKASGYTFTNYGMNWVRQAPGQGLEWMGWINTYTGEPTYADGFTGRFVFSLDTSVSTAYLQISSLKAEDTAVYFCARGRGTGYFDNWGQGTLVTVSS

SEQ ID NO: 17557 - protein, 5 aa, Artificial Sequence
  Description of Artificial Sequence: Synthetic peptide
  XENP019394 vhCDR1
NYGMN

SEQ ID NO: 17558 - protein, 17 aa, Artificial Sequence
  Description of Artificial Sequence: Synthetic peptide
  XENP019394 vhCDR2
WINTYTGEPTYADGFTG

SEQ ID NO: 17559 - protein, 9 aa, Artificial Sequence
  Description of Artificial Sequence: Synthetic peptide
  XENP019394 vhCDR3
GRGTGYFDN

SEQ ID NO: 17560 - protein, 214 aa, Artificial Sequence
  Description of Artificial Sequence: Synthetic polypeptide
  XENP019394 2D4_H1L1_IgG1_PVA_/S267K Light Chain
DIQMTQSPSSLSASVGDRVTITCRASENIYSNLAWYQQKPGKSPKLLVYAATNLADGVPSRFSGSGSGTDYTLTISSLQPEDFATYYCQHFWVTPRTFGGGTKVEIKRTVAAPSVFIFPPSDEQLKSGTASVVCLLNNFYPREAKVQWKVDNALQSGNSQESVTEQDSKDSTYSLSSTLTLSKADYEKHKVYACEVTHQGLSSPVTKSFNRGEC

SEQ ID NO: 17561 - protein, 107 aa, Artificial Sequence
  Description of Artificial Sequence: Synthetic polypeptide
  VL of XENP019394
DIQMTQSPSSLSASVGDRVTITCRASENIYSNLAWYQQKPGKSPKLLVYAATNLADGVPSRFSGSGSGTDYTLTISSLQPEDFATYYCQHFWVTPRTFGGGTKVEIK

SEQ ID NO: 17562 - protein, 11 aa, Artificial Sequence
  Description of Artificial Sequence: Synthetic peptide
  XENP019394 vlCDR1
RASENIYSNLA

SEQ ID NO: 17563 - protein, 7 aa, Artificial Sequence
  Description of Artificial Sequence: Synthetic peptide
  XENP019394 vlCDR2
AATNLAD

SEQ ID NO: 17564 - protein, 9 aa, Artificial Sequence
  Description of Artificial Sequence: Synthetic peptide
  XENP019394 vlCDR3
QHFWVTPRT

SEQ ID NO: 17565 - protein, 447 aa, Artificial Sequence
  Description of Artificial Sequence: Synthetic polypeptide
  XENP019395 4H9_H1L1_IgG1_PVA_/S267K Heavy Chain
QIQLVQSGSELKKPGASVKVSCKASEYAFINYGMNWVRQAPGQGLEWMGWINTYTGEPTYADGFTGRFVFSLDTSVSTAYLQISSLKAEDTAVYFCARGRGTGYFDYWGQGTLVTVSSASTKGPSVFPLAPSSKSTSGGTAALGCLVKDYFPEPVTVSWNSGALTSGVHTFPAVLQSSGLYSLSSVVTVPSSSLGTQTYICNVNHKPSDTKVDKKVEPKSCDKTHTCPPCPAPPVAGPSVFLFPPKPKDTLMISRTPEVTCVVVDVKHEDPEVKFNWYVDGVEVHNAKTKPREEEYNSTYRVVSVLTVLHQDWLNGKEYKCKVSNKALPAPIEKTISKAKGQPREPQVYTLPPSREEMTKNQVSLTCDVSGFYPSDIAVEWESDGQPENNYKTTPPVLDSDGSFFLYSKLTVDKSRWEQGDVFSCSVMHEALHNHYTQKSLSLSPGK

SEQ ID NO: 17566 - protein, 118 aa, Artificial Sequence
  Description of Artificial Sequence: Synthetic polypeptide
  VH of XENP019395
QIQLVQSGSELKKPGASVKVSCKASEYAFINYGMNWVRQAPGQGLEWMGWINTYTGEPTYADGFTGRFVFSLDTSVSTAYLQISSLKAEDTAVYFCARGRGTGYFDYWGQGTLVTVSS

SEQ ID NO: 17567 - protein, 5 aa, Artificial Sequence
  Description of Artificial Sequence: Synthetic peptide
  XENP019395 vhCDR1
NYGMN

SEQ ID NO: 17568 - protein, 17 aa, Artificial Sequence
  Description of Artificial Sequence: Synthetic peptide
  XENP019395 vhCDR2
WINTYTGEPTYADGFTG

SEQ ID NO: 17569 - protein, 9 aa, Artificial Sequence
  Description of Artificial Sequence: Synthetic peptide
  XENP019395 vhCDR3
GRGTGYFDY

SEQ ID NO: 17570 - protein, 214 aa, Artificial Sequence
  Description of Artificial Sequence: Synthetic polypeptide
  XENP019395 4H9_H1L1_IgG1_PVA_/S267K Light Chain
DIVMTQSPSSLSASVGDRVTITCRASQDVSTAVAWYQQKPGKSPKLLIYSASYRYTGVPDRFSGSGSGTDFTLTISSLQPEDFATYSCQQHYSTSRTFGGGTKVEIKRTVAAPSVFIFPPSDEQLKSGTASVVCLLNNFYPREAKVQWKVDNALQSGNSQESVTEQDSKDSTYSLSSTLTLSKADYEKHKVYACEVTHQGLSSPVTKSFNRGEC

SEQ ID NO: 17571 - protein, 107 aa, Artificial Sequence
  Description of Artificial Sequence: Synthetic polypeptide
  VL of XENP019395
DIVMTQSPSSLSASVGDRVTITCRASQDVSTAVAWYQQKPGKSPKLLIYSASYRYTGVPDRFSGSGSGTDFTLTISSLQPEDFATYSCQQHYSTSRTFGGGTKVEIK

SEQ ID NO: 17572 - protein, 11 aa, Artificial Sequence
  Description of Artificial Sequence: Synthetic peptide
  XENP019395 vlCDR1
RASQDVSTAVA

SEQ ID NO: 17573 - protein, 7 aa, Artificial Sequence
  Description of Artificial Sequence: Synthetic peptide
  XENP019395 vlCDR2
SASYRYT

SEQ ID NO: 17574 - protein, 9 aa, Artificial Sequence
  Description of Artificial Sequence: Synthetic peptide
  XENP019395 vlCDR3
QQHYSTSRT

SEQ ID NO: 17575 - protein, 447 aa, Artificial Sequence; identical to SEQ ID NO: 17565
  Description of Artificial Sequence: Synthetic polypeptide
  XENP019396 4H9_H1L2_IgG1_PVA_/S267K Heavy Chain

SEQ ID NO: 17576 - protein, 118 aa, Artificial Sequence; identical to SEQ ID NO: 17566
  Description of Artificial Sequence: Synthetic polypeptide
  VH of XENP019396

SEQ ID NO: 17577 - protein, 5 aa, Artificial Sequence
  Description of Artificial Sequence: Synthetic peptide
  XENP019396 vhCDR1
NYGMN

SEQ ID NO: 17578 - protein, 17 aa, Artificial Sequence
  Description of Artificial Sequence: Synthetic peptide
  XENP019396 vhCDR2
WINTYTGEPTYADGFTG

SEQ ID NO: 17579 - protein, 9 aa, Artificial Sequence
  Description of Artificial Sequence: Synthetic peptide
  XENP019396 vhCDR3
GRGTGYFDY

SEQ ID NO: 17580 - protein, 214 aa, Artificial Sequence
  Description of Artificial Sequence: Synthetic polypeptide
  XENP019396 4H9_H1L2_IgG1_PVA_/S267K Light Chain
DIVMTQSPDSLAVSLGERATINCKASQDVSTAVAWYQQKPGQSPKLLIYSASYRYTGVPDRFSGSGSGTDFTLTISSLQAEDVAVYSCQQHYSTSRTFGGGTKVEIKRTVAAPSVFIFPPSDEQLKSGTASVVCLLNNFYPREAKVQWKVDNALQSGNSQESVTEQDSKDSTYSLSSTLTLSKADYEKHKVYACEVTHQGLSSPVTKSFNRGEC

SEQ ID NO: 17581 - protein, 107 aa, Artificial Sequence
  Description of Artificial Sequence: Synthetic polypeptide
  VL of XENP019396
DIVMTQSPDSLAVSLGERATINCKASQDVSTAVAWYQQKPGQSPKLLIYSASYRYTGVPDRFSGSGSGTDFTLTISSLQAEDVAVYSCQQHYSTSRTFGGGTKVEIK

SEQ ID NO: 17582 - protein, 11 aa, Artificial Sequence
  Description of Artificial Sequence: Synthetic peptide
  XENP019396 vlCDR1
KASQDVSTAVA

SEQ ID NO: 17583 - protein, 7 aa, Artificial Sequence
  Description of Artificial Sequence: Synthetic peptide
  XENP019396 vlCDR2
SASYRYT

SEQ ID NO: 17584 - protein, 9 aa, Artificial Sequence
  Description of Artificial Sequence: Synthetic peptide
  XENP019396 vlCDR3
QQHYSTSRT

SEQ ID NO: 17585 - protein, 450 aa, Artificial Sequence
  Description of Artificial Sequence: Synthetic polypeptide
  XENP019401 7G8_H0L0_IgG1_PVA_/S267K Heavy Chain
EVKLEESGGGLVQPGGSMKLSCAASGFTFSDAWMDWVRQSPEKGLEWVAEIRTKANNHATYYAESVKGRFTISRDDSKSSVYLQMNSLRAEDTGIYYCTRLANWDWYFDVWGAGTTVTVSSASTKGPSVFPLAPSSKSTSGGTAALGCLVKDYFPEPVTVSWNSGALTSGVHTFPAVLQSSGLYSLSSVVTVPSSSLGTQTYICNVNHKPSDTKVDKKVEPKSCDKTHTCPPCPAPPVAGPSVFLFPPKPKDTLMISRTPEVTCVVVDVKHEDPEVKFNWYVDGVEVHNAKTKPREEEYNSTYRVVSVLTVLHQDWLNGKEYKCKVSNKALPAPIEKTISKAKGQPREPQVYTLPPSREEMTKNQVSLTCDVSGFYPSDIAVEWESDGQPENNYKTTPPVLDSDGSFFLYSKLTVDKSRWEQGDVFSCSVMHEALHNHYTQKSLSLSPGK

SEQ ID NO: 17586 - protein, 121 aa, Artificial Sequence
  Description of Artificial Sequence: Synthetic polypeptide
  VH of XENP019401
EVKLEESGGGLVQPGGSMKLSCAASGFTFSDAWMDWVRQSPEKGLEWVAEIRTKANNHATYYAESVKGRFTISRDDSKSSVYLQMNSLRAEDTGIYYCTRLANWDWYFDVWGAGTTVTVSS

SEQ ID NO: 17587 - protein, 5 aa, Artificial Sequence
  Description of Artificial Sequence: Synthetic peptide
  XENP019401 vhCDR1
DAWMD

SEQ ID NO: 17588 - protein, 19 aa, Artificial Sequence
  Description of Artificial Sequence: Synthetic peptide
  XENP019401 vhCDR2
EIRTKANNHATYYAESVKG

SEQ ID NO: 17589 - protein, 10 aa, Artificial Sequence
  Description of Artificial Sequence: Synthetic peptide
  XENP019401 vhCDR3
LANWDWYFDV

SEQ ID NO: 17590 - protein, 218 aa, Artificial Sequence
  Description of Artificial Sequence: Synthetic polypeptide
  XENP019401 7G8_H0L0_IgG1_PVA_/S267K Light Chain
DTVLTQSPASLAVSLGQRATISCKASQSVDYDGDSYMNWYQQKPGQPPKLLIYAASNLESGIPARLSGSGSGTDFTLNIHPVEEEDAATYYCQQSNEDPFTFGSGTKLEVKRTVAAPSVFIFPPSDEQLKSGTASVVCLLNNFYPREAKVQWKVDNALQSGNSQESVTEQDSKDSTYSLSSTLTLSKADYEKHKVYACEVTHQGLSSPVTKSFNRGEC

SEQ ID NO: 17591 - protein, 111 aa, Artificial Sequence
  Description of Artificial Sequence: Synthetic polypeptide
  VL of XENP019401
DTVLTQSPASLAVSLGQRATISCKASQSVDYDGDSYMNWYQQKPGQPPKLLIYAASNLESGIPARLSGSGSGTDFTLNIHPVEEEDAATYYCQQSNEDPFTFGSGTKLEVK

SEQ ID NO: 17592 - protein, 15 aa, Artificial Sequence
  Description of Artificial Sequence: Synthetic peptide
  XENP019401 vlCDR1
KASQSVDYDGDSYMN

SEQ ID NO: 17593 - protein, 7 aa, Artificial Sequence
  Description of Artificial Sequence: Synthetic peptide
  XENP019401 vlCDR2
AASNLES

SEQ ID NO: 17594 - protein, 9 aa, Artificial Sequence
  Description of Artificial Sequence: Synthetic peptide
  XENP019401 vlCDR3
QQSNEDPFT

SEQ ID NO: 17595 - protein, 450 aa, Artificial Sequence
  Description of Artificial Sequence: Synthetic polypeptide
  XENP019402 7G8_H1L1_IgG1_PVA_/S267K Heavy Chain
QVQLVQSGAEVKKPGASVKVSCKASGFTFSDAWMDWVRQAPGQGLEWMGEIRTKANNHATYYAEKFQGRVTMTRDDSTSTVYMELSSLRSEDTAVYYCTRLANWDWYFDVWGAGTTVTVSSASTKGPSVFPLAPSSKSTSGGTAALGCLVKDYFPEPVTVSWNSGALTSGVHTFPAVLQSSGLYSLSSVVTVPSSSLGTQTYICNVNHKPSDTKVDKKVEPKSCDKTHTCPPCPAPPVAGPSVFLFPPKPKDTLMISRTPEVTCVVVDVKHEDPEVKFNWYVDGVEVHNAKTKPREEEYNSTYRVVSVLTVLHQDWLNGKEYKCKVSNKALPAPIEKTISKAKGQPREPQVYTLPPSREEMTKNQVSLTCDVSGFYPSDIAVEWESDGQPENNYKTTPPVLDSDGSFFLYSKLTVDKSRWEQGDVFSCSVMHEALHNHYTQKSLSLSPGK

SEQ ID NO: 17596 - protein, 121 aa, Artificial Sequence
  Description of Artificial Sequence: Synthetic polypeptide
  VH of XENP019402
QVQLVQSGAEVKKPGASVKVSCKASGFTFSDAWMDWVRQAPGQGLEWMGEIRTKANNHATYYAEKFQGRVTMTRDDSTSTVYMELSSLRSEDTAVYYCTRLANWDWYFDVWGAGTTVTVSS

SEQ ID NO: 17597 - protein, 5 aa, Artificial Sequence
  Description of Artificial Sequence: Synthetic peptide
  XENP019402 vhCDR1
DAWMD

SEQ ID NO: 17598 - protein, 19 aa, Artificial Sequence
  Description of Artificial Sequence: Synthetic peptide
  XENP019402 vhCDR2
EIRTKANNHATYYAEKFQG

SEQ ID NO: 17599 - protein, 10 aa, Artificial Sequence
  Description of Artificial Sequence: Synthetic peptide
  XENP019402 vhCDR3
LANWDWYFDV

SEQ ID NO: 17600 - protein, 218 aa, Artificial Sequence
  Description of Artificial Sequence: Synthetic polypeptide
  XENP019402 7G8_H1L1_IgG1_PVA_/S267K Light Chain
DTVLTQSPSSLSASVGDRVTITCRASQSVDYDGDSYMNWYQQKPGKPPKLLIYAASNLESGIPARLSGSGSGTDFTLTISSLQPEDFATYYCQQSNEDPFTFGSGTKLEIKRTVAAPSVFIFPPSDEQLKSGTASVVCLLNNFYPREAKVQWKVDNALQSGNSQESVTEQDSKDSTYSLSSTLTLSKADYEKHKVYACEVTHQGLSSPVTKSFNRGEC

SEQ ID NO: 17601 - protein, 111 aa, Artificial Sequence
  Description of Artificial Sequence: Synthetic polypeptide
  VL of XENP019402
DTVLTQSPSSLSASVGDRVTITCRASQSVDYDGDSYMNWYQQKPGKPPKLLIYAASNLESGIPARLSGSGSGTDFTLTISSLQPEDFATYYCQQSNEDPFTFGSGTKLEIK

SEQ ID NO: 17602 - protein, 15 aa, Artificial Sequence
  Description of Artificial Sequence: Synthetic peptide
  XENP019402 vlCDR1
RASQSVDYDGDSYMN

SEQ ID NO: 17603 - protein, 7 aa, Artificial Sequence
  Description of Artificial Sequence: Synthetic peptide
  XENP019402 vlCDR2
AASNLES

SEQ ID NO: 17604 - protein, 9 aa, Artificial Sequence
  Description of Artificial Sequence: Synthetic peptide
  XENP019402 vlCDR3
QQSNEDPFT

SEQ ID NO: 17605 - protein, 450 aa, Artificial Sequence; identical to SEQ ID NO: 17595
  Description of Artificial Sequence: Synthetic polypeptide
  XENP019403 7G8_H1L2_IgG1_PVA_/S267K Heavy Chain

SEQ ID NO: 17606 - protein, 121 aa, Artificial Sequence; identical to SEQ ID NO: 17596
  Description of Artificial Sequence: Synthetic polypeptide
  VH of XENP019403

SEQ ID NO: 17607 - protein, 5 aa, Artificial Sequence
  Description of Artificial Sequence: Synthetic peptide
  XENP019403 vhCDR1
DAWMD

SEQ ID NO: 17608 - protein, 19 aa, Artificial Sequence
  Description of Artificial Sequence: Synthetic peptide
  XENP019403 vhCDR2
EIRTKANNHATYYAEKFQG

SEQ ID NO: 17609 - protein, 10 aa, Artificial Sequence
  Description of Artificial Sequence: Synthetic peptide
  XENP019403 vhCDR3
LANWDWYFDV

SEQ ID NO: 17610 - protein, 218 aa, Artificial Sequence
  Description of Artificial Sequence: Synthetic polypeptide
  XENP019403 7G8_H1L2_IgG1_PVA_/S267K Light Chain
DTVLTQSPATLSLSPGERATLSCRASQSVDYDGDSYMNWYQQKPGQPPRLLIYAASNLESGIPARLSGSGSGTDFTLTISSLEPEDFAVYYCQQSNEDPFTFGSGTKLEIKRTVAAPSVFIFPPSDEQLKSGTASVVCLLNNFYPREAKVQWKVDNALQSGNSQESVTEQDSKDSTYSLSSTLTLSKADYEKHKVYACEVTHQGLSSPVTKSFNRGEC

SEQ ID NO: 17611 - protein, 111 aa, Artificial Sequence
  Description of Artificial Sequence: Synthetic polypeptide
  VL of XENP019403
DTVLTQSPATLSLSPGERATLSCRASQSVDYDGDSYMNWYQQKPGQPPRLLIYAASNLESGIPARLSGSGSGTDFTLTISSLEPEDFAVYYCQQSNEDPFTFGSGTKLEIK

SEQ ID NO: 17612 - protein, 15 aa, Artificial Sequence
  Description of Artificial Sequence: Synthetic peptide
  XENP019403 vlCDR1
RASQSVDYDGDSYMN

SEQ ID NO: 17613 - protein, 7 aa, Artificial Sequence
  Description of Artificial Sequence: Synthetic peptide
  XENP019403 vlCDR2
AASNLES

SEQ ID NO: 17614 - protein, 9 aa, Artificial Sequence
  Description of Artificial Sequence: Synthetic peptide
  XENP019403 vlCDR3
QQSNEDPFT

SEQ ID NO: 17615 - protein, 450 aa, Artificial Sequence; identical to SEQ ID NO: 17595
  Description of Artificial Sequence: Synthetic polypeptide
  XENP019404 7G8_H1L3_IgG1_PVA_/S267K Heavy Chain

SEQ ID NO: 17616 - protein, 121 aa, Artificial Sequence; identical to SEQ ID NO: 17596
  Description of Artificial Sequence: Synthetic polypeptide
  VH of XENP019404

SEQ ID NO: 17617 - protein, 5 aa, Artificial Sequence
  Description of Artificial Sequence: Synthetic peptide
  XENP019404 vhCDR1
DAWMD

SEQ ID NO: 17618 - protein, 19 aa, Artificial Sequence
  Description of Artificial Sequence: Synthetic peptide
  XENP019404 vhCDR2
EIRTKANNHATYYAEKFQG

SEQ ID NO: 17619 - protein, 10 aa, Artificial Sequence
  Description of Artificial Sequence: Synthetic peptide
  XENP019404 vhCDR3
LANWDWYFDV

SEQ ID NO: 17620 - protein, 218 aa, Artificial Sequence
  Description of Artificial Sequence: Synthetic polypeptide
  XENP019404 7G8_H1L3_IgG1_PVA_/S267K Light Chain
DTVLTQSPDSLAVSLGERATINCKASQSVDYDGDSYMNWYQQKPGQPPKLLIYAASNLESGIPARLSGSGSGTDFTLTISSLQAEDVAVYYCQQSNEDPFTFGSGTKLEIKRTVAAPSVFIFPPSDEQLKSGTASVVCLLNNFYPREAKVQWKVDNALQSGNSQESVTEQDSKDSTYSLSSTLTLSKADYEKHKVYACEVTHQGLSSPVTKSFNRGEC

SEQ ID NO: 17621 - protein, 111 aa, Artificial Sequence
  Description of Artificial Sequence: Synthetic polypeptide
  VL of XENP019404
DTVLTQSPDSLAVSLGERATINCKASQSVDYDGDSYMNWYQQKPGQPPKLLIYAASNLESGIPARLSGSGSGTDFTLTISSLQAEDVAVYYCQQSNEDPFTFGSGTKLEIK

SEQ ID NO: 17622 - protein, 15 aa, Artificial Sequence
  Description of Artificial Sequence: Synthetic peptide
  XENP019404 vlCDR1
KASQSVDYDGDSYMN

SEQ ID NO: 17623 - protein, 7 aa, Artificial Sequence
  Description of Artificial Sequence: Synthetic peptide
  XENP019404 vlCDR2
AASNLES

SEQ ID NO: 17624 - protein, 9 aa, Artificial Sequence
  Description of Artificial Sequence: Synthetic peptide
  XENP019404 vlCDR3
QQSNEDPFT

SEQ ID NO: 17625 - protein, 450 aa, Artificial Sequence
  Description of Artificial Sequence: Synthetic polypeptide
  XENP019405 7G8_H2L1_IgG1_PVA_/S267K Heavy Chain
EVQLVESGGGLVQPGGSLRLSCAASGFTFSDAWMDWVRQAPGKGLEWVGEIRTKANNHATYYAESVKGRFTISRDDSKSSVYLQMNSLKTEDTAVYYCTRLANWDWYFDVWGAGTTVTVSSASTKGPSVFPLAPSSKSTSGGTAALGCLVKDYFPEPVTVSWNSGALTSGVHTFPAVLQSSGLYSLSSVVTVPSSSLGTQTYICNVNHKPSDTKVDKKVEPKSCDKTHTCPPCPAPPVAGPSVFLFPPKPKDTLMISRTPEVTCVVVDVKHEDPEVKFNWYVDGVEVHNAKTKPREEEYNSTYRVVSVLTVLHQDWLNGKEYKCKVSNKALPAPIEKTISKAKGQPREPQVYTLPPSREEMTKNQVSLTCDVSGFYPSDIAVEWESDGQPENNYKTTPPVLDSDGSFFLYSKLTVDKSRWEQGDVFSCSVMHEALHNHYTQKSLSLSPGK

SEQ ID NO: 17626 - protein, 121 aa, Artificial Sequence
  Description of Artificial Sequence: Synthetic polypeptide
  VH of XENP019405
EVQLVESGGGLVQPGGSLRLSCAASGFTFSDAWMDWVRQAPGKGLEWVGEIRTKANNHATYYAESVKGRFTISRDDSKSSVYLQMNSLKTEDTAVYYCTRLANWDWYFDVWGAGTTVTVSS

SEQ ID NO: 17627 - protein, 5 aa, Artificial Sequence
  Description of Artificial Sequence: Synthetic peptide
  XENP019405 vhCDR1
DAWMD

SEQ ID NO: 17628 - protein, 19 aa, Artificial Sequence
  Description of Artificial Sequence: Synthetic peptide
  XENP019405 vhCDR2
EIRTKANNHATYYAESVKG

SEQ ID NO: 17629 - protein, 10 aa, Artificial Sequence
  Description of Artificial Sequence: Synthetic peptide
  XENP019405 vhCDR3
LANWDWYFDV

SEQ ID NO: 17630 - protein, 218 aa, Artificial Sequence; identical to SEQ ID NO: 17600
  Description of Artificial Sequence: Synthetic polypeptide
  XENP019405 7G8_H2L1_IgG1_PVA_/S267K Light Chain

SEQ ID NO: 17631 - protein, 111 aa, Artificial Sequence; identical to SEQ ID NO: 17601
  Description of Artificial Sequence: Synthetic polypeptide
  VL of XENP019405

SEQ ID NO: 17632 - protein, 15 aa, Artificial Sequence
  Description of Artificial Sequence: Synthetic peptide
  XENP019405 vlCDR1
RASQSVDYDGDSYMN

SEQ ID NO: 17633 - protein, 7 aa, Artificial Sequence
  Description of Artificial Sequence: Synthetic peptide
  XENP019405 vlCDR2
AASNLES

SEQ ID NO: 17634 - protein, 9 aa, Artificial Sequence
  Description of Artificial Sequence: Synthetic peptide
  XENP019405 vlCDR3
QQSNEDPFT

SEQ ID NO: 17635 - protein, 450 aa, Artificial Sequence; identical to SEQ ID NO: 17625
  Description of Artificial Sequence: Synthetic polypeptide
  XENP019406 7G8_H2L2_IgG1_PVA_/S267K Heavy Chain

SEQ ID NO: 17636 - protein, 121 aa, Artificial Sequence; identical to SEQ ID NO: 17626
  Description of Artificial Sequence: Synthetic polypeptide
  VH of XENP019406

SEQ ID NO: 17637 - protein, 5 aa, Artificial Sequence
  Description of Artificial Sequence: Synthetic peptide
  XENP019406 vhCDR1
DAWMD

SEQ ID NO: 17638 - protein, 19 aa, Artificial Sequence
  Description of Artificial Sequence: Synthetic peptide
  XENP019406 vhCDR2
EIRTKANNHATYYAESVKG

SEQ ID NO: 17639 - protein, 10 aa, Artificial Sequence
  Description of Artificial Sequence: Synthetic peptide
  XENP019406 vhCDR3
LANWDWYFDV

SEQ ID NO: 17640 - protein, 218 aa, Artificial Sequence; identical to SEQ ID NO: 17610
  Description of Artificial Sequence: Synthetic polypeptide
  XENP019406 7G8_H2L2_IgG1_PVA_/S267K Light Chain

SEQ ID NO: 17641 - protein, 111 aa, Artificial Sequence; identical to SEQ ID NO: 17611
  Description of Artificial Sequence: Synthetic polypeptide
  VL of XENP019406

SEQ ID NO: 17642 - protein, 15 aa, Artificial Sequence
  Description of Artificial Sequence: Synthetic peptide
  XENP019406 vlCDR1
RASQSVDYDGDSYMN

SEQ ID NO: 17643 - protein, 7 aa, Artificial Sequence
  Description of Artificial Sequence: Synthetic peptide
  XENP019406 vlCDR2
AASNLES

SEQ ID NO: 17644 - protein, 9 aa, Artificial Sequence
  Description of Artificial Sequence: Synthetic peptide
  XENP019406 vlCDR3
QQSNEDPFT

SEQ ID NO: 17645 - protein, 450 aa, Artificial Sequence; identical to SEQ ID NO: 17625
  Description of Artificial Sequence: Synthetic polypeptide
  XENP019407 7G8_H2L3_IgG1_PVA_/S267K Heavy Chain

SEQ ID NO: 17646 - protein, 121 aa, Artificial Sequence; identical to SEQ ID NO: 17626
  Description of Artificial Sequence: Synthetic polypeptide
  VH of XENP019407

SEQ ID NO: 17647 - protein, 5 aa, Artificial Sequence
  Description of Artificial Sequence: Synthetic peptide
  XENP019407 vhCDR1
DAWMD

SEQ ID NO: 17648 - protein, 19 aa, Artificial Sequence
  Description of Artificial Sequence: Synthetic peptide
  XENP019407 vhCDR2
EIRTKANNHATYYAESVKG

SEQ ID NO: 17649 - protein, 10 aa, Artificial Sequence
  Description of Artificial Sequence: Synthetic peptide
  XENP019407 vhCDR3
LANWDWYFDV

SEQ ID NO: 17650 - protein, 218 aa, Artificial Sequence; identical to SEQ ID NO: 17620
  Description of Artificial Sequence: Synthetic polypeptide
  XENP019407 7G8_H2L3_IgG1_PVA_/S267K Light Chain

SEQ ID NO: 17651 - protein, 111 aa, Artificial Sequence; identical to SEQ ID NO: 17621
  Description of Artificial Sequence: Synthetic polypeptide
  VL of XENP019407

SEQ ID NO: 17652 - protein, 15 aa, Artificial Sequence
  Description of Artificial Sequence: Synthetic peptide
  XENP019407 vlCDR1
KASQSVDYDGDSYMN

SEQ ID NO: 17653 - protein, 7 aa, Artificial Sequence
  Description of Artificial Sequence: Synthetic peptide
  XENP019407 vlCDR2
AASNLES

SEQ ID NO: 17654 - protein, 9 aa, Artificial Sequence
  Description of Artificial Sequence: Synthetic peptide
  XENP019407 vlCDR3
QQSNEDPFT

SEQ ID NO: 17655 - protein, 446 aa, Artificial Sequence
  Description of Artificial Sequence: Synthetic polypeptide
  XENP019408 11C12_H1L1_IgG1_PVA_/S267K Heavy Chain
EVQLVESGGGLVQPGGSLRLSCAASGFTFSSFGMHWVRQAPGKGLEWVSYISSDSSTFSYADSVKGRFTISRDNAKNSLYLQMNSLRAEDTAVYYCARYYYGYVDFWGQGTTVTVSSASTKGPSVFPLAPSSKSTSGGTAALGCLVKDYFPEPVTVSWNSGALTSGVHTFPAVLQSSGLYSLSSVVTVPSSSLGTQTYICNVNHKPSDTKVDKKVEPKSCDKTHTCPPCPAPPVAGPSVFLFPPKPKDTLMISRTPEVTCVVVDVKHEDPEVKFNWYVDGVEVHNAKTKPREEEYNSTYRVVSVLTVLHQDWLNGKEYKCKVSNKALPAPIEKTISKAKGQPREPQVYTLPPSREEMTKNQVSLTCDVSGFYPSDIAVEWESDGQPENNYKTTPPVLDSDGSFFLYSKLTVDKSRWEQGDVFSCSVMHEALHNHYTQKSLSLSPGK

SEQ ID NO: 17656 - protein, 117 aa, Artificial Sequence
  Description of Artificial Sequence: Synthetic polypeptide
  VH of XENP019408
EVQLVESGGGLVQPGGSLRLSCAASGFTFSSFGMHWVRQAPGKGLEWVSYISSDSSTFSYADSVKGRFTISRDNAKNSLYLQMNSLRAEDTAVYYCARYYYGYVDFWGQGTTVTVSS

SEQ ID NO: 17657 - protein, 5 aa, Artificial Sequence
  Description of Artificial Sequence: Synthetic peptide
  XENP019408 vhCDR1
SFGMH

SEQ ID NO: 17658 - protein, 17 aa, Artificial Sequence
  Description of Artificial Sequence: Synthetic peptide
  XENP019408 vhCDR2
YISSDSSTFSYADSVKG

SEQ ID NO: 17659 - protein, 8 aa, Artificial Sequence
  Description of Artificial Sequence: Synthetic peptide
  XENP019408 vhCDR3
YYYGYVDF

SEQ ID NO: 17660 - protein, 214 aa, Artificial Sequence
  Description of Artificial Sequence: Synthetic polypeptide
  XENP019408 11C12_H1L1_IgG1_PVA_/S267K Light Chain
DIQMTQSPSSLSASVGDRVTITCRASEDIYNRLAWYQQKPGKAPKLLISGATSFETGVPSRFSGSGSGKDYTLTISSLQPEDFATYYCQQYWSTPWTFGGGTKVEIKRTVAAPSVFIFPPSDEQLKSGTASVVCLLNNFYPREAKVQWKVDNALQSGNSQESVTEQDSKDSTYSLSSTLTLSKADYEKHKVYACEVTHQGLSSPVTKSFNRGEC

SEQ ID NO: 17661 - protein, 107 aa, Artificial Sequence
  Description of Artificial Sequence: Synthetic polypeptide
  VL of XENP019408
DIQMTQSPSSLSASVGDRVTITCRASEDIYNRLAWYQQKPGKAPKLLISGATSFETGVPSRFSGSGSGKDYTLTISSLQPEDFATYYCQQYWSTPWTFGGGTKVEIK

SEQ ID NO: 17662 - protein, 11 aa, Artificial Sequence
  Description of Artificial Sequence: Synthetic peptide
  XENP019408 vlCDR1
RASEDIYNRLA

SEQ ID NO: 17663 - protein, 7 aa, Artificial Sequence
  Description of Artificial Sequence: Synthetic peptide
  XENP019408 vlCDR2
GATSFET

SEQ ID NO: 17664 - protein, 9 aa, Artificial Sequence
  Description of Artificial Sequence: Synthetic peptide
  XENP019408 vlCDR3
QQYWSTPWT

SEQ ID NO: 17665 - protein, 447 aa, Artificial Sequence; identical to SEQ ID NO: 17235
  Description of Artificial Sequence: Synthetic polypeptide
  XENP020023 2A11_H1L0_IgG1_PVA_/S267K Heavy Chain

SEQ ID NO: 17666 - protein, 118 aa, Artificial Sequence; identical to SEQ ID NO: 17236
  Description of Artificial Sequence: Synthetic polypeptide
  VH of XENP020023

SEQ ID NO: 17667 - protein, 5 aa, Artificial Sequence
  Description of Artificial Sequence: Synthetic peptide
  XENP020023 vhCDR1
DYYMH

SEQ ID NO: 17668 - protein, 17 aa, Artificial Sequence
  Description of Artificial Sequence: Synthetic peptide
  XENP020023 vhCDR2
WIDPENGDTEYAPKFQG

SEQ ID NO: 17669 - protein, 9 aa, Artificial Sequence
  Description of Artificial Sequence: Synthetic peptide
  XENP020023 vhCDR3
RGVRQALDY

SEQ ID NO: 17670 - protein, 214 aa, Artificial Sequence; identical to SEQ ID NO: 17230
  Description of Artificial Sequence: Synthetic polypeptide
  XENP020023 2A11_H1L0_IgG1_PVA_/S267K Light Chain

SEQ ID NO: 17671 - protein, 107 aa, Artificial Sequence; identical to SEQ ID NO: 17231
  Description of Artificial Sequence: Synthetic polypeptide
  VL of XENP020023

SEQ ID NO: 17672 - protein, 11 aa, Artificial Sequence
  Description of Artificial Sequence: Synthetic peptide
  XENP020023 vlCDR1
RASQDIGNYLN

SEQ ID NO: 17673 - protein, 7 aa, Artificial Sequence
  Description of Artificial Sequence: Synthetic peptide
  XENP020023 vlCDR2
YTSRLHS

SEQ ID NO: 17674 - protein, 9 aa, Artificial Sequence
  Description of Artificial Sequence: Synthetic peptide
  XENP020023 vlCDR3
QQGNTLPYT

SEQ ID NO: 17675 - protein, 447 aa, Artificial Sequence; identical to SEQ ID NO: 17225
  Description of Artificial Sequence: Synthetic polypeptide
  XENP020024 2A11_H0L1_IgG1_PVA_/S267K Heavy Chain

SEQ ID NO: 17676 - protein, 118 aa, Artificial Sequence; identical to SEQ ID NO: 17226
  Description of Artificial Sequence: Synthetic polypeptide
  VH of XENP020024

SEQ ID NO: 17677 - protein, 5 aa, Artificial Sequence
  Description of Artificial Sequence: Synthetic peptide
  XENP020024 vhCDR1
DYYMH

SEQ ID NO: 17678 - protein, 17 aa, Artificial Sequence
  Description of Artificial Sequence: Synthetic peptide
  XENP020024 vhCDR2
WIDPENGDTEYAPKFQG

SEQ ID NO: 17679 - protein, 9 aa, Artificial Sequence
  Description of Artificial Sequence: Synthetic peptide
  XENP020024 vhCDR3
RGVRQALDY

SEQ ID NO: 17680 - protein, 214 aa, Artificial Sequence; identical to SEQ ID NO: 17240
  Description of Artificial Sequence: Synthetic polypeptide
  XENP020024 2A11_H0L1_IgG1_PVA_/S267K Light Chain

SEQ ID NO: 17681 - protein, 107 aa, Artificial Sequence; identical to SEQ ID NO: 17241
  Description of Artificial Sequence: Synthetic polypeptide
  VL of XENP020024

SEQ ID NO: 17682 - protein, 11 aa, Artificial Sequence
  Description of Artificial Sequence: Synthetic peptide
  XENP020024 vlCDR1
RASQDIGNYLN

SEQ ID NO: 17683 - protein, 7 aa, Artificial Sequence
  Description of Artificial Sequence: Synthetic peptide
  XENP020024 vlCDR2
YTSRLHS

SEQ ID NO: 17684 - protein, 9 aa, Artificial Sequence
  Description of Artificial Sequence: Synthetic peptide
  XENP020024 vlCDR3
QQGNTLPYT

SEQ ID NO: 17685 - protein, 445 aa, Artificial Sequence; identical to SEQ ID NO: 17455
  Description of Artificial Sequence: Synthetic polypeptide
  XENP020025 7A6_H1L0_IgG1_PVA_/S267K Heavy Chain

SEQ ID NO: 17686 - protein, 116 aa, Artificial Sequence; identical to SEQ ID NO: 17456
  Description of Artificial Sequence: Synthetic polypeptide
  VH of XENP020025

SEQ ID NO: 17687 - protein, 6 aa, Artificial Sequence
  Description of Artificial Sequence: Synthetic peptide
  XENP020025 vhCDR1
SGYFWN

SEQ ID NO: 17688 - protein, 15 aa, Artificial Sequence
  Description of Artificial Sequence: Synthetic peptide
  XENP020025 vhCDR2
YISYDSNYYNPSVKG

SEQ ID NO: 17689 - protein, 8 aa, Artificial Sequence
  Description of Artificial Sequence: Synthetic peptide
  XENP020025 vhCDR3
GGITTFDY

SEQ ID NO: 17690 - protein, 218 aa, Artificial Sequence; identical to SEQ ID NO: 17450
  Description of Artificial Sequence: Synthetic polypeptide
  XENP020025 7A6_H1L0_IgG1_PVA_/S267K Light Chain

SEQ ID NO: 17691 - protein, 111 aa, Artificial Sequence; identical to SEQ ID NO: 17451
  Description of Artificial Sequence: Synthetic polypeptide
  VL of XENP020025

SEQ ID NO: 17692 - protein, 15 aa, Artificial Sequence
  Description of Artificial Sequence: Synthetic peptide
  XENP020025 vlCDR1
KASQSVDYDGDSYMN

SEQ ID NO: 17693 - protein, 7 aa, Artificial Sequence
  Description of Artificial Sequence: Synthetic peptide
  XENP020025 vlCDR2
AASNLES

SEQ ID NO: 17694 - protein, 9 aa, Artificial Sequence
  Description of Artificial Sequence: Synthetic peptide
  XENP020025 vlCDR3
QQSNEDPRT

SEQ ID NO: 17695 - protein, 445 aa, Artificial Sequence; identical to SEQ ID NO: 17445
  Description of Artificial Sequence: Synthetic polypeptide
  XENP020026 7A6_H0L1_IgG1_PVA_/S267K Heavy Chain

SEQ ID NO: 17696 - protein, 116 aa, Artificial Sequence; identical to SEQ ID NO: 17446
  Description of Artificial Sequence: Synthetic polypeptide
  VH of XENP020026

SEQ ID NO: 17697 - protein, 6 aa, Artificial Sequence
  Description of Artificial Sequence: Synthetic peptide
  XENP020026 vhCDR1
SGYFWN

SEQ ID NO: 17698 - protein, 15 aa, Artificial Sequence
  Description of Artificial Sequence: Synthetic peptide
  XENP020026 vhCDR2
YISYDSNYYNPSLKN

SEQ ID NO: 17699 - protein, 8 aa, Artificial Sequence
  Description of Artificial Sequence: Synthetic peptide
  XENP020026 vhCDR3
GGITTFDY

SEQ ID NO: 17700 - protein, 218 aa, Artificial Sequence; identical to SEQ ID NO: 17460
  Description of Artificial Sequence: Synthetic polypeptide
  XENP020026 7A6_H0L1_IgG1_PVA_/S267K Light Chain

SEQ ID NO: 17701 - protein, 111 aa, Artificial Sequence; identical to SEQ ID NO: 17461
  Description of Artificial Sequence: Synthetic polypeptide
  VL of XENP020026

SEQ ID NO: 17702 - protein, 15 aa, Artificial Sequence
  Description of Artificial Sequence: Synthetic peptide
  XENP020026 vlCDR1
RASQSVDYDGDSYMN

SEQ ID NO: 17703 - protein, 7 aa, Artificial Sequence
  Description of Artificial Sequence: Synthetic peptide
  XENP020026 vlCDR2
AASNLES

SEQ ID NO: 17704 - protein, 9 aa, Artificial Sequence
  Description of Artificial Sequence: Synthetic peptide
  XENP020026 vlCDR3
QQSNEDPRT

SEQ ID NO: 17705 - protein, 445 aa, Artificial Sequence; identical to SEQ ID NO: 17445
  Description of Artificial Sequence: Synthetic polypeptide
  XENP020027 7A6_H0L3_IgG1_PVA_/S267K Heavy Chain

SEQ ID NO: 17706 - protein, 116 aa, Artificial Sequence; identical to SEQ ID NO: 17446
  Description of Artificial Sequence: Synthetic polypeptide
  VH of XENP020027

SEQ ID NO: 17707 - protein, 6 aa, Artificial Sequence
  Description of Artificial Sequence: Synthetic peptide
  XENP020027 vhCDR1
SGYFWN

SEQ ID NO: 17708 - protein, 15 aa, Artificial Sequence
  Description of Artificial Sequence: Synthetic peptide
  XENP020027 vhCDR2
YISYDSNYYNPSLKN

SEQ ID NO: 17709 - protein, 8 aa, Artificial Sequence
  Description of Artificial Sequence: Synthetic peptide
  XENP020027 vhCDR3
GGITTFDY

SEQ ID NO: 17710 - protein, 218 aa, Artificial Sequence; identical to SEQ ID NO: 17480
  Description of Artificial Sequence: Synthetic polypeptide
  XENP020027 7A6_H0L3_IgG1_PVA_/S267K Light Chain

SEQ ID NO: 17711 - protein, 111 aa, Artificial Sequence; identical to SEQ ID NO: 17481
  Description of Artificial Sequence: Synthetic polypeptide
  VL of XENP020027

SEQ ID NO: 17712 - protein, 15 aa, Artificial Sequence
  Description of Artificial Sequence: Synthetic peptide
  XENP020027 vlCDR1
KASQSVDYDGDSYMN

SEQ ID NO: 17713 - protein, 7 aa, Artificial Sequence
  Description of Artificial Sequence: Synthetic peptide
  XENP020027 vlCDR2
AASNLES

SEQ ID NO: 17714 - protein, 9 aa, Artificial Sequence
  Description of Artificial Sequence: Synthetic peptide
  XENP020027 vlCDR3
QQSNEDPRT

SEQ ID NO: 17715 - protein, 450 aa, Artificial Sequence; identical to SEQ ID NO: 17595
  Description of Artificial Sequence: Synthetic polypeptide
  XENP020028 7G8_H1L0_IgG1_PVA_/S267K Heavy Chain

SEQ ID NO: 17716 - protein, 121 aa, Artificial Sequence; identical to SEQ ID NO: 17596
  Description of Artificial Sequence: Synthetic polypeptide
  VH of XENP020028

SEQ ID NO: 17717 - protein, 5 aa, Artificial Sequence
  Description of Artificial Sequence: Synthetic peptide
  XENP020028 vhCDR1
DAWMD

SEQ ID NO: 17718 - protein, 19 aa, Artificial Sequence
  Description of Artificial Sequence: Synthetic peptide
  XENP020028 vhCDR2
EIRTKANNHATYYAEKFQG

SEQ ID NO: 17719 - protein, 10 aa, Artificial Sequence
  Description of Artificial Sequence: Synthetic peptide
  XENP020028 vhCDR3
LANWDWYFDV

SEQ ID NO: 17720 - protein, 218 aa, Artificial Sequence; identical to SEQ ID NO: 17590
  Description of Artificial Sequence: Synthetic polypeptide
  XENP020028 7G8_H1L0_IgG1_PVA_/S267K Light Chain

SEQ ID NO: 17721 - protein, 111 aa, Artificial Sequence; identical to SEQ ID NO: 17591
  Description of Artificial Sequence: Synthetic polypeptide
  VL of XENP020028

SEQ ID NO: 17722 - protein, 15 aa, Artificial Sequence
  Description of Artificial Sequence: Synthetic peptide
  XENP020028 vlCDR1
KASQSVDYDGDSYMN

SEQ ID NO: 17723 - protein, 7 aa, Artificial Sequence
  Description of Artificial Sequence: Synthetic peptide
  XENP020028 vlCDR2
AASNLES

SEQ ID NO: 17724 - protein, 9 aa, Artificial Sequence
  Description of Artificial Sequence: Synthetic peptide
  XENP020028 vlCDR3
QQSNEDPFT

SEQ ID NO: 17725 - protein, 450 aa, Artificial Sequence; identical to SEQ ID NO: 17585
  Description of Artificial Sequence: Synthetic polypeptide
  XENP020029 7G8_H0L1_IgG1_PVA_/S267K Heavy Chain

SEQ ID NO: 17726 - protein, 121 aa, Artificial Sequence; identical to SEQ ID NO: 17586
  Description of Artificial Sequence: Synthetic polypeptide
  VH of XENP020029

SEQ ID NO: 17727 - protein, 5 aa, Artificial Sequence
  Description of Artificial Sequence: Synthetic peptide
  XENP020029 vhCDR1
DAWMD

SEQ ID NO: 17728 - protein, 19 aa, Artificial Sequence
  Description of Artificial Sequence: Synthetic peptide
  XENP020029 vhCDR2
EIRTKANNHATYYAESVKG

SEQ ID NO: 17729 - protein, 10 aa, Artificial Sequence
  Description of Artificial Sequence: Synthetic peptide
  XENP020029 vhCDR3
LANWDWYFDV

SEQ ID NO: 17730 - protein, 218 aa, Artificial Sequence; identical to SEQ ID NO: 17600
  Description of Artificial Sequence: Synthetic polypeptide
  XENP020029 7G8_H0L1_IgG1_PVA_/S267K Light Chain

SEQ ID NO: 17731 - protein, 111 aa, Artificial Sequence; identical to SEQ ID NO: 17601
  Description of Artificial Sequence: Synthetic polypeptide
  VL of XENP020029

SEQ ID NO: 17732 - protein, 15 aa, Artificial Sequence
  Description of Artificial Sequence: Synthetic peptide
  XENP020029 vlCDR1
RASQSVDYDGDSYMN

SEQ ID NO: 17733 - protein, 7 aa, Artificial Sequence
  Description of Artificial Sequence: Synthetic peptide
  XENP020029 vlCDR2
AASNLES

SEQ ID NO: 17734 - protein, 9 aa, Artificial Sequence
  Description of Artificial Sequence: Synthetic peptide
  XENP020029 vlCDR3
QQSNEDPFT

SEQ ID NO: 17735 - protein, 450 aa, Artificial Sequence; identical to SEQ ID NO: 17625
  Description of Artificial Sequence: Synthetic polypeptide
  XENP020262 7G8_H2L0_IgG1_PVA_/S267K Heavy Chain

SEQ ID NO: 17736 - protein, 121 aa, Artificial Sequence; identical to SEQ ID NO: 17626
  Description of Artificial Sequence: Synthetic polypeptide
  VH of XENP020262

SEQ ID NO: 17737 - protein, 5 aa, Artificial Sequence
  Description of Artificial Sequence: Synthetic peptide
  XENP020262 vhCDR1
DAWMD

SEQ ID NO: 17738 - protein, 19 aa, Artificial Sequence
  Description of Artificial Sequence: Synthetic peptide
  XENP020262 vhCDR2
EIRTKANNHATYYAESVKG

SEQ ID NO: 17739 - protein, 10 aa, Artificial Sequence
  Description of Artificial Sequence: Synthetic peptide
  XENP020262 vhCDR3
LANWDWYFDV

SEQ ID NO: 17740 - protein, 218 aa, Artificial Sequence; identical to SEQ ID NO: 17590
  Description of Artificial Sequence: Synthetic polypeptide
  XENP020262 7G8_H2L0_IgG1_PVA_/S267K Light Chain

SEQ ID NO: 17741 - protein, 111 aa, Artificial Sequence; identical to SEQ ID NO: 17591
  Description of Artificial Sequence: Synthetic polypeptide
  VL of XENP020262

SEQ ID NO: 17742 - protein, 15 aa, Artificial Sequence
  Description of Artificial Sequence: Synthetic peptide
  XENP020262 vlCDR1
KASQSVDYDGDSYMN

SEQ ID NO: 17743 - protein, 7 aa, Artificial Sequence
  Description of Artificial Sequence: Synthetic peptide
  XENP020262 vlCDR2
AASNLES

SEQ ID NO: 17744 - protein, 9 aa, Artificial Sequence
  Description of Artificial Sequence: Synthetic peptide
  XENP020262 vlCDR3
QQSNEDPFT

SEQ ID NO: 17745 - protein, 450 aa, Artificial Sequence; identical to SEQ ID NO: 17585
  Description of Artificial Sequence: Synthetic polypeptide
  XENP020263 7G8_H0L2_IgG1_PVA_/S267K Heavy Chain

SEQ ID NO: 17746 - protein, 121 aa, Artificial Sequence; identical to SEQ ID NO: 17586
  Description of Artificial Sequence: Synthetic polypeptide
  VH of XENP020263

SEQ ID NO: 17747 - protein, 5 aa, Artificial Sequence
  Description of Artificial Sequence: Synthetic peptide
  XENP020263 vhCDR1
DAWMD

SEQ ID NO: 17748 - protein, 19 aa, Artificial Sequence
  Description of Artificial Sequence: Synthetic peptide
  XENP020263 vhCDR2
EIRTKANNHATYYAESVKG

SEQ ID NO: 17749 - protein, 10 aa, Artificial Sequence
  Description of Artificial Sequence: Synthetic peptide
  XENP020263 vhCDR3
LANWDWYFDV

SEQ ID NO: 17750 - protein, 218 aa, Artificial Sequence; identical to SEQ ID NO: 17610
  Description of Artificial Sequence: Synthetic polypeptide
  XENP020263 7G8_H0L2_IgG1_PVA_/S267K Light Chain

SEQ ID NO: 17751 - protein, 111 aa, Artificial Sequence; identical to SEQ ID NO: 17611
  Description of Artificial Sequence: Synthetic polypeptide
  VL of XENP020263

SEQ ID NO: 17752 - protein, 15 aa, Artificial Sequence
  Description of Artificial Sequence: Synthetic peptide
  XENP020263 vlCDR1
RASQSVDYDGDSYMN

SEQ ID NO: 17753 - protein, 7 aa, Artificial Sequence
  Description of Artificial Sequence: Synthetic peptide
  XENP020263 vlCDR2
AASNLES

SEQ ID NO: 17754 - protein, 9 aa, Artificial Sequence
  Description of Artificial Sequence: Synthetic peptide
  XENP020263 vlCDR3
QQSNEDPFT

SEQ ID NO: 17755 - protein, 444 aa, Artificial Sequence
  Description of Artificial Sequence: Synthetic polypeptide
  XENP020412 8D7_H0L0_IgG1_PVA_/S267K Heavy Chain
QVQLKQSGPGLVQPSQSLSITCTVSGFSLSSYGVHWVRQSPGKGLEWLGVIWSGSTDYNAAFISRLSISKDNSKSQVFFKMNSLQPNDTAIYYCARTYYYAMDYWGQGTSVTVSSASTKGPSVFPLAPSSKSTSGGTAALGCLVKDYFPEPVTVSWNSGALTSGVHTFPAVLQSSGLYSLSSVVTVPSSSLGTQTYICNVNHKPSNTKVDKKVEPKSCDKTHTCPPCPAPPVAGPSVFLFPPKPKDTLMISRTPEVTCVVVDVKHEDPEVKFNWYVDGVEVHNAKTKPREEQYNSTYRVVSVLTVLHQDWLNGKEYKCKVSNKALPAPIEKTISKAKGQPREPQVYTLPPSREEMTKNQVSLTCLVKGFYPSDIAVEWESNGQPENNYKTTPPVLDSDGSFFLYSKLTVDKSRWQQGNVFSCSVMHEALHNHYTQKSLSLSPGK

SEQ ID NO: 17756 - protein, 115 aa, Artificial Sequence
  Description of Artificial Sequence: Synthetic polypeptide
  VH of XENP020412
QVQLKQSGPGLVQPSQSLSITCTVSGFSLSSYGVHWVRQSPGKGLEWLGVIWSGSTDYNAAFISRLSISKDNSKSQVFFKMNSLQPNDTAIYYCARTYYYAMDYWGQGTSVTVSS

SEQ ID NO: 17757 - protein, 5 aa, Artificial Sequence
  Description of Artificial Sequence: Synthetic peptide
  XENP020412 vhCDR1
SYGVH

SEQ ID NO: 17758 - protein, 15 aa, Artificial Sequence
  Description of Artificial Sequence: Synthetic peptide
  XENP020412 vhCDR2
VIWSGSTDYNAAFIS

SEQ ID NO: 17759 - protein, 8 aa, Artificial Sequence
  Description of Artificial Sequence: Synthetic peptide
  XENP020412 vhCDR3
TYYYAMDY

SEQ ID NO: 17760 - protein, 214 aa, Artificial Sequence
  Description of Artificial Sequence: Synthetic polypeptide
  XENP020412 8D7_H0L0_IgG1_PVA_/S267K Light Chain
DIQMTQSPASLSVSVGETVTITCRASENIYSNLAWYQQKQGKSPQFLIYAATNLADGVPSRFSGSGSGTQYSLKINSLQSEDFGSYYCQHFWGTPWTFGGGTKLEIKRTVAAPSVFIFPPSDEQLKSGTASVVCLLNNFYPREAKVQWKVDNALQSGNSQESVTEQDSKDSTYSLSSTLTLSKADYEKHKVYACEVTHQGLSSPVTKSFNRGEC

SEQ ID NO: 17761 - protein, 107 aa, Artificial Sequence
  Description of Artificial Sequence: Synthetic polypeptide
  VL of XENP020412
DIQMTQSPASLSVSVGETVTITCRASENIYSNLAWYQQKQGKSPQFLIYAATNLADGVPSRFSGSGSGTQYSLKINSLQSEDFGSYYCQHFWGTPWTFGGGTKLEIK

SEQ ID NO: 17762 - protein, 11 aa, Artificial Sequence
  Description of Artificial Sequence: Synthetic peptide
  XENP020412 vlCDR1
RASENIYSNLA

SEQ ID NO: 17763 - protein, 7 aa, Artificial Sequence
  Description of Artificial Sequence: Synthetic peptide
  XENP020412 vlCDR2
AATNLAD

SEQ ID NO: 17764 - protein, 9 aa, Artificial Sequence
  Description of Artificial Sequence: Synthetic peptide
  XENP020412 vlCDR3
QHFWGTPWT

SEQ ID NO: 17765 - protein, 444 aa, Artificial Sequence
  Description of Artificial Sequence: Synthetic polypeptide
  XENP020413 8D7_H2L1_IgG1_PVA_/S267K Heavy Chain
QVQLVQSGAEVKKPGASVKVSCKVSGFSLSSYGVHWVRQAPGQGLEWLGVIWSGSTDYNAKFQGRVTITKDNSKSTVYFELSSLRSEDTAVYYCARTYYYAMDYWGQGTLVTVSSASTKGPSVFPLAPSSKSTSGGTAALGCLVKDYFPEPVTVSWNSGALTSGVHTFPAVLQSSGLYSLSSVVTVPSSSLGTQTYICNVNHKPSNTKVDKKVEPKSCDKTHTCPPCPAPPVAGPSVFLFPPKPKDTLMISRTPEVTCVVVDVKHEDPEVKFNWYVDGVEVHNAKTKPREEQYNSTYRVVSVLTVLHQDWLNGKEYKCKVSNKALPAPIEKTISKAKGQPREPQVYTLPPSREEMTKNQVSLTCLVKGFYPSDIAVEWESNGQPENNYKTTPPVLDSDGSFFLYSKLTVDKSRWQQGNVFSCSVMHEALHNHYTQKSLSLSPGK

SEQ ID NO: 17766 - protein, 115 aa, Artificial Sequence
  Description of Artificial Sequence: Synthetic polypeptide
  VH of XENP020413
QVQLVQSGAEVKKPGASVKVSCKVSGFSLSSYGVHWVRQAPGQGLEWLGVIWSGSTDYNAKFQGRVTITKDNSKSTVYFELSSLRSEDTAVYYCARTYYYAMDYWGQGTLVTVSS

SEQ ID NO: 17767 - protein, 5 aa, Artificial Sequence
  Description of Artificial Sequence: Synthetic peptide
  XENP020413 vhCDR1
SYGVH

SEQ ID NO: 17768 - protein, 15 aa, Artificial Sequence
  Description of Artificial Sequence: Synthetic peptide
  XENP020413 vhCDR2
VIWSGSTDYNAKFQG

SEQ ID NO: 17769 - protein, 8 aa, Artificial Sequence
  Description of Artificial Sequence: Synthetic peptide
  XENP020413 vhCDR3
TYYYAMDY

SEQ ID NO: 17770 - protein, 214 aa, Artificial Sequence; identical to SEQ ID NO: 17220
  Description of Artificial Sequence: Synthetic polypeptide
  XENP020413 8D7_H2L1_IgG1_PVA_/S267K Light Chain

SEQ ID NO: 17771 - protein, 107 aa, Artificial Sequence; identical to SEQ ID NO: 17221
  Description of Artificial Sequence: Synthetic polypeptide
  VL of XENP020413

SEQ ID NO: 17772 - protein, 11 aa, Artificial Sequence
  Description of Artificial Sequence: Synthetic peptide
  XENP020413 vlCDR1
RASENIYSNLA

SEQ ID NO: 17773 - protein, 7 aa, Artificial Sequence
  Description of Artificial Sequence: Synthetic peptide
  XENP020413 vlCDR2
AATNLAD

SEQ ID NO: 17774 - protein, 9 aa, Artificial Sequence
  Description of Artificial Sequence: Synthetic peptide
  XENP020413 vlCDR3
QHFWGTPWT

SEQ ID NO: 17775 - protein, 444 aa, Artificial Sequence
  Description of Artificial Sequence: Synthetic polypeptide
  XENP020414 8D7_H3L1_IgG1_PVA_/S267K Heavy Chain
QVQLVESGGGVVQPGRSLRLSCAVSGFSLSSYGVHWVRQAPGKGLEWVAVIWSGSTDYNAAVKGRFTISKDNSKSTVYLQMNSLRAEDTAVYYCARTYYYAMDYWGQGTLVTVSSASTKGPSVFPLAPSSKSTSGGTAALGCLVKDYFPEPVTVSWNSGALTSGVHTFPAVLQSSGLYSLSSVVTVPSSSLGTQTYICNVNHKPSNTKVDKKVEPKSCDKTHTCPPCPAPPVAGPSVFLFPPKPKDTLMISRTPEVTCVVVDVKHEDPEVKFNWYVDGVEVHNAKTKPREEQYNSTYRVVSVLTVLHQDWLNGKEYKCKVSNKALPAPIEKTISKAKGQPREPQVYTLPPSREEMTKNQVSLTCLVKGFYPSDIAVEWESNGQPENNYKTTPPVLDSDGSFFLYSKLTVDKSRWQQGNVFSCSVMHEALHNHYTQKSLSLSPGK

SEQ ID NO: 17776 - protein, 115 aa, Artificial Sequence
  Description of Artificial Sequence: Synthetic polypeptide
  VH of XENP020414
QVQLVESGGGVVQPGRSLRLSCAVSGFSLSSYGVHWVRQAPGKGLEWVAVIWSGSTDYNAAVKGRFTISKDNSKSTVYLQMNSLRAEDTAVYYCARTYYYAMDYWGQGTLVTVSS

SEQ ID NO: 17777 - protein, 5 aa, Artificial Sequence
  Description of Artificial Sequence: Synthetic peptide
  XENP020414 vhCDR1
SYGVH

SEQ ID NO: 17778 - protein, 15 aa, Artificial Sequence
  Description of Artificial Sequence: Synthetic peptide
  XENP020414 vhCDR2
VIWSGSTDYNAAVKG

SEQ ID NO: 17779 - protein, 8 aa, Artificial Sequence
  Description of Artificial Sequence: Synthetic peptide
  XENP020414 vhCDR3
TYYYAMDY

SEQ ID NO: 17780 - protein, 214 aa, Artificial Sequence; identical to SEQ ID NO: 17220
  Description of Artificial Sequence: Synthetic polypeptide
  XENP020414 8D7_H3L1_IgG1_PVA_/S267K Light Chain

SEQ ID NO: 17781 - protein, 107 aa, Artificial Sequence; identical to SEQ ID NO: 17221
  Description of Artificial Sequence: Synthetic polypeptide
  VL of XENP020414

SEQ ID NO: 17782 - protein, 11 aa, Artificial Sequence
  Description of Artificial Sequence: Synthetic peptide
  XENP020414 vlCDR1
RASENIYSNLA

SEQ ID NO: 17783 - protein, 7 aa, Artificial Sequence
  Description of Artificial Sequence: Synthetic peptide
  XENP020414 vlCDR2
AATNLAD

SEQ ID NO: 17784 - protein, 9 aa, Artificial Sequence
  Description of Artificial Sequence: Synthetic peptide
  XENP020414 vlCDR3
QHFWGTPWT

SEQ ID NO: 17785 - protein, 449 aa, Artificial Sequence
  Description of Artificial Sequence: Synthetic polypeptide
  XENP020415 4C8_H0L0_IgG1_PVA_/S267K Heavy Chain
EVQLQQSGPELVKPGASVKISCKASGYTFTDYNVHWVKQSHGKSLEWIGYIYPYTGGTGYNQKFKSKATLTVDNSSSTAYMELRSLTSEDSAVYYCARSDDGYSYAMDYWGQGTSVTVSSASTKGPSVFPLAPSSKSTSGGTAALGCLVKDYFPEPVTVSWNSGALTSGVHTFPAVLQSSGLYSLSSVVTVPSSSLGTQTYICNVNHKPSNTKVDKKVEPKSCDKTHTCPPCPAPPVAGPSVFLFPPKPKDTLMISRTPEVTCVVVDVKHEDPEVKFNWYVDGVEVHNAKTKPREEQYNSTYRVVSVLTVLHQDWLNGKEYKCKVSNKALPAPIEKTISKAKGQPREPQVYTLPPSREEMTKNQVSLTCLVKGFYPSDIAVEWESNGQPENNYKTTPPVLDSDGSFFLYSKLTVDKSRWQQGNVFSCSVMHEALHNHYTQKSLSLSPGK

SEQ ID NO: 17786 - protein, 120 aa, Artificial Sequence
  Description of Artificial Sequence: Synthetic polypeptide
  VH of XENP020415
EVQLQQSGPELVKPGASVKISCKASGYTFTDYNVHWVKQSHGKSLEWIGYIYPYTGGTGYNQKFKSKATLTVDNSSSTAYMELRSLTSEDSAVYYCARSDDGYSYAMDYWGQGTSVTVSS

SEQ ID NO: 17787 - protein, 5 aa, Artificial Sequence
  Description of Artificial Sequence: Synthetic peptide
  XENP020415 vhCDR1
DYNVH

SEQ ID NO: 17788 - protein, 17 aa, Artificial Sequence
  Description of Artificial Sequence: Synthetic peptide
  XENP020415 vhCDR2
YIYPYTGGTGYNQKFKS

SEQ ID NO: 17789 - protein, 11 aa, Artificial Sequence
  Description of Artificial Sequence: Synthetic peptide
  XENP020415 vhCDR3
SDDGYSYAMDY

SEQ ID NO: 17790 - protein, 213 aa, Artificial Sequence
  Description of Artificial Sequence: Synthetic polypeptide
  XENP020415 4C8_H0L0_IgG1_PVA_/S267K Light Chain
DIQMTQTTSSLSASLGDRVTISCRASQDISNYLNWYQQKPDGTVKLLIYYTSRLHSGVPSRFSGSGSGTDYSLTISNLEQEDIATYFCQQGNTLWTFGGGTKLEIKRTVAAPSVFIFPPSDEQLKSGTASVVCLLNNFYPREAKVQWKVDNALQSGNSQESVTEQDSKDSTYSLSSTLTLSKADYEKHKVYACEVTHQGLSSPVTKSFNRGEC

SEQ ID NO: 17791 - protein, 106 aa, Artificial Sequence
  Description of Artificial Sequence: Synthetic polypeptide
  VL of XENP020415
DIQMTQTTSSLSASLGDRVTISCRASQDISNYLNWYQQKPDGTVKLLIYYTSRLHSGVPSRFSGSGSGTDYSLTISNLEQEDIATYFCQQGNTLWTFGGGTKLEIK

SEQ ID NO: 17792 - protein, 11 aa, Artificial Sequence
  Description of Artificial Sequence: Synthetic peptide
  XENP020415 vlCDR1
RASQDISNYLN

SEQ ID NO: 17793 - protein, 7 aa, Artificial Sequence
  Description of Artificial Sequence: Synthetic peptide
  XENP020415 vlCDR2
YTSRLHS

SEQ ID NO: 17794 - protein, 8 aa, Artificial Sequence
  Description of Artificial Sequence: Synthetic peptide
  XENP020415 vlCDR3
QQGNTLWT

SEQ ID NO: 17795 - protein, 449 aa, Artificial Sequence
  Description of Artificial Sequence: Synthetic polypeptide
  XENP020416 4C8_H2L1_IgG1_PVA_/S267K Heavy Chain
QVQLVQSGAEVKKPGASVKVSCKASGYTFTDYNVHWVRQAPGQGLEWIGYIYPYTGGTGYNQKFQGRVTLTVDNSISTAYMELSSLRSEDTAVYYCARSDDGYSYAMDYWGQGTLVTVSSASTKGPSVFPLAPSSKSTSGGTAALGCLVKDYFPEPVTVSWNSGALTSGVHTFPAVLQSSGLYSLSSVVTVPSSSLGTQTYICNVNHKPSNTKVDKKVEPKSCDKTHTCPPCPAPPVAGPSVFLFPPKPKDTLMISRTPEVTCVVVDVKHEDPEVKFNWYVDGVEVHNAKTKPREEQYNSTYRVVSVLTVLHQDWLNGKEYKCKVSNKALPAPIEKTISKAKGQPREPQVYTLPPSREEMTKNQVSLTCLVKGFYPSDIAVEWESNGQPENNYKTTPPVLDSDGSFFLYSKLTVDKSRWQQGNVFSCSVMHEALHNHYTQKSLSLSPGK

SEQ ID NO: 17796 - protein, 120 aa, Artificial Sequence
  Description of Artificial Sequence: Synthetic polypeptide
  VH of XENP020416
QVQLVQSGAEVKKPGASVKVSCKASGYTFTDYNVHWVRQAPGQGLEWIGYIYPYTGGTGYNQKFQGRVTLTVDNSISTAYMELSSLRSEDTAVYYCARSDDGYSYAMDYWGQGTLVTVSS

SEQ ID NO: 17797 - protein, 5 aa, Artificial Sequence
  Description of Artificial Sequence: Synthetic peptide
  XENP020416 vhCDR1
DYNVH

SEQ ID NO: 17798 - protein, 17 aa, Artificial Sequence
  Description of Artificial Sequence: Synthetic peptide
  XENP020416 vhCDR2
YIYPYTGGTGYNQKFQG

SEQ ID NO: 17799 - protein, 11 aa, Artificial Sequence
  Description of Artificial Sequence: Synthetic peptide
  XENP020416 vhCDR3
SDDGYSYAMDY

SEQ ID NO: 17800 - protein, 213 aa, Artificial Sequence; identical to SEQ ID NO: 17440
  Description of Artificial Sequence: Synthetic polypeptide
  XENP020416 4C8_H2L1_IgG1_PVA_/S267K Light Chain

SEQ ID NO: 17801 - protein, 106 aa, Artificial Sequence; identical to SEQ ID NO: 17441
  Description of Artificial Sequence: Synthetic polypeptide
  VL of XENP020416

SEQ ID NO: 17802 - protein, 11 aa, Artificial Sequence
  Description of Artificial Sequence: Synthetic peptide
  XENP020416 vlCDR1
QASQDISNYLN

SEQ ID NO: 17803 - protein, 7 aa, Artificial Sequence
  Description of Artificial Sequence: Synthetic peptide
  XENP020416 vlCDR2
YTSRLHS

SEQ ID NO: 17804 - protein, 8 aa, Artificial Sequence
  Description of Artificial Sequence: Synthetic peptide
  XENP020416 vlCDR3
QQGNTLWT

SEQ ID NO: 17805 - protein, 450 aa, Artificial Sequence
  Description of Artificial Sequence: Synthetic polypeptide
  XENP020417 7G8_H3L1_IgG1_PVA_/S267K Heavy Chain
EVQLVESGGGLVQPGGSLRLSCAASGFTFSDAWMDWVRQAPGKGLEWVAEIRTKANNHATYYAESVKGRFTISRDDSKSSVYLQMNSLRAEDTAVYYCTRLANWDWYFDVWGQGTTVTVSSASTKGPSVFPLAPSSKSTSGGTAALGCLVKDYFPEPVTVSWNSGALTSGVHTFPAVLQSSGLYSLSSVVTVPSSSLGTQTYICNVNHKPSNTKVDKKVEPKSCDKTHTCPPCPAPPVAGPSVFLFPPKPKDTLMISRTPEVTCVVVDVKHEDPEVKFNWYVDGVEVHNAKTKPREEQYNSTYRVVSVLTVLHQDWLNGKEYKCKVSNKALPAPIEKTISKAKGQPREPQVYTLPPSREEMTKNQVSLTCLVKGFYPSDIAVEWESNGQPENNYKTTPPVLDSDGSFFLYSKLTVDKSRWQQGNVFSCSVMHEALHNHYTQKSLSLSPGK

SEQ ID NO: 17806 - protein, 121 aa, Artificial Sequence
  Description of Artificial Sequence: Synthetic polypeptide
  VH of XENP020417
EVQLVESGGGLVQPGGSLRLSCAASGFTFSDAWMDWVRQAPGKGLEWVAEIRTKANNHATYYAESVKGRFTISRDDSKSSVYLQMNSLRAEDTAVYYCTRLANWDWYFDVWGQGTTVTVSS

SEQ ID NO: 17807 - protein, 5 aa, Artificial Sequence
  Description of Artificial Sequence: Synthetic peptide
  XENP020417 vhCDR1
DAWMD

SEQ ID NO: 17808 - protein, 19 aa, Artificial Sequence
  Description of Artificial Sequence: Synthetic peptide
  XENP020417 vhCDR2
EIRTKANNHATYYAESVKG

SEQ ID NO: 17809 - protein, 10 aa, Artificial Sequence
  Description of Artificial Sequence: Synthetic peptide
  XENP020417 vhCDR3
LANWDWYFDV

SEQ ID NO: 17810 - protein, 218 aa, Artificial Sequence; identical to SEQ ID NO: 17600
  Description of Artificial Sequence: Synthetic polypeptide
  XENP020417 7G8_H3L1_IgG1_PVA_/S267K Light Chain

SEQ ID NO: 17811 - protein, 111 aa, Artificial Sequence; identical to SEQ ID NO: 17601
  Description of Artificial Sequence: Synthetic polypeptide
  VL of XENP020417

SEQ ID NO: 17812 - protein, 15 aa, Artificial Sequence
  Description of Artificial Sequence: Synthetic peptide
  XENP020417 vlCDR1
RASQSVDYDGDSYMN

SEQ ID NO: 17813 - protein, 7 aa, Artificial Sequence
  Description of Artificial Sequence: Synthetic peptide
  XENP020417 vlCDR2
AASNLES

SEQ ID NO: 17814 - protein, 9 aa, Artificial Sequence
  Description of Artificial Sequence: Synthetic peptide
  XENP020417 vlCDR3
QQSNEDPFT

SEQ ID NO: 17815 - protein, 450 aa, Artificial Sequence; identical to SEQ ID NO: 17805
  Description of Artificial Sequence: Synthetic polypeptide
  XENP020418 7G8_H3L2_IgG1_PVA_/S267K Heavy Chain

SEQ ID NO: 17816 - protein, 121 aa, Artificial Sequence; identical to SEQ ID NO: 17806
  Description of Artificial Sequence: Synthetic polypeptide
  VH of XENP020418

SEQ ID NO: 17817 - protein, 5 aa, Artificial Sequence
  Description of Artificial Sequence: Synthetic peptide
  XENP020418 vhCDR1
DAWMD

SEQ ID NO: 17818 - protein, 19 aa, Artificial Sequence
  Description of Artificial Sequence: Synthetic peptide
  XENP020418 vhCDR2
EIRTKANNHATYYAESVKG

SEQ ID NO: 17819 - protein, 10 aa, Artificial Sequence
  Description of Artificial Sequence: Synthetic peptide
  XENP020418 vhCDR3
LANWDWYFDV

SEQ ID NO: 17820 - protein, 218 aa, Artificial Sequence; identical to SEQ ID NO: 17610
  Description of Artificial Sequence: Synthetic polypeptide
  XENP020418 7G8_H3L2_IgG1_PVA_/S267K Light Chain

SEQ ID NO: 17821 - protein, 111 aa, Artificial Sequence; identical to SEQ ID NO: 17611
  Description of Artificial Sequence: Synthetic polypeptide
  VL of XENP020418

SEQ ID NO: 17822 - protein, 15 aa, Artificial Sequence
  Description of Artificial Sequence: Synthetic peptide
  XENP020418 vlCDR1
RASQSVDYDGDSYMN

SEQ ID NO: 17823 - protein, 7 aa, Artificial Sequence
  Description of Artificial Sequence: Synthetic peptide
  XENP020418 vlCDR2
AASNLES

SEQ ID NO: 17824 - protein, 9 aa, Artificial Sequence
  Description of Artificial Sequence: Synthetic peptide
  XENP020418 vlCDR3
QQSNEDPFT

SEQ ID NO: 17825 - protein, 450 aa, Artificial Sequence; identical to SEQ ID NO: 17805
  Description of Artificial Sequence: Synthetic polypeptide
  XENP020419 7G8_H3L3_IgG1_PVA_/S267K Heavy Chain

SEQ ID NO: 17826 - protein, 121 aa, Artificial Sequence; identical to SEQ ID NO: 17806
  Description of Artificial Sequence: Synthetic polypeptide
  VH of XENP020419

SEQ ID NO: 17827 - protein, 5 aa, Artificial Sequence
  Description of Artificial Sequence: Synthetic peptide
  XENP020419 vhCDR1
DAWMD

SEQ ID NO: 17828 - protein, 19 aa, Artificial Sequence
  Description of Artificial Sequence: Synthetic peptide
  XENP020419 vhCDR2
EIRTKANNHATYYAESVKG

SEQ ID NO: 17829 - protein, 10 aa, Artificial Sequence
  Description of Artificial Sequence: Synthetic peptide
  XENP020419 vhCDR3
LANWDWYFDV

SEQ ID NO: 17830 - protein, 218 aa, Artificial Sequence; identical to SEQ ID NO: 17620
  Description of Artificial Sequence: Synthetic polypeptide
  XENP020419 7G8_H3L3_IgG1_PVA_/S267K Light Chain

SEQ ID NO: 17831 - protein, 111 aa, Artificial Sequence; identical to SEQ ID NO: 17621
  Description of Artificial Sequence: Synthetic polypeptide
  VL of XENP020419

SEQ ID NO: 17832 - protein, 15 aa, Artificial Sequence
  Description of Artificial Sequence: Synthetic peptide
  XENP020419 vlCDR1
KASQSVDYDGDSYMN

SEQ ID NO: 17833 - protein, 7 aa, Artificial Sequence
  Description of Artificial Sequence: Synthetic peptide
  XENP020419 vlCDR2
AASNLES

SEQ ID NO: 17834 - protein, 9 aa, Artificial Sequence
  Description of Artificial Sequence: Synthetic peptide
  XENP020419 vlCDR3
QQSNEDPFT

SEQ ID NO: 17835 - protein, 444 aa, Artificial Sequence; identical to SEQ ID NO: 17755
  Description of Artificial Sequence: Synthetic polypeptide
  XENP020412 8D7_H0L0_IgG1_PVA_/S267K Heavy Chain

SEQ ID NO: 17836 - protein, 115 aa, Artificial Sequence; identical to SEQ ID NO: 17756
  Description of Artificial Sequence: Synthetic polypeptide
  VH of XENP020412

SEQ ID NO: 17837 - protein, 5 aa, Artificial Sequence
  Description of Artificial Sequence: Synthetic peptide
  XENP020412 vhCDR1
SYGVH

SEQ ID NO: 17838 - protein, 15 aa, Artificial Sequence
  Description of Artificial Sequence: Synthetic peptide
  XENP020412 vhCDR2
VIWSGSTDYNAAFIS

SEQ ID NO: 17839 - protein, 8 aa, Artificial Sequence
  Description of Artificial Sequence: Synthetic peptide
  XENP020412 vhCDR3
TYYYAMDY

SEQ ID NO: 17840 - protein, 214 aa, Artificial Sequence; identical to SEQ ID NO: 17760
  Description of Artificial Sequence: Synthetic polypeptide
  XENP020412 8D7_H0L0_IgG1_PVA_/S267K Light Chain

SEQ ID NO: 17841 - protein, 107 aa, Artificial Sequence; identical to SEQ ID NO: 17761
  Description of Artificial Sequence: Synthetic polypeptide
  VL of XENP020412

SEQ ID NO: 17842 - protein, 11 aa, Artificial Sequence
  Description of Artificial Sequence: Synthetic peptide
  XENP020412 vlCDR1
RASENIYSNLA

SEQ ID NO: 17843 - protein, 7 aa, Artificial Sequence
  Description of Artificial Sequence: Synthetic peptide
  XENP020412 vlCDR2
AATNLAD

SEQ ID NO: 17844 - protein, 9 aa, Artificial Sequence
  Description of Artificial Sequence: Synthetic peptide
  XENP020412 vlCDR3
QHFWGTPWT

SEQ ID NO: 17845 - protein, 444 aa, Artificial Sequence; identical to SEQ ID NO: 17765
  Description of Artificial Sequence: Synthetic polypeptide
  XENP020413 8D7_H2L1_IgG1_PVA_/S267K Heavy Chain

SEQ ID NO: 17846 - protein, 115 aa, Artificial Sequence; identical to SEQ ID NO: 17766
  Description of Artificial Sequence: Synthetic polypeptide
  VH of XENP020413

SEQ ID NO: 17847 - protein, 5 aa, Artificial Sequence
  Description of Artificial Sequence: Synthetic peptide
  XENP020413 vhCDR1
SYGVH

SEQ ID NO: 17848 - protein, 15 aa, Artificial Sequence
  Description of Artificial Sequence: Synthetic peptide
  XENP020413 vhCDR2
VIWSGSTDYNAKFQG

SEQ ID NO: 17849 - protein, 8 aa, Artificial Sequence
  Description of Artificial Sequence: Synthetic peptide
  XENP020413 vhCDR3
TYYYAMDY

SEQ ID NO: 17850 - protein, 214 aa, Artificial Sequence; identical to SEQ ID NO: 17220
  Description of Artificial Sequence: Synthetic polypeptide
  XENP020413 8D7_H2L1_IgG1_PVA_/S267K Light Chain

SEQ ID NO: 17851 - protein, 107 aa, Artificial Sequence; identical to SEQ ID NO: 17221
  Description of Artificial Sequence: Synthetic polypeptide
  VL of XENP020413

SEQ ID NO: 17852 - protein, 11 aa, Artificial Sequence
  Description of Artificial Sequence: Synthetic peptide
  XENP020413 vlCDR1
RASENIYSNLA

SEQ ID NO: 17853 - protein, 7 aa, Artificial Sequence
  Description of Artificial Sequence: Synthetic peptide
  XENP020413 vlCDR2
AATNLAD

SEQ ID NO: 17854 - protein, 9 aa, Artificial Sequence
  Description of Artificial Sequence: Synthetic peptide
  XENP020413 vlCDR3
QHFWGTPWT

SEQ ID NO: 17855 - protein, 444 aa, Artificial Sequence; identical to SEQ ID NO: 17775
  Description of Artificial Sequence: Synthetic polypeptide
  XENP020414 8D7_H3L1_IgG1_PVA_/S267K Heavy Chain

SEQ ID NO: 17856 - protein, 115 aa, Artificial Sequence; identical to SEQ ID NO: 17776
  Description of Artificial Sequence: Synthetic polypeptide
  VH of XENP020414

SEQ ID NO: 17857 - protein, 5 aa, Artificial Sequence
  Description of Artificial Sequence: Synthetic peptide
  XENP020414 vhCDR1
SYGVH

SEQ ID NO: 17858 - protein, 15 aa, Artificial Sequence
  Description of Artificial Sequence: Synthetic peptide
  XENP020414 vhCDR2
VIWSGSTDYNAAVKG

SEQ ID NO: 17859 - protein, 8 aa, Artificial Sequence
  Description of Artificial Sequence: Synthetic peptide
  XENP020414 vhCDR3
TYYYAMDY

SEQ ID NO: 17860 - protein, 214 aa, Artificial Sequence; identical to SEQ ID NO: 17220
  Description of Artificial Sequence: Synthetic polypeptide
  XENP020414 8D7_H3L1_IgG1_PVA_/S267K Light Chain

SEQ ID NO: 17861 - protein, 107 aa, Artificial Sequence; identical to SEQ ID NO: 17221
  Description of Artificial Sequence: Synthetic polypeptide
  VL of XENP020414

SEQ ID NO: 17862 - protein, 11 aa, Artificial Sequence
  Description of Artificial Sequence: Synthetic peptide
  XENP020414 vlCDR1
RASENIYSNLA

SEQ ID NO: 17863 - protein, 7 aa, Artificial Sequence
  Description of Artificial Sequence: Synthetic peptide
  XENP020414 vlCDR2
AATNLAD

SEQ ID NO: 17864 - protein, 9 aa, Artificial Sequence
  Description of Artificial Sequence: Synthetic peptide
  XENP020414 vlCDR3
QHFWGTPWT

SEQ ID NO: 17865 - protein, 449 aa, Artificial Sequence; identical to SEQ ID NO: 17785
  Description of Artificial Sequence: Synthetic polypeptide
  XENP020415 4C8_H0L0_IgG1_PVA_/S267K Heavy Chain

SEQ ID NO: 17866 - protein, 120 aa, Artificial Sequence; identical to SEQ ID NO: 17786
  Description of Artificial Sequence: Synthetic polypeptide
  VH of XENP020415

SEQ ID NO: 17867 - protein, 5 aa, Artificial Sequence
  Description of Artificial Sequence: Synthetic peptide
  XENP020415 vhCDR1
DYNVH

SEQ ID NO: 17868 - protein, 17 aa, Artificial Sequence
  Description of Artificial Sequence: Synthetic peptide
  XENP020415 vhCDR2
YIYPYTGGTGYNQKFKS

SEQ ID NO: 17869 - protein, 11 aa, Artificial Sequence
  Description of Artificial Sequence: Synthetic peptide
  XENP020415 vhCDR3
SDDGYSYAMDY

SEQ ID NO: 17870 - protein, 213 aa, Artificial Sequence; identical to SEQ ID NO: 17790
  Description of Artificial Sequence: Synthetic polypeptide
  XENP020415 4C8_H0L0_IgG1_PVA_/S267K Light Chain

SEQ ID NO: 17871 - protein, 106 aa, Artificial Sequence; identical to SEQ ID NO: 17791
  Description of Artificial Sequence: Synthetic polypeptide
  VL of XENP020415

SEQ ID NO: 17872 - protein, 11 aa, Artificial Sequence
  Description of Artificial Sequence: Synthetic peptide
  XENP020415 vlCDR1
RASQDISNYLN

SEQ ID NO: 17873 - protein, 7 aa, Artificial Sequence
  Description of Artificial Sequence: Synthetic peptide
  XENP020415 vlCDR2
YTSRLHS

SEQ ID NO: 17874 - protein, 8 aa, Artificial Sequence
  Description of Artificial Sequence: Synthetic peptide
  XENP020415 vlCDR3
QQGNTLWT

SEQ ID NO: 17875 - protein, 449 aa, Artificial Sequence; identical to SEQ ID NO: 17795
  Description of Artificial Sequence: Synthetic polypeptide
  XENP020416 4C8_H2L1_IgG1_PVA_/S267K Heavy Chain

SEQ ID NO: 17876 - protein, 120 aa, Artificial Sequence; identical to SEQ ID NO: 17796
  Description of Artificial Sequence: Synthetic polypeptide
  VH of XENP020416

SEQ ID NO: 17877 - protein, 5 aa, Artificial Sequence
  Description of Artificial Sequence: Synthetic peptide
  XENP020416 vhCDR1
DYNVH

SEQ ID NO: 17878 - protein, 17 aa, Artificial Sequence
  Description of Artificial Sequence: Synthetic peptide
  XENP020416 vhCDR2
YIYPYTGGTGYNQKFQG

SEQ ID NO: 17879 - protein, 11 aa, Artificial Sequence
  Description of Artificial Sequence: Synthetic peptide
  XENP020416 vhCDR3
SDDGYSYAMDY

SEQ ID NO: 17880 - protein, 213 aa, Artificial Sequence; identical to SEQ ID NO: 17440
  Description of Artificial Sequence: Synthetic polypeptide
  XENP020416 4C8_H2L1_IgG1_PVA_/S267K Light Chain

SEQ ID NO: 17881 - protein, 106 aa, Artificial Sequence; identical to SEQ ID NO: 17441
  Description of Artificial Sequence: Synthetic polypeptide
  VL of XENP020416

SEQ ID NO: 17882 - protein, 11 aa, Artificial Sequence
  Description of Artificial Sequence: Synthetic peptide
  XENP020416 vlCDR1
QASQDISNYLN

SEQ ID NO: 17883 - protein, 7 aa, Artificial Sequence
  Description of Artificial Sequence: Synthetic peptide
  XENP020416 vlCDR2
YTSRLHS

SEQ ID NO: 17884 - protein, 8 aa, Artificial Sequence
  Description of Artificial Sequence: Synthetic peptide
  XENP020416 vlCDR3
QQGNTLWT

SEQ ID NO: 17885 - protein, 450 aa, Artificial Sequence; identical to SEQ ID NO: 17805
  Description of Artificial Sequence: Synthetic polypeptide
  XENP020417 7G8_H3L1_IgG1_PVA_/S267K Heavy Chain

SEQ ID NO: 17886 - protein, 121 aa, Artificial Sequence; identical to SEQ ID NO: 17806
  Description of Artificial Sequence: Synthetic polypeptide
  VH of XENP020417

SEQ ID NO: 17887 - protein, 5 aa, Artificial Sequence
  Description of Artificial Sequence: Synthetic peptide
  XENP020417 vhCDR1
DAWMD

SEQ ID NO: 17888 - protein, 19 aa, Artificial Sequence
  Description of Artificial Sequence: Synthetic peptide
  XENP020417 vhCDR2
EIRTKANNHATYYAESVKG

SEQ ID NO: 17889 - protein, 10 aa, Artificial Sequence
  Description of Artificial Sequence: Synthetic peptide
  XENP020417 vhCDR3
LANWDWYFDV

SEQ ID NO: 17890 - protein, 218 aa, Artificial Sequence; identical to SEQ ID NO: 17600
  Description of Artificial Sequence: Synthetic polypeptide
  XENP020417 7G8_H3L1_IgG1_PVA_/S267K Light Chain

SEQ ID NO: 17891 - protein, 111 aa, Artificial Sequence; identical to SEQ ID NO: 17601
  Description of Artificial Sequence: Synthetic polypeptide
  VL of XENP020417

SEQ ID NO: 17892 - protein, 15 aa, Artificial Sequence
  Description of Artificial Sequence: Synthetic peptide
  XENP020417 vlCDR1
RASQSVDYDGDSYMN

SEQ ID NO: 17893 - protein, 7 aa, Artificial Sequence
  Description of Artificial Sequence: Synthetic peptide
  XENP020417 vlCDR2
AASNLES

SEQ ID NO: 17894 - protein, 9 aa, Artificial Sequence
  Description of Artificial Sequence: Synthetic peptide
  XENP020417 vlCDR3
QQSNEDPFT

SEQ ID NO: 17895 - protein, 450 aa, Artificial Sequence; identical to SEQ ID NO: 17805
  Description of Artificial Sequence: Synthetic polypeptide
  XENP020418 7G8_H3L2_IgG1_PVA_/S267K Heavy Chain

SEQ ID NO: 17896 - protein, 121 aa, Artificial Sequence; identical to SEQ ID NO: 17806
  Description of Artificial Sequence: Synthetic polypeptide
  VH of XENP020418

SEQ ID NO: 17897 - protein, 5 aa, Artificial Sequence
  Description of Artificial Sequence: Synthetic peptide
  XENP020418 vhCDR1
DAWMD

SEQ ID NO: 17898 - protein, 19 aa, Artificial Sequence
  Description of Artificial Sequence: Synthetic peptide
  XENP020418 vhCDR2
EIRTKANNHATYYAESVKG

SEQ ID NO: 17899 - protein, 10 aa, Artificial Sequence
  Description of Artificial Sequence: Synthetic peptide
  XENP020418 vhCDR3
LANWDWYFDV

SEQ ID NO: 17900 - protein, 218 aa, Artificial Sequence; identical to SEQ ID NO: 17610
  Description of Artificial Sequence: Synthetic polypeptide
  XENP020418 7G8_H3L2_IgG1_PVA_/S267K Light Chain

SEQ ID NO: 17901 - protein, 111 aa, Artificial Sequence; identical to SEQ ID NO: 17611
  Description of Artificial Sequence: Synthetic polypeptide
  VL of XENP020418

SEQ ID NO: 17902 - protein, 15 aa, Artificial Sequence
  Description of Artificial Sequence: Synthetic peptide
  XENP020418 vlCDR1
RASQSVDYDGDSYMN

SEQ ID NO: 17903 - protein, 7 aa, Artificial Sequence
  Description of Artificial Sequence: Synthetic peptide
  XENP020418 vlCDR2
AASNLES

SEQ ID NO: 17904 - protein, 9 aa, Artificial Sequence
  Description of Artificial Sequence: Synthetic peptide
  XENP020418 vlCDR3
QQSNEDPFT

SEQ ID NO: 17905 - protein, 450 aa, Artificial Sequence; identical to SEQ ID NO: 17805
  Description of Artificial Sequence: Synthetic polypeptide
  XENP020419 7G8_H3L3_IgG1_PVA_/S267K Heavy Chain

SEQ ID NO: 17906 - protein, 121 aa, Artificial Sequence; identical to SEQ ID NO: 17806
  Description of Artificial Sequence: Synthetic polypeptide
  VH of XENP020419

SEQ ID NO: 17907 - protein, 5 aa, Artificial Sequence
  Description of Artificial Sequence: Synthetic peptide
  XENP020419 vhCDR1
DAWMD

SEQ ID NO: 17908 - protein, 19 aa, Artificial Sequence
  Description of Artificial Sequence: Synthetic peptide
  XENP020419 vhCDR2
EIRTKANNHATYYAESVKG

SEQ ID NO: 17909 - protein, 10 aa, Artificial Sequence
  Description of Artificial Sequence: Synthetic peptide
  XENP020419 vhCDR3
LANWDWYFDV

SEQ ID NO: 17910 - protein, 218 aa, Artificial Sequence; identical to SEQ ID NO: 17620
  Description of Artificial Sequence: Synthetic polypeptide
  XENP020419 7G8_H3L3_IgG1_PVA_/S267K Light Chain

SEQ ID NO: 17911 - protein, 111 aa, Artificial Sequence; identical to SEQ ID NO: 17621
  Description of Artificial Sequence: Synthetic polypeptide
  VL of XENP020419

SEQ ID NO: 17912 - protein, 15 aa, Artificial Sequence
  Description of Artificial Sequence: Synthetic peptide
  XENP020419 vlCDR1
KASQSVDYDGDSYMN

SEQ ID NO: 17913 - protein, 7 aa, Artificial Sequence
  Description of Artificial Sequence: Synthetic peptide
  XENP020419 vlCDR2
AASNLES

SEQ ID NO: 17914 - protein, 9 aa, Artificial Sequence
  Description of Artificial Sequence: Synthetic peptide
  XENP020419 vlCDR3
QQSNEDPFT

SEQ ID NO: 17915 - protein, 449 aa, Artificial Sequence; identical to SEQ ID NO: 17435
  Description of Artificial Sequence: Synthetic polypeptide
  XENP020420 4C8_H1L2_IgG1_PVA_/S267K Heavy Chain

SEQ ID NO: 17916 - protein, 120 aa, Artificial Sequence; identical to SEQ ID NO: 17436
  Description of Artificial Sequence: Synthetic polypeptide
  VH of XENP020420

SEQ ID NO: 17917 - protein, 5 aa, Artificial Sequence
  Description of Artificial Sequence: Synthetic peptide
  XENP020420 vhCDR1
DYNMH

SEQ ID NO: 17918 - protein, 17 aa, Artificial Sequence
  Description of Artificial Sequence: Synthetic peptide
  XENP020420 vhCDR2
YIYPYTGGTGYNQKFQG

SEQ ID NO: 17919 - protein, 11 aa, Artificial Sequence
  Description of Artificial Sequence: Synthetic peptide
  XENP020420 vhCDR3
SDDGYSYAMDY

SEQ ID NO: 17920 - protein, 213 aa, Artificial Sequence
  Description of Artificial Sequence: Synthetic polypeptide
  XENP020420 4C8_H1L2_IgG1_PVA_/S267K Light Chain
DIQMTQSPSSLSASVGDRVTITCRASQDISNYLNWYQQKPGKAPKLLIYYTSRLHSGVPSRFSGSGSGTDYTLTISSLQPEDFATYFCQQGNTLWTFGGGTKVEIKRTVAAPSVFIFPPSDEQLKSGTASVVCLLNNFYPREAKVQWKVDNALQSGNSQESVTEQDSKDSTYSLSSTLTLSKADYEKHKVYACEVTHQGLSSPVTKSFNRGEC

SEQ ID NO: 17921 - protein, 106 aa, Artificial Sequence
  Description of Artificial Sequence: Synthetic polypeptide
  VL of XENP020420
DIQMTQSPSSLSASVGDRVTITCRASQDISNYLNWYQQKPGKAPKLLIYYTSRLHSGVPSRFSGSGSGTDYTLTISSLQPEDFATYFCQQGNTLWTFGGGTKVEIK

SEQ ID NO: 17922 - protein, 11 aa, Artificial Sequence
  Description of Artificial Sequence: Synthetic peptide
  XENP020420 vlCDR1
RASQDISNYLN

SEQ ID NO: 17923 - protein, 7 aa, Artificial Sequence
  Description of Artificial Sequence: Synthetic peptide
  XENP020420 vlCDR2
YTSRLHS

SEQ ID NO: 17924 - protein, 8 aa, Artificial Sequence
  Description of Artificial Sequence: Synthetic peptide
  XENP020420 vlCDR3
QQGNTLWT

SEQ ID NO: 17925 - protein, 449 aa, Artificial Sequence; identical to SEQ ID NO: 17795
  Description of Artificial Sequence: Synthetic polypeptide
  XENP020421 4C8_H2L2_IgG1_PVA_/S267K Heavy Chain

SEQ ID NO: 17926 - protein, 120 aa, Artificial Sequence; identical to SEQ ID NO: 17796
  Description of Artificial Sequence: Synthetic polypeptide
  VH of XENP020421

SEQ ID NO: 17927 - protein, 5 aa, Artificial Sequence
  Description of Artificial Sequence: Synthetic peptide
  XENP020421 vhCDR1
DYNVH

SEQ ID NO: 17928 - protein, 17 aa, Artificial Sequence
  Description of Artificial Sequence: Synthetic peptide
  XENP020421 vhCDR2
YIYPYTGGTGYNQKFQG

SEQ ID NO: 17929 - protein, 11 aa, Artificial Sequence
  Description of Artificial Sequence: Synthetic peptide
  XENP020421 vhCDR3
SDDGYSYAMDY

SEQ ID NO: 17930 - protein, 213 aa, Artificial Sequence; identical to SEQ ID NO: 17920
  Description of Artificial Sequence: Synthetic polypeptide
  XENP020421 4C8_H2L2_IgG1_PVA_/S267K Light Chain

SEQ ID NO: 17931 - protein, 106 aa, Artificial Sequence; identical to SEQ ID NO: 17921
  Description of Artificial Sequence: Synthetic polypeptide
  VL of XENP020421

SEQ ID NO: 17932 - protein, 11 aa, Artificial Sequence
  Description of Artificial Sequence: Synthetic peptide
  XENP020421 vlCDR1
RASQDISNYLN

SEQ ID NO: 17933 - protein, 7 aa, Artificial Sequence
  Description of Artificial Sequence: Synthetic peptide
  XENP020421 vlCDR2
YTSRLHS

SEQ ID NO: 17934 - protein, 8 aa, Artificial Sequence
  Description of Artificial Sequence: Synthetic peptide
  XENP020421 vlCDR3
QQGNTLWT

SEQ ID NO: 17935 - protein, 447 aa, Artificial Sequence; identical to SEQ ID NO: 17225
  Description of Artificial Sequence: Synthetic polypeptide
  XENP019361 2A11_H0L0_IgG1_PVA_/S267K Heavy Chain

SEQ ID NO: 17936 - protein, 118 aa, Artificial Sequence; identical to SEQ ID NO: 17226
  Description of Artificial Sequence: Synthetic polypeptide
  VH of XENP019361

SEQ ID NO: 17937 - protein, 5 aa, Artificial Sequence
  Description of Artificial Sequence: Synthetic peptide
  XENP019361 vhCDR1
DYYMH

SEQ ID NO: 17938 - protein, 17 aa, Artificial Sequence
  Description of Artificial Sequence: Synthetic peptide
  XENP019361 vhCDR2
WIDPENGDTEYAPKFQG

SEQ ID NO: 17939 - protein, 9 aa, Artificial Sequence
  Description of Artificial Sequence: Synthetic peptide
  XENP019361 vhCDR3
RGVRQALDY

SEQ ID NO: 17940 - protein, 214 aa, Artificial Sequence; identical to SEQ ID NO: 17230
  Description of Artificial Sequence: Synthetic polypeptide
  XENP019361 2A11_H0L0_IgG1_PVA_/S267K Light Chain

SEQ ID NO: 17941 - protein, 107 aa, Artificial Sequence; identical to SEQ ID NO: 17231
  Description of Artificial Sequence: Synthetic polypeptide
  VL of XENP019361

SEQ ID NO: 17942 - protein, 11 aa, Artificial Sequence
  Description of Artificial Sequence: Synthetic peptide
  XENP019361 vlCDR1
RASQDIGNYLN

SEQ ID NO: 17943 - protein, 7 aa, Artificial Sequence
  Description of Artificial Sequence: Synthetic peptide
  XENP019361 vlCDR2
YTSRLHS

SEQ ID NO: 17944 - protein, 9 aa, Artificial Sequence
  Description of Artificial Sequence: Synthetic peptide
  XENP019361 vlCDR3
QQGNTLPYT

SEQ ID NO: 17945 - protein, 447 aa, Artificial Sequence; identical to SEQ ID NO: 17235
  Description of Artificial Sequence: Synthetic polypeptide
  XENP019362 2A11_H1L1_IgG1_PVA_/S267K Heavy Chain

SEQ ID NO: 17946 - protein, 118 aa, Artificial Sequence; identical to SEQ ID NO: 17236
  Description of Artificial Sequence: Synthetic polypeptide
  VH of XENP019362

SEQ ID NO: 17947 - protein, 5 aa, Artificial Sequence
  Description of Artificial Sequence: Synthetic peptide
  XENP019362 vhCDR1
DYYMH

SEQ ID NO: 17948 - protein, 17 aa, Artificial Sequence
  Description of Artificial Sequence: Synthetic peptide
  XENP019362 vhCDR2
WIDPENGDTEYAPKFQG

SEQ ID NO: 17949 - protein, 9 aa, Artificial Sequence
  Description of Artificial Sequence: Synthetic peptide
  XENP019362 vhCDR3
RGVRQALDY

SEQ ID NO: 17950 - protein, 214 aa, Artificial Sequence; identical to SEQ ID NO: 17240
  Description of Artificial Sequence: Synthetic polypeptide
  XENP019362 2A11_H1L1_IgG1_PVA_/S267K Light Chain

SEQ ID NO: 17951 - protein, 107 aa, Artificial Sequence; identical to SEQ ID NO: 17241
  Description of Artificial Sequence: Synthetic polypeptide
  VL of XENP019362

SEQ ID NO: 17952 - protein, 11 aa, Artificial Sequence
  Description of Artificial Sequence: Synthetic peptide
  XENP019362 vlCDR1
RASQDIGNYLN

SEQ ID NO: 17953 - protein, 7 aa, Artificial Sequence
  Description of Artificial Sequence: Synthetic peptide
  XENP019362 vlCDR2
YTSRLHS

SEQ ID NO: 17954 - protein, 9 aa, Artificial Sequence
  Description of Artificial Sequence: Synthetic peptide
  XENP019362 vlCDR3
QQGNTLPYT

SEQ ID NO: 17955 - protein, 447 aa, Artificial Sequence; identical to SEQ ID NO: 17235
  Description of Artificial Sequence: Synthetic polypeptide
  XENP019363 2A11_H1L2_IgG1_PVA_/S267K Heavy Chain

SEQ ID NO: 17956 - protein, 118 aa, Artificial Sequence; identical to SEQ ID NO: 17236
  Description of Artificial Sequence: Synthetic polypeptide
  VH of XENP019363

SEQ ID NO: 17957 - protein, 5 aa, Artificial Sequence
  Description of Artificial Sequence: Synthetic peptide
  XENP019363 vhCDR1
DYYMH

SEQ ID NO: 17958 - protein, 17 aa, Artificial Sequence
  Description of Artificial Sequence: Synthetic peptide
  XENP019363 vhCDR2
WIDPENGDTEYAPKFQG

SEQ ID NO: 17959 - protein, 9 aa, Artificial Sequence
  Description of Artificial Sequence: Synthetic peptide
  XENP019363 vhCDR3
RGVRQALDY

SEQ ID NO: 17960 - protein, 214 aa, Artificial Sequence; identical to SEQ ID NO: 17250
  Description of Artificial Sequence: Synthetic polypeptide
  XENP019363 2A11_H1L2_IgG1_PVA_/S267K Light Chain

SEQ ID NO: 17961 - protein, 107 aa, Artificial Sequence; identical to SEQ ID NO: 17251
  Description of Artificial Sequence: Synthetic polypeptide
  VL of XENP019363

SEQ ID NO: 17962 - protein, 11 aa, Artificial Sequence
  Description of Artificial Sequence: Synthetic peptide
  XENP019363 vlCDR1
QASQDIGNYLN

SEQ ID NO: 17963 - protein, 7 aa, Artificial Sequence
  Description of Artificial Sequence: Synthetic peptide
  XENP019363 vlCDR2
YTSRLHS

SEQ ID NO: 17964 - protein, 9 aa, Artificial Sequence
  Description of Artificial Sequence: Synthetic peptide
  XENP019363 vlCDR3
QQGNTLPYT

SEQ ID NO: 17965 - protein, 446 aa, Artificial Sequence; identical to SEQ ID NO: 17255
  Description of Artificial Sequence: Synthetic polypeptide
  XENP019364 2A11_H2L1_IgG1_PVA_/S267K Heavy Chain

SEQ ID NO: 17966 - protein, 117 aa, Artificial Sequence; identical to SEQ ID NO: 17256
  Description of Artificial Sequence: Synthetic polypeptide
  VH of XENP019364

SEQ ID NO: 17967 - protein, 5 aa, Artificial Sequence
  Description of Artificial Sequence: Synthetic peptide
  XENP019364 vhCDR1
DYYMH

SEQ ID NO: 17968 - protein, 17 aa, Artificial Sequence
  Description of Artificial Sequence: Synthetic peptide
  XENP019364 vhCDR2
WIDPENGDTEYAPKFQG

SEQ ID NO: 17969 - protein, 8 aa, Artificial Sequence
  Description of Artificial Sequence: Synthetic peptide
  XENP019364 vhCDR3
GVRQALDY

SEQ ID NO: 17970 - protein, 214 aa, Artificial Sequence; identical to SEQ ID NO: 17240
  Description of Artificial Sequence: Synthetic polypeptide
  XENP019364 2A11_H2L1_IgG1_PVA_/S267K Light Chain

SEQ ID NO: 17971 - protein, 107 aa, Artificial Sequence; identical to SEQ ID NO: 17241
  Description of Artificial Sequence: Synthetic polypeptide
  VL of XENP019364

SEQ ID NO: 17972 - protein, 11 aa, Artificial Sequence
  Description of Artificial Sequence: Synthetic peptide
  XENP019364 vlCDR1
RASQDIGNYLN

SEQ ID NO: 17973 - protein, 7 aa, Artificial Sequence
  Description of Artificial Sequence: Synthetic peptide
  XENP019364 vlCDR2
YTSRLHS

SEQ ID NO: 17974 - protein, 9 aa, Artificial Sequence
  Description of Artificial Sequence: Synthetic peptide
  XENP019364 vlCDR3
QQGNTLPYT

SEQ ID NO: 17975 - protein, 446 aa, Artificial Sequence; identical to SEQ ID NO: 17255
  Description of Artificial Sequence: Synthetic polypeptide
  XENP019365 2A11_H2L2_IgG1_PVA_/S267K Heavy Chain

SEQ ID NO: 17976 - protein, 117 aa, Artificial Sequence; identical to SEQ ID NO: 17256
  Description of Artificial Sequence: Synthetic polypeptide
  VH of XENP019365

SEQ ID NO: 17977 - protein, 5 aa, Artificial Sequence
  Description of Artificial Sequence: Synthetic peptide
  XENP019365 vhCDR1
DYYMH

SEQ ID NO: 17978 - protein, 17 aa, Artificial Sequence
  Description of Artificial Sequence: Synthetic peptide
  XENP019365 vhCDR2
WIDPENGDTEYAPKFQG

SEQ ID NO: 17979 - protein, 8 aa, Artificial Sequence
  Description of Artificial Sequence: Synthetic peptide
  XENP019365 vhCDR3
GVRQALDY

SEQ ID NO: 17980 - protein, 214 aa, Artificial Sequence; identical to SEQ ID NO: 17250
  Description of Artificial Sequence: Synthetic polypeptide
  XENP019365 2A11_H2L2_IgG1_PVA_/S267K Light Chain

SEQ ID NO: 17981 - protein, 107 aa, Artificial Sequence; identical to SEQ ID NO: 17251
  Description of Artificial Sequence: Synthetic polypeptide
  VL of XENP019365

SEQ ID NO: 17982 - protein, 11 aa, Artificial Sequence
  Description of Artificial Sequence: Synthetic peptide
  XENP019365 vlCDR1
QASQDIGNYLN

SEQ ID NO: 17983 - protein, 7 aa, Artificial Sequence
  Description of Artificial Sequence: Synthetic peptide
  XENP019365 vlCDR2
YTSRLHS

SEQ ID NO: 17984 - protein, 9 aa, Artificial Sequence
  Description of Artificial Sequence: Synthetic peptide
  XENP019365 vlCDR3
QQGNTLPYT

SEQ ID NO: 17985 - protein, 447 aa, Artificial Sequence; identical to SEQ ID NO: 17275
  Description of Artificial Sequence: Synthetic polypeptide
  XENP019366 2A11_H3L1_IgG1_PVA_/S267K Heavy Chain

SEQ ID NO: 17986 - protein, 118 aa, Artificial Sequence; identical to SEQ ID NO: 17276
  Description of Artificial Sequence: Synthetic polypeptide
  VH of XENP019366

SEQ ID NO: 17987 - protein, 5 aa, Artificial Sequence
  Description of Artificial Sequence: Synthetic peptide
  XENP019366 vhCDR1
DYYMH

SEQ ID NO: 17988 - protein, 17 aa, Artificial Sequence
  Description of Artificial Sequence: Synthetic peptide
  XENP019366 vhCDR2
WIDPENGDTEYAPSVKG

SEQ ID NO: 17989 - protein, 9 aa, Artificial Sequence
  Description of Artificial Sequence: Synthetic peptide
  XENP019366 vhCDR3
RGVRQALDY

SEQ ID NO: 17990 - protein, 214 aa, Artificial Sequence; identical to SEQ ID NO: 17240
  Description of Artificial Sequence: Synthetic polypeptide
  XENP019366 2A11_H3L1_IgG1_PVA_/S267K Light Chain

SEQ ID NO: 17991 - protein, 107 aa, Artificial Sequence; identical to SEQ ID NO: 17241
  Description of Artificial Sequence: Synthetic polypeptide
  VL of XENP019366

SEQ ID NO: 17992 - protein, 11 aa, Artificial Sequence
  Description of Artificial Sequence: Synthetic peptide
  XENP019366 vlCDR1
RASQDIGNYLN

SEQ ID NO: 17993 - protein, 7 aa, Artificial Sequence
  Description of Artificial Sequence: Synthetic peptide
  XENP019366 vlCDR2
YTSRLHS

SEQ ID NO: 17994 - protein, 9 aa, Artificial Sequence
  Description of Artificial Sequence: Synthetic peptide
  XENP019366 vlCDR3
QQGNTLPYT

SEQ ID NO: 17995 - protein, 447 aa, Artificial Sequence; identical to SEQ ID NO: 17275
  Description of Artificial Sequence: Synthetic polypeptide
  XENP019367 2A11_H3L2_IgG1_PVA_/S267K Heavy Chain

SEQ ID NO: 17996 - protein, 118 aa, Artificial Sequence; identical to SEQ ID NO: 17276
  Description of Artificial Sequence: Synthetic polypeptide
  VH of XENP019367

SEQ ID NO: 17997 - protein, 5 aa, Artificial Sequence
  Description of Artificial Sequence: Synthetic peptide
  XENP019367 vhCDR1
DYYMH

SEQ ID NO: 17998 - protein, 17 aa, Artificial Sequence
  Description of Artificial Sequence: Synthetic peptide
  XENP019367 vhCDR2
WIDPENGDTEYAPSVKG

SEQ ID NO: 17999 - protein, 9 aa, Artificial Sequence
  Description of Artificial Sequence: Synthetic peptide
  XENP019367 vhCDR3
RGVRQALDY

SEQ ID NO: 18000 - protein, 214 aa, Artificial Sequence; identical to SEQ ID NO: 17250
  Description of Artificial Sequence: Synthetic polypeptide
  XENP019367 2A11_H3L2_IgG1_PVA_/S267K Light Chain

SEQ ID NO: 18001 - protein, 107 aa, Artificial Sequence; identical to SEQ ID NO: 17251
  Description of Artificial Sequence: Synthetic polypeptide
  VL of XENP019367

SEQ ID NO: 18002 - protein, 11 aa, Artificial Sequence
  Description of Artificial Sequence: Synthetic peptide
  XENP019367 vlCDR1
QASQDIGNYLN

SEQ ID NO: 18003 - protein, 7 aa, Artificial Sequence
  Description of Artificial Sequence: Synthetic peptide
  XENP019367 vlCDR2
YTSRLHS

SEQ ID NO: 18004 - protein, 9 aa, Artificial Sequence
  Description of Artificial Sequence: Synthetic peptide
  XENP019367 vlCDR3
QQGNTLPYT

SEQ ID NO: 18005 - protein, 446 aa, Artificial Sequence; identical to SEQ ID NO: 17295
  Description of Artificial Sequence: Synthetic polypeptide
  XENP019368 2A11_H4L1_IgG1_PVA_/S267K Heavy Chain

SEQ ID NO: 18006 - protein, 117 aa, Artificial Sequence; identical to SEQ ID NO: 17296
  Description of Artificial Sequence: Synthetic polypeptide
  VH of XENP019368

SEQ ID NO: 18007 - protein, 5 aa, Artificial Sequence
  Description of Artificial Sequence: Synthetic peptide
  XENP019368 vhCDR1
DYYMH

SEQ ID NO: 18008 - protein, 17 aa, Artificial Sequence
  Description of Artificial Sequence: Synthetic peptide
  XENP019368 vhCDR2
WIDPENGDTEYAPSVKG

SEQ ID NO: 18009 - protein, 8 aa, Artificial Sequence
  Description of Artificial Sequence: Synthetic peptide
  XENP019368 vhCDR3
GVRQALDY

SEQ ID NO: 18010 - protein, 214 aa, Artificial Sequence; identical to SEQ ID NO: 17240
  Description of Artificial Sequence: Synthetic polypeptide
  XENP019368 2A11_H4L1_IgG1_PVA_/S267K Light Chain

SEQ ID NO: 18011 - protein, 107 aa, Artificial Sequence; identical to SEQ ID NO: 17241
  Description of Artificial Sequence: Synthetic polypeptide
  VL of XENP019368

SEQ ID NO: 18012 - protein, 11 aa, Artificial Sequence
  Description of Artificial Sequence: Synthetic peptide
  XENP019368 vlCDR1
RASQDIGNYLN

SEQ ID NO: 18013 - protein, 7 aa, Artificial Sequence
  Description of Artificial Sequence: Synthetic peptide
  XENP019368 vlCDR2
YTSRLHS

SEQ ID NO: 18014 - protein, 9 aa, Artificial Sequence
  Description of Artificial Sequence: Synthetic peptide
  XENP019368 vlCDR3
QQGNTLPYT

SEQ ID NO: 18015 - protein, 446 aa, Artificial Sequence; identical to SEQ ID NO: 17295
  Description of Artificial Sequence: Synthetic polypeptide
  XENP019369 2A11_H4L2_IgG1_PVA_/S267K Heavy Chain

SEQ ID NO: 18016 - protein, 117 aa, Artificial Sequence; identical to SEQ ID NO: 17296
  Description of Artificial Sequence: Synthetic polypeptide
  VH of XENP019369

SEQ ID NO: 18017 - protein, 5 aa, Artificial Sequence
  Description of Artificial Sequence: Synthetic peptide
  XENP019369 vhCDR1
DYYMH

SEQ ID NO: 18018 - protein, 17 aa, Artificial Sequence
  Description of Artificial Sequence: Synthetic peptide
  XENP019369 vhCDR2
WIDPENGDTEYAPSVKG

SEQ ID NO: 18019 - protein, 8 aa, Artificial Sequence
  Description of Artificial Sequence: Synthetic peptide
  XENP019369 vhCDR3
GVRQALDY

SEQ ID NO: 18020 - protein, 214 aa, Artificial Sequence; identical to SEQ ID NO: 17250
  Description of Artificial Sequence: Synthetic polypeptide
  XENP019369 2A11_H4L2_IgG1_PVA_/S267K Light Chain

SEQ ID NO: 18021 - protein, 107 aa, Artificial Sequence; identical to SEQ ID NO: 17251
  Description of Artificial Sequence: Synthetic polypeptide
  VL of XENP019369

SEQ ID NO: 18022 - protein, 11 aa, Artificial Sequence
  Description of Artificial Sequence: Synthetic peptide
  XENP019369 vlCDR1
QASQDIGNYLN

SEQ ID NO: 18023 - protein, 7 aa, Artificial Sequence
  Description of Artificial Sequence: Synthetic peptide
  XENP019369 vlCDR2
YTSRLHS

SEQ ID NO: 18024 - protein, 9 aa, Artificial Sequence
  Description of Artificial Sequence: Synthetic peptide
  XENP019369 vlCDR3
QQGNTLPYT

SEQ ID NO: 18025 - protein, 447 aa, Artificial Sequence; identical to SEQ ID NO: 17235
  Description of Artificial Sequence: Synthetic polypeptide
  XENP020023 2A11_H1L0_IgG1_PVA_/S267K Heavy Chain

SEQ ID NO: 18026 - protein, 118 aa, Artificial Sequence; identical to SEQ ID NO: 17236
  Description of Artificial Sequence: Synthetic polypeptide
  VH of XENP020023

SEQ ID NO: 18027 - protein, 5 aa, Artificial Sequence
  Description of Artificial Sequence: Synthetic peptide
  XENP020023 vhCDR1
DYYMH

SEQ ID NO: 18028 - protein, 17 aa, Artificial Sequence
  Description of Artificial Sequence: Synthetic peptide
  XENP020023 vhCDR2
WIDPENGDTEYAPKFQG

SEQ ID NO: 18029 - protein, 9 aa, Artificial Sequence
  Description of Artificial Sequence: Synthetic peptide
  XENP020023 vhCDR3
RGVRQALDY

SEQ ID NO: 18030 - protein, 214 aa, Artificial Sequence; identical to SEQ ID NO: 17230
  Description of Artificial Sequence: Synthetic polypeptide
  XENP020023 2A11_H1L0_IgG1_PVA_/S267K Light Chain

SEQ ID NO: 18031 - protein, 107 aa, Artificial Sequence; identical to SEQ ID NO: 17231
  Description of Artificial Sequence: Synthetic polypeptide
  VL of XENP020023

SEQ ID NO: 18032 - protein, 11 aa, Artificial Sequence
  Description of Artificial Sequence: Synthetic peptide
  XENP020023 vlCDR1
RASQDIGNYLN

SEQ ID NO: 18033 - protein, 7 aa, Artificial Sequence
  Description of Artificial Sequence: Synthetic peptide
  XENP020023 vlCDR2
YTSRLHS

SEQ ID NO: 18034 - protein, 9 aa, Artificial Sequence
  Description of Artificial Sequence: Synthetic peptide
  XENP020023 vlCDR3
QQGNTLPYT

SEQ ID NO: 18035 - protein, 447 aa, Artificial Sequence; identical to SEQ ID NO: 17225
  Description of Artificial Sequence: Synthetic polypeptide
  XENP020024 2A11_H0L1_IgG1_PVA_/S267K Heavy Chain

SEQ ID NO: 18036 - protein, 118 aa, Artificial Sequence; identical to SEQ ID NO: 17226
  Description of Artificial Sequence: Synthetic polypeptide
  VH of XENP020024

SEQ ID NO: 18037 - protein, 5 aa, Artificial Sequence
  Description of Artificial Sequence: Synthetic peptide
  XENP020024 vhCDR1
DYYMH

SEQ ID NO: 18038 - protein, 17 aa, Artificial Sequence
  Description of Artificial Sequence: Synthetic peptide
  XENP020024 vhCDR2
WIDPENGDTEYAPKFQG

SEQ ID NO: 18039 - protein, 9 aa, Artificial Sequence
  Description of Artificial Sequence: Synthetic peptide
  XENP020024 vhCDR3
RGVRQALDY

SEQ ID NO: 18040 - protein, 214 aa, Artificial Sequence; identical to SEQ ID NO: 17240
  Description of Artificial Sequence: Synthetic polypeptide
  XENP020024 2A11_H0L1_IgG1_PVA_/S267K Light Chain

SEQ ID NO: 18041 - protein, 107 aa, Artificial Sequence; identical to SEQ ID NO: 17241
  Description of Artificial Sequence: Synthetic polypeptide
  VL of XENP020024

SEQ ID NO: 18042 - protein, 11 aa, Artificial Sequence
  Description of Artificial Sequence: Synthetic peptide
  XENP020024 vlCDR1
RASQDIGNYLN

SEQ ID NO: 18043 - protein, 7 aa, Artificial Sequence
  Description of Artificial Sequence: Synthetic peptide
  XENP020024 vlCDR2
YTSRLHS

SEQ ID NO: 18044 - protein, 9 aa, Artificial Sequence
  Description of Artificial Sequence: Synthetic peptide
  XENP020024 vlCDR3
QQGNTLPYT

SEQ ID NO: 18045 - protein, 450 aa, Artificial Sequence; identical to SEQ ID NO: 17585
  Description of Artificial Sequence: Synthetic polypeptide
  XENP019401 7G8_H0L0_IgG1_PVA_/S267K Heavy Chain

SEQ ID NO: 18046 - protein, 121 aa, Artificial Sequence; identical to SEQ ID NO: 17586
  Description of Artificial Sequence: Synthetic polypeptide
  VH of XENP019401

SEQ ID NO: 18047 - protein, 5 aa, Artificial Sequence
  Description of Artificial Sequence: Synthetic peptide
  XENP019401 vhCDR1
DAWMD

SEQ ID NO: 18048 - protein, 19 aa, Artificial Sequence
  Description of Artificial Sequence: Synthetic peptide
  XENP019401 vhCDR2
EIRTKANNHATYYAESVKG

SEQ ID NO: 18049 - protein, 10 aa, Artificial Sequence
  Description of Artificial Sequence: Synthetic peptide
  XENP019401 vhCDR3
LANWDWYFDV

SEQ ID NO: 18050 - protein, 218 aa, Artificial Sequence; identical to SEQ ID NO: 17590
  Description of Artificial Sequence: Synthetic polypeptide
  XENP019401 7G8_H0L0_IgG1_PVA_/S267K Light Chain

SEQ ID NO: 18051 - protein, 111 aa, Artificial Sequence; identical to SEQ ID NO: 17591
  Description of Artificial Sequence: Synthetic polypeptide
  VL of XENP019401

SEQ ID NO: 18052 - protein, 15 aa, Artificial Sequence
  Description of Artificial Sequence: Synthetic peptide
  XENP019401 vlCDR1
KASQSVDYDGDSYMN

SEQ ID NO: 18053 - protein, 7 aa, Artificial Sequence
  Description of Artificial Sequence: Synthetic peptide
  XENP019401 vlCDR2
AASNLES

SEQ ID NO: 18054 - protein, 9 aa, Artificial Sequence
  Description of Artificial Sequence: Synthetic peptide
  XENP019401 vlCDR3
QQSNEDPFT

SEQ ID NO: 18055 - protein, 450 aa, Artificial Sequence; identical to SEQ ID NO: 17595
  Description of Artificial Sequence: Synthetic polypeptide
  XENP019402 7G8_H1L1_IgG1_PVA_/S267K Heavy Chain

SEQ ID NO: 18056 - protein, 121 aa, Artificial Sequence; identical to SEQ ID NO: 17596
  Description of Artificial Sequence: Synthetic polypeptide
  VH of XENP019402

SEQ ID NO: 18057 - protein, 5 aa, Artificial Sequence
  Description of Artificial Sequence: Synthetic peptide
  XENP019402 vhCDR1
DAWMD

SEQ ID NO: 18058 - protein, 19 aa, Artificial Sequence
  Description of Artificial Sequence: Synthetic peptide
  XENP019402 vhCDR2
EIRTKANNHATYYAEKFQG

SEQ ID NO: 18059 - protein, 10 aa, Artificial Sequence
  Description of Artificial Sequence: Synthetic peptide
  XENP019402 vhCDR3
LANWDWYFDV

SEQ ID NO: 18060 - protein, 218 aa, Artificial Sequence; identical to SEQ ID NO: 17600
  Description of Artificial Sequence: Synthetic polypeptide
  XENP019402 7G8_H1L1_IgG1_PVA_/S267K Light Chain

SEQ ID NO: 18061 - protein, 111 aa, Artificial Sequence; identical to SEQ ID NO: 17601
  Description of Artificial Sequence: Synthetic polypeptide
  VL of XENP019402

SEQ ID NO: 18062 - protein, 15 aa, Artificial Sequence
  Description of Artificial Sequence: Synthetic peptide
  XENP019402 vlCDR1
RASQSVDYDGDSYMN

SEQ ID NO: 18063 - protein, 7 aa, Artificial Sequence
  Description of Artificial Sequence: Synthetic peptide
  XENP019402 vlCDR2
AASNLES

SEQ ID NO: 18064 - protein, 9 aa, Artificial Sequence
  Description of Artificial Sequence: Synthetic peptide
  XENP019402 vlCDR3
QQSNEDPFT

SEQ ID NO: 18065 - protein, 450 aa, Artificial Sequence; identical to SEQ ID NO: 17595
  Description of Artificial Sequence: Synthetic polypeptide
  XENP019403 7G8_H1L2_IgG1_PVA_/S267K Heavy Chain

SEQ ID NO: 18066 - protein, 121 aa, Artificial Sequence; identical to SEQ ID NO: 17596
  Description of Artificial Sequence: Synthetic polypeptide
  VH of XENP019403

SEQ ID NO: 18067 - protein, 5 aa, Artificial Sequence
  Description of Artificial Sequence: Synthetic peptide
  XENP019403 vhCDR1
DAWMD

SEQ ID NO: 18068 - protein, 19 aa, Artificial Sequence
  Description of Artificial Sequence: Synthetic peptide
  XENP019403 vhCDR2
EIRTKANNHATYYAEKFQG

SEQ ID NO: 18069 - protein, 10 aa, Artificial Sequence
  Description of Artificial Sequence: Synthetic peptide
  XENP019403 vhCDR3
LANWDWYFDV

SEQ ID NO: 18070 - protein, 218 aa, Artificial Sequence; identical to SEQ ID NO: 17610
  Description of Artificial Sequence: Synthetic polypeptide
  XENP019403 7G8_H1L2_IgG1_PVA_/S267K Light Chain

SEQ ID NO: 18071 - protein, 111 aa, Artificial Sequence; identical to SEQ ID NO: 17611
  Description of Artificial Sequence: Synthetic polypeptide
  VL of XENP019403

SEQ ID NO: 18072 - protein, 15 aa, Artificial Sequence
  Description of Artificial Sequence: Synthetic peptide
  XENP019403 vlCDR1
RASQSVDYDGDSYMN

SEQ ID NO: 18073 - protein, 7 aa, Artificial Sequence
  Description of Artificial Sequence: Synthetic peptide
  XENP019403 vlCDR2
AASNLES

SEQ ID NO: 18074 - protein, 9 aa, Artificial Sequence
  Description of Artificial Sequence: Synthetic peptide
  XENP019403 vlCDR3
QQSNEDPFT

SEQ ID NO: 18075 - protein, 450 aa, Artificial Sequence; identical to SEQ ID NO: 17595
  Description of Artificial Sequence: Synthetic polypeptide
  XENP019404 7G8_H1L3_IgG1_PVA_/S267K Heavy Chain

SEQ ID NO: 18076 - protein, 121 aa, Artificial Sequence; identical to SEQ ID NO: 17596
  Description of Artificial Sequence: Synthetic polypeptide
  VH of XENP019404

SEQ ID NO: 18077 - protein, 5 aa, Artificial Sequence
  Description of Artificial Sequence: Synthetic peptide
  XENP019404 vhCDR1
DAWMD

SEQ ID NO: 18078 - protein, 19 aa, Artificial Sequence
  Description of Artificial Sequence: Synthetic peptide
  XENP019404 vhCDR2
EIRTKANNHATYYAEKFQG

SEQ ID NO: 18079 - protein, 10 aa, Artificial Sequence
  Description of Artificial Sequence: Synthetic peptide
  XENP019404 vhCDR3
LANWDWYFDV

SEQ ID NO: 18080 - protein, 218 aa, Artificial Sequence; identical to SEQ ID NO: 17620
  Description of Artificial Sequence: Synthetic polypeptide
  XENP019404 7G8_H1L3_IgG1_PVA_/S267K Light Chain

SEQ ID NO: 18081 - protein, 111 aa, Artificial Sequence; identical to SEQ ID NO: 17621
  Description of Artificial Sequence: Synthetic polypeptide
  VL of XENP019404

SEQ ID NO: 18082 - protein, 15 aa, Artificial Sequence
  Description of Artificial Sequence: Synthetic peptide
  XENP019404 vlCDR1
KASQSVDYDGDSYMN

SEQ ID NO: 18083 - protein, 7 aa, Artificial Sequence
  Description of Artificial Sequence: Synthetic peptide
  XENP019404 vlCDR2
AASNLES

SEQ ID NO: 18084 - protein, 9 aa, Artificial Sequence
  Description of Artificial Sequence: Synthetic peptide
  XENP019404 vlCDR3
QQSNEDPFT

SEQ ID NO: 18085 - protein, 450 aa, Artificial Sequence; identical to SEQ ID NO: 17625
  Description of Artificial Sequence: Synthetic polypeptide
  XENP019405 7G8_H2L1_IgG1_PVA_/S267K Heavy Chain

SEQ ID NO: 18086 - protein, 121 aa, Artificial Sequence; identical to SEQ ID NO: 17626
  Description of Artificial Sequence: Synthetic polypeptide
  VH of XENP019405

SEQ ID NO: 18087 - protein, 5 aa, Artificial Sequence
  Description of Artificial Sequence: Synthetic peptide
  XENP019405 vhCDR1
DAWMD

SEQ ID NO: 18088 - protein, 19 aa, Artificial Sequence
  Description of Artificial Sequence: Synthetic peptide
  XENP019405 vhCDR2
EIRTKANNHATYYAESVKG

SEQ ID NO: 18089 - protein, 10 aa, Artificial Sequence
  Description of Artificial Sequence: Synthetic peptide
  XENP019405 vhCDR3
LANWDWYFDV

SEQ ID NO: 18090 - protein, 218 aa, Artificial Sequence; identical to SEQ ID NO: 17600
  Description of Artificial Sequence: Synthetic polypeptide
  XENP019405 7G8_H2L1_IgG1_PVA_/S267K Light Chain

SEQ ID NO: 18091 - protein, 111 aa, Artificial Sequence; identical to SEQ ID NO: 17601
  Description of Artificial Sequence: Synthetic polypeptide
  VL of XENP019405

SEQ ID NO: 18092 - protein, 15 aa, Artificial Sequence
  Description of Artificial Sequence: Synthetic peptide
  XENP019405 vlCDR1
RASQSVDYDGDSYMN

SEQ ID NO: 18093 - protein, 7 aa, Artificial Sequence
  Description of Artificial Sequence: Synthetic peptide
  XENP019405 vlCDR2
AASNLES

SEQ ID NO: 18094 - protein, 9 aa, Artificial Sequence
  Description of Artificial Sequence: Synthetic peptide
  XENP019405 vlCDR3
QQSNEDPFT

SEQ ID NO: 18095 - protein, 450 aa, Artificial Sequence; identical to SEQ ID NO: 17625
  Description of Artificial Sequence: Synthetic polypeptide
  XENP019406 7G8_H2L2_IgG1_PVA_/S267K Heavy Chain

SEQ ID NO: 18096 - protein, 121 aa, Artificial Sequence; identical to SEQ ID NO: 17626
  Description of Artificial Sequence: Synthetic polypeptide
  VH of XENP019406

SEQ ID NO: 18097 - protein, 5 aa, Artificial Sequence
  Description of Artificial Sequence: Synthetic peptide
  XENP019406 vhCDR1
DAWMD

SEQ ID NO: 18098 - protein, 19 aa, Artificial Sequence
  Description of Artificial Sequence: Synthetic peptide
  XENP019406 vhCDR2
EIRTKANNHATYYAESVKG

SEQ ID NO: 18099 - protein, 10 aa, Artificial Sequence
  Description of Artificial Sequence: Synthetic peptide
  XENP019406 vhCDR3
LANWDWYFDV

SEQ ID NO: 18100 - protein, 218 aa, Artificial Sequence; identical to SEQ ID NO: 17610
  Description of Artificial Sequence: Synthetic polypeptide
  XENP019406 7G8_H2L2_IgG1_PVA_/S267K Light Chain

SEQ ID NO: 18101 - protein, 111 aa, Artificial Sequence; identical to SEQ ID NO: 17611
  Description of Artificial Sequence: Synthetic polypeptide
  VL of XENP019406

SEQ ID NO: 18102 - protein, 15 aa, Artificial Sequence
  Description of Artificial Sequence: Synthetic peptide
  XENP019406 vlCDR1
RASQSVDYDGDSYMN

SEQ ID NO: 18103 - protein, 7 aa, Artificial Sequence
  Description of Artificial Sequence: Synthetic peptide
  XENP019406 vlCDR2
AASNLES

SEQ ID NO: 18104 - protein, 9 aa, Artificial Sequence
  Description of Artificial Sequence: Synthetic peptide
  XENP019406 vlCDR3
QQSNEDPFT

SEQ ID NO: 18105 - protein, 450 aa, Artificial Sequence; identical to SEQ ID NO: 17625
  Description of Artificial Sequence: Synthetic polypeptide
  XENP019407 7G8_H2L3_IgG1_PVA_/S267K Heavy Chain

SEQ ID NO: 18106 - protein, 121 aa, Artificial Sequence; identical to SEQ ID NO: 17626
  Description of Artificial Sequence: Synthetic polypeptide
  VH of XENP019407

SEQ ID NO: 18107 - protein, 5 aa, Artificial Sequence
  Description of Artificial Sequence: Synthetic peptide
  XENP019407 vhCDR1
DAWMD

SEQ ID NO: 18108 - protein, 19 aa, Artificial Sequence
  Description of Artificial Sequence: Synthetic peptide
  XENP019407 vhCDR2
EIRTKANNHATYYAESVKG

SEQ ID NO: 18109 - protein, 10 aa, Artificial Sequence
  Description of Artificial Sequence: Synthetic peptide
  XENP019407 vhCDR3
LANWDWYFDV

SEQ ID NO: 18110 - protein, 218 aa, Artificial Sequence; identical to SEQ ID NO: 17620
  Description of Artificial Sequence: Synthetic polypeptide
  XENP019407 7G8_H2L3_IgG1_PVA_/S267K Light Chain

SEQ ID NO: 18111 - protein, 111 aa, Artificial Sequence; identical to SEQ ID NO: 17621
  Description of Artificial Sequence: Synthetic polypeptide
  VL of XENP019407

SEQ ID NO: 18112 - protein, 15 aa, Artificial Sequence
  Description of Artificial Sequence: Synthetic peptide
  XENP019407 vlCDR1
KASQSVDYDGDSYMN

SEQ ID NO: 18113 - protein, 7 aa, Artificial Sequence
  Description of Artificial Sequence: Synthetic peptide
  XENP019407 vlCDR2
AASNLES

SEQ ID NO: 18114 - protein, 9 aa, Artificial Sequence
  Description of Artificial Sequence: Synthetic peptide
  XENP019407 vlCDR3
QQSNEDPFT

SEQ ID NO: 18115 - protein, 450 aa, Artificial Sequence; identical to SEQ ID NO: 17595
  Description of Artificial Sequence: Synthetic polypeptide
  XENP020028 7G8_H1L0_IgG1_PVA_/S267K Heavy Chain

SEQ ID NO: 18116 - protein, 121 aa, Artificial Sequence; identical to SEQ ID NO: 17596
  Description of Artificial Sequence: Synthetic polypeptide
  VH of XENP020028

SEQ ID NO: 18117 - protein, 5 aa, Artificial Sequence
  Description of Artificial Sequence: Synthetic peptide
  XENP020028 vhCDR1
DAWMD

SEQ ID NO: 18118 - protein, 19 aa, Artificial Sequence
  Description of Artificial Sequence: Synthetic peptide
  XENP020028 vhCDR2
EIRTKANNHATYYAEKFQG

SEQ ID NO: 18119 - protein, 10 aa, Artificial Sequence
  Description of Artificial Sequence: Synthetic peptide
  XENP020028 vhCDR3
LANWDWYFDV

SEQ ID NO: 18120 - protein, 218 aa, Artificial Sequence; identical to SEQ ID NO: 17590
  Description of Artificial Sequence: Synthetic polypeptide
  XENP020028 7G8_H1L0_IgG1_PVA_/S267K Light Chain

SEQ ID NO: 18121 - protein, 111 aa, Artificial Sequence; identical to SEQ ID NO: 17591
  Description of Artificial Sequence: Synthetic polypeptide
  VL of XENP020028

SEQ ID NO: 18122 - protein, 15 aa, Artificial Sequence
  Description of Artificial Sequence: Synthetic peptide
  XENP020028 vlCDR1
KASQSVDYDGDSYMN

SEQ ID NO: 18123 - protein, 7 aa, Artificial Sequence
  Description of Artificial Sequence: Synthetic peptide
  XENP020028 vlCDR2
AASNLES

SEQ ID NO: 18124 - protein, 9 aa, Artificial Sequence
  Description of Artificial Sequence: Synthetic peptide
  XENP020028 vlCDR3
QQSNEDPFT

SEQ ID NO: 18125 - protein, 450 aa, Artificial Sequence; identical to SEQ ID NO: 17585
  Description of Artificial Sequence: Synthetic polypeptide
  XENP020029 7G8_H0L1_IgG1_PVA_/S267K Heavy Chain

SEQ ID NO: 18126 - protein, 121 aa, Artificial Sequence; identical to SEQ ID NO: 17586
  Description of Artificial Sequence: Synthetic polypeptide
  VH of XENP020029

SEQ ID NO: 18127 - protein, 5 aa, Artificial Sequence
  Description of Artificial Sequence: Synthetic peptide
  XENP020029 vhCDR1
DAWMD

SEQ ID NO: 18128 - protein, 19 aa, Artificial Sequence
  Description of Artificial Sequence: Synthetic peptide
  XENP020029 vhCDR2
EIRTKANNHATYYAESVKG

SEQ ID NO: 18129 - protein, 10 aa, Artificial Sequence
  Description of Artificial Sequence: Synthetic peptide
  XENP020029 vhCDR3
LANWDWYFDV

SEQ ID NO: 18130 - protein, 218 aa, Artificial Sequence; identical to SEQ ID NO: 17600
  Description of Artificial Sequence: Synthetic polypeptide
  XENP020029 7G8_H0L1_IgG1_PVA_/S267K Light Chain

SEQ ID NO: 18131 - protein, 111 aa, Artificial Sequence; identical to SEQ ID NO: 17601
  Description of Artificial Sequence: Synthetic polypeptide
  VL of XENP020029

SEQ ID NO: 18132 - protein, 15 aa, Artificial Sequence
  Description of Artificial Sequence: Synthetic peptide
  XENP020029 vlCDR1
RASQSVDYDGDSYMN

SEQ ID NO: 18133 - protein, 7 aa, Artificial Sequence
  Description of Artificial Sequence: Synthetic peptide
  XENP020029 vlCDR2
AASNLES

SEQ ID NO: 18134 - protein, 9 aa, Artificial Sequence
  Description of Artificial Sequence: Synthetic peptide
  XENP020029 vlCDR3
QQSNEDPFT

SEQ ID NO: 18135 - protein, 450 aa, Artificial Sequence; identical to SEQ ID NO: 17625
  Description of Artificial Sequence: Synthetic polypeptide
  XENP020262 7G8_H2L0_IgG1_PVA_/S267K Heavy Chain

SEQ ID NO: 18136 - protein, 121 aa, Artificial Sequence; identical to SEQ ID NO: 17626
  Description of Artificial Sequence: Synthetic polypeptide
  VH of XENP020262

SEQ ID NO: 18137 - protein, 5 aa, Artificial Sequence
  Description of Artificial Sequence: Synthetic peptide
  XENP020262 vhCDR1
DAWMD

SEQ ID NO: 18138 - protein, 19 aa, Artificial Sequence
  Description of Artificial Sequence: Synthetic peptide
  XENP020262 vhCDR2
EIRTKANNHATYYAESVKG

SEQ ID NO: 18139 - protein, 10 aa, Artificial Sequence
  Description of Artificial Sequence: Synthetic peptide
  XENP020262 vhCDR3
LANWDWYFDV

SEQ ID NO: 18140 - protein, 218 aa, Artificial Sequence; identical to SEQ ID NO: 17590
  Description of Artificial Sequence: Synthetic polypeptide
  XENP020262 7G8_H2L0_IgG1_PVA_/S267K Light Chain

SEQ ID NO: 18141 - protein, 111 aa, Artificial Sequence; identical to SEQ ID NO: 17591
  Description of Artificial Sequence: Synthetic polypeptide
  VL of XENP020262

SEQ ID NO: 18142 - protein, 15 aa, Artificial Sequence
  Description of Artificial Sequence: Synthetic peptide
  XENP020262 vlCDR1
KASQSVDYDGDSYMN

SEQ ID NO: 18143 - protein, 7 aa, Artificial Sequence
  Description of Artificial Sequence: Synthetic peptide
  XENP020262 vlCDR2
AASNLES

SEQ ID NO: 18144 - protein, 9 aa, Artificial Sequence
  Description of Artificial Sequence: Synthetic peptide
  XENP020262 vlCDR3
QQSNEDPFT

SEQ ID NO: 18145 - protein, 450 aa, Artificial Sequence; identical to SEQ ID NO: 17585
  Description of Artificial Sequence: Synthetic polypeptide
  XENP020263 7G8_H0L2_IgG1_PVA_/S267K Heavy Chain

SEQ ID NO: 18146 - protein, 121 aa, Artificial Sequence; identical to SEQ ID NO: 17586
  Description of Artificial Sequence: Synthetic polypeptide
  VH of XENP020263

SEQ ID NO: 18147 - protein, 5 aa, Artificial Sequence
  Description of Artificial Sequence: Synthetic peptide
  XENP020263 vhCDR1
DAWMD

SEQ ID NO: 18148 - protein, 19 aa, Artificial Sequence
  Description of Artificial Sequence: Synthetic peptide
  XENP020263 vhCDR2
EIRTKANNHATYYAESVKG

SEQ ID NO: 18149 - protein, 10 aa, Artificial Sequence
  Description of Artificial Sequence: Synthetic peptide
  XENP020263 vhCDR3
LANWDWYFDV

SEQ ID NO: 18150 - protein, 218 aa, Artificial Sequence; identical to SEQ ID NO: 17610
  Description of Artificial Sequence: Synthetic polypeptide
  XENP020263 7G8_H0L2_IgG1_PVA_/S267K Light Chain

SEQ ID NO: 18151 - protein, 111 aa, Artificial Sequence; identical to SEQ ID NO: 17611
  Description of Artificial Sequence: Synthetic polypeptide
  VL of XENP020263

SEQ ID NO: 18152 - protein, 15 aa, Artificial Sequence
  Description of Artificial Sequence: Synthetic peptide
  XENP020263 vlCDR1
RASQSVDYDGDSYMN

SEQ ID NO: 18153 - protein, 7 aa, Artificial Sequence
  Description of Artificial Sequence: Synthetic peptide
  XENP020263 vlCDR2
AASNLES

SEQ ID NO: 18154 - protein, 9 aa, Artificial Sequence
  Description of Artificial Sequence: Synthetic peptide
  XENP020263 vlCDR3
QQSNEDPFT

SEQ ID NO: 18155 - protein, 450 aa, Artificial Sequence; identical to SEQ ID NO: 17805
  Description of Artificial Sequence: Synthetic polypeptide
  XENP020417 7G8_H3L1_IgG1_PVA_/S267K Heavy Chain

SEQ ID NO: 18156 - protein, 121 aa, Artificial Sequence; identical to SEQ ID NO: 17806
  Description of Artificial Sequence: Synthetic polypeptide
  VH of XENP020417

SEQ ID NO: 18157 - protein, 5 aa, Artificial Sequence
  Description of Artificial Sequence: Synthetic peptide
  XENP020417 vhCDR1
DAWMD

SEQ ID NO: 18158 - protein, 19 aa, Artificial Sequence
  Description of Artificial Sequence: Synthetic peptide
  XENP020417 vhCDR2
EIRTKANNHATYYAESVKG

SEQ ID NO: 18159 - protein, 10 aa, Artificial Sequence
  Description of Artificial Sequence: Synthetic peptide
  XENP020417 vhCDR3
LANWDWYFDV

SEQ ID NO: 18160 - protein, 218 aa, Artificial Sequence; identical to SEQ ID NO: 17600
  Description of Artificial Sequence: Synthetic polypeptide
  XENP020417 7G8_H3L1_IgG1_PVA_/S267K Light Chain

SEQ ID NO: 18161 - protein, 111 aa, Artificial Sequence; identical to SEQ ID NO: 17601
  Description of Artificial Sequence: Synthetic polypeptide
  VL of XENP020417

SEQ ID NO: 18162 - protein, 15 aa, Artificial Sequence
  Description of Artificial Sequence: Synthetic peptide
  XENP020417 vlCDR1
RASQSVDYDGDSYMN

SEQ ID NO: 18163 - protein, 7 aa, Artificial Sequence
  Description of Artificial Sequence: Synthetic peptide
  XENP020417 vlCDR2
AASNLES

SEQ ID NO: 18164 - protein, 9 aa, Artificial Sequence
  Description of Artificial Sequence: Synthetic peptide
  XENP020417 vlCDR3
QQSNEDPFT

SEQ ID NO: 18165 - protein, 450 aa, Artificial Sequence; identical to SEQ ID NO: 17805
  Description of Artificial Sequence: Synthetic polypeptide
  XENP020418 7G8_H3L2_IgG1_PVA_/S267K Heavy Chain

SEQ ID NO: 18166 - protein, 121 aa, Artificial Sequence; identical to SEQ ID NO: 17806
  Description of Artificial Sequence: Synthetic polypeptide
  VH of XENP020418

SEQ ID NO: 18167 - protein, 5 aa, Artificial Sequence
  Description of Artificial Sequence: Synthetic peptide
  XENP020418 vhCDR1
DAWMD

SEQ ID NO: 18168 - protein, 19 aa, Artificial Sequence
  Description of Artificial Sequence: Synthetic peptide
  XENP020418 vhCDR2
EIRTKANNHATYYAESVKG

SEQ ID NO: 18169 - protein, 10 aa, Artificial Sequence
  Description of Artificial Sequence: Synthetic peptide
  XENP020418 vhCDR3
LANWDWYFDV

SEQ ID NO: 18170 - protein, 218 aa, Artificial Sequence; identical to SEQ ID NO: 17610
  Description of Artificial Sequence: Synthetic polypeptide
  XENP020418 7G8_H3L2_IgG1_PVA_/S267K Light Chain

SEQ ID NO: 18171 - protein, 111 aa, Artificial Sequence; identical to SEQ ID NO: 17611
  Description of Artificial Sequence: Synthetic polypeptide
  VL of XENP020418

SEQ ID NO: 18172 - protein, 15 aa, Artificial Sequence
  Description of Artificial Sequence: Synthetic peptide
  XENP020418 vlCDR1
RASQSVDYDGDSYMN

SEQ ID NO: 18173 - protein, 7 aa, Artificial Sequence
  Description of Artificial Sequence: Synthetic peptide
  XENP020418 vlCDR2
AASNLES

SEQ ID NO: 18174 - protein, 9 aa, Artificial Sequence
  Description of Artificial Sequence: Synthetic peptide
  XENP020418 vlCDR3
QQSNEDPFT

SEQ ID NO: 18175 - protein, 450 aa, Artificial Sequence; identical to SEQ ID NO: 17805
  Description of Artificial Sequence: Synthetic polypeptide
  XENP020419 7G8_H3L3_IgG1_PVA_/S267K Heavy Chain

SEQ ID NO: 18176 - protein, 121 aa, Artificial Sequence; identical to SEQ ID NO: 17806
  Description of Artificial Sequence: Synthetic polypeptide
  VH of XENP020419

SEQ ID NO: 18177 - protein, 5 aa, Artificial Sequence
  Description of Artificial Sequence: Synthetic peptide
  XENP020419 vhCDR1
DAWMD

SEQ ID NO: 18178 - protein, 19 aa, Artificial Sequence
  Description of Artificial Sequence: Synthetic peptide
  XENP020419 vhCDR2
EIRTKANNHATYYAESVKG

SEQ ID NO: 18179 - protein, 10 aa, Artificial Sequence
  Description of Artificial Sequence: Synthetic peptide
  XENP020419 vhCDR3
LANWDWYFDV

SEQ ID NO: 18180 - protein, 218 aa, Artificial Sequence; identical to SEQ ID NO: 17620
  Description of Artificial Sequence: Synthetic polypeptide
  XENP020419 7G8_H3L3_IgG1_PVA_/S267K Light Chain

SEQ ID NO: 18181 - protein, 111 aa, Artificial Sequence; identical to SEQ ID NO: 17621
  Description of Artificial Sequence: Synthetic polypeptide
  VL of XENP020419

SEQ ID NO: 18182 - protein, 15 aa, Artificial Sequence
  Description of Artificial Sequence: Synthetic peptide
  XENP020419 vlCDR1
KASQSVDYDGDSYMN

SEQ ID NO: 18183 - protein, 7 aa, Artificial Sequence
  Description of Artificial Sequence: Synthetic peptide
  XENP020419 vlCDR2
AASNLES

SEQ ID NO: 18184 - protein, 9 aa, Artificial Sequence
  Description of Artificial Sequence: Synthetic peptide
  XENP020419 vlCDR3
QQSNEDPFT

SEQ ID NO: 18185 - protein, 450 aa, Artificial Sequence; identical to SEQ ID NO: 17805
  Description of Artificial Sequence: Synthetic polypeptide
  XENP020417 7G8_H3L1_IgG1_PVA_/S267K Heavy Chain

SEQ ID NO: 18186 - protein, 121 aa, Artificial Sequence; identical to SEQ ID NO: 17806
  Description of Artificial Sequence: Synthetic polypeptide
  VH of XENP020417

SEQ ID NO: 18187 - protein, 5 aa, Artificial Sequence
  Description of Artificial Sequence: Synthetic peptide
  XENP020417 vhCDR1
DAWMD

SEQ ID NO: 18188 - protein, 19 aa, Artificial Sequence
  Description of Artificial Sequence: Synthetic peptide
  XENP020417 vhCDR2
EIRTKANNHATYYAESVKG

SEQ ID NO: 18189 - protein, 10 aa, Artificial Sequence
  Description of Artificial Sequence: Synthetic peptide
  XENP020417 vhCDR3
LANWDWYFDV

SEQ ID NO: 18190 - protein, 218 aa, Artificial Sequence; identical to SEQ ID NO: 17600
  Description of Artificial Sequence: Synthetic polypeptide
  XENP020417 7G8_H3L1_IgG1_PVA_/S267K Light Chain

SEQ ID NO: 18191 - protein, 111 aa, Artificial Sequence; identical to SEQ ID NO: 17601
  Description of Artificial Sequence: Synthetic polypeptide
  VL of XENP020417

SEQ ID NO: 18192 - protein, 15 aa, Artificial Sequence
  Description of Artificial Sequence: Synthetic peptide
  XENP020417 vlCDR1
RASQSVDYDGDSYMN

SEQ ID NO: 18193 - protein, 7 aa, Artificial Sequence
  Description of Artificial Sequence: Synthetic peptide
  XENP020417 vlCDR2
AASNLES

SEQ ID NO: 18194 - protein, 9 aa, Artificial Sequence
  Description of Artificial Sequence: Synthetic peptide
  XENP020417 vlCDR3
QQSNEDPFT

SEQ ID NO: 18195 - protein, 450 aa, Artificial Sequence; identical to SEQ ID NO: 17805
  Description of Artificial Sequence: Synthetic polypeptide
  XENP020418 7G8_H3L2_IgG1_PVA_/S267K Heavy Chain

SEQ ID NO: 18196 - protein, 121 aa, Artificial Sequence; identical to SEQ ID NO: 17806
  Description of Artificial Sequence: Synthetic polypeptide
  VH of XENP020418

SEQ ID NO: 18197 - protein, 5 aa, Artificial Sequence
  Description of Artificial Sequence: Synthetic peptide
  XENP020418 vhCDR1
DAWMD

SEQ ID NO: 18198 - protein, 19 aa, Artificial Sequence
  Description of Artificial Sequence: Synthetic peptide
  XENP020418 vhCDR2
EIRTKANNHATYYAESVKG

SEQ ID NO: 18199 - protein, 10 aa, Artificial Sequence
  Description of Artificial Sequence: Synthetic peptide
  XENP020418 vhCDR3
LANWDWYFDV

SEQ ID NO: 18200 - protein, 218 aa, Artificial Sequence; identical to SEQ ID NO: 17610
  Description of Artificial Sequence: Synthetic polypeptide
  XENP020418 7G8_H3L2_IgG1_PVA_/S267K Light Chain

SEQ ID NO: 18201 - protein, 111 aa, Artificial Sequence; identical to SEQ ID NO: 17611
  Description of Artificial Sequence: Synthetic polypeptide
  VL of XENP020418

SEQ ID NO: 18202 - protein, 15 aa, Artificial Sequence
  Description of Artificial Sequence: Synthetic peptide
  XENP020418 vlCDR1
RASQSVDYDGDSYMN

SEQ ID NO: 18203 - protein, 7 aa, Artificial Sequence
  Description of Artificial Sequence: Synthetic peptide
  XENP020418 vlCDR2
AASNLES

SEQ ID NO: 18204 - protein, 9 aa, Artificial Sequence
  Description of Artificial Sequence: Synthetic peptide
  XENP020418 vlCDR3
QQSNEDPFT

SEQ ID NO: 18205 - protein, 450 aa, Artificial Sequence; identical to SEQ ID NO: 17805
  Description of Artificial Sequence: Synthetic polypeptide
  XENP020419 7G8_H3L3_IgG1_PVA_/S267K Heavy Chain

SEQ ID NO: 18206 - protein, 121 aa, Artificial Sequence; identical to SEQ ID NO: 17806
  Description of Artificial Sequence: Synthetic polypeptide
  VH of XENP020419

SEQ ID NO: 18207 - protein, 5 aa, Artificial Sequence
  Description of Artificial Sequence: Synthetic peptide
  XENP020419 vhCDR1
DAWMD

SEQ ID NO: 18208 - protein, 19 aa, Artificial Sequence
  Description of Artificial Sequence: Synthetic peptide
  XENP020419 vhCDR2
EIRTKANNHATYYAESVKG

SEQ ID NO: 18209 - protein, 10 aa, Artificial Sequence
  Description of Artificial Sequence: Synthetic peptide
  XENP020419 vhCDR3
LANWDWYFDV

SEQ ID NO: 18210 - protein, 218 aa, Artificial Sequence; identical to SEQ ID NO: 17620
  Description of Artificial Sequence: Synthetic polypeptide
  XENP020419 7G8_H3L3_IgG1_PVA_/S267K Light Chain

SEQ ID NO: 18211 - protein, 111 aa, Artificial Sequence; identical to SEQ ID NO: 17621
  Description of Artificial Sequence: Synthetic polypeptide
  VL of XENP020419

SEQ ID NO: 18212 - protein, 15 aa, Artificial Sequence
  Description of Artificial Sequence: Synthetic peptide
  XENP020419 vlCDR1
KASQSVDYDGDSYMN

SEQ ID NO: 18213 - protein, 7 aa, Artificial Sequence
  Description of Artificial Sequence: Synthetic peptide
  XENP020419 vlCDR2
AASNLES

SEQ ID NO: 18214 - protein, 9 aa, Artificial Sequence
  Description of Artificial Sequence: Synthetic peptide
  XENP020419 vlCDR3
QQSNEDPFT

SEQ ID NO: 18215 - protein, 450 aa, Artificial Sequence
  Description of Artificial Sequence: Synthetic polypeptide
  XENP020449 7G8_H0.1_L0_IgG1_PVA_/S267K Heavy Chain
EVKLEESGGGLVQPGGSMKLSCAASGYTFSDAWMDWVRQSPEKGLEWVAEIRTKANNHATYYAESVKGRFTISRDDSKSSVYLQMNSLRAEDTGIYYCTRLANWDWYFDVWGAGTTVTVSSASTKGPSVFPLAPSSKSTSGGTAALGCLVKDYFPEPVTVSWNSGALTSGVHTFPAVLQSSGLYSLSSVVTVPSSSLGTQTYICNVNHKPSDTKVDKKVEPKSCDKTHTCPPCPAPPVAGPSVFLFPPKPKDTLMISRTPEVTCVVVDVKHEDPEVKFNWYVDGVEVHNAKTKPREEEYNSTYRVVSVLTVLHQDWLNGKEYKCKVSNKALPAPIEKTISKAKGQPREPQVYTLPPSREEMTKNQVSLTCDVSGFYPSDIAVEWESDGQPENNYKTTPPVLDSDGSFFLYSKLTVDKSRWEQGDVFSCSVMHEALHNHYTQKSLSLSPGK

SEQ ID NO: 18216 - protein, 121 aa, Artificial Sequence
  Description of Artificial Sequence: Synthetic polypeptide
  VH of XENP020449
EVKLEESGGGLVQPGGSMKLSCAASGYTFSDAWMDWVRQSPEKGLEWVAEIRTKANNHATYYAESVKGRFTISRDDSKSSVYLQMNSLRAEDTGIYYCTRLANWDWYFDVWGAGTTVTVSS

SEQ ID NO: 18217 - protein, 5 aa, Artificial Sequence
  Description of Artificial Sequence: Synthetic peptide
  XENP020449 vhCDR1
DAWMD

SEQ ID NO: 18218 - protein, 19 aa, Artificial Sequence
  Description of Artificial Sequence: Synthetic peptide
  XENP020449 vhCDR2
EIRTKANNHATYYAESVKG

SEQ ID NO: 18219 - protein, 10 aa, Artificial Sequence
  Description of Artificial Sequence: Synthetic peptide
  XENP020449 vhCDR3
LANWDWYFDV

SEQ ID NO: 18220 - protein, 218 aa, Artificial Sequence; identical to SEQ ID NO: 17590
  Description of Artificial Sequence: Synthetic polypeptide
  XENP020449 7G8_H0.1_L0_IgG1_PVA_/S267K Light Chain

SEQ ID NO: 18221 - protein, 111 aa, Artificial Sequence; identical to SEQ ID NO: 17591
  Description of Artificial Sequence: Synthetic polypeptide
  VL of XENP020449

SEQ ID NO: 18222 - protein, 15 aa, Artificial Sequence
  Description of Artificial Sequence: Synthetic peptide
  XENP020449 vlCDR1
KASQSVDYDGDSYMN

SEQ ID NO: 18223 - protein, 7 aa, Artificial Sequence
  Description of Artificial Sequence: Synthetic peptide
  XENP020449 vlCDR2
AASNLES

SEQ ID NO: 18224 - protein, 9 aa, Artificial Sequence
  Description of Artificial Sequence: Synthetic peptide
  XENP020449 vlCDR3
QQSNEDPFT

SEQ ID NO: 18225 - protein, 450 aa, Artificial Sequence
  Description of Artificial Sequence: Synthetic polypeptide
  XENP020450 7G8_H0.2_L0_IgG1_PVA_/S267K Heavy Chain
EVKLEESGGGLVQPGGSMKLSCAASGGTFSDAWMDWVRQSPEKGLEWVAEIRTKANNHATYYAESVKGRFTISRDDSKSSVYLQMNSLRAEDTGIYYCTRLANWDWYFDVWGAGTTVTVSSASTKGPSVFPLAPSSKSTSGGTAALGCLVKDYFPEPVTVSWNSGALTSGVHTFPAVLQSSGLYSLSSVVTVPSSSLGTQTYICNVNHKPSDTKVDKKVEPKSCDKTHTCPPCPAPPVAGPSVFLFPPKPKDTLMISRTPEVTCVVVDVKHEDPEVKFNWYVDGVEVHNAKTKPREEEYNSTYRVVSVLTVLHQDWLNGKEYKCKVSNKALPAPIEKTISKAKGQPREPQVYTLPPSREEMTKNQVSLTCDVSGFYPSDIAVEWESDGQPENNYKTTPPVLDSDGSFFLYSKLTVDKSRWEQGDVFSCSVMHEALHNHYTQKSLSLSPGK

SEQ ID NO: 18226 - protein, 121 aa, Artificial Sequence
  Description of Artificial Sequence: Synthetic polypeptide
  VH of XENP020450
EVKLEESGGGLVQPGGSMKLSCAASGGTFSDAWMDWVRQSPEKGLEWVAEIRTKANNHATYYAESVKGRFTISRDDSKSSVYLQMNSLRAEDTGIYYCTRLANWDWYFDVWGAGTTVTVSS

SEQ ID NO: 18227 - protein, 5 aa, Artificial Sequence
  Description of Artificial Sequence: Synthetic peptide
  XENP020450 vhCDR1
DAWMD

SEQ ID NO: 18228 - protein, 19 aa, Artificial Sequence
  Description of Artificial Sequence: Synthetic peptide
  XENP020450 vhCDR2
EIRTKANNHATYYAESVKG

SEQ ID NO: 18229 - protein, 10 aa, Artificial Sequence
  Description of Artificial Sequence: Synthetic peptide
  XENP020450 vhCDR3
LANWDWYFDV

SEQ ID NO: 18230 - protein, 218 aa, Artificial Sequence; identical to SEQ ID NO: 17590
  Description of Artificial Sequence: Synthetic polypeptide
  XENP020450 7G8_H0.2_L0_IgG1_PVA_/S267K Light Chain

SEQ ID NO: 18231 - protein, 111 aa, Artificial Sequence; identical to SEQ ID NO: 17591
  Description of Artificial Sequence: Synthetic polypeptide
  VL of XENP020450

SEQ ID NO: 18232 - protein, 15 aa, Artificial Sequence
  Description of Artificial Sequence: Synthetic peptide
  XENP020450 vlCDR1
KASQSVDYDGDSYMN

SEQ ID NO: 18233 - protein, 7 aa, Artificial Sequence
  Description of Artificial Sequence: Synthetic peptide
  XENP020450 vlCDR2
AASNLES

SEQ ID NO: 18234 - protein, 9 aa, Artificial Sequence
  Description of Artificial Sequence: Synthetic peptide
  XENP020450 vlCDR3
QQSNEDPFT

SEQ ID NO: 18235 - protein, 450 aa, Artificial Sequence
  Description of Artificial Sequence: Synthetic polypeptide
  XENP020451 7G8_H0.3_L0_IgG1_PVA_/S267K Heavy Chain
EVKLEESGGGLVQPGGSMKLSCAASGDTFSDAWMDWVRQSPEKGLEWVAEIRTKANNHATYYAESVKGRFTISRDDSKSSVYLQMNSLRAEDTGIYYCTRLANWDWYFDVWGAGTTVTVSSASTKGPSVFPLAPSSKSTSGGTAALGCLVKDYFPEPVTVSWNSGALTSGVHTFPAVLQSSGLYSLSSVVTVPSSSLGTQTYICNVNHKPSDTKVDKKVEPKSCDKTHTCPPCPAPPVAGPSVFLFPPKPKDTLMISRTPEVTCVVVDVKHEDPEVKFNWYVDGVEVHNAKTKPREEEYNSTYRVVSVLTVLHQDWLNGKEYKCKVSNKALPAPIEKTISKAKGQPREPQVYTLPPSREEMTKNQVSLTCDVSGFYPSDIAVEWESDGQPENNYKTTPPVLDSDGSFFLYSKLTVDKSRWEQGDVFSCSVMHEALHNHYTQKSLSLSPGK

SEQ ID NO: 18236 - protein, 121 aa, Artificial Sequence
  Description of Artificial Sequence: Synthetic polypeptide
  VH of XENP020451
EVKLEESGGGLVQPGGSMKLSCAASGDTFSDAWMDWVRQSPEKGLEWVAEIRTKANNHATYYAESVKGRFTISRDDSKSSVYLQMNSLRAEDTGIYYCTRLANWDWYFDVWGAGTTVTVSS

SEQ ID NO: 18237 - protein, 5 aa, Artificial Sequence
  Description of Artificial Sequence: Synthetic peptide
  XENP020451 vhCDR1
DAWMD

SEQ ID NO: 18238 - protein, 19 aa, Artificial Sequence
  Description of Artificial Sequence: Synthetic peptide
  XENP020451 vhCDR2
EIRTKANNHATYYAESVKG

SEQ ID NO: 18239 - protein, 10 aa, Artificial Sequence
  Description of Artificial Sequence: Synthetic peptide
  XENP020451 vhCDR3
LANWDWYFDV

SEQ ID NO: 18240 - protein, 218 aa, Artificial Sequence; identical to SEQ ID NO: 17590
  Description of Artificial Sequence: Synthetic polypeptide
  XENP020451 7G8_H0.3_L0_IgG1_PVA_/S267K Light Chain

SEQ ID NO: 18241 - protein, 111 aa, Artificial Sequence; identical to SEQ ID NO: 17591
  Description of Artificial Sequence: Synthetic polypeptide
  VL of XENP020451

SEQ ID NO: 18242 - protein, 15 aa, Artificial Sequence
  Description of Artificial Sequence: Synthetic peptide
  XENP020451 vlCDR1
KASQSVDYDGDSYMN

SEQ ID NO: 18243 - protein, 7 aa, Artificial Sequence
  Description of Artificial Sequence: Synthetic peptide
  XENP020451 vlCDR2
AASNLES

SEQ ID NO: 18244 - protein, 9 aa, Artificial Sequence
  Description of Artificial Sequence: Synthetic peptide
  XENP020451 vlCDR3
QQSNEDPFT

SEQ ID NO: 18245 - protein, 450 aa, Artificial Sequence
  Description of Artificial Sequence: Synthetic polypeptide
  XENP020452 7G8_H0.4_L0_IgG1_PVA_/S267K Heavy Chain
EVKLEESGGGLVQPGGSMKLSCAASGFSFSDAWMDWVRQSPEKGLEWVAEIRTKANNHATYYAESVKGRFTISRDDSKSSVYLQMNSLRAEDTGIYYCTRLANWDWYFDVWGAGTTVTVSSASTKGPSVFPLAPSSKSTSGGTAALGCLVKDYFPEPVTVSWNSGALTSGVHTFPAVLQSSGLYSLSSVVTVPSSSLGTQTYICNVNHKPSDTKVDKKVEPKSCDKTHTCPPCPAPPVAGPSVFLFPPKPKDTLMISRTPEVTCVVVDVKHEDPEVKFNWYVDGVEVHNAKTKPREEEYNSTYRVVSVLTVLHQDWLNGKEYKCKVSNKALPAPIEKTISKAKGQPREPQVYTLPPSREEMTKNQVSLTCDVSGFYPSDIAVEWESDGQPENNYKTTPPVLDSDGSFFLYSKLTVDKSRWEQGDVFSCSVMHEALHNHYTQKSLSLSPGK

SEQ ID NO: 18246 - protein, 121 aa, Artificial Sequence
  Description of Artificial Sequence: Synthetic polypeptide
  VH of XENP020452
EVKLEESGGGLVQPGGSMKLSCAASGFSFSDAWMDWVRQSPEKGLEWVAEIRTKANNHATYYAESVKGRFTISRDDSKSSVYLQMNSLRAEDTGIYYCTRLANWDWYFDVWGAGTTVTVSS

SEQ ID NO: 18247 - protein, 5 aa, Artificial Sequence
  Description of Artificial Sequence: Synthetic peptide
  XENP020452 vhCDR1
DAWMD

SEQ ID NO: 18248 - protein, 19 aa, Artificial Sequence
  Description of Artificial Sequence: Synthetic peptide
  XENP020452 vhCDR2
EIRTKANNHATYYAESVKG

SEQ ID NO: 18249 - protein, 10 aa, Artificial Sequence
  Description of Artificial Sequence: Synthetic peptide
  XENP020452 vhCDR3
LANWDWYFDV

SEQ ID NO: 18250 - protein, 218 aa, Artificial Sequence; identical to SEQ ID NO: 17590
  Description of Artificial Sequence: Synthetic polypeptide
  XENP020452 7G8_H0.4_L0_IgG1_PVA_/S267K Light Chain

SEQ ID NO: 18251 - protein, 111 aa, Artificial Sequence; identical to SEQ ID NO: 17591
  Description of Artificial Sequence: Synthetic polypeptide
  VL of XENP020452

SEQ ID NO: 18252 - protein, 15 aa, Artificial Sequence
  Description of Artificial Sequence: Synthetic peptide
  XENP020452 vlCDR1
KASQSVDYDGDSYMN

SEQ ID NO: 18253 - protein, 7 aa, Artificial Sequence
  Description of Artificial Sequence: Synthetic peptide
  XENP020452 vlCDR2
AASNLES

SEQ ID NO: 18254 - protein, 9 aa, Artificial Sequence
  Description of Artificial Sequence: Synthetic peptide
  XENP020452 vlCDR3
QQSNEDPFT

SEQ ID NO: 18255 - protein, 450 aa, Artificial Sequence
  Description of Artificial Sequence: Synthetic polypeptide
  XENP020453 7G8_H0.5_L0_IgG1_PVA_/S267K Heavy Chain
EVKLEESGGGLVQPGGSMKLSCAASGFTFTDAWMDWVRQSPEKGLEWVAEIRTKANNHATYYAESVKGRFTISRDDSKSSVYLQMNSLRAEDTGIYYCTRLANWDWYFDVWGAGTTVTVSSASTKGPSVFPLAPSSKSTSGGTAALGCLVKDYFPEPVTVSWNSGALTSGVHTFPAVLQSSGLYSLSSVVTVPSSSLGTQTYICNVNHKPSDTKVDKKVEPKSCDKTHTCPPCPAPPVAGPSVFLFPPKPKDTLMISRTPEVTCVVVDVKHEDPEVKFNWYVDGVEVHNAKTKPREEEYNSTYRVVSVLTVLHQDWLNGKEYKCKVSNKALPAPIEKTISKAKGQPREPQVYTLPPSREEMTKNQVSLTCDVSGFYPSDIAVEWESDGQPENNYKTTPPVLDSDGSFFLYSKLTVDKSRWEQGDVFSCSVMHEALHNHYTQKSLSLSPGK

SEQ ID NO: 18256 - protein, 121 aa, Artificial Sequence
  Description of Artificial Sequence: Synthetic polypeptide
  VH of XENP020453
EVKLEESGGGLVQPGGSMKLSCAASGFTFTDAWMDWVRQSPEKGLEWVAEIRTKANNHATYYAESVKGRFTISRDDSKSSVYLQMNSLRAEDTGIYYCTRLANWDWYFDVWGAGTTVTVSS

SEQ ID NO: 18257 - protein, 5 aa, Artificial Sequence
  Description of Artificial Sequence: Synthetic peptide
  XENP020453 vhCDR1
DAWMD

SEQ ID NO: 18258 - protein, 19 aa, Artificial Sequence
  Description of Artificial Sequence: Synthetic peptide
  XENP020453 vhCDR2
EIRTKANNHATYYAESVKG

SEQ ID NO: 18259 - protein, 10 aa, Artificial Sequence
  Description of Artificial Sequence: Synthetic peptide
  XENP020453 vhCDR3
LANWDWYFDV

SEQ ID NO: 18260 - protein, 218 aa, Artificial Sequence; identical to SEQ ID NO: 17590
  Description of Artificial Sequence: Synthetic polypeptide
  XENP020453 7G8_H0.5_L0_IgG1_PVA_/S267K Light Chain

SEQ ID NO: 18261 - protein, 111 aa, Artificial Sequence; identical to SEQ ID NO: 17591
  Description of Artificial Sequence: Synthetic polypeptide
  VL of XENP020453

SEQ ID NO: 18262 - protein, 15 aa, Artificial Sequence
  Description of Artificial Sequence: Synthetic peptide
  XENP020453 vlCDR1
KASQSVDYDGDSYMN

SEQ ID NO: 18263 - protein, 7 aa, Artificial Sequence
  Description of Artificial Sequence: Synthetic peptide
  XENP020453 vlCDR2
AASNLES

SEQ ID NO: 18264 - protein, 9 aa, Artificial Sequence
  Description of Artificial Sequence: Synthetic peptide
  XENP020453 vlCDR3
QQSNEDPFT

SEQ ID NO: 18265 - protein, 450 aa, Artificial Sequence
  Description of Artificial Sequence: Synthetic polypeptide
  XENP020454 7G8_H0.6_L0_IgG1_PVA_/S267K Heavy Chain
EVKLEESGGGLVQPGGSMKLSCAASGFTFDDAWMDWVRQSPEKGLEWVAEIRTKANNHATYYAESVKGRFTISRDDSKSSVYLQMNSLRAEDTGIYYCTRLANWDWYFDVWGAGTTVTVSSASTKGPSVFPLAPSSKSTSGGTAALGCLVKDYFPEPVTVSWNSGALTSGVHTFPAVLQSSGLYSLSSVVTVPSSSLGTQTYICNVNHKPSDTKVDKKVEPKSCDKTHTCPPCPAPPVAGPSVFLFPPKPKDTLMISRTPEVTCVVVDVKHEDPEVKFNWYVDGVEVHNAKTKPREEEYNSTYRVVSVLTVLHQDWLNGKEYKCKVSNKALPAPIEKTISKAKGQPREPQVYTLPPSREEMTKNQVSLTCDVSGFYPSDIAVEWESDGQPENNYKTTPPVLDSDGSFFLYSKLTVDKSRWEQGDVFSCSVMHEALHNHYTQKSLSLSPGK

SEQ ID NO: 18266 - protein, 121 aa, Artificial Sequence
  Description of Artificial Sequence: Synthetic polypeptide
  VH of XENP020454
EVKLEESGGGLVQPGGSMKLSCAASGFTFDDAWMDWVRQSPEKGLEWVAEIRTKANNHATYYAESVKGRFTISRDDSKSSVYLQMNSLRAEDTGIYYCTRLANWDWYFDVWGAGTTVTVSS

SEQ ID NO: 18267 - protein, 5 aa, Artificial Sequence
  Description of Artificial Sequence: Synthetic peptide
  XENP020454 vhCDR1
DAWMD

SEQ ID NO: 18268 - protein, 19 aa, Artificial Sequence
  Description of Artificial Sequence: Synthetic peptide
  XENP020454 vhCDR2
EIRTKANNHATYYAESVKG

SEQ ID NO: 18269 - protein, 10 aa, Artificial Sequence
  Description of Artificial Sequence: Synthetic peptide
  XENP020454 vhCDR3
LANWDWYFDV

SEQ ID NO: 18270 - protein, 218 aa, Artificial Sequence; identical to SEQ ID NO: 17590
  Description of Artificial Sequence: Synthetic polypeptide
  XENP020454 7G8_H0.6_L0_IgG1_PVA_/S267K Light Chain

SEQ ID NO: 18271 - protein, 111 aa, Artificial Sequence; identical to SEQ ID NO: 17591
  Description of Artificial Sequence: Synthetic polypeptide
  VL of XENP020454

SEQ ID NO: 18272 - protein, 15 aa, Artificial Sequence
  Description of Artificial Sequence: Synthetic peptide
  XENP020454 vlCDR1
KASQSVDYDGDSYMN

SEQ ID NO: 18273 - protein, 7 aa, Artificial Sequence
  Description of Artificial Sequence: Synthetic peptide
  XENP020454 vlCDR2
AASNLES

SEQ ID NO: 18274 - protein, 9 aa, Artificial Sequence
  Description of Artificial Sequence: Synthetic peptide
  XENP020454 vlCDR3
QQSNEDPFT

SEQ ID NO: 18275 - protein, 450 aa, Artificial Sequence
  Description of Artificial Sequence: Synthetic polypeptide
  XENP020455 7G8_H0.7_L0_IgG1_PVA_/S267K Heavy Chain
EVKLEESGGGLVQPGGSMKLSCAASGFTFGDAWMDWVRQSPEKGLEWVAEIRTKANNHATYYAESVKGRFTISRDDSKSSVYLQMNSLRAEDTGIYYCTRLANWDWYFDVWGAGTTVTVSSASTKGPSVFPLAPSSKSTSGGTAALGCLVKDYFPEPVTVSWNSGALTSGVHTFPAVLQSSGLYSLSSVVTVPSSSLGTQTYICNVNHKPSDTKVDKKVEPKSCDKTHTCPPCPAPPVAGPSVFLFPPKPKDTLMISRTPEVTCVVVDVKHEDPEVKFNWYVDGVEVHNAKTKPREEEYNSTYRVVSVLTVLHQDWLNGKEYKCKVSNKALPAPIEKTISKAKGQPREPQVYTLPPSREEMTKNQVSLTCDVSGFYPSDIAVEWESDGQPENNYKTTPPVLDSDGSFFLYSKLTVDKSRWEQGDVFSCSVMHEALHNHYTQKSLSLSPGK

SEQ ID NO: 18276 - protein, 121 aa, Artificial Sequence
  Description of Artificial Sequence: Synthetic polypeptide
  VH of XENP020455
EVKLEESGGGLVQPGGSMKLSCAASGFTFGDAWMDWVRQSPEKGLEWVAEIRTKANNHATYYAESVKGRFTISRDDSKSSVYLQMNSLRAEDTGIYYCTRLANWDWYFDVWGAGTTVTVSS

SEQ ID NO: 18277 - protein, 5 aa, Artificial Sequence
  Description of Artificial Sequence: Synthetic peptide
  XENP020455 vhCDR1
DAWMD

SEQ ID NO: 18278 - protein, 19 aa, Artificial Sequence
  Description of Artificial Sequence: Synthetic peptide
  XENP020455 vhCDR2
EIRTKANNHATYYAESVKG

SEQ ID NO: 18279 - protein, 10 aa, Artificial Sequence
  Description of Artificial Sequence: Synthetic peptide
  XENP020455 vhCDR3
LANWDWYFDV

SEQ ID NO: 18280 - protein, 218 aa, Artificial Sequence; identical to SEQ ID NO: 17590
  Description of Artificial Sequence: Synthetic polypeptide
  XENP020455 7G8_H0.7_L0_IgG1_PVA_/S267K Light Chain

SEQ ID NO: 18281 - protein, 111 aa, Artificial Sequence; identical to SEQ ID NO: 17591
  Description of Artificial Sequence: Synthetic polypeptide
  VL of XENP020455

SEQ ID NO: 18282 - protein, 15 aa, Artificial Sequence
  Description of Artificial Sequence: Synthetic peptide
  XENP020455 vlCDR1
KASQSVDYDGDSYMN

SEQ ID NO: 18283 - protein, 7 aa, Artificial Sequence
  Description of Artificial Sequence: Synthetic peptide
  XENP020455 vlCDR2
AASNLES

SEQ ID NO: 18284 - protein, 9 aa, Artificial Sequence
  Description of Artificial Sequence: Synthetic peptide
  XENP020455 vlCDR3
QQSNEDPFT

SEQ ID NO: 18285 - protein, 450 aa, Artificial Sequence
  Description of Artificial Sequence: Synthetic polypeptide
  XENP020456 7G8_H0.8_L0_IgG1_PVA_/S267K Heavy Chain
EVKLEESGGGLVQPGGSMKLSCAASGFTFSNAWMDWVRQSPEKGLEWVAEIRTKANNHATYYAESVKGRFTISRDDSKSSVYLQMNSLRAEDTGIYYCTRLANWDWYFDVWGAGTTVTVSSASTKGPSVFPLAPSSKSTSGGTAALGCLVKDYFPEPVTVSWNSGALTSGVHTFPAVLQSSGLYSLSSVVTVPSSSLGTQTYICNVNHKPSDTKVDKKVEPKSCDKTHTCPPCPAPPVAGPSVFLFPPKPKDTLMISRTPEVTCVVVDVKHEDPEVKFNWYVDGVEVHNAKTKPREEEYNSTYRVVSVLTVLHQDWLNGKEYKCKVSNKALPAPIEKTISKAKGQPREPQVYTLPPSREEMTKNQVSLTCDVSGFYPSDIAVEWESDGQPENNYKTTPPVLDSDGSFFLYSKLTVDKSRWEQGDVFSCSVMHEALHNHYTQKSLSLSPGK

SEQ ID NO: 18286 - protein, 121 aa, Artificial Sequence
  Description of Artificial Sequence: Synthetic polypeptide
  VH of XENP020456
EVKLEESGGGLVQPGGSMKLSCAASGFTFSNAWMDWVRQSPEKGLEWVAEIRTKANNHATYYAESVKGRFTISRDDSKSSVYLQMNSLRAEDTGIYYCTRLANWDWYFDVWGAGTTVTVSS

SEQ ID NO: 18287 - protein, 5 aa, Artificial Sequence
  Description of Artificial Sequence: Synthetic peptide
  XENP020456 vhCDR1
NAWMD

SEQ ID NO: 18288 - protein, 19 aa, Artificial Sequence
  Description of Artificial Sequence: Synthetic peptide
  XENP020456 vhCDR2
EIRTKANNHATYYAESVKG

SEQ ID NO: 18289 - protein, 10 aa, Artificial Sequence
  Description of Artificial Sequence: Synthetic peptide
  XENP020456 vhCDR3
LANWDWYFDV

SEQ ID NO: 18290 - protein, 218 aa, Artificial Sequence; identical to SEQ ID NO: 17590
  Description of Artificial Sequence: Synthetic polypeptide
  XENP020456 7G8_H0.8_L0_IgG1_PVA_/S267K Light Chain

SEQ ID NO: 18291 - protein, 111 aa, Artificial Sequence; identical to SEQ ID NO: 17591
  Description of Artificial Sequence: Synthetic polypeptide
  VL of XENP020456

SEQ ID NO: 18292 - protein, 15 aa, Artificial Sequence
  Description of Artificial Sequence: Synthetic peptide
  XENP020456 vlCDR1
KASQSVDYDGDSYMN

SEQ ID NO: 18293 - protein, 7 aa, Artificial Sequence
  Description of Artificial Sequence: Synthetic peptide
  XENP020456 vlCDR2
AASNLES

SEQ ID NO: 18294 - protein, 9 aa, Artificial Sequence
  Description of Artificial Sequence: Synthetic peptide
  XENP020456 vlCDR3
QQSNEDPFT

SEQ ID NO: 18295 - protein, 450 aa, Artificial Sequence
  Description of Artificial Sequence: Synthetic polypeptide
  XENP020457 7G8_H0.9_L0_IgG1_PVA_/S267K Heavy Chain
EVKLEESGGGLVQPGGSMKLSCAASGFTFSEAWMDWVRQSPEKGLEWVAEIRTKANNHATYYAESVKGRFTISRDDSKSSVYLQMNSLRAEDTGIYYCTRLANWDWYFDVWGAGTTVTVSSASTKGPSVFPLAPSSKSTSGGTAALGCLVKDYFPEPVTVSWNSGALTSGVHTFPAVLQSSGLYSLSSVVTVPSSSLGTQTYICNVNHKPSDTKVDKKVEPKSCDKTHTCPPCPAPPVAGPSVFLFPPKPKDTLMISRTPEVTCVVVDVKHEDPEVKFNWYVDGVEVHNAKTKPREEEYNSTYRVVSVLTVLHQDWLNGKEYKCKVSNKALPAPIEKTISKAKGQPREPQVYTLPPSREEMTKNQVSLTCDVSGFYPSDIAVEWESDGQPENNYKTTPPVLDSDGSFFLYSKLTVDKSRWEQGDVFSCSVMHEALHNHYTQKSLSLSPGK

SEQ ID NO: 18296 - protein, 121 aa, Artificial Sequence
  Description of Artificial Sequence: Synthetic polypeptide
  VH of XENP020457
EVKLEESGGGLVQPGGSMKLSCAASGFTFSEAWMDWVRQSPEKGLEWVAEIRTKANNHATYYAESVKGRFTISRDDSKSSVYLQMNSLRAEDTGIYYCTRLANWDWYFDVWGAGTTVTVSS

SEQ ID NO: 18297 - protein, 5 aa, Artificial Sequence
  Description of Artificial Sequence: Synthetic peptide
  XENP020457 vhCDR1
EAWMD

SEQ ID NO: 18298 - protein, 19 aa, Artificial Sequence
  Description of Artificial Sequence: Synthetic peptide
  XENP020457 vhCDR2
EIRTKANNHATYYAESVKG

SEQ ID NO: 18299 - protein, 10 aa, Artificial Sequence
  Description of Artificial Sequence: Synthetic peptide
  XENP020457 vhCDR3
LANWDWYFDV

SEQ ID NO: 18300 - protein, 218 aa, Artificial Sequence; identical to SEQ ID NO: 17590
  Description of Artificial Sequence: Synthetic polypeptide
  XENP020457 7G8_H0.9_L0_IgG1_PVA_/S267K Light Chain

SEQ ID NO: 18301 - protein, 111 aa, Artificial Sequence; identical to SEQ ID NO: 17591
  Description of Artificial Sequence: Synthetic polypeptide
  VL of XENP020457

SEQ ID NO: 18302 - protein, 15 aa, Artificial Sequence
  Description of Artificial Sequence: Synthetic peptide
  XENP020457 vlCDR1
KASQSVDYDGDSYMN

SEQ ID NO: 18303 - protein, 7 aa, Artificial Sequence
  Description of Artificial Sequence: Synthetic peptide
  XENP020457 vlCDR2
AASNLES

SEQ ID NO: 18304 - protein, 9 aa, Artificial Sequence
  Description of Artificial Sequence: Synthetic peptide
  XENP020457 vlCDR3
QQSNEDPFT

SEQ ID NO: 18305 - protein, 450 aa, Artificial Sequence
  Description of Artificial Sequence: Synthetic polypeptide
  XENP020458 7G8_H0.10_L0_IgG1_PVA_/S267K Heavy Chain
EVKLEESGGGLVQPGGSMKLSCAASGFTFSHAWMDWVRQSPEKGLEWVAEIRTKANNHATYYAESVKGRFTISRDDSKSSVYLQMNSLRAEDTGIYYCTRLANWDWYFDVWGAGTTVTVSSASTKGPSVFPLAPSSKSTSGGTAALGCLVKDYFPEPVTVSWNSGALTSGVHTFPAVLQSSGLYSLSSVVTVPSSSLGTQTYICNVNHKPSDTKVDKKVEPKSCDKTHTCPPCPAPPVAGPSVFLFPPKPKDTLMISRTPEVTCVVVDVKHEDPEVKFNWYVDGVEVHNAKTKPREEEYNSTYRVVSVLTVLHQDWLNGKEYKCKVSNKALPAPIEKTISKAKGQPREPQVYTLPPSREEMTKNQVSLTCDVSGFYPSDIAVEWESDGQPENNYKTTPPVLDSDGSFFLYSKLTVDKSRWEQGDVFSCSVMHEALHNHYTQKSLSLSPGK

SEQ ID NO: 18306 - protein, 121 aa, Artificial Sequence
  Description of Artificial Sequence: Synthetic polypeptide
  VH of XENP020458
EVKLEESGGGLVQPGGSMKLSCAASGFTFSHAWMDWVRQSPEKGLEWVAEIRTKANNHATYYAESVKGRFTISRDDSKSSVYLQMNSLRAEDTGIYYCTRLANWDWYFDVWGAGTTVTVSS

SEQ ID NO: 18307 - protein, 5 aa, Artificial Sequence
  Description of Artificial Sequence: Synthetic peptide
  XENP020458 vhCDR1
HAWMD

SEQ ID NO: 18308 - protein, 19 aa, Artificial Sequence
  Description of Artificial Sequence: Synthetic peptide
  XENP020458 vhCDR2
EIRTKANNHATYYAESVKG

SEQ ID NO: 18309 - protein, 10 aa, Artificial Sequence
  Description of Artificial Sequence: Synthetic peptide
  XENP020458 vhCDR3
LANWDWYFDV

SEQ ID NO: 18310 - protein, 218 aa, Artificial Sequence; identical to SEQ ID NO: 17590
  Description of Artificial Sequence: Synthetic polypeptide
  XENP020458 7G8_H0.10_L0_IgG1_PVA_/S267K Light Chain

SEQ ID NO: 18311 - protein, 111 aa, Artificial Sequence; identical to SEQ ID NO: 17591
  Description of Artificial Sequence: Synthetic polypeptide
  VL of XENP020458

SEQ ID NO: 18312 - protein, 15 aa, Artificial Sequence
  Description of Artificial Sequence: Synthetic peptide
  XENP020458 vlCDR1
KASQSVDYDGDSYMN

SEQ ID NO: 18313 - protein, 7 aa, Artificial Sequence
  Description of Artificial Sequence: Synthetic peptide
  XENP020458 vlCDR2
AASNLES

SEQ ID NO: 18314 - protein, 9 aa, Artificial Sequence
  Description of Artificial Sequence: Synthetic peptide
  XENP020458 vlCDR3
QQSNEDPFT

SEQ ID NO: 18315 - protein, 450 aa, Artificial Sequence
  Description of Artificial Sequence: Synthetic polypeptide
  XENP020459 7G8_H0.11_L0_IgG1_PVA_/S267K Heavy Chain
EVKLEESGGGLVQPGGSMKLSCAASGFTFSSAWMDWVRQSPEKGLEWVAEIRTKANNHATYYAESVKGRFTISRDDSKSSVYLQMNSLRAEDTGIYYCTRLANWDWYFDVWGAGTTVTVSSASTKGPSVFPLAPSSKSTSGGTAALGCLVKDYFPEPVTVSWNSGALTSGVHTFPAVLQSSGLYSLSSVVTVPSSSLGTQTYICNVNHKPSDTKVDKKVEPKSCDKTHTCPPCPAPPVAGPSVFLFPPKPKDTLMISRTPEVTCVVVDVKHEDPEVKFNWYVDGVEVHNAKTKPREEEYNSTYRVVSVLTVLHQDWLNGKEYKCKVSNKALPAPIEKTISKAKGQPREPQVYTLPPSREEMTKNQVSLTCDVSGFYPSDIAVEWESDGQPENNYKTTPPVLDSDGSFFLYSKLTVDKSRWEQGDVFSCSVMHEALHNHYTQKSLSLSPGK

SEQ ID NO: 18316 - protein, 121 aa, Artificial Sequence
  Description of Artificial Sequence: Synthetic polypeptide
  VH of XENP020459
EVKLEESGGGLVQPGGSMKLSCAASGFTFSSAWMDWVRQSPEKGLEWVAEIRTKANNHATYYAESVKGRFTISRDDSKSSVYLQMNSLRAEDTGIYYCTRLANWDWYFDVWGAGTTVTVSS

SEQ ID NO: 18317 - protein, 5 aa, Artificial Sequence
  Description of Artificial Sequence: Synthetic peptide
  XENP020459 vhCDR1
SAWMD

SEQ ID NO: 18318 - protein, 19 aa, Artificial Sequence
  Description of Artificial Sequence: Synthetic peptide
  XENP020459 vhCDR2
EIRTKANNHATYYAESVKG

SEQ ID NO: 18319 - protein, 10 aa, Artificial Sequence
  Description of Artificial Sequence: Synthetic peptide
  XENP020459 vhCDR3
LANWDWYFDV

SEQ ID NO: 18320 - protein, 218 aa, Artificial Sequence; identical to SEQ ID NO: 17590
  Description of Artificial Sequence: Synthetic polypeptide
  XENP020459 7G8_H0.11_L0_IgG1_PVA_/S267K Light Chain

SEQ ID NO: 18321 - protein, 111 aa, Artificial Sequence; identical to SEQ ID NO: 17591
  Description of Artificial Sequence: Synthetic polypeptide
  VL of XENP020459

SEQ ID NO: 18322 - protein, 15 aa, Artificial Sequence
  Description of Artificial Sequence: Synthetic peptide
  XENP020459 vlCDR1
KASQSVDYDGDSYMN

SEQ ID NO: 18323 - protein, 7 aa, Artificial Sequence
  Description of Artificial Sequence: Synthetic peptide
  XENP020459 vlCDR2
AASNLES

SEQ ID NO: 18324 - protein, 9 aa, Artificial Sequence
  Description of Artificial Sequence: Synthetic peptide
  XENP020459 vlCDR3
QQSNEDPFT

SEQ ID NO: 18325 - protein, 450 aa, Artificial Sequence
  Description of Artificial Sequence: Synthetic polypeptide
  XENP020460 7G8_H0.12_L0_IgG1_PVA_/S267K Heavy Chain
EVKLEESGGGLVQPGGSMKLSCAASGFTFSRAWMDWVRQSPEKGLEWVAEIRTKANNHATYYAESVKGRFTISRDDSKSSVYLQMNSLRAEDTGIYYCTRLANWDWYFDVWGAGTTVTVSSASTKGPSVFPLAPSSKSTSGGTAALGCLVKDYFPEPVTVSWNSGALTSGVHTFPAVLQSSGLYSLSSVVTVPSSSLGTQTYICNVNHKPSDTKVDKKVEPKSCDKTHTCPPCPAPPVAGPSVFLFPPKPKDTLMISRTPEVTCVVVDVKHEDPEVKFNWYVDGVEVHNAKTKPREEEYNSTYRVVSVLTVLHQDWLNGKEYKCKVSNKALPAPIEKTISKAKGQPREPQVYTLPPSREEMTKNQVSLTCDVSGFYPSDIAVEWESDGQPENNYKTTPPVLDSDGSFFLYSKLTVDKSRWEQGDVFSCSVMHEALHNHYTQKSLSLSPGK

SEQ ID NO: 18326 - protein, 121 aa, Artificial Sequence
  Description of Artificial Sequence: Synthetic polypeptide
  VH of XENP020460
EVKLEESGGGLVQPGGSMKLSCAASGFTFSRAWMDWVRQSPEKGLEWVAEIRTKANNHATYYAESVKGRFTISRDDSKSSVYLQMNSLRAEDTGIYYCTRLANWDWYFDVWGAGTTVTVSS

SEQ ID NO: 18327 - protein, 5 aa, Artificial Sequence
  Description of Artificial Sequence: Synthetic peptide
  XENP020460 vhCDR1
RAWMD

SEQ ID NO: 18328 - protein, 19 aa, Artificial Sequence
  Description of Artificial Sequence: Synthetic peptide
  XENP020460 vhCDR2
EIRTKANNHATYYAESVKG

SEQ ID NO: 18329 - protein, 10 aa, Artificial Sequence
  Description of Artificial Sequence: Synthetic peptide
  XENP020460 vhCDR3
LANWDWYFDV

SEQ ID NO: 18330 - protein, 218 aa, Artificial Sequence; identical to SEQ ID NO: 17590
  Description of Artificial Sequence: Synthetic polypeptide
  XENP020460 7G8_H0.12_L0_IgG1_PVA_/S267K Light Chain

SEQ ID NO: 18331 - protein, 111 aa, Artificial Sequence; identical to SEQ ID NO: 17591
  Description of Artificial Sequence: Synthetic polypeptide
  VL of XENP020460

SEQ ID NO: 18332 - protein, 15 aa, Artificial Sequence
  Description of Artificial Sequence: Synthetic peptide
  XENP020460 vlCDR1
KASQSVDYDGDSYMN

SEQ ID NO: 18333 - protein, 7 aa, Artificial Sequence
  Description of Artificial Sequence: Synthetic peptide
  XENP020460 vlCDR2
AASNLES

SEQ ID NO: 18334 - protein, 9 aa, Artificial Sequence
  Description of Artificial Sequence: Synthetic peptide
  XENP020460 vlCDR3
QQSNEDPFT

SEQ ID NO: 18335 - protein, 450 aa, Artificial Sequence
  Description of Artificial Sequence: Synthetic polypeptide
  XENP020461 7G8_H0.13_L0_IgG1_PVA_/S267K Heavy Chain
EVKLEESGGGLVQPGGSMKLSCAASGFTFSLAWMDWVRQSPEKGLEWVAEIRTKANNHATYYAESVKGRFTISRDDSKSSVYLQMNSLRAEDTGIYYCTRLANWDWYFDVWGAGTTVTVSSASTKGPSVFPLAPSSKSTSGGTAALGCLVKDYFPEPVTVSWNSGALTSGVHTFPAVLQSSGLYSLSSVVTVPSSSLGTQTYICNVNHKPSDTKVDKKVEPKSCDKTHTCPPCPAPPVAGPSVFLFPPKPKDTLMISRTPEVTCVVVDVKHEDPEVKFNWYVDGVEVHNAKTKPREEEYNSTYRVVSVLTVLHQDWLNGKEYKCKVSNKALPAPIEKTISKAKGQPREPQVYTLPPSREEMTKNQVSLTCDVSGFYPSDIAVEWESDGQPENNYKTTPPVLDSDGSFFLYSKLTVDKSRWEQGDVFSCSVMHEALHNHYTQKSLSLSPGK

SEQ ID NO: 18336 - protein, 121 aa, Artificial Sequence
  Description of Artificial Sequence: Synthetic polypeptide
  VH of XENP020461
EVKLEESGGGLVQPGGSMKLSCAASGFTFSLAWMDWVRQSPEKGLEWVAEIRTKANNHATYYAESVKGRFTISRDDSKSSVYLQMNSLRAEDTGIYYCTRLANWDWYFDVWGAGTTVTVSS

SEQ ID NO: 18337 - protein, 5 aa, Artificial Sequence
  Description of Artificial Sequence: Synthetic peptide
  XENP020461 vhCDR1
LAWMD

SEQ ID NO: 18338 - protein, 19 aa, Artificial Sequence
  Description of Artificial Sequence: Synthetic peptide
  XENP020461 vhCDR2
EIRTKANNHATYYAESVKG

SEQ ID NO: 18339 - protein, 10 aa, Artificial Sequence
  Description of Artificial Sequence: Synthetic peptide
  XENP020461 vhCDR3
LANWDWYFDV

SEQ ID NO: 18340 - protein, 218 aa, Artificial Sequence; identical to SEQ ID NO: 17590
  Description of Artificial Sequence: Synthetic polypeptide
  XENP020461 7G8_H0.13_L0_IgG1_PVA_/S267K Light Chain

SEQ ID NO: 18341 - protein, 111 aa, Artificial Sequence; identical to SEQ ID NO: 17591
  Description of Artificial Sequence: Synthetic polypeptide
  VL of XENP020461

SEQ ID NO: 18342 - protein, 15 aa, Artificial Sequence
  Description of Artificial Sequence: Synthetic peptide
  XENP020461 vlCDR1
KASQSVDYDGDSYMN

SEQ ID NO: 18343 - protein, 7 aa, Artificial Sequence
  Description of Artificial Sequence: Synthetic peptide
  XENP020461 vlCDR2
AASNLES

SEQ ID NO: 18344 - protein, 9 aa, Artificial Sequence
  Description of Artificial Sequence: Synthetic peptide
  XENP020461 vlCDR3
QQSNEDPFT

SEQ ID NO: 18345 - protein, 450 aa, Artificial Sequence
  Description of Artificial Sequence: Synthetic polypeptide
  XENP020462 7G8_H0.14_L0_IgG1_PVA_/S267K Heavy Chain
EVKLEESGGGLVQPGGSMKLSCAASGFTFSTAWMDWVRQSPEKGLEWVAEIRTKANNHATYYAESVKGRFTISRDDSKSSVYLQMNSLRAEDTGIYYCTRLANWDWYFDVWGAGTTVTVSSASTKGPSVFPLAPSSKSTSGGTAALGCLVKDYFPEPVTVSWNSGALTSGVHTFPAVLQSSGLYSLSSVVTVPSSSLGTQTYICNVNHKPSDTKVDKKVEPKSCDKTHTCPPCPAPPVAGPSVFLFPPKPKDTLMISRTPEVTCVVVDVKHEDPEVKFNWYVDGVEVHNAKTKPREEEYNSTYRVVSVLTVLHQDWLNGKEYKCKVSNKALPAPIEKTISKAKGQPREPQVYTLPPSREEMTKNQVSLTCDVSGFYPSDIAVEWESDGQPENNYKTTPPVLDSDGSFFLYSKLTVDKSRWEQGDVFSCSVMHEALHNHYTQKSLSLSPGK

SEQ ID NO: 18346 - protein, 121 aa, Artificial Sequence
  Description of Artificial Sequence: Synthetic polypeptide
  VH of XENP020462
EVKLEESGGGLVQPGGSMKLSCAASGFTFSTAWMDWVRQSPEKGLEWVAEIRTKANNHATYYAESVKGRFTISRDDSKSSVYLQMNSLRAEDTGIYYCTRLANWDWYFDVWGAGTTVTVSS

SEQ ID NO: 18347 - protein, 5 aa, Artificial Sequence
  Description of Artificial Sequence: Synthetic peptide
  XENP020462 vhCDR1
TAWMD

SEQ ID NO: 18348 - protein, 19 aa, Artificial Sequence
  Description of Artificial Sequence: Synthetic peptide
  XENP020462 vhCDR2
EIRTKANNHATYYAESVKG

SEQ ID NO: 18349 - protein, 10 aa, Artificial Sequence
  Description of Artificial Sequence: Synthetic peptide
  XENP020462 vhCDR3
LANWDWYFDV

SEQ ID NO: 18350 - protein, 218 aa, Artificial Sequence; identical to SEQ ID NO: 17590
  Description of Artificial Sequence: Synthetic polypeptide
  XENP020462 7G8_H0.14_L0_IgG1_PVA_/S267K Light Chain

SEQ ID NO: 18351 - protein, 111 aa, Artificial Sequence; identical to SEQ ID NO: 17591
  Description of Artificial Sequence: Synthetic polypeptide
  VL of XENP020462

SEQ ID NO: 18352 - protein, 15 aa, Artificial Sequence
  Description of Artificial Sequence: Synthetic peptide
  XENP020462 vlCDR1
KASQSVDYDGDSYMN

SEQ ID NO: 18353 - protein, 7 aa, Artificial Sequence
  Description of Artificial Sequence: Synthetic peptide
  XENP020462 vlCDR2
AASNLES

SEQ ID NO: 18354 - protein, 9 aa, Artificial Sequence
  Description of Artificial Sequence: Synthetic peptide
  XENP020462 vlCDR3
QQSNEDPFT

SEQ ID NO: 18355 - protein, 450 aa, Artificial Sequence
  Description of Artificial Sequence: Synthetic polypeptide
  XENP020463 7G8_H0.15_L0_IgG1_PVA_/S267K Heavy Chain
EVKLEESGGGLVQPGGSMKLSCAASGFTFSGAWMDWVRQSPEKGLEWVAEIRTKANNHATYYAESVKGRFTISRDDSKSSVYLQMNSLRAEDTGIYYCTRLANWDWYFDVWGAGTTVTVSSASTKGPSVFPLAPSSKSTSGGTAALGCLVKDYFPEPVTVSWNSGALTSGVHTFPAVLQSSGLYSLSSVVTVPSSSLGTQTYICNVNHKPSDTKVDKKVEPKSCDKTHTCPPCPAPPVAGPSVFLFPPKPKDTLMISRTPEVTCVVVDVKHEDPEVKFNWYVDGVEVHNAKTKPREEEYNSTYRVVSVLTVLHQDWLNGKEYKCKVSNKALPAPIEKTISKAKGQPREPQVYTLPPSREEMTKNQVSLTCDVSGFYPSDIAVEWESDGQPENNYKTTPPVLDSDGSFFLYSKLTVDKSRWEQGDVFSCSVMHEALHNHYTQKSLSLSPGK

SEQ ID NO: 18356 - protein, 121 aa, Artificial Sequence
  Description of Artificial Sequence: Synthetic polypeptide
  VH of XENP020463
EVKLEESGGGLVQPGGSMKLSCAASGFTFSGAWMDWVRQSPEKGLEWVAEIRTKANNHATYYAESVKGRFTISRDDSKSSVYLQMNSLRAEDTGIYYCTRLANWDWYFDVWGAGTTVTVSS

SEQ ID NO: 18357 - protein, 5 aa, Artificial Sequence
  Description of Artificial Sequence: Synthetic peptide
  XENP020463 vhCDR1
GAWMD

SEQ ID NO: 18358 - protein, 19 aa, Artificial Sequence
  Description of Artificial Sequence: Synthetic peptide
  XENP020463 vhCDR2
EIRTKANNHATYYAESVKG

SEQ ID NO: 18359 - protein, 10 aa, Artificial Sequence
  Description of Artificial Sequence: Synthetic peptide
  XENP020463 vhCDR3
LANWDWYFDV

SEQ ID NO: 18360 - protein, 218 aa, Artificial Sequence; identical to SEQ ID NO: 17590
  Description of Artificial Sequence: Synthetic polypeptide
  XENP020463 7G8_H0.15_L0_IgG1_PVA_/S267K Light Chain

SEQ ID NO: 18361 - protein, 111 aa, Artificial Sequence; identical to SEQ ID NO: 17591
  Description of Artificial Sequence: Synthetic polypeptide
  VL of XENP020463

SEQ ID NO: 18362 - protein, 15 aa, Artificial Sequence
  Description of Artificial Sequence: Synthetic peptide
  XENP020463 vlCDR1
KASQSVDYDGDSYMN

SEQ ID NO: 18363 - protein, 7 aa, Artificial Sequence
  Description of Artificial Sequence: Synthetic peptide
  XENP020463 vlCDR2
AASNLES

SEQ ID NO: 18364 - protein, 9 aa, Artificial Sequence
  Description of Artificial Sequence: Synthetic peptide
  XENP020463 vlCDR3
QQSNEDPFT

SEQ ID NO: 18365 - protein, 450 aa, Artificial Sequence
  Description of Artificial Sequence: Synthetic polypeptide
  XENP020464 7G8_H0.16_L0_IgG1_PVA_/S267K Heavy Chain
EVKLEESGGGLVQPGGSMKLSCAASGFTFSYAWMDWVRQSPEKGLEWVAEIRTKANNHATYYAESVKGRFTISRDDSKSSVYLQMNSLRAEDTGIYYCTRLANWDWYFDVWGAGTTVTVSSASTKGPSVFPLAPSSKSTSGGTAALGCLVKDYFPEPVTVSWNSGALTSGVHTFPAVLQSSGLYSLSSVVTVPSSSLGTQTYICNVNHKPSDTKVDKKVEPKSCDKTHTCPPCPAPPVAGPSVFLFPPKPKDTLMISRTPEVTCVVVDVKHEDPEVKFNWYVDGVEVHNAKTKPREEEYNSTYRVVSVLTVLHQDWLNGKEYKCKVSNKALPAPIEKTISKAKGQPREPQVYTLPPSREEMTKNQVSLTCDVSGFYPSDIAVEWESDGQPENNYKTTPPVLDSDGSFFLYSKLTVDKSRWEQGDVFSCSVMHEALHNHYTQKSLSLSPGK

SEQ ID NO: 18366 - protein, 121 aa, Artificial Sequence
  Description of Artificial Sequence: Synthetic polypeptide
  VH of XENP020464
EVKLEESGGGLVQPGGSMKLSCAASGFTFSYAWMDWVRQSPEKGLEWVAEIRTKANNHATYYAESVKGRFTISRDDSKSSVYLQMNSLRAEDTGIYYCTRLANWDWYFDVWGAGTTVTVSS

SEQ ID NO: 18367 - protein, 5 aa, Artificial Sequence
  Description of Artificial Sequence: Synthetic peptide
  XENP020464 vhCDR1
YAWMD

SEQ ID NO: 18368 - protein, 19 aa, Artificial Sequence
  Description of Artificial Sequence: Synthetic peptide
  XENP020464 vhCDR2
EIRTKANNHATYYAESVKG

SEQ ID NO: 18369 - protein, 10 aa, Artificial Sequence
  Description of Artificial Sequence: Synthetic peptide
  XENP020464 vhCDR3
LANWDWYFDV

SEQ ID NO: 18370 - protein, 218 aa, Artificial Sequence; identical to SEQ ID NO: 17590
  Description of Artificial Sequence: Synthetic polypeptide
  XENP020464 7G8_H0.16_L0_IgG1_PVA_/S267K Light Chain

SEQ ID NO: 18371 - protein, 111 aa, Artificial Sequence; identical to SEQ ID NO: 17591
  Description of Artificial Sequence: Synthetic polypeptide
  VL of XENP020464

SEQ ID NO: 18372 - protein, 15 aa, Artificial Sequence
  Description of Artificial Sequence: Synthetic peptide
  XENP020464 vlCDR1
KASQSVDYDGDSYMN

SEQ ID NO: 18373 - protein, 7 aa, Artificial Sequence
  Description of Artificial Sequence: Synthetic peptide
  XENP020464 vlCDR2
AASNLES

SEQ ID NO: 18374 - protein, 9 aa, Artificial Sequence
  Description of Artificial Sequence: Synthetic peptide
  XENP020464 vlCDR3
QQSNEDPFT

SEQ ID NO: 18375 - protein, 450 aa, Artificial Sequence
  Description of Artificial Sequence: Synthetic polypeptide
  XENP020465 7G8_H0.17_L0_IgG1_PVA_/S267K Heavy Chain
EVKLEESGGGLVQPGGSMKLSCAASGFTFSDSWMDWVRQSPEKGLEWVAEIRTKANNHATYYAESVKGRFTISRDDSKSSVYLQMNSLRAEDTGIYYCTRLANWDWYFDVWGAGTTVTVSSASTKGPSVFPLAPSSKSTSGGTAALGCLVKDYFPEPVTVSWNSGALTSGVHTFPAVLQSSGLYSLSSVVTVPSSSLGTQTYICNVNHKPSDTKVDKKVEPKSCDKTHTCPPCPAPPVAGPSVFLFPPKPKDTLMISRTPEVTCVVVDVKHEDPEVKFNWYVDGVEVHNAKTKPREEEYNSTYRVVSVLTVLHQDWLNGKEYKCKVSNKALPAPIEKTISKAKGQPREPQVYTLPPSREEMTKNQVSLTCDVSGFYPSDIAVEWESDGQPENNYKTTPPVLDSDGSFFLYSKLTVDKSRWEQGDVFSCSVMHEALHNHYTQKSLSLSPGK

SEQ ID NO: 18376 - protein, 121 aa, Artificial Sequence
  Description of Artificial Sequence: Synthetic polypeptide
  VH of XENP020465
EVKLEESGGGLVQPGGSMKLSCAASGFTFSDSWMDWVRQSPEKGLEWVAEIRTKANNHATYYAESVKGRFTISRDDSKSSVYLQMNSLRAEDTGIYYCTRLANWDWYFDVWGAGTTVTVSS

SEQ ID NO: 18377 - protein, 5 aa, Artificial Sequence
  Description of Artificial Sequence: Synthetic peptide
  XENP020465 vhCDR1
DSWMD

SEQ ID NO: 18378 - protein, 19 aa, Artificial Sequence
  Description of Artificial Sequence: Synthetic peptide
  XENP020465 vhCDR2
EIRTKANNHATYYAESVKG

SEQ ID NO: 18379 - protein, 10 aa, Artificial Sequence
  Description of Artificial Sequence: Synthetic peptide
  XENP020465 vhCDR3
LANWDWYFDV

SEQ ID NO: 18380 - protein, 218 aa, Artificial Sequence; identical to SEQ ID NO: 17590
  Description of Artificial Sequence: Synthetic polypeptide
  XENP020465 7G8_H0.17_L0_IgG1_PVA_/S267K Light Chain

SEQ ID NO: 18381 - protein, 111 aa, Artificial Sequence; identical to SEQ ID NO: 17591
  Description of Artificial Sequence: Synthetic polypeptide
  VL of XENP020465

SEQ ID NO: 18382 - protein, 15 aa, Artificial Sequence
  Description of Artificial Sequence: Synthetic peptide
  XENP020465 vlCDR1
KASQSVDYDGDSYMN

SEQ ID NO: 18383 - protein, 7 aa, Artificial Sequence
  Description of Artificial Sequence: Synthetic peptide
  XENP020465 vlCDR2
AASNLES

SEQ ID NO: 18384 - protein, 9 aa, Artificial Sequence
  Description of Artificial Sequence: Synthetic peptide
  XENP020465 vlCDR3
QQSNEDPFT

SEQ ID NO: 18385 - protein, 450 aa, Artificial Sequence
  Description of Artificial Sequence: Synthetic polypeptide
  XENP020466 7G8_H0.18_L0_IgG1_PVA_/S267K Heavy Chain
EVKLEESGGGLVQPGGSMKLSCAASGFTFSDTWMDWVRQSPEKGLEWVAEIRTKANNHATYYAESVKGRFTISRDDSKSSVYLQMNSLRAEDTGIYYCTRLANWDWYFDVWGAGTTVTVSSASTKGPSVFPLAPSSKSTSGGTAALGCLVKDYFPEPVTVSWNSGALTSGVHTFPAVLQSSGLYSLSSVVTVPSSSLGTQTYICNVNHKPSDTKVDKKVEPKSCDKTHTCPPCPAPPVAGPSVFLFPPKPKDTLMISRTPEVTCVVVDVKHEDPEVKFNWYVDGVEVHNAKTKPREEEYNSTYRVVSVLTVLHQDWLNGKEYKCKVSNKALPAPIEKTISKAKGQPREPQVYTLPPSREEMTKNQVSLTCDVSGFYPSDIAVEWESDGQPENNYKTTPPVLDSDGSFFLYSKLTVDKSRWEQGDVFSCSVMHEALHNHYTQKSLSLSPGK

SEQ ID NO: 18386 - protein, 121 aa, Artificial Sequence
  Description of Artificial Sequence: Synthetic polypeptide
  VH of XENP020466
EVKLEESGGGLVQPGGSMKLSCAASGFTFSDTWMDWVRQSPEKGLEWVAEIRTKANNHATYYAESVKGRFTISRDDSKSSVYLQMNSLRAEDTGIYYCTRLANWDWYFDVWGAGTTVTVSS

SEQ ID NO: 18387 - protein, 5 aa, Artificial Sequence
  Description of Artificial Sequence: Synthetic peptide
  XENP020466 vhCDR1
DTWMD

SEQ ID NO: 18388 - protein, 19 aa, Artificial Sequence
  Description of Artificial Sequence: Synthetic peptide
  XENP020466 vhCDR2
EIRTKANNHATYYAESVKG

SEQ ID NO: 18389 - protein, 10 aa, Artificial Sequence
  Description of Artificial Sequence: Synthetic peptide
  XENP020466 vhCDR3
LANWDWYFDV

SEQ ID NO: 18390 - protein, 218 aa, Artificial Sequence; identical to SEQ ID NO: 17590
  Description of Artificial Sequence: Synthetic polypeptide
  XENP020466 7G8_H0.18_L0_IgG1_PVA_/S267K Light Chain

SEQ ID NO: 18391 - protein, 111 aa, Artificial Sequence; identical to SEQ ID NO: 17591
  Description of Artificial Sequence: Synthetic polypeptide
  VL of XENP020466

SEQ ID NO: 18392 - protein, 15 aa, Artificial Sequence
  Description of Artificial Sequence: Synthetic peptide
  XENP020466 vlCDR1
KASQSVDYDGDSYMN

SEQ ID NO: 18393 - protein, 7 aa, Artificial Sequence
  Description of Artificial Sequence: Synthetic peptide
  XENP020466 vlCDR2
AASNLES

SEQ ID NO: 18394 - protein, 9 aa, Artificial Sequence
  Description of Artificial Sequence: Synthetic peptide
  XENP020466 vlCDR3
QQSNEDPFT

SEQ ID NO: 18395 - protein, 450 aa, Artificial Sequence
  Description of Artificial Sequence: Synthetic polypeptide
  XENP020467 7G8_H0.19_L0_IgG1_PVA_/S267K Heavy Chain
EVKLEESGGGLVQPGGSMKLSCAASGFTFSDGWMDWVRQSPEKGLEWVAEIRTKANNHATYYAESVKGRFTISRDDSKSSVYLQMNSLRAEDTGIYYCTRLANWDWYFDVWGAGTTVTVSSASTKGPSVFPLAPSSKSTSGGTAALGCLVKDYFPEPVTVSWNSGALTSGVHTFPAVLQSSGLYSLSSVVTVPSSSLGTQTYICNVNHKPSDTKVDKKVEPKSCDKTHTCPPCPAPPVAGPSVFLFPPKPKDTLMISRTPEVTCVVVDVKHEDPEVKFNWYVDGVEVHNAKTKPREEEYNSTYRVVSVLTVLHQDWLNGKEYKCKVSNKALPAPIEKTISKAKGQPREPQVYTLPPSREEMTKNQVSLTCDVSGFYPSDIAVEWESDGQPENNYKTTPPVLDSDGSFFLYSKLTVDKSRWEQGDVFSCSVMHEALHNHYTQKSLSLSPGK

SEQ ID NO: 18396 - protein, 121 aa, Artificial Sequence
  Description of Artificial Sequence: Synthetic polypeptide
  VH of XENP020467
EVKLEESGGGLVQPGGSMKLSCAASGFTFSDGWMDWVRQSPEKGLEWVAEIRTKANNHATYYAESVKGRFTISRDDSKSSVYLQMNSLRAEDTGIYYCTRLANWDWYFDVWGAGTTVTVSS

SEQ ID NO: 18397 - protein, 5 aa, Artificial Sequence
  Description of Artificial Sequence: Synthetic peptide
  XENP020467 vhCDR1
DGWMD

SEQ ID NO: 18398 - protein, 19 aa, Artificial Sequence
  Description of Artificial Sequence: Synthetic peptide
  XENP020467 vhCDR2
EIRTKANNHATYYAESVKG

SEQ ID NO: 18399 - protein, 10 aa, Artificial Sequence
  Description of Artificial Sequence: Synthetic peptide
  XENP020467 vhCDR3
LANWDWYFDV

SEQ ID NO: 18400 - protein, 218 aa, Artificial Sequence; identical to SEQ ID NO: 17590
  Description of Artificial Sequence: Synthetic polypeptide
  XENP020467 7G8_H0.19_L0_IgG1_PVA_/S267K Light Chain

SEQ ID NO: 18401 - protein, 111 aa, Artificial Sequence; identical to SEQ ID NO: 17591
  Description of Artificial Sequence: Synthetic polypeptide
  VL of XENP020467

SEQ ID NO: 18402 - protein, 15 aa, Artificial Sequence
  Description of Artificial Sequence: Synthetic peptide
  XENP020467 vlCDR1
KASQSVDYDGDSYMN

SEQ ID NO: 18403 - protein, 7 aa, Artificial Sequence
  Description of Artificial Sequence: Synthetic peptide
  XENP020467 vlCDR2
AASNLES

SEQ ID NO: 18404 - protein, 9 aa, Artificial Sequence
  Description of Artificial Sequence: Synthetic peptide
  XENP020467 vlCDR3
QQSNEDPFT

SEQ ID NO: 18405 - protein, 450 aa, Artificial Sequence
  Description of Artificial Sequence: Synthetic polypeptide
  XENP020468 7G8_H0.20_L0_IgG1_PVA_/S267K Heavy Chain
EVKLEESGGGLVQPGGSMKLSCAASGFTFSDHWMDWVRQSPEKGLEWVAEIRTKANNHATYYAESVKGRFTISRDDSKSSVYLQMNSLRAEDTGIYYCTRLANWDWYFDVWGAGTTVTVSSASTKGPSVFPLAPSSKSTSGGTAALGCLVKDYFPEPVTVSWNSGALTSGVHTFPAVLQSSGLYSLSSVVTVPSSSLGTQTYICNVNHKPSDTKVDKKVEPKSCDKTHTCPPCPAPPVAGPSVFLFPPKPKDTLMISRTPEVTCVVVDVKHEDPEVKFNWYVDGVEVHNAKTKPREEEYNSTYRVVSVLTVLHQDWLNGKEYKCKVSNKALPAPIEKTISKAKGQPREPQVYTLPPSREEMTKNQVSLTCDVSGFYPSDIAVEWESDGQPENNYKTTPPVLDSDGSFFLYSKLTVDKSRWEQGDVFSCSVMHEALHNHYTQKSLSLSPGK

SEQ ID NO: 18406 - protein, 121 aa, Artificial Sequence
  Description of Artificial Sequence: Synthetic polypeptide
  VH of XENP020468
EVKLEESGGGLVQPGGSMKLSCAASGFTFSDHWMDWVRQSPEKGLEWVAEIRTKANNHATYYAESVKGRFTISRDDSKSSVYLQMNSLRAEDTGIYYCTRLANWDWYFDVWGAGTTVTVSS

SEQ ID NO: 18407 - protein, 5 aa, Artificial Sequence
  Description of Artificial Sequence: Synthetic peptide
  XENP020468 vhCDR1
DHWMD

SEQ ID NO: 18408 - protein, 19 aa, Artificial Sequence
  Description of Artificial Sequence: Synthetic peptide
  XENP020468 vhCDR2
EIRTKANNHATYYAESVKG

SEQ ID NO: 18409 - protein, 10 aa, Artificial Sequence
  Description of Artificial Sequence: Synthetic peptide
  XENP020468 vhCDR3
LANWDWYFDV

SEQ ID NO: 18410 - protein, 218 aa, Artificial Sequence; identical to SEQ ID NO: 17590
  Description of Artificial Sequence: Synthetic polypeptide
  XENP020468 7G8_H0.20_L0_IgG1_PVA_/S267K Light Chain

SEQ ID NO: 18411 - protein, 111 aa, Artificial Sequence; identical to SEQ ID NO: 17591
  Description of Artificial Sequence: Synthetic polypeptide
  VL of XENP020468

SEQ ID NO: 18412 - protein, 15 aa, Artificial Sequence
  Description of Artificial Sequence: Synthetic peptide
  XENP020468 vlCDR1
KASQSVDYDGDSYMN

SEQ ID NO: 18413 - protein, 7 aa, Artificial Sequence
  Description of Artificial Sequence: Synthetic peptide
  XENP020468 vlCDR2
AASNLES

SEQ ID NO: 18414 - protein, 9 aa, Artificial Sequence
  Description of Artificial Sequence: Synthetic peptide
  XENP020468 vlCDR3
QQSNEDPFT

SEQ ID NO: 18415 - protein, 450 aa, Artificial Sequence
  Description of Artificial Sequence: Synthetic polypeptide
  XENP020469 7G8_H0.21_L0_IgG1_PVA_/S267K Heavy Chain
EVKLEESGGGLVQPGGSMKLSCAASGFTFSDDWMDWVRQSPEKGLEWVAEIRTKANNHATYYAESVKGRFTISRDDSKSSVYLQMNSLRAEDTGIYYCTRLANWDWYFDVWGAGTTVTVSSASTKGPSVFPLAPSSKSTSGGTAALGCLVKDYFPEPVTVSWNSGALTSGVHTFPAVLQSSGLYSLSSVVTVPSSSLGTQTYICNVNHKPSDTKVDKKVEPKSCDKTHTCPPCPAPPVAGPSVFLFPPKPKDTLMISRTPEVTCVVVDVKHEDPEVKFNWYVDGVEVHNAKTKPREEEYNSTYRVVSVLTVLHQDWLNGKEYKCKVSNKALPAPIEKTISKAKGQPREPQVYTLPPSREEMTKNQVSLTCDVSGFYPSDIAVEWESDGQPENNYKTTPPVLDSDGSFFLYSKLTVDKSRWEQGDVFSCSVMHEALHNHYTQKSLSLSPGK

SEQ ID NO: 18416 - protein, 121 aa, Artificial Sequence
  Description of Artificial Sequence: Synthetic polypeptide
  VH of XENP020469
EVKLEESGGGLVQPGGSMKLSCAASGFTFSDDWMDWVRQSPEKGLEWVAEIRTKANNHATYYAESVKGRFTISRDDSKSSVYLQMNSLRAEDTGIYYCTRLANWDWYFDVWGAGTTVTVSS

SEQ ID NO: 18417 - protein, 5 aa, Artificial Sequence
  Description of Artificial Sequence: Synthetic peptide
  XENP020469 vhCDR1
DDWMD

SEQ ID NO: 18418 - protein, 19 aa, Artificial Sequence
  Description of Artificial Sequence: Synthetic peptide
  XENP020469 vhCDR2
EIRTKANNHATYYAESVKG

SEQ ID NO: 18419 - protein, 10 aa, Artificial Sequence
  Description of Artificial Sequence: Synthetic peptide
  XENP020469 vhCDR3
LANWDWYFDV

SEQ ID NO: 18420 - protein, 218 aa, Artificial Sequence; identical to SEQ ID NO: 17590
  Description of Artificial Sequence: Synthetic polypeptide
  XENP020469 7G8_H0.21_L0_IgG1_PVA_/S267K Light Chain

SEQ ID NO: 18421 - protein, 111 aa, Artificial Sequence; identical to SEQ ID NO: 17591
  Description of Artificial Sequence: Synthetic polypeptide
  VL of XENP020469

SEQ ID NO: 18422 - protein, 15 aa, Artificial Sequence
  Description of Artificial Sequence: Synthetic peptide
  XENP020469 vlCDR1
KASQSVDYDGDSYMN

SEQ ID NO: 18423 - protein, 7 aa, Artificial Sequence
  Description of Artificial Sequence: Synthetic peptide
  XENP020469 vlCDR2
AASNLES

SEQ ID NO: 18424 - protein, 9 aa, Artificial Sequence
  Description of Artificial Sequence: Synthetic peptide
  XENP020469 vlCDR3
QQSNEDPFT

SEQ ID NO: 18425 - protein, 450 aa, Artificial Sequence
  Description of Artificial Sequence: Synthetic polypeptide
  XENP020470 7G8_H0.22_L0_IgG1_PVA_/S267K Heavy Chain
EVKLEESGGGLVQPGGSMKLSCAASGFTFSDLWMDWVRQSPEKGLEWVAEIRTKANNHATYYAESVKGRFTISRDDSKSSVYLQMNSLRAEDTGIYYCTRLANWDWYFDVWGAGTTVTVSSASTKGPSVFPLAPSSKSTSGGTAALGCLVKDYFPEPVTVSWNSGALTSGVHTFPAVLQSSGLYSLSSVVTVPSSSLGTQTYICNVNHKPSDTKVDKKVEPKSCDKTHTCPPCPAPPVAGPSVFLFPPKPKDTLMISRTPEVTCVVVDVKHEDPEVKFNWYVDGVEVHNAKTKPREEEYNSTYRVVSVLTVLHQDWLNGKEYKCKVSNKALPAPIEKTISKAKGQPREPQVYTLPPSREEMTKNQVSLTCDVSGFYPSDIAVEWESDGQPENNYKTTPPVLDSDGSFFLYSKLTVDKSRWEQGDVFSCSVMHEALHNHYTQKSLSLSPGK

SEQ ID NO: 18426 - protein, 121 aa, Artificial Sequence
  Description of Artificial Sequence: Synthetic polypeptide
  VH of XENP020470
EVKLEESGGGLVQPGGSMKLSCAASGFTFSDLWMDWVRQSPEKGLEWVAEIRTKANNHATYYAESVKGRFTISRDDSKSSVYLQMNSLRAEDTGIYYCTRLANWDWYFDVWGAGTTVTVSS

SEQ ID NO: 18427 - protein, 5 aa, Artificial Sequence
  Description of Artificial Sequence: Synthetic peptide
  XENP020470 vhCDR1
DLWMD

SEQ ID NO: 18428 - protein, 19 aa, Artificial Sequence
  Description of Artificial Sequence: Synthetic peptide
  XENP020470 vhCDR2
EIRTKANNHATYYAESVKG

SEQ ID NO: 18429 - protein, 10 aa, Artificial Sequence
  Description of Artificial Sequence: Synthetic peptide
  XENP020470 vhCDR3
LANWDWYFDV

SEQ ID NO: 18430 - protein, 218 aa, Artificial Sequence; identical to SEQ ID NO: 17590
  Description of Artificial Sequence: Synthetic polypeptide
  XENP020470 7G8_H0.22_L0_IgG1_PVA_/S267K Light Chain

SEQ ID NO: 18431 - protein, 111 aa, Artificial Sequence; identical to SEQ ID NO: 17591
  Description of Artificial Sequence: Synthetic polypeptide
  VL of XENP020470

SEQ ID NO: 18432 - protein, 15 aa, Artificial Sequence
  Description of Artificial Sequence: Synthetic peptide
  XENP020470 vlCDR1
KASQSVDYDGDSYMN

SEQ ID NO: 18433 - protein, 7 aa, Artificial Sequence
  Description of Artificial Sequence: Synthetic peptide
  XENP020470 vlCDR2
AASNLES

SEQ ID NO: 18434 - protein, 9 aa, Artificial Sequence
  Description of Artificial Sequence: Synthetic peptide
  XENP020470 vlCDR3
QQSNEDPFT

SEQ ID NO: 18435 - protein, 450 aa, Artificial Sequence
  Description of Artificial Sequence: Synthetic polypeptide
  XENP020471 7G8_H0.23_L0_IgG1_PVA_/S267K Heavy Chain
EVKLEESGGGLVQPGGSMKLSCAASGFTFSDKWMDWVRQSPEKGLEWVAEIRTKANNHATYYAESVKGRFTISRDDSKSSVYLQMNSLRAEDTGIYYCTRLANWDWYFDVWGAGTTVTVSSASTKGPSVFPLAPSSKSTSGGTAALGCLVKDYFPEPVTVSWNSGALTSGVHTFPAVLQSSGLYSLSSVVTVPSSSLGTQTYICNVNHKPSDTKVDKKVEPKSCDKTHTCPPCPAPPVAGPSVFLFPPKPKDTLMISRTPEVTCVVVDVKHEDPEVKFNWYVDGVEVHNAKTKPREEEYNSTYRVVSVLTVLHQDWLNGKEYKCKVSNKALPAPIEKTISKAKGQPREPQVYTLPPSREEMTKNQVSLTCDVSGFYPSDIAVEWESDGQPENNYKTTPPVLDSDGSFFLYSKLTVDKSRWEQGDVFSCSVMHEALHNHYTQKSLSLSPGK

SEQ ID NO: 18436 - protein, 121 aa, Artificial Sequence
  Description of Artificial Sequence: Synthetic polypeptide
  VH of XENP020471
EVKLEESGGGLVQPGGSMKLSCAASGFTFSDKWMDWVRQSPEKGLEWVAEIRTKANNHATYYAESVKGRFTISRDDSKSSVYLQMNSLRAEDTGIYYCTRLANWDWYFDVWGAGTTVTVSS

SEQ ID NO: 18437 - protein, 5 aa, Artificial Sequence
  Description of Artificial Sequence: Synthetic peptide
  XENP020471 vhCDR1
DKWMD

SEQ ID NO: 18438 - protein, 19 aa, Artificial Sequence
  Description of Artificial Sequence: Synthetic peptide
  XENP020471 vhCDR2
EIRTKANNHATYYAESVKG

SEQ ID NO: 18439 - protein, 10 aa, Artificial Sequence
  Description of Artificial Sequence: Synthetic peptide
  XENP020471 vhCDR3
LANWDWYFDV

SEQ ID NO: 18440 - protein, 218 aa, Artificial Sequence; identical to SEQ ID NO: 17590
  Description of Artificial Sequence: Synthetic polypeptide
  XENP020471 7G8_H0.23_L0_IgG1_PVA_/S267K Light Chain

SEQ ID NO: 18441 - protein, 111 aa, Artificial Sequence; identical to SEQ ID NO: 17591
  Description of Artificial Sequence: Synthetic polypeptide
  VL of XENP020471

SEQ ID NO: 18442 - protein, 15 aa, Artificial Sequence
  Description of Artificial Sequence: Synthetic peptide
  XENP020471 vlCDR1
KASQSVDYDGDSYMN

SEQ ID NO: 18443 - protein, 7 aa, Artificial Sequence
  Description of Artificial Sequence: Synthetic peptide
  XENP020471 vlCDR2
AASNLES

SEQ ID NO: 18444 - protein, 9 aa, Artificial Sequence
  Description of Artificial Sequence: Synthetic peptide
  XENP020471 vlCDR3
QQSNEDPFT

SEQ ID NO: 18445 - protein, 450 aa, Artificial Sequence
  Description of Artificial Sequence: Synthetic polypeptide
  XENP020472 7G8_H0.24_L0_IgG1_PVA_/S267K Heavy Chain
EVKLEESGGGLVQPGGSMKLSCAASGFTFSDYWMDWVRQSPEKGLEWVAEIRTKANNHATYYAESVKGRFTISRDDSKSSVYLQMNSLRAEDTGIYYCTRLANWDWYFDVWGAGTTVTVSSASTKGPSVFPLAPSSKSTSGGTAALGCLVKDYFPEPVTVSWNSGALTSGVHTFPAVLQSSGLYSLSSVVTVPSSSLGTQTYICNVNHKPSDTKVDKKVEPKSCDKTHTCPPCPAPPVAGPSVFLFPPKPKDTLMISRTPEVTCVVVDVKHEDPEVKFNWYVDGVEVHNAKTKPREEEYNSTYRVVSVLTVLHQDWLNGKEYKCKVSNKALPAPIEKTISKAKGQPREPQVYTLPPSREEMTKNQVSLTCDVSGFYPSDIAVEWESDGQPENNYKTTPPVLDSDGSFFLYSKLTVDKSRWEQGDVFSCSVMHEALHNHYTQKSLSLSPGK

SEQ ID NO: 18446 - protein, 121 aa, Artificial Sequence
  Description of Artificial Sequence: Synthetic polypeptide
  VH of XENP020472
EVKLEESGGGLVQPGGSMKLSCAASGFTFSDYWMDWVRQSPEKGLEWVAEIRTKANNHATYYAESVKGRFTISRDDSKSSVYLQMNSLRAEDTGIYYCTRLANWDWYFDVWGAGTTVTVSS

SEQ ID NO: 18447 - protein, 5 aa, Artificial Sequence
  Description of Artificial Sequence: Synthetic peptide
  XENP020472 vhCDR1
DYWMD

SEQ ID NO: 18448 - protein, 19 aa, Artificial Sequence
  Description of Artificial Sequence: Synthetic peptide
  XENP020472 vhCDR2
EIRTKANNHATYYAESVKG

SEQ ID NO: 18449 - protein, 10 aa, Artificial Sequence
  Description of Artificial Sequence: Synthetic peptide
  XENP020472 vhCDR3
LANWDWYFDV

SEQ ID NO: 18450 - protein, 218 aa, Artificial Sequence; identical to SEQ ID NO: 17590
  Description of Artificial Sequence: Synthetic polypeptide
  XENP020472 7G8_H0.24_L0_IgG1_PVA_/S267K Light Chain

SEQ ID NO: 18451 - protein, 111 aa, Artificial Sequence; identical to SEQ ID NO: 17591
  Description of Artificial Sequence: Synthetic polypeptide
  VL of XENP020472

SEQ ID NO: 18452 - protein, 15 aa, Artificial Sequence
  Description of Artificial Sequence: Synthetic peptide
  XENP020472 vlCDR1
KASQSVDYDGDSYMN

SEQ ID NO: 18453 - protein, 7 aa, Artificial Sequence
  Description of Artificial Sequence: Synthetic peptide
  XENP020472 vlCDR2
AASNLES

SEQ ID NO: 18454 - protein, 9 aa, Artificial Sequence
  Description of Artificial Sequence: Synthetic peptide
  XENP020472 vlCDR3
QQSNEDPFT

SEQ ID NO: 18455 - protein, 450 aa, Artificial Sequence
  Description of Artificial Sequence: Synthetic polypeptide
  XENP020473 7G8_H0.25_L0_IgG1_PVA_/S267K Heavy Chain
EVKLEESGGGLVQPGGSMKLSCAASGFTFSDAYMDWVRQSPEKGLEWVAEIRTKANNHATYYAESVKGRFTISRDDSKSSVYLQMNSLRAEDTGIYYCTRLANWDWYFDVWGAGTTVTVSSASTKGPSVFPLAPSSKSTSGGTAALGCLVKDYFPEPVTVSWNSGALTSGVHTFPAVLQSSGLYSLSSVVTVPSSSLGTQTYICNVNHKPSDTKVDKKVEPKSCDKTHTCPPCPAPPVAGPSVFLFPPKPKDTLMISRTPEVTCVVVDVKHEDPEVKFNWYVDGVEVHNAKTKPREEEYNSTYRVVSVLTVLHQDWLNGKEYKCKVSNKALPAPIEKTISKAKGQPREPQVYTLPPSREEMTKNQVSLTCDVSGFYPSDIAVEWESDGQPENNYKTTPPVLDSDGSFFLYSKLTVDKSRWEQGDVFSCSVMHEALHNHYTQKSLSLSPGK

SEQ ID NO: 18456 - protein, 121 aa, Artificial Sequence
  Description of Artificial Sequence: Synthetic polypeptide
  VH of XENP020473
EVKLEESGGGLVQPGGSMKLSCAASGFTFSDAYMDWVRQSPEKGLEWVAEIRTKANNHATYYAESVKGRFTISRDDSKSSVYLQMNSLRAEDTGIYYCTRLANWDWYFDVWGAGTTVTVSS

SEQ ID NO: 18457 - protein, 5 aa, Artificial Sequence
  Description of Artificial Sequence: Synthetic peptide
  XENP020473 vhCDR1
DAYMD

SEQ ID NO: 18458 - protein, 19 aa, Artificial Sequence
  Description of Artificial Sequence: Synthetic peptide
  XENP020473 vhCDR2
EIRTKANNHATYYAESVKG

SEQ ID NO: 18459 - protein, 10 aa, Artificial Sequence
  Description of Artificial Sequence: Synthetic peptide
  XENP020473 vhCDR3
LANWDWYFDV

SEQ ID NO: 18460 - protein, 218 aa, Artificial Sequence; identical to SEQ ID NO: 17590
  Description of Artificial Sequence: Synthetic polypeptide
  XENP020473 7G8_H0.25_L0_IgG1_PVA_/S267K Light Chain

SEQ ID NO: 18461 - protein, 111 aa, Artificial Sequence; identical to SEQ ID NO: 17591
  Description of Artificial Sequence: Synthetic polypeptide
  VL of XENP020473

SEQ ID NO: 18462 - protein, 15 aa, Artificial Sequence
  Description of Artificial Sequence: Synthetic peptide
  XENP020473 vlCDR1
KASQSVDYDGDSYMN

SEQ ID NO: 18463 - protein, 7 aa, Artificial Sequence
  Description of Artificial Sequence: Synthetic peptide
  XENP020473 vlCDR2
AASNLES

SEQ ID NO: 18464 - protein, 9 aa, Artificial Sequence
  Description of Artificial Sequence: Synthetic peptide
  XENP020473 vlCDR3
QQSNEDPFT

SEQ ID NO: 18465 - protein, 450 aa, Artificial Sequence
  Description of Artificial Sequence: Synthetic polypeptide
  XENP020474 7G8_H0.26_L0_IgG1_PVA_/S267K Heavy Chain
EVKLEESGGGLVQPGGSMKLSCAASGFTFSDAFMDWVRQSPEKGLEWVAEIRTKANNHATYYAESVKGRFTISRDDSKSSVYLQMNSLRAEDTGIYYCTRLANWDWYFDVWGAGTTVTVSSASTKGPSVFPLAPSSKSTSGGTAALGCLVKDYFPEPVTVSWNSGALTSGVHTFPAVLQSSGLYSLSSVVTVPSSSLGTQTYICNVNHKPSDTKVDKKVEPKSCDKTHTCPPCPAPPVAGPSVFLFPPKPKDTLMISRTPEVTCVVVDVKHEDPEVKFNWYVDGVEVHNAKTKPREEEYNSTYRVVSVLTVLHQDWLNGKEYKCKVSNKALPAPIEKTISKAKGQPREPQVYTLPPSREEMTKNQVSLTCDVSGFYPSDIAVEWESDGQPENNYKTTPPVLDSDGSFFLYSKLTVDKSRWEQGDVFSCSVMHEALHNHYTQKSLSLSPGK

SEQ ID NO: 18466 - protein, 121 aa, Artificial Sequence
  Description of Artificial Sequence: Synthetic polypeptide
  VH of XENP020474
EVKLEESGGGLVQPGGSMKLSCAASGFTFSDAFMDWVRQSPEKGLEWVAEIRTKANNHATYYAESVKGRFTISRDDSKSSVYLQMNSLRAEDTGIYYCTRLANWDWYFDVWGAGTTVTVSS

SEQ ID NO: 18467 - protein, 5 aa, Artificial Sequence
  Description of Artificial Sequence: Synthetic peptide
  XENP020474 vhCDR1
DAFMD

SEQ ID NO: 18468 - protein, 19 aa, Artificial Sequence
  Description of Artificial Sequence: Synthetic peptide
  XENP020474 vhCDR2
EIRTKANNHATYYAESVKG

SEQ ID NO: 18469 - protein, 10 aa, Artificial Sequence
  Description of Artificial Sequence: Synthetic peptide
  XENP020474 vhCDR3
LANWDWYFDV

SEQ ID NO: 18470 - protein, 218 aa, Artificial Sequence; identical to SEQ ID NO: 17590
  Description of Artificial Sequence: Synthetic polypeptide
  XENP020474 7G8_H0.26_L0_IgG1_PVA_/S267K Light Chain

SEQ ID NO: 18471 - protein, 111 aa, Artificial Sequence; identical to SEQ ID NO: 17591
  Description of Artificial Sequence: Synthetic polypeptide
  VL of XENP020474

SEQ ID NO: 18472 - protein, 15 aa, Artificial Sequence
  Description of Artificial Sequence: Synthetic peptide
  XENP020474 vlCDR1
KASQSVDYDGDSYMN

SEQ ID NO: 18473 - protein, 7 aa, Artificial Sequence
  Description of Artificial Sequence: Synthetic peptide
  XENP020474 vlCDR2
AASNLES

SEQ ID NO: 18474 - protein, 9 aa, Artificial Sequence
  Description of Artificial Sequence: Synthetic peptide
  XENP020474 vlCDR3
QQSNEDPFT

SEQ ID NO: 18475 - protein, 450 aa, Artificial Sequence
  Description of Artificial Sequence: Synthetic polypeptide
  XENP020475 7G8_H0.27_L0_IgG1_PVA_/S267K Heavy Chain
EVKLEESGGGLVQPGGSMKLSCAASGFTFSDAWMDWVRQSPEKGLEWVAEIKTKANNHATYYAESVKGRFTISRDDSKSSVYLQMNSLRAEDTGIYYCTRLANWDWYFDVWGAGTTVTVSSASTKGPSVFPLAPSSKSTSGGTAALGCLVKDYFPEPVTVSWNSGALTSGVHTFPAVLQSSGLYSLSSVVTVPSSSLGTQTYICNVNHKPSDTKVDKKVEPKSCDKTHTCPPCPAPPVAGPSVFLFPPKPKDTLMISRTPEVTCVVVDVKHEDPEVKFNWYVDGVEVHNAKTKPREEEYNSTYRVVSVLTVLHQDWLNGKEYKCKVSNKALPAPIEKTISKAKGQPREPQVYTLPPSREEMTKNQVSLTCDVSGFYPSDIAVEWESDGQPENNYKTTPPVLDSDGSFFLYSKLTVDKSRWEQGDVFSCSVMHEALHNHYTQKSLSLSPGK

SEQ ID NO: 18476 - protein, 121 aa, Artificial Sequence
  Description of Artificial Sequence: Synthetic polypeptide
  VH of XENP020475
EVKLEESGGGLVQPGGSMKLSCAASGFTFSDAWMDWVRQSPEKGLEWVAEIKTKANNHATYYAESVKGRFTISRDDSKSSVYLQMNSLRAEDTGIYYCTRLANWDWYFDVWGAGTTVTVSS

SEQ ID NO: 18477 - protein, 5 aa, Artificial Sequence
  Description of Artificial Sequence: Synthetic peptide
  XENP020475 vhCDR1
DAWMD

SEQ ID NO: 18478 - protein, 19 aa, Artificial Sequence
  Description of Artificial Sequence: Synthetic peptide
  XENP020475 vhCDR2
EIKTKANNHATYYAESVKG

SEQ ID NO: 18479 - protein, 10 aa, Artificial Sequence
  Description of Artificial Sequence: Synthetic peptide
  XENP020475 vhCDR3
LANWDWYFDV

SEQ ID NO: 18480 - protein, 218 aa, Artificial Sequence; identical to SEQ ID NO: 17590
  Description of Artificial Sequence: Synthetic polypeptide
  XENP020475 7G8_H0.27_L0_IgG1_PVA_/S267K Light Chain

SEQ ID NO: 18481 - protein, 111 aa, Artificial Sequence; identical to SEQ ID NO: 17591
  Description of Artificial Sequence: Synthetic polypeptide
  VL of XENP020475

SEQ ID NO: 18482 - protein, 15 aa, Artificial Sequence
  Description of Artificial Sequence: Synthetic peptide
  XENP020475 vlCDR1
KASQSVDYDGDSYMN

SEQ ID NO: 18483 - protein, 7 aa, Artificial Sequence
  Description of Artificial Sequence: Synthetic peptide
  XENP020475 vlCDR2
AASNLES

SEQ ID NO: 18484 - protein, 9 aa, Artificial Sequence
  Description of Artificial Sequence: Synthetic peptide
  XENP020475 vlCDR3
QQSNEDPFT

SEQ ID NO: 18485 - protein, 450 aa, Artificial Sequence
  Description of Artificial Sequence: Synthetic polypeptide
  XENP020476 7G8_H0.28_L0_IgG1_PVA_/S267K Heavy Chain
EVKLEESGGGLVQPGGSMKLSCAASGFTFSDAWMDWVRQSPEKGLEWVAEIETKANNHATYYAESVKGRFTISRDDSKSSVYLQMNSLRAEDTGIYYCTRLANWDWYFDVWGAGTTVTVSSASTKGPSVFPLAPSSKSTSGGTAALGCLVKDYFPEPVTVSWNSGALTSGVHTFPAVLQSSGLYSLSSVVTVPSSSLGTQTYICNVNHKPSDTKVDKKVEPKSCDKTHTCPPCPAPPVAGPSVFLFPPKPKDTLMISRTPEVTCVVVDVKHEDPEVKFNWYVDGVEVHNAKTKPREEEYNSTYRVVSVLTVLHQDWLNGKEYKCKVSNKALPAPIEKTISKAKGQPREPQVYTLPPSREEMTKNQVSLTCDVSGFYPSDIAVEWESDGQPENNYKTTPPVLDSDGSFFLYSKLTVDKSRWEQGDVFSCSVMHEALHNHYTQKSLSLSPGK

SEQ ID NO: 18486 - protein, 121 aa, Artificial Sequence
  Description of Artificial Sequence: Synthetic polypeptide
  VH of XENP020476
EVKLEESGGGLVQPGGSMKLSCAASGFTFSDAWMDWVRQSPEKGLEWVAEIETKANNHATYYAESVKGRFTISRDDSKSSVYLQMNSLRAEDTGIYYCTRLANWDWYFDVWGAGTTVTVSS

SEQ ID NO: 18487 - protein, 5 aa, Artificial Sequence
  Description of Artificial Sequence: Synthetic peptide
  XENP020476 vhCDR1
DAWMD

SEQ ID NO: 18488 - protein, 19 aa, Artificial Sequence
  Description of Artificial Sequence: Synthetic peptide
  XENP020476 vhCDR2
EIETKANNHATYYAESVKG

SEQ ID NO: 18489 - protein, 10 aa, Artificial Sequence
  Description of Artificial Sequence: Synthetic peptide
  XENP020476 vhCDR3
LANWDWYFDV

SEQ ID NO: 18490 - protein, 218 aa, Artificial Sequence; identical to SEQ ID NO: 17590
  Description of Artificial Sequence: Synthetic polypeptide
  XENP020476 7G8_H0.28_L0_IgG1_PVA_/S267K Light Chain

SEQ ID NO: 18491 - protein, 111 aa, Artificial Sequence; identical to SEQ ID NO: 17591
  Description of Artificial Sequence: Synthetic polypeptide
  VL of XENP020476

SEQ ID NO: 18492 - protein, 15 aa, Artificial Sequence
  Description of Artificial Sequence: Synthetic peptide
  XENP020476 vlCDR1
KASQSVDYDGDSYMN

SEQ ID NO: 18493 - protein, 7 aa, Artificial Sequence
  Description of Artificial Sequence: Synthetic peptide
  XENP020476 vlCDR2
AASNLES

SEQ ID NO: 18494 - protein, 9 aa, Artificial Sequence
  Description of Artificial Sequence: Synthetic peptide
  XENP020476 vlCDR3
QQSNEDPFT

SEQ ID NO: 18495 - protein, 450 aa, Artificial Sequence
  Description of Artificial Sequence: Synthetic polypeptide
  XENP020477 7G8_H0.29_L0_IgG1_PVA_/S267K Heavy Chain
EVKLEESGGGLVQPGGSMKLSCAASGFTFSDAWMDWVRQSPEKGLEWVAEIDTKANNHATYYAESVKGRFTISRDDSKSSVYLQMNSLRAEDTGIYYCTRLANWDWYFDVWGAGTTVTVSSASTKGPSVFPLAPSSKSTSGGTAALGCLVKDYFPEPVTVSWNSGALTSGVHTFPAVLQSSGLYSLSSVVTVPSSSLGTQTYICNVNHKPSDTKVDKKVEPKSCDKTHTCPPCPAPPVAGPSVFLFPPKPKDTLMISRTPEVTCVVVDVKHEDPEVKFNWYVDGVEVHNAKTKPREEEYNSTYRVVSVLTVLHQDWLNGKEYKCKVSNKALPAPIEKTISKAKGQPREPQVYTLPPSREEMTKNQVSLTCDVSGFYPSDIAVEWESDGQPENNYKTTPPVLDSDGSFFLYSKLTVDKSRWEQGDVFSCSVMHEALHNHYTQKSLSLSPGK

SEQ ID NO: 18496 - protein, 121 aa, Artificial Sequence
  Description of Artificial Sequence: Synthetic polypeptide
  VH of XENP020477
EVKLEESGGGLVQPGGSMKLSCAASGFTFSDAWMDWVRQSPEKGLEWVAEIDTKANNHATYYAESVKGRFTISRDDSKSSVYLQMNSLRAEDTGIYYCTRLANWDWYFDVWGAGTTVTVSS

SEQ ID NO: 18497 - protein, 5 aa, Artificial Sequence
  Description of Artificial Sequence: Synthetic peptide
  XENP020477 vhCDR1
DAWMD

SEQ ID NO: 18498 - protein, 19 aa, Artificial Sequence
  Description of Artificial Sequence: Synthetic peptide
  XENP020477 vhCDR2
EIDTKANNHATYYAESVKG

SEQ ID NO: 18499 - protein, 10 aa, Artificial Sequence
  Description of Artificial Sequence: Synthetic peptide
  XENP020477 vhCDR3
LANWDWYFDV

SEQ ID NO: 18500 - protein, 218 aa, Artificial Sequence; identical to SEQ ID NO: 17590
  Description of Artificial Sequence: Synthetic polypeptide
  XENP020477 7G8_H0.29_L0_IgG1_PVA_/S267K Light Chain

SEQ ID NO: 18501 - protein, 111 aa, Artificial Sequence; identical to SEQ ID NO: 17591
  Description of Artificial Sequence: Synthetic polypeptide
  VL of XENP020477

SEQ ID NO: 18502 - protein, 15 aa, Artificial Sequence
  Description of Artificial Sequence: Synthetic peptide
  XENP020477 vlCDR1
KASQSVDYDGDSYMN

SEQ ID NO: 18503 - protein, 7 aa, Artificial Sequence
  Description of Artificial Sequence: Synthetic peptide
  XENP020477 vlCDR2
AASNLES

SEQ ID NO: 18504 - protein, 9 aa, Artificial Sequence
  Description of Artificial Sequence: Synthetic peptide
  XENP020477 vlCDR3
QQSNEDPFT

SEQ ID NO: 18505 - protein, 450 aa, Artificial Sequence
  Description of Artificial Sequence: Synthetic polypeptide
  XENP020478 7G8_H0.30_L0_IgG1_PVA_/S267K Heavy Chain
EVKLEESGGGLVQPGGSMKLSCAASGFTFSDAWMDWVRQSPEKGLEWVAEIHTKANNHATYYAESVKGRFTISRDDSKSSVYLQMNSLRAEDTGIYYCTRLANWDWYFDVWGAGTTVTVSSASTKGPSVFPLAPSSKSTSGGTAALGCLVKDYFPEPVTVSWNSGALTSGVHTFPAVLQSSGLYSLSSVVTVPSSSLGTQTYICNVNHKPSDTKVDKKVEPKSCDKTHTCPPCPAPPVAGPSVFLFPPKPKDTLMISRTPEVTCVVVDVKHEDPEVKFNWYVDGVEVHNAKTKPREEEYNSTYRVVSVLTVLHQDWLNGKEYKCKVSNKALPAPIEKTISKAKGQPREPQVYTLPPSREEMTKNQVSLTCDVSGFYPSDIAVEWESDGQPENNYKTTPPVLDSDGSFFLYSKLTVDKSRWEQGDVFSCSVMHEALHNHYTQKSLSLSPGK

SEQ ID NO: 18506 - protein, 121 aa, Artificial Sequence
  Description of Artificial Sequence: Synthetic polypeptide
  VH of XENP020478
EVKLEESGGGLVQPGGSMKLSCAASGFTFSDAWMDWVRQSPEKGLEWVAEIHTKANNHATYYAESVKGRFTISRDDSKSSVYLQMNSLRAEDTGIYYCTRLANWDWYFDVWGAGTTVTVSS

SEQ ID NO: 18507 - protein, 5 aa, Artificial Sequence
  Description of Artificial Sequence: Synthetic peptide
  XENP020478 vhCDR1
DAWMD

SEQ ID NO: 18508 - protein, 19 aa, Artificial Sequence
  Description of Artificial Sequence: Synthetic peptide
  XENP020478 vhCDR2
EIHTKANNHATYYAESVKG

SEQ ID NO: 18509 - protein, 10 aa, Artificial Sequence
  Description of Artificial Sequence: Synthetic peptide
  XENP020478 vhCDR3
LANWDWYFDV

SEQ ID NO: 18510 - protein, 218 aa, Artificial Sequence; identical to SEQ ID NO: 17590
  Description of Artificial Sequence: Synthetic polypeptide
  XENP020478 7G8_H0.30_L0_IgG1_PVA_/S267K Light Chain

SEQ ID NO: 18511 - protein, 111 aa, Artificial Sequence; identical to SEQ ID NO: 17591
  Description of Artificial Sequence: Synthetic polypeptide
  VL of XENP020478

SEQ ID NO: 18512 - protein, 15 aa, Artificial Sequence
  Description of Artificial Sequence: Synthetic peptide
  XENP020478 vlCDR1
KASQSVDYDGDSYMN

SEQ ID NO: 18513 - protein, 7 aa, Artificial Sequence
  Description of Artificial Sequence: Synthetic peptide
  XENP020478 vlCDR2
AASNLES

SEQ ID NO: 18514 - protein, 9 aa, Artificial Sequence
  Description of Artificial Sequence: Synthetic peptide
  XENP020478 vlCDR3
QQSNEDPFT

SEQ ID NO: 18515 - protein, 450 aa, Artificial Sequence
  Description of Artificial Sequence: Synthetic polypeptide
  XENP020479 7G8_H0.31_L0_IgG1_PVA_/S267K Heavy Chain
EVKLEESGGGLVQPGGSMKLSCAASGFTFSDAWMDWVRQSPEKGLEWVAEISTKANNHATYYAESVKGRFTISRDDSKSSVYLQMNSLRAEDTGIYYCTRLANWDWYFDVWGAGTTVTVSSASTKGPSVFPLAPSSKSTSGGTAALGCLVKDYFPEPVTVSWNSGALTSGVHTFPAVLQSSGLYSLSSVVTVPSSSLGTQTYICNVNHKPSDTKVDKKVEPKSCDKTHTCPPCPAPPVAGPSVFLFPPKPKDTLMISRTPEVTCVVVDVKHEDPEVKFNWYVDGVEVHNAKTKPREEEYNSTYRVVSVLTVLHQDWLNGKEYKCKVSNKALPAPIEKTISKAKGQPREPQVYTLPPSREEMTKNQVSLTCDVSGFYPSDIAVEWESDGQPENNYKTTPPVLDSDGSFFLYSKLTVDKSRWEQGDVFSCSVMHEALHNHYTQKSLSLSPGK

SEQ ID NO: 18516 - protein, 121 aa, Artificial Sequence
  Description of Artificial Sequence: Synthetic polypeptide
  VH of XENP020479
EVKLEESGGGLVQPGGSMKLSCAASGFTFSDAWMDWVRQSPEKGLEWVAEISTKANNHATYYAESVKGRFTISRDDSKSSVYLQMNSLRAEDTGIYYCTRLANWDWYFDVWGAGTTVTVSS

SEQ ID NO: 18517 - protein, 5 aa, Artificial Sequence
  Description of Artificial Sequence: Synthetic peptide
  XENP020479 vhCDR1
DAWMD

SEQ ID NO: 18518 - protein, 19 aa, Artificial Sequence
  Description of Artificial Sequence: Synthetic peptide
  XENP020479 vhCDR2
EISTKANNHATYYAESVKG

SEQ ID NO: 18519 - protein, 10 aa, Artificial Sequence
  Description of Artificial Sequence: Synthetic peptide
  XENP020479 vhCDR3
LANWDWYFDV

SEQ ID NO: 18520 - protein, 218 aa, Artificial Sequence; identical to SEQ ID NO: 17590
  Description of Artificial Sequence: Synthetic polypeptide
  XENP020479 7G8_H0.31_L0_IgG1_PVA_/S267K Light Chain

SEQ ID NO: 18521 - protein, 111 aa, Artificial Sequence; identical to SEQ ID NO: 17591
  Description of Artificial Sequence: Synthetic polypeptide
  VL of XENP020479

SEQ ID NO: 18522 - protein, 15 aa, Artificial Sequence
  Description of Artificial Sequence: Synthetic peptide
  XENP020479 vlCDR1
KASQSVDYDGDSYMN

SEQ ID NO: 18523 - protein, 7 aa, Artificial Sequence
  Description of Artificial Sequence: Synthetic peptide
  XENP020479 vlCDR2
AASNLES

SEQ ID NO: 18524 - protein, 9 aa, Artificial Sequence
  Description of Artificial Sequence: Synthetic peptide
  XENP020479 vlCDR3
QQSNEDPFT

SEQ ID NO: 18525 - protein, 450 aa, Artificial Sequence
  Description of Artificial Sequence: Synthetic polypeptide
  XENP020480 7G8_H0.32_L0_IgG1_PVA_/S267K Heavy Chain
EVKLEESGGGLVQPGGSMKLSCAASGFTFSDAWMDWVRQSPEKGLEWVAEIGTKANNHATYYAESVKGRFTISRDDSKSSVYLQMNSLRAEDTGIYYCTRLANWDWYFDVWGAGTTVTVSSASTKGPSVFPLAPSSKSTSGGTAALGCLVKDYFPEPVTVSWNSGALTSGVHTFPAVLQSSGLYSLSSVVTVPSSSLGTQTYICNVNHKPSDTKVDKKVEPKSCDKTHTCPPCPAPPVAGPSVFLFPPKPKDTLMISRTPEVTCVVVDVKHEDPEVKFNWYVDGVEVHNAKTKPREEEYNSTYRVVSVLTVLHQDWLNGKEYKCKVSNKALPAPIEKTISKAKGQPREPQVYTLPPSREEMTKNQVSLTCDVSGFYPSDIAVEWESDGQPENNYKTTPPVLDSDGSFFLYSKLTVDKSRWEQGDVFSCSVMHEALHNHYTQKSLSLSPGK

SEQ ID NO: 18526 - protein, 121 aa, Artificial Sequence
  Description of Artificial Sequence: Synthetic polypeptide
  VH of XENP020480
EVKLEESGGGLVQPGGSMKLSCAASGFTFSDAWMDWVRQSPEKGLEWVAEIGTKANNHATYYAESVKGRFTISRDDSKSSVYLQMNSLRAEDTGIYYCTRLANWDWYFDVWGAGTTVTVSS

SEQ ID NO: 18527 - protein, 5 aa, Artificial Sequence
  Description of Artificial Sequence: Synthetic peptide
  XENP020480 vhCDR1
DAWMD

SEQ ID NO: 18528 - protein, 19 aa, Artificial Sequence
  Description of Artificial Sequence: Synthetic peptide
  XENP020480 vhCDR2
EIGTKANNHATYYAESVKG

SEQ ID NO: 18529 - protein, 10 aa, Artificial Sequence
  Description of Artificial Sequence: Synthetic peptide
  XENP020480 vhCDR3
LANWDWYFDV

SEQ ID NO: 18530 - protein, 218 aa, Artificial Sequence; identical to SEQ ID NO: 17590
  Description of Artificial Sequence: Synthetic polypeptide
  XENP020480 7G8_H0.32_L0_IgG1_PVA_/S267K Light Chain

SEQ ID NO: 18531 - protein, 111 aa, Artificial Sequence; identical to SEQ ID NO: 17591
  Description of Artificial Sequence: Synthetic polypeptide
  VL of XENP020480

SEQ ID NO: 18532 - protein, 15 aa, Artificial Sequence
  Description of Artificial Sequence: Synthetic peptide
  XENP020480 vlCDR1
KASQSVDYDGDSYMN

SEQ ID NO: 18533 - protein, 7 aa, Artificial Sequence
  Description of Artificial Sequence: Synthetic peptide
  XENP020480 vlCDR2
AASNLES

SEQ ID NO: 18534 - protein, 9 aa, Artificial Sequence
  Description of Artificial Sequence: Synthetic peptide
  XENP020480 vlCDR3
QQSNEDPFT

SEQ ID NO: 18535 - protein, 450 aa, Artificial Sequence
  Description of Artificial Sequence: Synthetic polypeptide
  XENP020481 7G8_H0.33_L0_IgG1_PVA_/S267K Heavy Chain
EVKLEESGGGLVQPGGSMKLSCAASGFTFSDAWMDWVRQSPEKGLEWVAEIYTKANNHATYYAESVKGRFTISRDDSKSSVYLQMNSLRAEDTGIYYCTRLANWDWYFDVWGAGTTVTVSSASTKGPSVFPLAPSSKSTSGGTAALGCLVKDYFPEPVTVSWNSGALTSGVHTFPAVLQSSGLYSLSSVVTVPSSSLGTQTYICNVNHKPSDTKVDKKVEPKSCDKTHTCPPCPAPPVAGPSVFLFPPKPKDTLMISRTPEVTCVVVDVKHEDPEVKFNWYVDGVEVHNAKTKPREEEYNSTYRVVSVLTVLHQDWLNGKEYKCKVSNKALPAPIEKTISKAKGQPREPQVYTLPPSREEMTKNQVSLTCDVSGFYPSDIAVEWESDGQPENNYKTTPPVLDSDGSFFLYSKLTVDKSRWEQGDVFSCSVMHEALHNHYTQKSLSLSPGK

SEQ ID NO: 18536 - protein, 121 aa, Artificial Sequence
  Description of Artificial Sequence: Synthetic polypeptide
  VH of XENP020481
EVKLEESGGGLVQPGGSMKLSCAASGFTFSDAWMDWVRQSPEKGLEWVAEIYTKANNHATYYAESVKGRFTISRDDSKSSVYLQMNSLRAEDTGIYYCTRLANWDWYFDVWGAGTTVTVSS

SEQ ID NO: 18537 - protein, 5 aa, Artificial Sequence
  Description of Artificial Sequence: Synthetic peptide
  XENP020481 vhCDR1
DAWMD

SEQ ID NO: 18538 - protein, 19 aa, Artificial Sequence
  Description of Artificial Sequence: Synthetic peptide
  XENP020481 vhCDR2
EIYTKANNHATYYAESVKG

SEQ ID NO: 18539 - protein, 10 aa, Artificial Sequence
  Description of Artificial Sequence: Synthetic peptide
  XENP020481 vhCDR3
LANWDWYFDV

SEQ ID NO: 18540 - protein, 218 aa, Artificial Sequence; identical to SEQ ID NO: 17590
  Description of Artificial Sequence: Synthetic polypeptide
  XENP020481 7G8_H0.33_L0_IgG1_PVA_/S267K Light Chain

SEQ ID NO: 18541 - protein, 111 aa, Artificial Sequence; identical to SEQ ID NO: 17591
  Description of Artificial Sequence: Synthetic polypeptide
  VL of XENP020481

SEQ ID NO: 18542 - protein, 15 aa, Artificial Sequence
  Description of Artificial Sequence: Synthetic peptide
  XENP020481 vlCDR1
KASQSVDYDGDSYMN

SEQ ID NO: 18543 - protein, 7 aa, Artificial Sequence
  Description of Artificial Sequence: Synthetic peptide
  XENP020481 vlCDR2
AASNLES

SEQ ID NO: 18544 - protein, 9 aa, Artificial Sequence
  Description of Artificial Sequence: Synthetic peptide
  XENP020481 vlCDR3
QQSNEDPFT

SEQ ID NO: 18545 - protein, 450 aa, Artificial Sequence
  Description of Artificial Sequence: Synthetic polypeptide
  XENP020482 7G8_H0.34_L0_IgG1_PVA_/S267K Heavy Chain
EVKLEESGGGLVQPGGSMKLSCAASGFTFSDAWMDWVRQSPEKGLEWVAEIITKANNHATYYAESVKGRFTISRDDSKSSVYLQMNSLRAEDTGIYYCTRLANWDWYFDVWGAGTTVTVSSASTKGPSVFPLAPSSKSTSGGTAALGCLVKDYFPEPVTVSWNSGALTSGVHTFPAVLQSSGLYSLSSVVTVPSSSLGTQTYICNVNHKPSDTKVDKKVEPKSCDKTHTCPPCPAPPVAGPSVFLFPPKPKDTLMISRTPEVTCVVVDVKHEDPEVKFNWYVDGVEVHNAKTKPREEEYNSTYRVVSVLTVLHQDWLNGKEYKCKVSNKALPAPIEKTISKAKGQPREPQVYTLPPSREEMTKNQVSLTCDVSGFYPSDIAVEWESDGQPENNYKTTPPVLDSDGSFFLYSKLTVDKSRWEQGDVFSCSVMHEALHNHYTQKSLSLSPGK

SEQ ID NO: 18546 - protein, 121 aa, Artificial Sequence
  Description of Artificial Sequence: Synthetic polypeptide
  VH of XENP020482
EVKLEESGGGLVQPGGSMKLSCAASGFTFSDAWMDWVRQSPEKGLEWVAEIITKANNHATYYAESVKGRFTISRDDSKSSVYLQMNSLRAEDTGIYYCTRLANWDWYFDVWGAGTTVTVSS

SEQ ID NO: 18547 - protein, 5 aa, Artificial Sequence
  Description of Artificial Sequence: Synthetic peptide
  XENP020482 vhCDR1
DAWMD

SEQ ID NO: 18548 - protein, 19 aa, Artificial Sequence
  Description of Artificial Sequence: Synthetic peptide
  XENP020482 vhCDR2
EIITKANNHATYYAESVKG

SEQ ID NO: 18549 - protein, 10 aa, Artificial Sequence
  Description of Artificial Sequence: Synthetic peptide
  XENP020482 vhCDR3
LANWDWYFDV

SEQ ID NO: 18550 - protein, 218 aa, Artificial Sequence; identical to SEQ ID NO: 17590
  Description of Artificial Sequence: Synthetic polypeptide
  XENP020482 7G8_H0.34_L0_IgG1_PVA_/S267K Light Chain

SEQ ID NO: 18551 - protein, 111 aa, Artificial Sequence; identical to SEQ ID NO: 17591
  Description of Artificial Sequence: Synthetic polypeptide
  VL of XENP020482

SEQ ID NO: 18552 - protein, 15 aa, Artificial Sequence
  Description of Artificial Sequence: Synthetic peptide
  XENP020482 vlCDR1
KASQSVDYDGDSYMN

SEQ ID NO: 18553 - protein, 7 aa, Artificial Sequence
  Description of Artificial Sequence: Synthetic peptide
  XENP020482 vlCDR2
AASNLES

SEQ ID NO: 18554 - protein, 9 aa, Artificial Sequence
  Description of Artificial Sequence: Synthetic peptide
  XENP020482 vlCDR3
QQSNEDPFT

SEQ ID NO: 18555 - protein, 450 aa, Artificial Sequence
  Description of Artificial Sequence: Synthetic polypeptide
  XENP020483 7G8_H0.35_L0_IgG1_PVA_/S267K Heavy Chain
EVKLEESGGGLVQPGGSMKLSCAASGFTFSDAWMDWVRQSPEKGLEWVAEIWTKANNHATYYAESVKGRFTISRDDSKSSVYLQMNSLRAEDTGIYYCTRLANWDWYFDVWGAGTTVTVSSASTKGPSVFPLAPSSKSTSGGTAALGCLVKDYFPEPVTVSWNSGALTSGVHTFPAVLQSSGLYSLSSVVTVPSSSLGTQTYICNVNHKPSDTKVDKKVEPKSCDKTHTCPPCPAPPVAGPSVFLFPPKPKDTLMISRTPEVTCVVVDVKHEDPEVKFNWYVDGVEVHNAKTKPREEEYNSTYRVVSVLTVLHQDWLNGKEYKCKVSNKALPAPIEKTISKAKGQPREPQVYTLPPSREEMTKNQVSLTCDVSGFYPSDIAVEWESDGQPENNYKTTPPVLDSDGSFFLYSKLTVDKSRWEQGDVFSCSVMHEALHNHYTQKSLSLSPGK

SEQ ID NO: 18556 - protein, 121 aa, Artificial Sequence
  Description of Artificial Sequence: Synthetic polypeptide
  VH of XENP020483
EVKLEESGGGLVQPGGSMKLSCAASGFTFSDAWMDWVRQSPEKGLEWVAEIWTKANNHATYYAESVKGRFTISRDDSKSSVYLQMNSLRAEDTGIYYCTRLANWDWYFDVWGAGTTVTVSS

SEQ ID NO: 18557 - protein, 5 aa, Artificial Sequence
  Description of Artificial Sequence: Synthetic peptide
  XENP020483 vhCDR1
DAWMD

SEQ ID NO: 18558 - protein, 19 aa, Artificial Sequence
  Description of Artificial Sequence: Synthetic peptide
  XENP020483 vhCDR2
EIWTKANNHATYYAESVKG

SEQ ID NO: 18559 - protein, 10 aa, Artificial Sequence
  Description of Artificial Sequence: Synthetic peptide
  XENP020483 vhCDR3
LANWDWYFDV

SEQ ID NO: 18560 - protein, 218 aa, Artificial Sequence; identical to SEQ ID NO: 17590
  Description of Artificial Sequence: Synthetic polypeptide
  XENP020483 7G8_H0.35_L0_IgG1_PVA_/S267K Light Chain

SEQ ID NO: 18561 - protein, 111 aa, Artificial Sequence; identical to SEQ ID NO: 17591
  Description of Artificial Sequence: Synthetic polypeptide
  VL of XENP020483

SEQ ID NO: 18562 - protein, 15 aa, Artificial Sequence
  Description of Artificial Sequence: Synthetic peptide
  XENP020483 vlCDR1
KASQSVDYDGDSYMN

SEQ ID NO: 18563 - protein, 7 aa, Artificial Sequence
  Description of Artificial Sequence: Synthetic peptide
  XENP020483 vlCDR2
AASNLES

SEQ ID NO: 18564 - protein, 9 aa, Artificial Sequence
  Description of Artificial Sequence: Synthetic peptide
  XENP020483 vlCDR3
QQSNEDPFT

SEQ ID NO: 18565 - protein, 450 aa, Artificial Sequence
  Description of Artificial Sequence: Synthetic polypeptide
  XENP020484 7G8_H0.36_L0_IgG1_PVA_/S267K Heavy Chain
EVKLEESGGGLVQPGGSMKLSCAASGFTFSDAWMDWVRQSPEKGLEWVAEIRVKANNHATYYAESVKGRFTISRDDSKSSVYLQMNSLRAEDTGIYYCTRLANWDWYFDVWGAGTTVTVSSASTKGPSVFPLAPSSKSTSGGTAALGCLVKDYFPEPVTVSWNSGALTSGVHTFPAVLQSSGLYSLSSVVTVPSSSLGTQTYICNVNHKPSDTKVDKKVEPKSCDKTHTCPPCPAPPVAGPSVFLFPPKPKDTLMISRTPEVTCVVVDVKHEDPEVKFNWYVDGVEVHNAKTKPREEEYNSTYRVVSVLTVLHQDWLNGKEYKCKVSNKALPAPIEKTISKAKGQPREPQVYTLPPSREEMTKNQVSLTCDVSGFYPSDIAVEWESDGQPENNYKTTPPVLDSDGSFFLYSKLTVDKSRWEQGDVFSCSVMHEALHNHYTQKSLSLSPGK

SEQ ID NO: 18566 - protein, 121 aa, Artificial Sequence
  Description of Artificial Sequence: Synthetic polypeptide
  VH of XENP020484
EVKLEESGGGLVQPGGSMKLSCAASGFTFSDAWMDWVRQSPEKGLEWVAEIRVKANNHATYYAESVKGRFTISRDDSKSSVYLQMNSLRAEDTGIYYCTRLANWDWYFDVWGAGTTVTVSS

SEQ ID NO: 18567 - protein, 5 aa, Artificial Sequence
  Description of Artificial Sequence: Synthetic peptide
  XENP020484 vhCDR1
DAWMD

SEQ ID NO: 18568 - protein, 19 aa, Artificial Sequence
  Description of Artificial Sequence: Synthetic peptide
  XENP020484 vhCDR2
EIRVKANNHATYYAESVKG

SEQ ID NO: 18569 - protein, 10 aa, Artificial Sequence
  Description of Artificial Sequence: Synthetic peptide
  XENP020484 vhCDR3
LANWDWYFDV

SEQ ID NO: 18570 - protein, 218 aa, Artificial Sequence; identical to SEQ ID NO: 17590
  Description of Artificial Sequence: Synthetic polypeptide
  XENP020484 7G8_H0.36_L0_IgG1_PVA_/S267K Light Chain

SEQ ID NO: 18571 - protein, 111 aa, Artificial Sequence; identical to SEQ ID NO: 17591
  Description of Artificial Sequence: Synthetic polypeptide
  VL of XENP020484

SEQ ID NO: 18572 - protein, 15 aa, Artificial Sequence
  Description of Artificial Sequence: Synthetic peptide
  XENP020484 vlCDR1
KASQSVDYDGDSYMN

SEQ ID NO: 18573 - protein, 7 aa, Artificial Sequence
  Description of Artificial Sequence: Synthetic peptide
  XENP020484 vlCDR2
AASNLES

SEQ ID NO: 18574 - protein, 9 aa, Artificial Sequence
  Description of Artificial Sequence: Synthetic peptide
  XENP020484 vlCDR3
QQSNEDPFT

SEQ ID NO: 18575 - protein, 450 aa, Artificial Sequence
  Description of Artificial Sequence: Synthetic polypeptide
  XENP020485 7G8_H0.37_L0_IgG1_PVA_/S267K Heavy Chain
EVKLEESGGGLVQPGGSMKLSCAASGFTFSDAWMDWVRQSPEKGLEWVAEIRSKANNHATYYAESVKGRFTISRDDSKSSVYLQMNSLRAEDTGIYYCTRLANWDWYFDVWGAGTTVTVSSASTKGPSVFPLAPSSKSTSGGTAALGCLVKDYFPEPVTVSWNSGALTSGVHTFPAVLQSSGLYSLSSVVTVPSSSLGTQTYICNVNHKPSDTKVDKKVEPKSCDKTHTCPPCPAPPVAGPSVFLFPPKPKDTLMISRTPEVTCVVVDVKHEDPEVKFNWYVDGVEVHNAKTKPREEEYNSTYRVVSVLTVLHQDWLNGKEYKCKVSNKALPAPIEKTISKAKGQPREPQVYTLPPSREEMTKNQVSLTCDVSGFYPSDIAVEWESDGQPENNYKTTPPVLDSDGSFFLYSKLTVDKSRWEQGDVFSCSVMHEALHNHYTQKSLSLSPGK

SEQ ID NO: 18576 - protein, 121 aa, Artificial Sequence
  Description of Artificial Sequence: Synthetic polypeptide
  VH of XENP020485
EVKLEESGGGLVQPGGSMKLSCAASGFTFSDAWMDWVRQSPEKGLEWVAEIRSKANNHATYYAESVKGRFTISRDDSKSSVYLQMNSLRAEDTGIYYCTRLANWDWYFDVWGAGTTVTVSS

SEQ ID NO: 18577 - protein, 5 aa, Artificial Sequence
  Description of Artificial Sequence: Synthetic peptide
  XENP020485 vhCDR1
DAWMD

SEQ ID NO: 18578 - protein, 19 aa, Artificial Sequence
  Description of Artificial Sequence: Synthetic peptide
  XENP020485 vhCDR2
EIRSKANNHATYYAESVKG

SEQ ID NO: 18579 - protein, 10 aa, Artificial Sequence
  Description of Artificial Sequence: Synthetic peptide
  XENP020485 vhCDR3
LANWDWYFDV

SEQ ID NO: 18580 - protein, 218 aa, Artificial Sequence; identical to SEQ ID NO: 17590
  Description of Artificial Sequence: Synthetic polypeptide
  XENP020485 7G8_H0.37_L0_IgG1_PVA_/S267K Light Chain

SEQ ID NO: 18581 - protein, 111 aa, Artificial Sequence; identical to SEQ ID NO: 17591
  Description of Artificial Sequence: Synthetic polypeptide
  VL of XENP020485

SEQ ID NO: 18582 - protein, 15 aa, Artificial Sequence
  Description of Artificial Sequence: Synthetic peptide
  XENP020485 vlCDR1
KASQSVDYDGDSYMN

SEQ ID NO: 18583 - protein, 7 aa, Artificial Sequence
  Description of Artificial Sequence: Synthetic peptide
  XENP020485 vlCDR2
AASNLES

SEQ ID NO: 18584 - protein, 9 aa, Artificial Sequence
  Description of Artificial Sequence: Synthetic peptide
  XENP020485 vlCDR3
QQSNEDPFT

SEQ ID NO: 18585 - protein, 450 aa, Artificial Sequence
  Description of Artificial Sequence: Synthetic polypeptide
  XENP020486 7G8_H0.38_L0_IgG1_PVA_/S267K Heavy Chain
EVKLEESGGGLVQPGGSMKLSCAASGFTFSDAWMDWVRQSPEKGLEWVAEIRAKANNHATYYAESVKGRFTISRDDSKSSVYLQMNSLRAEDTGIYYCTRLANWDWYFDVWGAGTTVTVSSASTKGPSVFPLAPSSKSTSGGTAALGCLVKDYFPEPVTVSWNSGALTSGVHTFPAVLQSSGLYSLSSVVTVPSSSLGTQTYICNVNHKPSDTKVDKKVEPKSCDKTHTCPPCPAPPVAGPSVFLFPPKPKDTLMISRTPEVTCVVVDVKHEDPEVKFNWYVDGVEVHNAKTKPREEEYNSTYRVVSVLTVLHQDWLNGKEYKCKVSNKALPAPIEKTISKAKGQPREPQVYTLPPSREEMTKNQVSLTCDVSGFYPSDIAVEWESDGQPENNYKTTPPVLDSDGSFFLYSKLTVDKSRWEQGDVFSCSVMHEALHNHYTQKSLSLSPGK

SEQ ID NO: 18586 - protein, 121 aa, Artificial Sequence
  Description of Artificial Sequence: Synthetic polypeptide
  VH of XENP020486
EVKLEESGGGLVQPGGSMKLSCAASGFTFSDAWMDWVRQSPEKGLEWVAEIRAKANNHATYYAESVKGRFTISRDDSKSSVYLQMNSLRAEDTGIYYCTRLANWDWYFDVWGAGTTVTVSS

SEQ ID NO: 18587 - protein, 5 aa, Artificial Sequence
  Description of Artificial Sequence: Synthetic peptide
  XENP020486 vhCDR1
DAWMD

SEQ ID NO: 18588 - protein, 19 aa, Artificial Sequence
  Description of Artificial Sequence: Synthetic peptide
  XENP020486 vhCDR2
EIRAKANNHATYYAESVKG

SEQ ID NO: 18589 - protein, 10 aa, Artificial Sequence
  Description of Artificial Sequence: Synthetic peptide
  XENP020486 vhCDR3
LANWDWYFDV

SEQ ID NO: 18590 - protein, 218 aa, Artificial Sequence; identical to SEQ ID NO: 17590
  Description of Artificial Sequence: Synthetic polypeptide
  XENP020486 7G8_H0.38_L0_IgG1_PVA_/S267K Light Chain

SEQ ID NO: 18591 - protein, 111 aa, Artificial Sequence; identical to SEQ ID NO: 17591
  Description of Artificial Sequence: Synthetic polypeptide
  VL of XENP020486

SEQ ID NO: 18592 - protein, 15 aa, Artificial Sequence
  Description of Artificial Sequence: Synthetic peptide
  XENP020486 vlCDR1
KASQSVDYDGDSYMN

SEQ ID NO: 18593 - protein, 7 aa, Artificial Sequence
  Description of Artificial Sequence: Synthetic peptide
  XENP020486 vlCDR2
AASNLES

SEQ ID NO: 18594 - protein, 9 aa, Artificial Sequence
  Description of Artificial Sequence: Synthetic peptide
  XENP020486 vlCDR3
QQSNEDPFT

SEQ ID NO: 18595 - protein, 450 aa, Artificial Sequence
  Description of Artificial Sequence: Synthetic polypeptide
  XENP020487 7G8_H0.39_L0_IgG1_PVA_/S267K Heavy Chain
EVKLEESGGGLVQPGGSMKLSCAASGFTFSDAWMDWVRQSPEKGLEWVAEIRIKANNHATYYAESVKGRFTISRDDSKSSVYLQMNSLRAEDTGIYYCTRLANWDWYFDVWGAGTTVTVSSASTKGPSVFPLAPSSKSTSGGTAALGCLVKDYFPEPVTVSWNSGALTSGVHTFPAVLQSSGLYSLSSVVTVPSSSLGTQTYICNVNHKPSDTKVDKKVEPKSCDKTHTCPPCPAPPVAGPSVFLFPPKPKDTLMISRTPEVTCVVVDVKHEDPEVKFNWYVDGVEVHNAKTKPREEEYNSTYRVVSVLTVLHQDWLNGKEYKCKVSNKALPAPIEKTISKAKGQPREPQVYTLPPSREEMTKNQVSLTCDVSGFYPSDIAVEWESDGQPENNYKTTPPVLDSDGSFFLYSKLTVDKSRWEQGDVFSCSVMHEALHNHYTQKSLSLSPGK

SEQ ID NO: 18596 - protein, 121 aa, Artificial Sequence
  Description of Artificial Sequence: Synthetic polypeptide
  VH of XENP020487
EVKLEESGGGLVQPGGSMKLSCAASGFTFSDAWMDWVRQSPEKGLEWVAEIRIKANNHATYYAESVKGRFTISRDDSKSSVYLQMNSLRAEDTGIYYCTRLANWDWYFDVWGAGTTVTVSS

SEQ ID NO: 18597 - protein, 5 aa, Artificial Sequence
  Description of Artificial Sequence: Synthetic peptide
  XENP020487 vhCDR1
DAWMD

SEQ ID NO: 18598 - protein, 19 aa, Artificial Sequence
  Description of Artificial Sequence: Synthetic peptide
  XENP020487 vhCDR2
EIRIKANNHATYYAESVKG

SEQ ID NO: 18599 - protein, 10 aa, Artificial Sequence
  Description of Artificial Sequence: Synthetic peptide
  XENP020487 vhCDR3
LANWDWYFDV

SEQ ID NO: 18600 - protein, 218 aa, Artificial Sequence; identical to SEQ ID NO: 17590
  Description of Artificial Sequence: Synthetic polypeptide
  XENP020487 7G8_H0.39_L0_IgG1_PVA_/S267K Light Chain

SEQ ID NO: 18601 - protein, 111 aa, Artificial Sequence; identical to SEQ ID NO: 17591
  Description of Artificial Sequence: Synthetic polypeptide
  VL of XENP020487

SEQ ID NO: 18602 - protein, 15 aa, Artificial Sequence
  Description of Artificial Sequence: Synthetic peptide
  XENP020487 vlCDR1
KASQSVDYDGDSYMN

SEQ ID NO: 18603 - protein, 7 aa, Artificial Sequence
  Description of Artificial Sequence: Synthetic peptide
  XENP020487 vlCDR2
AASNLES

SEQ ID NO: 18604 - protein, 9 aa, Artificial Sequence
  Description of Artificial Sequence: Synthetic peptide
  XENP020487 vlCDR3
QQSNEDPFT

SEQ ID NO: 18605 - protein, 450 aa, Artificial Sequence
  Description of Artificial Sequence: Synthetic polypeptide
  XENP020488 7G8_H0.40_L0_IgG1_PVA_/S267K Heavy Chain
EVKLEESGGGLVQPGGSMKLSCAASGFTFSDAWMDWVRQSPEKGLEWVAEIRQKANNHATYYAESVKGRFTISRDDSKSSVYLQMNSLRAEDTGIYYCTRLANWDWYFDVWGAGTTVTVSSASTKGPSVFPLAPSSKSTSGGTAALGCLVKDYFPEPVTVSWNSGALTSGVHTFPAVLQSSGLYSLSSVVTVPSSSLGTQTYICNVNHKPSDTKVDKKVEPKSCDKTHTCPPCPAPPVAGPSVFLFPPKPKDTLMISRTPEVTCVVVDVKHEDPEVKFNWYVDGVEVHNAKTKPREEEYNSTYRVVSVLTVLHQDWLNGKEYKCKVSNKALPAPIEKTISKAKGQPREPQVYTLPPSREEMTKNQVSLTCDVSGFYPSDIAVEWESDGQPENNYKTTPPVLDSDGSFFLYSKLTVDKSRWEQGDVFSCSVMHEALHNHYTQKSLSLSPGK

SEQ ID NO: 18606 - protein, 121 aa, Artificial Sequence
  Description of Artificial Sequence: Synthetic polypeptide
  VH of XENP020488
EVKLEESGGGLVQPGGSMKLSCAASGFTFSDAWMDWVRQSPEKGLEWVAEIRQKANNHATYYAESVKGRFTISRDDSKSSVYLQMNSLRAEDTGIYYCTRLANWDWYFDVWGAGTTVTVSS

SEQ ID NO: 18607 - protein, 5 aa, Artificial Sequence
  Description of Artificial Sequence: Synthetic peptide
  XENP020488 vhCDR1
DAWMD

SEQ ID NO: 18608 - protein, 19 aa, Artificial Sequence
  Description of Artificial Sequence: Synthetic peptide
  XENP020488 vhCDR2
EIRQKANNHATYYAESVKG

SEQ ID NO: 18609 - protein, 10 aa, Artificial Sequence
  Description of Artificial Sequence: Synthetic peptide
  XENP020488 vhCDR3
LANWDWYFDV

SEQ ID NO: 18610 - protein, 218 aa, Artificial Sequence; identical to SEQ ID NO: 17590
  Description of Artificial Sequence: Synthetic polypeptide
  XENP020488 7G8_H0.40_L0_IgG1_PVA_/S267K Light Chain

SEQ ID NO: 18611 - protein, 111 aa, Artificial Sequence; identical to SEQ ID NO: 17591
  Description of Artificial Sequence: Synthetic polypeptide
  VL of XENP020488

SEQ ID NO: 18612 - protein, 15 aa, Artificial Sequence
  Description of Artificial Sequence: Synthetic peptide
  XENP020488 vlCDR1
KASQSVDYDGDSYMN

SEQ ID NO: 18613 - protein, 7 aa, Artificial Sequence
  Description of Artificial Sequence: Synthetic peptide
  XENP020488 vlCDR2
AASNLES

SEQ ID NO: 18614 - protein, 9 aa, Artificial Sequence
  Description of Artificial Sequence: Synthetic peptide
  XENP020488 vlCDR3
QQSNEDPFT

SEQ ID NO: 18615 - protein, 450 aa, Artificial Sequence
  Description of Artificial Sequence: Synthetic polypeptide
  XENP020489 7G8_H0.41_L0_IgG1_PVA_/S267K Heavy Chain
EVKLEESGGGLVQPGGSMKLSCAASGFTFSDAWMDWVRQSPEKGLEWVAEIRHKANNHATYYAESVKGRFTISRDDSKSSVYLQMNSLRAEDTGIYYCTRLANWDWYFDVWGAGTTVTVSSASTKGPSVFPLAPSSKSTSGGTAALGCLVKDYFPEPVTVSWNSGALTSGVHTFPAVLQSSGLYSLSSVVTVPSSSLGTQTYICNVNHKPSDTKVDKKVEPKSCDKTHTCPPCPAPPVAGPSVFLFPPKPKDTLMISRTPEVTCVVVDVKHEDPEVKFNWYVDGVEVHNAKTKPREEEYNSTYRVVSVLTVLHQDWLNGKEYKCKVSNKALPAPIEKTISKAKGQPREPQVYTLPPSREEMTKNQVSLTCDVSGFYPSDIAVEWESDGQPENNYKTTPPVLDSDGSFFLYSKLTVDKSRWEQGDVFSCSVMHEALHNHYTQKSLSLSPGK

SEQ ID NO: 18616 - protein, 121 aa, Artificial Sequence
  Description of Artificial Sequence: Synthetic polypeptide
  VH of XENP020489
EVKLEESGGGLVQPGGSMKLSCAASGFTFSDAWMDWVRQSPEKGLEWVAEIRHKANNHATYYAESVKGRFTISRDDSKSSVYLQMNSLRAEDTGIYYCTRLANWDWYFDVWGAGTTVTVSS

SEQ ID NO: 18617 - protein, 5 aa, Artificial Sequence
  Description of Artificial Sequence: Synthetic peptide
  XENP020489 vhCDR1
DAWMD

SEQ ID NO: 18618 - protein, 19 aa, Artificial Sequence
  Description of Artificial Sequence: Synthetic peptide
  XENP020489 vhCDR2
EIRHKANNHATYYAESVKG

SEQ ID NO: 18619 - protein, 10 aa, Artificial Sequence
  Description of Artificial Sequence: Synthetic peptide
  XENP020489 vhCDR3
LANWDWYFDV

SEQ ID NO: 18620 - protein, 218 aa, Artificial Sequence; identical to SEQ ID NO: 17590
  Description of Artificial Sequence: Synthetic polypeptide
  XENP020489 7G8_H0.41_L0_IgG1_PVA_/S267K Light Chain

SEQ ID NO: 18621 - protein, 111 aa, Artificial Sequence; identical to SEQ ID NO: 17591
  Description of Artificial Sequence: Synthetic polypeptide
  VL of XENP020489

SEQ ID NO: 18622 - protein, 15 aa, Artificial Sequence
  Description of Artificial Sequence: Synthetic peptide
  XENP020489 vlCDR1
KASQSVDYDGDSYMN

SEQ ID NO: 18623 - protein, 7 aa, Artificial Sequence
  Description of Artificial Sequence: Synthetic peptide
  XENP020489 vlCDR2
AASNLES

SEQ ID NO: 18624 - protein, 9 aa, Artificial Sequence
  Description of Artificial Sequence: Synthetic peptide
  XENP020489 vlCDR3
QQSNEDPFT

SEQ ID NO: 18625 - protein, 450 aa, Artificial Sequence
  Description of Artificial Sequence: Synthetic polypeptide
  XENP020490 7G8_H0.42_L0_IgG1_PVA_/S267K Heavy Chain
EVKLEESGGGLVQPGGSMKLSCAASGFTFSDAWMDWVRQSPEKGLEWVAEIRDKANNHATYYAESVKGRFTISRDDSKSSVYLQMNSLRAEDTGIYYCTRLANWDWYFDVWGAGTTVTVSSASTKGPSVFPLAPSSKSTSGGTAALGCLVKDYFPEPVTVSWNSGALTSGVHTFPAVLQSSGLYSLSSVVTVPSSSLGTQTYICNVNHKPSDTKVDKKVEPKSCDKTHTCPPCPAPPVAGPSVFLFPPKPKDTLMISRTPEVTCVVVDVKHEDPEVKFNWYVDGVEVHNAKTKPREEEYNSTYRVVSVLTVLHQDWLNGKEYKCKVSNKALPAPIEKTISKAKGQPREPQVYTLPPSREEMTKNQVSLTCDVSGFYPSDIAVEWESDGQPENNYKTTPPVLDSDGSFFLYSKLTVDKSRWEQGDVFSCSVMHEALHNHYTQKSLSLSPGK

SEQ ID NO: 18626 - protein, 121 aa, Artificial Sequence
  Description of Artificial Sequence: Synthetic polypeptide
  VH of XENP020490
EVKLEESGGGLVQPGGSMKLSCAASGFTFSDAWMDWVRQSPEKGLEWVAEIRDKANNHATYYAESVKGRFTISRDDSKSSVYLQMNSLRAEDTGIYYCTRLANWDWYFDVWGAGTTVTVSS

SEQ ID NO: 18627 - protein, 5 aa, Artificial Sequence
  Description of Artificial Sequence: Synthetic peptide
  XENP020490 vhCDR1
DAWMD

SEQ ID NO: 18628 - protein, 19 aa, Artificial Sequence
  Description of Artificial Sequence: Synthetic peptide
  XENP020490 vhCDR2
EIRDKANNHATYYAESVKG

SEQ ID NO: 18629 - protein, 10 aa, Artificial Sequence
  Description of Artificial Sequence: Synthetic peptide
  XENP020490 vhCDR3
LANWDWYFDV

SEQ ID NO: 18630 - protein, 218 aa, Artificial Sequence; identical to SEQ ID NO: 17590
  Description of Artificial Sequence: Synthetic polypeptide
  XENP020490 7G8_H0.42_L0_IgG1_PVA_/S267K Light Chain

SEQ ID NO: 18631 - protein, 111 aa, Artificial Sequence; identical to SEQ ID NO: 17591
  Description of Artificial Sequence: Synthetic polypeptide
  VL of XENP020490

SEQ ID NO: 18632 - protein, 15 aa, Artificial Sequence
  Description of Artificial Sequence: Synthetic peptide
  XENP020490 vlCDR1
KASQSVDYDGDSYMN

SEQ ID NO: 18633 - protein, 7 aa, Artificial Sequence
  Description of Artificial Sequence: Synthetic peptide
  XENP020490 vlCDR2
AASNLES

SEQ ID NO: 18634 - protein, 9 aa, Artificial Sequence
  Description of Artificial Sequence: Synthetic peptide
  XENP020490 vlCDR3
QQSNEDPFT

SEQ ID NO: 18635 - protein, 450 aa, Artificial Sequence
  Description of Artificial Sequence: Synthetic polypeptide
  XENP020491 7G8_H0.43_L0_IgG1_PVA_/S267K Heavy Chain
EVKLEESGGGLVQPGGSMKLSCAASGFTFSDAWMDWVRQSPEKGLEWVAEIRKKANNHATYYAESVKGRFTISRDDSKSSVYLQMNSLRAEDTGIYYCTRLANWDWYFDVWGAGTTVTVSSASTKGPSVFPLAPSSKSTSGGTAALGCLVKDYFPEPVTVSWNSGALTSGVHTFPAVLQSSGLYSLSSVVTVPSSSLGTQTYICNVNHKPSDTKVDKKVEPKSCDKTHTCPPCPAPPVAGPSVFLFPPKPKDTLMISRTPEVTCVVVDVKHEDPEVKFNWYVDGVEVHNAKTKPREEEYNSTYRVVSVLTVLHQDWLNGKEYKCKVSNKALPAPIEKTISKAKGQPREPQVYTLPPSREEMTKNQVSLTCDVSGFYPSDIAVEWESDGQPENNYKTTPPVLDSDGSFFLYSKLTVDKSRWEQGDVFSCSVMHEALHNHYTQKSLSLSPGK

SEQ ID NO: 18636 - protein, 121 aa, Artificial Sequence
  Description of Artificial Sequence: Synthetic polypeptide
  VH of XENP020491
EVKLEESGGGLVQPGGSMKLSCAASGFTFSDAWMDWVRQSPEKGLEWVAEIRKKANNHATYYAESVKGRFTISRDDSKSSVYLQMNSLRAEDTGIYYCTRLANWDWYFDVWGAGTTVTVSS

SEQ ID NO: 18637 - protein, 5 aa, Artificial Sequence
  Description of Artificial Sequence: Synthetic peptide
  XENP020491 vhCDR1
DAWMD

SEQ ID NO: 18638 - protein, 19 aa, Artificial Sequence
  Description of Artificial Sequence: Synthetic peptide
  XENP020491 vhCDR2
EIRKKANNHATYYAESVKG

SEQ ID NO: 18639 - protein, 10 aa, Artificial Sequence
  Description of Artificial Sequence: Synthetic peptide
  XENP020491 vhCDR3
LANWDWYFDV

SEQ ID NO: 18640 - protein, 218 aa, Artificial Sequence; identical to SEQ ID NO: 17590
  Description of Artificial Sequence: Synthetic polypeptide
  XENP020491 7G8_H0.43_L0_IgG1_PVA_/S267K Light Chain

SEQ ID NO: 18641 - protein, 111 aa, Artificial Sequence; identical to SEQ ID NO: 17591
  Description of Artificial Sequence: Synthetic polypeptide
  VL of XENP020491

SEQ ID NO: 18642 - protein, 15 aa, Artificial Sequence
  Description of Artificial Sequence: Synthetic peptide
  XENP020491 vlCDR1
KASQSVDYDGDSYMN

SEQ ID NO: 18643 - protein, 7 aa, Artificial Sequence
  Description of Artificial Sequence: Synthetic peptide
  XENP020491 vlCDR2
AASNLES

SEQ ID NO: 18644 - protein, 9 aa, Artificial Sequence
  Description of Artificial Sequence: Synthetic peptide
  XENP020491 vlCDR3
QQSNEDPFT

SEQ ID NO: 18645 - protein, 450 aa, Artificial Sequence
  Description of Artificial Sequence: Synthetic polypeptide
  XENP020492 7G8_H0.44_L0_IgG1_PVA_/S267K Heavy Chain
EVKLEESGGGLVQPGGSMKLSCAASGFTFSDAWMDWVRQSPEKGLEWVAEIRYKANNHATYYAESVKGRFTISRDDSKSSVYLQMNSLRAEDTGIYYCTRLANWDWYFDVWGAGTTVTVSSASTKGPSVFPLAPSSKSTSGGTAALGCLVKDYFPEPVTVSWNSGALTSGVHTFPAVLQSSGLYSLSSVVTVPSSSLGTQTYICNVNHKPSDTKVDKKVEPKSCDKTHTCPPCPAPPVAGPSVFLFPPKPKDTLMISRTPEVTCVVVDVKHEDPEVKFNWYVDGVEVHNAKTKPREEEYNSTYRVVSVLTVLHQDWLNGKEYKCKVSNKALPAPIEKTISKAKGQPREPQVYTLPPSREEMTKNQVSLTCDVSGFYPSDIAVEWESDGQPENNYKTTPPVLDSDGSFFLYSKLTVDKSRWEQGDVFSCSVMHEALHNHYTQKSLSLSPGK

SEQ ID NO: 18646 - protein, 121 aa, Artificial Sequence
  Description of Artificial Sequence: Synthetic polypeptide
  VH of XENP020492
EVKLEESGGGLVQPGGSMKLSCAASGFTFSDAWMDWVRQSPEKGLEWVAEIRYKANNHATYYAESVKGRFTISRDDSKSSVYLQMNSLRAEDTGIYYCTRLANWDWYFDVWGAGTTVTVSS

SEQ ID NO: 18647 - protein, 5 aa, Artificial Sequence
  Description of Artificial Sequence: Synthetic peptide
  XENP020492 vhCDR1
DAWMD

SEQ ID NO: 18648 - protein, 19 aa, Artificial Sequence
  Description of Artificial Sequence: Synthetic peptide
  XENP020492 vhCDR2
EIRYKANNHATYYAESVKG

SEQ ID NO: 18649 - protein, 10 aa, Artificial Sequence
  Description of Artificial Sequence: Synthetic peptide
  XENP020492 vhCDR3
LANWDWYFDV

SEQ ID NO: 18650 - protein, 218 aa, Artificial Sequence; identical to SEQ ID NO: 17590
  Description of Artificial Sequence: Synthetic polypeptide
  XENP020492 7G8_H0.44_L0_IgG1_PVA_/S267K Light Chain

SEQ ID NO: 18651 - protein, 111 aa, Artificial Sequence; identical to SEQ ID NO: 17591
  Description of Artificial Sequence: Synthetic polypeptide
  VL of XENP020492

SEQ ID NO: 18652 - protein, 15 aa, Artificial Sequence
  Description of Artificial Sequence: Synthetic peptide
  XENP020492 vlCDR1
KASQSVDYDGDSYMN

SEQ ID NO: 18653 - protein, 7 aa, Artificial Sequence
  Description of Artificial Sequence: Synthetic peptide
  XENP020492 vlCDR2
AASNLES

SEQ ID NO: 18654 - protein, 9 aa, Artificial Sequence
  Description of Artificial Sequence: Synthetic peptide
  XENP020492 vlCDR3
QQSNEDPFT

SEQ ID NO: 18655 - protein, 450 aa, Artificial Sequence
  Description of Artificial Sequence: Synthetic polypeptide
  XENP020493 7G8_H0.45_L0_IgG1_PVA_/S267K Heavy Chain
EVKLEESGGGLVQPGGSMKLSCAASGFTFSDAWMDWVRQSPEKGLEWVAEIRTRANNHATYYAESVKGRFTISRDDSKSSVYLQMNSLRAEDTGIYYCTRLANWDWYFDVWGAGTTVTVSSASTKGPSVFPLAPSSKSTSGGTAALGCLVKDYFPEPVTVSWNSGALTSGVHTFPAVLQSSGLYSLSSVVTVPSSSLGTQTYICNVNHKPSDTKVDKKVEPKSCDKTHTCPPCPAPPVAGPSVFLFPPKPKDTLMISRTPEVTCVVVDVKHEDPEVKFNWYVDGVEVHNAKTKPREEEYNSTYRVVSVLTVLHQDWLNGKEYKCKVSNKALPAPIEKTISKAKGQPREPQVYTLPPSREEMTKNQVSLTCDVSGFYPSDIAVEWESDGQPENNYKTTPPVLDSDGSFFLYSKLTVDKSRWEQGDVFSCSVMHEALHNHYTQKSLSLSPGK

SEQ ID NO: 18656 - protein, 121 aa, Artificial Sequence
  Description of Artificial Sequence: Synthetic polypeptide
  VH of XENP020493
EVKLEESGGGLVQPGGSMKLSCAASGFTFSDAWMDWVRQSPEKGLEWVAEIRTRANNHATYYAESVKGRFTISRDDSKSSVYLQMNSLRAEDTGIYYCTRLANWDWYFDVWGAGTTVTVSS

SEQ ID NO: 18657 - protein, 5 aa, Artificial Sequence
  Description of Artificial Sequence: Synthetic peptide
  XENP020493 vhCDR1
DAWMD

SEQ ID NO: 18658 - protein, 19 aa, Artificial Sequence
  Description of Artificial Sequence: Synthetic peptide
  XENP020493 vhCDR2
EIRTRANNHATYYAESVKG

SEQ ID NO: 18659 - protein, 10 aa, Artificial Sequence
  Description of Artificial Sequence: Synthetic peptide
  XENP020493 vhCDR3
LANWDWYFDV

SEQ ID NO: 18660 - protein, 218 aa, Artificial Sequence; identical to SEQ ID NO: 17590
  Description of Artificial Sequence: Synthetic polypeptide
  XENP020493 7G8_H0.45_L0_IgG1_PVA_/S267K Light Chain

SEQ ID NO: 18661 - protein, 111 aa, Artificial Sequence; identical to SEQ ID NO: 17591
  Description of Artificial Sequence: Synthetic polypeptide
  VL of XENP020493

SEQ ID NO: 18662 - protein, 15 aa, Artificial Sequence
  Description of Artificial Sequence: Synthetic peptide
  XENP020493 vlCDR1
KASQSVDYDGDSYMN

SEQ ID NO: 18663 - protein, 7 aa, Artificial Sequence
  Description of Artificial Sequence: Synthetic peptide
  XENP020493 vlCDR2
AASNLES

SEQ ID NO: 18664 - protein, 9 aa, Artificial Sequence
  Description of Artificial Sequence: Synthetic peptide
  XENP020493 vlCDR3
QQSNEDPFT

SEQ ID NO: 18665 - protein, 450 aa, Artificial Sequence
  Description of Artificial Sequence: Synthetic polypeptide
  XENP020494 7G8_H0.46_L0_IgG1_PVA_/S267K Heavy Chain
EVKLEESGGGLVQPGGSMKLSCAASGFTFSDAWMDWVRQSPEKGLEWVAEIRTEANNHATYYAESVKGRFTISRDDSKSSVYLQMNSLRAEDTGIYYCTRLANWDWYFDVWGAGTTVTVSSASTKGPSVFPLAPSSKSTSGGTAALGCLVKDYFPEPVTVSWNSGALTSGVHTFPAVLQSSGLYSLSSVVTVPSSSLGTQTYICNVNHKPSDTKVDKKVEPKSCDKTHTCPPCPAPPVAGPSVFLFPPKPKDTLMISRTPEVTCVVVDVKHEDPEVKFNWYVDGVEVHNAKTKPREEEYNSTYRVVSVLTVLHQDWLNGKEYKCKVSNKALPAPIEKTISKAKGQPREPQVYTLPPSREEMTKNQVSLTCDVSGFYPSDIAVEWESDGQPENNYKTTPPVLDSDGSFFLYSKLTVDKSRWEQGDVFSCSVMHEALHNHYTQKSLSLSPGK

SEQ ID NO: 18666 - protein, 121 aa, Artificial Sequence
  Description of Artificial Sequence: Synthetic polypeptide
  VH of XENP020494
EVKLEESGGGLVQPGGSMKLSCAASGFTFSDAWMDWVRQSPEKGLEWVAEIRTEANNHATYYAESVKGRFTISRDDSKSSVYLQMNSLRAEDTGIYYCTRLANWDWYFDVWGAGTTVTVSS

SEQ ID NO: 18667 - protein, 5 aa, Artificial Sequence
  Description of Artificial Sequence: Synthetic peptide
  XENP020494 vhCDR1
DAWMD

SEQ ID NO: 18668 - protein, 19 aa, Artificial Sequence
  Description of Artificial Sequence: Synthetic peptide
  XENP020494 vhCDR2
EIRTEANNHATYYAESVKG

SEQ ID NO: 18669 - protein, 10 aa, Artificial Sequence
  Description of Artificial Sequence: Synthetic peptide
  XENP020494 vhCDR3
LANWDWYFDV

SEQ ID NO: 18670 - protein, 218 aa, Artificial Sequence; identical to SEQ ID NO: 17590
  Description of Artificial Sequence: Synthetic polypeptide
  XENP020494 7G8_H0.46_L0_IgG1_PVA_/S267K Light Chain

SEQ ID NO: 18671 - protein, 111 aa, Artificial Sequence; identical to SEQ ID NO: 17591
  Description of Artificial Sequence: Synthetic polypeptide
  VL of XENP020494

SEQ ID NO: 18672 - protein, 15 aa, Artificial Sequence
  Description of Artificial Sequence: Synthetic peptide
  XENP020494 vlCDR1
KASQSVDYDGDSYMN

SEQ ID NO: 18673 - protein, 7 aa, Artificial Sequence
  Description of Artificial Sequence: Synthetic peptide
  XENP020494 vlCDR2
AASNLES

SEQ ID NO: 18674 - protein, 9 aa, Artificial Sequence
  Description of Artificial Sequence: Synthetic peptide
  XENP020494 vlCDR3
QQSNEDPFT

SEQ ID NO: 18675 - protein, 450 aa, Artificial Sequence
  Description of Artificial Sequence: Synthetic polypeptide
  XENP020495 7G8_H0.47_L0_IgG1_PVA_/S267K Heavy Chain
EVKLEESGGGLVQPGGSMKLSCAASGFTFSDAWMDWVRQSPEKGLEWVAEIRTHANNHATYYAESVKGRFTISRDDSKSSVYLQMNSLRAEDTGIYYCTRLANWDWYFDVWGAGTTVTVSSASTKGPSVFPLAPSSKSTSGGTAALGCLVKDYFPEPVTVSWNSGALTSGVHTFPAVLQSSGLYSLSSVVTVPSSSLGTQTYICNVNHKPSDTKVDKKVEPKSCDKTHTCPPCPAPPVAGPSVFLFPPKPKDTLMISRTPEVTCVVVDVKHEDPEVKFNWYVDGVEVHNAKTKPREEEYNSTYRVVSVLTVLHQDWLNGKEYKCKVSNKALPAPIEKTISKAKGQPREPQVYTLPPSREEMTKNQVSLTCDVSGFYPSDIAVEWESDGQPENNYKTTPPVLDSDGSFFLYSKLTVDKSRWEQGDVFSCSVMHEALHNHYTQKSLSLSPGK

SEQ ID NO: 18676 - protein, 121 aa, Artificial Sequence
  Description of Artificial Sequence: Synthetic polypeptide
  VH of XENP020495
EVKLEESGGGLVQPGGSMKLSCAASGFTFSDAWMDWVRQSPEKGLEWVAEIRTHANNHATYYAESVKGRFTISRDDSKSSVYLQMNSLRAEDTGIYYCTRLANWDWYFDVWGAGTTVTVSS

SEQ ID NO: 18677 - protein, 5 aa, Artificial Sequence
  Description of Artificial Sequence: Synthetic peptide
  XENP020495 vhCDR1
DAWMD

SEQ ID NO: 18678 - protein, 19 aa, Artificial Sequence
  Description of Artificial Sequence: Synthetic peptide
  XENP020495 vhCDR2
EIRTHANNHATYYAESVKG

SEQ ID NO: 18679 - protein, 10 aa, Artificial Sequence
  Description of Artificial Sequence: Synthetic peptide
  XENP020495 vhCDR3
LANWDWYFDV

SEQ ID NO: 18680 - protein, 218 aa, Artificial Sequence; identical to SEQ ID NO: 17590
  Description of Artificial Sequence: Synthetic polypeptide
  XENP020495 7G8_H0.47_L0_IgG1_PVA_/S267K Light Chain

SEQ ID NO: 18681 - protein, 111 aa, Artificial Sequence; identical to SEQ ID NO: 17591
  Description of Artificial Sequence: Synthetic polypeptide
  VL of XENP020495

SEQ ID NO: 18682 - protein, 15 aa, Artificial Sequence
  Description of Artificial Sequence: Synthetic peptide
  XENP020495 vlCDR1
KASQSVDYDGDSYMN

SEQ ID NO: 18683 - protein, 7 aa, Artificial Sequence
  Description of Artificial Sequence: Synthetic peptide
  XENP020495 vlCDR2
AASNLES

SEQ ID NO: 18684 - protein, 9 aa, Artificial Sequence
  Description of Artificial Sequence: Synthetic peptide
  XENP020495 vlCDR3
QQSNEDPFT

SEQ ID NO: 18685 - protein, 450 aa, Artificial Sequence
  Description of Artificial Sequence: Synthetic polypeptide
  XENP020496 7G8_H0.48_L0_IgG1_PVA_/S267K Heavy Chain
EVKLEESGGGLVQPGGSMKLSCAASGFTFSDAWMDWVRQSPEKGLEWVAEIRTSANNHATYYAESVKGRFTISRDDSKSSVYLQMNSLRAEDTGIYYCTRLANWDWYFDVWGAGTTVTVSSASTKGPSVFPLAPSSKSTSGGTAALGCLVKDYFPEPVTVSWNSGALTSGVHTFPAVLQSSGLYSLSSVVTVPSSSLGTQTYICNVNHKPSDTKVDKKVEPKSCDKTHTCPPCPAPPVAGPSVFLFPPKPKDTLMISRTPEVTCVVVDVKHEDPEVKFNWYVDGVEVHNAKTKPREEEYNSTYRVVSVLTVLHQDWLNGKEYKCKVSNKALPAPIEKTISKAKGQPREPQVYTLPPSREEMTKNQVSLTCDVSGFYPSDIAVEWESDGQPENNYKTTPPVLDSDGSFFLYSKLTVDKSRWEQGDVFSCSVMHEALHNHYTQKSLSLSPGK

SEQ ID NO: 18686 - protein, 121 aa, Artificial Sequence
  Description of Artificial Sequence: Synthetic polypeptide
  VH of XENP020496
EVKLEESGGGLVQPGGSMKLSCAASGFTFSDAWMDWVRQSPEKGLEWVAEIRTSANNHATYYAESVKGRFTISRDDSKSSVYLQMNSLRAEDTGIYYCTRLANWDWYFDVWGAGTTVTVSS

SEQ ID NO: 18687 - protein, 5 aa, Artificial Sequence
  Description of Artificial Sequence: Synthetic peptide
  XENP020496 vhCDR1
DAWMD

SEQ ID NO: 18688 - protein, 19 aa, Artificial Sequence
  Description of Artificial Sequence: Synthetic peptide
  XENP020496 vhCDR2
EIRTSANNHATYYAESVKG

SEQ ID NO: 18689 - protein, 10 aa, Artificial Sequence
  Description of Artificial Sequence: Synthetic peptide
  XENP020496 vhCDR3
LANWDWYFDV

SEQ ID NO: 18690 - protein, 218 aa, Artificial Sequence; identical to SEQ ID NO: 17590
  Description of Artificial Sequence: Synthetic polypeptide
  XENP020496 7G8_H0.48_L0_IgG1_PVA_/S267K Light Chain

SEQ ID NO: 18691 - protein, 111 aa, Artificial Sequence; identical to SEQ ID NO: 17591
  Description of Artificial Sequence: Synthetic polypeptide
  VL of XENP020496

SEQ ID NO: 18692 - protein, 15 aa, Artificial Sequence
  Description of Artificial Sequence: Synthetic peptide
  XENP020496 vlCDR1
KASQSVDYDGDSYMN

SEQ ID NO: 18693 - protein, 7 aa, Artificial Sequence
  Description of Artificial Sequence: Synthetic peptide
  XENP020496 vlCDR2
AASNLES

SEQ ID NO: 18694 - protein, 9 aa, Artificial Sequence
  Description of Artificial Sequence: Synthetic peptide
  XENP020496 vlCDR3
QQSNEDPFT

SEQ ID NO: 18695 - protein, 450 aa, Artificial Sequence
  Description of Artificial Sequence: Synthetic polypeptide
  XENP020501 7G8_H0.49_L0_IgG1_PVA_/S267K Heavy Chain
EVKLEESGGGLVQPGGSMKLSCAASGFTFSDAWMDWVRQSPEKGLEWVAEIRTDANNHATYYAESVKGRFTISRDDSKSSVYLQMNSLRAEDTGIYYCTRLANWDWYFDVWGAGTTVTVSSASTKGPSVFPLAPSSKSTSGGTAALGCLVKDYFPEPVTVSWNSGALTSGVHTFPAVLQSSGLYSLSSVVTVPSSSLGTQTYICNVNHKPSDTKVDKKVEPKSCDKTHTCPPCPAPPVAGPSVFLFPPKPKDTLMISRTPEVTCVVVDVKHEDPEVKFNWYVDGVEVHNAKTKPREEEYNSTYRVVSVLTVLHQDWLNGKEYKCKVSNKALPAPIEKTISKAKGQPREPQVYTLPPSREEMTKNQVSLTCDVSGFYPSDIAVEWESDGQPENNYKTTPPVLDSDGSFFLYSKLTVDKSRWEQGDVFSCSVMHEALHNHYTQKSLSLSPGK

SEQ ID NO: 18696 - protein, 121 aa, Artificial Sequence
  Description of Artificial Sequence: Synthetic polypeptide
  VH of XENP020501
EVKLEESGGGLVQPGGSMKLSCAASGFTFSDAWMDWVRQSPEKGLEWVAEIRTDANNHATYYAESVKGRFTISRDDSKSSVYLQMNSLRAEDTGIYYCTRLANWDWYFDVWGAGTTVTVSS

SEQ ID NO: 18697 - protein, 5 aa, Artificial Sequence
  Description of Artificial Sequence: Synthetic peptide
  XENP020501 vhCDR1
DAWMD

SEQ ID NO: 18698 - protein, 19 aa, Artificial Sequence
  Description of Artificial Sequence: Synthetic peptide
  XENP020501 vhCDR2
EIRTDANNHATYYAESVKG

SEQ ID NO: 18699 - protein, 10 aa, Artificial Sequence
  Description of Artificial Sequence: Synthetic peptide
  XENP020501 vhCDR3
LANWDWYFDV

SEQ ID NO: 18700 - protein, 218 aa, Artificial Sequence; identical to SEQ ID NO: 17590
  Description of Artificial Sequence: Synthetic polypeptide
  XENP020501 7G8_H0.49_L0_IgG1_PVA_/S267K Light Chain

SEQ ID NO: 18701 - protein, 111 aa, Artificial Sequence; identical to SEQ ID NO: 17591
  Description of Artificial Sequence: Synthetic polypeptide
  VL of XENP020501

SEQ ID NO: 18702 - protein, 15 aa, Artificial Sequence
  Description of Artificial Sequence: Synthetic peptide
  XENP020501 vlCDR1
KASQSVDYDGDSYMN

SEQ ID NO: 18703 - protein, 7 aa, Artificial Sequence
  Description of Artificial Sequence: Synthetic peptide
  XENP020501 vlCDR2
AASNLES

SEQ ID NO: 18704 - protein, 9 aa, Artificial Sequence
  Description of Artificial Sequence: Synthetic peptide
  XENP020501 vlCDR3
QQSNEDPFT

SEQ ID NO: 18705 - protein, 450 aa, Artificial Sequence
  Description of Artificial Sequence: Synthetic polypeptide
  XENP020502 7G8_H0.50_L0_IgG1_PVA_/S267K Heavy Chain
EVKLEESGGGLVQPGGSMKLSCAASGFTFSDAWMDWVRQSPEKGLEWVAEIRTAANNHATYYAESVKGRFTISRDDSKSSVYLQMNSLRAEDTGIYYCTRLANWDWYFDVWGAGTTVTVSSASTKGPSVFPLAPSSKSTSGGTAALGCLVKDYFPEPVTVSWNSGALTSGVHTFPAVLQSSGLYSLSSVVTVPSSSLGTQTYICNVNHKPSDTKVDKKVEPKSCDKTHTCPPCPAPPVAGPSVFLFPPKPKDTLMISRTPEVTCVVVDVKHEDPEVKFNWYVDGVEVHNAKTKPREEEYNSTYRVVSVLTVLHQDWLNGKEYKCKVSNKALPAPIEKTISKAKGQPREPQVYTLPPSREEMTKNQVSLTCDVSGFYPSDIAVEWESDGQPENNYKTTPPVLDSDGSFFLYSKLTVDKSRWEQGDVFSCSVMHEALHNHYTQKSLSLSPGK

SEQ ID NO: 18706 - protein, 121 aa, Artificial Sequence
  Description of Artificial Sequence: Synthetic polypeptide
  VH of XENP020502
EVKLEESGGGLVQPGGSMKLSCAASGFTFSDAWMDWVRQSPEKGLEWVAEIRTAANNHATYYAESVKGRFTISRDDSKSSVYLQMNSLRAEDTGIYYCTRLANWDWYFDVWGAGTTVTVSS

SEQ ID NO: 18707 - protein, 5 aa, Artificial Sequence
  Description of Artificial Sequence: Synthetic peptide
  XENP020502 vhCDR1
DAWMD

SEQ ID NO: 18708 - protein, 19 aa, Artificial Sequence
  Description of Artificial Sequence: Synthetic peptide
  XENP020502 vhCDR2
EIRTAANNHATYYAESVKG

SEQ ID NO: 18709 - protein, 10 aa, Artificial Sequence
  Description of Artificial Sequence: Synthetic peptide
  XENP020502 vhCDR3
LANWDWYFDV

SEQ ID NO: 18710 - protein, 218 aa, Artificial Sequence; identical to SEQ ID NO: 17590
  Description of Artificial Sequence: Synthetic polypeptide
  XENP020502 7G8_H0.50_L0_IgG1_PVA_/S267K Light Chain

SEQ ID NO: 18711 - protein, 111 aa, Artificial Sequence; identical to SEQ ID NO: 17591
  Description of Artificial Sequence: Synthetic polypeptide
  VL of XENP020502

SEQ ID NO: 18712 - protein, 15 aa, Artificial Sequence
  Description of Artificial Sequence: Synthetic peptide
  XENP020502 vlCDR1
KASQSVDYDGDSYMN

SEQ ID NO: 18713 - protein, 7 aa, Artificial Sequence
  Description of Artificial Sequence: Synthetic peptide
  XENP020502 vlCDR2
AASNLES

SEQ ID NO: 18714 - protein, 9 aa, Artificial Sequence
  Description of Artificial Sequence: Synthetic peptide
  XENP020502 vlCDR3
QQSNEDPFT

SEQ ID NO: 18715 - protein, 450 aa, Artificial Sequence
  Description of Artificial Sequence: Synthetic polypeptide
  XENP020503 7G8_H0.51_L0_IgG1_PVA_/S267K Heavy Chain
EVKLEESGGGLVQPGGSMKLSCAASGFTFSDAWMDWVRQSPEKGLEWVAEIRTGANNHATYYAESVKGRFTISRDDSKSSVYLQMNSLRAEDTGIYYCTRLANWDWYFDVWGAGTTVTVSSASTKGPSVFPLAPSSKSTSGGTAALGCLVKDYFPEPVTVSWNSGALTSGVHTFPAVLQSSGLYSLSSVVTVPSSSLGTQTYICNVNHKPSDTKVDKKVEPKSCDKTHTCPPCPAPPVAGPSVFLFPPKPKDTLMISRTPEVTCVVVDVKHEDPEVKFNWYVDGVEVHNAKTKPREEEYNSTYRVVSVLTVLHQDWLNGKEYKCKVSNKALPAPIEKTISKAKGQPREPQVYTLPPSREEMTKNQVSLTCDVSGFYPSDIAVEWESDGQPENNYKTTPPVLDSDGSFFLYSKLTVDKSRWEQGDVFSCSVMHEALHNHYTQKSLSLSPGK

SEQ ID NO: 18716 - protein, 121 aa, Artificial Sequence
  Description of Artificial Sequence: Synthetic polypeptide
  VH of XENP020503
EVKLEESGGGLVQPGGSMKLSCAASGFTFSDAWMDWVRQSPEKGLEWVAEIRTGANNHATYYAESVKGRFTISRDDSKSSVYLQMNSLRAEDTGIYYCTRLANWDWYFDVWGAGTTVTVSS

SEQ ID NO: 18717 - protein, 5 aa, Artificial Sequence
  Description of Artificial Sequence: Synthetic peptide
  XENP020503 vhCDR1
DAWMD

SEQ ID NO: 18718 - protein, 19 aa, Artificial Sequence
  Description of Artificial Sequence: Synthetic peptide
  XENP020503 vhCDR2
EIRTGANNHATYYAESVKG

SEQ ID NO: 18719 - protein, 10 aa, Artificial Sequence
  Description of Artificial Sequence: Synthetic peptide
  XENP020503 vhCDR3
LANWDWYFDV

SEQ ID NO: 18720 - protein, 218 aa, Artificial Sequence; identical to SEQ ID NO: 17590
  Description of Artificial Sequence: Synthetic polypeptide
  XENP020503 7G8_H0.51_L0_IgG1_PVA_/S267K Light Chain

SEQ ID NO: 18721 - protein, 111 aa, Artificial Sequence; identical to SEQ ID NO: 17591
  Description of Artificial Sequence: Synthetic polypeptide
  VL of XENP020503

SEQ ID NO: 18722 - protein, 15 aa, Artificial Sequence
  Description of Artificial Sequence: Synthetic peptide
  XENP020503 vlCDR1
KASQSVDYDGDSYMN

SEQ ID NO: 18723 - protein, 7 aa, Artificial Sequence
  Description of Artificial Sequence: Synthetic peptide
  XENP020503 vlCDR2
AASNLES

SEQ ID NO: 18724 - protein, 9 aa, Artificial Sequence
  Description of Artificial Sequence: Synthetic peptide
  XENP020503 vlCDR3
QQSNEDPFT

SEQ ID NO: 18725 - protein, 450 aa, Artificial Sequence
  Description of Artificial Sequence: Synthetic polypeptide
  XENP020504 7G8_H0.52_L0_IgG1_PVA_/S267K Heavy Chain
EVKLEESGGGLVQPGGSMKLSCAASGFTFSDAWMDWVRQSPEKGLEWVAEIRTYANNHATYYAESVKGRFTISRDDSKSSVYLQMNSLRAEDTGIYYCTRLANWDWYFDVWGAGTTVTVSSASTKGPSVFPLAPSSKSTSGGTAALGCLVKDYFPEPVTVSWNSGALTSGVHTFPAVLQSSGLYSLSSVVTVPSSSLGTQTYICNVNHKPSDTKVDKKVEPKSCDKTHTCPPCPAPPVAGPSVFLFPPKPKDTLMISRTPEVTCVVVDVKHEDPEVKFNWYVDGVEVHNAKTKPREEEYNSTYRVVSVLTVLHQDWLNGKEYKCKVSNKALPAPIEKTISKAKGQPREPQVYTLPPSREEMTKNQVSLTCDVSGFYPSDIAVEWESDGQPENNYKTTPPVLDSDGSFFLYSKLTVDKSRWEQGDVFSCSVMHEALHNHYTQKSLSLSPGK

SEQ ID NO: 18726 - protein, 121 aa, Artificial Sequence
  Description of Artificial Sequence: Synthetic polypeptide
  VH of XENP020504
EVKLEESGGGLVQPGGSMKLSCAASGFTFSDAWMDWVRQSPEKGLEWVAEIRTYANNHATYYAESVKGRFTISRDDSKSSVYLQMNSLRAEDTGIYYCTRLANWDWYFDVWGAGTTVTVSS

SEQ ID NO: 18727 - protein, 5 aa, Artificial Sequence
  Description of Artificial Sequence: Synthetic peptide
  XENP020504 vhCDR1
DAWMD

SEQ ID NO: 18728 - protein, 19 aa, Artificial Sequence
  Description of Artificial Sequence: Synthetic peptide
  XENP020504 vhCDR2
EIRTYANNHATYYAESVKG

SEQ ID NO: 18729 - protein, 10 aa, Artificial Sequence
  Description of Artificial Sequence: Synthetic peptide
  XENP020504 vhCDR3
LANWDWYFDV

SEQ ID NO: 18730 - protein, 218 aa, Artificial Sequence; identical to SEQ ID NO: 17590
  Description of Artificial Sequence: Synthetic polypeptide
  XENP020504 7G8_H0.52_L0_IgG1_PVA_/S267K Light Chain

SEQ ID NO: 18731 - protein, 111 aa, Artificial Sequence; identical to SEQ ID NO: 17591
  Description of Artificial Sequence: Synthetic polypeptide
  VL of XENP020504

SEQ ID NO: 18732 - protein, 15 aa, Artificial Sequence
  Description of Artificial Sequence: Synthetic peptide
  XENP020504 vlCDR1
KASQSVDYDGDSYMN

SEQ ID NO: 18733 - protein, 7 aa, Artificial Sequence
  Description of Artificial Sequence: Synthetic peptide
  XENP020504 vlCDR2
AASNLES

SEQ ID NO: 18734 - protein, 9 aa, Artificial Sequence
  Description of Artificial Sequence: Synthetic peptide
  XENP020504 vlCDR3
QQSNEDPFT

SEQ ID NO: 18735 - protein, 450 aa, Artificial Sequence
  Description of Artificial Sequence: Synthetic polypeptide
  XENP020505 7G8_H0.53_L0_IgG1_PVA_/S267K Heavy Chain
EVKLEESGGGLVQPGGSMKLSCAASGFTFSDAWMDWVRQSPEKGLEWVAEIRTIANNHATYYAESVKGRFTISRDDSKSSVYLQMNSLRAEDTGIYYCTRLANWDWYFDVWGAGTTVTVSSASTKGPSVFPLAPSSKSTSGGTAALGCLVKDYFPEPVTVSWNSGALTSGVHTFPAVLQSSGLYSLSSVVTVPSSSLGTQTYICNVNHKPSDTKVDKKVEPKSCDKTHTCPPCPAPPVAGPSVFLFPPKPKDTLMISRTPEVTCVVVDVKHEDPEVKFNWYVDGVEVHNAKTKPREEEYNSTYRVVSVLTVLHQDWLNGKEYKCKVSNKALPAPIEKTISKAKGQPREPQVYTLPPSREEMTKNQVSLTCDVSGFYPSDIAVEWESDGQPENNYKTTPPVLDSDGSFFLYSKLTVDKSRWEQGDVFSCSVMHEALHNHYTQKSLSLSPGK

SEQ ID NO: 18736 - protein, 121 aa, Artificial Sequence
  Description of Artificial Sequence: Synthetic polypeptide
  VH of XENP020505
EVKLEESGGGLVQPGGSMKLSCAASGFTFSDAWMDWVRQSPEKGLEWVAEIRTIANNHATYYAESVKGRFTISRDDSKSSVYLQMNSLRAEDTGIYYCTRLANWDWYFDVWGAGTTVTVSS

SEQ ID NO: 18737 - protein, 5 aa, Artificial Sequence
  Description of Artificial Sequence: Synthetic peptide
  XENP020505 vhCDR1
DAWMD

SEQ ID NO: 18738 - protein, 19 aa, Artificial Sequence
  Description of Artificial Sequence: Synthetic peptide
  XENP020505 vhCDR2
EIRTIANNHATYYAESVKG

SEQ ID NO: 18739 - protein, 10 aa, Artificial Sequence
  Description of Artificial Sequence: Synthetic peptide
  XENP020505 vhCDR3
LANWDWYFDV

SEQ ID NO: 18740 - protein, 218 aa, Artificial Sequence; identical to SEQ ID NO: 17590
  Description of Artificial Sequence: Synthetic polypeptide
  XENP020505 7G8_H0.53_L0_IgG1_PVA_/S267K Light Chain

SEQ ID NO: 18741 - protein, 111 aa, Artificial Sequence; identical to SEQ ID NO: 17591
  Description of Artificial Sequence: Synthetic polypeptide
  VL of XENP020505

SEQ ID NO: 18742 - protein, 15 aa, Artificial Sequence
  Description of Artificial Sequence: Synthetic peptide
  XENP020505 vlCDR1
KASQSVDYDGDSYMN

SEQ ID NO: 18743 - protein, 7 aa, Artificial Sequence
  Description of Artificial Sequence: Synthetic peptide
  XENP020505 vlCDR2
AASNLES

SEQ ID NO: 18744 - protein, 9 aa, Artificial Sequence
  Description of Artificial Sequence: Synthetic peptide
  XENP020505 vlCDR3
QQSNEDPFT

SEQ ID NO: 18745 - protein, 450 aa, Artificial Sequence
  Description of Artificial Sequence: Synthetic polypeptide
  XENP020506 7G8_H0.54_L0_IgG1_PVA_/S267K Heavy Chain
EVKLEESGGGLVQPGGSMKLSCAASGFTFSDAWMDWVRQSPEKGLEWVAEIRTKSNNHATYYAESVKGRFTISRDDSKSSVYLQMNSLRAEDTGIYYCTRLANWDWYFDVWGAGTTVTVSSASTKGPSVFPLAPSSKSTSGGTAALGCLVKDYFPEPVTVSWNSGALTSGVHTFPAVLQSSGLYSLSSVVTVPSSSLGTQTYICNVNHKPSDTKVDKKVEPKSCDKTHTCPPCPAPPVAGPSVFLFPPKPKDTLMISRTPEVTCVVVDVKHEDPEVKFNWYVDGVEVHNAKTKPREEEYNSTYRVVSVLTVLHQDWLNGKEYKCKVSNKALPAPIEKTISKAKGQPREPQVYTLPPSREEMTKNQVSLTCDVSGFYPSDIAVEWESDGQPENNYKTTPPVLDSDGSFFLYSKLTVDKSRWEQGDVFSCSVMHEALHNHYTQKSLSLSPGK

SEQ ID NO: 18746 - protein, 121 aa, Artificial Sequence
  Description of Artificial Sequence: Synthetic polypeptide
  VH of XENP020506
EVKLEESGGGLVQPGGSMKLSCAASGFTFSDAWMDWVRQSPEKGLEWVAEIRTKSNNHATYYAESVKGRFTISRDDSKSSVYLQMNSLRAEDTGIYYCTRLANWDWYFDVWGAGTTVTVSS

SEQ ID NO: 18747 - protein, 5 aa, Artificial Sequence
  Description of Artificial Sequence: Synthetic peptide
  XENP020506 vhCDR1
DAWMD

SEQ ID NO: 18748 - protein, 19 aa, Artificial Sequence
  Description of Artificial Sequence: Synthetic peptide
  XENP020506 vhCDR2
EIRTKSNNHATYYAESVKG

SEQ ID NO: 18749 - protein, 10 aa, Artificial Sequence
  Description of Artificial Sequence: Synthetic peptide
  XENP020506 vhCDR3
LANWDWYFDV

SEQ ID NO: 18750 - protein, 218 aa, Artificial Sequence; identical to SEQ ID NO: 17590
  Description of Artificial Sequence: Synthetic polypeptide
  XENP020506 7G8_H0.54_L0_IgG1_PVA_/S267K Light Chain

SEQ ID NO: 18751 - protein, 111 aa, Artificial Sequence; identical to SEQ ID NO: 17591
  Description of Artificial Sequence: Synthetic polypeptide
  VL of XENP020506

SEQ ID NO: 18752 - protein, 15 aa, Artificial Sequence
  Description of Artificial Sequence: Synthetic peptide
  XENP020506 vlCDR1
KASQSVDYDGDSYMN

SEQ ID NO: 18753 - protein, 7 aa, Artificial Sequence
  Description of Artificial Sequence: Synthetic peptide
  XENP020506 vlCDR2
AASNLES

SEQ ID NO: 18754 - protein, 9 aa, Artificial Sequence
  Description of Artificial Sequence: Synthetic peptide
  XENP020506 vlCDR3
QQSNEDPFT

SEQ ID NO: 18755 - protein, 450 aa, Artificial Sequence
  Description of Artificial Sequence: Synthetic polypeptide
  XENP020507 7G8_H0.55_L0_IgG1_PVA_/S267K Heavy Chain
EVKLEESGGGLVQPGGSMKLSCAASGFTFSDAWMDWVRQSPEKGLEWVAEIRTKTNNHATYYAESVKGRFTISRDDSKSSVYLQMNSLRAEDTGIYYCTRLANWDWYFDVWGAGTTVTVSSASTKGPSVFPLAPSSKSTSGGTAALGCLVKDYFPEPVTVSWNSGALTSGVHTFPAVLQSSGLYSLSSVVTVPSSSLGTQTYICNVNHKPSDTKVDKKVEPKSCDKTHTCPPCPAPPVAGPSVFLFPPKPKDTLMISRTPEVTCVVVDVKHEDPEVKFNWYVDGVEVHNAKTKPREEEYNSTYRVVSVLTVLHQDWLNGKEYKCKVSNKALPAPIEKTISKAKGQPREPQVYTLPPSREEMTKNQVSLTCDVSGFYPSDIAVEWESDGQPENNYKTTPPVLDSDGSFFLYSKLTVDKSRWEQGDVFSCSVMHEALHNHYTQKSLSLSPGK

SEQ ID NO: 18756 - protein, 121 aa, Artificial Sequence
  Description of Artificial Sequence: Synthetic polypeptide
  VH of XENP020507
EVKLEESGGGLVQPGGSMKLSCAASGFTFSDAWMDWVRQSPEKGLEWVAEIRTKTNNHATYYAESVKGRFTISRDDSKSSVYLQMNSLRAEDTGIYYCTRLANWDWYFDVWGAGTTVTVSS

SEQ ID NO: 18757 - protein, 5 aa, Artificial Sequence
  Description of Artificial Sequence: Synthetic peptide
  XENP020507 vhCDR1
DAWMD

SEQ ID NO: 18758 - protein, 19 aa, Artificial Sequence
  Description of Artificial Sequence: Synthetic peptide
  XENP020507 vhCDR2
EIRTKTNNHATYYAESVKG

SEQ ID NO: 18759 - protein, 10 aa, Artificial Sequence
  Description of Artificial Sequence: Synthetic peptide
  XENP020507 vhCDR3
LANWDWYFDV

SEQ ID NO: 18760 - protein, 218 aa, Artificial Sequence; identical to SEQ ID NO: 17590
  Description of Artificial Sequence: Synthetic polypeptide
  XENP020507 7G8_H0.55_L0_IgG1_PVA_/S267K Light Chain

SEQ ID NO: 18761 - protein, 111 aa, Artificial Sequence; identical to SEQ ID NO: 17591
  Description of Artificial Sequence: Synthetic polypeptide
  VL of XENP020507

SEQ ID NO: 18762 - protein, 15 aa, Artificial Sequence
  Description of Artificial Sequence: Synthetic peptide
  XENP020507 vlCDR1
KASQSVDYDGDSYMN

SEQ ID NO: 18763 - protein, 7 aa, Artificial Sequence
  Description of Artificial Sequence: Synthetic peptide
  XENP020507 vlCDR2
AASNLES

SEQ ID NO: 18764 - protein, 9 aa, Artificial Sequence
  Description of Artificial Sequence: Synthetic peptide
  XENP020507 vlCDR3
QQSNEDPFT

SEQ ID NO: 18765 - protein, 450 aa, Artificial Sequence
  Description of Artificial Sequence: Synthetic polypeptide
  XENP020508 7G8_H0.56_L0_IgG1_PVA_/S267K Heavy Chain
EVKLEESGGGLVQPGGSMKLSCAASGFTFSDAWMDWVRQSPEKGLEWVAEIRTKGNNHATYYAESVKGRFTISRDDSKSSVYLQMNSLRAEDTGIYYCTRLANWDWYFDVWGAGTTVTVSSASTKGPSVFPLAPSSKSTSGGTAALGCLVKDYFPEPVTVSWNSGALTSGVHTFPAVLQSSGLYSLSSVVTVPSSSLGTQTYICNVNHKPSDTKVDKKVEPKSCDKTHTCPPCPAPPVAGPSVFLFPPKPKDTLMISRTPEVTCVVVDVKHEDPEVKFNWYVDGVEVHNAKTKPREEEYNSTYRVVSVLTVLHQDWLNGKEYKCKVSNKALPAPIEKTISKAKGQPREPQVYTLPPSREEMTKNQVSLTCDVSGFYPSDIAVEWESDGQPENNYKTTPPVLDSDGSFFLYSKLTVDKSRWEQGDVFSCSVMHEALHNHYTQKSLSLSPGK

SEQ ID NO: 18766 - protein, 121 aa, Artificial Sequence
  Description of Artificial Sequence: Synthetic polypeptide
  VH of XENP020508
EVKLEESGGGLVQPGGSMKLSCAASGFTFSDAWMDWVRQSPEKGLEWVAEIRTKGNNHATYYAESVKGRFTISRDDSKSSVYLQMNSLRAEDTGIYYCTRLANWDWYFDVWGAGTTVTVSS

SEQ ID NO: 18767 - protein, 5 aa, Artificial Sequence
  Description of Artificial Sequence: Synthetic peptide
  XENP020508 vhCDR1
DAWMD

SEQ ID NO: 18768 - protein, 19 aa, Artificial Sequence
  Description of Artificial Sequence: Synthetic peptide
  XENP020508 vhCDR2
EIRTKGNNHATYYAESVKG

SEQ ID NO: 18769 - protein, 10 aa, Artificial Sequence
  Description of Artificial Sequence: Synthetic peptide
  XENP020508 vhCDR3
LANWDWYFDV

SEQ ID NO: 18770 - protein, 218 aa, Artificial Sequence; identical to SEQ ID NO: 17590
  Description of Artificial Sequence: Synthetic polypeptide
  XENP020508 7G8_H0.56_L0_IgG1_PVA_/S267K Light Chain

SEQ ID NO: 18771 - protein, 111 aa, Artificial Sequence; identical to SEQ ID NO: 17591
  Description of Artificial Sequence: Synthetic polypeptide
  VL of XENP020508

SEQ ID NO: 18772 - protein, 15 aa, Artificial Sequence
  Description of Artificial Sequence: Synthetic peptide
  XENP020508 vlCDR1
KASQSVDYDGDSYMN

SEQ ID NO: 18773 - protein, 7 aa, Artificial Sequence
  Description of Artificial Sequence: Synthetic peptide
  XENP020508 vlCDR2
AASNLES

SEQ ID NO: 18774 - protein, 9 aa, Artificial Sequence
  Description of Artificial Sequence: Synthetic peptide
  XENP020508 vlCDR3
QQSNEDPFT

SEQ ID NO: 18775 - protein, 450 aa, Artificial Sequence
  Description of Artificial Sequence: Synthetic polypeptide
  XENP020509 7G8_H0.57_L0_IgG1_PVA_/S267K Heavy Chain
EVKLEESGGGLVQPGGSMKLSCAASGFTFSDAWMDWVRQSPEKGLEWVAEIRTKHNNHATYYAESVKGRFTISRDDSKSSVYLQMNSLRAEDTGIYYCTRLANWDWYFDVWGAGTTVTVSSASTKGPSVFPLAPSSKSTSGGTAALGCLVKDYFPEPVTVSWNSGALTSGVHTFPAVLQSSGLYSLSSVVTVPSSSLGTQTYICNVNHKPSDTKVDKKVEPKSCDKTHTCPPCPAPPVAGPSVFLFPPKPKDTLMISRTPEVTCVVVDVKHEDPEVKFNWYVDGVEVHNAKTKPREEEYNSTYRVVSVLTVLHQDWLNGKEYKCKVSNKALPAPIEKTISKAKGQPREPQVYTLPPSREEMTKNQVSLTCDVSGFYPSDIAVEWESDGQPENNYKTTPPVLDSDGSFFLYSKLTVDKSRWEQGDVFSCSVMHEALHNHYTQKSLSLSPGK

SEQ ID NO: 18776 - protein, 121 aa, Artificial Sequence
  Description of Artificial Sequence: Synthetic polypeptide
  VH of XENP020509
EVKLEESGGGLVQPGGSMKLSCAASGFTFSDAWMDWVRQSPEKGLEWVAEIRTKHNNHATYYAESVKGRFTISRDDSKSSVYLQMNSLRAEDTGIYYCTRLANWDWYFDVWGAGTTVTVSS

SEQ ID NO: 18777 - protein, 5 aa, Artificial Sequence
  Description of Artificial Sequence: Synthetic peptide
  XENP020509 vhCDR1
DAWMD

SEQ ID NO: 18778 - protein, 19 aa, Artificial Sequence
  Description of Artificial Sequence: Synthetic peptide
  XENP020509 vhCDR2
EIRTKHNNHATYYAESVKG

SEQ ID NO: 18779 - protein, 10 aa, Artificial Sequence
  Description of Artificial Sequence: Synthetic peptide
  XENP020509 vhCDR3
LANWDWYFDV

SEQ ID NO: 18780 - protein, 218 aa, Artificial Sequence; identical to SEQ ID NO: 17590
  Description of Artificial Sequence: Synthetic polypeptide
  XENP020509 7G8_H0.57_L0_IgG1_PVA_/S267K Light Chain

SEQ ID NO: 18781 - protein, 111 aa, Artificial Sequence; identical to SEQ ID NO: 17591
  Description of Artificial Sequence: Synthetic polypeptide
  VL of XENP020509

SEQ ID NO: 18782 - protein, 15 aa, Artificial Sequence
  Description of Artificial Sequence: Synthetic peptide
  XENP020509 vlCDR1
KASQSVDYDGDSYMN

SEQ ID NO: 18783 - protein, 7 aa, Artificial Sequence
  Description of Artificial Sequence: Synthetic peptide
  XENP020509 vlCDR2
AASNLES

SEQ ID NO: 18784 - protein, 9 aa, Artificial Sequence
  Description of Artificial Sequence: Synthetic peptide
  XENP020509 vlCDR3
QQSNEDPFT

SEQ ID NO: 18785 - protein, 450 aa, Artificial Sequence
  Description of Artificial Sequence: Synthetic polypeptide
  XENP020510 7G8_H0.58_L0_IgG1_PVA_/S267K Heavy Chain
EVKLEESGGGLVQPGGSMKLSCAASGFTFSDAWMDWVRQSPEKGLEWVAEIRTKQNNHATYYAESVKGRFTISRDDSKSSVYLQMNSLRAEDTGIYYCTRLANWDWYFDVWGAGTTVTVSSASTKGPSVFPLAPSSKSTSGGTAALGCLVKDYFPEPVTVSWNSGALTSGVHTFPAVLQSSGLYSLSSVVTVPSSSLGTQTYICNVNHKPSDTKVDKKVEPKSCDKTHTCPPCPAPPVAGPSVFLFPPKPKDTLMISRTPEVTCVVVDVKHEDPEVKFNWYVDGVEVHNAKTKPREEEYNSTYRVVSVLTVLHQDWLNGKEYKCKVSNKALPAPIEKTISKAKGQPREPQVYTLPPSREEMTKNQVSLTCDVSGFYPSDIAVEWESDGQPENNYKTTPPVLDSDGSFFLYSKLTVDKSRWEQGDVFSCSVMHEALHNHYTQKSLSLSPGK

SEQ ID NO: 18786 - protein, 121 aa, Artificial Sequence
  Description of Artificial Sequence: Synthetic polypeptide
  VH of XENP020510
EVKLEESGGGLVQPGGSMKLSCAASGFTFSDAWMDWVRQSPEKGLEWVAEIRTKQNNHATYYAESVKGRFTISRDDSKSSVYLQMNSLRAEDTGIYYCTRLANWDWYFDVWGAGTTVTVSS

SEQ ID NO: 18787 - protein, 5 aa, Artificial Sequence
  Description of Artificial Sequence: Synthetic peptide
  XENP020510 vhCDR1
DAWMD

SEQ ID NO: 18788 - protein, 19 aa, Artificial Sequence
  Description of Artificial Sequence: Synthetic peptide
  XENP020510 vhCDR2
EIRTKQNNHATYYAESVKG

SEQ ID NO: 18789 - protein, 10 aa, Artificial Sequence
  Description of Artificial Sequence: Synthetic peptide
  XENP020510 vhCDR3
LANWDWYFDV

SEQ ID NO: 18790 - protein, 218 aa, Artificial Sequence; identical to SEQ ID NO: 17590
  Description of Artificial Sequence: Synthetic polypeptide
  XENP020510 7G8_H0.58_L0_IgG1_PVA_/S267K Light Chain

SEQ ID NO: 18791 - protein, 111 aa, Artificial Sequence; identical to SEQ ID NO: 17591
  Description of Artificial Sequence: Synthetic polypeptide
  VL of XENP020510

SEQ ID NO: 18792 - protein, 15 aa, Artificial Sequence
  Description of Artificial Sequence: Synthetic peptide
  XENP020510 vlCDR1
KASQSVDYDGDSYMN

SEQ ID NO: 18793 - protein, 7 aa, Artificial Sequence
  Description of Artificial Sequence: Synthetic peptide
  XENP020510 vlCDR2
AASNLES

SEQ ID NO: 18794 - protein, 9 aa, Artificial Sequence
  Description of Artificial Sequence: Synthetic peptide
  XENP020510 vlCDR3
QQSNEDPFT

SEQ ID NO: 18795 - protein, 450 aa, Artificial Sequence
  Description of Artificial Sequence: Synthetic polypeptide
  XENP020511 7G8_H0.59_L0_IgG1_PVA_/S267K Heavy Chain
EVKLEESGGGLVQPGGSMKLSCAASGFTFSDAWMDWVRQSPEKGLEWVAEIRTKDNNHATYYAESVKGRFTISRDDSKSSVYLQMNSLRAEDTGIYYCTRLANWDWYFDVWGAGTTVTVSSASTKGPSVFPLAPSSKSTSGGTAALGCLVKDYFPEPVTVSWNSGALTSGVHTFPAVLQSSGLYSLSSVVTVPSSSLGTQTYICNVNHKPSDTKVDKKVEPKSCDKTHTCPPCPAPPVAGPSVFLFPPKPKDTLMISRTPEVTCVVVDVKHEDPEVKFNWYVDGVEVHNAKTKPREEEYNSTYRVVSVLTVLHQDWLNGKEYKCKVSNKALPAPIEKTISKAKGQPREPQVYTLPPSREEMTKNQVSLTCDVSGFYPSDIAVEWESDGQPENNYKTTPPVLDSDGSFFLYSKLTVDKSRWEQGDVFSCSVMHEALHNHYTQKSLSLSPGK

SEQ ID NO: 18796 - protein, 121 aa, Artificial Sequence
  Description of Artificial Sequence: Synthetic polypeptide
  VH of XENP020511
EVKLEESGGGLVQPGGSMKLSCAASGFTFSDAWMDWVRQSPEKGLEWVAEIRTKDNNHATYYAESVKGRFTISRDDSKSSVYLQMNSLRAEDTGIYYCTRLANWDWYFDVWGAGTTVTVSS

SEQ ID NO: 18797 - protein, 5 aa, Artificial Sequence
  Description of Artificial Sequence: Synthetic peptide
  XENP020511 vhCDR1
DAWMD

SEQ ID NO: 18798 - protein, 19 aa, Artificial Sequence
  Description of Artificial Sequence: Synthetic peptide
  XENP020511 vhCDR2
EIRTKDNNHATYYAESVKG

SEQ ID NO: 18799 - protein, 10 aa, Artificial Sequence
  Description of Artificial Sequence: Synthetic peptide
  XENP020511 vhCDR3
LANWDWYFDV

SEQ ID NO: 18800 - protein, 218 aa, Artificial Sequence; identical to SEQ ID NO: 17590
  Description of Artificial Sequence: Synthetic polypeptide
  XENP020511 7G8_H0.59_L0_IgG1_PVA_/S267K Light Chain

SEQ ID NO: 18801 - protein, 111 aa, Artificial Sequence; identical to SEQ ID NO: 17591
  Description of Artificial Sequence: Synthetic polypeptide
  VL of XENP020511

SEQ ID NO: 18802 - protein, 15 aa, Artificial Sequence
  Description of Artificial Sequence: Synthetic peptide
  XENP020511 vlCDR1
KASQSVDYDGDSYMN

SEQ ID NO: 18803 - protein, 7 aa, Artificial Sequence
  Description of Artificial Sequence: Synthetic peptide
  XENP020511 vlCDR2
AASNLES

SEQ ID NO: 18804 - protein, 9 aa, Artificial Sequence
  Description of Artificial Sequence: Synthetic peptide
  XENP020511 vlCDR3
QQSNEDPFT

SEQ ID NO: 18805 - protein, 450 aa, Artificial Sequence
  Description of Artificial Sequence: Synthetic polypeptide
  XENP020512 7G8_H0.60_L0_IgG1_PVA_/S267K Heavy Chain
EVKLEESGGGLVQPGGSMKLSCAASGFTFSDAWMDWVRQSPEKGLEWVAEIRTKLNNHATYYAESVKGRFTISRDDSKSSVYLQMNSLRAEDTGIYYCTRLANWDWYFDVWGAGTTVTVSSASTKGPSVFPLAPSSKSTSGGTAALGCLVKDYFPEPVTVSWNSGALTSGVHTFPAVLQSSGLYSLSSVVTVPSSSLGTQTYICNVNHKPSDTKVDKKVEPKSCDKTHTCPPCPAPPVAGPSVFLFPPKPKDTLMISRTPEVTCVVVDVKHEDPEVKFNWYVDGVEVHNAKTKPREEEYNSTYRVVSVLTVLHQDWLNGKEYKCKVSNKALPAPIEKTISKAKGQPREPQVYTLPPSREEMTKNQVSLTCDVSGFYPSDIAVEWESDGQPENNYKTTPPVLDSDGSFFLYSKLTVDKSRWEQGDVFSCSVMHEALHNHYTQKSLSLSPGK

SEQ ID NO: 18806 - protein, 121 aa, Artificial Sequence
  Description of Artificial Sequence: Synthetic polypeptide
  VH of XENP020512
EVKLEESGGGLVQPGGSMKLSCAASGFTFSDAWMDWVRQSPEKGLEWVAEIRTKLNNHATYYAESVKGRFTISRDDSKSSVYLQMNSLRAEDTGIYYCTRLANWDWYFDVWGAGTTVTVSS

SEQ ID NO: 18807 - protein, 5 aa, Artificial Sequence
  Description of Artificial Sequence: Synthetic peptide
  XENP020512 vhCDR1
DAWMD

SEQ ID NO: 18808 - protein, 19 aa, Artificial Sequence
  Description of Artificial Sequence: Synthetic peptide
  XENP020512 vhCDR2
EIRTKLNNHATYYAESVKG

SEQ ID NO: 18809 - protein, 10 aa, Artificial Sequence
  Description of Artificial Sequence: Synthetic peptide
  XENP020512 vhCDR3
LANWDWYFDV

SEQ ID NO: 18810 - protein, 218 aa, Artificial Sequence; identical to SEQ ID NO: 17590
  Description of Artificial Sequence: Synthetic polypeptide
  XENP020512 7G8_H0.60_L0_IgG1_PVA_/S267K Light Chain

SEQ ID NO: 18811 - protein, 111 aa, Artificial Sequence; identical to SEQ ID NO: 17591
  Description of Artificial Sequence: Synthetic polypeptide
  VL of XENP020512

SEQ ID NO: 18812 - protein, 15 aa, Artificial Sequence
  Description of Artificial Sequence: Synthetic peptide
  XENP020512 vlCDR1
KASQSVDYDGDSYMN

SEQ ID NO: 18813 - protein, 7 aa, Artificial Sequence
  Description of Artificial Sequence: Synthetic peptide
  XENP020512 vlCDR2
AASNLES

SEQ ID NO: 18814 - protein, 9 aa, Artificial Sequence
  Description of Artificial Sequence: Synthetic peptide
  XENP020512 vlCDR3
QQSNEDPFT

SEQ ID NO: 18815 - protein, 450 aa, Artificial Sequence
  Description of Artificial Sequence: Synthetic polypeptide
  XENP020513 7G8_H0.61_L0_IgG1_PVA_/S267K Heavy Chain
EVKLEESGGGLVQPGGSMKLSCAASGFTFSDAWMDWVRQSPEKGLEWVAEIRTKKNNHATYYAESVKGRFTISRDDSKSSVYLQMNSLRAEDTGIYYCTRLANWDWYFDVWGAGTTVTVSSASTKGPSVFPLAPSSKSTSGGTAALGCLVKDYFPEPVTVSWNSGALTSGVHTFPAVLQSSGLYSLSSVVTVPSSSLGTQTYICNVNHKPSDTKVDKKVEPKSCDKTHTCPPCPAPPVAGPSVFLFPPKPKDTLMISRTPEVTCVVVDVKHEDPEVKFNWYVDGVEVHNAKTKPREEEYNSTYRVVSVLTVLHQDWLNGKEYKCKVSNKALPAPIEKTISKAKGQPREPQVYTLPPSREEMTKNQVSLTCDVSGFYPSDIAVEWESDGQPENNYKTTPPVLDSDGSFFLYSKLTVDKSRWEQGDVFSCSVMHEALHNHYTQKSLSLSPGK

SEQ ID NO: 18816 - protein, 121 aa, Artificial Sequence
  Description of Artificial Sequence: Synthetic polypeptide
  VH of XENP020513
EVKLEESGGGLVQPGGSMKLSCAASGFTFSDAWMDWVRQSPEKGLEWVAEIRTKKNNHATYYAESVKGRFTISRDDSKSSVYLQMNSLRAEDTGIYYCTRLANWDWYFDVWGAGTTVTVSS

SEQ ID NO: 18817 - protein, 5 aa, Artificial Sequence
  Description of Artificial Sequence: Synthetic peptide
  XENP020513 vhCDR1
DAWMD

SEQ ID NO: 18818 - protein, 19 aa, Artificial Sequence
  Description of Artificial Sequence: Synthetic peptide
  XENP020513 vhCDR2
EIRTKKNNHATYYAESVKG

SEQ ID NO: 18819 - protein, 10 aa, Artificial Sequence
  Description of Artificial Sequence: Synthetic peptide
  XENP020513 vhCDR3
LANWDWYFDV

SEQ ID NO: 18820 - protein, 218 aa, Artificial Sequence; identical to SEQ ID NO: 17590
  Description of Artificial Sequence: Synthetic polypeptide
  XENP020513 7G8_H0.61_L0_IgG1_PVA_/S267K Light Chain

SEQ ID NO: 18821 - protein, 111 aa, Artificial Sequence; identical to SEQ ID NO: 17591
  Description of Artificial Sequence: Synthetic polypeptide
  VL of XENP020513

SEQ ID NO: 18822 - protein, 15 aa, Artificial Sequence
  Description of Artificial Sequence: Synthetic peptide
  XENP020513 vlCDR1
KASQSVDYDGDSYMN

SEQ ID NO: 18823 - protein, 7 aa, Artificial Sequence
  Description of Artificial Sequence: Synthetic peptide
  XENP020513 vlCDR2
AASNLES

SEQ ID NO: 18824 - protein, 9 aa, Artificial Sequence
  Description of Artificial Sequence: Synthetic peptide
  XENP020513 vlCDR3
QQSNEDPFT

SEQ ID NO: 18825 - protein, 450 aa, Artificial Sequence
  Description of Artificial Sequence: Synthetic polypeptide
  XENP020514 7G8_H0.62_L0_IgG1_PVA_/S267K Heavy Chain
EVKLEESGGGLVQPGGSMKLSCAASGFTFSDAWMDWVRQSPEKGLEWVAEIRTKYNNHATYYAESVKGRFTISRDDSKSSVYLQMNSLRAEDTGIYYCTRLANWDWYFDVWGAGTTVTVSSASTKGPSVFPLAPSSKSTSGGTAALGCLVKDYFPEPVTVSWNSGALTSGVHTFPAVLQSSGLYSLSSVVTVPSSSLGTQTYICNVNHKPSDTKVDKKVEPKSCDKTHTCPPCPAPPVAGPSVFLFPPKPKDTLMISRTPEVTCVVVDVKHEDPEVKFNWYVDGVEVHNAKTKPREEEYNSTYRVVSVLTVLHQDWLNGKEYKCKVSNKALPAPIEKTISKAKGQPREPQVYTLPPSREEMTKNQVSLTCDVSGFYPSDIAVEWESDGQPENNYKTTPPVLDSDGSFFLYSKLTVDKSRWEQGDVFSCSVMHEALHNHYTQKSLSLSPGK

SEQ ID NO: 18826 - protein, 121 aa, Artificial Sequence
  Description of Artificial Sequence: Synthetic polypeptide
  VH of XENP020514
EVKLEESGGGLVQPGGSMKLSCAASGFTFSDAWMDWVRQSPEKGLEWVAEIRTKYNNHATYYAESVKGRFTISRDDSKSSVYLQMNSLRAEDTGIYYCTRLANWDWYFDVWGAGTTVTVSS

SEQ ID NO: 18827 - protein, 5 aa, Artificial Sequence
  Description of Artificial Sequence: Synthetic peptide
  XENP020514 vhCDR1
DAWMD

SEQ ID NO: 18828 - protein, 19 aa, Artificial Sequence
  Description of Artificial Sequence: Synthetic peptide
  XENP020514 vhCDR2
EIRTKYNNHATYYAESVKG

SEQ ID NO: 18829 - protein, 10 aa, Artificial Sequence
  Description of Artificial Sequence: Synthetic peptide
  XENP020514 vhCDR3
LANWDWYFDV

SEQ ID NO: 18830 - protein, 218 aa, Artificial Sequence; identical to SEQ ID NO: 17590
  Description of Artificial Sequence: Synthetic polypeptide
  XENP020514 7G8_H0.62_L0_IgG1_PVA_/S267K Light Chain

SEQ ID NO: 18831 - protein, 111 aa, Artificial Sequence; identical to SEQ ID NO: 17591
  Description of Artificial Sequence: Synthetic polypeptide
  VL of XENP020514

SEQ ID NO: 18832 - protein, 15 aa, Artificial Sequence
  Description of Artificial Sequence: Synthetic peptide
  XENP020514 vlCDR1
KASQSVDYDGDSYMN

SEQ ID NO: 18833 - protein, 7 aa, Artificial Sequence
  Description of Artificial Sequence: Synthetic peptide
  XENP020514 vlCDR2
AASNLES

SEQ ID NO: 18834 - protein, 9 aa, Artificial Sequence
  Description of Artificial Sequence: Synthetic peptide
  XENP020514 vlCDR3
QQSNEDPFT

SEQ ID NO: 18835 - protein, 450 aa, Artificial Sequence
  Description of Artificial Sequence: Synthetic polypeptide
  XENP020515 7G8_H0.63_L0_IgG1_PVA_/S267K Heavy Chain
EVKLEESGGGLVQPGGSMKLSCAASGFTFSDAWMDWVRQSPEKGLEWVAEIRTKADNHATYYAESVKGRFTISRDDSKSSVYLQMNSLRAEDTGIYYCTRLANWDWYFDVWGAGTTVTVSSASTKGPSVFPLAPSSKSTSGGTAALGCLVKDYFPEPVTVSWNSGALTSGVHTFPAVLQSSGLYSLSSVVTVPSSSLGTQTYICNVNHKPSDTKVDKKVEPKSCDKTHTCPPCPAPPVAGPSVFLFPPKPKDTLMISRTPEVTCVVVDVKHEDPEVKFNWYVDGVEVHNAKTKPREEEYNSTYRVVSVLTVLHQDWLNGKEYKCKVSNKALPAPIEKTISKAKGQPREPQVYTLPPSREEMTKNQVSLTCDVSGFYPSDIAVEWESDGQPENNYKTTPPVLDSDGSFFLYSKLTVDKSRWEQGDVFSCSVMHEALHNHYTQKSLSLSPGK

SEQ ID NO: 18836 - protein, 121 aa, Artificial Sequence
  Description of Artificial Sequence: Synthetic polypeptide
  VH of XENP020515
EVKLEESGGGLVQPGGSMKLSCAASGFTFSDAWMDWVRQSPEKGLEWVAEIRTKADNHATYYAESVKGRFTISRDDSKSSVYLQMNSLRAEDTGIYYCTRLANWDWYFDVWGAGTTVTVSS

SEQ ID NO: 18837 - protein, 5 aa, Artificial Sequence
  Description of Artificial Sequence: Synthetic peptide
  XENP020515 vhCDR1
DAWMD

SEQ ID NO: 18838 - protein, 19 aa, Artificial Sequence
  Description of Artificial Sequence: Synthetic peptide
  XENP020515 vhCDR2
EIRTKADNHATYYAESVKG

SEQ ID NO: 18839 - protein, 10 aa, Artificial Sequence
  Description of Artificial Sequence: Synthetic peptide
  XENP020515 vhCDR3
LANWDWYFDV

SEQ ID NO: 18840 - protein, 218 aa, Artificial Sequence; identical to SEQ ID NO: 17590
  Description of Artificial Sequence: Synthetic polypeptide
  XENP020515 7G8_H0.63_L0_IgG1_PVA_/S267K Light Chain

SEQ ID NO: 18841 - protein, 111 aa, Artificial Sequence; identical to SEQ ID NO: 17591
  Description of Artificial Sequence: Synthetic polypeptide
  VL of XENP020515

SEQ ID NO: 18842 - protein, 15 aa, Artificial Sequence
  Description of Artificial Sequence: Synthetic peptide
  XENP020515 vlCDR1
KASQSVDYDGDSYMN

SEQ ID NO: 18843 - protein, 7 aa, Artificial Sequence
  Description of Artificial Sequence: Synthetic peptide
  XENP020515 vlCDR2
AASNLES

SEQ ID NO: 18844 - protein, 9 aa, Artificial Sequence
  Description of Artificial Sequence: Synthetic peptide
  XENP020515 vlCDR3
QQSNEDPFT

SEQ ID NO: 18845 - protein, 450 aa, Artificial Sequence
  Description of Artificial Sequence: Synthetic polypeptide
  XENP020516 7G8_H0.64_L0_IgG1_PVA_/S267K Heavy Chain
EVKLEESGGGLVQPGGSMKLSCAASGFTFSDAWMDWVRQSPEKGLEWVAEIRTKAHNHATYYAESVKGRFTISRDDSKSSVYLQMNSLRAEDTGIYYCTRLANWDWYFDVWGAGTTVTVSSASTKGPSVFPLAPSSKSTSGGTAALGCLVKDYFPEPVTVSWNSGALTSGVHTFPAVLQSSGLYSLSSVVTVPSSSLGTQTYICNVNHKPSDTKVDKKVEPKSCDKTHTCPPCPAPPVAGPSVFLFPPKPKDTLMISRTPEVTCVVVDVKHEDPEVKFNWYVDGVEVHNAKTKPREEEYNSTYRVVSVLTVLHQDWLNGKEYKCKVSNKALPAPIEKTISKAKGQPREPQVYTLPPSREEMTKNQVSLTCDVSGFYPSDIAVEWESDGQPENNYKTTPPVLDSDGSFFLYSKLTVDKSRWEQGDVFSCSVMHEALHNHYTQKSLSLSPGK

SEQ ID NO: 18846 - protein, 121 aa, Artificial Sequence
  Description of Artificial Sequence: Synthetic polypeptide
  VH of XENP020516
EVKLEESGGGLVQPGGSMKLSCAASGFTFSDAWMDWVRQSPEKGLEWVAEIRTKAHNHATYYAESVKGRFTISRDDSKSSVYLQMNSLRAEDTGIYYCTRLANWDWYFDVWGAGTTVTVSS

SEQ ID NO: 18847 - protein, 5 aa, Artificial Sequence
  Description of Artificial Sequence: Synthetic peptide
  XENP020516 vhCDR1
DAWMD

SEQ ID NO: 18848 - protein, 19 aa, Artificial Sequence
  Description of Artificial Sequence: Synthetic peptide
  XENP020516 vhCDR2
EIRTKAHNHATYYAESVKG

SEQ ID NO: 18849 - protein, 10 aa, Artificial Sequence
  Description of Artificial Sequence: Synthetic peptide
  XENP020516 vhCDR3
LANWDWYFDV

SEQ ID NO: 18850 - protein, 218 aa, Artificial Sequence; identical to SEQ ID NO: 17590
  Description of Artificial Sequence: Synthetic polypeptide
  XENP020516 7G8_H0.64_L0_IgG1_PVA_/S267K Light Chain

SEQ ID NO: 18851 - protein, 111 aa, Artificial Sequence; identical to SEQ ID NO: 17591
  Description of Artificial Sequence: Synthetic polypeptide
  VL of XENP020516

SEQ ID NO: 18852 - protein, 15 aa, Artificial Sequence
  Description of Artificial Sequence: Synthetic peptide
  XENP020516 vlCDR1
KASQSVDYDGDSYMN

SEQ ID NO: 18853 - protein, 7 aa, Artificial Sequence
  Description of Artificial Sequence: Synthetic peptide
  XENP020516 vlCDR2
AASNLES

SEQ ID NO: 18854 - protein, 9 aa, Artificial Sequence
  Description of Artificial Sequence: Synthetic peptide
  XENP020516 vlCDR3
QQSNEDPFT

SEQ ID NO: 18855 - protein, 450 aa, Artificial Sequence
  Description of Artificial Sequence: Synthetic polypeptide
  XENP020517 7G8_H0.65_L0_IgG1_PVA_/S267K Heavy Chain
EVKLEESGGGLVQPGGSMKLSCAASGFTFSDAWMDWVRQSPEKGLEWVAEIRTKAENHATYYAESVKGRFTISRDDSKSSVYLQMNSLRAEDTGIYYCTRLANWDWYFDVWGAGTTVTVSSASTKGPSVFPLAPSSKSTSGGTAALGCLVKDYFPEPVTVSWNSGALTSGVHTFPAVLQSSGLYSLSSVVTVPSSSLGTQTYICNVNHKPSDTKVDKKVEPKSCDKTHTCPPCPAPPVAGPSVFLFPPKPKDTLMISRTPEVTCVVVDVKHEDPEVKFNWYVDGVEVHNAKTKPREEEYNSTYRVVSVLTVLHQDWLNGKEYKCKVSNKALPAPIEKTISKAKGQPREPQVYTLPPSREEMTKNQVSLTCDVSGFYPSDIAVEWESDGQPENNYKTTPPVLDSDGSFFLYSKLTVDKSRWEQGDVFSCSVMHEALHNHYTQKSLSLSPGK

SEQ ID NO: 18856 - protein, 121 aa, Artificial Sequence
  Description of Artificial Sequence: Synthetic polypeptide
  VH of XENP020517
EVKLEESGGGLVQPGGSMKLSCAASGFTFSDAWMDWVRQSPEKGLEWVAEIRTKAENHATYYAESVKGRFTISRDDSKSSVYLQMNSLRAEDTGIYYCTRLANWDWYFDVWGAGTTVTVSS

SEQ ID NO: 18857 - protein, 5 aa, Artificial Sequence
  Description of Artificial Sequence: Synthetic peptide
  XENP020517 vhCDR1
DAWMD

SEQ ID NO: 18858 - protein, 19 aa, Artificial Sequence
  Description of Artificial Sequence: Synthetic peptide
  XENP020517 vhCDR2
EIRTKAENHATYYAESVKG

SEQ ID NO: 18859 - protein, 10 aa, Artificial Sequence
  Description of Artificial Sequence: Synthetic peptide
  XENP020517 vhCDR3
LANWDWYFDV

SEQ ID NO: 18860 - protein, 218 aa, Artificial Sequence; identical to SEQ ID NO: 17590
  Description of Artificial Sequence: Synthetic polypeptide
  XENP020517 7G8_H0.65_L0_IgG1_PVA_/S267K Light Chain

SEQ ID NO: 18861 - protein, 111 aa, Artificial Sequence; identical to SEQ ID NO: 17591
  Description of Artificial Sequence: Synthetic polypeptide
  VL of XENP020517

SEQ ID NO: 18862 - protein, 15 aa, Artificial Sequence
  Description of Artificial Sequence: Synthetic peptide
  XENP020517 vlCDR1
KASQSVDYDGDSYMN

SEQ ID NO: 18863 - protein, 7 aa, Artificial Sequence
  Description of Artificial Sequence: Synthetic peptide
  XENP020517 vlCDR2
AASNLES

SEQ ID NO: 18864 - protein, 9 aa, Artificial Sequence
  Description of Artificial Sequence: Synthetic peptide
  XENP020517 vlCDR3
QQSNEDPFT

SEQ ID NO: 18865 - protein, 450 aa, Artificial Sequence
  Description of Artificial Sequence: Synthetic polypeptide
  XENP020518 7G8_H0.66_L0_IgG1_PVA_/S267K Heavy Chain
EVKLEESGGGLVQPGGSMKLSCAASGFTFSDAWMDWVRQSPEKGLEWVAEIRTKASNHATYYAESVKGRFTISRDDSKSSVYLQMNSLRAEDTGIYYCTRLANWDWYFDVWGAGTTVTVSSASTKGPSVFPLAPSSKSTSGGTAALGCLVKDYFPEPVTVSWNSGALTSGVHTFPAVLQSSGLYSLSSVVTVPSSSLGTQTYICNVNHKPSDTKVDKKVEPKSCDKTHTCPPCPAPPVAGPSVFLFPPKPKDTLMISRTPEVTCVVVDVKHEDPEVKFNWYVDGVEVHNAKTKPREEEYNSTYRVVSVLTVLHQDWLNGKEYKCKVSNKALPAPIEKTISKAKGQPREPQVYTLPPSREEMTKNQVSLTCDVSGFYPSDIAVEWESDGQPENNYKTTPPVLDSDGSFFLYSKLTVDKSRWEQGDVFSCSVMHEALHNHYTQKSLSLSPGK

SEQ ID NO: 18866 - protein, 121 aa, Artificial Sequence
  Description of Artificial Sequence: Synthetic polypeptide
  VH of XENP020518
EVKLEESGGGLVQPGGSMKLSCAASGFTFSDAWMDWVRQSPEKGLEWVAEIRTKASNHATYYAESVKGRFTISRDDSKSSVYLQMNSLRAEDTGIYYCTRLANWDWYFDVWGAGTTVTVSS

SEQ ID NO: 18867 - protein, 5 aa, Artificial Sequence
  Description of Artificial Sequence: Synthetic peptide
  XENP020518 vhCDR1
DAWMD

SEQ ID NO: 18868 - protein, 19 aa, Artificial Sequence
  Description of Artificial Sequence: Synthetic peptide
  XENP020518 vhCDR2
EIRTKASNHATYYAESVKG

SEQ ID NO: 18869 - protein, 10 aa, Artificial Sequence
  Description of Artificial Sequence: Synthetic peptide
  XENP020518 vhCDR3
LANWDWYFDV

SEQ ID NO: 18870 - protein, 218 aa, Artificial Sequence; identical to SEQ ID NO: 17590
  Description of Artificial Sequence: Synthetic polypeptide
  XENP020518 7G8_H0.66_L0_IgG1_PVA_/S267K Light Chain

SEQ ID NO: 18871 - protein, 111 aa, Artificial Sequence; identical to SEQ ID NO: 17591
  Description of Artificial Sequence: Synthetic polypeptide
  VL of XENP020518

SEQ ID NO: 18872 - protein, 15 aa, Artificial Sequence
  Description of Artificial Sequence: Synthetic peptide
  XENP020518 vlCDR1
KASQSVDYDGDSYMN

SEQ ID NO: 18873 - protein, 7 aa, Artificial Sequence
  Description of Artificial Sequence: Synthetic peptide
  XENP020518 vlCDR2
AASNLES

SEQ ID NO: 18874 - protein, 9 aa, Artificial Sequence
  Description of Artificial Sequence: Synthetic peptide
  XENP020518 vlCDR3
QQSNEDPFT

SEQ ID NO: 18875 - protein, 450 aa, Artificial Sequence
  Description of Artificial Sequence: Synthetic polypeptide
  XENP020519 7G8_H0.67_L0_IgG1_PVA_/S267K Heavy Chain
EVKLEESGGGLVQPGGSMKLSCAASGFTFSDAWMDWVRQSPEKGLEWVAEIRTKARNHATYYAESVKGRFTISRDDSKSSVYLQMNSLRAEDTGIYYCTRLANWDWYFDVWGAGTTVTVSSASTKGPSVFPLAPSSKSTSGGTAALGCLVKDYFPEPVTVSWNSGALTSGVHTFPAVLQSSGLYSLSSVVTVPSSSLGTQTYICNVNHKPSDTKVDKKVEPKSCDKTHTCPPCPAPPVAGPSVFLFPPKPKDTLMISRTPEVTCVVVDVKHEDPEVKFNWYVDGVEVHNAKTKPREEEYNSTYRVVSVLTVLHQDWLNGKEYKCKVSNKALPAPIEKTISKAKGQPREPQVYTLPPSREEMTKNQVSLTCDVSGFYPSDIAVEWESDGQPENNYKTTPPVLDSDGSFFLYSKLTVDKSRWEQGDVFSCSVMHEALHNHYTQKSLSLSPGK

SEQ ID NO: 18876 - protein, 121 aa, Artificial Sequence
  Description of Artificial Sequence: Synthetic polypeptide
  VH of XENP020519
EVKLEESGGGLVQPGGSMKLSCAASGFTFSDAWMDWVRQSPEKGLEWVAEIRTKARNHATYYAESVKGRFTISRDDSKSSVYLQMNSLRAEDTGIYYCTRLANWDWYFDVWGAGTTVTVSS

SEQ ID NO: 18877 - protein, 5 aa, Artificial Sequence
  Description of Artificial Sequence: Synthetic peptide
  XENP020519 vhCDR1
DAWMD

SEQ ID NO: 18878 - protein, 19 aa, Artificial Sequence
  Description of Artificial Sequence: Synthetic peptide
  XENP020519 vhCDR2
EIRTKARNHATYYAESVKG

SEQ ID NO: 18879 - protein, 10 aa, Artificial Sequence
  Description of Artificial Sequence: Synthetic peptide
  XENP020519 vhCDR3
LANWDWYFDV

SEQ ID NO: 18880 - protein, 218 aa, Artificial Sequence; identical to SEQ ID NO: 17590
  Description of Artificial Sequence: Synthetic polypeptide
  XENP020519 7G8_H0.67_L0_IgG1_PVA_/S267K Light Chain

SEQ ID NO: 18881 - protein, 111 aa, Artificial Sequence; identical to SEQ ID NO: 17591
  Description of Artificial Sequence: Synthetic polypeptide
  VL of XENP020519

SEQ ID NO: 18882 - protein, 15 aa, Artificial Sequence
  Description of Artificial Sequence: Synthetic peptide
  XENP020519 vlCDR1
KASQSVDYDGDSYMN

SEQ ID NO: 18883 - protein, 7 aa, Artificial Sequence
  Description of Artificial Sequence: Synthetic peptide
  XENP020519 vlCDR2
AASNLES

SEQ ID NO: 18884 - protein, 9 aa, Artificial Sequence
  Description of Artificial Sequence: Synthetic peptide
  XENP020519 vlCDR3
QQSNEDPFT

SEQ ID NO: 18885 - protein, 450 aa, Artificial Sequence
  Description of Artificial Sequence: Synthetic polypeptide
  XENP020520 7G8_H0.68_L0_IgG1_PVA_/S267K Heavy Chain
EVKLEESGGGLVQPGGSMKLSCAASGFTFSDAWMDWVRQSPEKGLEWVAEIRTKALNHATYYAESVKGRFTISRDDSKSSVYLQMNSLRAEDTGIYYCTRLANWDWYFDVWGAGTTVTVSSASTKGPSVFPLAPSSKSTSGGTAALGCLVKDYFPEPVTVSWNSGALTSGVHTFPAVLQSSGLYSLSSVVTVPSSSLGTQTYICNVNHKPSDTKVDKKVEPKSCDKTHTCPPCPAPPVAGPSVFLFPPKPKDTLMISRTPEVTCVVVDVKHEDPEVKFNWYVDGVEVHNAKTKPREEEYNSTYRVVSVLTVLHQDWLNGKEYKCKVSNKALPAPIEKTISKAKGQPREPQVYTLPPSREEMTKNQVSLTCDVSGFYPSDIAVEWESDGQPENNYKTTPPVLDSDGSFFLYSKLTVDKSRWEQGDVFSCSVMHEALHNHYTQKSLSLSPGK

SEQ ID NO: 18886 - protein, 121 aa, Artificial Sequence
  Description of Artificial Sequence: Synthetic polypeptide
  VH of XENP020520
EVKLEESGGGLVQPGGSMKLSCAASGFTFSDAWMDWVRQSPEKGLEWVAEIRTKALNHATYYAESVKGRFTISRDDSKSSVYLQMNSLRAEDTGIYYCTRLANWDWYFDVWGAGTTVTVSS

SEQ ID NO: 18887 - protein, 5 aa, Artificial Sequence
  Description of Artificial Sequence: Synthetic peptide
  XENP020520 vhCDR1
DAWMD

SEQ ID NO: 18888 - protein, 19 aa, Artificial Sequence
  Description of Artificial Sequence: Synthetic peptide
  XENP020520 vhCDR2
EIRTKALNHATYYAESVKG

SEQ ID NO: 18889 - protein, 10 aa, Artificial Sequence
  Description of Artificial Sequence: Synthetic peptide
  XENP020520 vhCDR3
LANWDWYFDV

SEQ ID NO: 18890 - protein, 218 aa, Artificial Sequence; identical to SEQ ID NO: 17590
  Description of Artificial Sequence: Synthetic polypeptide
  XENP020520 7G8_H0.68_L0_IgG1_PVA_/S267K Light Chain

SEQ ID NO: 18891 - protein, 111 aa, Artificial Sequence; identical to SEQ ID NO: 17591
  Description of Artificial Sequence: Synthetic polypeptide
  VL of XENP020520

SEQ ID NO: 18892 - protein, 15 aa, Artificial Sequence
  Description of Artificial Sequence: Synthetic peptide
  XENP020520 vlCDR1
KASQSVDYDGDSYMN

SEQ ID NO: 18893 - protein, 7 aa, Artificial Sequence
  Description of Artificial Sequence: Synthetic peptide
  XENP020520 vlCDR2
AASNLES

SEQ ID NO: 18894 - protein, 9 aa, Artificial Sequence
  Description of Artificial Sequence: Synthetic peptide
  XENP020520 vlCDR3
QQSNEDPFT

SEQ ID NO: 18895 - protein, 450 aa, Artificial Sequence
  Description of Artificial Sequence: Synthetic polypeptide
  XENP020521 7G8_H0.69_L0_IgG1_PVA_/S267K Heavy Chain
EVKLEESGGGLVQPGGSMKLSCAASGFTFSDAWMDWVRQSPEKGLEWVAEIRTKATNHATYYAESVKGRFTISRDDSKSSVYLQMNSLRAEDTGIYYCTRLANWDWYFDVWGAGTTVTVSSASTKGPSVFPLAPSSKSTSGGTAALGCLVKDYFPEPVTVSWNSGALTSGVHTFPAVLQSSGLYSLSSVVTVPSSSLGTQTYICNVNHKPSDTKVDKKVEPKSCDKTHTCPPCPAPPVAGPSVFLFPPKPKDTLMISRTPEVTCVVVDVKHEDPEVKFNWYVDGVEVHNAKTKPREEEYNSTYRVVSVLTVLHQDWLNGKEYKCKVSNKALPAPIEKTISKAKGQPREPQVYTLPPSREEMTKNQVSLTCDVSGFYPSDIAVEWESDGQPENNYKTTPPVLDSDGSFFLYSKLTVDKSRWEQGDVFSCSVMHEALHNHYTQKSLSLSPGK

SEQ ID NO: 18896 - protein, 121 aa, Artificial Sequence
  Description of Artificial Sequence: Synthetic polypeptide
  VH of XENP020521
EVKLEESGGGLVQPGGSMKLSCAASGFTFSDAWMDWVRQSPEKGLEWVAEIRTKATNHATYYAESVKGRFTISRDDSKSSVYLQMNSLRAEDTGIYYCTRLANWDWYFDVWGAGTTVTVSS

SEQ ID NO: 18897 - protein, 5 aa, Artificial Sequence
  Description of Artificial Sequence: Synthetic peptide
  XENP020521 vhCDR1
DAWMD

SEQ ID NO: 18898 - protein, 19 aa, Artificial Sequence
  Description of Artificial Sequence: Synthetic peptide
  XENP020521 vhCDR2
EIRTKATNHATYYAESVKG

SEQ ID NO: 18899 - protein, 10 aa, Artificial Sequence
  Description of Artificial Sequence: Synthetic peptide
  XENP020521 vhCDR3
LANWDWYFDV

SEQ ID NO: 18900 - protein, 218 aa, Artificial Sequence; identical to SEQ ID NO: 17590
  Description of Artificial Sequence: Synthetic polypeptide
  XENP020521 7G8_H0.69_L0_IgG1_PVA_/S267K Light Chain

SEQ ID NO: 18901 - protein, 111 aa, Artificial Sequence; identical to SEQ ID NO: 17591
  Description of Artificial Sequence: Synthetic polypeptide
  VL of XENP020521

SEQ ID NO: 18902 - protein, 15 aa, Artificial Sequence
  Description of Artificial Sequence: Synthetic peptide
  XENP020521 vlCDR1
KASQSVDYDGDSYMN

SEQ ID NO: 18903 - protein, 7 aa, Artificial Sequence
  Description of Artificial Sequence: Synthetic peptide
  XENP020521 vlCDR2
AASNLES

SEQ ID NO: 18904 - protein, 9 aa, Artificial Sequence
  Description of Artificial Sequence: Synthetic peptide
  XENP020521 vlCDR3
QQSNEDPFT

SEQ ID NO: 18905 - protein, 450 aa, Artificial Sequence
  Description of Artificial Sequence: Synthetic polypeptide
  XENP020522 7G8_H0.70_L0_IgG1_PVA_/S267K Heavy Chain
EVKLEESGGGLVQPGGSMKLSCAASGFTFSDAWMDWVRQSPEKGLEWVAEIRTKAGNHATYYAESVKGRFTISRDDSKSSVYLQMNSLRAEDTGIYYCTRLANWDWYFDVWGAGTTVTVSSASTKGPSVFPLAPSSKSTSGGTAALGCLVKDYFPEPVTVSWNSGALTSGVHTFPAVLQSSGLYSLSSVVTVPSSSLGTQTYICNVNHKPSDTKVDKKVEPKSCDKTHTCPPCPAPPVAGPSVFLFPPKPKDTLMISRTPEVTCVVVDVKHEDPEVKFNWYVDGVEVHNAKTKPREEEYNSTYRVVSVLTVLHQDWLNGKEYKCKVSNKALPAPIEKTISKAKGQPREPQVYTLPPSREEMTKNQVSLTCDVSGFYPSDIAVEWESDGQPENNYKTTPPVLDSDGSFFLYSKLTVDKSRWEQGDVFSCSVMHEALHNHYTQKSLSLSPGK

SEQ ID NO: 18906 - protein, 121 aa, Artificial Sequence
  Description of Artificial Sequence: Synthetic polypeptide
  VH of XENP020522
EVKLEESGGGLVQPGGSMKLSCAASGFTFSDAWMDWVRQSPEKGLEWVAEIRTKAGNHATYYAESVKGRFTISRDDSKSSVYLQMNSLRAEDTGIYYCTRLANWDWYFDVWGAGTTVTVSS

SEQ ID NO: 18907 - protein, 5 aa, Artificial Sequence
  Description of Artificial Sequence: Synthetic peptide
  XENP020522 vhCDR1
DAWMD

SEQ ID NO: 18908 - protein, 19 aa, Artificial Sequence
  Description of Artificial Sequence: Synthetic peptide
  XENP020522 vhCDR2
EIRTKAGNHATYYAESVKG

SEQ ID NO: 18909 - protein, 10 aa, Artificial Sequence
  Description of Artificial Sequence: Synthetic peptide
  XENP020522 vhCDR3
LANWDWYFDV

SEQ ID NO: 18910 - protein, 218 aa, Artificial Sequence; identical to SEQ ID NO: 17590
  Description of Artificial Sequence: Synthetic polypeptide
  XENP020522 7G8_H0.70_L0_IgG1_PVA_/S267K Light Chain

SEQ ID NO: 18911 - protein, 111 aa, Artificial Sequence; identical to SEQ ID NO: 17591
  Description of Artificial Sequence: Synthetic polypeptide
  VL of XENP020522

SEQ ID NO: 18912 - protein, 15 aa, Artificial Sequence
  Description of Artificial Sequence: Synthetic peptide
  XENP020522 vlCDR1
KASQSVDYDGDSYMN

SEQ ID NO: 18913 - protein, 7 aa, Artificial Sequence
  Description of Artificial Sequence: Synthetic peptide
  XENP020522 vlCDR2
AASNLES

SEQ ID NO: 18914 - protein, 9 aa, Artificial Sequence
  Description of Artificial Sequence: Synthetic peptide
  XENP020522 vlCDR3
QQSNEDPFT

SEQ ID NO: 18915 - protein, 450 aa, Artificial Sequence
  Description of Artificial Sequence: Synthetic polypeptide
  XENP020523 7G8_H0.71_L0_IgG1_PVA_/S267K Heavy Chain
EVKLEESGGGLVQPGGSMKLSCAASGFTFSDAWMDWVRQSPEKGLEWVAEIRTKAYNHATYYAESVKGRFTISRDDSKSSVYLQMNSLRAEDTGIYYCTRLANWDWYFDVWGAGTTVTVSSASTKGPSVFPLAPSSKSTSGGTAALGCLVKDYFPEPVTVSWNSGALTSGVHTFPAVLQSSGLYSLSSVVTVPSSSLGTQTYICNVNHKPSDTKVDKKVEPKSCDKTHTCPPCPAPPVAGPSVFLFPPKPKDTLMISRTPEVTCVVVDVKHEDPEVKFNWYVDGVEVHNAKTKPREEEYNSTYRVVSVLTVLHQDWLNGKEYKCKVSNKALPAPIEKTISKAKGQPREPQVYTLPPSREEMTKNQVSLTCDVSGFYPSDIAVEWESDGQPENNYKTTPPVLDSDGSFFLYSKLTVDKSRWEQGDVFSCSVMHEALHNHYTQKSLSLSPGK

SEQ ID NO: 18916 - protein, 121 aa, Artificial Sequence
  Description of Artificial Sequence: Synthetic polypeptide
  VH of XENP020523
EVKLEESGGGLVQPGGSMKLSCAASGFTFSDAWMDWVRQSPEKGLEWVAEIRTKAYNHATYYAESVKGRFTISRDDSKSSVYLQMNSLRAEDTGIYYCTRLANWDWYFDVWGAGTTVTVSS

SEQ ID NO: 18917 - protein, 5 aa, Artificial Sequence
  Description of Artificial Sequence: Synthetic peptide
  XENP020523 vhCDR1
DAWMD

SEQ ID NO: 18918 - protein, 19 aa, Artificial Sequence
  Description of Artificial Sequence: Synthetic peptide
  XENP020523 vhCDR2
EIRTKAYNHATYYAESVKG

SEQ ID NO: 18919 - protein, 10 aa, Artificial Sequence
  Description of Artificial Sequence: Synthetic peptide
  XENP020523 vhCDR3
LANWDWYFDV

SEQ ID NO: 18920 - protein, 218 aa, Artificial Sequence; identical to SEQ ID NO: 17590
  Description of Artificial Sequence: Synthetic polypeptide
  XENP020523 7G8_H0.71_L0_IgG1_PVA_/S267K Light Chain

SEQ ID NO: 18921 - protein, 111 aa, Artificial Sequence; identical to SEQ ID NO: 17591
  Description of Artificial Sequence: Synthetic polypeptide
  VL of XENP020523

SEQ ID NO: 18922 - protein, 15 aa, Artificial Sequence
  Description of Artificial Sequence: Synthetic peptide
  XENP020523 vlCDR1
KASQSVDYDGDSYMN

SEQ ID NO: 18923 - protein, 7 aa, Artificial Sequence
  Description of Artificial Sequence: Synthetic peptide
  XENP020523 vlCDR2
AASNLES

SEQ ID NO: 18924 - protein, 9 aa, Artificial Sequence
  Description of Artificial Sequence: Synthetic peptide
  XENP020523 vlCDR3
QQSNEDPFT

SEQ ID NO: 18925 - protein, 450 aa, Artificial Sequence
  Description of Artificial Sequence: Synthetic polypeptide
  XENP020524 7G8_H0.72_L0_IgG1_PVA_/S267K Heavy Chain
EVKLEESGGGLVQPGGSMKLSCAASGFTFSDAWMDWVRQSPEKGLEWVAEIRTKANDHATYYAESVKGRFTISRDDSKSSVYLQMNSLRAEDTGIYYCTRLANWDWYFDVWGAGTTVTVSSASTKGPSVFPLAPSSKSTSGGTAALGCLVKDYFPEPVTVSWNSGALTSGVHTFPAVLQSSGLYSLSSVVTVPSSSLGTQTYICNVNHKPSDTKVDKKVEPKSCDKTHTCPPCPAPPVAGPSVFLFPPKPKDTLMISRTPEVTCVVVDVKHEDPEVKFNWYVDGVEVHNAKTKPREEEYNSTYRVVSVLTVLHQDWLNGKEYKCKVSNKALPAPIEKTISKAKGQPREPQVYTLPPSREEMTKNQVSLTCDVSGFYPSDIAVEWESDGQPENNYKTTPPVLDSDGSFFLYSKLTVDKSRWEQGDVFSCSVMHEALHNHYTQKSLSLSPGK

SEQ ID NO: 18926 - protein, 121 aa, Artificial Sequence
  Description of Artificial Sequence: Synthetic polypeptide
  VH of XENP020524
EVKLEESGGGLVQPGGSMKLSCAASGFTFSDAWMDWVRQSPEKGLEWVAEIRTKANDHATYYAESVKGRFTISRDDSKSSVYLQMNSLRAEDTGIYYCTRLANWDWYFDVWGAGTTVTVSS

SEQ ID NO: 18927 - protein, 5 aa, Artificial Sequence
  Description of Artificial Sequence: Synthetic peptide
  XENP020524 vhCDR1
DAWMD

SEQ ID NO: 18928 - protein, 19 aa, Artificial Sequence
  Description of Artificial Sequence: Synthetic peptide
  XENP020524 vhCDR2
EIRTKANDHATYYAESVKG

SEQ ID NO: 18929 - protein, 10 aa, Artificial Sequence
  Description of Artificial Sequence: Synthetic peptide
  XENP020524 vhCDR3
LANWDWYFDV

SEQ ID NO: 18930 - protein, 218 aa, Artificial Sequence; identical to SEQ ID NO: 17590
  Description of Artificial Sequence: Synthetic polypeptide
  XENP020524 7G8_H0.72_L0_IgG1_PVA_/S267K Light Chain

SEQ ID NO: 18931 - protein, 111 aa, Artificial Sequence; identical to SEQ ID NO: 17591
  Description of Artificial Sequence: Synthetic polypeptide
  VL of XENP020524

SEQ ID NO: 18932 - protein, 15 aa, Artificial Sequence
  Description of Artificial Sequence: Synthetic peptide
  XENP020524 vlCDR1
KASQSVDYDGDSYMN

SEQ ID NO: 18933 - protein, 7 aa, Artificial Sequence
  Description of Artificial Sequence: Synthetic peptide
  XENP020524 vlCDR2
AASNLES

SEQ ID NO: 18934 - protein, 9 aa, Artificial Sequence
  Description of Artificial Sequence: Synthetic peptide
  XENP020524 vlCDR3
QQSNEDPFT

SEQ ID NO: 18935 - protein, 450 aa, Artificial Sequence
  Description of Artificial Sequence: Synthetic polypeptide
  XENP020525 7G8_H0.73_L0_IgG1_PVA_/S267K Heavy Chain
EVKLEESGGGLVQPGGSMKLSCAASGFTFSDAWMDWVRQSPEKGLEWVAEIRTKANHHATYYAESVKGRFTISRDDSKSSVYLQMNSLRAEDTGIYYCTRLANWDWYFDVWGAGTTVTVSSASTKGPSVFPLAPSSKSTSGGTAALGCLVKDYFPEPVTVSWNSGALTSGVHTFPAVLQSSGLYSLSSVVTVPSSSLGTQTYICNVNHKPSDTKVDKKVEPKSCDKTHTCPPCPAPPVAGPSVFLFPPKPKDTLMISRTPEVTCVVVDVKHEDPEVKFNWYVDGVEVHNAKTKPREEEYNSTYRVVSVLTVLHQDWLNGKEYKCKVSNKALPAPIEKTISKAKGQPREPQVYTLPPSREEMTKNQVSLTCDVSGFYPSDIAVEWESDGQPENNYKTTPPVLDSDGSFFLYSKLTVDKSRWEQGDVFSCSVMHEALHNHYTQKSLSLSPGK

SEQ ID NO: 18936 - protein, 121 aa, Artificial Sequence
  Description of Artificial Sequence: Synthetic polypeptide
  VH of XENP020525
EVKLEESGGGLVQPGGSMKLSCAASGFTFSDAWMDWVRQSPEKGLEWVAEIRTKANHHATYYAESVKGRFTISRDDSKSSVYLQMNSLRAEDTGIYYCTRLANWDWYFDVWGAGTTVTVSS

SEQ ID NO: 18937 - protein, 5 aa, Artificial Sequence
  Description of Artificial Sequence: Synthetic peptide
  XENP020525 vhCDR1
DAWMD

SEQ ID NO: 18938 - protein, 19 aa, Artificial Sequence
  Description of Artificial Sequence: Synthetic peptide
  XENP020525 vhCDR2
EIRTKANHHATYYAESVKG

SEQ ID NO: 18939 - protein, 10 aa, Artificial Sequence
  Description of Artificial Sequence: Synthetic peptide
  XENP020525 vhCDR3
LANWDWYFDV

SEQ ID NO: 18940 - protein, 218 aa, Artificial Sequence; identical to SEQ ID NO: 17590
  Description of Artificial Sequence: Synthetic polypeptide
  XENP020525 7G8_H0.73_L0_IgG1_PVA_/S267K Light Chain

SEQ ID NO: 18941 - protein, 111 aa, Artificial Sequence; identical to SEQ ID NO: 17591
  Description of Artificial Sequence: Synthetic polypeptide
  VL of XENP020525

SEQ ID NO: 18942 - protein, 15 aa, Artificial Sequence
  Description of Artificial Sequence: Synthetic peptide
  XENP020525 vlCDR1
KASQSVDYDGDSYMN

SEQ ID NO: 18943 - protein, 7 aa, Artificial Sequence
  Description of Artificial Sequence: Synthetic peptide
  XENP020525 vlCDR2
AASNLES

SEQ ID NO: 18944 - protein, 9 aa, Artificial Sequence
  Description of Artificial Sequence: Synthetic peptide
  XENP020525 vlCDR3
QQSNEDPFT

SEQ ID NO: 18945 - protein, 450 aa, Artificial Sequence
  Description of Artificial Sequence: Synthetic polypeptide
  XENP020526 7G8_H0.74_L0_IgG1_PVA_/S267K Heavy Chain
EVKLEESGGGLVQPGGSMKLSCAASGFTFSDAWMDWVRQSPEKGLEWVAEIRTKANEHATYYAESVKGRFTISRDDSKSSVYLQMNSLRAEDTGIYYCTRLANWDWYFDVWGAGTTVTVSSASTKGPSVFPLAPSSKSTSGGTAALGCLVKDYFPEPVTVSWNSGALTSGVHTFPAVLQSSGLYSLSSVVTVPSSSLGTQTYICNVNHKPSDTKVDKKVEPKSCDKTHTCPPCPAPPVAGPSVFLFPPKPKDTLMISRTPEVTCVVVDVKHEDPEVKFNWYVDGVEVHNAKTKPREEEYNSTYRVVSVLTVLHQDWLNGKEYKCKVSNKALPAPIEKTISKAKGQPREPQVYTLPPSREEMTKNQVSLTCDVSGFYPSDIAVEWESDGQPENNYKTTPPVLDSDGSFFLYSKLTVDKSRWEQGDVFSCSVMHEALHNHYTQKSLSLSPGK

SEQ ID NO: 18946 - protein, 121 aa, Artificial Sequence
  Description of Artificial Sequence: Synthetic polypeptide
  VH of XENP020526
EVKLEESGGGLVQPGGSMKLSCAASGFTFSDAWMDWVRQSPEKGLEWVAEIRTKANEHATYYAESVKGRFTISRDDSKSSVYLQMNSLRAEDTGIYYCTRLANWDWYFDVWGAGTTVTVSS

SEQ ID NO: 18947 - protein, 5 aa, Artificial Sequence
  Description of Artificial Sequence: Synthetic peptide
  XENP020526 vhCDR1
DAWMD

SEQ ID NO: 18948 - protein, 19 aa, Artificial Sequence
  Description of Artificial Sequence: Synthetic peptide
  XENP020526 vhCDR2
EIRTKANEHATYYAESVKG

SEQ ID NO: 18949 - protein, 10 aa, Artificial Sequence
  Description of Artificial Sequence: Synthetic peptide
  XENP020526 vhCDR3
LANWDWYFDV

SEQ ID NO: 18950 - protein, 218 aa, Artificial Sequence; identical to SEQ ID NO: 17590
  Description of Artificial Sequence: Synthetic polypeptide
  XENP020526 7G8_H0.74_L0_IgG1_PVA_/S267K Light Chain

SEQ ID NO: 18951 - protein, 111 aa, Artificial Sequence; identical to SEQ ID NO: 17591
  Description of Artificial Sequence: Synthetic polypeptide
  VL of XENP020526

SEQ ID NO: 18952 - protein, 15 aa, Artificial Sequence
  Description of Artificial Sequence: Synthetic peptide
  XENP020526 vlCDR1
KASQSVDYDGDSYMN

SEQ ID NO: 18953 - protein, 7 aa, Artificial Sequence
  Description of Artificial Sequence: Synthetic peptide
  XENP020526 vlCDR2
AASNLES

SEQ ID NO: 18954 - protein, 9 aa, Artificial Sequence
  Description of Artificial Sequence: Synthetic peptide
  XENP020526 vlCDR3
QQSNEDPFT

SEQ ID NO: 18955 - protein, 450 aa, Artificial Sequence
  Description of Artificial Sequence: Synthetic polypeptide
  XENP020527 7G8_H0.75_L0_IgG1_PVA_/S267K Heavy Chain
EVKLEESGGGLVQPGGSMKLSCAASGFTFSDAWMDWVRQSPEKGLEWVAEIRTKANSHATYYAESVKGRFTISRDDSKSSVYLQMNSLRAEDTGIYYCTRLANWDWYFDVWGAGTTVTVSSASTKGPSVFPLAPSSKSTSGGTAALGCLVKDYFPEPVTVSWNSGALTSGVHTFPAVLQSSGLYSLSSVVTVPSSSLGTQTYICNVNHKPSDTKVDKKVEPKSCDKTHTCPPCPAPPVAGPSVFLFPPKPKDTLMISRTPEVTCVVVDVKHEDPEVKFNWYVDGVEVHNAKTKPREEEYNSTYRVVSVLTVLHQDWLNGKEYKCKVSNKALPAPIEKTISKAKGQPREPQVYTLPPSREEMTKNQVSLTCDVSGFYPSDIAVEWESDGQPENNYKTTPPVLDSDGSFFLYSKLTVDKSRWEQGDVFSCSVMHEALHNHYTQKSLSLSPGK

SEQ ID NO: 18956 - protein, 121 aa, Artificial Sequence
  Description of Artificial Sequence: Synthetic polypeptide
  VH of XENP020527
EVKLEESGGGLVQPGGSMKLSCAASGFTFSDAWMDWVRQSPEKGLEWVAEIRTKANSHATYYAESVKGRFTISRDDSKSSVYLQMNSLRAEDTGIYYCTRLANWDWYFDVWGAGTTVTVSS

SEQ ID NO: 18957 - protein, 5 aa, Artificial Sequence
  Description of Artificial Sequence: Synthetic peptide
  XENP020527 vhCDR1
DAWMD

SEQ ID NO: 18958 - protein, 19 aa, Artificial Sequence
  Description of Artificial Sequence: Synthetic peptide
  XENP020527 vhCDR2
EIRTKANSHATYYAESVKG

SEQ ID NO: 18959 - protein, 10 aa, Artificial Sequence
  Description of Artificial Sequence: Synthetic peptide
  XENP020527 vhCDR3
LANWDWYFDV

SEQ ID NO: 18960 - protein, 218 aa, Artificial Sequence; identical to SEQ ID NO: 17590
  Description of Artificial Sequence: Synthetic polypeptide
  XENP020527 7G8_H0.75_L0_IgG1_PVA_/S267K Light Chain

SEQ ID NO: 18961 - protein, 111 aa, Artificial Sequence; identical to SEQ ID NO: 17591
  Description of Artificial Sequence: Synthetic polypeptide
  VL of XENP020527

SEQ ID NO: 18962 - protein, 15 aa, Artificial Sequence
  Description of Artificial Sequence: Synthetic peptide
  XENP020527 vlCDR1
KASQSVDYDGDSYMN

SEQ ID NO: 18963 - protein, 7 aa, Artificial Sequence
  Description of Artificial Sequence: Synthetic peptide
  XENP020527 vlCDR2
AASNLES

SEQ ID NO: 18964 - protein, 9 aa, Artificial Sequence
  Description of Artificial Sequence: Synthetic peptide
  XENP020527 vlCDR3
QQSNEDPFT

SEQ ID NO: 18965 - protein, 450 aa, Artificial Sequence
  Description of Artificial Sequence: Synthetic polypeptide
  XENP020528 7G8_H0.76_L0_IgG1_PVA_/S267K Heavy Chain
EVKLEESGGGLVQPGGSMKLSCAASGFTFSDAWMDWVRQSPEKGLEWVAEIRTKANRHATYYAESVKGRFTISRDDSKSSVYLQMNSLRAEDTGIYYCTRLANWDWYFDVWGAGTTVTVSSASTKGPSVFPLAPSSKSTSGGTAALGCLVKDYFPEPVTVSWNSGALTSGVHTFPAVLQSSGLYSLSSVVTVPSSSLGTQTYICNVNHKPSDTKVDKKVEPKSCDKTHTCPPCPAPPVAGPSVFLFPPKPKDTLMISRTPEVTCVVVDVKHEDPEVKFNWYVDGVEVHNAKTKPREEEYNSTYRVVSVLTVLHQDWLNGKEYKCKVSNKALPAPIEKTISKAKGQPREPQVYTLPPSREEMTKNQVSLTCDVSGFYPSDIAVEWESDGQPENNYKTTPPVLDSDGSFFLYSKLTVDKSRWEQGDVFSCSVMHEALHNHYTQKSLSLSPGK

SEQ ID NO: 18966 - protein, 121 aa, Artificial Sequence
  Description of Artificial Sequence: Synthetic polypeptide
  VH of XENP020528
EVKLEESGGGLVQPGGSMKLSCAASGFTFSDAWMDWVRQSPEKGLEWVAEIRTKANRHATYYAESVKGRFTISRDDSKSSVYLQMNSLRAEDTGIYYCTRLANWDWYFDVWGAGTTVTVSS

SEQ ID NO: 18967 - protein, 5 aa, Artificial Sequence
  Description of Artificial Sequence: Synthetic peptide
  XENP020528 vhCDR1
DAWMD

SEQ ID NO: 18968 - protein, 19 aa, Artificial Sequence
  Description of Artificial Sequence: Synthetic peptide
  XENP020528 vhCDR2
EIRTKANRHATYYAESVKG

SEQ ID NO: 18969 - protein, 10 aa, Artificial Sequence
  Description of Artificial Sequence: Synthetic peptide
  XENP020528 vhCDR3
LANWDWYFDV

SEQ ID NO: 18970 - protein, 218 aa, Artificial Sequence; identical to SEQ ID NO: 17590
  Description of Artificial Sequence: Synthetic polypeptide
  XENP020528 7G8_H0.76_L0_IgG1_PVA_/S267K Light Chain

SEQ ID NO: 18971 - protein, 111 aa, Artificial Sequence; identical to SEQ ID NO: 17591
  Description of Artificial Sequence: Synthetic polypeptide
  VL of XENP020528

SEQ ID NO: 18972 - protein, 15 aa, Artificial Sequence
  Description of Artificial Sequence: Synthetic peptide
  XENP020528 vlCDR1
KASQSVDYDGDSYMN

SEQ ID NO: 18973 - protein, 7 aa, Artificial Sequence
  Description of Artificial Sequence: Synthetic peptide
  XENP020528 vlCDR2
AASNLES

SEQ ID NO: 18974 - protein, 9 aa, Artificial Sequence
  Description of Artificial Sequence: Synthetic peptide
  XENP020528 vlCDR3
QQSNEDPFT

SEQ ID NO: 18975 - protein, 450 aa, Artificial Sequence
  Description of Artificial Sequence: Synthetic polypeptide
  XENP020529 7G8_H0.77_L0_IgG1_PVA_/S267K Heavy Chain
EVKLEESGGGLVQPGGSMKLSCAASGFTFSDAWMDWVRQSPEKGLEWVAEIRTKANLHATYYAESVKGRFTISRDDSKSSVYLQMNSLRAEDTGIYYCTRLANWDWYFDVWGAGTTVTVSSASTKGPSVFPLAPSSKSTSGGTAALGCLVKDYFPEPVTVSWNSGALTSGVHTFPAVLQSSGLYSLSSVVTVPSSSLGTQTYICNVNHKPSDTKVDKKVEPKSCDKTHTCPPCPAPPVAGPSVFLFPPKPKDTLMISRTPEVTCVVVDVKHEDPEVKFNWYVDGVEVHNAKTKPREEEYNSTYRVVSVLTVLHQDWLNGKEYKCKVSNKALPAPIEKTISKAKGQPREPQVYTLPPSREEMTKNQVSLTCDVSGFYPSDIAVEWESDGQPENNYKTTPPVLDSDGSFFLYSKLTVDKSRWEQGDVFSCSVMHEALHNHYTQKSLSLSPGK

SEQ ID NO: 18976 - protein, 121 aa, Artificial Sequence
  Description of Artificial Sequence: Synthetic polypeptide
  VH of XENP020529
EVKLEESGGGLVQPGGSMKLSCAASGFTFSDAWMDWVRQSPEKGLEWVAEIRTKANLHATYYAESVKGRFTISRDDSKSSVYLQMNSLRAEDTGIYYCTRLANWDWYFDVWGAGTTVTVSS

SEQ ID NO: 18977 - protein, 5 aa, Artificial Sequence
  Description of Artificial Sequence: Synthetic peptide
  XENP020529 vhCDR1
DAWMD

SEQ ID NO: 18978 - protein, 19 aa, Artificial Sequence
  Description of Artificial Sequence: Synthetic peptide
  XENP020529 vhCDR2
EIRTKANLHATYYAESVKG

SEQ ID NO: 18979 - protein, 10 aa, Artificial Sequence
  Description of Artificial Sequence: Synthetic peptide
  XENP020529 vhCDR3
LANWDWYFDV

SEQ ID NO: 18980 - protein, 218 aa, Artificial Sequence; identical to SEQ ID NO: 17590
  Description of Artificial Sequence: Synthetic polypeptide
  XENP020529 7G8_H0.77_L0_IgG1_PVA_/S267K Light Chain

SEQ ID NO: 18981 - protein, 111 aa, Artificial Sequence; identical to SEQ ID NO: 17591
  Description of Artificial Sequence: Synthetic polypeptide
  VL of XENP020529

SEQ ID NO: 18982 - protein, 15 aa, Artificial Sequence
  Description of Artificial Sequence: Synthetic peptide
  XENP020529 vlCDR1
KASQSVDYDGDSYMN

SEQ ID NO: 18983 - protein, 7 aa, Artificial Sequence
  Description of Artificial Sequence: Synthetic peptide
  XENP020529 vlCDR2
AASNLES

SEQ ID NO: 18984 - protein, 9 aa, Artificial Sequence
  Description of Artificial Sequence: Synthetic peptide
  XENP020529 vlCDR3
QQSNEDPFT

SEQ ID NO: 18985 - protein, 450 aa, Artificial Sequence
  Description of Artificial Sequence: Synthetic polypeptide
  XENP020530 7G8_H0.78_L0_IgG1_PVA_/S267K Heavy Chain
EVKLEESGGGLVQPGGSMKLSCAASGFTFSDAWMDWVRQSPEKGLEWVAEIRTKANTHATYYAESVKGRFTISRDDSKSSVYLQMNSLRAEDTGIYYCTRLANWDWYFDVWGAGTTVTVSSASTKGPSVFPLAPSSKSTSGGTAALGCLVKDYFPEPVTVSWNSGALTSGVHTFPAVLQSSGLYSLSSVVTVPSSSLGTQTYICNVNHKPSDTKVDKKVEPKSCDKTHTCPPCPAPPVAGPSVFLFPPKPKDTLMISRTPEVTCVVVDVKHEDPEVKFNWYVDGVEVHNAKTKPREEEYNSTYRVVSVLTVLHQDWLNGKEYKCKVSNKALPAPIEKTISKAKGQPREPQVYTLPPSREEMTKNQVSLTCDVSGFYPSDIAVEWESDGQPENNYKTTPPVLDSDGSFFLYSKLTVDKSRWEQGDVFSCSVMHEALHNHYTQKSLSLSPGK

SEQ ID NO: 18986 - protein, 121 aa, Artificial Sequence
  Description of Artificial Sequence: Synthetic polypeptide
  VH of XENP020530
EVKLEESGGGLVQPGGSMKLSCAASGFTFSDAWMDWVRQSPEKGLEWVAEIRTKANTHATYYAESVKGRFTISRDDSKSSVYLQMNSLRAEDTGIYYCTRLANWDWYFDVWGAGTTVTVSS

SEQ ID NO: 18987 - protein, 5 aa, Artificial Sequence
  Description of Artificial Sequence: Synthetic peptide
  XENP020530 vhCDR1
DAWMD

SEQ ID NO: 18988 - protein, 19 aa, Artificial Sequence
  Description of Artificial Sequence: Synthetic peptide
  XENP020530 vhCDR2
EIRTKANTHATYYAESVKG

SEQ ID NO: 18989 - protein, 10 aa, Artificial Sequence
  Description of Artificial Sequence: Synthetic peptide
  XENP020530 vhCDR3
LANWDWYFDV

SEQ ID NO: 18990 - protein, 218 aa, Artificial Sequence; identical to SEQ ID NO: 17590
  Description of Artificial Sequence: Synthetic polypeptide
  XENP020530 7G8_H0.78_L0_IgG1_PVA_/S267K Light Chain

SEQ ID NO: 18991 - protein, 111 aa, Artificial Sequence; identical to SEQ ID NO: 17591
  Description of Artificial Sequence: Synthetic polypeptide
  VL of XENP020530

SEQ ID NO: 18992 - protein, 15 aa, Artificial Sequence
  Description of Artificial Sequence: Synthetic peptide
  XENP020530 vlCDR1
KASQSVDYDGDSYMN

SEQ ID NO: 18993 - protein, 7 aa, Artificial Sequence
  Description of Artificial Sequence: Synthetic peptide
  XENP020530 vlCDR2
AASNLES

SEQ ID NO: 18994 - protein, 9 aa, Artificial Sequence
  Description of Artificial Sequence: Synthetic peptide
  XENP020530 vlCDR3
QQSNEDPFT

SEQ ID NO: 18995 - protein, 450 aa, Artificial Sequence
  Description of Artificial Sequence: Synthetic polypeptide
  XENP020531 7G8_H0.79_L0_IgG1_PVA_/S267K Heavy Chain
EVKLEESGGGLVQPGGSMKLSCAASGFTFSDAWMDWVRQSPEKGLEWVAEIRTKANGHATYYAESVKGRFTISRDDSKSSVYLQMNSLRAEDTGIYYCTRLANWDWYFDVWGAGTTVTVSSASTKGPSVFPLAPSSKSTSGGTAALGCLVKDYFPEPVTVSWNSGALTSGVHTFPAVLQSSGLYSLSSVVTVPSSSLGTQTYICNVNHKPSDTKVDKKVEPKSCDKTHTCPPCPAPPVAGPSVFLFPPKPKDTLMISRTPEVTCVVVDVKHEDPEVKFNWYVDGVEVHNAKTKPREEEYNSTYRVVSVLTVLHQDWLNGKEYKCKVSNKALPAPIEKTISKAKGQPREPQVYTLPPSREEMTKNQVSLTCDVSGFYPSDIAVEWESDGQPENNYKTTPPVLDSDGSFFLYSKLTVDKSRWEQGDVFSCSVMHEALHNHYTQKSLSLSPGK

SEQ ID NO: 18996 - protein, 121 aa, Artificial Sequence
  Description of Artificial Sequence: Synthetic polypeptide
  VH of XENP020531
EVKLEESGGGLVQPGGSMKLSCAASGFTFSDAWMDWVRQSPEKGLEWVAEIRTKANGHATYYAESVKGRFTISRDDSKSSVYLQMNSLRAEDTGIYYCTRLANWDWYFDVWGAGTTVTVSS

SEQ ID NO: 18997 - protein, 5 aa, Artificial Sequence
  Description of Artificial Sequence: Synthetic peptide
  XENP020531 vhCDR1
DAWMD

SEQ ID NO: 18998 - protein, 19 aa, Artificial Sequence
  Description of Artificial Sequence: Synthetic peptide
  XENP020531 vhCDR2
EIRTKANGHATYYAESVKG

SEQ ID NO: 18999 - protein, 10 aa, Artificial Sequence
  Description of Artificial Sequence: Synthetic peptide
  XENP020531 vhCDR3
LANWDWYFDV

SEQ ID NO: 19000 - protein, 218 aa, Artificial Sequence; identical to SEQ ID NO: 17590
  Description of Artificial Sequence: Synthetic polypeptide
  XENP020531 7G8_H0.79_L0_IgG1_PVA_/S267K Light Chain

SEQ ID NO: 19001 - protein, 111 aa, Artificial Sequence; identical to SEQ ID NO: 17591
  Description of Artificial Sequence: Synthetic polypeptide
  VL of XENP020531

SEQ ID NO: 19002 - protein, 15 aa, Artificial Sequence
  Description of Artificial Sequence: Synthetic peptide
  XENP020531 vlCDR1
KASQSVDYDGDSYMN

SEQ ID NO: 19003 - protein, 7 aa, Artificial Sequence
  Description of Artificial Sequence: Synthetic peptide
  XENP020531 vlCDR2
AASNLES

SEQ ID NO: 19004 - protein, 9 aa, Artificial Sequence
  Description of Artificial Sequence: Synthetic peptide
  XENP020531 vlCDR3
QQSNEDPFT

SEQ ID NO: 19005 - protein, 450 aa, Artificial Sequence
  Description of Artificial Sequence: Synthetic polypeptide
  XENP020532 7G8_H0.80_L0_IgG1_PVA_/S267K Heavy Chain
EVKLEESGGGLVQPGGSMKLSCAASGFTFSDAWMDWVRQSPEKGLEWVAEIRTKANYHATYYAESVKGRFTISRDDSKSSVYLQMNSLRAEDTGIYYCTRLANWDWYFDVWGAGTTVTVSSASTKGPSVFPLAPSSKSTSGGTAALGCLVKDYFPEPVTVSWNSGALTSGVHTFPAVLQSSGLYSLSSVVTVPSSSLGTQTYICNVNHKPSDTKVDKKVEPKSCDKTHTCPPCPAPPVAGPSVFLFPPKPKDTLMISRTPEVTCVVVDVKHEDPEVKFNWYVDGVEVHNAKTKPREEEYNSTYRVVSVLTVLHQDWLNGKEYKCKVSNKALPAPIEKTISKAKGQPREPQVYTLPPSREEMTKNQVSLTCDVSGFYPSDIAVEWESDGQPENNYKTTPPVLDSDGSFFLYSKLTVDKSRWEQGDVFSCSVMHEALHNHYTQKSLSLSPGK

SEQ ID NO: 19006 - protein, 121 aa, Artificial Sequence
  Description of Artificial Sequence: Synthetic polypeptide
  VH of XENP020532
EVKLEESGGGLVQPGGSMKLSCAASGFTFSDAWMDWVRQSPEKGLEWVAEIRTKANYHATYYAESVKGRFTISRDDSKSSVYLQMNSLRAEDTGIYYCTRLANWDWYFDVWGAGTTVTVSS

SEQ ID NO: 19007 - protein, 5 aa, Artificial Sequence
  Description of Artificial Sequence: Synthetic peptide
  XENP020532 vhCDR1
DAWMD

SEQ ID NO: 19008 - protein, 19 aa, Artificial Sequence
  Description of Artificial Sequence: Synthetic peptide
  XENP020532 vhCDR2
EIRTKANYHATYYAESVKG

SEQ ID NO: 19009 - protein, 10 aa, Artificial Sequence
  Description of Artificial Sequence: Synthetic peptide
  XENP020532 vhCDR3
LANWDWYFDV

SEQ ID NO: 19010 - protein, 218 aa, Artificial Sequence; identical to SEQ ID NO: 17590
  Description of Artificial Sequence: Synthetic polypeptide
  XENP020532 7G8_H0.80_L0_IgG1_PVA_/S267K Light Chain

SEQ ID NO: 19011 - protein, 111 aa, Artificial Sequence; identical to SEQ ID NO: 17591
  Description of Artificial Sequence: Synthetic polypeptide
  VL of XENP020532

SEQ ID NO: 19012 - protein, 15 aa, Artificial Sequence
  Description of Artificial Sequence: Synthetic peptide
  XENP020532 vlCDR1
KASQSVDYDGDSYMN

SEQ ID NO: 19013 - protein, 7 aa, Artificial Sequence
  Description of Artificial Sequence: Synthetic peptide
  XENP020532 vlCDR2
AASNLES

SEQ ID NO: 19014 - protein, 9 aa, Artificial Sequence
  Description of Artificial Sequence: Synthetic peptide
  XENP020532 vlCDR3
QQSNEDPFT

SEQ ID NO: 19015 - protein, 450 aa, Artificial Sequence
  Description of Artificial Sequence: Synthetic polypeptide
  XENP020533 7G8_H0.81_L0_IgG1_PVA_/S267K Heavy Chain
EVKLEESGGGLVQPGGSMKLSCAASGFTFSDAWMDWVRQSPEKGLEWVAEIRTKANNYATYYAESVKGRFTISRDDSKSSVYLQMNSLRAEDTGIYYCTRLANWDWYFDVWGAGTTVTVSSASTKGPSVFPLAPSSKSTSGGTAALGCLVKDYFPEPVTVSWNSGALTSGVHTFPAVLQSSGLYSLSSVVTVPSSSLGTQTYICNVNHKPSDTKVDKKVEPKSCDKTHTCPPCPAPPVAGPSVFLFPPKPKDTLMISRTPEVTCVVVDVKHEDPEVKFNWYVDGVEVHNAKTKPREEEYNSTYRVVSVLTVLHQDWLNGKEYKCKVSNKALPAPIEKTISKAKGQPREPQVYTLPPSREEMTKNQVSLTCDVSGFYPSDIAVEWESDGQPENNYKTTPPVLDSDGSFFLYSKLTVDKSRWEQGDVFSCSVMHEALHNHYTQKSLSLSPGK

SEQ ID NO: 19016 - protein, 121 aa, Artificial Sequence
  Description of Artificial Sequence: Synthetic polypeptide
  VH of XENP020533
EVKLEESGGGLVQPGGSMKLSCAASGFTFSDAWMDWVRQSPEKGLEWVAEIRTKANNYATYYAESVKGRFTISRDDSKSSVYLQMNSLRAEDTGIYYCTRLANWDWYFDVWGAGTTVTVSS

SEQ ID NO: 19017 - protein, 5 aa, Artificial Sequence
  Description of Artificial Sequence: Synthetic peptide
  XENP020533 vhCDR1
DAWMD

SEQ ID NO: 19018 - protein, 19 aa, Artificial Sequence
  Description of Artificial Sequence: Synthetic peptide
  XENP020533 vhCDR2
EIRTKANNYATYYAESVKG

SEQ ID NO: 19019 - protein, 10 aa, Artificial Sequence
  Description of Artificial Sequence: Synthetic peptide
  XENP020533 vhCDR3
LANWDWYFDV

SEQ ID NO: 19020 - protein, 218 aa, Artificial Sequence; identical to SEQ ID NO: 17590
  Description of Artificial Sequence: Synthetic polypeptide
  XENP020533 7G8_H0.81_L0_IgG1_PVA_/S267K Light Chain

SEQ ID NO: 19021 - protein, 111 aa, Artificial Sequence; identical to SEQ ID NO: 17591
  Description of Artificial Sequence: Synthetic polypeptide
  VL of XENP020533

SEQ ID NO: 19022 - protein, 15 aa, Artificial Sequence
  Description of Artificial Sequence: Synthetic peptide
  XENP020533 vlCDR1
KASQSVDYDGDSYMN

SEQ ID NO: 19023 - protein, 7 aa, Artificial Sequence
  Description of Artificial Sequence: Synthetic peptide
  XENP020533 vlCDR2
AASNLES

SEQ ID NO: 19024 - protein, 9 aa, Artificial Sequence
  Description of Artificial Sequence: Synthetic peptide
  XENP020533 vlCDR3
QQSNEDPFT

SEQ ID NO: 19025 - protein, 450 aa, Artificial Sequence
  Description of Artificial Sequence: Synthetic polypeptide
  XENP020534 7G8_H0.82_L0_IgG1_PVA_/S267K Heavy Chain
EVKLEESGGGLVQPGGSMKLSCAASGFTFSDAWMDWVRQSPEKGLEWVAEIRTKANNQATYYAESVKGRFTISRDDSKSSVYLQMNSLRAEDTGIYYCTRLANWDWYFDVWGAGTTVTVSSASTKGPSVFPLAPSSKSTSGGTAALGCLVKDYFPEPVTVSWNSGALTSGVHTFPAVLQSSGLYSLSSVVTVPSSSLGTQTYICNVNHKPSDTKVDKKVEPKSCDKTHTCPPCPAPPVAGPSVFLFPPKPKDTLMISRTPEVTCVVVDVKHEDPEVKFNWYVDGVEVHNAKTKPREEEYNSTYRVVSVLTVLHQDWLNGKEYKCKVSNKALPAPIEKTISKAKGQPREPQVYTLPPSREEMTKNQVSLTCDVSGFYPSDIAVEWESDGQPENNYKTTPPVLDSDGSFFLYSKLTVDKSRWEQGDVFSCSVMHEALHNHYTQKSLSLSPGK

SEQ ID NO: 19026 - protein, 121 aa, Artificial Sequence
  Description of Artificial Sequence: Synthetic polypeptide
  VH of XENP020534
EVKLEESGGGLVQPGGSMKLSCAASGFTFSDAWMDWVRQSPEKGLEWVAEIRTKANNQATYYAESVKGRFTISRDDSKSSVYLQMNSLRAEDTGIYYCTRLANWDWYFDVWGAGTTVTVSS

SEQ ID NO: 19027 - protein, 5 aa, Artificial Sequence
  Description of Artificial Sequence: Synthetic peptide
  XENP020534 vhCDR1
DAWMD

SEQ ID NO: 19028 - protein, 19 aa, Artificial Sequence
  Description of Artificial Sequence: Synthetic peptide
  XENP020534 vhCDR2
EIRTKANNQATYYAESVKG

SEQ ID NO: 19029 - protein, 10 aa, Artificial Sequence
  Description of Artificial Sequence: Synthetic peptide
  XENP020534 vhCDR3
LANWDWYFDV

SEQ ID NO: 19030 - protein, 218 aa, Artificial Sequence; identical to SEQ ID NO: 17590
  Description of Artificial Sequence: Synthetic polypeptide
  XENP020534 7G8_H0.82_L0_IgG1_PVA_/S267K Light Chain

SEQ ID NO: 19031 - protein, 111 aa, Artificial Sequence; identical to SEQ ID NO: 17591
  Description of Artificial Sequence: Synthetic polypeptide
  VL of XENP020534

SEQ ID NO: 19032 - protein, 15 aa, Artificial Sequence
  Description of Artificial Sequence: Synthetic peptide
  XENP020534 vlCDR1
KASQSVDYDGDSYMN

SEQ ID NO: 19033 - protein, 7 aa, Artificial Sequence
  Description of Artificial Sequence: Synthetic peptide
  XENP020534 vlCDR2
AASNLES

SEQ ID NO: 19034 - protein, 9 aa, Artificial Sequence
  Description of Artificial Sequence: Synthetic peptide
  XENP020534 vlCDR3
QQSNEDPFT

SEQ ID NO: 19035 - protein, 450 aa, Artificial Sequence
  Description of Artificial Sequence: Synthetic polypeptide
  XENP020535 7G8_H0.83_L0_IgG1_PVA_/S267K Heavy Chain
EVKLEESGGGLVQPGGSMKLSCAASGFTFSDAWMDWVRQSPEKGLEWVAEIRTKANNDATYYAESVKGRFTISRDDSKSSVYLQMNSLRAEDTGIYYCTRLANWDWYFDVWGAGTTVTVSSASTKGPSVFPLAPSSKSTSGGTAALGCLVKDYFPEPVTVSWNSGALTSGVHTFPAVLQSSGLYSLSSVVTVPSSSLGTQTYICNVNHKPSDTKVDKKVEPKSCDKTHTCPPCPAPPVAGPSVFLFPPKPKDTLMISRTPEVTCVVVDVKHEDPEVKFNWYVDGVEVHNAKTKPREEEYNSTYRVVSVLTVLHQDWLNGKEYKCKVSNKALPAPIEKTISKAKGQPREPQVYTLPPSREEMTKNQVSLTCDVSGFYPSDIAVEWESDGQPENNYKTTPPVLDSDGSFFLYSKLTVDKSRWEQGDVFSCSVMHEALHNHYTQKSLSLSPGK

SEQ ID NO: 19036 - protein, 121 aa, Artificial Sequence
  Description of Artificial Sequence: Synthetic polypeptide
  VH of XENP020535
EVKLEESGGGLVQPGGSMKLSCAASGFTFSDAWMDWVRQSPEKGLEWVAEIRTKANNDATYYAESVKGRFTISRDDSKSSVYLQMNSLRAEDTGIYYCTRLANWDWYFDVWGAGTTVTVSS

SEQ ID NO: 19037 - protein, 5 aa, Artificial Sequence
  Description of Artificial Sequence: Synthetic peptide
  XENP020535 vhCDR1
DAWMD

SEQ ID NO: 19038 - protein, 19 aa, Artificial Sequence
  Description of Artificial Sequence: Synthetic peptide
  XENP020535 vhCDR2
EIRTKANNDATYYAESVKG

SEQ ID NO: 19039 - protein, 10 aa, Artificial Sequence
  Description of Artificial Sequence: Synthetic peptide
  XENP020535 vhCDR3
LANWDWYFDV

SEQ ID NO: 19040 - protein, 218 aa, Artificial Sequence; identical to SEQ ID NO: 17590
  Description of Artificial Sequence: Synthetic polypeptide
  XENP020535 7G8_H0.83_L0_IgG1_PVA_/S267K Light Chain

SEQ ID NO: 19041 - protein, 111 aa, Artificial Sequence; identical to SEQ ID NO: 17591
  Description of Artificial Sequence: Synthetic polypeptide
  VL of XENP020535

SEQ ID NO: 19042 - protein, 15 aa, Artificial Sequence
  Description of Artificial Sequence: Synthetic peptide
  XENP020535 vlCDR1
KASQSVDYDGDSYMN

SEQ ID NO: 19043 - protein, 7 aa, Artificial Sequence
  Description of Artificial Sequence: Synthetic peptide
  XENP020535 vlCDR2
AASNLES

SEQ ID NO: 19044 - protein, 9 aa, Artificial Sequence
  Description of Artificial Sequence: Synthetic peptide
  XENP020535 vlCDR3
QQSNEDPFT

SEQ ID NO: 19045 - protein, 450 aa, Artificial Sequence
  Description of Artificial Sequence: Synthetic polypeptide
  XENP020536 7G8_H0.84_L0_IgG1_PVA_/S267K Heavy Chain
EVKLEESGGGLVQPGGSMKLSCAASGFTFSDAWMDWVRQSPEKGLEWVAEIRTKANNFATYYAESVKGRFTISRDDSKSSVYLQMNSLRAEDTGIYYCTRLANWDWYFDVWGAGTTVTVSSASTKGPSVFPLAPSSKSTSGGTAALGCLVKDYFPEPVTVSWNSGALTSGVHTFPAVLQSSGLYSLSSVVTVPSSSLGTQTYICNVNHKPSDTKVDKKVEPKSCDKTHTCPPCPAPPVAGPSVFLFPPKPKDTLMISRTPEVTCVVVDVKHEDPEVKFNWYVDGVEVHNAKTKPREEEYNSTYRVVSVLTVLHQDWLNGKEYKCKVSNKALPAPIEKTISKAKGQPREPQVYTLPPSREEMTKNQVSLTCDVSGFYPSDIAVEWESDGQPENNYKTTPPVLDSDGSFFLYSKLTVDKSRWEQGDVFSCSVMHEALHNHYTQKSLSLSPGK

SEQ ID NO: 19046 - protein, 121 aa, Artificial Sequence
  Description of Artificial Sequence: Synthetic polypeptide
  VH of XENP020536
EVKLEESGGGLVQPGGSMKLSCAASGFTFSDAWMDWVRQSPEKGLEWVAEIRTKANNFATYYAESVKGRFTISRDDSKSSVYLQMNSLRAEDTGIYYCTRLANWDWYFDVWGAGTTVTVSS

SEQ ID NO: 19047 - protein, 5 aa, Artificial Sequence
  Description of Artificial Sequence: Synthetic peptide
  XENP020536 vhCDR1
DAWMD

SEQ ID NO: 19048 - protein, 19 aa, Artificial Sequence
  Description of Artificial Sequence: Synthetic peptide
  XENP020536 vhCDR2
EIRTKANNFATYYAESVKG

SEQ ID NO: 19049 - protein, 10 aa, Artificial Sequence
  Description of Artificial Sequence: Synthetic peptide
  XENP020536 vhCDR3
LANWDWYFDV

SEQ ID NO: 19050 - protein, 218 aa, Artificial Sequence; identical to SEQ ID NO: 17590
  Description of Artificial Sequence: Synthetic polypeptide
  XENP020536 7G8_H0.84_L0_IgG1_PVA_/S267K Light Chain

SEQ ID NO: 19051 - protein, 111 aa, Artificial Sequence; identical to SEQ ID NO: 17591
  Description of Artificial Sequence: Synthetic polypeptide
  VL of XENP020536

SEQ ID NO: 19052 - protein, 15 aa, Artificial Sequence
  Description of Artificial Sequence: Synthetic peptide
  XENP020536 vlCDR1
KASQSVDYDGDSYMN

SEQ ID NO: 19053 - protein, 7 aa, Artificial Sequence
  Description of Artificial Sequence: Synthetic peptide
  XENP020536 vlCDR2
AASNLES

SEQ ID NO: 19054 - protein, 9 aa, Artificial Sequence
  Description of Artificial Sequence: Synthetic peptide
  XENP020536 vlCDR3
QQSNEDPFT

SEQ ID NO: 19055 - protein, 450 aa, Artificial Sequence
  Description of Artificial Sequence: Synthetic polypeptide
  XENP020537 7G8_H0.85_L0_IgG1_PVA_/S267K Heavy Chain
EVKLEESGGGLVQPGGSMKLSCAASGFTFSDAWMDWVRQSPEKGLEWVAEIRTKANNAATYYAESVKGRFTISRDDSKSSVYLQMNSLRAEDTGIYYCTRLANWDWYFDVWGAGTTVTVSSASTKGPSVFPLAPSSKSTSGGTAALGCLVKDYFPEPVTVSWNSGALTSGVHTFPAVLQSSGLYSLSSVVTVPSSSLGTQTYICNVNHKPSDTKVDKKVEPKSCDKTHTCPPCPAPPVAGPSVFLFPPKPKDTLMISRTPEVTCVVVDVKHEDPEVKFNWYVDGVEVHNAKTKPREEEYNSTYRVVSVLTVLHQDWLNGKEYKCKVSNKALPAPIEKTISKAKGQPREPQVYTLPPSREEMTKNQVSLTCDVSGFYPSDIAVEWESDGQPENNYKTTPPVLDSDGSFFLYSKLTVDKSRWEQGDVFSCSVMHEALHNHYTQKSLSLSPGK

SEQ ID NO: 19056 - protein, 121 aa, Artificial Sequence
  Description of Artificial Sequence: Synthetic polypeptide
  VH of XENP020537
EVKLEESGGGLVQPGGSMKLSCAASGFTFSDAWMDWVRQSPEKGLEWVAEIRTKANNAATYYAESVKGRFTISRDDSKSSVYLQMNSLRAEDTGIYYCTRLANWDWYFDVWGAGTTVTVSS

SEQ ID NO: 19057 - protein, 5 aa, Artificial Sequence
  Description of Artificial Sequence: Synthetic peptide
  XENP020537 vhCDR1
DAWMD

SEQ ID NO: 19058 - protein, 19 aa, Artificial Sequence
  Description of Artificial Sequence: Synthetic peptide
  XENP020537 vhCDR2
EIRTKANNAATYYAESVKG

SEQ ID NO: 19059 - protein, 10 aa, Artificial Sequence
  Description of Artificial Sequence: Synthetic peptide
  XENP020537 vhCDR3
LANWDWYFDV

SEQ ID NO: 19060 - protein, 218 aa, Artificial Sequence; identical to SEQ ID NO: 17590
  Description of Artificial Sequence: Synthetic polypeptide
  XENP020537 7G8_H0.85_L0_IgG1_PVA_/S267K Light Chain

SEQ ID NO: 19061 - protein, 111 aa, Artificial Sequence; identical to SEQ ID NO: 17591
  Description of Artificial Sequence: Synthetic polypeptide
  VL of XENP020537

SEQ ID NO: 19062 - protein, 15 aa, Artificial Sequence
  Description of Artificial Sequence: Synthetic peptide
  XENP020537 vlCDR1
KASQSVDYDGDSYMN

SEQ ID NO: 19063 - protein, 7 aa, Artificial Sequence
  Description of Artificial Sequence: Synthetic peptide
  XENP020537 vlCDR2
AASNLES

SEQ ID NO: 19064 - protein, 9 aa, Artificial Sequence
  Description of Artificial Sequence: Synthetic peptide
  XENP020537 vlCDR3
QQSNEDPFT

SEQ ID NO: 19065 - protein, 450 aa, Artificial Sequence
  Description of Artificial Sequence: Synthetic polypeptide
  XENP020538 7G8_H0.86_L0_IgG1_PVA_/S267K Heavy Chain
EVKLEESGGGLVQPGGSMKLSCAASGFTFSDAWMDWVRQSPEKGLEWVAEIRTKANNKATYYAESVKGRFTISRDDSKSSVYLQMNSLRAEDTGIYYCTRLANWDWYFDVWGAGTTVTVSSASTKGPSVFPLAPSSKSTSGGTAALGCLVKDYFPEPVTVSWNSGALTSGVHTFPAVLQSSGLYSLSSVVTVPSSSLGTQTYICNVNHKPSDTKVDKKVEPKSCDKTHTCPPCPAPPVAGPSVFLFPPKPKDTLMISRTPEVTCVVVDVKHEDPEVKFNWYVDGVEVHNAKTKPREEEYNSTYRVVSVLTVLHQDWLNGKEYKCKVSNKALPAPIEKTISKAKGQPREPQVYTLPPSREEMTKNQVSLTCDVSGFYPSDIAVEWESDGQPENNYKTTPPVLDSDGSFFLYSKLTVDKSRWEQGDVFSCSVMHEALHNHYTQKSLSLSPGK

SEQ ID NO: 19066 - protein, 121 aa, Artificial Sequence
  Description of Artificial Sequence: Synthetic polypeptide
  VH of XENP020538
EVKLEESGGGLVQPGGSMKLSCAASGFTFSDAWMDWVRQSPEKGLEWVAEIRTKANNKATYYAESVKGRFTISRDDSKSSVYLQMNSLRAEDTGIYYCTRLANWDWYFDVWGAGTTVTVSS

SEQ ID NO: 19067 - protein, 5 aa, Artificial Sequence
  Description of Artificial Sequence: Synthetic peptide
  XENP020538 vhCDR1
DAWMD

SEQ ID NO: 19068 - protein, 19 aa, Artificial Sequence
  Description of Artificial Sequence: Synthetic peptide
  XENP020538 vhCDR2
EIRTKANNKATYYAESVKG

SEQ ID NO: 19069 - protein, 10 aa, Artificial Sequence
  Description of Artificial Sequence: Synthetic peptide
  XENP020538 vhCDR3
LANWDWYFDV

SEQ ID NO: 19070 - protein, 218 aa, Artificial Sequence; identical to SEQ ID NO: 17590
  Description of Artificial Sequence: Synthetic polypeptide
  XENP020538 7G8_H0.86_L0_IgG1_PVA_/S267K Light Chain

SEQ ID NO: 19071 - protein, 111 aa, Artificial Sequence; identical to SEQ ID NO: 17591
  Description of Artificial Sequence: Synthetic polypeptide
  VL of XENP020538

SEQ ID NO: 19072 - protein, 15 aa, Artificial Sequence
  Description of Artificial Sequence: Synthetic peptide
  XENP020538 vlCDR1
KASQSVDYDGDSYMN

SEQ ID NO: 19073 - protein, 7 aa, Artificial Sequence
  Description of Artificial Sequence: Synthetic peptide
  XENP020538 vlCDR2
AASNLES

SEQ ID NO: 19074 - protein, 9 aa, Artificial Sequence
  Description of Artificial Sequence: Synthetic peptide
  XENP020538 vlCDR3
QQSNEDPFT

SEQ ID NO: 19075 - protein, 450 aa, Artificial Sequence
  Description of Artificial Sequence: Synthetic polypeptide
  XENP020539 7G8_H0.87_L0_IgG1_PVA_/S267K Heavy Chain
EVKLEESGGGLVQPGGSMKLSCAASGFTFSDAWMDWVRQSPEKGLEWVAEIRTKANNGATYYAESVKGRFTISRDDSKSSVYLQMNSLRAEDTGIYYCTRLANWDWYFDVWGAGTTVTVSSASTKGPSVFPLAPSSKSTSGGTAALGCLVKDYFPEPVTVSWNSGALTSGVHTFPAVLQSSGLYSLSSVVTVPSSSLGTQTYICNVNHKPSDTKVDKKVEPKSCDKTHTCPPCPAPPVAGPSVFLFPPKPKDTLMISRTPEVTCVVVDVKHEDPEVKFNWYVDGVEVHNAKTKPREEEYNSTYRVVSVLTVLHQDWLNGKEYKCKVSNKALPAPIEKTISKAKGQPREPQVYTLPPSREEMTKNQVSLTCDVSGFYPSDIAVEWESDGQPENNYKTTPPVLDSDGSFFLYSKLTVDKSRWEQGDVFSCSVMHEALHNHYTQKSLSLSPGK

SEQ ID NO: 19076 - protein, 121 aa, Artificial Sequence
  Description of Artificial Sequence: Synthetic polypeptide
  VH of XENP020539
EVKLEESGGGLVQPGGSMKLSCAASGFTFSDAWMDWVRQSPEKGLEWVAEIRTKANNGATYYAESVKGRFTISRDDSKSSVYLQMNSLRAEDTGIYYCTRLANWDWYFDVWGAGTTVTVSS

SEQ ID NO: 19077 - protein, 5 aa, Artificial Sequence
  Description of Artificial Sequence: Synthetic peptide
  XENP020539 vhCDR1
DAWMD

SEQ ID NO: 19078 - protein, 19 aa, Artificial Sequence
  Description of Artificial Sequence: Synthetic peptide
  XENP020539 vhCDR2
EIRTKANNGATYYAESVKG

SEQ ID NO: 19079 - protein, 10 aa, Artificial Sequence
  Description of Artificial Sequence: Synthetic peptide
  XENP020539 vhCDR3
LANWDWYFDV

SEQ ID NO: 19080 - protein, 218 aa, Artificial Sequence; identical to SEQ ID NO: 17590
  Description of Artificial Sequence: Synthetic polypeptide
  XENP020539 7G8_H0.87_L0_IgG1_PVA_/S267K Light Chain

SEQ ID NO: 19081 - protein, 111 aa, Artificial Sequence; identical to SEQ ID NO: 17591
  Description of Artificial Sequence: Synthetic polypeptide
  VL of XENP020539

SEQ ID NO: 19082 - protein, 15 aa, Artificial Sequence
  Description of Artificial Sequence: Synthetic peptide
  XENP020539 vlCDR1
KASQSVDYDGDSYMN

SEQ ID NO: 19083 - protein, 7 aa, Artificial Sequence
  Description of Artificial Sequence: Synthetic peptide
  XENP020539 vlCDR2
AASNLES

SEQ ID NO: 19084 - protein, 9 aa, Artificial Sequence
  Description of Artificial Sequence: Synthetic peptide
  XENP020539 vlCDR3
QQSNEDPFT

SEQ ID NO: 19085 - protein, 450 aa, Artificial Sequence
  Description of Artificial Sequence: Synthetic polypeptide
  XENP020540 7G8_H0.88_L0_IgG1_PVA_/S267K Heavy Chain
EVKLEESGGGLVQPGGSMKLSCAASGFTFSDAWMDWVRQSPEKGLEWVAEIRTKANNLATYYAESVKGRFTISRDDSKSSVYLQMNSLRAEDTGIYYCTRLANWDWYFDVWGAGTTVTVSSASTKGPSVFPLAPSSKSTSGGTAALGCLVKDYFPEPVTVSWNSGALTSGVHTFPAVLQSSGLYSLSSVVTVPSSSLGTQTYICNVNHKPSDTKVDKKVEPKSCDKTHTCPPCPAPPVAGPSVFLFPPKPKDTLMISRTPEVTCVVVDVKHEDPEVKFNWYVDGVEVHNAKTKPREEEYNSTYRVVSVLTVLHQDWLNGKEYKCKVSNKALPAPIEKTISKAKGQPREPQVYTLPPSREEMTKNQVSLTCDVSGFYPSDIAVEWESDGQPENNYKTTPPVLDSDGSFFLYSKLTVDKSRWEQGDVFSCSVMHEALHNHYTQKSLSLSPGK

SEQ ID NO: 19086 - protein, 121 aa, Artificial Sequence
  Description of Artificial Sequence: Synthetic polypeptide
  VH of XENP020540
EVKLEESGGGLVQPGGSMKLSCAASGFTFSDAWMDWVRQSPEKGLEWVAEIRTKANNLATYYAESVKGRFTISRDDSKSSVYLQMNSLRAEDTGIYYCTRLANWDWYFDVWGAGTTVTVSS

SEQ ID NO: 19087 - protein, 5 aa, Artificial Sequence
  Description of Artificial Sequence: Synthetic peptide
  XENP020540 vhCDR1
DAWMD

SEQ ID NO: 19088 - protein, 19 aa, Artificial Sequence
  Description of Artificial Sequence: Synthetic peptide
  XENP020540 vhCDR2
EIRTKANNLATYYAESVKG

SEQ ID NO: 19089 - protein, 10 aa, Artificial Sequence
  Description of Artificial Sequence: Synthetic peptide
  XENP020540 vhCDR3
LANWDWYFDV

SEQ ID NO: 19090 - protein, 218 aa, Artificial Sequence; identical to SEQ ID NO: 17590
  Description of Artificial Sequence: Synthetic polypeptide
  XENP020540 7G8_H0.88_L0_IgG1_PVA_/S267K Light Chain

SEQ ID NO: 19091 - protein, 111 aa, Artificial Sequence; identical to SEQ ID NO: 17591
  Description of Artificial Sequence: Synthetic polypeptide
  VL of XENP020540

SEQ ID NO: 19092 - protein, 15 aa, Artificial Sequence
  Description of Artificial Sequence: Synthetic peptide
  XENP020540 vlCDR1
KASQSVDYDGDSYMN

SEQ ID NO: 19093 - protein, 7 aa, Artificial Sequence
  Description of Artificial Sequence: Synthetic peptide
  XENP020540 vlCDR2
AASNLES

SEQ ID NO: 19094 - protein, 9 aa, Artificial Sequence
  Description of Artificial Sequence: Synthetic peptide
  XENP020540 vlCDR3
QQSNEDPFT

SEQ ID NO: 19095 - protein, 450 aa, Artificial Sequence
  Description of Artificial Sequence: Synthetic polypeptide
  XENP020541 7G8_H0.89_L0_IgG1_PVA_/S267K Heavy Chain
EVKLEESGGGLVQPGGSMKLSCAASGFTFSDAWMDWVRQSPEKGLEWVAEIRTKANNHGTYYAESVKGRFTISRDDSKSSVYLQMNSLRAEDTGIYYCTRLANWDWYFDVWGAGTTVTVSSASTKGPSVFPLAPSSKSTSGGTAALGCLVKDYFPEPVTVSWNSGALTSGVHTFPAVLQSSGLYSLSSVVTVPSSSLGTQTYICNVNHKPSDTKVDKKVEPKSCDKTHTCPPCPAPPVAGPSVFLFPPKPKDTLMISRTPEVTCVVVDVKHEDPEVKFNWYVDGVEVHNAKTKPREEEYNSTYRVVSVLTVLHQDWLNGKEYKCKVSNKALPAPIEKTISKAKGQPREPQVYTLPPSREEMTKNQVSLTCDVSGFYPSDIAVEWESDGQPENNYKTTPPVLDSDGSFFLYSKLTVDKSRWEQGDVFSCSVMHEALHNHYTQKSLSLSPGK

SEQ ID NO: 19096 - protein, 121 aa, Artificial Sequence
  Description of Artificial Sequence: Synthetic polypeptide
  VH of XENP020541
EVKLEESGGGLVQPGGSMKLSCAASGFTFSDAWMDWVRQSPEKGLEWVAEIRTKANNHGTYYAESVKGRFTISRDDSKSSVYLQMNSLRAEDTGIYYCTRLANWDWYFDVWGAGTTVTVSS

SEQ ID NO: 19097 - protein, 5 aa, Artificial Sequence
  Description of Artificial Sequence: Synthetic peptide
  XENP020541 vhCDR1
DAWMD

SEQ ID NO: 19098 - protein, 19 aa, Artificial Sequence
  Description of Artificial Sequence: Synthetic peptide
  XENP020541 vhCDR2
EIRTKANNHGTYYAESVKG

SEQ ID NO: 19099 - protein, 10 aa, Artificial Sequence
  Description of Artificial Sequence: Synthetic peptide
  XENP020541 vhCDR3
LANWDWYFDV

SEQ ID NO: 19100 - protein, 218 aa, Artificial Sequence; identical to SEQ ID NO: 17590
  Description of Artificial Sequence: Synthetic polypeptide
  XENP020541 7G8_H0.89_L0_IgG1_PVA_/S267K Light Chain

SEQ ID NO: 19101 - protein, 111 aa, Artificial Sequence; identical to SEQ ID NO: 17591
  Description of Artificial Sequence: Synthetic polypeptide
  VL of XENP020541

SEQ ID NO: 19102 - protein, 15 aa, Artificial Sequence
  Description of Artificial Sequence: Synthetic peptide
  XENP020541 vlCDR1
KASQSVDYDGDSYMN

SEQ ID NO: 19103 - protein, 7 aa, Artificial Sequence
  Description of Artificial Sequence: Synthetic peptide
  XENP020541 vlCDR2
AASNLES

SEQ ID NO: 19104 - protein, 9 aa, Artificial Sequence
  Description of Artificial Sequence: Synthetic peptide
  XENP020541 vlCDR3
QQSNEDPFT

SEQ ID NO: 19105 - protein, 450 aa, Artificial Sequence
  Description of Artificial Sequence: Synthetic polypeptide
  XENP020542 7G8_H0.90_L0_IgG1_PVA_/S267K Heavy Chain
EVKLEESGGGLVQPGGSMKLSCAASGFTFSDAWMDWVRQSPEKGLEWVAEIRTKANNHHTYYAESVKGRFTISRDDSKSSVYLQMNSLRAEDTGIYYCTRLANWDWYFDVWGAGTTVTVSSASTKGPSVFPLAPSSKSTSGGTAALGCLVKDYFPEPVTVSWNSGALTSGVHTFPAVLQSSGLYSLSSVVTVPSSSLGTQTYICNVNHKPSDTKVDKKVEPKSCDKTHTCPPCPAPPVAGPSVFLFPPKPKDTLMISRTPEVTCVVVDVKHEDPEVKFNWYVDGVEVHNAKTKPREEEYNSTYRVVSVLTVLHQDWLNGKEYKCKVSNKALPAPIEKTISKAKGQPREPQVYTLPPSREEMTKNQVSLTCDVSGFYPSDIAVEWESDGQPENNYKTTPPVLDSDGSFFLYSKLTVDKSRWEQGDVFSCSVMHEALHNHYTQKSLSLSPGK

SEQ ID NO: 19106 - protein, 121 aa, Artificial Sequence
  Description of Artificial Sequence: Synthetic polypeptide
  VH of XENP020542
EVKLEESGGGLVQPGGSMKLSCAASGFTFSDAWMDWVRQSPEKGLEWVAEIRTKANNHHTYYAESVKGRFTISRDDSKSSVYLQMNSLRAEDTGIYYCTRLANWDWYFDVWGAGTTVTVSS

SEQ ID NO: 19107 - protein, 5 aa, Artificial Sequence
  Description of Artificial Sequence: Synthetic peptide
  XENP020542 vhCDR1
DAWMD

SEQ ID NO: 19108 - protein, 19 aa, Artificial Sequence
  Description of Artificial Sequence: Synthetic peptide
  XENP020542 vhCDR2
EIRTKANNHHTYYAESVKG

SEQ ID NO: 19109 - protein, 10 aa, Artificial Sequence
  Description of Artificial Sequence: Synthetic peptide
  XENP020542 vhCDR3
LANWDWYFDV

SEQ ID NO: 19110 - protein, 218 aa, Artificial Sequence; identical to SEQ ID NO: 17590
  Description of Artificial Sequence: Synthetic polypeptide
  XENP020542 7G8_H0.90_L0_IgG1_PVA_/S267K Light Chain

SEQ ID NO: 19111 - protein, 111 aa, Artificial Sequence; identical to SEQ ID NO: 17591
  Description of Artificial Sequence: Synthetic polypeptide
  VL of XENP020542

SEQ ID NO: 19112 - protein, 15 aa, Artificial Sequence
  Description of Artificial Sequence: Synthetic peptide
  XENP020542 vlCDR1
KASQSVDYDGDSYMN

SEQ ID NO: 19113 - protein, 7 aa, Artificial Sequence
  Description of Artificial Sequence: Synthetic peptide
  XENP020542 vlCDR2
AASNLES

SEQ ID NO: 19114 - protein, 9 aa, Artificial Sequence
  Description of Artificial Sequence: Synthetic peptide
  XENP020542 vlCDR3
QQSNEDPFT

SEQ ID NO: 19115 - protein, 450 aa, Artificial Sequence
  Description of Artificial Sequence: Synthetic polypeptide
  XENP020543 7G8_H0.91_L0_IgG1_PVA_/S267K Heavy Chain
EVKLEESGGGLVQPGGSMKLSCAASGFTFSDAWMDWVRQSPEKGLEWVAEIRTKANNHQTYYAESVKGRFTISRDDSKSSVYLQMNSLRAEDTGIYYCTRLANWDWYFDVWGAGTTVTVSSASTKGPSVFPLAPSSKSTSGGTAALGCLVKDYFPEPVTVSWNSGALTSGVHTFPAVLQSSGLYSLSSVVTVPSSSLGTQTYICNVNHKPSDTKVDKKVEPKSCDKTHTCPPCPAPPVAGPSVFLFPPKPKDTLMISRTPEVTCVVVDVKHEDPEVKFNWYVDGVEVHNAKTKPREEEYNSTYRVVSVLTVLHQDWLNGKEYKCKVSNKALPAPIEKTISKAKGQPREPQVYTLPPSREEMTKNQVSLTCDVSGFYPSDIAVEWESDGQPENNYKTTPPVLDSDGSFFLYSKLTVDKSRWEQGDVFSCSVMHEALHNHYTQKSLSLSPGK

SEQ ID NO: 19116 - protein, 121 aa, Artificial Sequence
  Description of Artificial Sequence: Synthetic polypeptide
  VH of XENP020543
EVKLEESGGGLVQPGGSMKLSCAASGFTFSDAWMDWVRQSPEKGLEWVAEIRTKANNHQTYYAESVKGRFTISRDDSKSSVYLQMNSLRAEDTGIYYCTRLANWDWYFDVWGAGTTVTVSS

SEQ ID NO: 19117 - protein, 5 aa, Artificial Sequence
  Description of Artificial Sequence: Synthetic peptide
  XENP020543 vhCDR1
DAWMD

SEQ ID NO: 19118 - protein, 19 aa, Artificial Sequence
  Description of Artificial Sequence: Synthetic peptide
  XENP020543 vhCDR2
EIRTKANNHQTYYAESVKG

SEQ ID NO: 19119 - protein, 10 aa, Artificial Sequence
  Description of Artificial Sequence: Synthetic peptide
  XENP020543 vhCDR3
LANWDWYFDV

SEQ ID NO: 19120 - protein, 218 aa, Artificial Sequence; identical to SEQ ID NO: 17590
  Description of Artificial Sequence: Synthetic polypeptide
  XENP020543 7G8_H0.91_L0_IgG1_PVA_/S267K Light Chain

SEQ ID NO: 19121 - protein, 111 aa, Artificial Sequence; identical to SEQ ID NO: 17591
  Description of Artificial Sequence: Synthetic polypeptide
  VL of XENP020543

SEQ ID NO: 19122 - protein, 15 aa, Artificial Sequence
  Description of Artificial Sequence: Synthetic peptide
  XENP020543 vlCDR1
KASQSVDYDGDSYMN

SEQ ID NO: 19123 - protein, 7 aa, Artificial Sequence
  Description of Artificial Sequence: Synthetic peptide
  XENP020543 vlCDR2
AASNLES

SEQ ID NO: 19124 - protein, 9 aa, Artificial Sequence
  Description of Artificial Sequence: Synthetic peptide
  XENP020543 vlCDR3
QQSNEDPFT

SEQ ID NO: 19125 - protein, 450 aa, Artificial Sequence
  Description of Artificial Sequence: Synthetic polypeptide
  XENP020544 7G8_H0.92_L0_IgG1_PVA_/S267K Heavy Chain
EVKLEESGGGLVQPGGSMKLSCAASGFTFSDAWMDWVRQSPEKGLEWVAEIRTKANNHDTYYAESVKGRFTISRDDSKSSVYLQMNSLRAEDTGIYYCTRLANWDWYFDVWGAGTTVTVSSASTKGPSVFPLAPSSKSTSGGTAALGCLVKDYFPEPVTVSWNSGALTSGVHTFPAVLQSSGLYSLSSVVTVPSSSLGTQTYICNVNHKPSDTKVDKKVEPKSCDKTHTCPPCPAPPVAGPSVFLFPPKPKDTLMISRTPEVTCVVVDVKHEDPEVKFNWYVDGVEVHNAKTKPREEEYNSTYRVVSVLTVLHQDWLNGKEYKCKVSNKALPAPIEKTISKAKGQPREPQVYTLPPSREEMTKNQVSLTCDVSGFYPSDIAVEWESDGQPENNYKTTPPVLDSDGSFFLYSKLTVDKSRWEQGDVFSCSVMHEALHNHYTQKSLSLSPGK

SEQ ID NO: 19126 - protein, 121 aa, Artificial Sequence
  Description of Artificial Sequence: Synthetic polypeptide
  VH of XENP020544
EVKLEESGGGLVQPGGSMKLSCAASGFTFSDAWMDWVRQSPEKGLEWVAEIRTKANNHDTYYAESVKGRFTISRDDSKSSVYLQMNSLRAEDTGIYYCTRLANWDWYFDVWGAGTTVTVSS

SEQ ID NO: 19127 - protein, 5 aa, Artificial Sequence
  Description of Artificial Sequence: Synthetic peptide
  XENP020544 vhCDR1
DAWMD

SEQ ID NO: 19128 - protein, 19 aa, Artificial Sequence
  Description of Artificial Sequence: Synthetic peptide
  XENP020544 vhCDR2
EIRTKANNHDTYYAESVKG

SEQ ID NO: 19129 - protein, 10 aa, Artificial Sequence
  Description of Artificial Sequence: Synthetic peptide
  XENP020544 vhCDR3
LANWDWYFDV

SEQ ID NO: 19130 - protein, 218 aa, Artificial Sequence; identical to SEQ ID NO: 17590
  Description of Artificial Sequence: Synthetic polypeptide
  XENP020544 7G8_H0.92_L0_IgG1_PVA_/S267K Light Chain

SEQ ID NO: 19131 - protein, 111 aa, Artificial Sequence; identical to SEQ ID NO: 17591
  Description of Artificial Sequence: Synthetic polypeptide
  VL of XENP020544

SEQ ID NO: 19132 - protein, 15 aa, Artificial Sequence
  Description of Artificial Sequence: Synthetic peptide
  XENP020544 vlCDR1
KASQSVDYDGDSYMN

SEQ ID NO: 19133 - protein, 7 aa, Artificial Sequence
  Description of Artificial Sequence: Synthetic peptide
  XENP020544 vlCDR2
AASNLES

SEQ ID NO: 19134 - protein, 9 aa, Artificial Sequence
  Description of Artificial Sequence: Synthetic peptide
  XENP020544 vlCDR3
QQSNEDPFT

SEQ ID NO: 19135 - protein, 450 aa, Artificial Sequence
  Description of Artificial Sequence: Synthetic polypeptide
  XENP020545 7G8_H0.93_L0_IgG1_PVA_/S267K Heavy Chain
EVKLEESGGGLVQPGGSMKLSCAASGFTFSDAWMDWVRQSPEKGLEWVAEIRTKANNHLTYYAESVKGRFTISRDDSKSSVYLQMNSLRAEDTGIYYCTRLANWDWYFDVWGAGTTVTVSSASTKGPSVFPLAPSSKSTSGGTAALGCLVKDYFPEPVTVSWNSGALTSGVHTFPAVLQSSGLYSLSSVVTVPSSSLGTQTYICNVNHKPSDTKVDKKVEPKSCDKTHTCPPCPAPPVAGPSVFLFPPKPKDTLMISRTPEVTCVVVDVKHEDPEVKFNWYVDGVEVHNAKTKPREEEYNSTYRVVSVLTVLHQDWLNGKEYKCKVSNKALPAPIEKTISKAKGQPREPQVYTLPPSREEMTKNQVSLTCDVSGFYPSDIAVEWESDGQPENNYKTTPPVLDSDGSFFLYSKLTVDKSRWEQGDVFSCSVMHEALHNHYTQKSLSLSPGK

SEQ ID NO: 19136 - protein, 121 aa, Artificial Sequence
  Description of Artificial Sequence: Synthetic polypeptide
  VH of XENP020545
EVKLEESGGGLVQPGGSMKLSCAASGFTFSDAWMDWVRQSPEKGLEWVAEIRTKANNHLTYYAESVKGRFTISRDDSKSSVYLQMNSLRAEDTGIYYCTRLANWDWYFDVWGAGTTVTVSS

SEQ ID NO: 19137 - protein, 5 aa, Artificial Sequence
  Description of Artificial Sequence: Synthetic peptide
  XENP020545 vhCDR1
DAWMD

SEQ ID NO: 19138 - protein, 19 aa, Artificial Sequence
  Description of Artificial Sequence: Synthetic peptide
  XENP020545 vhCDR2
EIRTKANNHLTYYAESVKG

SEQ ID NO: 19139 - protein, 10 aa, Artificial Sequence
  Description of Artificial Sequence: Synthetic peptide
  XENP020545 vhCDR3
LANWDWYFDV

SEQ ID NO: 19140 - protein, 218 aa, Artificial Sequence; identical to SEQ ID NO: 17590
  Description of Artificial Sequence: Synthetic polypeptide
  XENP020545 7G8_H0.93_L0_IgG1_PVA_/S267K Light Chain

SEQ ID NO: 19141 - protein, 111 aa, Artificial Sequence; identical to SEQ ID NO: 17591
  Description of Artificial Sequence: Synthetic polypeptide
  VL of XENP020545

SEQ ID NO: 19142 - protein, 15 aa, Artificial Sequence
  Description of Artificial Sequence: Synthetic peptide
  XENP020545 vlCDR1
KASQSVDYDGDSYMN

SEQ ID NO: 19143 - protein, 7 aa, Artificial Sequence
  Description of Artificial Sequence: Synthetic peptide
  XENP020545 vlCDR2
AASNLES

SEQ ID NO: 19144 - protein, 9 aa, Artificial Sequence
  Description of Artificial Sequence: Synthetic peptide
  XENP020545 vlCDR3
QQSNEDPFT

SEQ ID NO: 19145 - protein, 450 aa, Artificial Sequence
  Description of Artificial Sequence: Synthetic polypeptide
  XENP020546 7G8_H0.94_L0_IgG1_PVA_/S267K Heavy Chain
EVKLEESGGGLVQPGGSMKLSCAASGFTFSDAWMDWVRQSPEKGLEWVAEIRTKANNHKTYYAESVKGRFTISRDDSKSSVYLQMNSLRAEDTGIYYCTRLANWDWYFDVWGAGTTVTVSSASTKGPSVFPLAPSSKSTSGGTAALGCLVKDYFPEPVTVSWNSGALTSGVHTFPAVLQSSGLYSLSSVVTVPSSSLGTQTYICNVNHKPSDTKVDKKVEPKSCDKTHTCPPCPAPPVAGPSVFLFPPKPKDTLMISRTPEVTCVVVDVKHEDPEVKFNWYVDGVEVHNAKTKPREEEYNSTYRVVSVLTVLHQDWLNGKEYKCKVSNKALPAPIEKTISKAKGQPREPQVYTLPPSREEMTKNQVSLTCDVSGFYPSDIAVEWESDGQPENNYKTTPPVLDSDGSFFLYSKLTVDKSRWEQGDVFSCSVMHEALHNHYTQKSLSLSPGK

SEQ ID NO: 19146 - protein, 121 aa, Artificial Sequence
  Description of Artificial Sequence: Synthetic polypeptide
  VH of XENP020546
EVKLEESGGGLVQPGGSMKLSCAASGFTFSDAWMDWVRQSPEKGLEWVAEIRTKANNHKTYYAESVKGRFTISRDDSKSSVYLQMNSLRAEDTGIYYCTRLANWDWYFDVWGAGTTVTVSS

SEQ ID NO: 19147 - protein, 5 aa, Artificial Sequence
  Description of Artificial Sequence: Synthetic peptide
  XENP020546 vhCDR1
DAWMD

SEQ ID NO: 19148 - protein, 19 aa, Artificial Sequence
  Description of Artificial Sequence: Synthetic peptide
  XENP020546 vhCDR2
EIRTKANNHKTYYAESVKG

SEQ ID NO: 19149 - protein, 10 aa, Artificial Sequence
  Description of Artificial Sequence: Synthetic peptide
  XENP020546 vhCDR3
LANWDWYFDV

SEQ ID NO: 19150 - protein, 218 aa, Artificial Sequence; identical to SEQ ID NO: 17590
  Description of Artificial Sequence: Synthetic polypeptide
  XENP020546 7G8_H0.94_L0_IgG1_PVA_/S267K Light Chain

SEQ ID NO: 19151 - protein, 111 aa, Artificial Sequence; identical to SEQ ID NO: 17591
  Description of Artificial Sequence: Synthetic polypeptide
  VL of XENP020546

SEQ ID NO: 19152 - protein, 15 aa, Artificial Sequence
  Description of Artificial Sequence: Synthetic peptide
  XENP020546 vlCDR1
KASQSVDYDGDSYMN

SEQ ID NO: 19153 - protein, 7 aa, Artificial Sequence
  Description of Artificial Sequence: Synthetic peptide
  XENP020546 vlCDR2
AASNLES

SEQ ID NO: 19154 - protein, 9 aa, Artificial Sequence
  Description of Artificial Sequence: Synthetic peptide
  XENP020546 vlCDR3
QQSNEDPFT

SEQ ID NO: 19155 - protein, 450 aa, Artificial Sequence
  Description of Artificial Sequence: Synthetic polypeptide
  XENP020547 7G8_H0.95_L0_IgG1_PVA_/S267K Heavy Chain
EVKLEESGGGLVQPGGSMKLSCAASGFTFSDAWMDWVRQSPEKGLEWVAEIRTKANNHYTYYAESVKGRFTISRDDSKSSVYLQMNSLRAEDTGIYYCTRLANWDWYFDVWGAGTTVTVSSASTKGPSVFPLAPSSKSTSGGTAALGCLVKDYFPEPVTVSWNSGALTSGVHTFPAVLQSSGLYSLSSVVTVPSSSLGTQTYICNVNHKPSDTKVDKKVEPKSCDKTHTCPPCPAPPVAGPSVFLFPPKPKDTLMISRTPEVTCVVVDVKHEDPEVKFNWYVDGVEVHNAKTKPREEEYNSTYRVVSVLTVLHQDWLNGKEYKCKVSNKALPAPIEKTISKAKGQPREPQVYTLPPSREEMTKNQVSLTCDVSGFYPSDIAVEWESDGQPENNYKTTPPVLDSDGSFFLYSKLTVDKSRWEQGDVFSCSVMHEALHNHYTQKSLSLSPGK

SEQ ID NO: 19156 - protein, 121 aa, Artificial Sequence
  Description of Artificial Sequence: Synthetic polypeptide
  VH of XENP020547
EVKLEESGGGLVQPGGSMKLSCAASGFTFSDAWMDWVRQSPEKGLEWVAEIRTKANNHYTYYAESVKGRFTISRDDSKSSVYLQMNSLRAEDTGIYYCTRLANWDWYFDVWGAGTTVTVSS

SEQ ID NO: 19157 - protein, 5 aa, Artificial Sequence
  Description of Artificial Sequence: Synthetic peptide
  XENP020547 vhCDR1
DAWMD

SEQ ID NO: 19158 - protein, 19 aa, Artificial Sequence
  Description of Artificial Sequence: Synthetic peptide
  XENP020547 vhCDR2
EIRTKANNHYTYYAESVKG

SEQ ID NO: 19159 - protein, 10 aa, Artificial Sequence
  Description of Artificial Sequence: Synthetic peptide
  XENP020547 vhCDR3
LANWDWYFDV

SEQ ID NO: 19160 - protein, 218 aa, Artificial Sequence; identical to SEQ ID NO: 17590
  Description of Artificial Sequence: Synthetic polypeptide
  XENP020547 7G8_H0.95_L0_IgG1_PVA_/S267K Light Chain

SEQ ID NO: 19161 - protein, 111 aa, Artificial Sequence; identical to SEQ ID NO: 17591
  Description of Artificial Sequence: Synthetic polypeptide
  VL of XENP020547

SEQ ID NO: 19162 - protein, 15 aa, Artificial Sequence
  Description of Artificial Sequence: Synthetic peptide
  XENP020547 vlCDR1
KASQSVDYDGDSYMN

SEQ ID NO: 19163 - protein, 7 aa, Artificial Sequence
  Description of Artificial Sequence: Synthetic peptide
  XENP020547 vlCDR2
AASNLES

SEQ ID NO: 19164 - protein, 9 aa, Artificial Sequence
  Description of Artificial Sequence: Synthetic peptide
  XENP020547 vlCDR3
QQSNEDPFT

SEQ ID NO: 19165 - protein, 450 aa, Artificial Sequence
  Description of Artificial Sequence: Synthetic polypeptide
  XENP020548 7G8_H0.96_L0_IgG1_PVA_/S267K Heavy Chain
EVKLEESGGGLVQPGGSMKLSCAASGFTFSDAWMDWVRQSPEKGLEWVAEIRTKANNHATFYAESVKGRFTISRDDSKSSVYLQMNSLRAEDTGIYYCTRLANWDWYFDVWGAGTTVTVSSASTKGPSVFPLAPSSKSTSGGTAALGCLVKDYFPEPVTVSWNSGALTSGVHTFPAVLQSSGLYSLSSVVTVPSSSLGTQTYICNVNHKPSDTKVDKKVEPKSCDKTHTCPPCPAPPVAGPSVFLFPPKPKDTLMISRTPEVTCVVVDVKHEDPEVKFNWYVDGVEVHNAKTKPREEEYNSTYRVVSVLTVLHQDWLNGKEYKCKVSNKALPAPIEKTISKAKGQPREPQVYTLPPSREEMTKNQVSLTCDVSGFYPSDIAVEWESDGQPENNYKTTPPVLDSDGSFFLYSKLTVDKSRWEQGDVFSCSVMHEALHNHYTQKSLSLSPGK

SEQ ID NO: 19166 - protein, 121 aa, Artificial Sequence
  Description of Artificial Sequence: Synthetic polypeptide
  VH of XENP020548
EVKLEESGGGLVQPGGSMKLSCAASGFTFSDAWMDWVRQSPEKGLEWVAEIRTKANNHATFYAESVKGRFTISRDDSKSSVYLQMNSLRAEDTGIYYCTRLANWDWYFDVWGAGTTVTVSS

SEQ ID NO: 19167 - protein, 5 aa, Artificial Sequence
  Description of Artificial Sequence: Synthetic peptide
  XENP020548 vhCDR1
DAWMD

SEQ ID NO: 19168 - protein, 19 aa, Artificial Sequence
  Description of Artificial Sequence: Synthetic peptide
  XENP020548 vhCDR2
EIRTKANNHATFYAESVKG

SEQ ID NO: 19169 - protein, 10 aa, Artificial Sequence
  Description of Artificial Sequence: Synthetic peptide
  XENP020548 vhCDR3
LANWDWYFDV

SEQ ID NO: 19170 - protein, 218 aa, Artificial Sequence; identical to SEQ ID NO: 17590
  Description of Artificial Sequence: Synthetic polypeptide
  XENP020548 7G8_H0.96_L0_IgG1_PVA_/S267K Light Chain

SEQ ID NO: 19171 - protein, 111 aa, Artificial Sequence; identical to SEQ ID NO: 17591
  Description of Artificial Sequence: Synthetic polypeptide
  VL of XENP020548

SEQ ID NO: 19172 - protein, 15 aa, Artificial Sequence
  Description of Artificial Sequence: Synthetic peptide
  XENP020548 vlCDR1
KASQSVDYDGDSYMN

SEQ ID NO: 19173 - protein, 7 aa, Artificial Sequence
  Description of Artificial Sequence: Synthetic peptide
  XENP020548 vlCDR2
AASNLES

SEQ ID NO: 19174 - protein, 9 aa, Artificial Sequence
  Description of Artificial Sequence: Synthetic peptide
  XENP020548 vlCDR3
QQSNEDPFT

SEQ ID NO: 19175 - protein, 450 aa, Artificial Sequence
  Description of Artificial Sequence: Synthetic polypeptide
  XENP020549 7G8_H0.97_L0_IgG1_PVA_/S267K Heavy Chain
EVKLEESGGGLVQPGGSMKLSCAASGFTFSDAWMDWVRQSPEKGLEWVAEIRTKANNHATHYAESVKGRFTISRDDSKSSVYLQMNSLRAEDTGIYYCTRLANWDWYFDVWGAGTTVTVSSASTKGPSVFPLAPSSKSTSGGTAALGCLVKDYFPEPVTVSWNSGALTSGVHTFPAVLQSSGLYSLSSVVTVPSSSLGTQTYICNVNHKPSDTKVDKKVEPKSCDKTHTCPPCPAPPVAGPSVFLFPPKPKDTLMISRTPEVTCVVVDVKHEDPEVKFNWYVDGVEVHNAKTKPREEEYNSTYRVVSVLTVLHQDWLNGKEYKCKVSNKALPAPIEKTISKAKGQPREPQVYTLPPSREEMTKNQVSLTCDVSGFYPSDIAVEWESDGQPENNYKTTPPVLDSDGSFFLYSKLTVDKSRWEQGDVFSCSVMHEALHNHYTQKSLSLSPGK

SEQ ID NO: 19176 - protein, 121 aa, Artificial Sequence
  Description of Artificial Sequence: Synthetic polypeptide
  VH of XENP020549
EVKLEESGGGLVQPGGSMKLSCAASGFTFSDAWMDWVRQSPEKGLEWVAEIRTKANNHATHYAESVKGRFTISRDDSKSSVYLQMNSLRAEDTGIYYCTRLANWDWYFDVWGAGTTVTVSS

SEQ ID NO: 19177 - protein, 5 aa, Artificial Sequence
  Description of Artificial Sequence: Synthetic peptide
  XENP020549 vhCDR1
DAWMD

SEQ ID NO: 19178 - protein, 19 aa, Artificial Sequence
  Description of Artificial Sequence: Synthetic peptide
  XENP020549 vhCDR2
EIRTKANNHATHYAESVKG

SEQ ID NO: 19179 - protein, 10 aa, Artificial Sequence
  Description of Artificial Sequence: Synthetic peptide
  XENP020549 vhCDR3
LANWDWYFDV

SEQ ID NO: 19180 - protein, 218 aa, Artificial Sequence; identical to SEQ ID NO: 17590
  Description of Artificial Sequence: Synthetic polypeptide
  XENP020549 7G8_H0.97_L0_IgG1_PVA_/S267K Light Chain

SEQ ID NO: 19181 - protein, 111 aa, Artificial Sequence; identical to SEQ ID NO: 17591
  Description of Artificial Sequence: Synthetic polypeptide
  VL of XENP020549

SEQ ID NO: 19182 - protein, 15 aa, Artificial Sequence
  Description of Artificial Sequence: Synthetic peptide
  XENP020549 vlCDR1
KASQSVDYDGDSYMN

SEQ ID NO: 19183 - protein, 7 aa, Artificial Sequence
  Description of Artificial Sequence: Synthetic peptide
  XENP020549 vlCDR2
AASNLES

SEQ ID NO: 19184 - protein, 9 aa, Artificial Sequence
  Description of Artificial Sequence: Synthetic peptide
  XENP020549 vlCDR3
QQSNEDPFT

SEQ ID NO: 19185 - protein, 450 aa, Artificial Sequence
  Description of Artificial Sequence: Synthetic polypeptide
  XENP020550 7G8_H0.98_L0_IgG1_PVA_/S267K Heavy Chain
EVKLEESGGGLVQPGGSMKLSCAASGFTFSDAWMDWVRQSPEKGLEWVAEIRTKANNHATLYAESVKGRFTISRDDSKSSVYLQMNSLRAEDTGIYYCTRLANWDWYFDVWGAGTTVTVSSASTKGPSVFPLAPSSKSTSGGTAALGCLVKDYFPEPVTVSWNSGALTSGVHTFPAVLQSSGLYSLSSVVTVPSSSLGTQTYICNVNHKPSDTKVDKKVEPKSCDKTHTCPPCPAPPVAGPSVFLFPPKPKDTLMISRTPEVTCVVVDVKHEDPEVKFNWYVDGVEVHNAKTKPREEEYNSTYRVVSVLTVLHQDWLNGKEYKCKVSNKALPAPIEKTISKAKGQPREPQVYTLPPSREEMTKNQVSLTCDVSGFYPSDIAVEWESDGQPENNYKTTPPVLDSDGSFFLYSKLTVDKSRWEQGDVFSCSVMHEALHNHYTQKSLSLSPGK

SEQ ID NO: 19186 - protein, 121 aa, Artificial Sequence
  Description of Artificial Sequence: Synthetic polypeptide
  VH of XENP020550
EVKLEESGGGLVQPGGSMKLSCAASGFTFSDAWMDWVRQSPEKGLEWVAEIRTKANNHATLYAESVKGRFTISRDDSKSSVYLQMNSLRAEDTGIYYCTRLANWDWYFDVWGAGTTVTVSS

SEQ ID NO: 19187 - protein, 5 aa, Artificial Sequence
  Description of Artificial Sequence: Synthetic peptide
  XENP020550 vhCDR1
DAWMD

SEQ ID NO: 19188 - protein, 19 aa, Artificial Sequence
  Description of Artificial Sequence: Synthetic peptide
  XENP020550 vhCDR2
EIRTKANNHATLYAESVKG

SEQ ID NO: 19189 - protein, 10 aa, Artificial Sequence
  Description of Artificial Sequence: Synthetic peptide
  XENP020550 vhCDR3
LANWDWYFDV

SEQ ID NO: 19190 - protein, 218 aa, Artificial Sequence; identical to SEQ ID NO: 17590
  Description of Artificial Sequence: Synthetic polypeptide
  XENP020550 7G8_H0.98_L0_IgG1_PVA_/S267K Light Chain

SEQ ID NO: 19191 - protein, 111 aa, Artificial Sequence; identical to SEQ ID NO: 17591
  Description of Artificial Sequence: Synthetic polypeptide
  VL of XENP020550

SEQ ID NO: 19192 - protein, 15 aa, Artificial Sequence
  Description of Artificial Sequence: Synthetic peptide
  XENP020550 vlCDR1
KASQSVDYDGDSYMN

SEQ ID NO: 19193 - protein, 7 aa, Artificial Sequence
  Description of Artificial Sequence: Synthetic peptide
  XENP020550 vlCDR2
AASNLES

SEQ ID NO: 19194 - protein, 9 aa, Artificial Sequence
  Description of Artificial Sequence: Synthetic peptide
  XENP020550 vlCDR3
QQSNEDPFT

SEQ ID NO: 19195 - protein, 450 aa, Artificial Sequence
  Description of Artificial Sequence: Synthetic polypeptide
  XENP020551 7G8_H0.99_L0_IgG1_PVA_/S267K Heavy Chain
EVKLEESGGGLVQPGGSMKLSCAASGFTFSDAWMDWVRQSPEKGLEWVAEIRTKANNHATWYAESVKGRFTISRDDSKSSVYLQMNSLRAEDTGIYYCTRLANWDWYFDVWGAGTTVTVSSASTKGPSVFPLAPSSKSTSGGTAALGCLVKDYFPEPVTVSWNSGALTSGVHTFPAVLQSSGLYSLSSVVTVPSSSLGTQTYICNVNHKPSDTKVDKKVEPKSCDKTHTCPPCPAPPVAGPSVFLFPPKPKDTLMISRTPEVTCVVVDVKHEDPEVKFNWYVDGVEVHNAKTKPREEEYNSTYRVVSVLTVLHQDWLNGKEYKCKVSNKALPAPIEKTISKAKGQPREPQVYTLPPSREEMTKNQVSLTCDVSGFYPSDIAVEWESDGQPENNYKTTPPVLDSDGSFFLYSKLTVDKSRWEQGDVFSCSVMHEALHNHYTQKSLSLSPGK

SEQ ID NO: 19196 - protein, 121 aa, Artificial Sequence
  Description of Artificial Sequence: Synthetic polypeptide
  VH of XENP020551
EVKLEESGGGLVQPGGSMKLSCAASGFTFSDAWMDWVRQSPEKGLEWVAEIRTKANNHATWYAESVKGRFTISRDDSKSSVYLQMNSLRAEDTGIYYCTRLANWDWYFDVWGAGTTVTVSS

SEQ ID NO: 19197 - protein, 5 aa, Artificial Sequence
  Description of Artificial Sequence: Synthetic peptide
  XENP020551 vhCDR1
DAWMD

SEQ ID NO: 19198 - protein, 19 aa, Artificial Sequence
  Description of Artificial Sequence: Synthetic peptide
  XENP020551 vhCDR2
EIRTKANNHATWYAESVKG

SEQ ID NO: 19199 - protein, 10 aa, Artificial Sequence
  Description of Artificial Sequence: Synthetic peptide
  XENP020551 vhCDR3
LANWDWYFDV

SEQ ID NO: 19200 - protein, 218 aa, Artificial Sequence; identical to SEQ ID NO: 17590
  Description of Artificial Sequence: Synthetic polypeptide
  XENP020551 7G8_H0.99_L0_IgG1_PVA_/S267K Light Chain

SEQ ID NO: 19201 - protein, 111 aa, Artificial Sequence; identical to SEQ ID NO: 17591
  Description of Artificial Sequence: Synthetic polypeptide
  VL of XENP020551

SEQ ID NO: 19202 - protein, 15 aa, Artificial Sequence
  Description of Artificial Sequence: Synthetic peptide
  XENP020551 vlCDR1
KASQSVDYDGDSYMN

SEQ ID NO: 19203 - protein, 7 aa, Artificial Sequence
  Description of Artificial Sequence: Synthetic peptide
  XENP020551 vlCDR2
AASNLES

SEQ ID NO: 19204 - protein, 9 aa, Artificial Sequence
  Description of Artificial Sequence: Synthetic peptide
  XENP020551 vlCDR3
QQSNEDPFT

SEQ ID NO: 19205 - protein, 450 aa, Artificial Sequence
  Description of Artificial Sequence: Synthetic polypeptide
  XENP020552 7G8_H0.100_L0_IgG1_PVA_/S267K Heavy Chain
EVKLEESGGGLVQPGGSMKLSCAASGFTFSDAWMDWVRQSPEKGLEWVAEIRTKANNHATVYAESVKGRFTISRDDSKSSVYLQMNSLRAEDTGIYYCTRLANWDWYFDVWGAGTTVTVSSASTKGPSVFPLAPSSKSTSGGTAALGCLVKDYFPEPVTVSWNSGALTSGVHTFPAVLQSSGLYSLSSVVTVPSSSLGTQTYICNVNHKPSDTKVDKKVEPKSCDKTHTCPPCPAPPVAGPSVFLFPPKPKDTLMISRTPEVTCVVVDVKHEDPEVKFNWYVDGVEVHNAKTKPREEEYNSTYRVVSVLTVLHQDWLNGKEYKCKVSNKALPAPIEKTISKAKGQPREPQVYTLPPSREEMTKNQVSLTCDVSGFYPSDIAVEWESDGQPENNYKTTPPVLDSDGSFFLYSKLTVDKSRWEQGDVFSCSVMHEALHNHYTQKSLSLSPGK

SEQ ID NO: 19206 - protein, 121 aa, Artificial Sequence
  Description of Artificial Sequence: Synthetic polypeptide
  VH of XENP020552
EVKLEESGGGLVQPGGSMKLSCAASGFTFSDAWMDWVRQSPEKGLEWVAEIRTKANNHATVYAESVKGRFTISRDDSKSSVYLQMNSLRAEDTGIYYCTRLANWDWYFDVWGAGTTVTVSS

SEQ ID NO: 19207 - protein, 5 aa, Artificial Sequence
  Description of Artificial Sequence: Synthetic peptide
  XENP020552 vhCDR1
DAWMD

SEQ ID NO: 19208 - protein, 19 aa, Artificial Sequence
  Description of Artificial Sequence: Synthetic peptide
  XENP020552 vhCDR2
EIRTKANNHATVYAESVKG

SEQ ID NO: 19209 - protein, 10 aa, Artificial Sequence
  Description of Artificial Sequence: Synthetic peptide
  XENP020552 vhCDR3
LANWDWYFDV

SEQ ID NO: 19210 - protein, 218 aa, Artificial Sequence; identical to SEQ ID NO: 17590
  Description of Artificial Sequence: Synthetic polypeptide
  XENP020552 7G8_H0.100_L0_IgG1_PVA_/S267K Light Chain

SEQ ID NO: 19211 - protein, 111 aa, Artificial Sequence; identical to SEQ ID NO: 17591
  Description of Artificial Sequence: Synthetic polypeptide
  VL of XENP020552

SEQ ID NO: 19212 - protein, 15 aa, Artificial Sequence
  Description of Artificial Sequence: Synthetic peptide
  XENP020552 vlCDR1
KASQSVDYDGDSYMN

SEQ ID NO: 19213 - protein, 7 aa, Artificial Sequence
  Description of Artificial Sequence: Synthetic peptide
  XENP020552 vlCDR2
AASNLES

SEQ ID NO: 19214 - protein, 9 aa, Artificial Sequence
  Description of Artificial Sequence: Synthetic peptide
  XENP020552 vlCDR3
QQSNEDPFT

SEQ ID NO: 19215 - protein, 450 aa, Artificial Sequence
  Description of Artificial Sequence: Synthetic polypeptide
  XENP020553 7G8_H0.101_L0_IgG1_PVA_/S267K Heavy Chain
EVKLEESGGGLVQPGGSMKLSCAASGFTFSDAWMDWVRQSPEKGLEWVAEIRTKANNHATAYAESVKGRFTISRDDSKSSVYLQMNSLRAEDTGIYYCTRLANWDWYFDVWGAGTTVTVSSASTKGPSVFPLAPSSKSTSGGTAALGCLVKDYFPEPVTVSWNSGALTSGVHTFPAVLQSSGLYSLSSVVTVPSSSLGTQTYICNVNHKPSDTKVDKKVEPKSCDKTHTCPPCPAPPVAGPSVFLFPPKPKDTLMISRTPEVTCVVVDVKHEDPEVKFNWYVDGVEVHNAKTKPREEEYNSTYRVVSVLTVLHQDWLNGKEYKCKVSNKALPAPIEKTISKAKGQPREPQVYTLPPSREEMTKNQVSLTCDVSGFYPSDIAVEWESDGQPENNYKTTPPVLDSDGSFFLYSKLTVDKSRWEQGDVFSCSVMHEALHNHYTQKSLSLSPGK

SEQ ID NO: 19216 - protein, 121 aa, Artificial Sequence
  Description of Artificial Sequence: Synthetic polypeptide
  VH of XENP020553
EVKLEESGGGLVQPGGSMKLSCAASGFTFSDAWMDWVRQSPEKGLEWVAEIRTKANNHATAYAESVKGRFTISRDDSKSSVYLQMNSLRAEDTGIYYCTRLANWDWYFDVWGAGTTVTVSS

SEQ ID NO: 19217 - protein, 5 aa, Artificial Sequence
  Description of Artificial Sequence: Synthetic peptide
  XENP020553 vhCDR1
DAWMD

SEQ ID NO: 19218 - protein, 19 aa, Artificial Sequence
  Description of Artificial Sequence: Synthetic peptide
  XENP020553 vhCDR2
EIRTKANNHATAYAESVKG

SEQ ID NO: 19219 - protein, 10 aa, Artificial Sequence
  Description of Artificial Sequence: Synthetic peptide
  XENP020553 vhCDR3
LANWDWYFDV

SEQ ID NO: 19220 - protein, 218 aa, Artificial Sequence; identical to SEQ ID NO: 17590
  Description of Artificial Sequence: Synthetic polypeptide
  XENP020553 7G8_H0.101_L0_IgG1_PVA_/S267K Light Chain

SEQ ID NO: 19221 - protein, 111 aa, Artificial Sequence; identical to SEQ ID NO: 17591
  Description of Artificial Sequence: Synthetic polypeptide
  VL of XENP020553

SEQ ID NO: 19222 - protein, 15 aa, Artificial Sequence
  Description of Artificial Sequence: Synthetic peptide
  XENP020553 vlCDR1
KASQSVDYDGDSYMN

SEQ ID NO: 19223 - protein, 7 aa, Artificial Sequence
  Description of Artificial Sequence: Synthetic peptide
  XENP020553 vlCDR2
AASNLES

SEQ ID NO: 19224 - protein, 9 aa, Artificial Sequence
  Description of Artificial Sequence: Synthetic peptide
  XENP020553 vlCDR3
QQSNEDPFT

SEQ ID NO: 19225 - protein, 450 aa, Artificial Sequence
  Description of Artificial Sequence: Synthetic polypeptide
  XENP020554 7G8_H0.102_L0_IgG1_PVA_/S267K Heavy Chain
EVKLEESGGGLVQPGGSMKLSCAASGFTFSDAWMDWVRQSPEKGLEWVAEIRTKANNHATQYAESVKGRFTISRDDSKSSVYLQMNSLRAEDTGIYYCTRLANWDWYFDVWGAGTTVTVSSASTKGPSVFPLAPSSKSTSGGTAALGCLVKDYFPEPVTVSWNSGALTSGVHTFPAVLQSSGLYSLSSVVTVPSSSLGTQTYICNVNHKPSDTKVDKKVEPKSCDKTHTCPPCPAPPVAGPSVFLFPPKPKDTLMISRTPEVTCVVVDVKHEDPEVKFNWYVDGVEVHNAKTKPREEEYNSTYRVVSVLTVLHQDWLNGKEYKCKVSNKALPAPIEKTISKAKGQPREPQVYTLPPSREEMTKNQVSLTCDVSGFYPSDIAVEWESDGQPENNYKTTPPVLDSDGSFFLYSKLTVDKSRWEQGDVFSCSVMHEALHNHYTQKSLSLSPGK

SEQ ID NO: 19226 - protein, 121 aa, Artificial Sequence
  Description of Artificial Sequence: Synthetic polypeptide
  VH of XENP020554
EVKLEESGGGLVQPGGSMKLSCAASGFTFSDAWMDWVRQSPEKGLEWVAEIRTKANNHATQYAESVKGRFTISRDDSKSSVYLQMNSLRAEDTGIYYCTRLANWDWYFDVWGAGTTVTVSS

SEQ ID NO: 19227 - protein, 5 aa, Artificial Sequence
  Description of Artificial Sequence: Synthetic peptide
  XENP020554 vhCDR1
DAWMD

SEQ ID NO: 19228 - protein, 19 aa, Artificial Sequence
  Description of Artificial Sequence: Synthetic peptide
  XENP020554 vhCDR2
EIRTKANNHATQYAESVKG

SEQ ID NO: 19229 - protein, 10 aa, Artificial Sequence
  Description of Artificial Sequence: Synthetic peptide
  XENP020554 vhCDR3
LANWDWYFDV

SEQ ID NO: 19230 - protein, 218 aa, Artificial Sequence; identical to SEQ ID NO: 17590
  Description of Artificial Sequence: Synthetic polypeptide
  XENP020554 7G8_H0.102_L0_IgG1_PVA_/S267K Light Chain

SEQ ID NO: 19231 - protein, 111 aa, Artificial Sequence; identical to SEQ ID NO: 17591
  Description of Artificial Sequence: Synthetic polypeptide
  VL of XENP020554

SEQ ID NO: 19232 - protein, 15 aa, Artificial Sequence
  Description of Artificial Sequence: Synthetic peptide
  XENP020554 vlCDR1
KASQSVDYDGDSYMN

SEQ ID NO: 19233 - protein, 7 aa, Artificial Sequence
  Description of Artificial Sequence: Synthetic peptide
  XENP020554 vlCDR2
AASNLES

SEQ ID NO: 19234 - protein, 9 aa, Artificial Sequence
  Description of Artificial Sequence: Synthetic peptide
  XENP020554 vlCDR3
QQSNEDPFT

SEQ ID NO: 19235 - protein, 450 aa, Artificial Sequence
  Description of Artificial Sequence: Synthetic polypeptide
  XENP020555 7G8_H0.103_L0_IgG1_PVA_/S267K Heavy Chain
EVKLEESGGGLVQPGGSMKLSCAASGFTFSDAWMDWVRQSPEKGLEWVAEIRTKANNHATDYAESVKGRFTISRDDSKSSVYLQMNSLRAEDTGIYYCTRLANWDWYFDVWGAGTTVTVSSASTKGPSVFPLAPSSKSTSGGTAALGCLVKDYFPEPVTVSWNSGALTSGVHTFPAVLQSSGLYSLSSVVTVPSSSLGTQTYICNVNHKPSDTKVDKKVEPKSCDKTHTCPPCPAPPVAGPSVFLFPPKPKDTLMISRTPEVTCVVVDVKHEDPEVKFNWYVDGVEVHNAKTKPREEEYNSTYRVVSVLTVLHQDWLNGKEYKCKVSNKALPAPIEKTISKAKGQPREPQVYTLPPSREEMTKNQVSLTCDVSGFYPSDIAVEWESDGQPENNYKTTPPVLDSDGSFFLYSKLTVDKSRWEQGDVFSCSVMHEALHNHYTQKSLSLSPGK

SEQ ID NO: 19236 - protein, 121 aa, Artificial Sequence
  Description of Artificial Sequence: Synthetic polypeptide
  VH of XENP020555
EVKLEESGGGLVQPGGSMKLSCAASGFTFSDAWMDWVRQSPEKGLEWVAEIRTKANNHATDYAESVKGRFTISRDDSKSSVYLQMNSLRAEDTGIYYCTRLANWDWYFDVWGAGTTVTVSS

SEQ ID NO: 19237 - protein, 5 aa, Artificial Sequence
  Description of Artificial Sequence: Synthetic peptide
  XENP020555 vhCDR1
DAWMD

SEQ ID NO: 19238 - protein, 19 aa, Artificial Sequence
  Description of Artificial Sequence: Synthetic peptide
  XENP020555 vhCDR2
EIRTKANNHATDYAESVKG

SEQ ID NO: 19239 - protein, 10 aa, Artificial Sequence
  Description of Artificial Sequence: Synthetic peptide
  XENP020555 vhCDR3
LANWDWYFDV

SEQ ID NO: 19240 - protein, 218 aa, Artificial Sequence; identical to SEQ ID NO: 17590
  Description of Artificial Sequence: Synthetic polypeptide
  XENP020555 7G8_H0.103_L0_IgG1_PVA_/S267K Light Chain

SEQ ID NO: 19241 - protein, 111 aa, Artificial Sequence; identical to SEQ ID NO: 17591
  Description of Artificial Sequence: Synthetic polypeptide
  VL of XENP020555

SEQ ID NO: 19242 - protein, 15 aa, Artificial Sequence
  Description of Artificial Sequence: Synthetic peptide
  XENP020555 vlCDR1
KASQSVDYDGDSYMN

SEQ ID NO: 19243 - protein, 7 aa, Artificial Sequence
  Description of Artificial Sequence: Synthetic peptide
  XENP020555 vlCDR2
AASNLES

SEQ ID NO: 19244 - protein, 9 aa, Artificial Sequence
  Description of Artificial Sequence: Synthetic peptide
  XENP020555 vlCDR3
QQSNEDPFT

SEQ ID NO: 19245 - protein, 450 aa, Artificial Sequence
  Description of Artificial Sequence: Synthetic polypeptide
  XENP020556 7G8_H0.104_L0_IgG1_PVA_/S267K Heavy Chain
EVKLEESGGGLVQPGGSMKLSCAASGFTFSDAWMDWVRQSPEKGLEWVAEIRTKANNHATKYAESVKGRFTISRDDSKSSVYLQMNSLRAEDTGIYYCTRLANWDWYFDVWGAGTTVTVSSASTKGPSVFPLAPSSKSTSGGTAALGCLVKDYFPEPVTVSWNSGALTSGVHTFPAVLQSSGLYSLSSVVTVPSSSLGTQTYICNVNHKPSDTKVDKKVEPKSCDKTHTCPPCPAPPVAGPSVFLFPPKPKDTLMISRTPEVTCVVVDVKHEDPEVKFNWYVDGVEVHNAKTKPREEEYNSTYRVVSVLTVLHQDWLNGKEYKCKVSNKALPAPIEKTISKAKGQPREPQVYTLPPSREEMTKNQVSLTCDVSGFYPSDIAVEWESDGQPENNYKTTPPVLDSDGSFFLYSKLTVDKSRWEQGDVFSCSVMHEALHNHYTQKSLSLSPGK

SEQ ID NO: 19246 - protein, 121 aa, Artificial Sequence
  Description of Artificial Sequence: Synthetic polypeptide
  VH of XENP020556
EVKLEESGGGLVQPGGSMKLSCAASGFTFSDAWMDWVRQSPEKGLEWVAEIRTKANNHATKYAESVKGRFTISRDDSKSSVYLQMNSLRAEDTGIYYCTRLANWDWYFDVWGAGTTVTVSS

SEQ ID NO: 19247 - protein, 5 aa, Artificial Sequence
  Description of Artificial Sequence: Synthetic peptide
  XENP020556 vhCDR1
DAWMD

SEQ ID NO: 19248 - protein, 19 aa, Artificial Sequence
  Description of Artificial Sequence: Synthetic peptide
  XENP020556 vhCDR2
EIRTKANNHATKYAESVKG

SEQ ID NO: 19249 - protein, 10 aa, Artificial Sequence
  Description of Artificial Sequence: Synthetic peptide
  XENP020556 vhCDR3
LANWDWYFDV

SEQ ID NO: 19250 - protein, 218 aa, Artificial Sequence; identical to SEQ ID NO: 17590
  Description of Artificial Sequence: Synthetic polypeptide
  XENP020556 7G8_H0.104_L0_IgG1_PVA_/S267K Light Chain

SEQ ID NO: 19251 - protein, 111 aa, Artificial Sequence; identical to SEQ ID NO: 17591
  Description of Artificial Sequence: Synthetic polypeptide
  VL of XENP020556

SEQ ID NO: 19252 - protein, 15 aa, Artificial Sequence
  Description of Artificial Sequence: Synthetic peptide
  XENP020556 vlCDR1
KASQSVDYDGDSYMN

SEQ ID NO: 19253 - protein, 7 aa, Artificial Sequence
  Description of Artificial Sequence: Synthetic peptide
  XENP020556 vlCDR2
AASNLES

SEQ ID NO: 19254 - protein, 9 aa, Artificial Sequence
  Description of Artificial Sequence: Synthetic peptide
  XENP020556 vlCDR3
QQSNEDPFT

SEQ ID NO: 19255 - protein, 450 aa, Artificial Sequence
  Description of Artificial Sequence: Synthetic polypeptide
  XENP020557 7G8_H0.105_L0_IgG1_PVA_/S267K Heavy Chain
EVKLEESGGGLVQPGGSMKLSCAASGFTFSDAWMDWVRQSPEKGLEWVAEIRTKANNHATYYAESVKGRFTISRDDSKSSVYLQMNSLRAEDTGIYYCTRIANWDWYFDVWGAGTTVTVSSASTKGPSVFPLAPSSKSTSGGTAALGCLVKDYFPEPVTVSWNSGALTSGVHTFPAVLQSSGLYSLSSVVTVPSSSLGTQTYICNVNHKPSDTKVDKKVEPKSCDKTHTCPPCPAPPVAGPSVFLFPPKPKDTLMISRTPEVTCVVVDVKHEDPEVKFNWYVDGVEVHNAKTKPREEEYNSTYRVVSVLTVLHQDWLNGKEYKCKVSNKALPAPIEKTISKAKGQPREPQVYTLPPSREEMTKNQVSLTCDVSGFYPSDIAVEWESDGQPENNYKTTPPVLDSDGSFFLYSKLTVDKSRWEQGDVFSCSVMHEALHNHYTQKSLSLSPGK

SEQ ID NO: 19256 - protein, 121 aa, Artificial Sequence
  Description of Artificial Sequence: Synthetic polypeptide
  VH of XENP020557
EVKLEESGGGLVQPGGSMKLSCAASGFTFSDAWMDWVRQSPEKGLEWVAEIRTKANNHATYYAESVKGRFTISRDDSKSSVYLQMNSLRAEDTGIYYCTRIANWDWYFDVWGAGTTVTVSS

SEQ ID NO: 19257 - protein, 5 aa, Artificial Sequence
  Description of Artificial Sequence: Synthetic peptide
  XENP020557 vhCDR1
DAWMD

SEQ ID NO: 19258 - protein, 19 aa, Artificial Sequence
  Description of Artificial Sequence: Synthetic peptide
  XENP020557 vhCDR2
EIRTKANNHATYYAESVKG

SEQ ID NO: 19259 - protein, 10 aa, Artificial Sequence
  Description of Artificial Sequence: Synthetic peptide
  XENP020557 vhCDR3
IANWDWYFDV

SEQ ID NO: 19260 - protein, 218 aa, Artificial Sequence; identical to SEQ ID NO: 17590
  Description of Artificial Sequence: Synthetic polypeptide
  XENP020557 7G8_H0.105_L0_IgG1_PVA_/S267K Light Chain

SEQ ID NO: 19261 - protein, 111 aa, Artificial Sequence; identical to SEQ ID NO: 17591
  Description of Artificial Sequence: Synthetic polypeptide
  VL of XENP020557

SEQ ID NO: 19262 - protein, 15 aa, Artificial Sequence
  Description of Artificial Sequence: Synthetic peptide
  XENP020557 vlCDR1
KASQSVDYDGDSYMN

SEQ ID NO: 19263 - protein, 7 aa, Artificial Sequence
  Description of Artificial Sequence: Synthetic peptide
  XENP020557 vlCDR2
AASNLES

SEQ ID NO: 19264 - protein, 9 aa, Artificial Sequence
  Description of Artificial Sequence: Synthetic peptide
  XENP020557 vlCDR3
QQSNEDPFT

SEQ ID NO: 19265 - protein, 450 aa, Artificial Sequence
  Description of Artificial Sequence: Synthetic polypeptide
  XENP020558 7G8_H0.106_L0_IgG1_PVA_/S267K Heavy Chain
EVKLEESGGGLVQPGGSMKLSCAASGFTFSDAWMDWVRQSPEKGLEWVAEIRTKANNHATYYAESVKGRFTISRDDSKSSVYLQMNSLRAEDTGIYYCTRFANWDWYFDVWGAGTTVTVSSASTKGPSVFPLAPSSKSTSGGTAALGCLVKDYFPEPVTVSWNSGALTSGVHTFPAVLQSSGLYSLSSVVTVPSSSLGTQTYICNVNHKPSDTKVDKKVEPKSCDKTHTCPPCPAPPVAGPSVFLFPPKPKDTLMISRTPEVTCVVVDVKHEDPEVKFNWYVDGVEVHNAKTKPREEEYNSTYRVVSVLTVLHQDWLNGKEYKCKVSNKALPAPIEKTISKAKGQPREPQVYTLPPSREEMTKNQVSLTCDVSGFYPSDIAVEWESDGQPENNYKTTPPVLDSDGSFFLYSKLTVDKSRWEQGDVFSCSVMHEALHNHYTQKSLSLSPGK

SEQ ID NO: 19266 - protein, 121 aa, Artificial Sequence
  Description of Artificial Sequence: Synthetic polypeptide
  VH of XENP020558
EVKLEESGGGLVQPGGSMKLSCAASGFTFSDAWMDWVRQSPEKGLEWVAEIRTKANNHATYYAESVKGRFTISRDDSKSSVYLQMNSLRAEDTGIYYCTRFANWDWYFDVWGAGTTVTVSS

SEQ ID NO: 19267 - protein, 5 aa, Artificial Sequence
  Description of Artificial Sequence: Synthetic peptide
  XENP020558 vhCDR1
DAWMD

SEQ ID NO: 19268 - protein, 19 aa, Artificial Sequence
  Description of Artificial Sequence: Synthetic peptide
  XENP020558 vhCDR2
EIRTKANNHATYYAESVKG

SEQ ID NO: 19269 - protein, 10 aa, Artificial Sequence
  Description of Artificial Sequence: Synthetic peptide
  XENP020558 vhCDR3
FANWDWYFDV

SEQ ID NO: 19270 - protein, 218 aa, Artificial Sequence; identical to SEQ ID NO: 17590
  Description of Artificial Sequence: Synthetic polypeptide
  XENP020558 7G8_H0.106_L0_IgG1_PVA_/S267K Light Chain

SEQ ID NO: 19271 - protein, 111 aa, Artificial Sequence; identical to SEQ ID NO: 17591
  Description of Artificial Sequence: Synthetic polypeptide
  VL of XENP020558

SEQ ID NO: 19272 - protein, 15 aa, Artificial Sequence
  Description of Artificial Sequence: Synthetic peptide
  XENP020558 vlCDR1
KASQSVDYDGDSYMN

SEQ ID NO: 19273 - protein, 7 aa, Artificial Sequence
  Description of Artificial Sequence: Synthetic peptide
  XENP020558 vlCDR2
AASNLES

SEQ ID NO: 19274 - protein, 9 aa, Artificial Sequence
  Description of Artificial Sequence: Synthetic peptide
  XENP020558 vlCDR3
QQSNEDPFT

SEQ ID NO: 19275 - protein, 450 aa, Artificial Sequence
  Description of Artificial Sequence: Synthetic polypeptide
  XENP020559 7G8_H0.107_L0_IgG1_PVA_/S267K Heavy Chain
EVKLEESGGGLVQPGGSMKLSCAASGFTFSDAWMDWVRQSPEKGLEWVAEIRTKANNHATYYAESVKGRFTISRDDSKSSVYLQMNSLRAEDTGIYYCTRVANWDWYFDVWGAGTTVTVSSASTKGPSVFPLAPSSKSTSGGTAALGCLVKDYFPEPVTVSWNSGALTSGVHTFPAVLQSSGLYSLSSVVTVPSSSLGTQTYICNVNHKPSDTKVDKKVEPKSCDKTHTCPPCPAPPVAGPSVFLFPPKPKDTLMISRTPEVTCVVVDVKHEDPEVKFNWYVDGVEVHNAKTKPREEEYNSTYRVVSVLTVLHQDWLNGKEYKCKVSNKALPAPIEKTISKAKGQPREPQVYTLPPSREEMTKNQVSLTCDVSGFYPSDIAVEWESDGQPENNYKTTPPVLDSDGSFFLYSKLTVDKSRWEQGDVFSCSVMHEALHNHYTQKSLSLSPGK

SEQ ID NO: 19276 - protein, 121 aa, Artificial Sequence
  Description of Artificial Sequence: Synthetic polypeptide
  VH of XENP020559
EVKLEESGGGLVQPGGSMKLSCAASGFTFSDAWMDWVRQSPEKGLEWVAEIRTKANNHATYYAESVKGRFTISRDDSKSSVYLQMNSLRAEDTGIYYCTRVANWDWYFDVWGAGTTVTVSS

SEQ ID NO: 19277 - protein, 5 aa, Artificial Sequence
  Description of Artificial Sequence: Synthetic peptide
  XENP020559 vhCDR1
DAWMD

SEQ ID NO: 19278 - protein, 19 aa, Artificial Sequence
  Description of Artificial Sequence: Synthetic peptide
  XENP020559 vhCDR2
EIRTKANNHATYYAESVKG

SEQ ID NO: 19279 - protein, 10 aa, Artificial Sequence
  Description of Artificial Sequence: Synthetic peptide
  XENP020559 vhCDR3
VANWDWYFDV

SEQ ID NO: 19280 - protein, 218 aa, Artificial Sequence; identical to SEQ ID NO: 17590
  Description of Artificial Sequence: Synthetic polypeptide
  XENP020559 7G8_H0.107_L0_IgG1_PVA_/S267K Light Chain

SEQ ID NO: 19281 - protein, 111 aa, Artificial Sequence; identical to SEQ ID NO: 17591
  Description of Artificial Sequence: Synthetic polypeptide
  VL of XENP020559

SEQ ID NO: 19282 - protein, 15 aa, Artificial Sequence
  Description of Artificial Sequence: Synthetic peptide
  XENP020559 vlCDR1
KASQSVDYDGDSYMN

SEQ ID NO: 19283 - protein, 7 aa, Artificial Sequence
  Description of Artificial Sequence: Synthetic peptide
  XENP020559 vlCDR2
AASNLES

SEQ ID NO: 19284 - protein, 9 aa, Artificial Sequence
  Description of Artificial Sequence: Synthetic peptide
  XENP020559 vlCDR3
QQSNEDPFT

SEQ ID NO: 19285 - protein, 450 aa, Artificial Sequence
  Description of Artificial Sequence: Synthetic polypeptide
  XENP020560 7G8_H0.108_L0_IgG1_PVA_/S267K Heavy Chain
EVKLEESGGGLVQPGGSMKLSCAASGFTFSDAWMDWVRQSPEKGLEWVAEIRTKANNHATYYAESVKGRFTISRDDSKSSVYLQMNSLRAEDTGIYYCTRYANWDWYFDVWGAGTTVTVSSASTKGPSVFPLAPSSKSTSGGTAALGCLVKDYFPEPVTVSWNSGALTSGVHTFPAVLQSSGLYSLSSVVTVPSSSLGTQTYICNVNHKPSDTKVDKKVEPKSCDKTHTCPPCPAPPVAGPSVFLFPPKPKDTLMISRTPEVTCVVVDVKHEDPEVKFNWYVDGVEVHNAKTKPREEEYNSTYRVVSVLTVLHQDWLNGKEYKCKVSNKALPAPIEKTISKAKGQPREPQVYTLPPSREEMTKNQVSLTCDVSGFYPSDIAVEWESDGQPENNYKTTPPVLDSDGSFFLYSKLTVDKSRWEQGDVFSCSVMHEALHNHYTQKSLSLSPGK

SEQ ID NO: 19286 - protein, 121 aa, Artificial Sequence
  Description of Artificial Sequence: Synthetic polypeptide
  VH of XENP020560
EVKLEESGGGLVQPGGSMKLSCAASGFTFSDAWMDWVRQSPEKGLEWVAEIRTKANNHATYYAESVKGRFTISRDDSKSSVYLQMNSLRAEDTGIYYCTRYANWDWYFDVWGAGTTVTVSS

SEQ ID NO: 19287 - protein, 5 aa, Artificial Sequence
  Description of Artificial Sequence: Synthetic peptide
  XENP020560 vhCDR1
DAWMD

SEQ ID NO: 19288 - protein, 19 aa, Artificial Sequence
  Description of Artificial Sequence: Synthetic peptide
  XENP020560 vhCDR2
EIRTKANNHATYYAESVKG

SEQ ID NO: 19289 - protein, 10 aa, Artificial Sequence
  Description of Artificial Sequence: Synthetic peptide
  XENP020560 vhCDR3
YANWDWYFDV

SEQ ID NO: 19290 - protein, 218 aa, Artificial Sequence; identical to SEQ ID NO: 17590
  Description of Artificial Sequence: Synthetic polypeptide
  XENP020560 7G8_H0.108_L0_IgG1_PVA_/S267K Light Chain

SEQ ID NO: 19291 - protein, 111 aa, Artificial Sequence; identical to SEQ ID NO: 17591
  Description of Artificial Sequence: Synthetic polypeptide
  VL of XENP020560

SEQ ID NO: 19292 - protein, 15 aa, Artificial Sequence
  Description of Artificial Sequence: Synthetic peptide
  XENP020560 vlCDR1
KASQSVDYDGDSYMN

SEQ ID NO: 19293 - protein, 7 aa, Artificial Sequence
  Description of Artificial Sequence: Synthetic peptide
  XENP020560 vlCDR2
AASNLES

SEQ ID NO: 19294 - protein, 9 aa, Artificial Sequence
  Description of Artificial Sequence: Synthetic peptide
  XENP020560 vlCDR3
QQSNEDPFT

SEQ ID NO: 19295 - protein, 450 aa, Artificial Sequence
  Description of Artificial Sequence: Synthetic polypeptide
  XENP020561 7G8_H0.109_L0_IgG1_PVA_/S267K Heavy Chain
EVKLEESGGGLVQPGGSMKLSCAASGFTFSDAWMDWVRQSPEKGLEWVAEIRTKANNHATYYAESVKGRFTISRDDSKSSVYLQMNSLRAEDTGIYYCTRWANWDWYFDVWGAGTTVTVSSASTKGPSVFPLAPSSKSTSGGTAALGCLVKDYFPEPVTVSWNSGALTSGVHTFPAVLQSSGLYSLSSVVTVPSSSLGTQTYICNVNHKPSDTKVDKKVEPKSCDKTHTCPPCPAPPVAGPSVFLFPPKPKDTLMISRTPEVTCVVVDVKHEDPEVKFNWYVDGVEVHNAKTKPREEEYNSTYRVVSVLTVLHQDWLNGKEYKCKVSNKALPAPIEKTISKAKGQPREPQVYTLPPSREEMTKNQVSLTCDVSGFYPSDIAVEWESDGQPENNYKTTPPVLDSDGSFFLYSKLTVDKSRWEQGDVFSCSVMHEALHNHYTQKSLSLSPGK

SEQ ID NO: 19296 - protein, 121 aa, Artificial Sequence
  Description of Artificial Sequence: Synthetic polypeptide
  VH of XENP020561
EVKLEESGGGLVQPGGSMKLSCAASGFTFSDAWMDWVRQSPEKGLEWVAEIRTKANNHATYYAESVKGRFTISRDDSKSSVYLQMNSLRAEDTGIYYCTRWANWDWYFDVWGAGTTVTVSS

SEQ ID NO: 19297 - protein, 5 aa, Artificial Sequence
  Description of Artificial Sequence: Synthetic peptide
  XENP020561 vhCDR1
DAWMD

SEQ ID NO: 19298 - protein, 19 aa, Artificial Sequence
  Description of Artificial Sequence: Synthetic peptide
  XENP020561 vhCDR2
EIRTKANNHATYYAESVKG

SEQ ID NO: 19299 - protein, 10 aa, Artificial Sequence
  Description of Artificial Sequence: Synthetic peptide
  XENP020561 vhCDR3
WANWDWYFDV

SEQ ID NO: 19300 - protein, 218 aa, Artificial Sequence; identical to SEQ ID NO: 17590
  Description of Artificial Sequence: Synthetic polypeptide
  XENP020561 7G8_H0.109_L0_IgG1_PVA_/S267K Light Chain

SEQ ID NO: 19301 - protein, 111 aa, Artificial Sequence; identical to SEQ ID NO: 17591
  Description of Artificial Sequence: Synthetic polypeptide
  VL of XENP020561

SEQ ID NO: 19302 - protein, 15 aa, Artificial Sequence
  Description of Artificial Sequence: Synthetic peptide
  XENP020561 vlCDR1
KASQSVDYDGDSYMN

SEQ ID NO: 19303 - protein, 7 aa, Artificial Sequence
  Description of Artificial Sequence: Synthetic peptide
  XENP020561 vlCDR2
AASNLES

SEQ ID NO: 19304 - protein, 9 aa, Artificial Sequence
  Description of Artificial Sequence: Synthetic peptide
  XENP020561 vlCDR3
QQSNEDPFT

SEQ ID NO: 19305 - protein, 450 aa, Artificial Sequence
  Description of Artificial Sequence: Synthetic polypeptide
  XENP020562 7G8_H0.110_L0_IgG1_PVA_/S267K Heavy Chain
EVKLEESGGGLVQPGGSMKLSCAASGFTFSDAWMDWVRQSPEKGLEWVAEIRTKANNHATYYAESVKGRFTISRDDSKSSVYLQMNSLRAEDTGIYYCTRDANWDWYFDVWGAGTTVTVSSASTKGPSVFPLAPSSKSTSGGTAALGCLVKDYFPEPVTVSWNSGALTSGVHTFPAVLQSSGLYSLSSVVTVPSSSLGTQTYICNVNHKPSDTKVDKKVEPKSCDKTHTCPPCPAPPVAGPSVFLFPPKPKDTLMISRTPEVTCVVVDVKHEDPEVKFNWYVDGVEVHNAKTKPREEEYNSTYRVVSVLTVLHQDWLNGKEYKCKVSNKALPAPIEKTISKAKGQPREPQVYTLPPSREEMTKNQVSLTCDVSGFYPSDIAVEWESDGQPENNYKTTPPVLDSDGSFFLYSKLTVDKSRWEQGDVFSCSVMHEALHNHYTQKSLSLSPGK

SEQ ID NO: 19306 - protein, 121 aa, Artificial Sequence
  Description of Artificial Sequence: Synthetic polypeptide
  VH of XENP020562
EVKLEESGGGLVQPGGSMKLSCAASGFTFSDAWMDWVRQSPEKGLEWVAEIRTKANNHATYYAESVKGRFTISRDDSKSSVYLQMNSLRAEDTGIYYCTRDANWDWYFDVWGAGTTVTVSS

SEQ ID NO: 19307 - protein, 5 aa, Artificial Sequence
  Description of Artificial Sequence: Synthetic peptide
  XENP020562 vhCDR1
DAWMD

SEQ ID NO: 19308 - protein, 19 aa, Artificial Sequence
  Description of Artificial Sequence: Synthetic peptide
  XENP020562 vhCDR2
EIRTKANNHATYYAESVKG

SEQ ID NO: 19309 - protein, 10 aa, Artificial Sequence
  Description of Artificial Sequence: Synthetic peptide
  XENP020562 vhCDR3
DANWDWYFDV

SEQ ID NO: 19310 - protein, 218 aa, Artificial Sequence; identical to SEQ ID NO: 17590
  Description of Artificial Sequence: Synthetic polypeptide
  XENP020562 7G8_H0.110_L0_IgG1_PVA_/S267K Light Chain

SEQ ID NO: 19311 - protein, 111 aa, Artificial Sequence; identical to SEQ ID NO: 17591
  Description of Artificial Sequence: Synthetic polypeptide
  VL of XENP020562

SEQ ID NO: 19312 - protein, 15 aa, Artificial Sequence
  Description of Artificial Sequence: Synthetic peptide
  XENP020562 vlCDR1
KASQSVDYDGDSYMN

SEQ ID NO: 19313 - protein, 7 aa, Artificial Sequence
  Description of Artificial Sequence: Synthetic peptide
  XENP020562 vlCDR2
AASNLES

SEQ ID NO: 19314 - protein, 9 aa, Artificial Sequence
  Description of Artificial Sequence: Synthetic peptide
  XENP020562 vlCDR3
QQSNEDPFT

SEQ ID NO: 19315 - protein, 450 aa, Artificial Sequence
  Description of Artificial Sequence: Synthetic polypeptide
  XENP020563 7G8_H0.111_L0_IgG1_PVA_/S267K Heavy Chain
EVKLEESGGGLVQPGGSMKLSCAASGFTFSDAWMDWVRQSPEKGLEWVAEIRTKANNHATYYAESVKGRFTISRDDSKSSVYLQMNSLRAEDTGIYYCTRAANWDWYFDVWGAGTTVTVSSASTKGPSVFPLAPSSKSTSGGTAALGCLVKDYFPEPVTVSWNSGALTSGVHTFPAVLQSSGLYSLSSVVTVPSSSLGTQTYICNVNHKPSDTKVDKKVEPKSCDKTHTCPPCPAPPVAGPSVFLFPPKPKDTLMISRTPEVTCVVVDVKHEDPEVKFNWYVDGVEVHNAKTKPREEEYNSTYRVVSVLTVLHQDWLNGKEYKCKVSNKALPAPIEKTISKAKGQPREPQVYTLPPSREEMTKNQVSLTCDVSGFYPSDIAVEWESDGQPENNYKTTPPVLDSDGSFFLYSKLTVDKSRWEQGDVFSCSVMHEALHNHYTQKSLSLSPGK

SEQ ID NO: 19316 - protein, 121 aa, Artificial Sequence
  Description of Artificial Sequence: Synthetic polypeptide
  VH of XENP020563
EVKLEESGGGLVQPGGSMKLSCAASGFTFSDAWMDWVRQSPEKGLEWVAEIRTKANNHATYYAESVKGRFTISRDDSKSSVYLQMNSLRAEDTGIYYCTRAANWDWYFDVWGAGTTVTVSS

SEQ ID NO: 19317 - protein, 5 aa, Artificial Sequence
  Description of Artificial Sequence: Synthetic peptide
  XENP020563 vhCDR1
DAWMD

SEQ ID NO: 19318 - protein, 19 aa, Artificial Sequence
  Description of Artificial Sequence: Synthetic peptide
  XENP020563 vhCDR2
EIRTKANNHATYYAESVKG

SEQ ID NO: 19319 - protein, 10 aa, Artificial Sequence
  Description of Artificial Sequence: Synthetic peptide
  XENP020563 vhCDR3
AANWDWYFDV

SEQ ID NO: 19320 - protein, 218 aa, Artificial Sequence; identical to SEQ ID NO: 17590
  Description of Artificial Sequence: Synthetic polypeptide
  XENP020563 7G8_H0.111_L0_IgG1_PVA_/S267K Light Chain

SEQ ID NO: 19321 - protein, 111 aa, Artificial Sequence; identical to SEQ ID NO: 17591
  Description of Artificial Sequence: Synthetic polypeptide
  VL of XENP020563

SEQ ID NO: 19322 - protein, 15 aa, Artificial Sequence
  Description of Artificial Sequence: Synthetic peptide
  XENP020563 vlCDR1
KASQSVDYDGDSYMN

SEQ ID NO: 19323 - protein, 7 aa, Artificial Sequence
  Description of Artificial Sequence: Synthetic peptide
  XENP020563 vlCDR2
AASNLES

SEQ ID NO: 19324 - protein, 9 aa, Artificial Sequence
  Description of Artificial Sequence: Synthetic peptide
  XENP020563 vlCDR3
QQSNEDPFT

SEQ ID NO: 19325 - protein, 450 aa, Artificial Sequence
  Description of Artificial Sequence: Synthetic polypeptide
  XENP020564 7G8_H0.112_L0_IgG1_PVA_/S267K Heavy Chain
EVKLEESGGGLVQPGGSMKLSCAASGFTFSDAWMDWVRQSPEKGLEWVAEIRTKANNHATYYAESVKGRFTISRDDSKSSVYLQMNSLRAEDTGIYYCTRQANWDWYFDVWGAGTTVTVSSASTKGPSVFPLAPSSKSTSGGTAALGCLVKDYFPEPVTVSWNSGALTSGVHTFPAVLQSSGLYSLSSVVTVPSSSLGTQTYICNVNHKPSDTKVDKKVEPKSCDKTHTCPPCPAPPVAGPSVFLFPPKPKDTLMISRTPEVTCVVVDVKHEDPEVKFNWYVDGVEVHNAKTKPREEEYNSTYRVVSVLTVLHQDWLNGKEYKCKVSNKALPAPIEKTISKAKGQPREPQVYTLPPSREEMTKNQVSLTCDVSGFYPSDIAVEWESDGQPENNYKTTPPVLDSDGSFFLYSKLTVDKSRWEQGDVFSCSVMHEALHNHYTQKSLSLSPGK

SEQ ID NO: 19326 - protein, 121 aa, Artificial Sequence
  Description of Artificial Sequence: Synthetic polypeptide
  VH of XENP020564
EVKLEESGGGLVQPGGSMKLSCAASGFTFSDAWMDWVRQSPEKGLEWVAEIRTKANNHATYYAESVKGRFTISRDDSKSSVYLQMNSLRAEDTGIYYCTRQANWDWYFDVWGAGTTVTVSS

SEQ ID NO: 19327 - protein, 5 aa, Artificial Sequence
  Description of Artificial Sequence: Synthetic peptide
  XENP020564 vhCDR1
DAWMD

SEQ ID NO: 19328 - protein, 19 aa, Artificial Sequence
  Description of Artificial Sequence: Synthetic peptide
  XENP020564 vhCDR2
EIRTKANNHATYYAESVKG

SEQ ID NO: 19329 - protein, 10 aa, Artificial Sequence
  Description of Artificial Sequence: Synthetic peptide
  XENP020564 vhCDR3
QANWDWYFDV

SEQ ID NO: 19330 - protein, 218 aa, Artificial Sequence; identical to SEQ ID NO: 17590
  Description of Artificial Sequence: Synthetic polypeptide
  XENP020564 7G8_H0.112_L0_IgG1_PVA_/S267K Light Chain

SEQ ID NO: 19331 - protein, 111 aa, Artificial Sequence; identical to SEQ ID NO: 17591
  Description of Artificial Sequence: Synthetic polypeptide
  VL of XENP020564

SEQ ID NO: 19332 - protein, 15 aa, Artificial Sequence
  Description of Artificial Sequence: Synthetic peptide
  XENP020564 vlCDR1
KASQSVDYDGDSYMN

SEQ ID NO: 19333 - protein, 7 aa, Artificial Sequence
  Description of Artificial Sequence: Synthetic peptide
  XENP020564 vlCDR2
AASNLES

SEQ ID NO: 19334 - protein, 9 aa, Artificial Sequence
  Description of Artificial Sequence: Synthetic peptide
  XENP020564 vlCDR3
QQSNEDPFT

SEQ ID NO: 19335 - protein, 450 aa, Artificial Sequence
  Description of Artificial Sequence: Synthetic polypeptide
  XENP020565 7G8_H0.113_L0_IgG1_PVA_/S267K Heavy Chain
EVKLEESGGGLVQPGGSMKLSCAASGFTFSDAWMDWVRQSPEKGLEWVAEIRTKANNHATYYAESVKGRFTISRDDSKSSVYLQMNSLRAEDTGIYYCTRKANWDWYFDVWGAGTTVTVSSASTKGPSVFPLAPSSKSTSGGTAALGCLVKDYFPEPVTVSWNSGALTSGVHTFPAVLQSSGLYSLSSVVTVPSSSLGTQTYICNVNHKPSDTKVDKKVEPKSCDKTHTCPPCPAPPVAGPSVFLFPPKPKDTLMISRTPEVTCVVVDVKHEDPEVKFNWYVDGVEVHNAKTKPREEEYNSTYRVVSVLTVLHQDWLNGKEYKCKVSNKALPAPIEKTISKAKGQPREPQVYTLPPSREEMTKNQVSLTCDVSGFYPSDIAVEWESDGQPENNYKTTPPVLDSDGSFFLYSKLTVDKSRWEQGDVFSCSVMHEALHNHYTQKSLSLSPGK

SEQ ID NO: 19336 - protein, 121 aa, Artificial Sequence
  Description of Artificial Sequence: Synthetic polypeptide
  VH of XENP020565
EVKLEESGGGLVQPGGSMKLSCAASGFTFSDAWMDWVRQSPEKGLEWVAEIRTKANNHATYYAESVKGRFTISRDDSKSSVYLQMNSLRAEDTGIYYCTRKANWDWYFDVWGAGTTVTVSS

SEQ ID NO: 19337 - protein, 5 aa, Artificial Sequence
  Description of Artificial Sequence: Synthetic peptide
  XENP020565 vhCDR1
DAWMD

SEQ ID NO: 19338 - protein, 19 aa, Artificial Sequence
  Description of Artificial Sequence: Synthetic peptide
  XENP020565 vhCDR2
EIRTKANNHATYYAESVKG

SEQ ID NO: 19339 - protein, 10 aa, Artificial Sequence
  Description of Artificial Sequence: Synthetic peptide
  XENP020565 vhCDR3
KANWDWYFDV

SEQ ID NO: 19340 - protein, 218 aa, Artificial Sequence; identical to SEQ ID NO: 17590
  Description of Artificial Sequence: Synthetic polypeptide
  XENP020565 7G8_H0.113_L0_IgG1_PVA_/S267K Light Chain

SEQ ID NO: 19341 - protein, 111 aa, Artificial Sequence; identical to SEQ ID NO: 17591
  Description of Artificial Sequence: Synthetic polypeptide
  VL of XENP020565

SEQ ID NO: 19342 - protein, 15 aa, Artificial Sequence
  Description of Artificial Sequence: Synthetic peptide
  XENP020565 vlCDR1
KASQSVDYDGDSYMN

SEQ ID NO: 19343 - protein, 7 aa, Artificial Sequence
  Description of Artificial Sequence: Synthetic peptide
  XENP020565 vlCDR2
AASNLES

SEQ ID NO: 19344 - protein, 9 aa, Artificial Sequence
  Description of Artificial Sequence: Synthetic peptide
  XENP020565 vlCDR3
QQSNEDPFT

SEQ ID NO: 19345 - protein, 450 aa, Artificial Sequence
  Description of Artificial Sequence: Synthetic polypeptide
  XENP020566 7G8_H0.114_L0_IgG1_PVA_/S267K Heavy Chain
EVKLEESGGGLVQPGGSMKLSCAASGFTFSDAWMDWVRQSPEKGLEWVAEIRTKANNHATYYAESVKGRFTISRDDSKSSVYLQMNSLRAEDTGIYYCTRLSNWDWYFDVWGAGTTVTVSSASTKGPSVFPLAPSSKSTSGGTAALGCLVKDYFPEPVTVSWNSGALTSGVHTFPAVLQSSGLYSLSSVVTVPSSSLGTQTYICNVNHKPSDTKVDKKVEPKSCDKTHTCPPCPAPPVAGPSVFLFPPKPKDTLMISRTPEVTCVVVDVKHEDPEVKFNWYVDGVEVHNAKTKPREEEYNSTYRVVSVLTVLHQDWLNGKEYKCKVSNKALPAPIEKTISKAKGQPREPQVYTLPPSREEMTKNQVSLTCDVSGFYPSDIAVEWESDGQPENNYKTTPPVLDSDGSFFLYSKLTVDKSRWEQGDVFSCSVMHEALHNHYTQKSLSLSPGK

SEQ ID NO: 19346 - protein, 121 aa, Artificial Sequence
  Description of Artificial Sequence: Synthetic polypeptide
  VH of XENP020566
EVKLEESGGGLVQPGGSMKLSCAASGFTFSDAWMDWVRQSPEKGLEWVAEIRTKANNHATYYAESVKGRFTISRDDSKSSVYLQMNSLRAEDTGIYYCTRLSNWDWYFDVWGAGTTVTVSS

SEQ ID NO: 19347 - protein, 5 aa, Artificial Sequence
  Description of Artificial Sequence: Synthetic peptide
  XENP020566 vhCDR1
DAWMD

SEQ ID NO: 19348 - protein, 19 aa, Artificial Sequence
  Description of Artificial Sequence: Synthetic peptide
  XENP020566 vhCDR2
EIRTKANNHATYYAESVKG

SEQ ID NO: 19349 - protein, 10 aa, Artificial Sequence
  Description of Artificial Sequence: Synthetic peptide
  XENP020566 vhCDR3
LSNWDWYFDV

SEQ ID NO: 19350 - protein, 218 aa, Artificial Sequence; identical to SEQ ID NO: 17590
  Description of Artificial Sequence: Synthetic polypeptide
  XENP020566 7G8_H0.114_L0_IgG1_PVA_/S267K Light Chain

SEQ ID NO: 19351 - protein, 111 aa, Artificial Sequence; identical to SEQ ID NO: 17591
  Description of Artificial Sequence: Synthetic polypeptide
  VL of XENP020566

SEQ ID NO: 19352 - protein, 15 aa, Artificial Sequence
  Description of Artificial Sequence: Synthetic peptide
  XENP020566 vlCDR1
KASQSVDYDGDSYMN

SEQ ID NO: 19353 - protein, 7 aa, Artificial Sequence
  Description of Artificial Sequence: Synthetic peptide
  XENP020566 vlCDR2
AASNLES

SEQ ID NO: 19354 - protein, 9 aa, Artificial Sequence
  Description of Artificial Sequence: Synthetic peptide
  XENP020566 vlCDR3
QQSNEDPFT

SEQ ID NO: 19355 - protein, 450 aa, Artificial Sequence
  Description of Artificial Sequence: Synthetic polypeptide
  XENP020567 7G8_H0.115_L0_IgG1_PVA_/S267K Heavy Chain
EVKLEESGGGLVQPGGSMKLSCAASGFTFSDAWMDWVRQSPEKGLEWVAEIRTKANNHATYYAESVKGRFTISRDDSKSSVYLQMNSLRAEDTGIYYCTRLTNWDWYFDVWGAGTTVTVSSASTKGPSVFPLAPSSKSTSGGTAALGCLVKDYFPEPVTVSWNSGALTSGVHTFPAVLQSSGLYSLSSVVTVPSSSLGTQTYICNVNHKPSDTKVDKKVEPKSCDKTHTCPPCPAPPVAGPSVFLFPPKPKDTLMISRTPEVTCVVVDVKHEDPEVKFNWYVDGVEVHNAKTKPREEEYNSTYRVVSVLTVLHQDWLNGKEYKCKVSNKALPAPIEKTISKAKGQPREPQVYTLPPSREEMTKNQVSLTCDVSGFYPSDIAVEWESDGQPENNYKTTPPVLDSDGSFFLYSKLTVDKSRWEQGDVFSCSVMHEALHNHYTQKSLSLSPGK

SEQ ID NO: 19356 - protein, 121 aa, Artificial Sequence
  Description of Artificial Sequence: Synthetic polypeptide
  VH of XENP020567
EVKLEESGGGLVQPGGSMKLSCAASGFTFSDAWMDWVRQSPEKGLEWVAEIRTKANNHATYYAESVKGRFTISRDDSKSSVYLQMNSLRAEDTGIYYCTRLTNWDWYFDVWGAGTTVTVSS

SEQ ID NO: 19357 - protein, 5 aa, Artificial Sequence
  Description of Artificial Sequence: Synthetic peptide
  XENP020567 vhCDR1
DAWMD

SEQ ID NO: 19358 - protein, 19 aa, Artificial Sequence
  Description of Artificial Sequence: Synthetic peptide
  XENP020567 vhCDR2
EIRTKANNHATYYAESVKG

SEQ ID NO: 19359 - protein, 10 aa, Artificial Sequence
  Description of Artificial Sequence: Synthetic peptide
  XENP020567 vhCDR3
LTNWDWYFDV

SEQ ID NO: 19360 - protein, 218 aa, Artificial Sequence; identical to SEQ ID NO: 17590
  Description of Artificial Sequence: Synthetic polypeptide
  XENP020567 7G8_H0.115_L0_IgG1_PVA_/S267K Light Chain

SEQ ID NO: 19361 - protein, 111 aa, Artificial Sequence; identical to SEQ ID NO: 17591
  Description of Artificial Sequence: Synthetic polypeptide
  VL of XENP020567

SEQ ID NO: 19362 - protein, 15 aa, Artificial Sequence
  Description of Artificial Sequence: Synthetic peptide
  XENP020567 vlCDR1
KASQSVDYDGDSYMN

SEQ ID NO: 19363 - protein, 7 aa, Artificial Sequence
  Description of Artificial Sequence: Synthetic peptide
  XENP020567 vlCDR2
AASNLES

SEQ ID NO: 19364 - protein, 9 aa, Artificial Sequence
  Description of Artificial Sequence: Synthetic peptide
  XENP020567 vlCDR3
QQSNEDPFT

SEQ ID NO: 19365 - protein, 450 aa, Artificial Sequence
  Description of Artificial Sequence: Synthetic polypeptide
  XENP020568 7G8_H0.116_L0_IgG1_PVA_/S267K Heavy Chain
EVKLEESGGGLVQPGGSMKLSCAASGFTFSDAWMDWVRQSPEKGLEWVAEIRTKANNHATYYAESVKGRFTISRDDSKSSVYLQMNSLRAEDTGIYYCTRLGNWDWYFDVWGAGTTVTVSSASTKGPSVFPLAPSSKSTSGGTAALGCLVKDYFPEPVTVSWNSGALTSGVHTFPAVLQSSGLYSLSSVVTVPSSSLGTQTYICNVNHKPSDTKVDKKVEPKSCDKTHTCPPCPAPPVAGPSVFLFPPKPKDTLMISRTPEVTCVVVDVKHEDPEVKFNWYVDGVEVHNAKTKPREEEYNSTYRVVSVLTVLHQDWLNGKEYKCKVSNKALPAPIEKTISKAKGQPREPQVYTLPPSREEMTKNQVSLTCDVSGFYPSDIAVEWESDGQPENNYKTTPPVLDSDGSFFLYSKLTVDKSRWEQGDVFSCSVMHEALHNHYTQKSLSLSPGK

SEQ ID NO: 19366 - protein, 121 aa, Artificial Sequence
  Description of Artificial Sequence: Synthetic polypeptide
  VH of XENP020568
EVKLEESGGGLVQPGGSMKLSCAASGFTFSDAWMDWVRQSPEKGLEWVAEIRTKANNHATYYAESVKGRFTISRDDSKSSVYLQMNSLRAEDTGIYYCTRLGNWDWYFDVWGAGTTVTVSS

SEQ ID NO: 19367 - protein, 5 aa, Artificial Sequence
  Description of Artificial Sequence: Synthetic peptide
  XENP020568 vhCDR1
DAWMD

SEQ ID NO: 19368 - protein, 19 aa, Artificial Sequence
  Description of Artificial Sequence: Synthetic peptide
  XENP020568 vhCDR2
EIRTKANNHATYYAESVKG

SEQ ID NO: 19369 - protein, 10 aa, Artificial Sequence
  Description of Artificial Sequence: Synthetic peptide
  XENP020568 vhCDR3
LGNWDWYFDV

SEQ ID NO: 19370 - protein, 218 aa, Artificial Sequence; identical to SEQ ID NO: 17590
  Description of Artificial Sequence: Synthetic polypeptide
  XENP020568 7G8_H0.116_L0_IgG1_PVA_/S267K Light Chain

SEQ ID NO: 19371 - protein, 111 aa, Artificial Sequence; identical to SEQ ID NO: 17591
  Description of Artificial Sequence: Synthetic polypeptide
  VL of XENP020568

SEQ ID NO: 19372 - protein, 15 aa, Artificial Sequence
  Description of Artificial Sequence: Synthetic peptide
  XENP020568 vlCDR1
KASQSVDYDGDSYMN

SEQ ID NO: 19373 - protein, 7 aa, Artificial Sequence
  Description of Artificial Sequence: Synthetic peptide
  XENP020568 vlCDR2
AASNLES

SEQ ID NO: 19374 - protein, 9 aa, Artificial Sequence
  Description of Artificial Sequence: Synthetic peptide
  XENP020568 vlCDR3
QQSNEDPFT

SEQ ID NO: 19375 - protein, 450 aa, Artificial Sequence
  Description of Artificial Sequence: Synthetic polypeptide
  XENP020569 7G8_H0.117_L0_IgG1_PVA_/S267K Heavy Chain
EVKLEESGGGLVQPGGSMKLSCAASGFTFSDAWMDWVRQSPEKGLEWVAEIRTKANNHATYYAESVKGRFTISRDDSKSSVYLQMNSLRAEDTGIYYCTRLHNWDWYFDVWGAGTTVTVSSASTKGPSVFPLAPSSKSTSGGTAALGCLVKDYFPEPVTVSWNSGALTSGVHTFPAVLQSSGLYSLSSVVTVPSSSLGTQTYICNVNHKPSDTKVDKKVEPKSCDKTHTCPPCPAPPVAGPSVFLFPPKPKDTLMISRTPEVTCVVVDVKHEDPEVKFNWYVDGVEVHNAKTKPREEEYNSTYRVVSVLTVLHQDWLNGKEYKCKVSNKALPAPIEKTISKAKGQPREPQVYTLPPSREEMTKNQVSLTCDVSGFYPSDIAVEWESDGQPENNYKTTPPVLDSDGSFFLYSKLTVDKSRWEQGDVFSCSVMHEALHNHYTQKSLSLSPGK

SEQ ID NO: 19376 - protein, 121 aa, Artificial Sequence
  Description of Artificial Sequence: Synthetic polypeptide
  VH of XENP020569
EVKLEESGGGLVQPGGSMKLSCAASGFTFSDAWMDWVRQSPEKGLEWVAEIRTKANNHATYYAESVKGRFTISRDDSKSSVYLQMNSLRAEDTGIYYCTRLHNWDWYFDVWGAGTTVTVSS

SEQ ID NO: 19377 - protein, 5 aa, Artificial Sequence
  Description of Artificial Sequence: Synthetic peptide
  XENP020569 vhCDR1
DAWMD

SEQ ID NO: 19378 - protein, 19 aa, Artificial Sequence
  Description of Artificial Sequence: Synthetic peptide
  XENP020569 vhCDR2
EIRTKANNHATYYAESVKG

SEQ ID NO: 19379 - protein, 10 aa, Artificial Sequence
  Description of Artificial Sequence: Synthetic peptide
  XENP020569 vhCDR3
LHNWDWYFDV

SEQ ID NO: 19380 - protein, 218 aa, Artificial Sequence; identical to SEQ ID NO: 17590
  Description of Artificial Sequence: Synthetic polypeptide
  XENP020569 7G8_H0.117_L0_IgG1_PVA_/S267K Light Chain

SEQ ID NO: 19381 - protein, 111 aa, Artificial Sequence; identical to SEQ ID NO: 17591
  Description of Artificial Sequence: Synthetic polypeptide
  VL of XENP020569

SEQ ID NO: 19382 - protein, 15 aa, Artificial Sequence
  Description of Artificial Sequence: Synthetic peptide
  XENP020569 vlCDR1
KASQSVDYDGDSYMN

SEQ ID NO: 19383 - protein, 7 aa, Artificial Sequence
  Description of Artificial Sequence: Synthetic peptide
  XENP020569 vlCDR2
AASNLES

SEQ ID NO: 19384 - protein, 9 aa, Artificial Sequence
  Description of Artificial Sequence: Synthetic peptide
  XENP020569 vlCDR3
QQSNEDPFT

SEQ ID NO: 19385 - protein, 450 aa, Artificial Sequence
  Description of Artificial Sequence: Synthetic polypeptide
  XENP020570 7G8_H0.118_L0_IgG1_PVA_/S267K Heavy Chain
EVKLEESGGGLVQPGGSMKLSCAASGFTFSDAWMDWVRQSPEKGLEWVAEIRTKANNHATYYAESVKGRFTISRDDSKSSVYLQMNSLRAEDTGIYYCTRLQNWDWYFDVWGAGTTVTVSSASTKGPSVFPLAPSSKSTSGGTAALGCLVKDYFPEPVTVSWNSGALTSGVHTFPAVLQSSGLYSLSSVVTVPSSSLGTQTYICNVNHKPSDTKVDKKVEPKSCDKTHTCPPCPAPPVAGPSVFLFPPKPKDTLMISRTPEVTCVVVDVKHEDPEVKFNWYVDGVEVHNAKTKPREEEYNSTYRVVSVLTVLHQDWLNGKEYKCKVSNKALPAPIEKTISKAKGQPREPQVYTLPPSREEMTKNQVSLTCDVSGFYPSDIAVEWESDGQPENNYKTTPPVLDSDGSFFLYSKLTVDKSRWEQGDVFSCSVMHEALHNHYTQKSLSLSPGK

SEQ ID NO: 19386 - protein, 121 aa, Artificial Sequence
  Description of Artificial Sequence: Synthetic polypeptide
  VH of XENP020570
EVKLEESGGGLVQPGGSMKLSCAASGFTFSDAWMDWVRQSPEKGLEWVAEIRTKANNHATYYAESVKGRFTISRDDSKSSVYLQMNSLRAEDTGIYYCTRLQNWDWYFDVWGAGTTVTVSS

SEQ ID NO: 19387 - protein, 5 aa, Artificial Sequence
  Description of Artificial Sequence: Synthetic peptide
  XENP020570 vhCDR1
DAWMD

SEQ ID NO: 19388 - protein, 19 aa, Artificial Sequence
  Description of Artificial Sequence: Synthetic peptide
  XENP020570 vhCDR2
EIRTKANNHATYYAESVKG

SEQ ID NO: 19389 - protein, 10 aa, Artificial Sequence
  Description of Artificial Sequence: Synthetic peptide
  XENP020570 vhCDR3
LQNWDWYFDV

SEQ ID NO: 19390 - protein, 218 aa, Artificial Sequence; identical to SEQ ID NO: 17590
  Description of Artificial Sequence: Synthetic polypeptide
  XENP020570 7G8_H0.118_L0_IgG1_PVA_/S267K Light Chain

SEQ ID NO: 19391 - protein, 111 aa, Artificial Sequence; identical to SEQ ID NO: 17591
  Description of Artificial Sequence: Synthetic polypeptide
  VL of XENP020570

SEQ ID NO: 19392 - protein, 15 aa, Artificial Sequence
  Description of Artificial Sequence: Synthetic peptide
  XENP020570 vlCDR1
KASQSVDYDGDSYMN

SEQ ID NO: 19393 - protein, 7 aa, Artificial Sequence
  Description of Artificial Sequence: Synthetic peptide
  XENP020570 vlCDR2
AASNLES

SEQ ID NO: 19394 - protein, 9 aa, Artificial Sequence
  Description of Artificial Sequence: Synthetic peptide
  XENP020570 vlCDR3
QQSNEDPFT

SEQ ID NO: 19395 - protein, 450 aa, Artificial Sequence
  Description of Artificial Sequence: Synthetic polypeptide
  XENP020571 7G8_H0.119_L0_IgG1_PVA_/S267K Heavy Chain
EVKLEESGGGLVQPGGSMKLSCAASGFTFSDAWMDWVRQSPEKGLEWVAEIRTKANNHATYYAESVKGRFTISRDDSKSSVYLQMNSLRAEDTGIYYCTRLDNWDWYFDVWGAGTTVTVSSASTKGPSVFPLAPSSKSTSGGTAALGCLVKDYFPEPVTVSWNSGALTSGVHTFPAVLQSSGLYSLSSVVTVPSSSLGTQTYICNVNHKPSDTKVDKKVEPKSCDKTHTCPPCPAPPVAGPSVFLFPPKPKDTLMISRTPEVTCVVVDVKHEDPEVKFNWYVDGVEVHNAKTKPREEEYNSTYRVVSVLTVLHQDWLNGKEYKCKVSNKALPAPIEKTISKAKGQPREPQVYTLPPSREEMTKNQVSLTCDVSGFYPSDIAVEWESDGQPENNYKTTPPVLDSDGSFFLYSKLTVDKSRWEQGDVFSCSVMHEALHNHYTQKSLSLSPGK

SEQ ID NO: 19396 - protein, 121 aa, Artificial Sequence
  Description of Artificial Sequence: Synthetic polypeptide
  VH of XENP020571
EVKLEESGGGLVQPGGSMKLSCAASGFTFSDAWMDWVRQSPEKGLEWVAEIRTKANNHATYYAESVKGRFTISRDDSKSSVYLQMNSLRAEDTGIYYCTRLDNWDWYFDVWGAGTTVTVSS

SEQ ID NO: 19397 - protein, 5 aa, Artificial Sequence
  Description of Artificial Sequence: Synthetic peptide
  XENP020571 vhCDR1
DAWMD

SEQ ID NO: 19398 - protein, 19 aa, Artificial Sequence
  Description of Artificial Sequence: Synthetic peptide
  XENP020571 vhCDR2
EIRTKANNHATYYAESVKG

SEQ ID NO: 19399 - protein, 10 aa, Artificial Sequence
  Description of Artificial Sequence: Synthetic peptide
  XENP020571 vhCDR3
LDNWDWYFDV

SEQ ID NO: 19400 - protein, 218 aa, Artificial Sequence; identical to SEQ ID NO: 17590
  Description of Artificial Sequence: Synthetic polypeptide
  XENP020571 7G8_H0.119_L0_IgG1_PVA_/S267K Light Chain

SEQ ID NO: 19401 - protein, 111 aa, Artificial Sequence; identical to SEQ ID NO: 17591
  Description of Artificial Sequence: Synthetic polypeptide
  VL of XENP020571

SEQ ID NO: 19402 - protein, 15 aa, Artificial Sequence
  Description of Artificial Sequence: Synthetic peptide
  XENP020571 vlCDR1
KASQSVDYDGDSYMN

SEQ ID NO: 19403 - protein, 7 aa, Artificial Sequence
  Description of Artificial Sequence: Synthetic peptide
  XENP020571 vlCDR2
AASNLES

SEQ ID NO: 19404 - protein, 9 aa, Artificial Sequence
  Description of Artificial Sequence: Synthetic peptide
  XENP020571 vlCDR3
QQSNEDPFT

SEQ ID NO: 19405 - protein, 450 aa, Artificial Sequence
  Description of Artificial Sequence: Synthetic polypeptide
  XENP020572 7G8_H0.120_L0_IgG1_PVA_/S267K Heavy Chain
EVKLEESGGGLVQPGGSMKLSCAASGFTFSDAWMDWVRQSPEKGLEWVAEIRTKANNHATYYAESVKGRFTISRDDSKSSVYLQMNSLRAEDTGIYYCTRLLNWDWYFDVWGAGTTVTVSSASTKGPSVFPLAPSSKSTSGGTAALGCLVKDYFPEPVTVSWNSGALTSGVHTFPAVLQSSGLYSLSSVVTVPSSSLGTQTYICNVNHKPSDTKVDKKVEPKSCDKTHTCPPCPAPPVAGPSVFLFPPKPKDTLMISRTPEVTCVVVDVKHEDPEVKFNWYVDGVEVHNAKTKPREEEYNSTYRVVSVLTVLHQDWLNGKEYKCKVSNKALPAPIEKTISKAKGQPREPQVYTLPPSREEMTKNQVSLTCDVSGFYPSDIAVEWESDGQPENNYKTTPPVLDSDGSFFLYSKLTVDKSRWEQGDVFSCSVMHEALHNHYTQKSLSLSPGK

SEQ ID NO: 19406 - protein, 121 aa, Artificial Sequence
  Description of Artificial Sequence: Synthetic polypeptide
  VH of XENP020572
EVKLEESGGGLVQPGGSMKLSCAASGFTFSDAWMDWVRQSPEKGLEWVAEIRTKANNHATYYAESVKGRFTISRDDSKSSVYLQMNSLRAEDTGIYYCTRLLNWDWYFDVWGAGTTVTVSS

SEQ ID NO: 19407 - protein, 5 aa, Artificial Sequence
  Description of Artificial Sequence: Synthetic peptide
  XENP020572 vhCDR1
DAWMD

SEQ ID NO: 19408 - protein, 19 aa, Artificial Sequence
  Description of Artificial Sequence: Synthetic peptide
  XENP020572 vhCDR2
EIRTKANNHATYYAESVKG

SEQ ID NO: 19409 - protein, 10 aa, Artificial Sequence
  Description of Artificial Sequence: Synthetic peptide
  XENP020572 vhCDR3
LLNWDWYFDV

SEQ ID NO: 19410 - protein, 218 aa, Artificial Sequence; identical to SEQ ID NO: 17590
  Description of Artificial Sequence: Synthetic polypeptide
  XENP020572 7G8_H0.120_L0_IgG1_PVA_/S267K Light Chain

SEQ ID NO: 19411 - protein, 111 aa, Artificial Sequence; identical to SEQ ID NO: 17591
  Description of Artificial Sequence: Synthetic polypeptide
  VL of XENP020572

SEQ ID NO: 19412 - protein, 15 aa, Artificial Sequence
  Description of Artificial Sequence: Synthetic peptide
  XENP020572 vlCDR1
KASQSVDYDGDSYMN

SEQ ID NO: 19413 - protein, 7 aa, Artificial Sequence
  Description of Artificial Sequence: Synthetic peptide
  XENP020572 vlCDR2
AASNLES

SEQ ID NO: 19414 - protein, 9 aa, Artificial Sequence
  Description of Artificial Sequence: Synthetic peptide
  XENP020572 vlCDR3
QQSNEDPFT

SEQ ID NO: 19415 - protein, 450 aa, Artificial Sequence
  Description of Artificial Sequence: Synthetic polypeptide
  XENP020573 7G8_H0.121_L0_IgG1_PVA_/S267K Heavy Chain
EVKLEESGGGLVQPGGSMKLSCAASGFTFSDAWMDWVRQSPEKGLEWVAEIRTKANNHATYYAESVKGRFTISRDDSKSSVYLQMNSLRAEDTGIYYCTRLKNWDWYFDVWGAGTTVTVSSASTKGPSVFPLAPSSKSTSGGTAALGCLVKDYFPEPVTVSWNSGALTSGVHTFPAVLQSSGLYSLSSVVTVPSSSLGTQTYICNVNHKPSDTKVDKKVEPKSCDKTHTCPPCPAPPVAGPSVFLFPPKPKDTLMISRTPEVTCVVVDVKHEDPEVKFNWYVDGVEVHNAKTKPREEEYNSTYRVVSVLTVLHQDWLNGKEYKCKVSNKALPAPIEKTISKAKGQPREPQVYTLPPSREEMTKNQVSLTCDVSGFYPSDIAVEWESDGQPENNYKTTPPVLDSDGSFFLYSKLTVDKSRWEQGDVFSCSVMHEALHNHYTQKSLSLSPGK

SEQ ID NO: 19416 - protein, 121 aa, Artificial Sequence
  Description of Artificial Sequence: Synthetic polypeptide
  VH of XENP020573
EVKLEESGGGLVQPGGSMKLSCAASGFTFSDAWMDWVRQSPEKGLEWVAEIRTKANNHATYYAESVKGRFTISRDDSKSSVYLQMNSLRAEDTGIYYCTRLKNWDWYFDVWGAGTTVTVSS

SEQ ID NO: 19417 - protein, 5 aa, Artificial Sequence
  Description of Artificial Sequence: Synthetic peptide
  XENP020573 vhCDR1
DAWMD

SEQ ID NO: 19418 - protein, 19 aa, Artificial Sequence
  Description of Artificial Sequence: Synthetic peptide
  XENP020573 vhCDR2
EIRTKANNHATYYAESVKG

SEQ ID NO: 19419 - protein, 10 aa, Artificial Sequence
  Description of Artificial Sequence: Synthetic peptide
  XENP020573 vhCDR3
LKNWDWYFDV

SEQ ID NO: 19420 - protein, 218 aa, Artificial Sequence; identical to SEQ ID NO: 17590
  Description of Artificial Sequence: Synthetic polypeptide
  XENP020573 7G8_H0.121_L0_IgG1_PVA_/S267K Light Chain

SEQ ID NO: 19421 - protein, 111 aa, Artificial Sequence; identical to SEQ ID NO: 17591
  Description of Artificial Sequence: Synthetic polypeptide
  VL of XENP020573

SEQ ID NO: 19422 - protein, 15 aa, Artificial Sequence
  Description of Artificial Sequence: Synthetic peptide
  XENP020573 vlCDR1
KASQSVDYDGDSYMN

SEQ ID NO: 19423 - protein, 7 aa, Artificial Sequence
  Description of Artificial Sequence: Synthetic peptide
  XENP020573 vlCDR2
AASNLES

SEQ ID NO: 19424 - protein, 9 aa, Artificial Sequence
  Description of Artificial Sequence: Synthetic peptide
  XENP020573 vlCDR3
QQSNEDPFT

SEQ ID NO: 19425 - protein, 450 aa, Artificial Sequence
  Description of Artificial Sequence: Synthetic polypeptide
  XENP020574 7G8_H0.122_L0_IgG1_PVA_/S267K Heavy Chain
EVKLEESGGGLVQPGGSMKLSCAASGFTFSDAWMDWVRQSPEKGLEWVAEIRTKANNHATYYAESVKGRFTISRDDSKSSVYLQMNSLRAEDTGIYYCTRLYNWDWYFDVWGAGTTVTVSSASTKGPSVFPLAPSSKSTSGGTAALGCLVKDYFPEPVTVSWNSGALTSGVHTFPAVLQSSGLYSLSSVVTVPSSSLGTQTYICNVNHKPSDTKVDKKVEPKSCDKTHTCPPCPAPPVAGPSVFLFPPKPKDTLMISRTPEVTCVVVDVKHEDPEVKFNWYVDGVEVHNAKTKPREEEYNSTYRVVSVLTVLHQDWLNGKEYKCKVSNKALPAPIEKTISKAKGQPREPQVYTLPPSREEMTKNQVSLTCDVSGFYPSDIAVEWESDGQPENNYKTTPPVLDSDGSFFLYSKLTVDKSRWEQGDVFSCSVMHEALHNHYTQKSLSLSPGK

SEQ ID NO: 19426 - protein, 121 aa, Artificial Sequence
  Description of Artificial Sequence: Synthetic polypeptide
  VH of XENP020574
EVKLEESGGGLVQPGGSMKLSCAASGFTFSDAWMDWVRQSPEKGLEWVAEIRTKANNHATYYAESVKGRFTISRDDSKSSVYLQMNSLRAEDTGIYYCTRLYNWDWYFDVWGAGTTVTVSS

SEQ ID NO: 19427 - protein, 5 aa, Artificial Sequence
  Description of Artificial Sequence: Synthetic peptide
  XENP020574 vhCDR1
DAWMD

SEQ ID NO: 19428 - protein, 19 aa, Artificial Sequence
  Description of Artificial Sequence: Synthetic peptide
  XENP020574 vhCDR2
EIRTKANNHATYYAESVKG

SEQ ID NO: 19429 - protein, 10 aa, Artificial Sequence
  Description of Artificial Sequence: Synthetic peptide
  XENP020574 vhCDR3
LYNWDWYFDV

SEQ ID NO: 19430 - protein, 218 aa, Artificial Sequence; identical to SEQ ID NO: 17590
  Description of Artificial Sequence: Synthetic polypeptide
  XENP020574 7G8_H0.122_L0_IgG1_PVA_/S267K Light Chain

SEQ ID NO: 19431 - protein, 111 aa, Artificial Sequence; identical to SEQ ID NO: 17591
  Description of Artificial Sequence: Synthetic polypeptide
  VL of XENP020574

SEQ ID NO: 19432 - protein, 15 aa, Artificial Sequence
  Description of Artificial Sequence: Synthetic peptide
  XENP020574 vlCDR1
KASQSVDYDGDSYMN

SEQ ID NO: 19433 - protein, 7 aa, Artificial Sequence
  Description of Artificial Sequence: Synthetic peptide
  XENP020574 vlCDR2
AASNLES

SEQ ID NO: 19434 - protein, 9 aa, Artificial Sequence
  Description of Artificial Sequence: Synthetic peptide
  XENP020574 vlCDR3
QQSNEDPFT

SEQ ID NO: 19435 - protein, 450 aa, Artificial Sequence
  Description of Artificial Sequence: Synthetic polypeptide
  XENP020575 7G8_H0.123_L0_IgG1_PVA_/S267K Heavy Chain
EVKLEESGGGLVQPGGSMKLSCAASGFTFSDAWMDWVRQSPEKGLEWVAEIRTKANNHATYYAESVKGRFTISRDDSKSSVYLQMNSLRAEDTGIYYCTRLADWDWYFDVWGAGTTVTVSSASTKGPSVFPLAPSSKSTSGGTAALGCLVKDYFPEPVTVSWNSGALTSGVHTFPAVLQSSGLYSLSSVVTVPSSSLGTQTYICNVNHKPSDTKVDKKVEPKSCDKTHTCPPCPAPPVAGPSVFLFPPKPKDTLMISRTPEVTCVVVDVKHEDPEVKFNWYVDGVEVHNAKTKPREEEYNSTYRVVSVLTVLHQDWLNGKEYKCKVSNKALPAPIEKTISKAKGQPREPQVYTLPPSREEMTKNQVSLTCDVSGFYPSDIAVEWESDGQPENNYKTTPPVLDSDGSFFLYSKLTVDKSRWEQGDVFSCSVMHEALHNHYTQKSLSLSPGK

SEQ ID NO: 19436 - protein, 121 aa, Artificial Sequence
  Description of Artificial Sequence: Synthetic polypeptide
  VH of XENP020575
EVKLEESGGGLVQPGGSMKLSCAASGFTFSDAWMDWVRQSPEKGLEWVAEIRTKANNHATYYAESVKGRFTISRDDSKSSVYLQMNSLRAEDTGIYYCTRLADWDWYFDVWGAGTTVTVSS

SEQ ID NO: 19437 - protein, 5 aa, Artificial Sequence
  Description of Artificial Sequence: Synthetic peptide
  XENP020575 vhCDR1
DAWMD

SEQ ID NO: 19438 - protein, 19 aa, Artificial Sequence
  Description of Artificial Sequence: Synthetic peptide
  XENP020575 vhCDR2
EIRTKANNHATYYAESVKG

SEQ ID NO: 19439 - protein, 10 aa, Artificial Sequence
  Description of Artificial Sequence: Synthetic peptide
  XENP020575 vhCDR3
LADWDWYFDV

SEQ ID NO: 19440 - protein, 218 aa, Artificial Sequence; identical to SEQ ID NO: 17590
  Description of Artificial Sequence: Synthetic polypeptide
  XENP020575 7G8_H0.123_L0_IgG1_PVA_/S267K Light Chain

SEQ ID NO: 19441 - protein, 111 aa, Artificial Sequence; identical to SEQ ID NO: 17591
  Description of Artificial Sequence: Synthetic polypeptide
  VL of XENP020575

SEQ ID NO: 19442 - protein, 15 aa, Artificial Sequence
  Description of Artificial Sequence: Synthetic peptide
  XENP020575 vlCDR1
KASQSVDYDGDSYMN

SEQ ID NO: 19443 - protein, 7 aa, Artificial Sequence
  Description of Artificial Sequence: Synthetic peptide
  XENP020575 vlCDR2
AASNLES

SEQ ID NO: 19444 - protein, 9 aa, Artificial Sequence
  Description of Artificial Sequence: Synthetic peptide
  XENP020575 vlCDR3
QQSNEDPFT

SEQ ID NO: 19445 - protein, 450 aa, Artificial Sequence
  Description of Artificial Sequence: Synthetic polypeptide
  XENP020576 7G8_H0.124_L0_IgG1_PVA_/S267K Heavy Chain
EVKLEESGGGLVQPGGSMKLSCAASGFTFSDAWMDWVRQSPEKGLEWVAEIRTKANNHATYYAESVKGRFTISRDDSKSSVYLQMNSLRAEDTGIYYCTRLAHWDWYFDVWGAGTTVTVSSASTKGPSVFPLAPSSKSTSGGTAALGCLVKDYFPEPVTVSWNSGALTSGVHTFPAVLQSSGLYSLSSVVTVPSSSLGTQTYICNVNHKPSDTKVDKKVEPKSCDKTHTCPPCPAPPVAGPSVFLFPPKPKDTLMISRTPEVTCVVVDVKHEDPEVKFNWYVDGVEVHNAKTKPREEEYNSTYRVVSVLTVLHQDWLNGKEYKCKVSNKALPAPIEKTISKAKGQPREPQVYTLPPSREEMTKNQVSLTCDVSGFYPSDIAVEWESDGQPENNYKTTPPVLDSDGSFFLYSKLTVDKSRWEQGDVFSCSVMHEALHNHYTQKSLSLSPGK

SEQ ID NO: 19446 - protein, 121 aa, Artificial Sequence
  Description of Artificial Sequence: Synthetic polypeptide
  VH of XENP020576
EVKLEESGGGLVQPGGSMKLSCAASGFTFSDAWMDWVRQSPEKGLEWVAEIRTKANNHATYYAESVKGRFTISRDDSKSSVYLQMNSLRAEDTGIYYCTRLAHWDWYFDVWGAGTTVTVSS

SEQ ID NO: 19447 - protein, 5 aa, Artificial Sequence
  Description of Artificial Sequence: Synthetic peptide
  XENP020576 vhCDR1
DAWMD

SEQ ID NO: 19448 - protein, 19 aa, Artificial Sequence
  Description of Artificial Sequence: Synthetic peptide
  XENP020576 vhCDR2
EIRTKANNHATYYAESVKG

SEQ ID NO: 19449 - protein, 10 aa, Artificial Sequence
  Description of Artificial Sequence: Synthetic peptide
  XENP020576 vhCDR3
LAHWDWYFDV

SEQ ID NO: 19450 - protein, 218 aa, Artificial Sequence; identical to SEQ ID NO: 17590
  Description of Artificial Sequence: Synthetic polypeptide
  XENP020576 7G8_H0.124_L0_IgG1_PVA_/S267K Light Chain

SEQ ID NO: 19451 - protein, 111 aa, Artificial Sequence; identical to SEQ ID NO: 17591
  Description of Artificial Sequence: Synthetic polypeptide
  VL of XENP020576

SEQ ID NO: 19452 - protein, 15 aa, Artificial Sequence
  Description of Artificial Sequence: Synthetic peptide
  XENP020576 vlCDR1
KASQSVDYDGDSYMN

SEQ ID NO: 19453 - protein, 7 aa, Artificial Sequence
  Description of Artificial Sequence: Synthetic peptide
  XENP020576 vlCDR2
AASNLES

SEQ ID NO: 19454 - protein, 9 aa, Artificial Sequence
  Description of Artificial Sequence: Synthetic peptide
  XENP020576 vlCDR3
QQSNEDPFT

SEQ ID NO: 19455 - protein, 450 aa, Artificial Sequence
  Description of Artificial Sequence: Synthetic polypeptide
  XENP020577 7G8_H0.125_L0_IgG1_PVA_/S267K Heavy Chain
EVKLEESGGGLVQPGGSMKLSCAASGFTFSDAWMDWVRQSPEKGLEWVAEIRTKANNHATYYAESVKGRFTISRDDSKSSVYLQMNSLRAEDTGIYYCTRLAEWDWYFDVWGAGTTVTVSSASTKGPSVFPLAPSSKSTSGGTAALGCLVKDYFPEPVTVSWNSGALTSGVHTFPAVLQSSGLYSLSSVVTVPSSSLGTQTYICNVNHKPSDTKVDKKVEPKSCDKTHTCPPCPAPPVAGPSVFLFPPKPKDTLMISRTPEVTCVVVDVKHEDPEVKFNWYVDGVEVHNAKTKPREEEYNSTYRVVSVLTVLHQDWLNGKEYKCKVSNKALPAPIEKTISKAKGQPREPQVYTLPPSREEMTKNQVSLTCDVSGFYPSDIAVEWESDGQPENNYKTTPPVLDSDGSFFLYSKLTVDKSRWEQGDVFSCSVMHEALHNHYTQKSLSLSPGK

SEQ ID NO: 19456 - protein, 121 aa, Artificial Sequence
  Description of Artificial Sequence: Synthetic polypeptide
  VH of XENP020577
EVKLEESGGGLVQPGGSMKLSCAASGFTFSDAWMDWVRQSPEKGLEWVAEIRTKANNHATYYAESVKGRFTISRDDSKSSVYLQMNSLRAEDTGIYYCTRLAEWDWYFDVWGAGTTVTVSS

SEQ ID NO: 19457 - protein, 5 aa, Artificial Sequence
  Description of Artificial Sequence: Synthetic peptide
  XENP020577 vhCDR1
DAWMD

SEQ ID NO: 19458 - protein, 19 aa, Artificial Sequence
  Description of Artificial Sequence: Synthetic peptide
  XENP020577 vhCDR2
EIRTKANNHATYYAESVKG

SEQ ID NO: 19459 - protein, 10 aa, Artificial Sequence
  Description of Artificial Sequence: Synthetic peptide
  XENP020577 vhCDR3
LAEWDWYFDV

SEQ ID NO: 19460 - protein, 218 aa, Artificial Sequence; identical to SEQ ID NO: 17590
  Description of Artificial Sequence: Synthetic polypeptide
  XENP020577 7G8_H0.125_L0_IgG1_PVA_/S267K Light Chain

SEQ ID NO: 19461 - protein, 111 aa, Artificial Sequence; identical to SEQ ID NO: 17591
  Description of Artificial Sequence: Synthetic polypeptide
  VL of XENP020577

SEQ ID NO: 19462 - protein, 15 aa, Artificial Sequence
  Description of Artificial Sequence: Synthetic peptide
  XENP020577 vlCDR1
KASQSVDYDGDSYMN

SEQ ID NO: 19463 - protein, 7 aa, Artificial Sequence
  Description of Artificial Sequence: Synthetic peptide
  XENP020577 vlCDR2
AASNLES

SEQ ID NO: 19464 - protein, 9 aa, Artificial Sequence
  Description of Artificial Sequence: Synthetic peptide
  XENP020577 vlCDR3
QQSNEDPFT

SEQ ID NO: 19465 - protein, 450 aa, Artificial Sequence
  Description of Artificial Sequence: Synthetic polypeptide
  XENP020578 7G8_H0.126_L0_IgG1_PVA_/S267K Heavy Chain
EVKLEESGGGLVQPGGSMKLSCAASGFTFSDAWMDWVRQSPEKGLEWVAEIRTKANNHATYYAESVKGRFTISRDDSKSSVYLQMNSLRAEDTGIYYCTRLASWDWYFDVWGAGTTVTVSSASTKGPSVFPLAPSSKSTSGGTAALGCLVKDYFPEPVTVSWNSGALTSGVHTFPAVLQSSGLYSLSSVVTVPSSSLGTQTYICNVNHKPSDTKVDKKVEPKSCDKTHTCPPCPAPPVAGPSVFLFPPKPKDTLMISRTPEVTCVVVDVKHEDPEVKFNWYVDGVEVHNAKTKPREEEYNSTYRVVSVLTVLHQDWLNGKEYKCKVSNKALPAPIEKTISKAKGQPREPQVYTLPPSREEMTKNQVSLTCDVSGFYPSDIAVEWESDGQPENNYKTTPPVLDSDGSFFLYSKLTVDKSRWEQGDVFSCSVMHEALHNHYTQKSLSLSPGK

SEQ ID NO: 19466 - protein, 121 aa, Artificial Sequence
  Description of Artificial Sequence: Synthetic polypeptide
  VH of XENP020578
EVKLEESGGGLVQPGGSMKLSCAASGFTFSDAWMDWVRQSPEKGLEWVAEIRTKANNHATYYAESVKGRFTISRDDSKSSVYLQMNSLRAEDTGIYYCTRLASWDWYFDVWGAGTTVTVSS

SEQ ID NO: 19467 - protein, 5 aa, Artificial Sequence
  Description of Artificial Sequence: Synthetic peptide
  XENP020578 vhCDR1
DAWMD

SEQ ID NO: 19468 - protein, 19 aa, Artificial Sequence
  Description of Artificial Sequence: Synthetic peptide
  XENP020578 vhCDR2
EIRTKANNHATYYAESVKG

SEQ ID NO: 19469 - protein, 10 aa, Artificial Sequence
  Description of Artificial Sequence: Synthetic peptide
  XENP020578 vhCDR3
LASWDWYFDV

SEQ ID NO: 19470 - protein, 218 aa, Artificial Sequence; identical to SEQ ID NO: 17590
  Description of Artificial Sequence: Synthetic polypeptide
  XENP020578 7G8_H0.126_L0_IgG1_PVA_/S267K Light Chain

SEQ ID NO: 19471 - protein, 111 aa, Artificial Sequence; identical to SEQ ID NO: 17591
  Description of Artificial Sequence: Synthetic polypeptide
  VL of XENP020578

SEQ ID NO: 19472 - protein, 15 aa, Artificial Sequence
  Description of Artificial Sequence: Synthetic peptide
  XENP020578 vlCDR1
KASQSVDYDGDSYMN

SEQ ID NO: 19473 - protein, 7 aa, Artificial Sequence
  Description of Artificial Sequence: Synthetic peptide
  XENP020578 vlCDR2
AASNLES

SEQ ID NO: 19474 - protein, 9 aa, Artificial Sequence
  Description of Artificial Sequence: Synthetic peptide
  XENP020578 vlCDR3
QQSNEDPFT

SEQ ID NO: 19475 - protein, 450 aa, Artificial Sequence
  Description of Artificial Sequence: Synthetic polypeptide
  XENP020579 7G8_H0.127_L0_IgG1_PVA_/S267K Heavy Chain
EVKLEESGGGLVQPGGSMKLSCAASGFTFSDAWMDWVRQSPEKGLEWVAEIRTKANNHATYYAESVKGRFTISRDDSKSSVYLQMNSLRAEDTGIYYCTRLARWDWYFDVWGAGTTVTVSSASTKGPSVFPLAPSSKSTSGGTAALGCLVKDYFPEPVTVSWNSGALTSGVHTFPAVLQSSGLYSLSSVVTVPSSSLGTQTYICNVNHKPSDTKVDKKVEPKSCDKTHTCPPCPAPPVAGPSVFLFPPKPKDTLMISRTPEVTCVVVDVKHEDPEVKFNWYVDGVEVHNAKTKPREEEYNSTYRVVSVLTVLHQDWLNGKEYKCKVSNKALPAPIEKTISKAKGQPREPQVYTLPPSREEMTKNQVSLTCDVSGFYPSDIAVEWESDGQPENNYKTTPPVLDSDGSFFLYSKLTVDKSRWEQGDVFSCSVMHEALHNHYTQKSLSLSPGK

SEQ ID NO: 19476 - protein, 121 aa, Artificial Sequence
  Description of Artificial Sequence: Synthetic polypeptide
  VH of XENP020579
EVKLEESGGGLVQPGGSMKLSCAASGFTFSDAWMDWVRQSPEKGLEWVAEIRTKANNHATYYAESVKGRFTISRDDSKSSVYLQMNSLRAEDTGIYYCTRLARWDWYFDVWGAGTTVTVSS

SEQ ID NO: 19477 - protein, 5 aa, Artificial Sequence
  Description of Artificial Sequence: Synthetic peptide
  XENP020579 vhCDR1
DAWMD

SEQ ID NO: 19478 - protein, 19 aa, Artificial Sequence
  Description of Artificial Sequence: Synthetic peptide
  XENP020579 vhCDR2
EIRTKANNHATYYAESVKG

SEQ ID NO: 19479 - protein, 10 aa, Artificial Sequence
  Description of Artificial Sequence: Synthetic peptide
  XENP020579 vhCDR3
LARWDWYFDV

SEQ ID NO: 19480 - protein, 218 aa, Artificial Sequence; identical to SEQ ID NO: 17590
  Description of Artificial Sequence: Synthetic polypeptide
  XENP020579 7G8_H0.127_L0_IgG1_PVA_/S267K Light Chain

SEQ ID NO: 19481 - protein, 111 aa, Artificial Sequence; identical to SEQ ID NO: 17591
  Description of Artificial Sequence: Synthetic polypeptide
  VL of XENP020579

SEQ ID NO: 19482 - protein, 15 aa, Artificial Sequence
  Description of Artificial Sequence: Synthetic peptide
  XENP020579 vlCDR1
KASQSVDYDGDSYMN

SEQ ID NO: 19483 - protein, 7 aa, Artificial Sequence
  Description of Artificial Sequence: Synthetic peptide
  XENP020579 vlCDR2
AASNLES

SEQ ID NO: 19484 - protein, 9 aa, Artificial Sequence
  Description of Artificial Sequence: Synthetic peptide
  XENP020579 vlCDR3
QQSNEDPFT

SEQ ID NO: 19485 - protein, 450 aa, Artificial Sequence
  Description of Artificial Sequence: Synthetic polypeptide
  XENP020580 7G8_H0.128_L0_IgG1_PVA_/S267K Heavy Chain
EVKLEESGGGLVQPGGSMKLSCAASGFTFSDAWMDWVRQSPEKGLEWVAEIRTKANNHATYYAESVKGRFTISRDDSKSSVYLQMNSLRAEDTGIYYCTRLALWDWYFDVWGAGTTVTVSSASTKGPSVFPLAPSSKSTSGGTAALGCLVKDYFPEPVTVSWNSGALTSGVHTFPAVLQSSGLYSLSSVVTVPSSSLGTQTYICNVNHKPSDTKVDKKVEPKSCDKTHTCPPCPAPPVAGPSVFLFPPKPKDTLMISRTPEVTCVVVDVKHEDPEVKFNWYVDGVEVHNAKTKPREEEYNSTYRVVSVLTVLHQDWLNGKEYKCKVSNKALPAPIEKTISKAKGQPREPQVYTLPPSREEMTKNQVSLTCDVSGFYPSDIAVEWESDGQPENNYKTTPPVLDSDGSFFLYSKLTVDKSRWEQGDVFSCSVMHEALHNHYTQKSLSLSPGK

SEQ ID NO: 19486 - protein, 121 aa, Artificial Sequence
  Description of Artificial Sequence: Synthetic polypeptide
  VH of XENP020580
EVKLEESGGGLVQPGGSMKLSCAASGFTFSDAWMDWVRQSPEKGLEWVAEIRTKANNHATYYAESVKGRFTISRDDSKSSVYLQMNSLRAEDTGIYYCTRLALWDWYFDVWGAGTTVTVSS

SEQ ID NO: 19487 - protein, 5 aa, Artificial Sequence
  Description of Artificial Sequence: Synthetic peptide
  XENP020580 vhCDR1
DAWMD

SEQ ID NO: 19488 - protein, 19 aa, Artificial Sequence
  Description of Artificial Sequence: Synthetic peptide
  XENP020580 vhCDR2
EIRTKANNHATYYAESVKG

SEQ ID NO: 19489 - protein, 10 aa, Artificial Sequence
  Description of Artificial Sequence: Synthetic peptide
  XENP020580 vhCDR3
LALWDWYFDV

SEQ ID NO: 19490 - protein, 218 aa, Artificial Sequence; identical to SEQ ID NO: 17590
  Description of Artificial Sequence: Synthetic polypeptide
  XENP020580 7G8_H0.128_L0_IgG1_PVA_/S267K Light Chain

SEQ ID NO: 19491 - protein, 111 aa, Artificial Sequence; identical to SEQ ID NO: 17591
  Description of Artificial Sequence: Synthetic polypeptide
  VL of XENP020580

SEQ ID NO: 19492 - protein, 15 aa, Artificial Sequence
  Description of Artificial Sequence: Synthetic peptide
  XENP020580 vlCDR1
KASQSVDYDGDSYMN

SEQ ID NO: 19493 - protein, 7 aa, Artificial Sequence
  Description of Artificial Sequence: Synthetic peptide
  XENP020580 vlCDR2
AASNLES

SEQ ID NO: 19494 - protein, 9 aa, Artificial Sequence
  Description of Artificial Sequence: Synthetic peptide
  XENP020580 vlCDR3
QQSNEDPFT

SEQ ID NO: 19495 - protein, 450 aa, Artificial Sequence
  Description of Artificial Sequence: Synthetic polypeptide
  XENP020581 7G8_H0.129_L0_IgG1_PVA_/S267K Heavy Chain
EVKLEESGGGLVQPGGSMKLSCAASGFTFSDAWMDWVRQSPEKGLEWVAEIRTKANNHATYYAESVKGRFTISRDDSKSSVYLQMNSLRAEDTGIYYCTRLATWDWYFDVWGAGTTVTVSSASTKGPSVFPLAPSSKSTSGGTAALGCLVKDYFPEPVTVSWNSGALTSGVHTFPAVLQSSGLYSLSSVVTVPSSSLGTQTYICNVNHKPSDTKVDKKVEPKSCDKTHTCPPCPAPPVAGPSVFLFPPKPKDTLMISRTPEVTCVVVDVKHEDPEVKFNWYVDGVEVHNAKTKPREEEYNSTYRVVSVLTVLHQDWLNGKEYKCKVSNKALPAPIEKTISKAKGQPREPQVYTLPPSREEMTKNQVSLTCDVSGFYPSDIAVEWESDGQPENNYKTTPPVLDSDGSFFLYSKLTVDKSRWEQGDVFSCSVMHEALHNHYTQKSLSLSPGK

SEQ ID NO: 19496 - protein, 121 aa, Artificial Sequence
  Description of Artificial Sequence: Synthetic polypeptide
  VH of XENP020581
EVKLEESGGGLVQPGGSMKLSCAASGFTFSDAWMDWVRQSPEKGLEWVAEIRTKANNHATYYAESVKGRFTISRDDSKSSVYLQMNSLRAEDTGIYYCTRLATWDWYFDVWGAGTTVTVSS

SEQ ID NO: 19497 - protein, 5 aa, Artificial Sequence
  Description of Artificial Sequence: Synthetic peptide
  XENP020581 vhCDR1
DAWMD

SEQ ID NO: 19498 - protein, 19 aa, Artificial Sequence
  Description of Artificial Sequence: Synthetic peptide
  XENP020581 vhCDR2
EIRTKANNHATYYAESVKG

SEQ ID NO: 19499 - protein, 10 aa, Artificial Sequence
  Description of Artificial Sequence: Synthetic peptide
  XENP020581 vhCDR3
LATWDWYFDV

SEQ ID NO: 19500 - protein, 218 aa, Artificial Sequence; identical to SEQ ID NO: 17590
  Description of Artificial Sequence: Synthetic polypeptide
  XENP020581 7G8_H0.129_L0_IgG1_PVA_/S267K Light Chain

SEQ ID NO: 19501 - protein, 111 aa, Artificial Sequence; identical to SEQ ID NO: 17591
  Description of Artificial Sequence: Synthetic polypeptide
  VL of XENP020581

SEQ ID NO: 19502 - protein, 15 aa, Artificial Sequence
  Description of Artificial Sequence: Synthetic peptide
  XENP020581 vlCDR1
KASQSVDYDGDSYMN

SEQ ID NO: 19503 - protein, 7 aa, Artificial Sequence
  Description of Artificial Sequence: Synthetic peptide
  XENP020581 vlCDR2
AASNLES

SEQ ID NO: 19504 - protein, 9 aa, Artificial Sequence
  Description of Artificial Sequence: Synthetic peptide
  XENP020581 vlCDR3
QQSNEDPFT

SEQ ID NO: 19505 - protein, 450 aa, Artificial Sequence
  Description of Artificial Sequence: Synthetic polypeptide
  XENP020582 7G8_H0.130_L0_IgG1_PVA_/S267K Heavy Chain
EVKLEESGGGLVQPGGSMKLSCAASGFTFSDAWMDWVRQSPEKGLEWVAEIRTKANNHATYYAESVKGRFTISRDDSKSSVYLQMNSLRAEDTGIYYCTRLAGWDWYFDVWGAGTTVTVSSASTKGPSVFPLAPSSKSTSGGTAALGCLVKDYFPEPVTVSWNSGALTSGVHTFPAVLQSSGLYSLSSVVTVPSSSLGTQTYICNVNHKPSDTKVDKKVEPKSCDKTHTCPPCPAPPVAGPSVFLFPPKPKDTLMISRTPEVTCVVVDVKHEDPEVKFNWYVDGVEVHNAKTKPREEEYNSTYRVVSVLTVLHQDWLNGKEYKCKVSNKALPAPIEKTISKAKGQPREPQVYTLPPSREEMTKNQVSLTCDVSGFYPSDIAVEWESDGQPENNYKTTPPVLDSDGSFFLYSKLTVDKSRWEQGDVFSCSVMHEALHNHYTQKSLSLSPGK

SEQ ID NO: 19506 - protein, 121 aa, Artificial Sequence
  Description of Artificial Sequence: Synthetic polypeptide
  VH of XENP020582
EVKLEESGGGLVQPGGSMKLSCAASGFTFSDAWMDWVRQSPEKGLEWVAEIRTKANNHATYYAESVKGRFTISRDDSKSSVYLQMNSLRAEDTGIYYCTRLAGWDWYFDVWGAGTTVTVSS

SEQ ID NO: 19507 - protein, 5 aa, Artificial Sequence
  Description of Artificial Sequence: Synthetic peptide
  XENP020582 vhCDR1
DAWMD

SEQ ID NO: 19508 - protein, 19 aa, Artificial Sequence
  Description of Artificial Sequence: Synthetic peptide
  XENP020582 vhCDR2
EIRTKANNHATYYAESVKG

SEQ ID NO: 19509 - protein, 10 aa, Artificial Sequence
  Description of Artificial Sequence: Synthetic peptide
  XENP020582 vhCDR3
LAGWDWYFDV

SEQ ID NO: 19510 - protein, 218 aa, Artificial Sequence; identical to SEQ ID NO: 17590
  Description of Artificial Sequence: Synthetic polypeptide
  XENP020582 7G8_H0.130_L0_IgG1_PVA_/S267K Light Chain

SEQ ID NO: 19511 - protein, 111 aa, Artificial Sequence; identical to SEQ ID NO: 17591
  Description of Artificial Sequence: Synthetic polypeptide
  VL of XENP020582

SEQ ID NO: 19512 - protein, 15 aa, Artificial Sequence
  Description of Artificial Sequence: Synthetic peptide
  XENP020582 vlCDR1
KASQSVDYDGDSYMN

SEQ ID NO: 19513 - protein, 7 aa, Artificial Sequence
  Description of Artificial Sequence: Synthetic peptide
  XENP020582 vlCDR2
AASNLES

SEQ ID NO: 19514 - protein, 9 aa, Artificial Sequence
  Description of Artificial Sequence: Synthetic peptide
  XENP020582 vlCDR3
QQSNEDPFT

SEQ ID NO: 19515 - protein, 450 aa, Artificial Sequence
  Description of Artificial Sequence: Synthetic polypeptide
  XENP020583 7G8_H0.131_L0_IgG1_PVA_/S267K Heavy Chain
EVKLEESGGGLVQPGGSMKLSCAASGFTFSDAWMDWVRQSPEKGLEWVAEIRTKANNHATYYAESVKGRFTISRDDSKSSVYLQMNSLRAEDTGIYYCTRLAYWDWYFDVWGAGTTVTVSSASTKGPSVFPLAPSSKSTSGGTAALGCLVKDYFPEPVTVSWNSGALTSGVHTFPAVLQSSGLYSLSSVVTVPSSSLGTQTYICNVNHKPSDTKVDKKVEPKSCDKTHTCPPCPAPPVAGPSVFLFPPKPKDTLMISRTPEVTCVVVDVKHEDPEVKFNWYVDGVEVHNAKTKPREEEYNSTYRVVSVLTVLHQDWLNGKEYKCKVSNKALPAPIEKTISKAKGQPREPQVYTLPPSREEMTKNQVSLTCDVSGFYPSDIAVEWESDGQPENNYKTTPPVLDSDGSFFLYSKLTVDKSRWEQGDVFSCSVMHEALHNHYTQKSLSLSPGK

SEQ ID NO: 19516 - protein, 121 aa, Artificial Sequence
  Description of Artificial Sequence: Synthetic polypeptide
  VH of XENP020583
EVKLEESGGGLVQPGGSMKLSCAASGFTFSDAWMDWVRQSPEKGLEWVAEIRTKANNHATYYAESVKGRFTISRDDSKSSVYLQMNSLRAEDTGIYYCTRLAYWDWYFDVWGAGTTVTVSS

SEQ ID NO: 19517 - protein, 5 aa, Artificial Sequence
  Description of Artificial Sequence: Synthetic peptide
  XENP020583 vhCDR1
DAWMD

SEQ ID NO: 19518 - protein, 19 aa, Artificial Sequence
  Description of Artificial Sequence: Synthetic peptide
  XENP020583 vhCDR2
EIRTKANNHATYYAESVKG

SEQ ID NO: 19519 - protein, 10 aa, Artificial Sequence
  Description of Artificial Sequence: Synthetic peptide
  XENP020583 vhCDR3
LAYWDWYFDV

SEQ ID NO: 19520 - protein, 218 aa, Artificial Sequence; identical to SEQ ID NO: 17590
  Description of Artificial Sequence: Synthetic polypeptide
  XENP020583 7G8_H0.131_L0_IgG1_PVA_/S267K Light Chain

SEQ ID NO: 19521 - protein, 111 aa, Artificial Sequence; identical to SEQ ID NO: 17591
  Description of Artificial Sequence: Synthetic polypeptide
  VL of XENP020583

SEQ ID NO: 19522 - protein, 15 aa, Artificial Sequence
  Description of Artificial Sequence: Synthetic peptide
  XENP020583 vlCDR1
KASQSVDYDGDSYMN

SEQ ID NO: 19523 - protein, 7 aa, Artificial Sequence
  Description of Artificial Sequence: Synthetic peptide
  XENP020583 vlCDR2
AASNLES

SEQ ID NO: 19524 - protein, 9 aa, Artificial Sequence
  Description of Artificial Sequence: Synthetic peptide
  XENP020583 vlCDR3
QQSNEDPFT

SEQ ID NO: 19525 - protein, 450 aa, Artificial Sequence
  Description of Artificial Sequence: Synthetic polypeptide
  XENP020584 7G8_H0.132_L0_IgG1_PVA_/S267K Heavy Chain
EVKLEESGGGLVQPGGSMKLSCAASGFTFSDAWMDWVRQSPEKGLEWVAEIRTKANNHATYYAESVKGRFTISRDDSKSSVYLQMNSLRAEDTGIYYCTRLANFDWYFDVWGAGTTVTVSSASTKGPSVFPLAPSSKSTSGGTAALGCLVKDYFPEPVTVSWNSGALTSGVHTFPAVLQSSGLYSLSSVVTVPSSSLGTQTYICNVNHKPSDTKVDKKVEPKSCDKTHTCPPCPAPPVAGPSVFLFPPKPKDTLMISRTPEVTCVVVDVKHEDPEVKFNWYVDGVEVHNAKTKPREEEYNSTYRVVSVLTVLHQDWLNGKEYKCKVSNKALPAPIEKTISKAKGQPREPQVYTLPPSREEMTKNQVSLTCDVSGFYPSDIAVEWESDGQPENNYKTTPPVLDSDGSFFLYSKLTVDKSRWEQGDVFSCSVMHEALHNHYTQKSLSLSPGK

SEQ ID NO: 19526 - protein, 121 aa, Artificial Sequence
  Description of Artificial Sequence: Synthetic polypeptide
  VH of XENP020584
EVKLEESGGGLVQPGGSMKLSCAASGFTFSDAWMDWVRQSPEKGLEWVAEIRTKANNHATYYAESVKGRFTISRDDSKSSVYLQMNSLRAEDTGIYYCTRLANFDWYFDVWGAGTTVTVSS

SEQ ID NO: 19527 - protein, 5 aa, Artificial Sequence
  Description of Artificial Sequence: Synthetic peptide
  XENP020584 vhCDR1
DAWMD

SEQ ID NO: 19528 - protein, 19 aa, Artificial Sequence
  Description of Artificial Sequence: Synthetic peptide
  XENP020584 vhCDR2
EIRTKANNHATYYAESVKG

SEQ ID NO: 19529 - protein, 10 aa, Artificial Sequence
  Description of Artificial Sequence: Synthetic peptide
  XENP020584 vhCDR3
LANFDWYFDV

SEQ ID NO: 19530 - protein, 218 aa, Artificial Sequence; identical to SEQ ID NO: 17590
  Description of Artificial Sequence: Synthetic polypeptide
  XENP020584 7G8_H0.132_L0_IgG1_PVA_/S267K Light Chain

SEQ ID NO: 19531 - protein, 111 aa, Artificial Sequence; identical to SEQ ID NO: 17591
  Description of Artificial Sequence: Synthetic polypeptide
  VL of XENP020584

SEQ ID NO: 19532 - protein, 15 aa, Artificial Sequence
  Description of Artificial Sequence: Synthetic peptide
  XENP020584 vlCDR1
KASQSVDYDGDSYMN

SEQ ID NO: 19533 - protein, 7 aa, Artificial Sequence
  Description of Artificial Sequence: Synthetic peptide
  XENP020584 vlCDR2
AASNLES

SEQ ID NO: 19534 - protein, 9 aa, Artificial Sequence
  Description of Artificial Sequence: Synthetic peptide
  XENP020584 vlCDR3
QQSNEDPFT

SEQ ID NO: 19535 - protein, 450 aa, Artificial Sequence
  Description of Artificial Sequence: Synthetic polypeptide
  XENP020585 7G8_H0.133_L0_IgG1_PVA_/S267K Heavy Chain
EVKLEESGGGLVQPGGSMKLSCAASGFTFSDAWMDWVRQSPEKGLEWVAEIRTKANNHATYYAESVKGRFTISRDDSKSSVYLQMNSLRAEDTGIYYCTRLANLDWYFDVWGAGTTVTVSSASTKGPSVFPLAPSSKSTSGGTAALGCLVKDYFPEPVTVSWNSGALTSGVHTFPAVLQSSGLYSLSSVVTVPSSSLGTQTYICNVNHKPSDTKVDKKVEPKSCDKTHTCPPCPAPPVAGPSVFLFPPKPKDTLMISRTPEVTCVVVDVKHEDPEVKFNWYVDGVEVHNAKTKPREEEYNSTYRVVSVLTVLHQDWLNGKEYKCKVSNKALPAPIEKTISKAKGQPREPQVYTLPPSREEMTKNQVSLTCDVSGFYPSDIAVEWESDGQPENNYKTTPPVLDSDGSFFLYSKLTVDKSRWEQGDVFSCSVMHEALHNHYTQKSLSLSPGK

SEQ ID NO: 19536 - protein, 121 aa, Artificial Sequence
  Description of Artificial Sequence: Synthetic polypeptide
  VH of XENP020585
EVKLEESGGGLVQPGGSMKLSCAASGFTFSDAWMDWVRQSPEKGLEWVAEIRTKANNHATYYAESVKGRFTISRDDSKSSVYLQMNSLRAEDTGIYYCTRLANLDWYFDVWGAGTTVTVSS

SEQ ID NO: 19537 - protein, 5 aa, Artificial Sequence
  Description of Artificial Sequence: Synthetic peptide
  XENP020585 vhCDR1
DAWMD

SEQ ID NO: 19538 - protein, 19 aa, Artificial Sequence
  Description of Artificial Sequence: Synthetic peptide
  XENP020585 vhCDR2
EIRTKANNHATYYAESVKG

SEQ ID NO: 19539 - protein, 10 aa, Artificial Sequence
  Description of Artificial Sequence: Synthetic peptide
  XENP020585 vhCDR3
LANLDWYFDV

SEQ ID NO: 19540 - protein, 218 aa, Artificial Sequence; identical to SEQ ID NO: 17590
  Description of Artificial Sequence: Synthetic polypeptide
  XENP020585 7G8_H0.133_L0_IgG1_PVA_/S267K Light Chain

SEQ ID NO: 19541 - protein, 111 aa, Artificial Sequence; identical to SEQ ID NO: 17591
  Description of Artificial Sequence: Synthetic polypeptide
  VL of XENP020585

SEQ ID NO: 19542 - protein, 15 aa, Artificial Sequence
  Description of Artificial Sequence: Synthetic peptide
  XENP020585 vlCDR1
KASQSVDYDGDSYMN

SEQ ID NO: 19543 - protein, 7 aa, Artificial Sequence
  Description of Artificial Sequence: Synthetic peptide
  XENP020585 vlCDR2
AASNLES

SEQ ID NO: 19544 - protein, 9 aa, Artificial Sequence
  Description of Artificial Sequence: Synthetic peptide
  XENP020585 vlCDR3
QQSNEDPFT

SEQ ID NO: 19545 - protein, 450 aa, Artificial Sequence
  Description of Artificial Sequence: Synthetic polypeptide
  XENP020586 7G8_H0.134_L0_IgG1_PVA_/S267K Heavy Chain
EVKLEESGGGLVQPGGSMKLSCAASGFTFSDAWMDWVRQSPEKGLEWVAEIRTKANNHATYYAESVKGRFTISRDDSKSSVYLQMNSLRAEDTGIYYCTRLANYDWYFDVWGAGTTVTVSSASTKGPSVFPLAPSSKSTSGGTAALGCLVKDYFPEPVTVSWNSGALTSGVHTFPAVLQSSGLYSLSSVVTVPSSSLGTQTYICNVNHKPSDTKVDKKVEPKSCDKTHTCPPCPAPPVAGPSVFLFPPKPKDTLMISRTPEVTCVVVDVKHEDPEVKFNWYVDGVEVHNAKTKPREEEYNSTYRVVSVLTVLHQDWLNGKEYKCKVSNKALPAPIEKTISKAKGQPREPQVYTLPPSREEMTKNQVSLTCDVSGFYPSDIAVEWESDGQPENNYKTTPPVLDSDGSFFLYSKLTVDKSRWEQGDVFSCSVMHEALHNHYTQKSLSLSPGK

SEQ ID NO: 19546 - protein, 121 aa, Artificial Sequence
  Description of Artificial Sequence: Synthetic polypeptide
  VH of XENP020586
EVKLEESGGGLVQPGGSMKLSCAASGFTFSDAWMDWVRQSPEKGLEWVAEIRTKANNHATYYAESVKGRFTISRDDSKSSVYLQMNSLRAEDTGIYYCTRLANYDWYFDVWGAGTTVTVSS

SEQ ID NO: 19547 - protein, 5 aa, Artificial Sequence
  Description of Artificial Sequence: Synthetic peptide
  XENP020586 vhCDR1
DAWMD

SEQ ID NO: 19548 - protein, 19 aa, Artificial Sequence
  Description of Artificial Sequence: Synthetic peptide
  XENP020586 vhCDR2
EIRTKANNHATYYAESVKG

SEQ ID NO: 19549 - protein, 10 aa, Artificial Sequence
  Description of Artificial Sequence: Synthetic peptide
  XENP020586 vhCDR3
LANYDWYFDV

SEQ ID NO: 19550 - protein, 218 aa, Artificial Sequence; identical to SEQ ID NO: 17590
  Description of Artificial Sequence: Synthetic polypeptide
  XENP020586 7G8_H0.134_L0_IgG1_PVA_/S267K Light Chain

SEQ ID NO: 19551 - protein, 111 aa, Artificial Sequence; identical to SEQ ID NO: 17591
  Description of Artificial Sequence: Synthetic polypeptide
  VL of XENP020586

SEQ ID NO: 19552 - protein, 15 aa, Artificial Sequence
  Description of Artificial Sequence: Synthetic peptide
  XENP020586 vlCDR1
KASQSVDYDGDSYMN

SEQ ID NO: 19553 - protein, 7 aa, Artificial Sequence
  Description of Artificial Sequence: Synthetic peptide
  XENP020586 vlCDR2
AASNLES

SEQ ID NO: 19554 - protein, 9 aa, Artificial Sequence
  Description of Artificial Sequence: Synthetic peptide
  XENP020586 vlCDR3
QQSNEDPFT

SEQ ID NO: 19555 - protein, 450 aa, Artificial Sequence
  Description of Artificial Sequence: Synthetic polypeptide
  XENP020587 7G8_H0.135_L0_IgG1_PVA_/S267K Heavy Chain
EVKLEESGGGLVQPGGSMKLSCAASGFTFSDAWMDWVRQSPEKGLEWVAEIRTKANNHATYYAESVKGRFTISRDDSKSSVYLQMNSLRAEDTGIYYCTRLANIDWYFDVWGAGTTVTVSSASTKGPSVFPLAPSSKSTSGGTAALGCLVKDYFPEPVTVSWNSGALTSGVHTFPAVLQSSGLYSLSSVVTVPSSSLGTQTYICNVNHKPSDTKVDKKVEPKSCDKTHTCPPCPAPPVAGPSVFLFPPKPKDTLMISRTPEVTCVVVDVKHEDPEVKFNWYVDGVEVHNAKTKPREEEYNSTYRVVSVLTVLHQDWLNGKEYKCKVSNKALPAPIEKTISKAKGQPREPQVYTLPPSREEMTKNQVSLTCDVSGFYPSDIAVEWESDGQPENNYKTTPPVLDSDGSFFLYSKLTVDKSRWEQGDVFSCSVMHEALHNHYTQKSLSLSPGK

SEQ ID NO: 19556 - protein, 121 aa, Artificial Sequence
  Description of Artificial Sequence: Synthetic polypeptide
  VH of XENP020587
EVKLEESGGGLVQPGGSMKLSCAASGFTFSDAWMDWVRQSPEKGLEWVAEIRTKANNHATYYAESVKGRFTISRDDSKSSVYLQMNSLRAEDTGIYYCTRLANIDWYFDVWGAGTTVTVSS

SEQ ID NO: 19557 - protein, 5 aa, Artificial Sequence
  Description of Artificial Sequence: Synthetic peptide
  XENP020587 vhCDR1
DAWMD

SEQ ID NO: 19558 - protein, 19 aa, Artificial Sequence
  Description of Artificial Sequence: Synthetic peptide
  XENP020587 vhCDR2
EIRTKANNHATYYAESVKG

SEQ ID NO: 19559 - protein, 10 aa, Artificial Sequence
  Description of Artificial Sequence: Synthetic peptide
  XENP020587 vhCDR3
LANIDWYFDV

SEQ ID NO: 19560 - protein, 218 aa, Artificial Sequence; identical to SEQ ID NO: 17590
  Description of Artificial Sequence: Synthetic polypeptide
  XENP020587 7G8_H0.135_L0_IgG1_PVA_/S267K Light Chain

SEQ ID NO: 19561 - protein, 111 aa, Artificial Sequence; identical to SEQ ID NO: 17591
  Description of Artificial Sequence: Synthetic polypeptide
  VL of XENP020587

SEQ ID NO: 19562 - protein, 15 aa, Artificial Sequence
  Description of Artificial Sequence: Synthetic peptide
  XENP020587 vlCDR1
KASQSVDYDGDSYMN

SEQ ID NO: 19563 - protein, 7 aa, Artificial Sequence
  Description of Artificial Sequence: Synthetic peptide
  XENP020587 vlCDR2
AASNLES

SEQ ID NO: 19564 - protein, 9 aa, Artificial Sequence
  Description of Artificial Sequence: Synthetic peptide
  XENP020587 vlCDR3
QQSNEDPFT

SEQ ID NO: 19565 - protein, 450 aa, Artificial Sequence
  Description of Artificial Sequence: Synthetic polypeptide
  XENP020588 7G8_H0.136_L0_IgG1_PVA_/S267K Heavy Chain
EVKLEESGGGLVQPGGSMKLSCAASGFTFSDAWMDWVRQSPEKGLEWVAEIRTKANNHATYYAESVKGRFTISRDDSKSSVYLQMNSLRAEDTGIYYCTRLANHDWYFDVWGAGTTVTVSSASTKGPSVFPLAPSSKSTSGGTAALGCLVKDYFPEPVTVSWNSGALTSGVHTFPAVLQSSGLYSLSSVVTVPSSSLGTQTYICNVNHKPSDTKVDKKVEPKSCDKTHTCPPCPAPPVAGPSVFLFPPKPKDTLMISRTPEVTCVVVDVKHEDPEVKFNWYVDGVEVHNAKTKPREEEYNSTYRVVSVLTVLHQDWLNGKEYKCKVSNKALPAPIEKTISKAKGQPREPQVYTLPPSREEMTKNQVSLTCDVSGFYPSDIAVEWESDGQPENNYKTTPPVLDSDGSFFLYSKLTVDKSRWEQGDVFSCSVMHEALHNHYTQKSLSLSPGK

SEQ ID NO: 19566 - protein, 121 aa, Artificial Sequence
  Description of Artificial Sequence: Synthetic polypeptide
  VH of XENP020588
EVKLEESGGGLVQPGGSMKLSCAASGFTFSDAWMDWVRQSPEKGLEWVAEIRTKANNHATYYAESVKGRFTISRDDSKSSVYLQMNSLRAEDTGIYYCTRLANHDWYFDVWGAGTTVTVSS

SEQ ID NO: 19567 - protein, 5 aa, Artificial Sequence
  Description of Artificial Sequence: Synthetic peptide
  XENP020588 vhCDR1
DAWMD

SEQ ID NO: 19568 - protein, 19 aa, Artificial Sequence
  Description of Artificial Sequence: Synthetic peptide
  XENP020588 vhCDR2
EIRTKANNHATYYAESVKG

SEQ ID NO: 19569 - protein, 10 aa, Artificial Sequence
  Description of Artificial Sequence: Synthetic peptide
  XENP020588 vhCDR3
LANHDWYFDV

SEQ ID NO: 19570 - protein, 218 aa, Artificial Sequence; identical to SEQ ID NO: 17590
  Description of Artificial Sequence: Synthetic polypeptide
  XENP020588 7G8_H0.136_L0_IgG1_PVA_/S267K Light Chain

SEQ ID NO: 19571 - protein, 111 aa, Artificial Sequence; identical to SEQ ID NO: 17591
  Description of Artificial Sequence: Synthetic polypeptide
  VL of XENP020588

SEQ ID NO: 19572 - protein, 15 aa, Artificial Sequence
  Description of Artificial Sequence: Synthetic peptide
  XENP020588 vlCDR1
KASQSVDYDGDSYMN

SEQ ID NO: 19573 - protein, 7 aa, Artificial Sequence
  Description of Artificial Sequence: Synthetic peptide
  XENP020588 vlCDR2
AASNLES

SEQ ID NO: 19574 - protein, 9 aa, Artificial Sequence
  Description of Artificial Sequence: Synthetic peptide
  XENP020588 vlCDR3
QQSNEDPFT

SEQ ID NO: 19575 - protein, 450 aa, Artificial Sequence
  Description of Artificial Sequence: Synthetic polypeptide
  XENP020589 7G8_H0.137_L0_IgG1_PVA_/S267K Heavy Chain
EVKLEESGGGLVQPGGSMKLSCAASGFTFSDAWMDWVRQSPEKGLEWVAEIRTKANNHATYYAESVKGRFTISRDDSKSSVYLQMNSLRAEDTGIYYCTRLANQDWYFDVWGAGTTVTVSSASTKGPSVFPLAPSSKSTSGGTAALGCLVKDYFPEPVTVSWNSGALTSGVHTFPAVLQSSGLYSLSSVVTVPSSSLGTQTYICNVNHKPSDTKVDKKVEPKSCDKTHTCPPCPAPPVAGPSVFLFPPKPKDTLMISRTPEVTCVVVDVKHEDPEVKFNWYVDGVEVHNAKTKPREEEYNSTYRVVSVLTVLHQDWLNGKEYKCKVSNKALPAPIEKTISKAKGQPREPQVYTLPPSREEMTKNQVSLTCDVSGFYPSDIAVEWESDGQPENNYKTTPPVLDSDGSFFLYSKLTVDKSRWEQGDVFSCSVMHEALHNHYTQKSLSLSPGK

SEQ ID NO: 19576 - protein, 121 aa, Artificial Sequence
  Description of Artificial Sequence: Synthetic polypeptide
  VH of XENP020589
EVKLEESGGGLVQPGGSMKLSCAASGFTFSDAWMDWVRQSPEKGLEWVAEIRTKANNHATYYAESVKGRFTISRDDSKSSVYLQMNSLRAEDTGIYYCTRLANQDWYFDVWGAGTTVTVSS

SEQ ID NO: 19577 - protein, 5 aa, Artificial Sequence
  Description of Artificial Sequence: Synthetic peptide
  XENP020589 vhCDR1
DAWMD

SEQ ID NO: 19578 - protein, 19 aa, Artificial Sequence
  Description of Artificial Sequence: Synthetic peptide
  XENP020589 vhCDR2
EIRTKANNHATYYAESVKG

SEQ ID NO: 19579 - protein, 10 aa, Artificial Sequence
  Description of Artificial Sequence: Synthetic peptide
  XENP020589 vhCDR3
LANQDWYFDV

SEQ ID NO: 19580 - protein, 218 aa, Artificial Sequence; identical to SEQ ID NO: 17590
  Description of Artificial Sequence: Synthetic polypeptide
  XENP020589 7G8_H0.137_L0_IgG1_PVA_/S267K Light Chain

SEQ ID NO: 19581 - protein, 111 aa, Artificial Sequence; identical to SEQ ID NO: 17591
  Description of Artificial Sequence: Synthetic polypeptide
  VL of XENP020589

SEQ ID NO: 19582 - protein, 15 aa, Artificial Sequence
  Description of Artificial Sequence: Synthetic peptide
  XENP020589 vlCDR1
KASQSVDYDGDSYMN

SEQ ID NO: 19583 - protein, 7 aa, Artificial Sequence
  Description of Artificial Sequence: Synthetic peptide
  XENP020589 vlCDR2
AASNLES

SEQ ID NO: 19584 - protein, 9 aa, Artificial Sequence
  Description of Artificial Sequence: Synthetic peptide
  XENP020589 vlCDR3
QQSNEDPFT

SEQ ID NO: 19585 - protein, 450 aa, Artificial Sequence
  Description of Artificial Sequence: Synthetic polypeptide
  XENP020590 7G8_H0.138_L0_IgG1_PVA_/S267K Heavy Chain
EVKLEESGGGLVQPGGSMKLSCAASGFTFSDAWMDWVRQSPEKGLEWVAEIRTKANNHATYYAESVKGRFTISRDDSKSSVYLQMNSLRAEDTGIYYCTRLANSDWYFDVWGAGTTVTVSSASTKGPSVFPLAPSSKSTSGGTAALGCLVKDYFPEPVTVSWNSGALTSGVHTFPAVLQSSGLYSLSSVVTVPSSSLGTQTYICNVNHKPSDTKVDKKVEPKSCDKTHTCPPCPAPPVAGPSVFLFPPKPKDTLMISRTPEVTCVVVDVKHEDPEVKFNWYVDGVEVHNAKTKPREEEYNSTYRVVSVLTVLHQDWLNGKEYKCKVSNKALPAPIEKTISKAKGQPREPQVYTLPPSREEMTKNQVSLTCDVSGFYPSDIAVEWESDGQPENNYKTTPPVLDSDGSFFLYSKLTVDKSRWEQGDVFSCSVMHEALHNHYTQKSLSLSPGK

SEQ ID NO: 19586 - protein, 121 aa, Artificial Sequence
  Description of Artificial Sequence: Synthetic polypeptide
  VH of XENP020590
EVKLEESGGGLVQPGGSMKLSCAASGFTFSDAWMDWVRQSPEKGLEWVAEIRTKANNHATYYAESVKGRFTISRDDSKSSVYLQMNSLRAEDTGIYYCTRLANSDWYFDVWGAGTTVTVSS

SEQ ID NO: 19587 - protein, 5 aa, Artificial Sequence
  Description of Artificial Sequence: Synthetic peptide
  XENP020590 vhCDR1
DAWMD

SEQ ID NO: 19588 - protein, 19 aa, Artificial Sequence
  Description of Artificial Sequence: Synthetic peptide
  XENP020590 vhCDR2
EIRTKANNHATYYAESVKG

SEQ ID NO: 19589 - protein, 10 aa, Artificial Sequence
  Description of Artificial Sequence: Synthetic peptide
  XENP020590 vhCDR3
LANSDWYFDV

SEQ ID NO: 19590 - protein, 218 aa, Artificial Sequence; identical to SEQ ID NO: 17590
  Description of Artificial Sequence: Synthetic polypeptide
  XENP020590 7G8_H0.138_L0_IgG1_PVA_/S267K Light Chain

SEQ ID NO: 19591 - protein, 111 aa, Artificial Sequence; identical to SEQ ID NO: 17591
  Description of Artificial Sequence: Synthetic polypeptide
  VL of XENP020590

SEQ ID NO: 19592 - protein, 15 aa, Artificial Sequence
  Description of Artificial Sequence: Synthetic peptide
  XENP020590 vlCDR1
KASQSVDYDGDSYMN

SEQ ID NO: 19593 - protein, 7 aa, Artificial Sequence
  Description of Artificial Sequence: Synthetic peptide
  XENP020590 vlCDR2
AASNLES

SEQ ID NO: 19594 - protein, 9 aa, Artificial Sequence
  Description of Artificial Sequence: Synthetic peptide
  XENP020590 vlCDR3
QQSNEDPFT

SEQ ID NO: 19595 - protein, 450 aa, Artificial Sequence
  Description of Artificial Sequence: Synthetic polypeptide
  XENP020591 7G8_H0.139_L0_IgG1_PVA_/S267K Heavy Chain
EVKLEESGGGLVQPGGSMKLSCAASGFTFSDAWMDWVRQSPEKGLEWVAEIRTKANNHATYYAESVKGRFTISRDDSKSSVYLQMNSLRAEDTGIYYCTRLANDDWYFDVWGAGTTVTVSSASTKGPSVFPLAPSSKSTSGGTAALGCLVKDYFPEPVTVSWNSGALTSGVHTFPAVLQSSGLYSLSSVVTVPSSSLGTQTYICNVNHKPSDTKVDKKVEPKSCDKTHTCPPCPAPPVAGPSVFLFPPKPKDTLMISRTPEVTCVVVDVKHEDPEVKFNWYVDGVEVHNAKTKPREEEYNSTYRVVSVLTVLHQDWLNGKEYKCKVSNKALPAPIEKTISKAKGQPREPQVYTLPPSREEMTKNQVSLTCDVSGFYPSDIAVEWESDGQPENNYKTTPPVLDSDGSFFLYSKLTVDKSRWEQGDVFSCSVMHEALHNHYTQKSLSLSPGK

SEQ ID NO: 19596 - protein, 121 aa, Artificial Sequence
  Description of Artificial Sequence: Synthetic polypeptide
  VH of XENP020591
EVKLEESGGGLVQPGGSMKLSCAASGFTFSDAWMDWVRQSPEKGLEWVAEIRTKANNHATYYAESVKGRFTISRDDSKSSVYLQMNSLRAEDTGIYYCTRLANDDWYFDVWGAGTTVTVSS

SEQ ID NO: 19597 - protein, 5 aa, Artificial Sequence
  Description of Artificial Sequence: Synthetic peptide
  XENP020591 vhCDR1
DAWMD

SEQ ID NO: 19598 - protein, 19 aa, Artificial Sequence
  Description of Artificial Sequence: Synthetic peptide
  XENP020591 vhCDR2
EIRTKANNHATYYAESVKG

SEQ ID NO: 19599 - protein, 10 aa, Artificial Sequence
  Description of Artificial Sequence: Synthetic peptide
  XENP020591 vhCDR3
LANDDWYFDV

SEQ ID NO: 19600 - protein, 218 aa, Artificial Sequence; identical to SEQ ID NO: 17590
  Description of Artificial Sequence: Synthetic polypeptide
  XENP020591 7G8_H0.139_L0_IgG1_PVA_/S267K Light Chain

SEQ ID NO: 19601 - protein, 111 aa, Artificial Sequence; identical to SEQ ID NO: 17591
  Description of Artificial Sequence: Synthetic polypeptide
  VL of XENP020591

SEQ ID NO: 19602 - protein, 15 aa, Artificial Sequence
  Description of Artificial Sequence: Synthetic peptide
  XENP020591 vlCDR1
KASQSVDYDGDSYMN

SEQ ID NO: 19603 - protein, 7 aa, Artificial Sequence
  Description of Artificial Sequence: Synthetic peptide
  XENP020591 vlCDR2
AASNLES

SEQ ID NO: 19604 - protein, 9 aa, Artificial Sequence
  Description of Artificial Sequence: Synthetic peptide
  XENP020591 vlCDR3
QQSNEDPFT

SEQ ID NO: 19605 - protein, 450 aa, Artificial Sequence
  Description of Artificial Sequence: Synthetic polypeptide
  XENP020592 7G8_H0.140_L0_IgG1_PVA_/S267K Heavy Chain
EVKLEESGGGLVQPGGSMKLSCAASGFTFSDAWMDWVRQSPEKGLEWVAEIRTKANNHATYYAESVKGRFTISRDDSKSSVYLQMNSLRAEDTGIYYCTRLANRDWYFDVWGAGTTVTVSSASTKGPSVFPLAPSSKSTSGGTAALGCLVKDYFPEPVTVSWNSGALTSGVHTFPAVLQSSGLYSLSSVVTVPSSSLGTQTYICNVNHKPSDTKVDKKVEPKSCDKTHTCPPCPAPPVAGPSVFLFPPKPKDTLMISRTPEVTCVVVDVKHEDPEVKFNWYVDGVEVHNAKTKPREEEYNSTYRVVSVLTVLHQDWLNGKEYKCKVSNKALPAPIEKTISKAKGQPREPQVYTLPPSREEMTKNQVSLTCDVSGFYPSDIAVEWESDGQPENNYKTTPPVLDSDGSFFLYSKLTVDKSRWEQGDVFSCSVMHEALHNHYTQKSLSLSPGK

SEQ ID NO: 19606 - protein, 121 aa, Artificial Sequence
  Description of Artificial Sequence: Synthetic polypeptide
  VH of XENP020592
EVKLEESGGGLVQPGGSMKLSCAASGFTFSDAWMDWVRQSPEKGLEWVAEIRTKANNHATYYAESVKGRFTISRDDSKSSVYLQMNSLRAEDTGIYYCTRLANRDWYFDVWGAGTTVTVSS

SEQ ID NO: 19607 - protein, 5 aa, Artificial Sequence
  Description of Artificial Sequence: Synthetic peptide
  XENP020592 vhCDR1
DAWMD

SEQ ID NO: 19608 - protein, 19 aa, Artificial Sequence
  Description of Artificial Sequence: Synthetic peptide
  XENP020592 vhCDR2
EIRTKANNHATYYAESVKG

SEQ ID NO: 19609 - protein, 10 aa, Artificial Sequence
  Description of Artificial Sequence: Synthetic peptide
  XENP020592 vhCDR3
LANRDWYFDV

SEQ ID NO: 19610 - protein, 218 aa, Artificial Sequence; identical to SEQ ID NO: 17590
  Description of Artificial Sequence: Synthetic polypeptide
  XENP020592 7G8_H0.140_L0_IgG1_PVA_/S267K Light Chain

SEQ ID NO: 19611 - protein, 111 aa, Artificial Sequence; identical to SEQ ID NO: 17591
  Description of Artificial Sequence: Synthetic polypeptide
  VL of XENP020592

SEQ ID NO: 19612 - protein, 15 aa, Artificial Sequence
  Description of Artificial Sequence: Synthetic peptide
  XENP020592 vlCDR1
KASQSVDYDGDSYMN

SEQ ID NO: 19613 - protein, 7 aa, Artificial Sequence
  Description of Artificial Sequence: Synthetic peptide
  XENP020592 vlCDR2
AASNLES

SEQ ID NO: 19614 - protein, 9 aa, Artificial Sequence
  Description of Artificial Sequence: Synthetic peptide
  XENP020592 vlCDR3
QQSNEDPFT

SEQ ID NO: 19615 - protein, 450 aa, Artificial Sequence
  Description of Artificial Sequence: Synthetic polypeptide
  XENP020593 7G8_H0.141_L0_IgG1_PVA_/S267K Heavy Chain
EVKLEESGGGLVQPGGSMKLSCAASGFTFSDAWMDWVRQSPEKGLEWVAEIRTKANNHATYYAESVKGRFTISRDDSKSSVYLQMNSLRAEDTGIYYCTRLANWNWYFDVWGAGTTVTVSSASTKGPSVFPLAPSSKSTSGGTAALGCLVKDYFPEPVTVSWNSGALTSGVHTFPAVLQSSGLYSLSSVVTVPSSSLGTQTYICNVNHKPSDTKVDKKVEPKSCDKTHTCPPCPAPPVAGPSVFLFPPKPKDTLMISRTPEVTCVVVDVKHEDPEVKFNWYVDGVEVHNAKTKPREEEYNSTYRVVSVLTVLHQDWLNGKEYKCKVSNKALPAPIEKTISKAKGQPREPQVYTLPPSREEMTKNQVSLTCDVSGFYPSDIAVEWESDGQPENNYKTTPPVLDSDGSFFLYSKLTVDKSRWEQGDVFSCSVMHEALHNHYTQKSLSLSPGK

SEQ ID NO: 19616 - protein, 121 aa, Artificial Sequence
  Description of Artificial Sequence: Synthetic polypeptide
  VH of XENP020593
EVKLEESGGGLVQPGGSMKLSCAASGFTFSDAWMDWVRQSPEKGLEWVAEIRTKANNHATYYAESVKGRFTISRDDSKSSVYLQMNSLRAEDTGIYYCTRLANWNWYFDVWGAGTTVTVSS

SEQ ID NO: 19617 - protein, 5 aa, Artificial Sequence
  Description of Artificial Sequence: Synthetic peptide
  XENP020593 vhCDR1
DAWMD

SEQ ID NO: 19618 - protein, 19 aa, Artificial Sequence
  Description of Artificial Sequence: Synthetic peptide
  XENP020593 vhCDR2
EIRTKANNHATYYAESVKG

SEQ ID NO: 19619 - protein, 10 aa, Artificial Sequence
  Description of Artificial Sequence: Synthetic peptide
  XENP020593 vhCDR3
LANWNWYFDV

SEQ ID NO: 19620 - protein, 218 aa, Artificial Sequence; identical to SEQ ID NO: 17590
  Description of Artificial Sequence: Synthetic polypeptide
  XENP020593 7G8_H0.141_L0_IgG1_PVA_/S267K Light Chain

SEQ ID NO: 19621 - protein, 111 aa, Artificial Sequence; identical to SEQ ID NO: 17591
  Description of Artificial Sequence: Synthetic polypeptide
  VL of XENP020593

SEQ ID NO: 19622 - protein, 15 aa, Artificial Sequence
  Description of Artificial Sequence: Synthetic peptide
  XENP020593 vlCDR1
KASQSVDYDGDSYMN

SEQ ID NO: 19623 - protein, 7 aa, Artificial Sequence
  Description of Artificial Sequence: Synthetic peptide
  XENP020593 vlCDR2
AASNLES

SEQ ID NO: 19624 - protein, 9 aa, Artificial Sequence
  Description of Artificial Sequence: Synthetic peptide
  XENP020593 vlCDR3
QQSNEDPFT

SEQ ID NO: 19625 - protein, 450 aa, Artificial Sequence
  Description of Artificial Sequence: Synthetic polypeptide
  XENP020594 7G8_H0.142_L0_IgG1_PVA_/S267K Heavy Chain
EVKLEESGGGLVQPGGSMKLSCAASGFTFSDAWMDWVRQSPEKGLEWVAEIRTKANNHATYYAESVKGRFTISRDDSKSSVYLQMNSLRAEDTGIYYCTRLANWEWYFDVWGAGTTVTVSSASTKGPSVFPLAPSSKSTSGGTAALGCLVKDYFPEPVTVSWNSGALTSGVHTFPAVLQSSGLYSLSSVVTVPSSSLGTQTYICNVNHKPSDTKVDKKVEPKSCDKTHTCPPCPAPPVAGPSVFLFPPKPKDTLMISRTPEVTCVVVDVKHEDPEVKFNWYVDGVEVHNAKTKPREEEYNSTYRVVSVLTVLHQDWLNGKEYKCKVSNKALPAPIEKTISKAKGQPREPQVYTLPPSREEMTKNQVSLTCDVSGFYPSDIAVEWESDGQPENNYKTTPPVLDSDGSFFLYSKLTVDKSRWEQGDVFSCSVMHEALHNHYTQKSLSLSPGK

SEQ ID NO: 19626 - protein, 121 aa, Artificial Sequence
  Description of Artificial Sequence: Synthetic polypeptide
  VH of XENP020594
EVKLEESGGGLVQPGGSMKLSCAASGFTFSDAWMDWVRQSPEKGLEWVAEIRTKANNHATYYAESVKGRFTISRDDSKSSVYLQMNSLRAEDTGIYYCTRLANWEWYFDVWGAGTTVTVSS

SEQ ID NO: 19627 - protein, 5 aa, Artificial Sequence
  Description of Artificial Sequence: Synthetic peptide
  XENP020594 vhCDR1
DAWMD

SEQ ID NO: 19628 - protein, 19 aa, Artificial Sequence
  Description of Artificial Sequence: Synthetic peptide
  XENP020594 vhCDR2
EIRTKANNHATYYAESVKG

SEQ ID NO: 19629 - protein, 10 aa, Artificial Sequence
  Description of Artificial Sequence: Synthetic peptide
  XENP020594 vhCDR3
LANWEWYFDV

SEQ ID NO: 19630 - protein, 218 aa, Artificial Sequence; identical to SEQ ID NO: 17590
  Description of Artificial Sequence: Synthetic polypeptide
  XENP020594 7G8_H0.142_L0_IgG1_PVA_/S267K Light Chain

SEQ ID NO: 19631 - protein, 111 aa, Artificial Sequence; identical to SEQ ID NO: 17591
  Description of Artificial Sequence: Synthetic polypeptide
  VL of XENP020594

SEQ ID NO: 19632 - protein, 15 aa, Artificial Sequence
  Description of Artificial Sequence: Synthetic peptide
  XENP020594 vlCDR1
KASQSVDYDGDSYMN

SEQ ID NO: 19633 - protein, 7 aa, Artificial Sequence
  Description of Artificial Sequence: Synthetic peptide
  XENP020594 vlCDR2
AASNLES

SEQ ID NO: 19634 - protein, 9 aa, Artificial Sequence
  Description of Artificial Sequence: Synthetic peptide
  XENP020594 vlCDR3
QQSNEDPFT

SEQ ID NO: 19635 - protein, 450 aa, Artificial Sequence
  Description of Artificial Sequence: Synthetic polypeptide
  XENP020595 7G8_H0.143_L0_IgG1_PVA_/S267K Heavy Chain
EVKLEESGGGLVQPGGSMKLSCAASGFTFSDAWMDWVRQSPEKGLEWVAEIRTKANNHATYYAESVKGRFTISRDDSKSSVYLQMNSLRAEDTGIYYCTRLANWHWYFDVWGAGTTVTVSSASTKGPSVFPLAPSSKSTSGGTAALGCLVKDYFPEPVTVSWNSGALTSGVHTFPAVLQSSGLYSLSSVVTVPSSSLGTQTYICNVNHKPSDTKVDKKVEPKSCDKTHTCPPCPAPPVAGPSVFLFPPKPKDTLMISRTPEVTCVVVDVKHEDPEVKFNWYVDGVEVHNAKTKPREEEYNSTYRVVSVLTVLHQDWLNGKEYKCKVSNKALPAPIEKTISKAKGQPREPQVYTLPPSREEMTKNQVSLTCDVSGFYPSDIAVEWESDGQPENNYKTTPPVLDSDGSFFLYSKLTVDKSRWEQGDVFSCSVMHEALHNHYTQKSLSLSPGK

SEQ ID NO: 19636 - protein, 121 aa, Artificial Sequence
  Description of Artificial Sequence: Synthetic polypeptide
  VH of XENP020595
EVKLEESGGGLVQPGGSMKLSCAASGFTFSDAWMDWVRQSPEKGLEWVAEIRTKANNHATYYAESVKGRFTISRDDSKSSVYLQMNSLRAEDTGIYYCTRLANWHWYFDVWGAGTTVTVSS

SEQ ID NO: 19637 - protein, 5 aa, Artificial Sequence
  Description of Artificial Sequence: Synthetic peptide
  XENP020595 vhCDR1
DAWMD

SEQ ID NO: 19638 - protein, 19 aa, Artificial Sequence
  Description of Artificial Sequence: Synthetic peptide
  XENP020595 vhCDR2
EIRTKANNHATYYAESVKG

SEQ ID NO: 19639 - protein, 10 aa, Artificial Sequence
  Description of Artificial Sequence: Synthetic peptide
  XENP020595 vhCDR3
LANWHWYFDV

SEQ ID NO: 19640 - protein, 218 aa, Artificial Sequence; identical to SEQ ID NO: 17590
  Description of Artificial Sequence: Synthetic polypeptide
  XENP020595 7G8_H0.143_L0_IgG1_PVA_/S267K Light Chain

SEQ ID NO: 19641 - protein, 111 aa, Artificial Sequence; identical to SEQ ID NO: 17591
  Description of Artificial Sequence: Synthetic polypeptide
  VL of XENP020595

SEQ ID NO: 19642 - protein, 15 aa, Artificial Sequence
  Description of Artificial Sequence: Synthetic peptide
  XENP020595 vlCDR1
KASQSVDYDGDSYMN

SEQ ID NO: 19643 - protein, 7 aa, Artificial Sequence
  Description of Artificial Sequence: Synthetic peptide
  XENP020595 vlCDR2
AASNLES

SEQ ID NO: 19644 - protein, 9 aa, Artificial Sequence
  Description of Artificial Sequence: Synthetic peptide
  XENP020595 vlCDR3
QQSNEDPFT

SEQ ID NO: 19645 - protein, 450 aa, Artificial Sequence
  Description of Artificial Sequence: Synthetic polypeptide
  XENP020596 7G8_H0.144_L0_IgG1_PVA_/S267K Heavy Chain
EVKLEESGGGLVQPGGSMKLSCAASGFTFSDAWMDWVRQSPEKGLEWVAEIRTKANNHATYYAESVKGRFTISRDDSKSSVYLQMNSLRAEDTGIYYCTRLANWRWYFDVWGAGTTVTVSSASTKGPSVFPLAPSSKSTSGGTAALGCLVKDYFPEPVTVSWNSGALTSGVHTFPAVLQSSGLYSLSSVVTVPSSSLGTQTYICNVNHKPSDTKVDKKVEPKSCDKTHTCPPCPAPPVAGPSVFLFPPKPKDTLMISRTPEVTCVVVDVKHEDPEVKFNWYVDGVEVHNAKTKPREEEYNSTYRVVSVLTVLHQDWLNGKEYKCKVSNKALPAPIEKTISKAKGQPREPQVYTLPPSREEMTKNQVSLTCDVSGFYPSDIAVEWESDGQPENNYKTTPPVLDSDGSFFLYSKLTVDKSRWEQGDVFSCSVMHEALHNHYTQKSLSLSPGK

SEQ ID NO: 19646 - protein, 121 aa, Artificial Sequence
  Description of Artificial Sequence: Synthetic polypeptide
  VH of XENP020596
EVKLEESGGGLVQPGGSMKLSCAASGFTFSDAWMDWVRQSPEKGLEWVAEIRTKANNHATYYAESVKGRFTISRDDSKSSVYLQMNSLRAEDTGIYYCTRLANWRWYFDVWGAGTTVTVSS

SEQ ID NO: 19647 - protein, 5 aa, Artificial Sequence
  Description of Artificial Sequence: Synthetic peptide
  XENP020596 vhCDR1
DAWMD

SEQ ID NO: 19648 - protein, 19 aa, Artificial Sequence
  Description of Artificial Sequence: Synthetic peptide
  XENP020596 vhCDR2
EIRTKANNHATYYAESVKG

SEQ ID NO: 19649 - protein, 10 aa, Artificial Sequence
  Description of Artificial Sequence: Synthetic peptide
  XENP020596 vhCDR3
LANWRWYFDV

SEQ ID NO: 19650 - protein, 218 aa, Artificial Sequence; identical to SEQ ID NO: 17590
  Description of Artificial Sequence: Synthetic polypeptide
  XENP020596 7G8_H0.144_L0_IgG1_PVA_/S267K Light Chain

SEQ ID NO: 19651 - protein, 111 aa, Artificial Sequence; identical to SEQ ID NO: 17591
  Description of Artificial Sequence: Synthetic polypeptide
  VL of XENP020596

SEQ ID NO: 19652 - protein, 15 aa, Artificial Sequence
  Description of Artificial Sequence: Synthetic peptide
  XENP020596 vlCDR1
KASQSVDYDGDSYMN

SEQ ID NO: 19653 - protein, 7 aa, Artificial Sequence
  Description of Artificial Sequence: Synthetic peptide
  XENP020596 vlCDR2
AASNLES

SEQ ID NO: 19654 - protein, 9 aa, Artificial Sequence
  Description of Artificial Sequence: Synthetic peptide
  XENP020596 vlCDR3
QQSNEDPFT

SEQ ID NO: 19655 - protein, 450 aa, Artificial Sequence
  Description of Artificial Sequence: Synthetic polypeptide
  XENP020601 7G8_H0.145_L0_IgG1_PVA_/S267K Heavy Chain
EVKLEESGGGLVQPGGSMKLSCAASGFTFSDAWMDWVRQSPEKGLEWVAEIRTKANNHATYYAESVKGRFTISRDDSKSSVYLQMNSLRAEDTGIYYCTRLANWLWYFDVWGAGTTVTVSSASTKGPSVFPLAPSSKSTSGGTAALGCLVKDYFPEPVTVSWNSGALTSGVHTFPAVLQSSGLYSLSSVVTVPSSSLGTQTYICNVNHKPSDTKVDKKVEPKSCDKTHTCPPCPAPPVAGPSVFLFPPKPKDTLMISRTPEVTCVVVDVKHEDPEVKFNWYVDGVEVHNAKTKPREEEYNSTYRVVSVLTVLHQDWLNGKEYKCKVSNKALPAPIEKTISKAKGQPREPQVYTLPPSREEMTKNQVSLTCDVSGFYPSDIAVEWESDGQPENNYKTTPPVLDSDGSFFLYSKLTVDKSRWEQGDVFSCSVMHEALHNHYTQKSLSLSPGK

SEQ ID NO: 19656 - protein, 121 aa, Artificial Sequence
  Description of Artificial Sequence: Synthetic polypeptide
  VH of XENP020601
EVKLEESGGGLVQPGGSMKLSCAASGFTFSDAWMDWVRQSPEKGLEWVAEIRTKANNHATYYAESVKGRFTISRDDSKSSVYLQMNSLRAEDTGIYYCTRLANWLWYFDVWGAGTTVTVSS

SEQ ID NO: 19657 - protein, 5 aa, Artificial Sequence
  Description of Artificial Sequence: Synthetic peptide
  XENP020601 vhCDR1
DAWMD

SEQ ID NO: 19658 - protein, 19 aa, Artificial Sequence
  Description of Artificial Sequence: Synthetic peptide
  XENP020601 vhCDR2
EIRTKANNHATYYAESVKG

SEQ ID NO: 19659 - protein, 10 aa, Artificial Sequence
  Description of Artificial Sequence: Synthetic peptide
  XENP020601 vhCDR3
LANWLWYFDV

SEQ ID NO: 19660 - protein, 218 aa, Artificial Sequence; identical to SEQ ID NO: 17590
  Description of Artificial Sequence: Synthetic polypeptide
  XENP020601 7G8_H0.145_L0_IgG1_PVA_/S267K Light Chain

SEQ ID NO: 19661 - protein, 111 aa, Artificial Sequence; identical to SEQ ID NO: 17591
  Description of Artificial Sequence: Synthetic polypeptide
  VL of XENP020601

SEQ ID NO: 19662 - protein, 15 aa, Artificial Sequence
  Description of Artificial Sequence: Synthetic peptide
  XENP020601 vlCDR1
KASQSVDYDGDSYMN

SEQ ID NO: 19663 - protein, 7 aa, Artificial Sequence
  Description of Artificial Sequence: Synthetic peptide
  XENP020601 vlCDR2
AASNLES

SEQ ID NO: 19664 - protein, 9 aa, Artificial Sequence
  Description of Artificial Sequence: Synthetic peptide
  XENP020601 vlCDR3
QQSNEDPFT

SEQ ID NO: 19665 - protein, 450 aa, Artificial Sequence
  Description of Artificial Sequence: Synthetic polypeptide
  XENP020602 7G8_H0.146_L0_IgG1_PVA_/S267K Heavy Chain
EVKLEESGGGLVQPGGSMKLSCAASGFTFSDAWMDWVRQSPEKGLEWVAEIRTKANNHATYYAESVKGRFTISRDDSKSSVYLQMNSLRAEDTGIYYCTRLANWGWYFDVWGAGTTVTVSSASTKGPSVFPLAPSSKSTSGGTAALGCLVKDYFPEPVTVSWNSGALTSGVHTFPAVLQSSGLYSLSSVVTVPSSSLGTQTYICNVNHKPSDTKVDKKVEPKSCDKTHTCPPCPAPPVAGPSVFLFPPKPKDTLMISRTPEVTCVVVDVKHEDPEVKFNWYVDGVEVHNAKTKPREEEYNSTYRVVSVLTVLHQDWLNGKEYKCKVSNKALPAPIEKTISKAKGQPREPQVYTLPPSREEMTKNQVSLTCDVSGFYPSDIAVEWESDGQPENNYKTTPPVLDSDGSFFLYSKLTVDKSRWEQGDVFSCSVMHEALHNHYTQKSLSLSPGK

SEQ ID NO: 19666 - protein, 121 aa, Artificial Sequence
  Description of Artificial Sequence: Synthetic polypeptide
  VH of XENP020602
EVKLEESGGGLVQPGGSMKLSCAASGFTFSDAWMDWVRQSPEKGLEWVAEIRTKANNHATYYAESVKGRFTISRDDSKSSVYLQMNSLRAEDTGIYYCTRLANWGWYFDVWGAGTTVTVSS

SEQ ID NO: 19667 - protein, 5 aa, Artificial Sequence
  Description of Artificial Sequence: Synthetic peptide
  XENP020602 vhCDR1
DAWMD

SEQ ID NO: 19668 - protein, 19 aa, Artificial Sequence
  Description of Artificial Sequence: Synthetic peptide
  XENP020602 vhCDR2
EIRTKANNHATYYAESVKG

SEQ ID NO: 19669 - protein, 10 aa, Artificial Sequence
  Description of Artificial Sequence: Synthetic peptide
  XENP020602 vhCDR3
LANWGWYFDV

SEQ ID NO: 19670 - protein, 218 aa, Artificial Sequence; identical to SEQ ID NO: 17590
  Description of Artificial Sequence: Synthetic polypeptide
  XENP020602 7G8_H0.146_L0_IgG1_PVA_/S267K Light Chain

SEQ ID NO: 19671 - protein, 111 aa, Artificial Sequence; identical to SEQ ID NO: 17591
  Description of Artificial Sequence: Synthetic polypeptide
  VL of XENP020602

SEQ ID NO: 19672 - protein, 15 aa, Artificial Sequence
  Description of Artificial Sequence: Synthetic peptide
  XENP020602 vlCDR1
KASQSVDYDGDSYMN

SEQ ID NO: 19673 - protein, 7 aa, Artificial Sequence
  Description of Artificial Sequence: Synthetic peptide
  XENP020602 vlCDR2
AASNLES

SEQ ID NO: 19674 - protein, 9 aa, Artificial Sequence
  Description of Artificial Sequence: Synthetic peptide
  XENP020602 vlCDR3
QQSNEDPFT

SEQ ID NO: 19675 - protein, 450 aa, Artificial Sequence
  Description of Artificial Sequence: Synthetic polypeptide
  XENP020603 7G8_H0.147_L0_IgG1_PVA_/S267K Heavy Chain
EVKLEESGGGLVQPGGSMKLSCAASGFTFSDAWMDWVRQSPEKGLEWVAEIRTKANNHATYYAESVKGRFTISRDDSKSSVYLQMNSLRAEDTGIYYCTRLANWYWYFDVWGAGTTVTVSSASTKGPSVFPLAPSSKSTSGGTAALGCLVKDYFPEPVTVSWNSGALTSGVHTFPAVLQSSGLYSLSSVVTVPSSSLGTQTYICNVNHKPSDTKVDKKVEPKSCDKTHTCPPCPAPPVAGPSVFLFPPKPKDTLMISRTPEVTCVVVDVKHEDPEVKFNWYVDGVEVHNAKTKPREEEYNSTYRVVSVLTVLHQDWLNGKEYKCKVSNKALPAPIEKTISKAKGQPREPQVYTLPPSREEMTKNQVSLTCDVSGFYPSDIAVEWESDGQPENNYKTTPPVLDSDGSFFLYSKLTVDKSRWEQGDVFSCSVMHEALHNHYTQKSLSLSPGK

SEQ ID NO: 19676 - protein, 121 aa, Artificial Sequence
  Description of Artificial Sequence: Synthetic polypeptide
  VH of XENP020603
EVKLEESGGGLVQPGGSMKLSCAASGFTFSDAWMDWVRQSPEKGLEWVAEIRTKANNHATYYAESVKGRFTISRDDSKSSVYLQMNSLRAEDTGIYYCTRLANWYWYFDVWGAGTTVTVSS

SEQ ID NO: 19677 - protein, 5 aa, Artificial Sequence
  Description of Artificial Sequence: Synthetic peptide
  XENP020603 vhCDR1
DAWMD

SEQ ID NO: 19678 - protein, 19 aa, Artificial Sequence
  Description of Artificial Sequence: Synthetic peptide
  XENP020603 vhCDR2
EIRTKANNHATYYAESVKG

SEQ ID NO: 19679 - protein, 10 aa, Artificial Sequence
  Description of Artificial Sequence: Synthetic peptide
  XENP020603 vhCDR3
LANWYWYFDV

SEQ ID NO: 19680 - protein, 218 aa, Artificial Sequence; identical to SEQ ID NO: 17590
  Description of Artificial Sequence: Synthetic polypeptide
  XENP020603 7G8_H0.147_L0_IgG1_PVA_/S267K Light Chain

SEQ ID NO: 19681 - protein, 111 aa, Artificial Sequence; identical to SEQ ID NO: 17591
  Description of Artificial Sequence: Synthetic polypeptide
  VL of XENP020603

SEQ ID NO: 19682 - protein, 15 aa, Artificial Sequence
  Description of Artificial Sequence: Synthetic peptide
  XENP020603 vlCDR1
KASQSVDYDGDSYMN

SEQ ID NO: 19683 - protein, 7 aa, Artificial Sequence
  Description of Artificial Sequence: Synthetic peptide
  XENP020603 vlCDR2
AASNLES

SEQ ID NO: 19684 - protein, 9 aa, Artificial Sequence
  Description of Artificial Sequence: Synthetic peptide
  XENP020603 vlCDR3
QQSNEDPFT

SEQ ID NO: 19685 - protein, 450 aa, Artificial Sequence
  Description of Artificial Sequence: Synthetic polypeptide
  XENP020604 7G8_H0.148_L0_IgG1_PVA_/S267K Heavy Chain
EVKLEESGGGLVQPGGSMKLSCAASGFTFSDAWMDWVRQSPEKGLEWVAEIRTKANNHATYYAESVKGRFTISRDDSKSSVYLQMNSLRAEDTGIYYCTRLANWDYYFDVWGAGTTVTVSSASTKGPSVFPLAPSSKSTSGGTAALGCLVKDYFPEPVTVSWNSGALTSGVHTFPAVLQSSGLYSLSSVVTVPSSSLGTQTYICNVNHKPSDTKVDKKVEPKSCDKTHTCPPCPAPPVAGPSVFLFPPKPKDTLMISRTPEVTCVVVDVKHEDPEVKFNWYVDGVEVHNAKTKPREEEYNSTYRVVSVLTVLHQDWLNGKEYKCKVSNKALPAPIEKTISKAKGQPREPQVYTLPPSREEMTKNQVSLTCDVSGFYPSDIAVEWESDGQPENNYKTTPPVLDSDGSFFLYSKLTVDKSRWEQGDVFSCSVMHEALHNHYTQKSLSLSPGK

SEQ ID NO: 19686 - protein, 121 aa, Artificial Sequence
  Description of Artificial Sequence: Synthetic polypeptide
  VH of XENP020604
EVKLEESGGGLVQPGGSMKLSCAASGFTFSDAWMDWVRQSPEKGLEWVAEIRTKANNHATYYAESVKGRFTISRDDSKSSVYLQMNSLRAEDTGIYYCTRLANWDYYFDVWGAGTTVTVSS

SEQ ID NO: 19687 - protein, 5 aa, Artificial Sequence
  Description of Artificial Sequence: Synthetic peptide
  XENP020604 vhCDR1
DAWMD

SEQ ID NO: 19688 - protein, 19 aa, Artificial Sequence
  Description of Artificial Sequence: Synthetic peptide
  XENP020604 vhCDR2
EIRTKANNHATYYAESVKG

SEQ ID NO: 19689 - protein, 10 aa, Artificial Sequence
  Description of Artificial Sequence: Synthetic peptide
  XENP020604 vhCDR3
LANWDYYFDV

SEQ ID NO: 19690 - protein, 218 aa, Artificial Sequence; identical to SEQ ID NO: 17590
  Description of Artificial Sequence: Synthetic polypeptide
  XENP020604 7G8_H0.148_L0_IgG1_PVA_/S267K Light Chain

SEQ ID NO: 19691 - protein, 111 aa, Artificial Sequence; identical to SEQ ID NO: 17591
  Description of Artificial Sequence: Synthetic polypeptide
  VL of XENP020604

SEQ ID NO: 19692 - protein, 15 aa, Artificial Sequence
  Description of Artificial Sequence: Synthetic peptide
  XENP020604 vlCDR1
KASQSVDYDGDSYMN

SEQ ID NO: 19693 - protein, 7 aa, Artificial Sequence
  Description of Artificial Sequence: Synthetic peptide
  XENP020604 vlCDR2
AASNLES

SEQ ID NO: 19694 - protein, 9 aa, Artificial Sequence
  Description of Artificial Sequence: Synthetic peptide
  XENP020604 vlCDR3
QQSNEDPFT

SEQ ID NO: 19695 - protein, 450 aa, Artificial Sequence; identical to SEQ ID NO: 17585
  Description of Artificial Sequence: Synthetic polypeptide
  XENP020605 7G8_H0_L0.1_IgG1_PVA_/S267K Heavy Chain

SEQ ID NO: 19696 - protein, 121 aa, Artificial Sequence; identical to SEQ ID NO: 17586
  Description of Artificial Sequence: Synthetic polypeptide
  VH of XENP020605

SEQ ID NO: 19697 - protein, 5 aa, Artificial Sequence
  Description of Artificial Sequence: Synthetic peptide
  XENP020605 vhCDR1
DAWMD

SEQ ID NO: 19698 - protein, 19 aa, Artificial Sequence
  Description of Artificial Sequence: Synthetic peptide
  XENP020605 vhCDR2
EIRTKANNHATYYAESVKG

SEQ ID NO: 19699 - protein, 10 aa, Artificial Sequence
  Description of Artificial Sequence: Synthetic peptide
  XENP020605 vhCDR3
LANWDWYFDV

SEQ ID NO: 19700 - protein, 218 aa, Artificial Sequence
  Description of Artificial Sequence: Synthetic polypeptide
  XENP020605 7G8_H0_L0.1_IgG1_PVA_/S267K Light Chain
DTVLTQSPASLAVSLGQRATISCKASQSVNYDGDSYMNWYQQKPGQPPKLLIYAASNLESGIPARLSGSGSGTDFTLNIHPVEEEDAATYYCQQSNEDPFTFGSGTKLEVKRTVAAPSVFIFPPSDEQLKSGTASVVCLLNNFYPREAKVQWKVDNALQSGNSQESVTEQDSKDSTYSLSSTLTLSKADYEKHKVYACEVTHQGLSSPVTKSFNRGEC

SEQ ID NO: 19701 - protein, 111 aa, Artificial Sequence
  Description of Artificial Sequence: Synthetic polypeptide
  VL of XENP020605
DTVLTQSPASLAVSLGQRATISCKASQSVNYDGDSYMNWYQQKPGQPPKLLIYAASNLESGIPARLSGSGSGTDFTLNIHPVEEEDAATYYCQQSNEDPFTFGSGTKLEVK

SEQ ID NO: 19702 - protein, 15 aa, Artificial Sequence
  Description of Artificial Sequence: Synthetic peptide
  XENP020605 vlCDR1
KASQSVNYDGDSYMN

SEQ ID NO: 19703 - protein, 7 aa, Artificial Sequence
  Description of Artificial Sequence: Synthetic peptide
  XENP020605 vlCDR2
AASNLES

SEQ ID NO: 19704 - protein, 9 aa, Artificial Sequence
  Description of Artificial Sequence: Synthetic peptide
  XENP020605 vlCDR3
QQSNEDPFT

SEQ ID NO: 19705 - protein, 450 aa, Artificial Sequence; identical to SEQ ID NO: 17585
  Description of Artificial Sequence: Synthetic polypeptide
  XENP020606 7G8_H0_L0.2_IgG1_PVA_/S267K Heavy Chain

SEQ ID NO: 19706 - protein, 121 aa, Artificial Sequence; identical to SEQ ID NO: 17586
  Description of Artificial Sequence: Synthetic polypeptide
  VH of XENP020606

SEQ ID NO: 19707 - protein, 5 aa, Artificial Sequence
  Description of Artificial Sequence: Synthetic peptide
  XENP020606 vhCDR1
DAWMD

SEQ ID NO: 19708 - protein, 19 aa, Artificial Sequence
  Description of Artificial Sequence: Synthetic peptide
  XENP020606 vhCDR2
EIRTKANNHATYYAESVKG

SEQ ID NO: 19709 - protein, 10 aa, Artificial Sequence
  Description of Artificial Sequence: Synthetic peptide
  XENP020606 vhCDR3
LANWDWYFDV

SEQ ID NO: 19710 - protein, 218 aa, Artificial Sequence
  Description of Artificial Sequence: Synthetic polypeptide
  XENP020606 7G8_H0_L0.2_IgG1_PVA_/S267K Light Chain
DTVLTQSPASLAVSLGQRATISCKASQSVEYDGDSYMNWYQQKPGQPPKLLIYAASNLESGIPARLSGSGSGTDFTLNIHPVEEEDAATYYCQQSNEDPFTFGSGTKLEVKRTVAAPSVFIFPPSDEQLKSGTASVVCLLNNFYPREAKVQWKVDNALQSGNSQESVTEQDSKDSTYSLSSTLTLSKADYEKHKVYACEVTHQGLSSPVTKSFNRGEC

SEQ ID NO: 19711 - protein, 111 aa, Artificial Sequence
  Description of Artificial Sequence: Synthetic polypeptide
  VL of XENP020606
DTVLTQSPASLAVSLGQRATISCKASQSVEYDGDSYMNWYQQKPGQPPKLLIYAASNLESGIPARLSGSGSGTDFTLNIHPVEEEDAATYYCQQSNEDPFTFGSGTKLEVK

SEQ ID NO: 19712 - protein, 15 aa, Artificial Sequence
  Description of Artificial Sequence: Synthetic peptide
  XENP020606 vlCDR1
KASQSVEYDGDSYMN

SEQ ID NO: 19713 - protein, 7 aa, Artificial Sequence
  Description of Artificial Sequence: Synthetic peptide
  XENP020606 vlCDR2
AASNLES

SEQ ID NO: 19714 - protein, 9 aa, Artificial Sequence
  Description of Artificial Sequence: Synthetic peptide
  XENP020606 vlCDR3
QQSNEDPFT

SEQ ID NO: 19715 - protein, 450 aa, Artificial Sequence; identical to SEQ ID NO: 17585
  Description of Artificial Sequence: Synthetic polypeptide
  XENP020607 7G8_H0_L0.3_IgG1_PVA_/S267K Heavy Chain

SEQ ID NO: 19716 - protein, 121 aa, Artificial Sequence; identical to SEQ ID NO: 17586
  Description of Artificial Sequence: Synthetic polypeptide
  VH of XENP020607

SEQ ID NO: 19717 - protein, 5 aa, Artificial Sequence
  Description of Artificial Sequence: Synthetic peptide
  XENP020607 vhCDR1
DAWMD

SEQ ID NO: 19718 - protein, 19 aa, Artificial Sequence
  Description of Artificial Sequence: Synthetic peptide
  XENP020607 vhCDR2
EIRTKANNHATYYAESVKG

SEQ ID NO: 19719 - protein, 10 aa, Artificial Sequence
  Description of Artificial Sequence: Synthetic peptide
  XENP020607 vhCDR3
LANWDWYFDV

SEQ ID NO: 19720 - protein, 218 aa, Artificial Sequence
  Description of Artificial Sequence: Synthetic polypeptide
  XENP020607 7G8_H0_L0.3_IgG1_PVA_/S267K Light Chain
DTVLTQSPASLAVSLGQRATISCKASQSVHYDGDSYMNWYQQKPGQPPKLLIYAASNLESGIPARLSGSGSGTDFTLNIHPVEEEDAATYYCQQSNEDPFTFGSGTKLEVKRTVAAPSVFIFPPSDEQLKSGTASVVCLLNNFYPREAKVQWKVDNALQSGNSQESVTEQDSKDSTYSLSSTLTLSKADYEKHKVYACEVTHQGLSSPVTKSFNRGEC

SEQ ID NO: 19721 - protein, 111 aa, Artificial Sequence
  Description of Artificial Sequence: Synthetic polypeptide
  VL of XENP020607
DTVLTQSPASLAVSLGQRATISCKASQSVHYDGDSYMNWYQQKPGQPPKLLIYAASNLESGIPARLSGSGSGTDFTLNIHPVEEEDAATYYCQQSNEDPFTFGSGTKLEVK

SEQ ID NO: 19722 - protein, 15 aa, Artificial Sequence
  Description of Artificial Sequence: Synthetic peptide
  XENP020607 vlCDR1
KASQSVHYDGDSYMN

SEQ ID NO: 19723 - protein, 7 aa, Artificial Sequence
  Description of Artificial Sequence: Synthetic peptide
  XENP020607 vlCDR2
AASNLES

SEQ ID NO: 19724 - protein, 9 aa, Artificial Sequence
  Description of Artificial Sequence: Synthetic peptide
  XENP020607 vlCDR3
QQSNEDPFT

SEQ ID NO: 19725 - protein, 450 aa, Artificial Sequence; identical to SEQ ID NO: 17585
  Description of Artificial Sequence: Synthetic polypeptide
  XENP020608 7G8_H0_L0.4_IgG1_PVA_/S267K Heavy Chain

SEQ ID NO: 19726 - protein, 121 aa, Artificial Sequence; identical to SEQ ID NO: 17586
  Description of Artificial Sequence: Synthetic polypeptide
  VH of XENP020608

SEQ ID NO: 19727 - protein, 5 aa, Artificial Sequence
  Description of Artificial Sequence: Synthetic peptide
  XENP020608 vhCDR1
DAWMD

SEQ ID NO: 19728 - protein, 19 aa, Artificial Sequence
  Description of Artificial Sequence: Synthetic peptide
  XENP020608 vhCDR2
EIRTKANNHATYYAESVKG

SEQ ID NO: 19729 - protein, 10 aa, Artificial Sequence
  Description of Artificial Sequence: Synthetic peptide
  XENP020608 vhCDR3
LANWDWYFDV

SEQ ID NO: 19730 - protein, 218 aa, Artificial Sequence
  Description of Artificial Sequence: Synthetic polypeptide
  XENP020608 7G8_H0_L0.4_IgG1_PVA_/S267K Light Chain
DTVLTQSPASLAVSLGQRATISCKASQSVSYDGDSYMNWYQQKPGQPPKLLIYAASNLESGIPARLSGSGSGTDFTLNIHPVEEEDAATYYCQQSNEDPFTFGSGTKLEVKRTVAAPSVFIFPPSDEQLKSGTASVVCLLNNFYPREAKVQWKVDNALQSGNSQESVTEQDSKDSTYSLSSTLTLSKADYEKHKVYACEVTHQGLSSPVTKSFNRGEC

SEQ ID NO: 19731 - protein, 111 aa, Artificial Sequence
  Description of Artificial Sequence: Synthetic polypeptide
  VL of XENP020608
DTVLTQSPASLAVSLGQRATISCKASQSVSYDGDSYMNWYQQKPGQPPKLLIYAASNLESGIPARLSGSGSGTDFTLNIHPVEEEDAATYYCQQSNEDPFTFGSGTKLEVK

SEQ ID NO: 19732 - protein, 15 aa, Artificial Sequence
  Description of Artificial Sequence: Synthetic peptide
  XENP020608 vlCDR1
KASQSVSYDGDSYMN

SEQ ID NO: 19733 - protein, 7 aa, Artificial Sequence
  Description of Artificial Sequence: Synthetic peptide
  XENP020608 vlCDR2
AASNLES

SEQ ID NO: 19734 - protein, 9 aa, Artificial Sequence
  Description of Artificial Sequence: Synthetic peptide
  XENP020608 vlCDR3
QQSNEDPFT

SEQ ID NO: 19735 - protein, 450 aa, Artificial Sequence; identical to SEQ ID NO: 17585
  Description of Artificial Sequence: Synthetic polypeptide
  XENP020609 7G8_H0_L0.5_IgG1_PVA_/S267K Heavy Chain

SEQ ID NO: 19736 - protein, 121 aa, Artificial Sequence; identical to SEQ ID NO: 17586
  Description of Artificial Sequence: Synthetic polypeptide
  VH of XENP020609

SEQ ID NO: 19737 - protein, 5 aa, Artificial Sequence
  Description of Artificial Sequence: Synthetic peptide
  XENP020609 vhCDR1
DAWMD

SEQ ID NO: 19738 - protein, 19 aa, Artificial Sequence
  Description of Artificial Sequence: Synthetic peptide
  XENP020609 vhCDR2
EIRTKANNHATYYAESVKG

SEQ ID NO: 19739 - protein, 10 aa, Artificial Sequence
  Description of Artificial Sequence: Synthetic peptide
  XENP020609 vhCDR3
LANWDWYFDV

SEQ ID NO: 19740 - protein, 218 aa, Artificial Sequence
  Description of Artificial Sequence: Synthetic polypeptide
  XENP020609 7G8_H0_L0.5_IgG1_PVA_/S267K Light Chain
DTVLTQSPASLAVSLGQRATISCKASQSVRYDGDSYMNWYQQKPGQPPKLLIYAASNLESGIPARLSGSGSGTDFTLNIHPVEEEDAATYYCQQSNEDPFTFGSGTKLEVKRTVAAPSVFIFPPSDEQLKSGTASVVCLLNNFYPREAKVQWKVDNALQSGNSQESVTEQDSKDSTYSLSSTLTLSKADYEKHKVYACEVTHQGLSSPVTKSFNRGEC

SEQ ID NO: 19741 - protein, 111 aa, Artificial Sequence
  Description of Artificial Sequence: Synthetic polypeptide
  VL of XENP020609
DTVLTQSPASLAVSLGQRATISCKASQSVRYDGDSYMNWYQQKPGQPPKLLIYAASNLESGIPARLSGSGSGTDFTLNIHPVEEEDAATYYCQQSNEDPFTFGSGTKLEVK

SEQ ID NO: 19742 - protein, 15 aa, Artificial Sequence
  Description of Artificial Sequence: Synthetic peptide
  XENP020609 vlCDR1
KASQSVRYDGDSYMN

SEQ ID NO: 19743 - protein, 7 aa, Artificial Sequence
  Description of Artificial Sequence: Synthetic peptide
  XENP020609 vlCDR2
AASNLES

SEQ ID NO: 19744 - protein, 9 aa, Artificial Sequence
  Description of Artificial Sequence: Synthetic peptide
  XENP020609 vlCDR3
QQSNEDPFT

SEQ ID NO: 19745 - protein, 450 aa, Artificial Sequence; identical to SEQ ID NO: 17585
  Description of Artificial Sequence: Synthetic polypeptide
  XENP020610 7G8_H0_L0.6_IgG1_PVA_/S267K Heavy Chain

SEQ ID NO: 19746 - protein, 121 aa, Artificial Sequence; identical to SEQ ID NO: 17586
  Description of Artificial Sequence: Synthetic polypeptide
  VH of XENP020610

SEQ ID NO: 19747 - protein, 5 aa, Artificial Sequence
  Description of Artificial Sequence: Synthetic peptide
  XENP020610 vhCDR1
DAWMD

SEQ ID NO: 19748 - protein, 19 aa, Artificial Sequence
  Description of Artificial Sequence: Synthetic peptide
  XENP020610 vhCDR2
EIRTKANNHATYYAESVKG

SEQ ID NO: 19749 - protein, 10 aa, Artificial Sequence
  Description of Artificial Sequence: Synthetic peptide
  XENP020610 vhCDR3
LANWDWYFDV

SEQ ID NO: 19750 - protein, 218 aa, Artificial Sequence
  Description of Artificial Sequence: Synthetic polypeptide
  XENP020610 7G8_H0_L0.6_IgG1_PVA_/S267K Light Chain
DTVLTQSPASLAVSLGQRATISCKASQSVLYDGDSYMNWYQQKPGQPPKLLIYAASNLESGIPARLSGSGSGTDFTLNIHPVEEEDAATYYCQQSNEDPFTFGSGTKLEVKRTVAAPSVFIFPPSDEQLKSGTASVVCLLNNFYPREAKVQWKVDNALQSGNSQESVTEQDSKDSTYSLSSTLTLSKADYEKHKVYACEVTHQGLSSPVTKSFNRGEC

SEQ ID NO: 19751 - protein, 111 aa, Artificial Sequence
  Description of Artificial Sequence: Synthetic polypeptide
  VL of XENP020610
DTVLTQSPASLAVSLGQRATISCKASQSVLYDGDSYMNWYQQKPGQPPKLLIYAASNLESGIPARLSGSGSGTDFTLNIHPVEEEDAATYYCQQSNEDPFTFGSGTKLEVK

SEQ ID NO: 19752 - protein, 15 aa, Artificial Sequence
  Description of Artificial Sequence: Synthetic peptide
  XENP020610 vlCDR1
KASQSVLYDGDSYMN

SEQ ID NO: 19753 - protein, 7 aa, Artificial Sequence
  Description of Artificial Sequence: Synthetic peptide
  XENP020610 vlCDR2
AASNLES

SEQ ID NO: 19754 - protein, 9 aa, Artificial Sequence
  Description of Artificial Sequence: Synthetic peptide
  XENP020610 vlCDR3
QQSNEDPFT

SEQ ID NO: 19755 - protein, 450 aa, Artificial Sequence; identical to SEQ ID NO: 17585
  Description of Artificial Sequence: Synthetic polypeptide
  XENP020611 7G8_H0_L0.7_IgG1_PVA_/S267K Heavy Chain

SEQ ID NO: 19756 - protein, 121 aa, Artificial Sequence; identical to SEQ ID NO: 17586
  Description of Artificial Sequence: Synthetic polypeptide
  VH of XENP020611

SEQ ID NO: 19757 - protein, 5 aa, Artificial Sequence
  Description of Artificial Sequence: Synthetic peptide
  XENP020611 vhCDR1
DAWMD

SEQ ID NO: 19758 - protein, 19 aa, Artificial Sequence
  Description of Artificial Sequence: Synthetic peptide
  XENP020611 vhCDR2
EIRTKANNHATYYAESVKG

SEQ ID NO: 19759 - protein, 10 aa, Artificial Sequence
  Description of Artificial Sequence: Synthetic peptide
  XENP020611 vhCDR3
LANWDWYFDV

SEQ ID NO: 19760 - protein, 218 aa, Artificial Sequence
  Description of Artificial Sequence: Synthetic polypeptide
  XENP020611 7G8_H0_L0.7_IgG1_PVA_/S267K Light Chain
DTVLTQSPASLAVSLGQRATISCKASQSVTYDGDSYMNWYQQKPGQPPKLLIYAASNLESGIPARLSGSGSGTDFTLNIHPVEEEDAATYYCQQSNEDPFTFGSGTKLEVKRTVAAPSVFIFPPSDEQLKSGTASVVCLLNNFYPREAKVQWKVDNALQSGNSQESVTEQDSKDSTYSLSSTLTLSKADYEKHKVYACEVTHQGLSSPVTKSFNRGEC

SEQ ID NO: 19761 - protein, 111 aa, Artificial Sequence
  Description of Artificial Sequence: Synthetic polypeptide
  VL of XENP020611
DTVLTQSPASLAVSLGQRATISCKASQSVTYDGDSYMNWYQQKPGQPPKLLIYAASNLESGIPARLSGSGSGTDFTLNIHPVEEEDAATYYCQQSNEDPFTFGSGTKLEVK

SEQ ID NO: 19762 - protein, 15 aa, Artificial Sequence
  Description of Artificial Sequence: Synthetic peptide
  XENP020611 vlCDR1
KASQSVTYDGDSYMN

SEQ ID NO: 19763 - protein, 7 aa, Artificial Sequence
  Description of Artificial Sequence: Synthetic peptide
  XENP020611 vlCDR2
AASNLES

SEQ ID NO: 19764 - protein, 9 aa, Artificial Sequence
  Description of Artificial Sequence: Synthetic peptide
  XENP020611 vlCDR3
QQSNEDPFT

SEQ ID NO: 19765 - protein, 450 aa, Artificial Sequence; identical to SEQ ID NO: 17585
  Description of Artificial Sequence: Synthetic polypeptide
  XENP020612 7G8_H0_L0.8_IgG1_PVA_/S267K Heavy Chain

SEQ ID NO: 19766 - protein, 121 aa, Artificial Sequence; identical to SEQ ID NO: 17586
  Description of Artificial Sequence: Synthetic polypeptide
  VH of XENP020612

SEQ ID NO: 19767 - protein, 5 aa, Artificial Sequence
  Description of Artificial Sequence: Synthetic peptide
  XENP020612 vhCDR1
DAWMD

SEQ ID NO: 19768 - protein, 19 aa, Artificial Sequence
  Description of Artificial Sequence: Synthetic peptide
  XENP020612 vhCDR2
EIRTKANNHATYYAESVKG

SEQ ID NO: 19769 - protein, 10 aa, Artificial Sequence
  Description of Artificial Sequence: Synthetic peptide
  XENP020612 vhCDR3
LANWDWYFDV

SEQ ID NO: 19770 - protein, 218 aa, Artificial Sequence
  Description of Artificial Sequence: Synthetic polypeptide
  XENP020612 7G8_H0_L0.8_IgG1_PVA_/S267K Light Chain
DTVLTQSPASLAVSLGQRATISCKASQSVGYDGDSYMNWYQQKPGQPPKLLIYAASNLESGIPARLSGSGSGTDFTLNIHPVEEEDAATYYCQQSNEDPFTFGSGTKLEVKRTVAAPSVFIFPPSDEQLKSGTASVVCLLNNFYPREAKVQWKVDNALQSGNSQESVTEQDSKDSTYSLSSTLTLSKADYEKHKVYACEVTHQGLSSPVTKSFNRGEC

SEQ ID NO: 19771 - protein, 111 aa, Artificial Sequence
  Description of Artificial Sequence: Synthetic polypeptide
  VL of XENP020612
DTVLTQSPASLAVSLGQRATISCKASQSVGYDGDSYMNWYQQKPGQPPKLLIYAASNLESGIPARLSGSGSGTDFTLNIHPVEEEDAATYYCQQSNEDPFTFGSGTKLEVK

SEQ ID NO: 19772 - protein, 15 aa, Artificial Sequence
  Description of Artificial Sequence: Synthetic peptide
  XENP020612 vlCDR1
KASQSVGYDGDSYMN

SEQ ID NO: 19773 - protein, 7 aa, Artificial Sequence
  Description of Artificial Sequence: Synthetic peptide
  XENP020612 vlCDR2
AASNLES

SEQ ID NO: 19774 - protein, 9 aa, Artificial Sequence
  Description of Artificial Sequence: Synthetic peptide
  XENP020612 vlCDR3
QQSNEDPFT

SEQ ID NO: 19775 - protein, 450 aa, Artificial Sequence; identical to SEQ ID NO: 17585
  Description of Artificial Sequence: Synthetic polypeptide
  XENP020613 7G8_H0_L0.9_IgG1_PVA_/S267K Heavy Chain

SEQ ID NO: 19776 - protein, 121 aa, Artificial Sequence; identical to SEQ ID NO: 17586
  Description of Artificial Sequence: Synthetic polypeptide
  VH of XENP020613

SEQ ID NO: 19777 - protein, 5 aa, Artificial Sequence
  Description of Artificial Sequence: Synthetic peptide
  XENP020613 vhCDR1
DAWMD

SEQ ID NO: 19778 - protein, 19 aa, Artificial Sequence
  Description of Artificial Sequence: Synthetic peptide
  XENP020613 vhCDR2
EIRTKANNHATYYAESVKG

SEQ ID NO: 19779 - protein, 10 aa, Artificial Sequence
  Description of Artificial Sequence: Synthetic peptide
  XENP020613 vhCDR3
LANWDWYFDV

SEQ ID NO: 19780 - protein, 218 aa, Artificial Sequence
  Description of Artificial Sequence: Synthetic polypeptide
  XENP020613 7G8_H0_L0.9_IgG1_PVA_/S267K Light Chain
DTVLTQSPASLAVSLGQRATISCKASQSVYYDGDSYMNWYQQKPGQPPKLLIYAASNLESGIPARLSGSGSGTDFTLNIHPVEEEDAATYYCQQSNEDPFTFGSGTKLEVKRTVAAPSVFIFPPSDEQLKSGTASVVCLLNNFYPREAKVQWKVDNALQSGNSQESVTEQDSKDSTYSLSSTLTLSKADYEKHKVYACEVTHQGLSSPVTKSFNRGEC

SEQ ID NO: 19781 - protein, 111 aa, Artificial Sequence
  Description of Artificial Sequence: Synthetic polypeptide
  VL of XENP020613
DTVLTQSPASLAVSLGQRATISCKASQSVYYDGDSYMNWYQQKPGQPPKLLIYAASNLESGIPARLSGSGSGTDFTLNIHPVEEEDAATYYCQQSNEDPFTFGSGTKLEVK

SEQ ID NO: 19782 - protein, 15 aa, Artificial Sequence
  Description of Artificial Sequence: Synthetic peptide
  XENP020613 vlCDR1
KASQSVYYDGDSYMN

SEQ ID NO: 19783 - protein, 7 aa, Artificial Sequence
  Description of Artificial Sequence: Synthetic peptide
  XENP020613 vlCDR2
AASNLES

SEQ ID NO: 19784 - protein, 9 aa, Artificial Sequence
  Description of Artificial Sequence: Synthetic peptide
  XENP020613 vlCDR3
QQSNEDPFT

SEQ ID NO: 19785 - protein, 450 aa, Artificial Sequence; identical to SEQ ID NO: 17585
  Description of Artificial Sequence: Synthetic polypeptide
  XENP020614 7G8_H0_L0.10_IgG1_PVA_/S267K Heavy Chain

SEQ ID NO: 19786 - protein, 121 aa, Artificial Sequence; identical to SEQ ID NO: 17586
  Description of Artificial Sequence: Synthetic polypeptide
  VH of XENP020614

SEQ ID NO: 19787 - protein, 5 aa, Artificial Sequence
  Description of Artificial Sequence: Synthetic peptide
  XENP020614 vhCDR1
DAWMD

SEQ ID NO: 19788 - protein, 19 aa, Artificial Sequence
  Description of Artificial Sequence: Synthetic peptide
  XENP020614 vhCDR2
EIRTKANNHATYYAESVKG

SEQ ID NO: 19789 - protein, 10 aa, Artificial Sequence
  Description of Artificial Sequence: Synthetic peptide
  XENP020614 vhCDR3
LANWDWYFDV

SEQ ID NO: 19790 - protein, 218 aa, Artificial Sequence
  Description of Artificial Sequence: Synthetic polypeptide
  XENP020614 7G8_H0_L0.10_IgG1_PVA_/S267K Light Chain
DTVLTQSPASLAVSLGQRATISCKASQSVDFDGDSYMNWYQQKPGQPPKLLIYAASNLESGIPARLSGSGSGTDFTLNIHPVEEEDAATYYCQQSNEDPFTFGSGTKLEVKRTVAAPSVFIFPPSDEQLKSGTASVVCLLNNFYPREAKVQWKVDNALQSGNSQESVTEQDSKDSTYSLSSTLTLSKADYEKHKVYACEVTHQGLSSPVTKSFNRGEC

SEQ ID NO: 19791 - protein, 111 aa, Artificial Sequence
  Description of Artificial Sequence: Synthetic polypeptide
  VL of XENP020614
DTVLTQSPASLAVSLGQRATISCKASQSVDFDGDSYMNWYQQKPGQPPKLLIYAASNLESGIPARLSGSGSGTDFTLNIHPVEEEDAATYYCQQSNEDPFTFGSGTKLEVK

SEQ ID NO: 19792 - protein, 15 aa, Artificial Sequence
  Description of Artificial Sequence: Synthetic peptide
  XENP020614 vlCDR1
KASQSVDFDGDSYMN

SEQ ID NO: 19793 - protein, 7 aa, Artificial Sequence
  Description of Artificial Sequence: Synthetic peptide
  XENP020614 vlCDR2
AASNLES

SEQ ID NO: 19794 - protein, 9 aa, Artificial Sequence
  Description of Artificial Sequence: Synthetic peptide
  XENP020614 vlCDR3
QQSNEDPFT

SEQ ID NO: 19795 - protein, 450 aa, Artificial Sequence; identical to SEQ ID NO: 17585
  Description of Artificial Sequence: Synthetic polypeptide
  XENP020615 7G8_H0_L0.11_IgG1_PVA_/S267K Heavy Chain

SEQ ID NO: 19796 - protein, 121 aa, Artificial Sequence; identical to SEQ ID NO: 17586
  Description of Artificial Sequence: Synthetic polypeptide
  VH of XENP020615

SEQ ID NO: 19797 - protein, 5 aa, Artificial Sequence
  Description of Artificial Sequence: Synthetic peptide
  XENP020615 vhCDR1
DAWMD

SEQ ID NO: 19798 - protein, 19 aa, Artificial Sequence
  Description of Artificial Sequence: Synthetic peptide
  XENP020615 vhCDR2
EIRTKANNHATYYAESVKG

SEQ ID NO: 19799 - protein, 10 aa, Artificial Sequence
  Description of Artificial Sequence: Synthetic peptide
  XENP020615 vhCDR3
LANWDWYFDV

SEQ ID NO: 19800 - protein, 218 aa, Artificial Sequence
  Description of Artificial Sequence: Synthetic polypeptide
  XENP020615 7G8_H0_L0.11_IgG1_PVA_/S267K Light Chain
DTVLTQSPASLAVSLGQRATISCKASQSVDHDGDSYMNWYQQKPGQPPKLLIYAASNLESGIPARLSGSGSGTDFTLNIHPVEEEDAATYYCQQSNEDPFTFGSGTKLEVKRTVAAPSVFIFPPSDEQLKSGTASVVCLLNNFYPREAKVQWKVDNALQSGNSQESVTEQDSKDSTYSLSSTLTLSKADYEKHKVYACEVTHQGLSSPVTKSFNRGEC

SEQ ID NO: 19801 - protein, 111 aa, Artificial Sequence
  Description of Artificial Sequence: Synthetic polypeptide
  VL of XENP020615
DTVLTQSPASLAVSLGQRATISCKASQSVDHDGDSYMNWYQQKPGQPPKLLIYAASNLESGIPARLSGSGSGTDFTLNIHPVEEEDAATYYCQQSNEDPFTFGSGTKLEVK

SEQ ID NO: 19802 - protein, 15 aa, Artificial Sequence
  Description of Artificial Sequence: Synthetic peptide
  XENP020615 vlCDR1
KASQSVDHDGDSYMN

SEQ ID NO: 19803 - protein, 7 aa, Artificial Sequence
  Description of Artificial Sequence: Synthetic peptide
  XENP020615 vlCDR2
AASNLES

SEQ ID NO: 19804 - protein, 9 aa, Artificial Sequence
  Description of Artificial Sequence: Synthetic peptide
  XENP020615 vlCDR3
QQSNEDPFT

SEQ ID NO: 19805 - protein, 450 aa, Artificial Sequence; identical to SEQ ID NO: 17585
  Description of Artificial Sequence: Synthetic polypeptide
  XENP020616 7G8_H0_L0.12_IgG1_PVA_/S267K Heavy Chain

SEQ ID NO: 19806 - protein, 121 aa, Artificial Sequence; identical to SEQ ID NO: 17586
  Description of Artificial Sequence: Synthetic polypeptide
  VH of XENP020616

SEQ ID NO: 19807 - protein, 5 aa, Artificial Sequence
  Description of Artificial Sequence: Synthetic peptide
  XENP020616 vhCDR1
DAWMD

SEQ ID NO: 19808 - protein, 19 aa, Artificial Sequence
  Description of Artificial Sequence: Synthetic peptide
  XENP020616 vhCDR2
EIRTKANNHATYYAESVKG

SEQ ID NO: 19809 - protein, 10 aa, Artificial Sequence
  Description of Artificial Sequence: Synthetic peptide
  XENP020616 vhCDR3
LANWDWYFDV

SEQ ID NO: 19810 - protein, 218 aa, Artificial Sequence
  Description of Artificial Sequence: Synthetic polypeptide
  XENP020616 7G8_H0_L0.12_IgG1_PVA_/S267K Light Chain
DTVLTQSPASLAVSLGQRATISCKASQSVDLDGDSYMNWYQQKPGQPPKLLIYAASNLESGIPARLSGSGSGTDFTLNIHPVEEEDAATYYCQQSNEDPFTFGSGTKLEVKRTVAAPSVFIFPPSDEQLKSGTASVVCLLNNFYPREAKVQWKVDNALQSGNSQESVTEQDSKDSTYSLSSTLTLSKADYEKHKVYACEVTHQGLSSPVTKSFNRGEC

SEQ ID NO: 19811 - protein, 111 aa, Artificial Sequence
  Description of Artificial Sequence: Synthetic polypeptide
  VL of XENP020616
DTVLTQSPASLAVSLGQRATISCKASQSVDLDGDSYMNWYQQKPGQPPKLLIYAASNLESGIPARLSGSGSGTDFTLNIHPVEEEDAATYYCQQSNEDPFTFGSGTKLEVK

SEQ ID NO: 19812 - protein, 15 aa, Artificial Sequence
  Description of Artificial Sequence: Synthetic peptide
  XENP020616 vlCDR1
KASQSVDLDGDSYMN

SEQ ID NO: 19813 - protein, 7 aa, Artificial Sequence
  Description of Artificial Sequence: Synthetic peptide
  XENP020616 vlCDR2
AASNLES

SEQ ID NO: 19814 - protein, 9 aa, Artificial Sequence
  Description of Artificial Sequence: Synthetic peptide
  XENP020616 vlCDR3
QQSNEDPFT

SEQ ID NO: 19815 - protein, 450 aa, Artificial Sequence; identical to SEQ ID NO: 17585
  Description of Artificial Sequence: Synthetic polypeptide
  XENP020617 7G8_H0_L0.13_IgG1_PVA_/S267K Heavy Chain

SEQ ID NO: 19816 - protein, 121 aa, Artificial Sequence; identical to SEQ ID NO: 17586
  Description of Artificial Sequence: Synthetic polypeptide
  VH of XENP020617

SEQ ID NO: 19817 - protein, 5 aa, Artificial Sequence
  Description of Artificial Sequence: Synthetic peptide
  XENP020617 vhCDR1
DAWMD

SEQ ID NO: 19818 - protein, 19 aa, Artificial Sequence
  Description of Artificial Sequence: Synthetic peptide
  XENP020617 vhCDR2
EIRTKANNHATYYAESVKG

SEQ ID NO: 19819 - protein, 10 aa, Artificial Sequence
  Description of Artificial Sequence: Synthetic peptide
  XENP020617 vhCDR3
LANWDWYFDV

SEQ ID NO: 19820 - protein, 218 aa, Artificial Sequence
  Description of Artificial Sequence: Synthetic polypeptide
  XENP020617 7G8_H0_L0.13_IgG1_PVA_/S267K Light Chain
DTVLTQSPASLAVSLGQRATISCKASQSVDWDGDSYMNWYQQKPGQPPKLLIYAASNLESGIPARLSGSGSGTDFTLNIHPVEEEDAATYYCQQSNEDPFTFGSGTKLEVKRTVAAPSVFIFPPSDEQLKSGTASVVCLLNNFYPREAKVQWKVDNALQSGNSQESVTEQDSKDSTYSLSSTLTLSKADYEKHKVYACEVTHQGLSSPVTKSFNRGEC

SEQ ID NO: 19821 - protein, 111 aa, Artificial Sequence
  Description of Artificial Sequence: Synthetic polypeptide
  VL of XENP020617
DTVLTQSPASLAVSLGQRATISCKASQSVDWDGDSYMNWYQQKPGQPPKLLIYAASNLESGIPARLSGSGSGTDFTLNIHPVEEEDAATYYCQQSNEDPFTFGSGTKLEVK

SEQ ID NO: 19822 - protein, 15 aa, Artificial Sequence
  Description of Artificial Sequence: Synthetic peptide
  XENP020617 vlCDR1
KASQSVDWDGDSYMN

SEQ ID NO: 19823 - protein, 7 aa, Artificial Sequence
  Description of Artificial Sequence: Synthetic peptide
  XENP020617 vlCDR2
AASNLES

SEQ ID NO: 19824 - protein, 9 aa, Artificial Sequence
  Description of Artificial Sequence: Synthetic peptide
  XENP020617 vlCDR3
QQSNEDPFT

SEQ ID NO: 19825 - protein, 450 aa, Artificial Sequence; identical to SEQ ID NO: 17585
  Description of Artificial Sequence: Synthetic polypeptide
  XENP020618 7G8_H0_L0.14_IgG1_PVA_/S267K Heavy Chain

SEQ ID NO: 19826 - protein, 121 aa, Artificial Sequence; identical to SEQ ID NO: 17586
  Description of Artificial Sequence: Synthetic polypeptide
  VH of XENP020618

SEQ ID NO: 19827 - protein, 5 aa, Artificial Sequence
  Description of Artificial Sequence: Synthetic peptide
  XENP020618 vhCDR1
DAWMD

SEQ ID NO: 19828 - protein, 19 aa, Artificial Sequence
  Description of Artificial Sequence: Synthetic peptide
  XENP020618 vhCDR2
EIRTKANNHATYYAESVKG

SEQ ID NO: 19829 - protein, 10 aa, Artificial Sequence
  Description of Artificial Sequence: Synthetic peptide
  XENP020618 vhCDR3
LANWDWYFDV

SEQ ID NO: 19830 - protein, 218 aa, Artificial Sequence
  Description of Artificial Sequence: Synthetic polypeptide
  XENP020618 7G8_H0_L0.14_IgG1_PVA_/S267K Light Chain
DTVLTQSPASLAVSLGQRATISCKASQSVDVDGDSYMNWYQQKPGQPPKLLIYAASNLESGIPARLSGSGSGTDFTLNIHPVEEEDAATYYCQQSNEDPFTFGSGTKLEVKRTVAAPSVFIFPPSDEQLKSGTASVVCLLNNFYPREAKVQWKVDNALQSGNSQESVTEQDSKDSTYSLSSTLTLSKADYEKHKVYACEVTHQGLSSPVTKSFNRGEC

SEQ ID NO: 19831 - protein, 111 aa, Artificial Sequence
  Description of Artificial Sequence: Synthetic polypeptide
  VL of XENP020618
DTVLTQSPASLAVSLGQRATISCKASQSVDVDGDSYMNWYQQKPGQPPKLLIYAASNLESGIPARLSGSGSGTDFTLNIHPVEEEDAATYYCQQSNEDPFTFGSGTKLEVK

SEQ ID NO: 19832 - protein, 15 aa, Artificial Sequence
  Description of Artificial Sequence: Synthetic peptide
  XENP020618 vlCDR1
KASQSVDVDGDSYMN

SEQ ID NO: 19833 - protein, 7 aa, Artificial Sequence
  Description of Artificial Sequence: Synthetic peptide
  XENP020618 vlCDR2
AASNLES

SEQ ID NO: 19834 - protein, 9 aa, Artificial Sequence
  Description of Artificial Sequence: Synthetic peptide
  XENP020618 vlCDR3
QQSNEDPFT

SEQ ID NO: 19835 - protein, 450 aa, Artificial Sequence; identical to SEQ ID NO: 17585
  Description of Artificial Sequence: Synthetic polypeptide
  XENP020619 7G8_H0_L0.15_IgG1_PVA_/S267K Heavy Chain

SEQ ID NO: 19836 - protein, 121 aa, Artificial Sequence; identical to SEQ ID NO: 17586
  Description of Artificial Sequence: Synthetic polypeptide
  VH of XENP020619

SEQ ID NO: 19837 - protein, 5 aa, Artificial Sequence
  Description of Artificial Sequence: Synthetic peptide
  XENP020619 vhCDR1
DAWMD

SEQ ID NO: 19838 - protein, 19 aa, Artificial Sequence
  Description of Artificial Sequence: Synthetic peptide
  XENP020619 vhCDR2
EIRTKANNHATYYAESVKG

SEQ ID NO: 19839 - protein, 10 aa, Artificial Sequence
  Description of Artificial Sequence: Synthetic peptide
  XENP020619 vhCDR3
LANWDWYFDV

SEQ ID NO: 19840 - protein, 218 aa, Artificial Sequence
  Description of Artificial Sequence: Synthetic polypeptide
  XENP020619 7G8_H0_L0.15_IgG1_PVA_/S267K Light Chain
DTVLTQSPASLAVSLGQRATISCKASQSVDADGDSYMNWYQQKPGQPPKLLIYAASNLESGIPARLSGSGSGTDFTLNIHPVEEEDAATYYCQQSNEDPFTFGSGTKLEVKRTVAAPSVFIFPPSDEQLKSGTASVVCLLNNFYPREAKVQWKVDNALQSGNSQESVTEQDSKDSTYSLSSTLTLSKADYEKHKVYACEVTHQGLSSPVTKSFNRGEC

SEQ ID NO: 19841 - protein, 111 aa, Artificial Sequence
  Description of Artificial Sequence: Synthetic polypeptide
  VL of XENP020619
DTVLTQSPASLAVSLGQRATISCKASQSVDADGDSYMNWYQQKPGQPPKLLIYAASNLESGIPARLSGSGSGTDFTLNIHPVEEEDAATYYCQQSNEDPFTFGSGTKLEVK

SEQ ID NO: 19842 - protein, 15 aa, Artificial Sequence
  Description of Artificial Sequence: Synthetic peptide
  XENP020619 vlCDR1
KASQSVDADGDSYMN

SEQ ID NO: 19843 - protein, 7 aa, Artificial Sequence
  Description of Artificial Sequence: Synthetic peptide
  XENP020619 vlCDR2
AASNLES

SEQ ID NO: 19844 - protein, 9 aa, Artificial Sequence
  Description of Artificial Sequence: Synthetic peptide
  XENP020619 vlCDR3
QQSNEDPFT

SEQ ID NO: 19845 - protein, 450 aa, Artificial Sequence; identical to SEQ ID NO: 17585
  Description of Artificial Sequence: Synthetic polypeptide
  XENP020620 7G8_H0_L0.16_IgG1_PVA_/S267K Heavy Chain

SEQ ID NO: 19846 - protein, 121 aa, Artificial Sequence; identical to SEQ ID NO: 17586
  Description of Artificial Sequence: Synthetic polypeptide
  VH of XENP020620

SEQ ID NO: 19847 - protein, 5 aa, Artificial Sequence
  Description of Artificial Sequence: Synthetic peptide
  XENP020620 vhCDR1
DAWMD

SEQ ID NO: 19848 - protein, 19 aa, Artificial Sequence
  Description of Artificial Sequence: Synthetic peptide
  XENP020620 vhCDR2
EIRTKANNHATYYAESVKG

SEQ ID NO: 19849 - protein, 10 aa, Artificial Sequence
  Description of Artificial Sequence: Synthetic peptide
  XENP020620 vhCDR3
LANWDWYFDV

SEQ ID NO: 19850 - protein, 218 aa, Artificial Sequence
  Description of Artificial Sequence: Synthetic polypeptide
  XENP020620 7G8_H0_L0.16_IgG1_PVA_/S267K Light Chain
DTVLTQSPASLAVSLGQRATISCKASQSVDQDGDSYMNWYQQKPGQPPKLLIYAASNLESGIPARLSGSGSGTDFTLNIHPVEEEDAATYYCQQSNEDPFTFGSGTKLEVKRTVAAPSVFIFPPSDEQLKSGTASVVCLLNNFYPREAKVQWKVDNALQSGNSQESVTEQDSKDSTYSLSSTLTLSKADYEKHKVYACEVTHQGLSSPVTKSFNRGEC

SEQ ID NO: 19851 - protein, 111 aa, Artificial Sequence
  Description of Artificial Sequence: Synthetic polypeptide
  VL of XENP020620
DTVLTQSPASLAVSLGQRATISCKASQSVDQDGDSYMNWYQQKPGQPPKLLIYAASNLESGIPARLSGSGSGTDFTLNIHPVEEEDAATYYCQQSNEDPFTFGSGTKLEVK

SEQ ID NO: 19852 - protein, 15 aa, Artificial Sequence
  Description of Artificial Sequence: Synthetic peptide
  XENP020620 vlCDR1
KASQSVDQDGDSYMN

SEQ ID NO: 19853 - protein, 7 aa, Artificial Sequence
  Description of Artificial Sequence: Synthetic peptide
  XENP020620 vlCDR2
AASNLES

SEQ ID NO: 19854 - protein, 9 aa, Artificial Sequence
  Description of Artificial Sequence: Synthetic peptide
  XENP020620 vlCDR3
QQSNEDPFT

SEQ ID NO: 19855 - protein, 450 aa, Artificial Sequence; identical to SEQ ID NO: 17585
  Description of Artificial Sequence: Synthetic polypeptide
  XENP020621 7G8_H0_L0.17_IgG1_PVA_/S267K Heavy Chain

SEQ ID NO: 19856 - protein, 121 aa, Artificial Sequence; identical to SEQ ID NO: 17586
  Description of Artificial Sequence: Synthetic polypeptide
  VH of XENP020621

SEQ ID NO: 19857 - protein, 5 aa, Artificial Sequence
  Description of Artificial Sequence: Synthetic peptide
  XENP020621 vhCDR1
DAWMD

SEQ ID NO: 19858 - protein, 19 aa, Artificial Sequence
  Description of Artificial Sequence: Synthetic peptide
  XENP020621 vhCDR2
EIRTKANNHATYYAESVKG

SEQ ID NO: 19859 - protein, 10 aa, Artificial Sequence
  Description of Artificial Sequence: Synthetic peptide
  XENP020621 vhCDR3
LANWDWYFDV

SEQ ID NO: 19860 - protein, 218 aa, Artificial Sequence
  Description of Artificial Sequence: Synthetic polypeptide
  XENP020621 7G8_H0_L0.17_IgG1_PVA_/S267K Light Chain
DTVLTQSPASLAVSLGQRATISCKASQSVDDDGDSYMNWYQQKPGQPPKLLIYAASNLESGIPARLSGSGSGTDFTLNIHPVEEEDAATYYCQQSNEDPFTFGSGTKLEVKRTVAAPSVFIFPPSDEQLKSGTASVVCLLNNFYPREAKVQWKVDNALQSGNSQESVTEQDSKDSTYSLSSTLTLSKADYEKHKVYACEVTHQGLSSPVTKSFNRGEC

SEQ ID NO: 19861 - protein, 111 aa, Artificial Sequence
  Description of Artificial Sequence: Synthetic polypeptide
  VL of XENP020621
DTVLTQSPASLAVSLGQRATISCKASQSVDDDGDSYMNWYQQKPGQPPKLLIYAASNLESGIPARLSGSGSGTDFTLNIHPVEEEDAATYYCQQSNEDPFTFGSGTKLEVK

SEQ ID NO: 19862 - protein, 15 aa, Artificial Sequence
  Description of Artificial Sequence: Synthetic peptide
  XENP020621 vlCDR1
KASQSVDDDGDSYMN

SEQ ID NO: 19863 - protein, 7 aa, Artificial Sequence
  Description of Artificial Sequence: Synthetic peptide
  XENP020621 vlCDR2
AASNLES

SEQ ID NO: 19864 - protein, 9 aa, Artificial Sequence
  Description of Artificial Sequence: Synthetic peptide
  XENP020621 vlCDR3
QQSNEDPFT

SEQ ID NO: 19865 - protein, 450 aa, Artificial Sequence; identical to SEQ ID NO: 17585
  Description of Artificial Sequence: Synthetic polypeptide
  XENP020622 7G8_H0_L0.18_IgG1_PVA_/S267K Heavy Chain

SEQ ID NO: 19866 - protein, 121 aa, Artificial Sequence; identical to SEQ ID NO: 17586
  Description of Artificial Sequence: Synthetic polypeptide
  VH of XENP020622

SEQ ID NO: 19867 - protein, 5 aa, Artificial Sequence
  Description of Artificial Sequence: Synthetic peptide
  XENP020622 vhCDR1
DAWMD

SEQ ID NO: 19868 - protein, 19 aa, Artificial Sequence
  Description of Artificial Sequence: Synthetic peptide
  XENP020622 vhCDR2
EIRTKANNHATYYAESVKG

SEQ ID NO: 19869 - protein, 10 aa, Artificial Sequence
  Description of Artificial Sequence: Synthetic peptide
  XENP020622 vhCDR3
LANWDWYFDV

SEQ ID NO: 19870 - protein, 218 aa, Artificial Sequence
  Description of Artificial Sequence: Synthetic polypeptide
  XENP020622 7G8_H0_L0.18_IgG1_PVA_/S267K Light Chain
DTVLTQSPASLAVSLGQRATISCKASQSVDKDGDSYMNWYQQKPGQPPKLLIYAASNLESGIPARLSGSGSGTDFTLNIHPVEEEDAATYYCQQSNEDPFTFGSGTKLEVKRTVAAPSVFIFPPSDEQLKSGTASVVCLLNNFYPREAKVQWKVDNALQSGNSQESVTEQDSKDSTYSLSSTLTLSKADYEKHKVYACEVTHQGLSSPVTKSFNRGEC

SEQ ID NO: 19871 - protein, 111 aa, Artificial Sequence
  Description of Artificial Sequence: Synthetic polypeptide
  VL of XENP020622
DTVLTQSPASLAVSLGQRATISCKASQSVDKDGDSYMNWYQQKPGQPPKLLIYAASNLESGIPARLSGSGSGTDFTLNIHPVEEEDAATYYCQQSNEDPFTFGSGTKLEVK

SEQ ID NO: 19872 - protein, 15 aa, Artificial Sequence
  Description of Artificial Sequence: Synthetic peptide
  XENP020622 vlCDR1
KASQSVDKDGDSYMN

SEQ ID NO: 19873 - protein, 7 aa, Artificial Sequence
  Description of Artificial Sequence: Synthetic peptide
  XENP020622 vlCDR2
AASNLES

SEQ ID NO: 19874 - protein, 9 aa, Artificial Sequence
  Description of Artificial Sequence: Synthetic peptide
  XENP020622 vlCDR3
QQSNEDPFT

SEQ ID NO: 19875 - protein, 450 aa, Artificial Sequence; identical to SEQ ID NO: 17585
  Description of Artificial Sequence: Synthetic polypeptide
  XENP020623 7G8_H0_L0.19_IgG1_PVA_/S267K Heavy Chain

SEQ ID NO: 19876 - protein, 121 aa, Artificial Sequence; identical to SEQ ID NO: 17586
  Description of Artificial Sequence: Synthetic polypeptide
  VH of XENP020623

SEQ ID NO: 19877 - protein, 5 aa, Artificial Sequence
  Description of Artificial Sequence: Synthetic peptide
  XENP020623 vhCDR1
DAWMD

SEQ ID NO: 19878 - protein, 19 aa, Artificial Sequence
  Description of Artificial Sequence: Synthetic peptide
  XENP020623 vhCDR2
EIRTKANNHATYYAESVKG

SEQ ID NO: 19879 - protein, 10 aa, Artificial Sequence
  Description of Artificial Sequence: Synthetic peptide
  XENP020623 vhCDR3
LANWDWYFDV

SEQ ID NO: 19880 - protein, 218 aa, Artificial Sequence
  Description of Artificial Sequence: Synthetic polypeptide
  XENP020623 7G8_H0_L0.19_IgG1_PVA_/S267K Light Chain
DTVLTQSPASLAVSLGQRATISCKASQSVDNDGDSYMNWYQQKPGQPPKLLIYAASNLESGIPARLSGSGSGTDFTLNIHPVEEEDAATYYCQQSNEDPFTFGSGTKLEVKRTVAAPSVFIFPPSDEQLKSGTASVVCLLNNFYPREAKVQWKVDNALQSGNSQESVTEQDSKDSTYSLSSTLTLSKADYEKHKVYACEVTHQGLSSPVTKSFNRGEC

SEQ ID NO: 19881 - protein, 111 aa, Artificial Sequence
  Description of Artificial Sequence: Synthetic polypeptide
  VL of XENP020623
DTVLTQSPASLAVSLGQRATISCKASQSVDNDGDSYMNWYQQKPGQPPKLLIYAASNLESGIPARLSGSGSGTDFTLNIHPVEEEDAATYYCQQSNEDPFTFGSGTKLEVK

SEQ ID NO: 19882 - protein, 15 aa, Artificial Sequence
  Description of Artificial Sequence: Synthetic peptide
  XENP020623 vlCDR1
KASQSVDNDGDSYMN

SEQ ID NO: 19883 - protein, 7 aa, Artificial Sequence
  Description of Artificial Sequence: Synthetic peptide
  XENP020623 vlCDR2
AASNLES

SEQ ID NO: 19884 - protein, 9 aa, Artificial Sequence
  Description of Artificial Sequence: Synthetic peptide
  XENP020623 vlCDR3
QQSNEDPFT

SEQ ID NO: 19885 - protein, 450 aa, Artificial Sequence; identical to SEQ ID NO: 17585
  Description of Artificial Sequence: Synthetic polypeptide
  XENP020624 7G8_H0_L0.20_IgG1_PVA_/S267K Heavy Chain

SEQ ID NO: 19886 - protein, 121 aa, Artificial Sequence; identical to SEQ ID NO: 17586
  Description of Artificial Sequence: Synthetic polypeptide
  VH of XENP020624

SEQ ID NO: 19887 - protein, 5 aa, Artificial Sequence
  Description of Artificial Sequence: Synthetic peptide
  XENP020624 vhCDR1
DAWMD

SEQ ID NO: 19888 - protein, 19 aa, Artificial Sequence
  Description of Artificial Sequence: Synthetic peptide
  XENP020624 vhCDR2
EIRTKANNHATYYAESVKG

SEQ ID NO: 19889 - protein, 10 aa, Artificial Sequence
  Description of Artificial Sequence: Synthetic peptide
  XENP020624 vhCDR3
LANWDWYFDV

SEQ ID NO: 19890 - protein, 218 aa, Artificial Sequence
  Description of Artificial Sequence: Synthetic polypeptide
  XENP020624 7G8_H0_L0.20_IgG1_PVA_/S267K Light Chain
DTVLTQSPASLAVSLGQRATISCKASQSVDYNGDSYMNWYQQKPGQPPKLLIYAASNLESGIPARLSGSGSGTDFTLNIHPVEEEDAATYYCQQSNEDPFTFGSGTKLEVKRTVAAPSVFIFPPSDEQLKSGTASVVCLLNNFYPREAKVQWKVDNALQSGNSQESVTEQDSKDSTYSLSSTLTLSKADYEKHKVYACEVTHQGLSSPVTKSFNRGEC

SEQ ID NO: 19891 - protein, 111 aa, Artificial Sequence
  Description of Artificial Sequence: Synthetic polypeptide
  VL of XENP020624
DTVLTQSPASLAVSLGQRATISCKASQSVDYNGDSYMNWYQQKPGQPPKLLIYAASNLESGIPARLSGSGSGTDFTLNIHPVEEEDAATYYCQQSNEDPFTFGSGTKLEVK

SEQ ID NO: 19892 - protein, 15 aa, Artificial Sequence
  Description of Artificial Sequence: Synthetic peptide
  XENP020624 vlCDR1
KASQSVDYNGDSYMN

SEQ ID NO: 19893 - protein, 7 aa, Artificial Sequence
  Description of Artificial Sequence: Synthetic peptide
  XENP020624 vlCDR2
AASNLES

SEQ ID NO: 19894 - protein, 9 aa, Artificial Sequence
  Description of Artificial Sequence: Synthetic peptide
  XENP020624 vlCDR3
QQSNEDPFT

SEQ ID NO: 19895 - protein, 450 aa, Artificial Sequence; identical to SEQ ID NO: 17585
  Description of Artificial Sequence: Synthetic polypeptide
  XENP020625 7G8_H0_L0.21_IgG1_PVA_/S267K Heavy Chain

SEQ ID NO: 19896 - protein, 121 aa, Artificial Sequence; identical to SEQ ID NO: 17586
  Description of Artificial Sequence: Synthetic polypeptide
  VH of XENP020625

SEQ ID NO: 19897 - protein, 5 aa, Artificial Sequence
  Description of Artificial Sequence: Synthetic peptide
  XENP020625 vhCDR1
DAWMD

SEQ ID NO: 19898 - protein, 19 aa, Artificial Sequence
  Description of Artificial Sequence: Synthetic peptide
  XENP020625 vhCDR2
EIRTKANNHATYYAESVKG

SEQ ID NO: 19899 - protein, 10 aa, Artificial Sequence
  Description of Artificial Sequence: Synthetic peptide
  XENP020625 vhCDR3
LANWDWYFDV

SEQ ID NO: 19900 - protein, 218 aa, Artificial Sequence
  Description of Artificial Sequence: Synthetic polypeptide
  XENP020625 7G8_H0_L0.21_IgG1_PVA_/S267K Light Chain
DTVLTQSPASLAVSLGQRATISCKASQSVDYEGDSYMNWYQQKPGQPPKLLIYAASNLESGIPARLSGSGSGTDFTLNIHPVEEEDAATYYCQQSNEDPFTFGSGTKLEVKRTVAAPSVFIFPPSDEQLKSGTASVVCLLNNFYPREAKVQWKVDNALQSGNSQESVTEQDSKDSTYSLSSTLTLSKADYEKHKVYACEVTHQGLSSPVTKSFNRGEC

SEQ ID NO: 19901 - protein, 111 aa, Artificial Sequence
  Description of Artificial Sequence: Synthetic polypeptide
  VL of XENP020625
DTVLTQSPASLAVSLGQRATISCKASQSVDYEGDSYMNWYQQKPGQPPKLLIYAASNLESGIPARLSGSGSGTDFTLNIHPVEEEDAATYYCQQSNEDPFTFGSGTKLEVK

SEQ ID NO: 19902 - protein, 15 aa, Artificial Sequence
  Description of Artificial Sequence: Synthetic peptide
  XENP020625 vlCDR1
KASQSVDYEGDSYMN

SEQ ID NO: 19903 - protein, 7 aa, Artificial Sequence
  Description of Artificial Sequence: Synthetic peptide
  XENP020625 vlCDR2
AASNLES

SEQ ID NO: 19904 - protein, 9 aa, Artificial Sequence
  Description of Artificial Sequence: Synthetic peptide
  XENP020625 vlCDR3
QQSNEDPFT

SEQ ID NO: 19905 - protein, 450 aa, Artificial Sequence; identical to SEQ ID NO: 17585
  Description of Artificial Sequence: Synthetic polypeptide
  XENP020626 7G8_H0_L0.22_IgG1_PVA_/S267K Heavy Chain

SEQ ID NO: 19906 - protein, 121 aa, Artificial Sequence; identical to SEQ ID NO: 17586
  Description of Artificial Sequence: Synthetic polypeptide
  VH of XENP020626

SEQ ID NO: 19907 - protein, 5 aa, Artificial Sequence
  Description of Artificial Sequence: Synthetic peptide
  XENP020626 vhCDR1
DAWMD

SEQ ID NO: 19908 - protein, 19 aa, Artificial Sequence
  Description of Artificial Sequence: Synthetic peptide
  XENP020626 vhCDR2
EIRTKANNHATYYAESVKG

SEQ ID NO: 19909 - protein, 10 aa, Artificial Sequence
  Description of Artificial Sequence: Synthetic peptide
  XENP020626 vhCDR3
LANWDWYFDV

SEQ ID NO: 19910 - protein, 218 aa, Artificial Sequence
  Description of Artificial Sequence: Synthetic polypeptide
  XENP020626 7G8_H0_L0.22_IgG1_PVA_/S267K Light Chain
DTVLTQSPASLAVSLGQRATISCKASQSVDYHGDSYMNWYQQKPGQPPKLLIYAASNLESGIPARLSGSGSGTDFTLNIHPVEEEDAATYYCQQSNEDPFTFGSGTKLEVKRTVAAPSVFIFPPSDEQLKSGTASVVCLLNNFYPREAKVQWKVDNALQSGNSQESVTEQDSKDSTYSLSSTLTLSKADYEKHKVYACEVTHQGLSSPVTKSFNRGEC

SEQ ID NO: 19911 - protein, 111 aa, Artificial Sequence
  Description of Artificial Sequence: Synthetic polypeptide
  VL of XENP020626
DTVLTQSPASLAVSLGQRATISCKASQSVDYHGDSYMNWYQQKPGQPPKLLIYAASNLESGIPARLSGSGSGTDFTLNIHPVEEEDAATYYCQQSNEDPFTFGSGTKLEVK

SEQ ID NO: 19912 - protein, 15 aa, Artificial Sequence
  Description of Artificial Sequence: Synthetic peptide
  XENP020626 vlCDR1
KASQSVDYHGDSYMN

SEQ ID NO: 19913 - protein, 7 aa, Artificial Sequence
  Description of Artificial Sequence: Synthetic peptide
  XENP020626 vlCDR2
AASNLES

SEQ ID NO: 19914 - protein, 9 aa, Artificial Sequence
  Description of Artificial Sequence: Synthetic peptide
  XENP020626 vlCDR3
QQSNEDPFT

SEQ ID NO: 19915 - protein, 450 aa, Artificial Sequence; identical to SEQ ID NO: 17585
  Description of Artificial Sequence: Synthetic polypeptide
  XENP020627 7G8_H0_L0.23_IgG1_PVA_/S267K Heavy Chain

SEQ ID NO: 19916 - protein, 121 aa, Artificial Sequence; identical to SEQ ID NO: 17586
  Description of Artificial Sequence: Synthetic polypeptide
  VH of XENP020627

SEQ ID NO: 19917 - protein, 5 aa, Artificial Sequence
  Description of Artificial Sequence: Synthetic peptide
  XENP020627 vhCDR1
DAWMD

SEQ ID NO: 19918 - protein, 19 aa, Artificial Sequence
  Description of Artificial Sequence: Synthetic peptide
  XENP020627 vhCDR2
EIRTKANNHATYYAESVKG

SEQ ID NO: 19919 - protein, 10 aa, Artificial Sequence
  Description of Artificial Sequence: Synthetic peptide
  XENP020627 vhCDR3
LANWDWYFDV

SEQ ID NO: 19920 - protein, 218 aa, Artificial Sequence
  Description of Artificial Sequence: Synthetic polypeptide
  XENP020627 7G8_H0_L0.23_IgG1_PVA_/S267K Light Chain
DTVLTQSPASLAVSLGQRATISCKASQSVDYSGDSYMNWYQQKPGQPPKLLIYAASNLESGIPARLSGSGSGTDFTLNIHPVEEEDAATYYCQQSNEDPFTFGSGTKLEVKRTVAAPSVFIFPPSDEQLKSGTASVVCLLNNFYPREAKVQWKVDNALQSGNSQESVTEQDSKDSTYSLSSTLTLSKADYEKHKVYACEVTHQGLSSPVTKSFNRGEC

SEQ ID NO: 19921 - protein, 111 aa, Artificial Sequence
  Description of Artificial Sequence: Synthetic polypeptide
  VL of XENP020627
DTVLTQSPASLAVSLGQRATISCKASQSVDYSGDSYMNWYQQKPGQPPKLLIYAASNLESGIPARLSGSGSGTDFTLNIHPVEEEDAATYYCQQSNEDPFTFGSGTKLEVK

SEQ ID NO: 19922 - protein, 15 aa, Artificial Sequence
  Description of Artificial Sequence: Synthetic peptide
  XENP020627 vlCDR1
KASQSVDYSGDSYMN

SEQ ID NO: 19923 - protein, 7 aa, Artificial Sequence
  Description of Artificial Sequence: Synthetic peptide
  XENP020627 vlCDR2
AASNLES

SEQ ID NO: 19924 - protein, 9 aa, Artificial Sequence
  Description of Artificial Sequence: Synthetic peptide
  XENP020627 vlCDR3
QQSNEDPFT

SEQ ID NO: 19925 - protein, 450 aa, Artificial Sequence; identical to SEQ ID NO: 17585
  Description of Artificial Sequence: Synthetic polypeptide
  XENP020628 7G8_H0_L0.24_IgG1_PVA_/S267K Heavy Chain

SEQ ID NO: 19926 - protein, 121 aa, Artificial Sequence; identical to SEQ ID NO: 17586
  Description of Artificial Sequence: Synthetic polypeptide
  VH of XENP020628

SEQ ID NO: 19927 - protein, 5 aa, Artificial Sequence
  Description of Artificial Sequence: Synthetic peptide
  XENP020628 vhCDR1
DAWMD

SEQ ID NO: 19928 - protein, 19 aa, Artificial Sequence
  Description of Artificial Sequence: Synthetic peptide
  XENP020628 vhCDR2
EIRTKANNHATYYAESVKG

SEQ ID NO: 19929 - protein, 10 aa, Artificial Sequence
  Description of Artificial Sequence: Synthetic peptide
  XENP020628 vhCDR3
LANWDWYFDV

SEQ ID NO: 19930 - protein, 218 aa, Artificial Sequence
  Description of Artificial Sequence: Synthetic polypeptide
  XENP020628 7G8_H0_L0.24_IgG1_PVA_/S267K Light Chain
DTVLTQSPASLAVSLGQRATISCKASQSVDYRGDSYMNWYQQKPGQPPKLLIYAASNLESGIPARLSGSGSGTDFTLNIHPVEEEDAATYYCQQSNEDPFTFGSGTKLEVKRTVAAPSVFIFPPSDEQLKSGTASVVCLLNNFYPREAKVQWKVDNALQSGNSQESVTEQDSKDSTYSLSSTLTLSKADYEKHKVYACEVTHQGLSSPVTKSFNRGEC

SEQ ID NO: 19931 - protein, 111 aa, Artificial Sequence
  Description of Artificial Sequence: Synthetic polypeptide
  VL of XENP020628
DTVLTQSPASLAVSLGQRATISCKASQSVDYRGDSYMNWYQQKPGQPPKLLIYAASNLESGIPARLSGSGSGTDFTLNIHPVEEEDAATYYCQQSNEDPFTFGSGTKLEVK

SEQ ID NO: 19932 - protein, 15 aa, Artificial Sequence
  Description of Artificial Sequence: Synthetic peptide
  XENP020628 vlCDR1
KASQSVDYRGDSYMN

SEQ ID NO: 19933 - protein, 7 aa, Artificial Sequence
  Description of Artificial Sequence: Synthetic peptide
  XENP020628 vlCDR2
AASNLES

SEQ ID NO: 19934 - protein, 9 aa, Artificial Sequence
  Description of Artificial Sequence: Synthetic peptide
  XENP020628 vlCDR3
QQSNEDPFT

SEQ ID NO: 19935 - protein, 450 aa, Artificial Sequence; identical to SEQ ID NO: 17585
  Description of Artificial Sequence: Synthetic polypeptide
  XENP020629 7G8_H0_L0.25_IgG1_PVA_/S267K Heavy Chain

SEQ ID NO: 19936 - protein, 121 aa, Artificial Sequence; identical to SEQ ID NO: 17586
  Description of Artificial Sequence: Synthetic polypeptide
  VH of XENP020629

SEQ ID NO: 19937 - protein, 5 aa, Artificial Sequence
  Description of Artificial Sequence: Synthetic peptide
  XENP020629 vhCDR1
DAWMD

SEQ ID NO: 19938 - protein, 19 aa, Artificial Sequence
  Description of Artificial Sequence: Synthetic peptide
  XENP020629 vhCDR2
EIRTKANNHATYYAESVKG

SEQ ID NO: 19939 - protein, 10 aa, Artificial Sequence
  Description of Artificial Sequence: Synthetic peptide
  XENP020629 vhCDR3
LANWDWYFDV

SEQ ID NO: 19940 - protein, 218 aa, Artificial Sequence
  Description of Artificial Sequence: Synthetic polypeptide
  XENP020629 7G8_H0_L0.25_IgG1_PVA_/S267K Light Chain
DTVLTQSPASLAVSLGQRATISCKASQSVDYLGDSYMNWYQQKPGQPPKLLIYAASNLESGIPARLSGSGSGTDFTLNIHPVEEEDAATYYCQQSNEDPFTFGSGTKLEVKRTVAAPSVFIFPPSDEQLKSGTASVVCLLNNFYPREAKVQWKVDNALQSGNSQESVTEQDSKDSTYSLSSTLTLSKADYEKHKVYACEVTHQGLSSPVTKSFNRGEC

SEQ ID NO: 19941 - protein, 111 aa, Artificial Sequence
  Description of Artificial Sequence: Synthetic polypeptide
  VL of XENP020629
DTVLTQSPASLAVSLGQRATISCKASQSVDYLGDSYMNWYQQKPGQPPKLLIYAASNLESGIPARLSGSGSGTDFTLNIHPVEEEDAATYYCQQSNEDPFTFGSGTKLEVK

SEQ ID NO: 19942 - protein, 15 aa, Artificial Sequence
  Description of Artificial Sequence: Synthetic peptide
  XENP020629 vlCDR1
KASQSVDYLGDSYMN

SEQ ID NO: 19943 - protein, 7 aa, Artificial Sequence
  Description of Artificial Sequence: Synthetic peptide
  XENP020629 vlCDR2
AASNLES

SEQ ID NO: 19944 - protein, 9 aa, Artificial Sequence
  Description of Artificial Sequence: Synthetic peptide
  XENP020629 vlCDR3
QQSNEDPFT

SEQ ID NO: 19945 - protein, 450 aa, Artificial Sequence; identical to SEQ ID NO: 17585
  Description of Artificial Sequence: Synthetic polypeptide
  XENP020630 7G8_H0_L0.26_IgG1_PVA_/S267K Heavy Chain

SEQ ID NO: 19946 - protein, 121 aa, Artificial Sequence; identical to SEQ ID NO: 17586
  Description of Artificial Sequence: Synthetic polypeptide
  VH of XENP020630

SEQ ID NO: 19947 - protein, 5 aa, Artificial Sequence
  Description of Artificial Sequence: Synthetic peptide
  XENP020630 vhCDR1
DAWMD

SEQ ID NO: 19948 - protein, 19 aa, Artificial Sequence
  Description of Artificial Sequence: Synthetic peptide
  XENP020630 vhCDR2
EIRTKANNHATYYAESVKG

SEQ ID NO: 19949 - protein, 10 aa, Artificial Sequence
  Description of Artificial Sequence: Synthetic peptide
  XENP020630 vhCDR3
LANWDWYFDV

SEQ ID NO: 19950 - protein, 218 aa, Artificial Sequence
  Description of Artificial Sequence: Synthetic polypeptide
  XENP020630 7G8_H0_L0.26_IgG1_PVA_/S267K Light Chain
DTVLTQSPASLAVSLGQRATISCKASQSVDYTGDSYMNWYQQKPGQPPKLLIYAASNLESGIPARLSGSGSGTDFTLNIHPVEEEDAATYYCQQSNEDPFTFGSGTKLEVKRTVAAPSVFIFPPSDEQLKSGTASVVCLLNNFYPREAKVQWKVDNALQSGNSQESVTEQDSKDSTYSLSSTLTLSKADYEKHKVYACEVTHQGLSSPVTKSFNRGEC

SEQ ID NO: 19951 - protein, 111 aa, Artificial Sequence
  Description of Artificial Sequence: Synthetic polypeptide
  VL of XENP020630
DTVLTQSPASLAVSLGQRATISCKASQSVDYTGDSYMNWYQQKPGQPPKLLIYAASNLESGIPARLSGSGSGTDFTLNIHPVEEEDAATYYCQQSNEDPFTFGSGTKLEVK

SEQ ID NO: 19952 - protein, 15 aa, Artificial Sequence
  Description of Artificial Sequence: Synthetic peptide
  XENP020630 vlCDR1
KASQSVDYTGDSYMN

SEQ ID NO: 19953 - protein, 7 aa, Artificial Sequence
  Description of Artificial Sequence: Synthetic peptide
  XENP020630 vlCDR2
AASNLES

SEQ ID NO: 19954 - protein, 9 aa, Artificial Sequence
  Description of Artificial Sequence: Synthetic peptide
  XENP020630 vlCDR3
QQSNEDPFT

SEQ ID NO: 19955 - protein, 450 aa, Artificial Sequence; identical to SEQ ID NO: 17585
  Description of Artificial Sequence: Synthetic polypeptide
  XENP020631 7G8_H0_L0.27_IgG1_PVA_/S267K Heavy Chain

SEQ ID NO: 19956 - protein, 121 aa, Artificial Sequence; identical to SEQ ID NO: 17586
  Description of Artificial Sequence: Synthetic polypeptide
  VH of XENP020631

SEQ ID NO: 19957 - protein, 5 aa, Artificial Sequence
  Description of Artificial Sequence: Synthetic peptide
  XENP020631 vhCDR1
DAWMD

SEQ ID NO: 19958 - protein, 19 aa, Artificial Sequence
  Description of Artificial Sequence: Synthetic peptide
  XENP020631 vhCDR2
EIRTKANNHATYYAESVKG

SEQ ID NO: 19959 - protein, 10 aa, Artificial Sequence
  Description of Artificial Sequence: Synthetic peptide
  XENP020631 vhCDR3
LANWDWYFDV

SEQ ID NO: 19960 - protein, 218 aa, Artificial Sequence
  Description of Artificial Sequence: Synthetic polypeptide
  XENP020631 7G8_H0_L0.27_IgG1_PVA_/S267K Light Chain
DTVLTQSPASLAVSLGQRATISCKASQSVDYGGDSYMNWYQQKPGQPPKLLIYAASNLESGIPARLSGSGSGTDFTLNIHPVEEEDAATYYCQQSNEDPFTFGSGTKLEVKRTVAAPSVFIFPPSDEQLKSGTASVVCLLNNFYPREAKVQWKVDNALQSGNSQESVTEQDSKDSTYSLSSTLTLSKADYEKHKVYACEVTHQGLSSPVTKSFNRGEC

SEQ ID NO: 19961 - protein, 111 aa, Artificial Sequence
  Description of Artificial Sequence: Synthetic polypeptide
  VL of XENP020631
DTVLTQSPASLAVSLGQRATISCKASQSVDYGGDSYMNWYQQKPGQPPKLLIYAASNLESGIPARLSGSGSGTDFTLNIHPVEEEDAATYYCQQSNEDPFTFGSGTKLEVK

SEQ ID NO: 19962 - protein, 15 aa, Artificial Sequence
  Description of Artificial Sequence: Synthetic peptide
  XENP020631 vlCDR1
KASQSVDYGGDSYMN

SEQ ID NO: 19963 - protein, 7 aa, Artificial Sequence
  Description of Artificial Sequence: Synthetic peptide
  XENP020631 vlCDR2
AASNLES

SEQ ID NO: 19964 - protein, 9 aa, Artificial Sequence
  Description of Artificial Sequence: Synthetic peptide
  XENP020631 vlCDR3
QQSNEDPFT

SEQ ID NO: 19965 - protein, 450 aa, Artificial Sequence; identical to SEQ ID NO: 17585
  Description of Artificial Sequence: Synthetic polypeptide
  XENP020632 7G8_H0_L0.28_IgG1_PVA_/S267K Heavy Chain

SEQ ID NO: 19966 - protein, 121 aa, Artificial Sequence; identical to SEQ ID NO: 17586
  Description of Artificial Sequence: Synthetic polypeptide
  VH of XENP020632

SEQ ID NO: 19967 - protein, 5 aa, Artificial Sequence
  Description of Artificial Sequence: Synthetic peptide
  XENP020632 vhCDR1
DAWMD

SEQ ID NO: 19968 - protein, 19 aa, Artificial Sequence
  Description of Artificial Sequence: Synthetic peptide
  XENP020632 vhCDR2
EIRTKANNHATYYAESVKG

SEQ ID NO: 19969 - protein, 10 aa, Artificial Sequence
  Description of Artificial Sequence: Synthetic peptide
  XENP020632 vhCDR3
LANWDWYFDV

SEQ ID NO: 19970 - protein, 218 aa, Artificial Sequence
  Description of Artificial Sequence: Synthetic polypeptide
  XENP020632 7G8_H0_L0.28_IgG1_PVA_/S267K Light Chain
DTVLTQSPASLAVSLGQRATISCKASQSVDYYGDSYMNWYQQKPGQPPKLLIYAASNLESGIPARLSGSGSGTDFTLNIHPVEEEDAATYYCQQSNEDPFTFGSGTKLEVKRTVAAPSVFIFPPSDEQLKSGTASVVCLLNNFYPREAKVQWKVDNALQSGNSQESVTEQDSKDSTYSLSSTLTLSKADYEKHKVYACEVTHQGLSSPVTKSFNRGEC

SEQ ID NO: 19971 - protein, 111 aa, Artificial Sequence
  Description of Artificial Sequence: Synthetic polypeptide
  VL of XENP020632
DTVLTQSPASLAVSLGQRATISCKASQSVDYYGDSYMNWYQQKPGQPPKLLIYAASNLESGIPARLSGSGSGTDFTLNIHPVEEEDAATYYCQQSNEDPFTFGSGTKLEVK

SEQ ID NO: 19972 - protein, 15 aa, Artificial Sequence
  Description of Artificial Sequence: Synthetic peptide
  XENP020632 vlCDR1
KASQSVDYYGDSYMN

SEQ ID NO: 19973 - protein, 7 aa, Artificial Sequence
  Description of Artificial Sequence: Synthetic peptide
  XENP020632 vlCDR2
AASNLES

SEQ ID NO: 19974 - protein, 9 aa, Artificial Sequence
  Description of Artificial Sequence: Synthetic peptide
  XENP020632 vlCDR3
QQSNEDPFT

SEQ ID NO: 19975 - protein, 450 aa, Artificial Sequence; identical to SEQ ID NO: 17585
  Description of Artificial Sequence: Synthetic polypeptide
  XENP020633 7G8_H0_L0.29_IgG1_PVA_/S267K Heavy Chain

SEQ ID NO: 19976 - protein, 121 aa, Artificial Sequence; identical to SEQ ID NO: 17586
  Description of Artificial Sequence: Synthetic polypeptide
  VH of XENP020633

SEQ ID NO: 19977 - protein, 5 aa, Artificial Sequence
  Description of Artificial Sequence: Synthetic peptide
  XENP020633 vhCDR1
DAWMD

SEQ ID NO: 19978 - protein, 19 aa, Artificial Sequence
  Description of Artificial Sequence: Synthetic peptide
  XENP020633 vhCDR2
EIRTKANNHATYYAESVKG

SEQ ID NO: 19979 - protein, 10 aa, Artificial Sequence
  Description of Artificial Sequence: Synthetic peptide
  XENP020633 vhCDR3
LANWDWYFDV

SEQ ID NO: 19980 - protein, 218 aa, Artificial Sequence
  Description of Artificial Sequence: Synthetic polypeptide
  XENP020633 7G8_H0_L0.29_IgG1_PVA_/S267K Light Chain
DTVLTQSPASLAVSLGQRATISCKASQSVDYDADSYMNWYQQKPGQPPKLLIYAASNLESGIPARLSGSGSGTDFTLNIHPVEEEDAATYYCQQSNEDPFTFGSGTKLEVKRTVAAPSVFIFPPSDEQLKSGTASVVCLLNNFYPREAKVQWKVDNALQSGNSQESVTEQDSKDSTYSLSSTLTLSKADYEKHKVYACEVTHQGLSSPVTKSFNRGEC

SEQ ID NO: 19981 - protein, 111 aa, Artificial Sequence
  Description of Artificial Sequence: Synthetic polypeptide
  VL of XENP020633
DTVLTQSPASLAVSLGQRATISCKASQSVDYDADSYMNWYQQKPGQPPKLLIYAASNLESGIPARLSGSGSGTDFTLNIHPVEEEDAATYYCQQSNEDPFTFGSGTKLEVK

SEQ ID NO: 19982 - protein, 15 aa, Artificial Sequence
  Description of Artificial Sequence: Synthetic peptide
  XENP020633 vlCDR1
KASQSVDYDADSYMN

SEQ ID NO: 19983 - protein, 7 aa, Artificial Sequence
  Description of Artificial Sequence: Synthetic peptide
  XENP020633 vlCDR2
AASNLES

SEQ ID NO: 19984 - protein, 9 aa, Artificial Sequence
  Description of Artificial Sequence: Synthetic peptide
  XENP020633 vlCDR3
QQSNEDPFT

SEQ ID NO: 19985 - protein, 450 aa, Artificial Sequence; identical to SEQ ID NO: 17585
  Description of Artificial Sequence: Synthetic polypeptide
  XENP020634 7G8_H0_L0.30_IgG1_PVA_/S267K Heavy Chain

SEQ ID NO: 19986 - protein, 121 aa, Artificial Sequence; identical to SEQ ID NO: 17586
  Description of Artificial Sequence: Synthetic polypeptide
  VH of XENP020634

SEQ ID NO: 19987 - protein, 5 aa, Artificial Sequence
  Description of Artificial Sequence: Synthetic peptide
  XENP020634 vhCDR1
DAWMD

SEQ ID NO: 19988 - protein, 19 aa, Artificial Sequence
  Description of Artificial Sequence: Synthetic peptide
  XENP020634 vhCDR2
EIRTKANNHATYYAESVKG

SEQ ID NO: 19989 - protein, 10 aa, Artificial Sequence
  Description of Artificial Sequence: Synthetic peptide
  XENP020634 vhCDR3
LANWDWYFDV

SEQ ID NO: 19990 - protein, 218 aa, Artificial Sequence
  Description of Artificial Sequence: Synthetic polypeptide
  XENP020634 7G8_H0_L0.30_IgG1_PVA_/S267K Light Chain
DTVLTQSPASLAVSLGQRATISCKASQSVDYDSDSYMNWYQQKPGQPPKLLIYAASNLESGIPARLSGSGSGTDFTLNIHPVEEEDAATYYCQQSNEDPFTFGSGTKLEVKRTVAAPSVFIFPPSDEQLKSGTASVVCLLNNFYPREAKVQWKVDNALQSGNSQESVTEQDSKDSTYSLSSTLTLSKADYEKHKVYACEVTHQGLSSPVTKSFNRGEC

SEQ ID NO: 19991 - protein, 111 aa, Artificial Sequence
  Description of Artificial Sequence: Synthetic polypeptide
  VL of XENP020634
DTVLTQSPASLAVSLGQRATISCKASQSVDYDSDSYMNWYQQKPGQPPKLLIYAASNLESGIPARLSGSGSGTDFTLNIHPVEEEDAATYYCQQSNEDPFTFGSGTKLEVK

SEQ ID NO: 19992 - protein, 15 aa, Artificial Sequence
  Description of Artificial Sequence: Synthetic peptide
  XENP020634 vlCDR1
KASQSVDYDSDSYMN

SEQ ID NO: 19993 - protein, 7 aa, Artificial Sequence
  Description of Artificial Sequence: Synthetic peptide
  XENP020634 vlCDR2
AASNLES

SEQ ID NO: 19994 - protein, 9 aa, Artificial Sequence
  Description of Artificial Sequence: Synthetic peptide
  XENP020634 vlCDR3
QQSNEDPFT

SEQ ID NO: 19995 - protein, 450 aa, Artificial Sequence; identical to SEQ ID NO: 17585
  Description of Artificial Sequence: Synthetic polypeptide
  XENP020635 7G8_H0_L0.31_IgG1_PVA_/S267K Heavy Chain

SEQ ID NO: 19996 - protein, 121 aa, Artificial Sequence; identical to SEQ ID NO: 17586
  Description of Artificial Sequence: Synthetic polypeptide
  VH of XENP020635

SEQ ID NO: 19997 - protein, 5 aa, Artificial Sequence
  Description of Artificial Sequence: Synthetic peptide
  XENP020635 vhCDR1
DAWMD

SEQ ID NO: 19998 - protein, 19 aa, Artificial Sequence
  Description of Artificial Sequence: Synthetic peptide
  XENP020635 vhCDR2
EIRTKANNHATYYAESVKG

SEQ ID NO: 19999 - protein, 10 aa, Artificial Sequence
  Description of Artificial Sequence: Synthetic peptide
  XENP020635 vhCDR3
LANWDWYFDV

SEQ ID NO: 20000 - protein, 218 aa, Artificial Sequence
  Description of Artificial Sequence: Synthetic polypeptide
  XENP020635 7G8_H0_L0.31_IgG1_PVA_/S267K Light Chain
DTVLTQSPASLAVSLGQRATISCKASQSVDYDTDSYMNWYQQKPGQPPKLLIYAASNLESGIPARLSGSGSGTDFTLNIHPVEEEDAATYYCQQSNEDPFTFGSGTKLEVKRTVAAPSVFIFPPSDEQLKSGTASVVCLLNNFYPREAKVQWKVDNALQSGNSQESVTEQDSKDSTYSLSSTLTLSKADYEKHKVYACEVTHQGLSSPVTKSFNRGEC

SEQ ID NO: 20001 - protein, 111 aa, Artificial Sequence
  Description of Artificial Sequence: Synthetic polypeptide
  VL of XENP020635
DTVLTQSPASLAVSLGQRATISCKASQSVDYDTDSYMNWYQQKPGQPPKLLIYAASNLESGIPARLSGSGSGTDFTLNIHPVEEEDAATYYCQQSNEDPFTFGSGTKLEVK

SEQ ID NO: 20002 - protein, 15 aa, Artificial Sequence
  Description of Artificial Sequence: Synthetic peptide
  XENP020635 vlCDR1
KASQSVDYDTDSYMN

SEQ ID NO: 20003 - protein, 7 aa, Artificial Sequence
  Description of Artificial Sequence: Synthetic peptide
  XENP020635 vlCDR2
AASNLES

SEQ ID NO: 20004 - protein, 9 aa, Artificial Sequence
  Description of Artificial Sequence: Synthetic peptide
  XENP020635 vlCDR3
QQSNEDPFT

SEQ ID NO: 20005 - protein, 450 aa, Artificial Sequence; identical to SEQ ID NO: 17585
  Description of Artificial Sequence: Synthetic polypeptide
  XENP020636 7G8_H0_L0.32_IgG1_PVA_/S267K Heavy Chain

SEQ ID NO: 20006 - protein, 121 aa, Artificial Sequence; identical to SEQ ID NO: 17586
  Description of Artificial Sequence: Synthetic polypeptide
  VH of XENP020636

SEQ ID NO: 20007 - protein, 5 aa, Artificial Sequence
  Description of Artificial Sequence: Synthetic peptide
  XENP020636 vhCDR1
DAWMD

SEQ ID NO: 20008 - protein, 19 aa, Artificial Sequence
  Description of Artificial Sequence: Synthetic peptide
  XENP020636 vhCDR2
EIRTKANNHATYYAESVKG

SEQ ID NO: 20009 - protein, 10 aa, Artificial Sequence
  Description of Artificial Sequence: Synthetic peptide
  XENP020636 vhCDR3
LANWDWYFDV

SEQ ID NO: 20010 - protein, 218 aa, Artificial Sequence
  Description of Artificial Sequence: Synthetic polypeptide
  XENP020636 7G8_H0_L0.32_IgG1_PVA_/S267K Light Chain
DTVLTQSPASLAVSLGQRATISCKASQSVDYDQDSYMNWYQQKPGQPPKLLIYAASNLESGIPARLSGSGSGTDFTLNIHPVEEEDAATYYCQQSNEDPFTFGSGTKLEVKRTVAAPSVFIFPPSDEQLKSGTASVVCLLNNFYPREAKVQWKVDNALQSGNSQESVTEQDSKDSTYSLSSTLTLSKADYEKHKVYACEVTHQGLSSPVTKSFNRGEC

SEQ ID NO: 20011 - protein, 111 aa, Artificial Sequence
  Description of Artificial Sequence: Synthetic polypeptide
  VL of XENP020636
DTVLTQSPASLAVSLGQRATISCKASQSVDYDQDSYMNWYQQKPGQPPKLLIYAASNLESGIPARLSGSGSGTDFTLNIHPVEEEDAATYYCQQSNEDPFTFGSGTKLEVK

SEQ ID NO: 20012 - protein, 15 aa, Artificial Sequence
  Description of Artificial Sequence: Synthetic peptide
  XENP020636 vlCDR1
KASQSVDYDQDSYMN

SEQ ID NO: 20013 - protein, 7 aa, Artificial Sequence
  Description of Artificial Sequence: Synthetic peptide
  XENP020636 vlCDR2
AASNLES

SEQ ID NO: 20014 - protein, 9 aa, Artificial Sequence
  Description of Artificial Sequence: Synthetic peptide
  XENP020636 vlCDR3
QQSNEDPFT

SEQ ID NO: 20015 - protein, 450 aa, Artificial Sequence; identical to SEQ ID NO: 17585
  Description of Artificial Sequence: Synthetic polypeptide
  XENP020637 7G8_H0_L0.33_IgG1_PVA_/S267K Heavy Chain

SEQ ID NO: 20016 - protein, 121 aa, Artificial Sequence; identical to SEQ ID NO: 17586
  Description of Artificial Sequence: Synthetic polypeptide
  VH of XENP020637

SEQ ID NO: 20017 - protein, 5 aa, Artificial Sequence
  Description of Artificial Sequence: Synthetic peptide
  XENP020637 vhCDR1
DAWMD

SEQ ID NO: 20018 - protein, 19 aa, Artificial Sequence
  Description of Artificial Sequence: Synthetic peptide
  XENP020637 vhCDR2
EIRTKANNHATYYAESVKG

SEQ ID NO: 20019 - protein, 10 aa, Artificial Sequence
  Description of Artificial Sequence: Synthetic peptide
  XENP020637 vhCDR3
LANWDWYFDV

SEQ ID NO: 20020 - protein, 218 aa, Artificial Sequence
  Description of Artificial Sequence: Synthetic polypeptide
  XENP020637 7G8_H0_L0.33_IgG1_PVA_/S267K Light Chain
DTVLTQSPASLAVSLGQRATISCKASQSVDYDHDSYMNWYQQKPGQPPKLLIYAASNLESGIPARLSGSGSGTDFTLNIHPVEEEDAATYYCQQSNEDPFTFGSGTKLEVKRTVAAPSVFIFPPSDEQLKSGTASVVCLLNNFYPREAKVQWKVDNALQSGNSQESVTEQDSKDSTYSLSSTLTLSKADYEKHKVYACEVTHQGLSSPVTKSFNRGEC

SEQ ID NO: 20021 - protein, 111 aa, Artificial Sequence
  Description of Artificial Sequence: Synthetic polypeptide
  VL of XENP020637
DTVLTQSPASLAVSLGQRATISCKASQSVDYDHDSYMNWYQQKPGQPPKLLIYAASNLESGIPARLSGSGSGTDFTLNIHPVEEEDAATYYCQQSNEDPFTFGSGTKLEVK

SEQ ID NO: 20022 - protein, 15 aa, Artificial Sequence
  Description of Artificial Sequence: Synthetic peptide
  XENP020637 vlCDR1
KASQSVDYDHDSYMN

SEQ ID NO: 20023 - protein, 7 aa, Artificial Sequence
  Description of Artificial Sequence: Synthetic peptide
  XENP020637 vlCDR2
AASNLES

SEQ ID NO: 20024 - protein, 9 aa, Artificial Sequence
  Description of Artificial Sequence: Synthetic peptide
  XENP020637 vlCDR3
QQSNEDPFT

SEQ ID NO: 20025 - protein, 450 aa, Artificial Sequence; identical to SEQ ID NO: 17585
  Description of Artificial Sequence: Synthetic polypeptide
  XENP020638 7G8_H0_L0.34_IgG1_PVA_/S267K Heavy Chain

SEQ ID NO: 20026 - protein, 121 aa, Artificial Sequence; identical to SEQ ID NO: 17586
  Description of Artificial Sequence: Synthetic polypeptide
  VH of XENP020638

SEQ ID NO: 20027 - protein, 5 aa, Artificial Sequence
  Description of Artificial Sequence: Synthetic peptide
  XENP020638 vhCDR1
DAWMD

SEQ ID NO: 20028 - protein, 19 aa, Artificial Sequence
  Description of Artificial Sequence: Synthetic peptide
  XENP020638 vhCDR2
EIRTKANNHATYYAESVKG

SEQ ID NO: 20029 - protein, 10 aa, Artificial Sequence
  Description of Artificial Sequence: Synthetic peptide
  XENP020638 vhCDR3
LANWDWYFDV

SEQ ID NO: 20030 - protein, 218 aa, Artificial Sequence
  Description of Artificial Sequence: Synthetic polypeptide
  XENP020638 7G8_H0_L0.34_IgG1_PVA_/S267K Light Chain
DTVLTQSPASLAVSLGQRATISCKASQSVDYDDDSYMNWYQQKPGQPPKLLIYAASNLESGIPARLSGSGSGTDFTLNIHPVEEEDAATYYCQQSNEDPFTFGSGTKLEVKRTVAAPSVFIFPPSDEQLKSGTASVVCLLNNFYPREAKVQWKVDNALQSGNSQESVTEQDSKDSTYSLSSTLTLSKADYEKHKVYACEVTHQGLSSPVTKSFNRGEC

SEQ ID NO: 20031 - protein, 111 aa, Artificial Sequence
  Description of Artificial Sequence: Synthetic polypeptide
  VL of XENP020638
DTVLTQSPASLAVSLGQRATISCKASQSVDYDDDSYMNWYQQKPGQPPKLLIYAASNLESGIPARLSGSGSGTDFTLNIHPVEEEDAATYYCQQSNEDPFTFGSGTKLEVK

SEQ ID NO: 20032 - protein, 15 aa, Artificial Sequence
  Description of Artificial Sequence: Synthetic peptide
  XENP020638 vlCDR1
KASQSVDYDDDSYMN

SEQ ID NO: 20033 - protein, 7 aa, Artificial Sequence
  Description of Artificial Sequence: Synthetic peptide
  XENP020638 vlCDR2
AASNLES

SEQ ID NO: 20034 - protein, 9 aa, Artificial Sequence
  Description of Artificial Sequence: Synthetic peptide
  XENP020638 vlCDR3
QQSNEDPFT

SEQ ID NO: 20035 - protein, 450 aa, Artificial Sequence; identical to SEQ ID NO: 17585
  Description of Artificial Sequence: Synthetic polypeptide
  XENP020639 7G8_H0_L0.35_IgG1_PVA_/S267K Heavy Chain

SEQ ID NO: 20036 - protein, 121 aa, Artificial Sequence; identical to SEQ ID NO: 17586
  Description of Artificial Sequence: Synthetic polypeptide
  VH of XENP020639

SEQ ID NO: 20037 - protein, 5 aa, Artificial Sequence
  Description of Artificial Sequence: Synthetic peptide
  XENP020639 vhCDR1
DAWMD

SEQ ID NO: 20038 - protein, 19 aa, Artificial Sequence
  Description of Artificial Sequence: Synthetic peptide
  XENP020639 vhCDR2
EIRTKANNHATYYAESVKG

SEQ ID NO: 20039 - protein, 10 aa, Artificial Sequence
  Description of Artificial Sequence: Synthetic peptide
  XENP020639 vhCDR3
LANWDWYFDV

SEQ ID NO: 20040 - protein, 218 aa, Artificial Sequence
  Description of Artificial Sequence: Synthetic polypeptide
  XENP020639 7G8_H0_L0.35_IgG1_PVA_/S267K Light Chain
DTVLTQSPASLAVSLGQRATISCKASQSVDYDKDSYMNWYQQKPGQPPKLLIYAASNLESGIPARLSGSGSGTDFTLNIHPVEEEDAATYYCQQSNEDPFTFGSGTKLEVKRTVAAPSVFIFPPSDEQLKSGTASVVCLLNNFYPREAKVQWKVDNALQSGNSQESVTEQDSKDSTYSLSSTLTLSKADYEKHKVYACEVTHQGLSSPVTKSFNRGEC

SEQ ID NO: 20041 - protein, 111 aa, Artificial Sequence
  Description of Artificial Sequence: Synthetic polypeptide
  VL of XENP020639
DTVLTQSPASLAVSLGQRATISCKASQSVDYDKDSYMNWYQQKPGQPPKLLIYAASNLESGIPARLSGSGSGTDFTLNIHPVEEEDAATYYCQQSNEDPFTFGSGTKLEVK

SEQ ID NO: 20042 - protein, 15 aa, Artificial Sequence
  Description of Artificial Sequence: Synthetic peptide
  XENP020639 vlCDR1
KASQSVDYDKDSYMN

SEQ ID NO: 20043 - protein, 7 aa, Artificial Sequence
  Description of Artificial Sequence: Synthetic peptide
  XENP020639 vlCDR2
AASNLES

SEQ ID NO: 20044 - protein, 9 aa, Artificial Sequence
  Description of Artificial Sequence: Synthetic peptide
  XENP020639 vlCDR3
QQSNEDPFT

SEQ ID NO: 20045 - protein, 450 aa, Artificial Sequence; identical to SEQ ID NO: 17585
  Description of Artificial Sequence: Synthetic polypeptide
  XENP020640 7G8_H0_L0.36_IgG1_PVA_/S267K Heavy Chain

SEQ ID NO: 20046 - protein, 121 aa, Artificial Sequence; identical to SEQ ID NO: 17586
  Description of Artificial Sequence: Synthetic polypeptide
  VH of XENP020640

SEQ ID NO: 20047 - protein, 5 aa, Artificial Sequence
  Description of Artificial Sequence: Synthetic peptide
  XENP020640 vhCDR1
DAWMD

SEQ ID NO: 20048 - protein, 19 aa, Artificial Sequence
  Description of Artificial Sequence: Synthetic peptide
  XENP020640 vhCDR2
EIRTKANNHATYYAESVKG

SEQ ID NO: 20049 - protein, 10 aa, Artificial Sequence
  Description of Artificial Sequence: Synthetic peptide
  XENP020640 vhCDR3
LANWDWYFDV

SEQ ID NO: 20050 - protein, 218 aa, Artificial Sequence
  Description of Artificial Sequence: Synthetic polypeptide
  XENP020640 7G8_H0_L0.36_IgG1_PVA_/S267K Light Chain
DTVLTQSPASLAVSLGQRATISCKASQSVDYDLDSYMNWYQQKPGQPPKLLIYAASNLESGIPARLSGSGSGTDFTLNIHPVEEEDAATYYCQQSNEDPFTFGSGTKLEVKRTVAAPSVFIFPPSDEQLKSGTASVVCLLNNFYPREAKVQWKVDNALQSGNSQESVTEQDSKDSTYSLSSTLTLSKADYEKHKVYACEVTHQGLSSPVTKSFNRGEC

SEQ ID NO: 20051 - protein, 111 aa, Artificial Sequence
  Description of Artificial Sequence: Synthetic polypeptide
  VL of XENP020640
DTVLTQSPASLAVSLGQRATISCKASQSVDYDLDSYMNWYQQKPGQPPKLLIYAASNLESGIPARLSGSGSGTDFTLNIHPVEEEDAATYYCQQSNEDPFTFGSGTKLEVK

SEQ ID NO: 20052 - protein, 15 aa, Artificial Sequence
  Description of Artificial Sequence: Synthetic peptide
  XENP020640 vlCDR1
KASQSVDYDLDSYMN

SEQ ID NO: 20053 - protein, 7 aa, Artificial Sequence
  Description of Artificial Sequence: Synthetic peptide
  XENP020640 vlCDR2
AASNLES

SEQ ID NO: 20054 - protein, 9 aa, Artificial Sequence
  Description of Artificial Sequence: Synthetic peptide
  XENP020640 vlCDR3
QQSNEDPFT

SEQ ID NO: 20055 - protein, 450 aa, Artificial Sequence; identical to SEQ ID NO: 17585
  Description of Artificial Sequence: Synthetic polypeptide
  XENP020641 7G8_H0_L0.37_IgG1_PVA_/S267K Heavy Chain

SEQ ID NO: 20056 - protein, 121 aa, Artificial Sequence; identical to SEQ ID NO: 17586
  Description of Artificial Sequence: Synthetic polypeptide
  VH of XENP020641

SEQ ID NO: 20057 - protein, 5 aa, Artificial Sequence
  Description of Artificial Sequence: Synthetic peptide
  XENP020641 vhCDR1
DAWMD

SEQ ID NO: 20058 - protein, 19 aa, Artificial Sequence
  Description of Artificial Sequence: Synthetic peptide
  XENP020641 vhCDR2
EIRTKANNHATYYAESVKG

SEQ ID NO: 20059 - protein, 10 aa, Artificial Sequence
  Description of Artificial Sequence: Synthetic peptide
  XENP020641 vhCDR3
LANWDWYFDV

SEQ ID NO: 20060 - protein, 218 aa, Artificial Sequence
  Description of Artificial Sequence: Synthetic polypeptide
  XENP020641 7G8_H0_L0.37_IgG1_PVA_/S267K Light Chain
DTVLTQSPASLAVSLGQRATISCKASQSVDYDYDSYMNWYQQKPGQPPKLLIYAASNLESGIPARLSGSGSGTDFTLNIHPVEEEDAATYYCQQSNEDPFTFGSGTKLEVKRTVAAPSVFIFPPSDEQLKSGTASVVCLLNNFYPREAKVQWKVDNALQSGNSQESVTEQDSKDSTYSLSSTLTLSKADYEKHKVYACEVTHQGLSSPVTKSFNRGEC

SEQ ID NO: 20061 - protein, 111 aa, Artificial Sequence
  Description of Artificial Sequence: Synthetic polypeptide
  VL of XENP020641
DTVLTQSPASLAVSLGQRATISCKASQSVDYDYDSYMNWYQQKPGQPPKLLIYAASNLESGIPARLSGSGSGTDFTLNIHPVEEEDAATYYCQQSNEDPFTFGSGTKLEVK

SEQ ID NO: 20062 - protein, 15 aa, Artificial Sequence
  Description of Artificial Sequence: Synthetic peptide
  XENP020641 vlCDR1
KASQSVDYDYDSYMN

SEQ ID NO: 20063 - protein, 7 aa, Artificial Sequence
  Description of Artificial Sequence: Synthetic peptide
  XENP020641 vlCDR2
AASNLES

SEQ ID NO: 20064 - protein, 9 aa, Artificial Sequence
  Description of Artificial Sequence: Synthetic peptide
  XENP020641 vlCDR3
QQSNEDPFT

SEQ ID NO: 20065 - protein, 450 aa, Artificial Sequence; identical to SEQ ID NO: 17585
  Description of Artificial Sequence: Synthetic polypeptide
  XENP020642 7G8_H0_L0.38_IgG1_PVA_/S267K Heavy Chain

SEQ ID NO: 20066 - protein, 121 aa, Artificial Sequence; identical to SEQ ID NO: 17586
  Description of Artificial Sequence: Synthetic polypeptide
  VH of XENP020642

SEQ ID NO: 20067 - protein, 5 aa, Artificial Sequence
  Description of Artificial Sequence: Synthetic peptide
  XENP020642 vhCDR1
DAWMD

SEQ ID NO: 20068 - protein, 19 aa, Artificial Sequence
  Description of Artificial Sequence: Synthetic peptide
  XENP020642 vhCDR2
EIRTKANNHATYYAESVKG

SEQ ID NO: 20069 - protein, 10 aa, Artificial Sequence
  Description of Artificial Sequence: Synthetic peptide
  XENP020642 vhCDR3
LANWDWYFDV

SEQ ID NO: 20070 - protein, 218 aa, Artificial Sequence
  Description of Artificial Sequence: Synthetic polypeptide
  XENP020642 7G8_H0_L0.38_IgG1_PVA_/S267K Light Chain
DTVLTQSPASLAVSLGQRATISCKASQSVDYDGNSYMNWYQQKPGQPPKLLIYAASNLESGIPARLSGSGSGTDFTLNIHPVEEEDAATYYCQQSNEDPFTFGSGTKLEVKRTVAAPSVFIFPPSDEQLKSGTASVVCLLNNFYPREAKVQWKVDNALQSGNSQESVTEQDSKDSTYSLSSTLTLSKADYEKHKVYACEVTHQGLSSPVTKSFNRGEC

SEQ ID NO: 20071 - protein, 111 aa, Artificial Sequence
  Description of Artificial Sequence: Synthetic polypeptide
  VL of XENP020642
DTVLTQSPASLAVSLGQRATISCKASQSVDYDGNSYMNWYQQKPGQPPKLLIYAASNLESGIPARLSGSGSGTDFTLNIHPVEEEDAATYYCQQSNEDPFTFGSGTKLEVK

SEQ ID NO: 20072 - protein, 15 aa, Artificial Sequence
  Description of Artificial Sequence: Synthetic peptide
  XENP020642 vlCDR1
KASQSVDYDGNSYMN

SEQ ID NO: 20073 - protein, 7 aa, Artificial Sequence
  Description of Artificial Sequence: Synthetic peptide
  XENP020642 vlCDR2
AASNLES

SEQ ID NO: 20074 - protein, 9 aa, Artificial Sequence
  Description of Artificial Sequence: Synthetic peptide
  XENP020642 vlCDR3
QQSNEDPFT

SEQ ID NO: 20075 - protein, 450 aa, Artificial Sequence; identical to SEQ ID NO: 17585
  Description of Artificial Sequence: Synthetic polypeptide
  XENP020643 7G8_H0_L0.39_IgG1_PVA_/S267K Heavy Chain

SEQ ID NO: 20076 - protein, 121 aa, Artificial Sequence; identical to SEQ ID NO: 17586
  Description of Artificial Sequence: Synthetic polypeptide
  VH of XENP020643

SEQ ID NO: 20077 - protein, 5 aa, Artificial Sequence
  Description of Artificial Sequence: Synthetic peptide
  XENP020643 vhCDR1
DAWMD

SEQ ID NO: 20078 - protein, 19 aa, Artificial Sequence
  Description of Artificial Sequence: Synthetic peptide
  XENP020643 vhCDR2
EIRTKANNHATYYAESVKG

SEQ ID NO: 20079 - protein, 10 aa, Artificial Sequence
  Description of Artificial Sequence: Synthetic peptide
  XENP020643 vhCDR3
LANWDWYFDV

SEQ ID NO: 20080 - protein, 218 aa, Artificial Sequence
  Description of Artificial Sequence: Synthetic polypeptide
  XENP020643 7G8_H0_L0.39_IgG1_PVA_/S267K Light Chain
DTVLTQSPASLAVSLGQRATISCKASQSVDYDGESYMNWYQQKPGQPPKLLIYAASNLESGIPARLSGSGSGTDFTLNIHPVEEEDAATYYCQQSNEDPFTFGSGTKLEVKRTVAAPSVFIFPPSDEQLKSGTASVVCLLNNFYPREAKVQWKVDNALQSGNSQESVTEQDSKDSTYSLSSTLTLSKADYEKHKVYACEVTHQGLSSPVTKSFNRGEC

SEQ ID NO: 20081 - protein, 111 aa, Artificial Sequence
  Description of Artificial Sequence: Synthetic polypeptide
  VL of XENP020643
DTVLTQSPASLAVSLGQRATISCKASQSVDYDGESYMNWYQQKPGQPPKLLIYAASNLESGIPARLSGSGSGTDFTLNIHPVEEEDAATYYCQQSNEDPFTFGSGTKLEVK

SEQ ID NO: 20082 - protein, 15 aa, Artificial Sequence
  Description of Artificial Sequence: Synthetic peptide
  XENP020643 vlCDR1
KASQSVDYDGESYMN

SEQ ID NO: 20083 - protein, 7 aa, Artificial Sequence
  Description of Artificial Sequence: Synthetic peptide
  XENP020643 vlCDR2
AASNLES

SEQ ID NO: 20084 - protein, 9 aa, Artificial Sequence
  Description of Artificial Sequence: Synthetic peptide
  XENP020643 vlCDR3
QQSNEDPFT

SEQ ID NO: 20085 - protein, 450 aa, Artificial Sequence; identical to SEQ ID NO: 17585
  Description of Artificial Sequence: Synthetic polypeptide
  XENP020644 7G8_H0_L0.40_IgG1_PVA_/S267K Heavy Chain

SEQ ID NO: 20086 - protein, 121 aa, Artificial Sequence; identical to SEQ ID NO: 17586
  Description of Artificial Sequence: Synthetic polypeptide
  VH of XENP020644

SEQ ID NO: 20087 - protein, 5 aa, Artificial Sequence
  Description of Artificial Sequence: Synthetic peptide
  XENP020644 vhCDR1
DAWMD

SEQ ID NO: 20088 - protein, 19 aa, Artificial Sequence
  Description of Artificial Sequence: Synthetic peptide
  XENP020644 vhCDR2
EIRTKANNHATYYAESVKG

SEQ ID NO: 20089 - protein, 10 aa, Artificial Sequence
  Description of Artificial Sequence: Synthetic peptide
  XENP020644 vhCDR3
LANWDWYFDV

SEQ ID NO: 20090 - protein, 218 aa, Artificial Sequence
  Description of Artificial Sequence: Synthetic polypeptide
  XENP020644 7G8_H0_L0.40_IgG1_PVA_/S267K Light Chain
DTVLTQSPASLAVSLGQRATISCKASQSVDYDGHSYMNWYQQKPGQPPKLLIYAASNLESGIPARLSGSGSGTDFTLNIHPVEEEDAATYYCQQSNEDPFTFGSGTKLEVKRTVAAPSVFIFPPSDEQLKSGTASVVCLLNNFYPREAKVQWKVDNALQSGNSQESVTEQDSKDSTYSLSSTLTLSKADYEKHKVYACEVTHQGLSSPVTKSFNRGEC

SEQ ID NO: 20091 - protein, 111 aa, Artificial Sequence
  Description of Artificial Sequence: Synthetic polypeptide
  VL of XENP020644
DTVLTQSPASLAVSLGQRATISCKASQSVDYDGHSYMNWYQQKPGQPPKLLIYAASNLESGIPARLSGSGSGTDFTLNIHPVEEEDAATYYCQQSNEDPFTFGSGTKLEVK

SEQ ID NO: 20092 - protein, 15 aa, Artificial Sequence
  Description of Artificial Sequence: Synthetic peptide
  XENP020644 vlCDR1
KASQSVDYDGHSYMN

SEQ ID NO: 20093 - protein, 7 aa, Artificial Sequence
  Description of Artificial Sequence: Synthetic peptide
  XENP020644 vlCDR2
AASNLES

SEQ ID NO: 20094 - protein, 9 aa, Artificial Sequence
  Description of Artificial Sequence: Synthetic peptide
  XENP020644 vlCDR3
QQSNEDPFT

SEQ ID NO: 20095 - protein, 450 aa, Artificial Sequence; identical to SEQ ID NO: 17585
  Description of Artificial Sequence: Synthetic polypeptide
  XENP020645 7G8_H0_L0.41_IgG1_PVA_/S267K Heavy Chain

SEQ ID NO: 20096 - protein, 121 aa, Artificial Sequence; identical to SEQ ID NO: 17586
  Description of Artificial Sequence: Synthetic polypeptide
  VH of XENP020645

SEQ ID NO: 20097 - protein, 5 aa, Artificial Sequence
  Description of Artificial Sequence: Synthetic peptide
  XENP020645 vhCDR1
DAWMD

SEQ ID NO: 20098 - protein, 19 aa, Artificial Sequence
  Description of Artificial Sequence: Synthetic peptide
  XENP020645 vhCDR2
EIRTKANNHATYYAESVKG

SEQ ID NO: 20099 - protein, 10 aa, Artificial Sequence
  Description of Artificial Sequence: Synthetic peptide
  XENP020645 vhCDR3
LANWDWYFDV

SEQ ID NO: 20100 - protein, 218 aa, Artificial Sequence
  Description of Artificial Sequence: Synthetic polypeptide
  XENP020645 7G8_H0_L0.41_IgG1_PVA_/S267K Light Chain
DTVLTQSPASLAVSLGQRATISCKASQSVDYDGSSYMNWYQQKPGQPPKLLIYAASNLESGIPARLSGSGSGTDFTLNIHPVEEEDAATYYCQQSNEDPFTFGSGTKLEVKRTVAAPSVFIFPPSDEQLKSGTASVVCLLNNFYPREAKVQWKVDNALQSGNSQESVTEQDSKDSTYSLSSTLTLSKADYEKHKVYACEVTHQGLSSPVTKSFNRGEC

SEQ ID NO: 20101 - protein, 111 aa, Artificial Sequence
  Description of Artificial Sequence: Synthetic polypeptide
  VL of XENP020645
DTVLTQSPASLAVSLGQRATISCKASQSVDYDGSSYMNWYQQKPGQPPKLLIYAASNLESGIPARLSGSGSGTDFTLNIHPVEEEDAATYYCQQSNEDPFTFGSGTKLEVK

SEQ ID NO: 20102 - protein, 15 aa, Artificial Sequence
  Description of Artificial Sequence: Synthetic peptide
  XENP020645 vlCDR1
KASQSVDYDGSSYMN

SEQ ID NO: 20103 - protein, 7 aa, Artificial Sequence
  Description of Artificial Sequence: Synthetic peptide
  XENP020645 vlCDR2
AASNLES

SEQ ID NO: 20104 - protein, 9 aa, Artificial Sequence
  Description of Artificial Sequence: Synthetic peptide
  XENP020645 vlCDR3
QQSNEDPFT

SEQ ID NO: 20105 - protein, 450 aa, Artificial Sequence; identical to SEQ ID NO: 17585
  Description of Artificial Sequence: Synthetic polypeptide
  XENP020646 7G8_H0_L0.42_IgG1_PVA_/S267K Heavy Chain

SEQ ID NO: 20106 - protein, 121 aa, Artificial Sequence; identical to SEQ ID NO: 17586
  Description of Artificial Sequence: Synthetic polypeptide
  VH of XENP020646

SEQ ID NO: 20107 - protein, 5 aa, Artificial Sequence
  Description of Artificial Sequence: Synthetic peptide
  XENP020646 vhCDR1
DAWMD

SEQ ID NO: 20108 - protein, 19 aa, Artificial Sequence
  Description of Artificial Sequence: Synthetic peptide
  XENP020646 vhCDR2
EIRTKANNHATYYAESVKG

SEQ ID NO: 20109 - protein, 10 aa, Artificial Sequence
  Description of Artificial Sequence: Synthetic peptide
  XENP020646 vhCDR3
LANWDWYFDV

SEQ ID NO: 20110 - protein, 218 aa, Artificial Sequence
  Description of Artificial Sequence: Synthetic polypeptide
  XENP020646 7G8_H0_L0.42_IgG1_PVA_/S267K Light Chain
DTVLTQSPASLAVSLGQRATISCKASQSVDYDGRSYMNWYQQKPGQPPKLLIYAASNLESGIPARLSGSGSGTDFTLNIHPVEEEDAATYYCQQSNEDPFTFGSGTKLEVKRTVAAPSVFIFPPSDEQLKSGTASVVCLLNNFYPREAKVQWKVDNALQSGNSQESVTEQDSKDSTYSLSSTLTLSKADYEKHKVYACEVTHQGLSSPVTKSFNRGEC

SEQ ID NO: 20111 - protein, 111 aa, Artificial Sequence
  Description of Artificial Sequence: Synthetic polypeptide
  VL of XENP020646
DTVLTQSPASLAVSLGQRATISCKASQSVDYDGRSYMNWYQQKPGQPPKLLIYAASNLESGIPARLSGSGSGTDFTLNIHPVEEEDAATYYCQQSNEDPFTFGSGTKLEVK

SEQ ID NO: 20112 - protein, 15 aa, Artificial Sequence
  Description of Artificial Sequence: Synthetic peptide
  XENP020646 vlCDR1
KASQSVDYDGRSYMN

SEQ ID NO: 20113 - protein, 7 aa, Artificial Sequence
  Description of Artificial Sequence: Synthetic peptide
  XENP020646 vlCDR2
AASNLES

SEQ ID NO: 20114 - protein, 9 aa, Artificial Sequence
  Description of Artificial Sequence: Synthetic peptide
  XENP020646 vlCDR3
QQSNEDPFT

SEQ ID NO: 20115 - protein, 450 aa, Artificial Sequence; identical to SEQ ID NO: 17585
  Description of Artificial Sequence: Synthetic polypeptide
  XENP020647 7G8_H0_L0.43_IgG1_PVA_/S267K Heavy Chain

SEQ ID NO: 20116 - protein, 121 aa, Artificial Sequence; identical to SEQ ID NO: 17586
  Description of Artificial Sequence: Synthetic polypeptide
  VH of XENP020647

SEQ ID NO: 20117 - protein, 5 aa, Artificial Sequence
  Description of Artificial Sequence: Synthetic peptide
  XENP020647 vhCDR1
DAWMD

SEQ ID NO: 20118 - protein, 19 aa, Artificial Sequence
  Description of Artificial Sequence: Synthetic peptide
  XENP020647 vhCDR2
EIRTKANNHATYYAESVKG

SEQ ID NO: 20119 - protein, 10 aa, Artificial Sequence
  Description of Artificial Sequence: Synthetic peptide
  XENP020647 vhCDR3
LANWDWYFDV

SEQ ID NO: 20120 - protein, 218 aa, Artificial Sequence
  Description of Artificial Sequence: Synthetic polypeptide
  XENP020647 7G8_H0_L0.43_IgG1_PVA_/S267K Light Chain
DTVLTQSPASLAVSLGQRATISCKASQSVDYDGLSYMNWYQQKPGQPPKLLIYAASNLESGIPARLSGSGSGTDFTLNIHPVEEEDAATYYCQQSNEDPFTFGSGTKLEVKRTVAAPSVFIFPPSDEQLKSGTASVVCLLNNFYPREAKVQWKVDNALQSGNSQESVTEQDSKDSTYSLSSTLTLSKADYEKHKVYACEVTHQGLSSPVTKSFNRGEC

SEQ ID NO: 20121 - protein, 111 aa, Artificial Sequence
  Description of Artificial Sequence: Synthetic polypeptide
  VL of XENP020647
DTVLTQSPASLAVSLGQRATISCKASQSVDYDGLSYMNWYQQKPGQPPKLLIYAASNLESGIPARLSGSGSGTDFTLNIHPVEEEDAATYYCQQSNEDPFTFGSGTKLEVK

SEQ ID NO: 20122 - protein, 15 aa, Artificial Sequence
  Description of Artificial Sequence: Synthetic peptide
  XENP020647 vlCDR1
KASQSVDYDGLSYMN

SEQ ID NO: 20123 - protein, 7 aa, Artificial Sequence
  Description of Artificial Sequence: Synthetic peptide
  XENP020647 vlCDR2
AASNLES

SEQ ID NO: 20124 - protein, 9 aa, Artificial Sequence
  Description of Artificial Sequence: Synthetic peptide
  XENP020647 vlCDR3
QQSNEDPFT

SEQ ID NO: 20125 - protein, 450 aa, Artificial Sequence; identical to SEQ ID NO: 17585
  Description of Artificial Sequence: Synthetic polypeptide
  XENP020648 7G8_H0_L0.44_IgG1_PVA_/S267K Heavy Chain

SEQ ID NO: 20126 - protein, 121 aa, Artificial Sequence; identical to SEQ ID NO: 17586
  Description of Artificial Sequence: Synthetic polypeptide
  VH of XENP020648

SEQ ID NO: 20127 - protein, 5 aa, Artificial Sequence
  Description of Artificial Sequence: Synthetic peptide
  XENP020648 vhCDR1
DAWMD

SEQ ID NO: 20128 - protein, 19 aa, Artificial Sequence
  Description of Artificial Sequence: Synthetic peptide
  XENP020648 vhCDR2
EIRTKANNHATYYAESVKG

SEQ ID NO: 20129 - protein, 10 aa, Artificial Sequence
  Description of Artificial Sequence: Synthetic peptide
  XENP020648 vhCDR3
LANWDWYFDV

SEQ ID NO: 20130 - protein, 218 aa, Artificial Sequence
  Description of Artificial Sequence: Synthetic polypeptide
  XENP020648 7G8_H0_L0.44_IgG1_PVA_/S267K Light Chain
DTVLTQSPASLAVSLGQRATISCKASQSVDYDGTSYMNWYQQKPGQPPKLLIYAASNLESGIPARLSGSGSGTDFTLNIHPVEEEDAATYYCQQSNEDPFTFGSGTKLEVKRTVAAPSVFIFPPSDEQLKSGTASVVCLLNNFYPREAKVQWKVDNALQSGNSQESVTEQDSKDSTYSLSSTLTLSKADYEKHKVYACEVTHQGLSSPVTKSFNRGEC

SEQ ID NO: 20131 - protein, 111 aa, Artificial Sequence
  Description of Artificial Sequence: Synthetic polypeptide
  VL of XENP020648
DTVLTQSPASLAVSLGQRATISCKASQSVDYDGTSYMNWYQQKPGQPPKLLIYAASNLESGIPARLSGSGSGTDFTLNIHPVEEEDAATYYCQQSNEDPFTFGSGTKLEVK

SEQ ID NO: 20132 - protein, 15 aa, Artificial Sequence
  Description of Artificial Sequence: Synthetic peptide
  XENP020648 vlCDR1
KASQSVDYDGTSYMN

SEQ ID NO: 20133 - protein, 7 aa, Artificial Sequence
  Description of Artificial Sequence: Synthetic peptide
  XENP020648 vlCDR2
AASNLES

SEQ ID NO: 20134 - protein, 9 aa, Artificial Sequence
  Description of Artificial Sequence: Synthetic peptide
  XENP020648 vlCDR3
QQSNEDPFT

SEQ ID NO: 20135 - protein, 450 aa, Artificial Sequence; identical to SEQ ID NO: 17585
  Description of Artificial Sequence: Synthetic polypeptide
  XENP020649 7G8_H0_L0.45_IgG1_PVA_/S267K Heavy Chain

SEQ ID NO: 20136 - protein, 121 aa, Artificial Sequence; identical to SEQ ID NO: 17586
  Description of Artificial Sequence: Synthetic polypeptide
  VH of XENP020649

SEQ ID NO: 20137 - protein, 5 aa, Artificial Sequence
  Description of Artificial Sequence: Synthetic peptide
  XENP020649 vhCDR1
DAWMD

SEQ ID NO: 20138 - protein, 19 aa, Artificial Sequence
  Description of Artificial Sequence: Synthetic peptide
  XENP020649 vhCDR2
EIRTKANNHATYYAESVKG

SEQ ID NO: 20139 - protein, 10 aa, Artificial Sequence
  Description of Artificial Sequence: Synthetic peptide
  XENP020649 vhCDR3
LANWDWYFDV

SEQ ID NO: 20140 - protein, 218 aa, Artificial Sequence
  Description of Artificial Sequence: Synthetic polypeptide
  XENP020649 7G8_H0_L0.45_IgG1_PVA_/S267K Light Chain
DTVLTQSPASLAVSLGQRATISCKASQSVDYDGGSYMNWYQQKPGQPPKLLIYAASNLESGIPARLSGSGSGTDFTLNIHPVEEEDAATYYCQQSNEDPFTFGSGTKLEVKRTVAAPSVFIFPPSDEQLKSGTASVVCLLNNFYPREAKVQWKVDNALQSGNSQESVTEQDSKDSTYSLSSTLTLSKADYEKHKVYACEVTHQGLSSPVTKSFNRGEC

SEQ ID NO: 20141 - protein, 111 aa, Artificial Sequence
  Description of Artificial Sequence: Synthetic polypeptide
  VL of XENP020649
DTVLTQSPASLAVSLGQRATISCKASQSVDYDGGSYMNWYQQKPGQPPKLLIYAASNLESGIPARLSGSGSGTDFTLNIHPVEEEDAATYYCQQSNEDPFTFGSGTKLEVK

SEQ ID NO: 20142 - protein, 15 aa, Artificial Sequence
  Description of Artificial Sequence: Synthetic peptide
  XENP020649 vlCDR1
KASQSVDYDGGSYMN

SEQ ID NO: 20143 - protein, 7 aa, Artificial Sequence
  Description of Artificial Sequence: Synthetic peptide
  XENP020649 vlCDR2
AASNLES

SEQ ID NO: 20144 - protein, 9 aa, Artificial Sequence
  Description of Artificial Sequence: Synthetic peptide
  XENP020649 vlCDR3
QQSNEDPFT

SEQ ID NO: 20145 - protein, 450 aa, Artificial Sequence; identical to SEQ ID NO: 17585
  Description of Artificial Sequence: Synthetic polypeptide
  XENP020650 7G8_H0_L0.46_IgG1_PVA_/S267K Heavy Chain

SEQ ID NO: 20146 - protein, 121 aa, Artificial Sequence; identical to SEQ ID NO: 17586
  Description of Artificial Sequence: Synthetic polypeptide
  VH of XENP020650

SEQ ID NO: 20147 - protein, 5 aa, Artificial Sequence
  Description of Artificial Sequence: Synthetic peptide
  XENP020650 vhCDR1
DAWMD

SEQ ID NO: 20148 - protein, 19 aa, Artificial Sequence
  Description of Artificial Sequence: Synthetic peptide
  XENP020650 vhCDR2
EIRTKANNHATYYAESVKG

SEQ ID NO: 20149 - protein, 10 aa, Artificial Sequence
  Description of Artificial Sequence: Synthetic peptide
  XENP020650 vhCDR3
LANWDWYFDV

SEQ ID NO: 20150 - protein, 218 aa, Artificial Sequence
  Description of Artificial Sequence: Synthetic polypeptide
  XENP020650 7G8_H0_L0.46_IgG1_PVA_/S267K Light Chain
DTVLTQSPASLAVSLGQRATISCKASQSVDYDGYSYMNWYQQKPGQPPKLLIYAASNLESGIPARLSGSGSGTDFTLNIHPVEEEDAATYYCQQSNEDPFTFGSGTKLEVKRTVAAPSVFIFPPSDEQLKSGTASVVCLLNNFYPREAKVQWKVDNALQSGNSQESVTEQDSKDSTYSLSSTLTLSKADYEKHKVYACEVTHQGLSSPVTKSFNRGEC

SEQ ID NO: 20151 - protein, 111 aa, Artificial Sequence
  Description of Artificial Sequence: Synthetic polypeptide
  VL of XENP020650
DTVLTQSPASLAVSLGQRATISCKASQSVDYDGYSYMNWYQQKPGQPPKLLIYAASNLESGIPARLSGSGSGTDFTLNIHPVEEEDAATYYCQQSNEDPFTFGSGTKLEVK

SEQ ID NO: 20152 - protein, 15 aa, Artificial Sequence
  Description of Artificial Sequence: Synthetic peptide
  XENP020650 vlCDR1
KASQSVDYDGYSYMN

SEQ ID NO: 20153 - protein, 7 aa, Artificial Sequence
  Description of Artificial Sequence: Synthetic peptide
  XENP020650 vlCDR2
AASNLES

SEQ ID NO: 20154 - protein, 9 aa, Artificial Sequence
  Description of Artificial Sequence: Synthetic peptide
  XENP020650 vlCDR3
QQSNEDPFT

SEQ ID NO: 20155 - protein, 450 aa, Artificial Sequence; identical to SEQ ID NO: 17585
  Description of Artificial Sequence: Synthetic polypeptide
  XENP020651 7G8_H0_L0.47_IgG1_PVA_/S267K Heavy Chain

SEQ ID NO: 20156 - protein, 121 aa, Artificial Sequence; identical to SEQ ID NO: 17586
  Description of Artificial Sequence: Synthetic polypeptide
  VH of XENP020651

SEQ ID NO: 20157 - protein, 5 aa, Artificial Sequence
  Description of Artificial Sequence: Synthetic peptide
  XENP020651 vhCDR1
DAWMD

SEQ ID NO: 20158 - protein, 19 aa, Artificial Sequence
  Description of Artificial Sequence: Synthetic peptide
  XENP020651 vhCDR2
EIRTKANNHATYYAESVKG

SEQ ID NO: 20159 - protein, 10 aa, Artificial Sequence
  Description of Artificial Sequence: Synthetic peptide
  XENP020651 vhCDR3
LANWDWYFDV

SEQ ID NO: 20160 - protein, 218 aa, Artificial Sequence
  Description of Artificial Sequence: Synthetic polypeptide
  XENP020651 7G8_H0_L0.47_IgG1_PVA_/S267K Light Chain
DTVLTQSPASLAVSLGQRATISCKASQSVDYDGDSYMNWYQQKPGQPPKLLIKAASNLESGIPARLSGSGSGTDFTLNIHPVEEEDAATYYCQQSNEDPFTFGSGTKLEVKRTVAAPSVFIFPPSDEQLKSGTASVVCLLNNFYPREAKVQWKVDNALQSGNSQESVTEQDSKDSTYSLSSTLTLSKADYEKHKVYACEVTHQGLSSPVTKSFNRGEC

SEQ ID NO: 20161 - protein, 111 aa, Artificial Sequence
  Description of Artificial Sequence: Synthetic polypeptide
  VL of XENP020651
DTVLTQSPASLAVSLGQRATISCKASQSVDYDGDSYMNWYQQKPGQPPKLLIKAASNLESGIPARLSGSGSGTDFTLNIHPVEEEDAATYYCQQSNEDPFTFGSGTKLEVK

SEQ ID NO: 20162 - protein, 15 aa, Artificial Sequence
  Description of Artificial Sequence: Synthetic peptide
  XENP020651 vlCDR1
KASQSVDYDGDSYMN

SEQ ID NO: 20163 - protein, 7 aa, Artificial Sequence
  Description of Artificial Sequence: Synthetic peptide
  XENP020651 vlCDR2
AASNLES

SEQ ID NO: 20164 - protein, 9 aa, Artificial Sequence
  Description of Artificial Sequence: Synthetic peptide
  XENP020651 vlCDR3
QQSNEDPFT

SEQ ID NO: 20165 - protein, 450 aa, Artificial Sequence; identical to SEQ ID NO: 17585
  Description of Artificial Sequence: Synthetic polypeptide
  XENP020652 7G8_H0_L0.48_IgG1_PVA_/S267K Heavy Chain

SEQ ID NO: 20166 - protein, 121 aa, Artificial Sequence; identical to SEQ ID NO: 17586
  Description of Artificial Sequence: Synthetic polypeptide
  VH of XENP020652

SEQ ID NO: 20167 - protein, 5 aa, Artificial Sequence
  Description of Artificial Sequence: Synthetic peptide
  XENP020652 vhCDR1
DAWMD

SEQ ID NO: 20168 - protein, 19 aa, Artificial Sequence
  Description of Artificial Sequence: Synthetic peptide
  XENP020652 vhCDR2
EIRTKANNHATYYAESVKG

SEQ ID NO: 20169 - protein, 10 aa, Artificial Sequence
  Description of Artificial Sequence: Synthetic peptide
  XENP020652 vhCDR3
LANWDWYFDV

SEQ ID NO: 20170 - protein, 218 aa, Artificial Sequence
  Description of Artificial Sequence: Synthetic polypeptide
  XENP020652 7G8_H0_L0.48_IgG1_PVA_/S267K Light Chain
DTVLTQSPASLAVSLGQRATISCKASQSVDYDGDSYMNWYQQKPGQPPKLLIYSASNLESGIPARLSGSGSGTDFTLNIHPVEEEDAATYYCQQSNEDPFTFGSGTKLEVKRTVAAPSVFIFPPSDEQLKSGTASVVCLLNNFYPREAKVQWKVDNALQSGNSQESVTEQDSKDSTYSLSSTLTLSKADYEKHKVYACEVTHQGLSSPVTKSFNRGEC

SEQ ID NO: 20171 - protein, 111 aa, Artificial Sequence
  Description of Artificial Sequence: Synthetic polypeptide
  VL of XENP020652
DTVLTQSPASLAVSLGQRATISCKASQSVDYDGDSYMNWYQQKPGQPPKLLIYSASNLESGIPARLSGSGSGTDFTLNIHPVEEEDAATYYCQQSNEDPFTFGSGTKLEVK

SEQ ID NO: 20172 - protein, 15 aa, Artificial Sequence
  Description of Artificial Sequence: Synthetic peptide
  XENP020652 vlCDR1
KASQSVDYDGDSYMN

SEQ ID NO: 20173 - protein, 7 aa, Artificial Sequence
  Description of Artificial Sequence: Synthetic peptide
  XENP020652 vlCDR2
SASNLES

SEQ ID NO: 20174 - protein, 9 aa, Artificial Sequence
  Description of Artificial Sequence: Synthetic peptide
  XENP020652 vlCDR3
QQSNEDPFT

SEQ ID NO: 20175 - protein, 450 aa, Artificial Sequence; identical to SEQ ID NO: 17585
  Description of Artificial Sequence: Synthetic polypeptide
  XENP020653 7G8_H0_L0.49_IgG1_PVA_/S267K Heavy Chain

SEQ ID NO: 20176 - protein, 121 aa, Artificial Sequence; identical to SEQ ID NO: 17586
  Description of Artificial Sequence: Synthetic polypeptide
  VH of XENP020653

SEQ ID NO: 20177 - protein, 5 aa, Artificial Sequence
  Description of Artificial Sequence: Synthetic peptide
  XENP020653 vhCDR1
DAWMD

SEQ ID NO: 20178 - protein, 19 aa, Artificial Sequence
  Description of Artificial Sequence: Synthetic peptide
  XENP020653 vhCDR2
EIRTKANNHATYYAESVKG

SEQ ID NO: 20179 - protein, 10 aa, Artificial Sequence
  Description of Artificial Sequence: Synthetic peptide
  XENP020653 vhCDR3
LANWDWYFDV

SEQ ID NO: 20180 - protein, 218 aa, Artificial Sequence
  Description of Artificial Sequence: Synthetic polypeptide
  XENP020653 7G8_H0_L0.49_IgG1_PVA_/S267K Light Chain
DTVLTQSPASLAVSLGQRATISCKASQSVDYDGDSYMNWYQQKPGQPPKLLIYTASNLESGIPARLSGSGSGTDFTLNIHPVEEEDAATYYCQQSNEDPFTFGSGTKLEVKRTVAAPSVFIFPPSDEQLKSGTASVVCLLNNFYPREAKVQWKVDNALQSGNSQESVTEQDSKDSTYSLSSTLTLSKADYEKHKVYACEVTHQGLSSPVTKSFNRGEC

SEQ ID NO: 20181 - protein, 111 aa, Artificial Sequence
  Description of Artificial Sequence: Synthetic polypeptide
  VL of XENP020653
DTVLTQSPASLAVSLGQRATISCKASQSVDYDGDSYMNWYQQKPGQPPKLLIYTASNLESGIPARLSGSGSGTDFTLNIHPVEEEDAATYYCQQSNEDPFTFGSGTKLEVK

SEQ ID NO: 20182 - protein, 15 aa, Artificial Sequence
  Description of Artificial Sequence: Synthetic peptide
  XENP020653 vlCDR1
KASQSVDYDGDSYMN

SEQ ID NO: 20183 - protein, 7 aa, Artificial Sequence
  Description of Artificial Sequence: Synthetic peptide
  XENP020653 vlCDR2
TASNLES

SEQ ID NO: 20184 - protein, 9 aa, Artificial Sequence
  Description of Artificial Sequence: Synthetic peptide
  XENP020653 vlCDR3
QQSNEDPFT

SEQ ID NO: 20185 - protein, 450 aa, Artificial Sequence; identical to SEQ ID NO: 17585
  Description of Artificial Sequence: Synthetic polypeptide
  XENP020654 7G8_H0_L0.50_IgG1_PVA_/S267K Heavy Chain

SEQ ID NO: 20186 - protein, 121 aa, Artificial Sequence; identical to SEQ ID NO: 17586
  Description of Artificial Sequence: Synthetic polypeptide
  VH of XENP020654

SEQ ID NO: 20187 - protein, 5 aa, Artificial Sequence
  Description of Artificial Sequence: Synthetic peptide
  XENP020654 vhCDR1
DAWMD

SEQ ID NO: 20188 - protein, 19 aa, Artificial Sequence
  Description of Artificial Sequence: Synthetic peptide
  XENP020654 vhCDR2
EIRTKANNHATYYAESVKG

SEQ ID NO: 20189 - protein, 10 aa, Artificial Sequence
  Description of Artificial Sequence: Synthetic peptide
  XENP020654 vhCDR3
LANWDWYFDV

SEQ ID NO: 20190 - protein, 218 aa, Artificial Sequence
  Description of Artificial Sequence: Synthetic polypeptide
  XENP020654 7G8_H0_L0.50_IgG1_PVA_/S267K Light Chain
DTVLTQSPASLAVSLGQRATISCKASQSVDYDGDSYMNWYQQKPGQPPKLLIYGASNLESGIPARLSGSGSGTDFTLNIHPVEEEDAATYYCQQSNEDPFTFGSGTKLEVKRTVAAPSVFIFPPSDEQLKSGTASVVCLLNNFYPREAKVQWKVDNALQSGNSQESVTEQDSKDSTYSLSSTLTLSKADYEKHKVYACEVTHQGLSSPVTKSFNRGEC

SEQ ID NO: 20191 - protein, 111 aa, Artificial Sequence
  Description of Artificial Sequence: Synthetic polypeptide
  VL of XENP020654
DTVLTQSPASLAVSLGQRATISCKASQSVDYDGDSYMNWYQQKPGQPPKLLIYGASNLESGIPARLSGSGSGTDFTLNIHPVEEEDAATYYCQQSNEDPFTFGSGTKLEVK

SEQ ID NO: 20192 - protein, 15 aa, Artificial Sequence
  Description of Artificial Sequence: Synthetic peptide
  XENP020654 vlCDR1
KASQSVDYDGDSYMN

SEQ ID NO: 20193 - protein, 7 aa, Artificial Sequence
  Description of Artificial Sequence: Synthetic peptide
  XENP020654 vlCDR2
GASNLES

SEQ ID NO: 20194 - protein, 9 aa, Artificial Sequence
  Description of Artificial Sequence: Synthetic peptide
  XENP020654 vlCDR3
QQSNEDPFT

SEQ ID NO: 20195 - protein, 450 aa, Artificial Sequence; identical to SEQ ID NO: 17585
  Description of Artificial Sequence: Synthetic polypeptide
  XENP020655 7G8_H0_L0.51_IgG1_PVA_/S267K Heavy Chain

SEQ ID NO: 20196 - protein, 121 aa, Artificial Sequence; identical to SEQ ID NO: 17586
  Description of Artificial Sequence: Synthetic polypeptide
  VH of XENP020655

SEQ ID NO: 20197 - protein, 5 aa, Artificial Sequence
  Description of Artificial Sequence: Synthetic peptide
  XENP020655 vhCDR1
DAWMD

SEQ ID NO: 20198 - protein, 19 aa, Artificial Sequence
  Description of Artificial Sequence: Synthetic peptide
  XENP020655 vhCDR2
EIRTKANNHATYYAESVKG

SEQ ID NO: 20199 - protein, 10 aa, Artificial Sequence
  Description of Artificial Sequence: Synthetic peptide
  XENP020655 vhCDR3
LANWDWYFDV

SEQ ID NO: 20200 - protein, 218 aa, Artificial Sequence
  Description of Artificial Sequence: Synthetic polypeptide
  XENP020655 7G8_H0_L0.51_IgG1_PVA_/S267K Light Chain
DTVLTQSPASLAVSLGQRATISCKASQSVDYDGDSYMNWYQQKPGQPPKLLIYHASNLESGIPARLSGSGSGTDFTLNIHPVEEEDAATYYCQQSNEDPFTFGSGTKLEVKRTVAAPSVFIFPPSDEQLKSGTASVVCLLNNFYPREAKVQWKVDNALQSGNSQESVTEQDSKDSTYSLSSTLTLSKADYEKHKVYACEVTHQGLSSPVTKSFNRGEC

SEQ ID NO: 20201 - protein, 111 aa, Artificial Sequence
  Description of Artificial Sequence: Synthetic polypeptide
  VL of XENP020655
DTVLTQSPASLAVSLGQRATISCKASQSVDYDGDSYMNWYQQKPGQPPKLLIYHASNLESGIPARLSGSGSGTDFTLNIHPVEEEDAATYYCQQSNEDPFTFGSGTKLEVK

SEQ ID NO: 20202 - protein, 15 aa, Artificial Sequence
  Description of Artificial Sequence: Synthetic peptide
  XENP020655 vlCDR1
KASQSVDYDGDSYMN

SEQ ID NO: 20203 - protein, 7 aa, Artificial Sequence
  Description of Artificial Sequence: Synthetic peptide
  XENP020655 vlCDR2
HASNLES

SEQ ID NO: 20204 - protein, 9 aa, Artificial Sequence
  Description of Artificial Sequence: Synthetic peptide
  XENP020655 vlCDR3
QQSNEDPFT

SEQ ID NO: 20205 - protein, 450 aa, Artificial Sequence; identical to SEQ ID NO: 17585
  Description of Artificial Sequence: Synthetic polypeptide
  XENP020656 7G8_H0_L0.52_IgG1_PVA_/S267K Heavy Chain

SEQ ID NO: 20206 - protein, 121 aa, Artificial Sequence; identical to SEQ ID NO: 17586
  Description of Artificial Sequence: Synthetic polypeptide
  VH of XENP020656

SEQ ID NO: 20207 - protein, 5 aa, Artificial Sequence
  Description of Artificial Sequence: Synthetic peptide
  XENP020656 vhCDR1
DAWMD

SEQ ID NO: 20208 - protein, 19 aa, Artificial Sequence
  Description of Artificial Sequence: Synthetic peptide
  XENP020656 vhCDR2
EIRTKANNHATYYAESVKG

SEQ ID NO: 20209 - protein, 10 aa, Artificial Sequence
  Description of Artificial Sequence: Synthetic peptide
  XENP020656 vhCDR3
LANWDWYFDV

SEQ ID NO: 20210 - protein, 218 aa, Artificial Sequence
  Description of Artificial Sequence: Synthetic polypeptide
  XENP020656 7G8_H0_L0.52_IgG1_PVA_/S267K Light Chain
DTVLTQSPASLAVSLGQRATISCKASQSVDYDGDSYMNWYQQKPGQPPKLLIYQASNLESGIPARLSGSGSGTDFTLNIHPVEEEDAATYYCQQSNEDPFTFGSGTKLEVKRTVAAPSVFIFPPSDEQLKSGTASVVCLLNNFYPREAKVQWKVDNALQSGNSQESVTEQDSKDSTYSLSSTLTLSKADYEKHKVYACEVTHQGLSSPVTKSFNRGEC

SEQ ID NO: 20211 - protein, 111 aa, Artificial Sequence
  Description of Artificial Sequence: Synthetic polypeptide
  VL of XENP020656
DTVLTQSPASLAVSLGQRATISCKASQSVDYDGDSYMNWYQQKPGQPPKLLIYQASNLESGIPARLSGSGSGTDFTLNIHPVEEEDAATYYCQQSNEDPFTFGSGTKLEVK

SEQ ID NO: 20212 - protein, 15 aa, Artificial Sequence
  Description of Artificial Sequence: Synthetic peptide
  XENP020656 vlCDR1
KASQSVDYDGDSYMN

SEQ ID NO: 20213 - protein, 7 aa, Artificial Sequence
  Description of Artificial Sequence: Synthetic peptide
  XENP020656 vlCDR2
QASNLES

SEQ ID NO: 20214 - protein, 9 aa, Artificial Sequence
  Description of Artificial Sequence: Synthetic peptide
  XENP020656 vlCDR3
QQSNEDPFT

SEQ ID NO: 20215 - protein, 450 aa, Artificial Sequence; identical to SEQ ID NO: 17585
  Description of Artificial Sequence: Synthetic polypeptide
  XENP020657 7G8_H0_L0.53_IgG1_PVA_/S267K Heavy Chain

SEQ ID NO: 20216 - protein, 121 aa, Artificial Sequence; identical to SEQ ID NO: 17586
  Description of Artificial Sequence: Synthetic polypeptide
  VH of XENP020657

SEQ ID NO: 20217 - protein, 5 aa, Artificial Sequence
  Description of Artificial Sequence: Synthetic peptide
  XENP020657 vhCDR1
DAWMD

SEQ ID NO: 20218 - protein, 19 aa, Artificial Sequence
  Description of Artificial Sequence: Synthetic peptide
  XENP020657 vhCDR2
EIRTKANNHATYYAESVKG

SEQ ID NO: 20219 - protein, 10 aa, Artificial Sequence
  Description of Artificial Sequence: Synthetic peptide
  XENP020657 vhCDR3
LANWDWYFDV

SEQ ID NO: 20220 - protein, 218 aa, Artificial Sequence
  Description of Artificial Sequence: Synthetic polypeptide
  XENP020657 7G8_H0_L0.53_IgG1_PVA_/S267K Light Chain
DTVLTQSPASLAVSLGQRATISCKASQSVDYDGDSYMNWYQQKPGQPPKLLIYDASNLESGIPARLSGSGSGTDFTLNIHPVEEEDAATYYCQQSNEDPFTFGSGTKLEVKRTVAAPSVFIFPPSDEQLKSGTASVVCLLNNFYPREAKVQWKVDNALQSGNSQESVTEQDSKDSTYSLSSTLTLSKADYEKHKVYACEVTHQGLSSPVTKSFNRGEC

SEQ ID NO: 20221 - protein, 111 aa, Artificial Sequence
  Description of Artificial Sequence: Synthetic polypeptide
  VL of XENP020657
DTVLTQSPASLAVSLGQRATISCKASQSVDYDGDSYMNWYQQKPGQPPKLLIYDASNLESGIPARLSGSGSGTDFTLNIHPVEEEDAATYYCQQSNEDPFTFGSGTKLEVK

SEQ ID NO: 20222 - protein, 15 aa, Artificial Sequence
  Description of Artificial Sequence: Synthetic peptide
  XENP020657 vlCDR1
KASQSVDYDGDSYMN

SEQ ID NO: 20223 - protein, 7 aa, Artificial Sequence
  Description of Artificial Sequence: Synthetic peptide
  XENP020657 vlCDR2
DASNLES

SEQ ID NO: 20224 - protein, 9 aa, Artificial Sequence
  Description of Artificial Sequence: Synthetic peptide
  XENP020657 vlCDR3
QQSNEDPFT

SEQ ID NO: 20225 - protein, 450 aa, Artificial Sequence; identical to SEQ ID NO: 17585
  Description of Artificial Sequence: Synthetic polypeptide
  XENP020658 7G8_H0_L0.54_IgG1_PVA_/S267K Heavy Chain

SEQ ID NO: 20226 - protein, 121 aa, Artificial Sequence; identical to SEQ ID NO: 17586
  Description of Artificial Sequence: Synthetic polypeptide
  VH of XENP020658

SEQ ID NO: 20227 - protein, 5 aa, Artificial Sequence
  Description of Artificial Sequence: Synthetic peptide
  XENP020658 vhCDR1
DAWMD

SEQ ID NO: 20228 - protein, 19 aa, Artificial Sequence
  Description of Artificial Sequence: Synthetic peptide
  XENP020658 vhCDR2
EIRTKANNHATYYAESVKG

SEQ ID NO: 20229 - protein, 10 aa, Artificial Sequence
  Description of Artificial Sequence: Synthetic peptide
  XENP020658 vhCDR3
LANWDWYFDV

SEQ ID NO: 20230 - protein, 218 aa, Artificial Sequence
  Description of Artificial Sequence: Synthetic polypeptide
  XENP020658 7G8_H0_L0.54_IgG1_PVA_/S267K Light Chain
DTVLTQSPASLAVSLGQRATISCKASQSVDYDGDSYMNWYQQKPGQPPKLLIYLASNLESGIPARLSGSGSGTDFTLNIHPVEEEDAATYYCQQSNEDPFTFGSGTKLEVKRTVAAPSVFIFPPSDEQLKSGTASVVCLLNNFYPREAKVQWKVDNALQSGNSQESVTEQDSKDSTYSLSSTLTLSKADYEKHKVYACEVTHQGLSSPVTKSFNRGEC

SEQ ID NO: 20231 - protein, 111 aa, Artificial Sequence
  Description of Artificial Sequence: Synthetic polypeptide
  VL of XENP020658
DTVLTQSPASLAVSLGQRATISCKASQSVDYDGDSYMNWYQQKPGQPPKLLIYLASNLESGIPARLSGSGSGTDFTLNIHPVEEEDAATYYCQQSNEDPFTFGSGTKLEVK

SEQ ID NO: 20232 - protein, 15 aa, Artificial Sequence
  Description of Artificial Sequence: Synthetic peptide
  XENP020658 vlCDR1
KASQSVDYDGDSYMN

SEQ ID NO: 20233 - protein, 7 aa, Artificial Sequence
  Description of Artificial Sequence: Synthetic peptide
  XENP020658 vlCDR2
LASNLES

SEQ ID NO: 20234 - protein, 9 aa, Artificial Sequence
  Description of Artificial Sequence: Synthetic peptide
  XENP020658 vlCDR3
QQSNEDPFT

SEQ ID NO: 20235 - protein, 450 aa, Artificial Sequence; identical to SEQ ID NO: 17585
  Description of Artificial Sequence: Synthetic polypeptide
  XENP020659 7G8_H0_L0.55_IgG1_PVA_/S267K Heavy Chain

SEQ ID NO: 20236 - protein, 121 aa, Artificial Sequence; identical to SEQ ID NO: 17586
  Description of Artificial Sequence: Synthetic polypeptide
  VH of XENP020659

SEQ ID NO: 20237 - protein, 5 aa, Artificial Sequence
  Description of Artificial Sequence: Synthetic peptide
  XENP020659 vhCDR1
DAWMD

SEQ ID NO: 20238 - protein, 19 aa, Artificial Sequence
  Description of Artificial Sequence: Synthetic peptide
  XENP020659 vhCDR2
EIRTKANNHATYYAESVKG

SEQ ID NO: 20239 - protein, 10 aa, Artificial Sequence
  Description of Artificial Sequence: Synthetic peptide
  XENP020659 vhCDR3
LANWDWYFDV

SEQ ID NO: 20240 - protein, 218 aa, Artificial Sequence
  Description of Artificial Sequence: Synthetic polypeptide
  XENP020659 7G8_H0_L0.55_IgG1_PVA_/S267K Light Chain
DTVLTQSPASLAVSLGQRATISCKASQSVDYDGDSYMNWYQQKPGQPPKLLIYKASNLESGIPARLSGSGSGTDFTLNIHPVEEEDAATYYCQQSNEDPFTFGSGTKLEVKRTVAAPSVFIFPPSDEQLKSGTASVVCLLNNFYPREAKVQWKVDNALQSGNSQESVTEQDSKDSTYSLSSTLTLSKADYEKHKVYACEVTHQGLSSPVTKSFNRGEC

SEQ ID NO: 20241 - protein, 111 aa, Artificial Sequence
  Description of Artificial Sequence: Synthetic polypeptide
  VL of XENP020659
DTVLTQSPASLAVSLGQRATISCKASQSVDYDGDSYMNWYQQKPGQPPKLLIYKASNLESGIPARLSGSGSGTDFTLNIHPVEEEDAATYYCQQSNEDPFTFGSGTKLEVK

SEQ ID NO: 20242 - protein, 15 aa, Artificial Sequence
  Description of Artificial Sequence: Synthetic peptide
  XENP020659 vlCDR1
KASQSVDYDGDSYMN

SEQ ID NO: 20243 - protein, 7 aa, Artificial Sequence
  Description of Artificial Sequence: Synthetic peptide
  XENP020659 vlCDR2
KASNLES

SEQ ID NO: 20244 - protein, 9 aa, Artificial Sequence
  Description of Artificial Sequence: Synthetic peptide
  XENP020659 vlCDR3
QQSNEDPFT

SEQ ID NO: 20245 - protein, 450 aa, Artificial Sequence; identical to SEQ ID NO: 17585
  Description of Artificial Sequence: Synthetic polypeptide
  XENP020660 7G8_H0_L0.56_IgG1_PVA_/S267K Heavy Chain

SEQ ID NO: 20246 - protein, 121 aa, Artificial Sequence; identical to SEQ ID NO: 17586
  Description of Artificial Sequence: Synthetic polypeptide
  VH of XENP020660

SEQ ID NO: 20247 - protein, 5 aa, Artificial Sequence
  Description of Artificial Sequence: Synthetic peptide
  XENP020660 vhCDR1
DAWMD

SEQ ID NO: 20248 - protein, 19 aa, Artificial Sequence
  Description of Artificial Sequence: Synthetic peptide
  XENP020660 vhCDR2
EIRTKANNHATYYAESVKG

SEQ ID NO: 20249 - protein, 10 aa, Artificial Sequence
  Description of Artificial Sequence: Synthetic peptide
  XENP020660 vhCDR3
LANWDWYFDV

SEQ ID NO: 20250 - protein, 218 aa, Artificial Sequence
  Description of Artificial Sequence: Synthetic polypeptide
  XENP020660 7G8_H0_L0.56_IgG1_PVA_/S267K Light Chain
DTVLTQSPASLAVSLGQRATISCKASQSVDYDGDSYMNWYQQKPGQPPKLLIYYASNLESGIPARLSGSGSGTDFTLNIHPVEEEDAATYYCQQSNEDPFTFGSGTKLEVKRTVAAPSVFIFPPSDEQLKSGTASVVCLLNNFYPREAKVQWKVDNALQSGNSQESVTEQDSKDSTYSLSSTLTLSKADYEKHKVYACEVTHQGLSSPVTKSFNRGEC

SEQ ID NO: 20251 - protein, 111 aa, Artificial Sequence
  Description of Artificial Sequence: Synthetic polypeptide
  VL of XENP020660
DTVLTQSPASLAVSLGQRATISCKASQSVDYDGDSYMNWYQQKPGQPPKLLIYYASNLESGIPARLSGSGSGTDFTLNIHPVEEEDAATYYCQQSNEDPFTFGSGTKLEVK

SEQ ID NO: 20252 - protein, 15 aa, Artificial Sequence
  Description of Artificial Sequence: Synthetic peptide
  XENP020660 vlCDR1
KASQSVDYDGDSYMN

SEQ ID NO: 20253 - protein, 7 aa, Artificial Sequence
  Description of Artificial Sequence: Synthetic peptide
  XENP020660 vlCDR2
YASNLES

SEQ ID NO: 20254 - protein, 9 aa, Artificial Sequence
  Description of Artificial Sequence: Synthetic peptide
  XENP020660 vlCDR3
QQSNEDPFT

SEQ ID NO: 20255 - protein, 450 aa, Artificial Sequence; identical to SEQ ID NO: 17585
  Description of Artificial Sequence: Synthetic polypeptide
  XENP020661 7G8_H0_L0.57_IgG1_PVA_/S267K Heavy Chain

SEQ ID NO: 20256 - protein, 121 aa, Artificial Sequence; identical to SEQ ID NO: 17586
  Description of Artificial Sequence: Synthetic polypeptide
  VH of XENP020661

SEQ ID NO: 20257 - protein, 5 aa, Artificial Sequence
  Description of Artificial Sequence: Synthetic peptide
  XENP020661 vhCDR1
DAWMD

SEQ ID NO: 20258 - protein, 19 aa, Artificial Sequence
  Description of Artificial Sequence: Synthetic peptide
  XENP020661 vhCDR2
EIRTKANNHATYYAESVKG

SEQ ID NO: 20259 - protein, 10 aa, Artificial Sequence
  Description of Artificial Sequence: Synthetic peptide
  XENP020661 vhCDR3
LANWDWYFDV

SEQ ID NO: 20260 - protein, 218 aa, Artificial Sequence
  Description of Artificial Sequence: Synthetic polypeptide
  XENP020661 7G8_H0_L0.57_IgG1_PVA_/S267K Light Chain
DTVLTQSPASLAVSLGQRATISCKASQSVDYDGDSYMNWYQQKPGQPPKLLIYAASDLESGIPARLSGSGSGTDFTLNIHPVEEEDAATYYCQQSNEDPFTFGSGTKLEVKRTVAAPSVFIFPPSDEQLKSGTASVVCLLNNFYPREAKVQWKVDNALQSGNSQESVTEQDSKDSTYSLSSTLTLSKADYEKHKVYACEVTHQGLSSPVTKSFNRGEC

SEQ ID NO: 20261 - protein, 111 aa, Artificial Sequence
  Description of Artificial Sequence: Synthetic polypeptide
  VL of XENP020661
DTVLTQSPASLAVSLGQRATISCKASQSVDYDGDSYMNWYQQKPGQPPKLLIYAASDLESGIPARLSGSGSGTDFTLNIHPVEEEDAATYYCQQSNEDPFTFGSGTKLEVK

SEQ ID NO: 20262 - protein, 15 aa, Artificial Sequence
  Description of Artificial Sequence: Synthetic peptide
  XENP020661 vlCDR1
KASQSVDYDGDSYMN

SEQ ID NO: 20263 - protein, 7 aa, Artificial Sequence
  Description of Artificial Sequence: Synthetic peptide
  XENP020661 vlCDR2
AASDLES

SEQ ID NO: 20264 - protein, 9 aa, Artificial Sequence
  Description of Artificial Sequence: Synthetic peptide
  XENP020661 vlCDR3
QQSNEDPFT

SEQ ID NO: 20265 - protein, 450 aa, Artificial Sequence; identical to SEQ ID NO: 17585
  Description of Artificial Sequence: Synthetic polypeptide
  XENP020662 7G8_H0_L0.58_IgG1_PVA_/S267K Heavy Chain

SEQ ID NO: 20266 - protein, 121 aa, Artificial Sequence; identical to SEQ ID NO: 17586
  Description of Artificial Sequence: Synthetic polypeptide
  VH of XENP020662

SEQ ID NO: 20267 - protein, 5 aa, Artificial Sequence
  Description of Artificial Sequence: Synthetic peptide
  XENP020662 vhCDR1
DAWMD

SEQ ID NO: 20268 - protein, 19 aa, Artificial Sequence
  Description of Artificial Sequence: Synthetic peptide
  XENP020662 vhCDR2
EIRTKANNHATYYAESVKG

SEQ ID NO: 20269 - protein, 10 aa, Artificial Sequence
  Description of Artificial Sequence: Synthetic peptide
  XENP020662 vhCDR3
LANWDWYFDV

SEQ ID NO: 20270 - protein, 218 aa, Artificial Sequence
  Description of Artificial Sequence: Synthetic polypeptide
  XENP020662 7G8_H0_L0.58_IgG1_PVA_/S267K Light Chain
DTVLTQSPASLAVSLGQRATISCKASQSVDYDGDSYMNWYQQKPGQPPKLLIYAASHLESGIPARLSGSGSGTDFTLNIHPVEEEDAATYYCQQSNEDPFTFGSGTKLEVKRTVAAPSVFIFPPSDEQLKSGTASVVCLLNNFYPREAKVQWKVDNALQSGNSQESVTEQDSKDSTYSLSSTLTLSKADYEKHKVYACEVTHQGLSSPVTKSFNRGEC

SEQ ID NO: 20271 - protein, 111 aa, Artificial Sequence
  Description of Artificial Sequence: Synthetic polypeptide
  VL of XENP020662
DTVLTQSPASLAVSLGQRATISCKASQSVDYDGDSYMNWYQQKPGQPPKLLIYAASHLESGIPARLSGSGSGTDFTLNIHPVEEEDAATYYCQQSNEDPFTFGSGTKLEVK

SEQ ID NO: 20272 - protein, 15 aa, Artificial Sequence
  Description of Artificial Sequence: Synthetic peptide
  XENP020662 vlCDR1
KASQSVDYDGDSYMN

SEQ ID NO: 20273 - protein, 7 aa, Artificial Sequence
  Description of Artificial Sequence: Synthetic peptide
  XENP020662 vlCDR2
AASHLES

SEQ ID NO: 20274 - protein, 9 aa, Artificial Sequence
  Description of Artificial Sequence: Synthetic peptide
  XENP020662 vlCDR3
QQSNEDPFT

SEQ ID NO: 20275 - protein, 450 aa, Artificial Sequence; identical to SEQ ID NO: 17585
  Description of Artificial Sequence: Synthetic polypeptide
  XENP020663 7G8_H0_L0.59_IgG1_PVA_/S267K Heavy Chain

SEQ ID NO: 20276 - protein, 121 aa, Artificial Sequence; identical to SEQ ID NO: 17586
  Description of Artificial Sequence: Synthetic polypeptide
  VH of XENP020663

SEQ ID NO: 20277 - protein, 5 aa, Artificial Sequence
  Description of Artificial Sequence: Synthetic peptide
  XENP020663 vhCDR1
DAWMD

SEQ ID NO: 20278 - protein, 19 aa, Artificial Sequence
  Description of Artificial Sequence: Synthetic peptide
  XENP020663 vhCDR2
EIRTKANNHATYYAESVKG

SEQ ID NO: 20279 - protein, 10 aa, Artificial Sequence
  Description of Artificial Sequence: Synthetic peptide
  XENP020663 vhCDR3
LANWDWYFDV

SEQ ID NO: 20280 - protein, 218 aa, Artificial Sequence
  Description of Artificial Sequence: Synthetic polypeptide
  XENP020663 7G8_H0_L0.59_IgG1_PVA_/S267K Light Chain
DTVLTQSPASLAVSLGQRATISCKASQSVDYDGDSYMNWYQQKPGQPPKLLIYAASELESGIPARLSGSGSGTDFTLNIHPVEEEDAATYYCQQSNEDPFTFGSGTKLEVKRTVAAPSVFIFPPSDEQLKSGTASVVCLLNNFYPREAKVQWKVDNALQSGNSQESVTEQDSKDSTYSLSSTLTLSKADYEKHKVYACEVTHQGLSSPVTKSFNRGEC

SEQ ID NO: 20281 - protein, 111 aa, Artificial Sequence
  Description of Artificial Sequence: Synthetic polypeptide
  VL of XENP020663
DTVLTQSPASLAVSLGQRATISCKASQSVDYDGDSYMNWYQQKPGQPPKLLIYAASELESGIPARLSGSGSGTDFTLNIHPVEEEDAATYYCQQSNEDPFTFGSGTKLEVK

SEQ ID NO: 20282 - protein, 15 aa, Artificial Sequence
  Description of Artificial Sequence: Synthetic peptide
  XENP020663 vlCDR1
KASQSVDYDGDSYMN

SEQ ID NO: 20283 - protein, 7 aa, Artificial Sequence
  Description of Artificial Sequence: Synthetic peptide
  XENP020663 vlCDR2
AASELES

SEQ ID NO: 20284 - protein, 9 aa, Artificial Sequence
  Description of Artificial Sequence: Synthetic peptide
  XENP020663 vlCDR3
QQSNEDPFT

SEQ ID NO: 20285 - protein, 450 aa, Artificial Sequence; identical to SEQ ID NO: 17585
  Description of Artificial Sequence: Synthetic polypeptide
  XENP020664 7G8_H0_L0.60_IgG1_PVA_/S267K Heavy Chain

SEQ ID NO: 20286 - protein, 121 aa, Artificial Sequence; identical to SEQ ID NO: 17586
  Description of Artificial Sequence: Synthetic polypeptide
  VH of XENP020664

SEQ ID NO: 20287 - protein, 5 aa, Artificial Sequence
  Description of Artificial Sequence: Synthetic peptide
  XENP020664 vhCDR1
DAWMD

SEQ ID NO: 20288 - protein, 19 aa, Artificial Sequence
  Description of Artificial Sequence: Synthetic peptide
  XENP020664 vhCDR2
EIRTKANNHATYYAESVKG

SEQ ID NO: 20289 - protein, 10 aa, Artificial Sequence
  Description of Artificial Sequence: Synthetic peptide
  XENP020664 vhCDR3
LANWDWYFDV

SEQ ID NO: 20290 - protein, 218 aa, Artificial Sequence
  Description of Artificial Sequence: Synthetic polypeptide
  XENP020664 7G8_H0_L0.60_IgG1_PVA_/S267K Light Chain
DTVLTQSPASLAVSLGQRATISCKASQSVDYDGDSYMNWYQQKPGQPPKLLIYAASSLESGIPARLSGSGSGTDFTLNIHPVEEEDAATYYCQQSNEDPFTFGSGTKLEVKRTVAAPSVFIFPPSDEQLKSGTASVVCLLNNFYPREAKVQWKVDNALQSGNSQESVTEQDSKDSTYSLSSTLTLSKADYEKHKVYACEVTHQGLSSPVTKSFNRGEC

SEQ ID NO: 20291 - protein, 111 aa, Artificial Sequence
  Description of Artificial Sequence: Synthetic polypeptide
  VL of XENP020664
DTVLTQSPASLAVSLGQRATISCKASQSVDYDGDSYMNWYQQKPGQPPKLLIYAASSLESGIPARLSGSGSGTDFTLNIHPVEEEDAATYYCQQSNEDPFTFGSGTKLEVK

SEQ ID NO: 20292 - protein, 15 aa, Artificial Sequence
  Description of Artificial Sequence: Synthetic peptide
  XENP020664 vlCDR1
KASQSVDYDGDSYMN

SEQ ID NO: 20293 - protein, 7 aa, Artificial Sequence
  Description of Artificial Sequence: Synthetic peptide
  XENP020664 vlCDR2
AASSLES

SEQ ID NO: 20294 - protein, 9 aa, Artificial Sequence
  Description of Artificial Sequence: Synthetic peptide
  XENP020664 vlCDR3
QQSNEDPFT

SEQ ID NO: 20295 - protein, 450 aa, Artificial Sequence; identical to SEQ ID NO: 17585
  Description of Artificial Sequence: Synthetic polypeptide
  XENP020665 7G8_H0_L0.61_IgG1_PVA_/S267K Heavy Chain

SEQ ID NO: 20296 - protein, 121 aa, Artificial Sequence; identical to SEQ ID NO: 17586
  Description of Artificial Sequence: Synthetic polypeptide
  VH of XENP020665

SEQ ID NO: 20297 - protein, 5 aa, Artificial Sequence
  Description of Artificial Sequence: Synthetic peptide
  XENP020665 vhCDR1
DAWMD

SEQ ID NO: 20298 - protein, 19 aa, Artificial Sequence
  Description of Artificial Sequence: Synthetic peptide
  XENP020665 vhCDR2
EIRTKANNHATYYAESVKG

SEQ ID NO: 20299 - protein, 10 aa, Artificial Sequence
  Description of Artificial Sequence: Synthetic peptide
  XENP020665 vhCDR3
LANWDWYFDV

SEQ ID NO: 20300 - protein, 218 aa, Artificial Sequence
  Description of Artificial Sequence: Synthetic polypeptide
  XENP020665 7G8_H0_L0.61_IgG1_PVA_/S267K Light Chain
DTVLTQSPASLAVSLGQRATISCKASQSVDYDGDSYMNWYQQKPGQPPKLLIYAASRLESGIPARLSGSGSGTDFTLNIHPVEEEDAATYYCQQSNEDPFTFGSGTKLEVKRTVAAPSVFIFPPSDEQLKSGTASVVCLLNNFYPREAKVQWKVDNALQSGNSQESVTEQDSKDSTYSLSSTLTLSKADYEKHKVYACEVTHQGLSSPVTKSFNRGEC

SEQ ID NO: 20301 - protein, 111 aa, Artificial Sequence
  Description of Artificial Sequence: Synthetic polypeptide
  VL of XENP020665
DTVLTQSPASLAVSLGQRATISCKASQSVDYDGDSYMNWYQQKPGQPPKLLIYAASRLESGIPARLSGSGSGTDFTLNIHPVEEEDAATYYCQQSNEDPFTFGSGTKLEVK

SEQ ID NO: 20302 - protein, 15 aa, Artificial Sequence
  Description of Artificial Sequence: Synthetic peptide
  XENP020665 vlCDR1
KASQSVDYDGDSYMN

SEQ ID NO: 20303 - protein, 7 aa, Artificial Sequence
  Description of Artificial Sequence: Synthetic peptide
  XENP020665 vlCDR2
AASRLES

SEQ ID NO: 20304 - protein, 9 aa, Artificial Sequence
  Description of Artificial Sequence: Synthetic peptide
  XENP020665 vlCDR3
QQSNEDPFT

SEQ ID NO: 20305 - protein, 450 aa, Artificial Sequence; identical to SEQ ID NO: 17585
  Description of Artificial Sequence: Synthetic polypeptide
  XENP020666 7G8_H0_L0.62_IgG1_PVA_/S267K Heavy Chain

SEQ ID NO: 20306 - protein, 121 aa, Artificial Sequence; identical to SEQ ID NO: 17586
  Description of Artificial Sequence: Synthetic polypeptide
  VH of XENP020666

SEQ ID NO: 20307 - protein, 5 aa, Artificial Sequence
  Description of Artificial Sequence: Synthetic peptide
  XENP020666 vhCDR1
DAWMD

SEQ ID NO: 20308 - protein, 19 aa, Artificial Sequence
  Description of Artificial Sequence: Synthetic peptide
  XENP020666 vhCDR2
EIRTKANNHATYYAESVKG

SEQ ID NO: 20309 - protein, 10 aa, Artificial Sequence
  Description of Artificial Sequence: Synthetic peptide
  XENP020666 vhCDR3
LANWDWYFDV

SEQ ID NO: 20310 - protein, 218 aa, Artificial Sequence
  Description of Artificial Sequence: Synthetic polypeptide
  XENP020666 7G8_H0_L0.62_IgG1_PVA_/S267K Light Chain
DTVLTQSPASLAVSLGQRATISCKASQSVDYDGDSYMNWYQQKPGQPPKLLIYAASLLESGIPARLSGSGSGTDFTLNIHPVEEEDAATYYCQQSNEDPFTFGSGTKLEVKRTVAAPSVFIFPPSDEQLKSGTASVVCLLNNFYPREAKVQWKVDNALQSGNSQESVTEQDSKDSTYSLSSTLTLSKADYEKHKVYACEVTHQGLSSPVTKSFNRGEC

SEQ ID NO: 20311 - protein, 111 aa, Artificial Sequence
  Description of Artificial Sequence: Synthetic polypeptide
  VL of XENP020666
DTVLTQSPASLAVSLGQRATISCKASQSVDYDGDSYMNWYQQKPGQPPKLLIYAASLLESGIPARLSGSGSGTDFTLNIHPVEEEDAATYYCQQSNEDPFTFGSGTKLEVK

SEQ ID NO: 20312 - protein, 15 aa, Artificial Sequence
  Description of Artificial Sequence: Synthetic peptide
  XENP020666 vlCDR1
KASQSVDYDGDSYMN

SEQ ID NO: 20313 - protein, 7 aa, Artificial Sequence
  Description of Artificial Sequence: Synthetic peptide
  XENP020666 vlCDR2
AASLLES

SEQ ID NO: 20314 - protein, 9 aa, Artificial Sequence
  Description of Artificial Sequence: Synthetic peptide
  XENP020666 vlCDR3
QQSNEDPFT

SEQ ID NO: 20315 - protein, 450 aa, Artificial Sequence; identical to SEQ ID NO: 17585
  Description of Artificial Sequence: Synthetic polypeptide
  XENP020667 7G8_H0_L0.63_IgG1_PVA_/S267K Heavy Chain

SEQ ID NO: 20316 - protein, 121 aa, Artificial Sequence; identical to SEQ ID NO: 17586
  Description of Artificial Sequence: Synthetic polypeptide
  VH of XENP020667

SEQ ID NO: 20317 - protein, 5 aa, Artificial Sequence
  Description of Artificial Sequence: Synthetic peptide
  XENP020667 vhCDR1
DAWMD

SEQ ID NO: 20318 - protein, 19 aa, Artificial Sequence
  Description of Artificial Sequence: Synthetic peptide
  XENP020667 vhCDR2
EIRTKANNHATYYAESVKG

SEQ ID NO: 20319 - protein, 10 aa, Artificial Sequence
  Description of Artificial Sequence: Synthetic peptide
  XENP020667 vhCDR3
LANWDWYFDV

SEQ ID NO: 20320 - protein, 218 aa, Artificial Sequence
  Description of Artificial Sequence: Synthetic polypeptide
  XENP020667 7G8_H0_L0.63_IgG1_PVA_/S267K Light Chain
DTVLTQSPASLAVSLGQRATISCKASQSVDYDGDSYMNWYQQKPGQPPKLLIYAASTLESGIPARLSGSGSGTDFTLNIHPVEEEDAATYYCQQSNEDPFTFGSGTKLEVKRTVAAPSVFIFPPSDEQLKSGTASVVCLLNNFYPREAKVQWKVDNALQSGNSQESVTEQDSKDSTYSLSSTLTLSKADYEKHKVYACEVTHQGLSSPVTKSFNRGEC

SEQ ID NO: 20321 - protein, 111 aa, Artificial Sequence
  Description of Artificial Sequence: Synthetic polypeptide
  VL of XENP020667
DTVLTQSPASLAVSLGQRATISCKASQSVDYDGDSYMNWYQQKPGQPPKLLIYAASTLESGIPARLSGSGSGTDFTLNIHPVEEEDAATYYCQQSNEDPFTFGSGTKLEVK

SEQ ID NO: 20322 - protein, 15 aa, Artificial Sequence
  Description of Artificial Sequence: Synthetic peptide
  XENP020667 vlCDR1
KASQSVDYDGDSYMN

SEQ ID NO: 20323 - protein, 7 aa, Artificial Sequence
  Description of Artificial Sequence: Synthetic peptide
  XENP020667 vlCDR2
AASTLES

SEQ ID NO: 20324 - protein, 9 aa, Artificial Sequence
  Description of Artificial Sequence: Synthetic peptide
  XENP020667 vlCDR3
QQSNEDPFT

SEQ ID NO: 20325 - protein, 450 aa, Artificial Sequence; identical to SEQ ID NO: 17585
  Description of Artificial Sequence: Synthetic polypeptide
  XENP020668 7G8_H0_L0.64_IgG1_PVA_/S267K Heavy Chain

SEQ ID NO: 20326 - protein, 121 aa, Artificial Sequence; identical to SEQ ID NO: 17586
  Description of Artificial Sequence: Synthetic polypeptide
  VH of XENP020668

SEQ ID NO: 20327 - protein, 5 aa, Artificial Sequence
  Description of Artificial Sequence: Synthetic peptide
  XENP020668 vhCDR1
DAWMD

SEQ ID NO: 20328 - protein, 19 aa, Artificial Sequence
  Description of Artificial Sequence: Synthetic peptide
  XENP020668 vhCDR2
EIRTKANNHATYYAESVKG

SEQ ID NO: 20329 - protein, 10 aa, Artificial Sequence
  Description of Artificial Sequence: Synthetic peptide
  XENP020668 vhCDR3
LANWDWYFDV

SEQ ID NO: 20330 - protein, 218 aa, Artificial Sequence
  Description of Artificial Sequence: Synthetic polypeptide
  XENP020668 7G8_H0_L0.64_IgG1_PVA_/S267K Light Chain
DTVLTQSPASLAVSLGQRATISCKASQSVDYDGDSYMNWYQQKPGQPPKLLIYAASGLESGIPARLSGSGSGTDFTLNIHPVEEEDAATYYCQQSNEDPFTFGSGTKLEVKRTVAAPSVFIFPPSDEQLKSGTASVVCLLNNFYPREAKVQWKVDNALQSGNSQESVTEQDSKDSTYSLSSTLTLSKADYEKHKVYACEVTHQGLSSPVTKSFNRGEC

SEQ ID NO: 20331 - protein, 111 aa, Artificial Sequence
  Description of Artificial Sequence: Synthetic polypeptide
  VL of XENP020668
DTVLTQSPASLAVSLGQRATISCKASQSVDYDGDSYMNWYQQKPGQPPKLLIYAASGLESGIPARLSGSGSGTDFTLNIHPVEEEDAATYYCQQSNEDPFTFGSGTKLEVK

SEQ ID NO: 20332 - protein, 15 aa, Artificial Sequence
  Description of Artificial Sequence: Synthetic peptide
  XENP020668 vlCDR1
KASQSVDYDGDSYMN

SEQ ID NO: 20333 - protein, 7 aa, Artificial Sequence
  Description of Artificial Sequence: Synthetic peptide
  XENP020668 vlCDR2
AASGLES

SEQ ID NO: 20334 - protein, 9 aa, Artificial Sequence
  Description of Artificial Sequence: Synthetic peptide
  XENP020668 vlCDR3
QQSNEDPFT

SEQ ID NO: 20335 - protein, 450 aa, Artificial Sequence; identical to SEQ ID NO: 17585
  Description of Artificial Sequence: Synthetic polypeptide
  XENP020669 7G8_H0_L0.65_IgG1_PVA_/S267K Heavy Chain

SEQ ID NO: 20336 - protein, 121 aa, Artificial Sequence; identical to SEQ ID NO: 17586
  Description of Artificial Sequence: Synthetic polypeptide
  VH of XENP020669

SEQ ID NO: 20337 - protein, 5 aa, Artificial Sequence
  Description of Artificial Sequence: Synthetic peptide
  XENP020669 vhCDR1
DAWMD

SEQ ID NO: 20338 - protein, 19 aa, Artificial Sequence
  Description of Artificial Sequence: Synthetic peptide
  XENP020669 vhCDR2
EIRTKANNHATYYAESVKG

SEQ ID NO: 20339 - protein, 10 aa, Artificial Sequence
  Description of Artificial Sequence: Synthetic peptide
  XENP020669 vhCDR3
LANWDWYFDV

SEQ ID NO: 20340 - protein, 218 aa, Artificial Sequence
  Description of Artificial Sequence: Synthetic polypeptide
  XENP020669 7G8_H0_L0.65_IgG1_PVA_/S267K Light Chain
DTVLTQSPASLAVSLGQRATISCKASQSVDYDGDSYMNWYQQKPGQPPKLLIYAASYLESGIPARLSGSGSGTDFTLNIHPVEEEDAATYYCQQSNEDPFTFGSGTKLEVKRTVAAPSVFIFPPSDEQLKSGTASVVCLLNNFYPREAKVQWKVDNALQSGNSQESVTEQDSKDSTYSLSSTLTLSKADYEKHKVYACEVTHQGLSSPVTKSFNRGEC

SEQ ID NO: 20341 - protein, 111 aa, Artificial Sequence
  Description of Artificial Sequence: Synthetic polypeptide
  VL of XENP020669
DTVLTQSPASLAVSLGQRATISCKASQSVDYDGDSYMNWYQQKPGQPPKLLIYAASYLESGIPARLSGSGSGTDFTLNIHPVEEEDAATYYCQQSNEDPFTFGSGTKLEVK

SEQ ID NO: 20342 - protein, 15 aa, Artificial Sequence
  Description of Artificial Sequence: Synthetic peptide
  XENP020669 vlCDR1
KASQSVDYDGDSYMN

SEQ ID NO: 20343 - protein, 7 aa, Artificial Sequence
  Description of Artificial Sequence: Synthetic peptide
  XENP020669 vlCDR2
AASYLES

SEQ ID NO: 20344 - protein, 9 aa, Artificial Sequence
  Description of Artificial Sequence: Synthetic peptide
  XENP020669 vlCDR3
QQSNEDPFT

SEQ ID NO: 20345 - protein, 450 aa, Artificial Sequence; identical to SEQ ID NO: 17585
  Description of Artificial Sequence: Synthetic polypeptide
  XENP020670 7G8_H0_L0.66_IgG1_PVA_/S267K Heavy Chain

SEQ ID NO: 20346 - protein, 121 aa, Artificial Sequence; identical to SEQ ID NO: 17586
  Description of Artificial Sequence: Synthetic polypeptide
  VH of XENP020670

SEQ ID NO: 20347 - protein, 5 aa, Artificial Sequence
  Description of Artificial Sequence: Synthetic peptide
  XENP020670 vhCDR1
DAWMD

SEQ ID NO: 20348 - protein, 19 aa, Artificial Sequence
  Description of Artificial Sequence: Synthetic peptide
  XENP020670 vhCDR2
EIRTKANNHATYYAESVKG

SEQ ID NO: 20349 - protein, 10 aa, Artificial Sequence
  Description of Artificial Sequence: Synthetic peptide
  XENP020670 vhCDR3
LANWDWYFDV

SEQ ID NO: 20350 - protein, 218 aa, Artificial Sequence
  Description of Artificial Sequence: Synthetic polypeptide
  XENP020670 7G8_H0_L0.66_IgG1_PVA_/S267K Light Chain
DTVLTQSPASLAVSLGQRATISCKASQSVDYDGDSYMNWYQQKPGQPPKLLIYAASNLQSGIPARLSGSGSGTDFTLNIHPVEEEDAATYYCQQSNEDPFTFGSGTKLEVKRTVAAPSVFIFPPSDEQLKSGTASVVCLLNNFYPREAKVQWKVDNALQSGNSQESVTEQDSKDSTYSLSSTLTLSKADYEKHKVYACEVTHQGLSSPVTKSFNRGEC

SEQ ID NO: 20351 - protein, 111 aa, Artificial Sequence
  Description of Artificial Sequence: Synthetic polypeptide
  VL of XENP020670
DTVLTQSPASLAVSLGQRATISCKASQSVDYDGDSYMNWYQQKPGQPPKLLIYAASNLQSGIPARLSGSGSGTDFTLNIHPVEEEDAATYYCQQSNEDPFTFGSGTKLEVK

SEQ ID NO: 20352 - protein, 15 aa, Artificial Sequence
  Description of Artificial Sequence: Synthetic peptide
  XENP020670 vlCDR1
KASQSVDYDGDSYMN

SEQ ID NO: 20353 - protein, 7 aa, Artificial Sequence
  Description of Artificial Sequence: Synthetic peptide
  XENP020670 vlCDR2
AASNLQS

SEQ ID NO: 20354 - protein, 9 aa, Artificial Sequence
  Description of Artificial Sequence: Synthetic peptide
  XENP020670 vlCDR3
QQSNEDPFT

SEQ ID NO: 20355 - protein, 450 aa, Artificial Sequence; identical to SEQ ID NO: 17585
  Description of Artificial Sequence: Synthetic polypeptide
  XENP020671 7G8_H0_L0.67_IgG1_PVA_/S267K Heavy Chain

SEQ ID NO: 20356 - protein, 121 aa, Artificial Sequence; identical to SEQ ID NO: 17586
  Description of Artificial Sequence: Synthetic polypeptide
  VH of XENP020671

SEQ ID NO: 20357 - protein, 5 aa, Artificial Sequence
  Description of Artificial Sequence: Synthetic peptide
  XENP020671 vhCDR1
DAWMD

SEQ ID NO: 20358 - protein, 19 aa, Artificial Sequence
  Description of Artificial Sequence: Synthetic peptide
  XENP020671 vhCDR2
EIRTKANNHATYYAESVKG

SEQ ID NO: 20359 - protein, 10 aa, Artificial Sequence
  Description of Artificial Sequence: Synthetic peptide
  XENP020671 vhCDR3
LANWDWYFDV

SEQ ID NO: 20360 - protein, 218 aa, Artificial Sequence
  Description of Artificial Sequence: Synthetic polypeptide
  XENP020671 7G8_H0_L0.67_IgG1_PVA_/S267K Light Chain
DTVLTQSPASLAVSLGQRATISCKASQSVDYDGDSYMNWYQQKPGQPPKLLIYAASNLDSGIPARLSGSGSGTDFTLNIHPVEEEDAATYYCQQSNEDPFTFGSGTKLEVKRTVAAPSVFIFPPSDEQLKSGTASVVCLLNNFYPREAKVQWKVDNALQSGNSQESVTEQDSKDSTYSLSSTLTLSKADYEKHKVYACEVTHQGLSSPVTKSFNRGEC

SEQ ID NO: 20361 - protein, 111 aa, Artificial Sequence
  Description of Artificial Sequence: Synthetic polypeptide
  VL of XENP020671
DTVLTQSPASLAVSLGQRATISCKASQSVDYDGDSYMNWYQQKPGQPPKLLIYAASNLDSGIPARLSGSGSGTDFTLNIHPVEEEDAATYYCQQSNEDPFTFGSGTKLEVK

SEQ ID NO: 20362 - protein, 15 aa, Artificial Sequence
  Description of Artificial Sequence: Synthetic peptide
  XENP020671 vlCDR1
KASQSVDYDGDSYMN

SEQ ID NO: 20363 - protein, 7 aa, Artificial Sequence
  Description of Artificial Sequence: Synthetic peptide
  XENP020671 vlCDR2
AASNLDS

SEQ ID NO: 20364 - protein, 9 aa, Artificial Sequence
  Description of Artificial Sequence: Synthetic peptide
  XENP020671 vlCDR3
QQSNEDPFT

SEQ ID NO: 20365 - protein, 450 aa, Artificial Sequence; identical to SEQ ID NO: 17585
  Description of Artificial Sequence: Synthetic polypeptide
  XENP020672 7G8_H0_L0.68_IgG1_PVA_/S267K Heavy Chain

SEQ ID NO: 20366 - protein, 121 aa, Artificial Sequence; identical to SEQ ID NO: 17586
  Description of Artificial Sequence: Synthetic polypeptide
  VH of XENP020672

SEQ ID NO: 20367 - protein, 5 aa, Artificial Sequence
  Description of Artificial Sequence: Synthetic peptide
  XENP020672 vhCDR1
DAWMD

SEQ ID NO: 20368 - protein, 19 aa, Artificial Sequence
  Description of Artificial Sequence: Synthetic peptide
  XENP020672 vhCDR2
EIRTKANNHATYYAESVKG

SEQ ID NO: 20369 - protein, 10 aa, Artificial Sequence
  Description of Artificial Sequence: Synthetic peptide
  XENP020672 vhCDR3
LANWDWYFDV

SEQ ID NO: 20370 - protein, 218 aa, Artificial Sequence
  Description of Artificial Sequence: Synthetic polypeptide
  XENP020672 7G8_H0_L0.68_IgG1_PVA_/S267K Light Chain
DTVLTQSPASLAVSLGQRATISCKASQSVDYDGDSYMNWYQQKPGQPPKLLIYAASNLKSGIPARLSGSGSGTDFTLNIHPVEEEDAATYYCQQSNEDPFTFGSGTKLEVKRTVAAPSVFIFPPSDEQLKSGTASVVCLLNNFYPREAKVQWKVDNALQSGNSQESVTEQDSKDSTYSLSSTLTLSKADYEKHKVYACEVTHQGLSSPVTKSFNRGEC

SEQ ID NO: 20371 - protein, 111 aa, Artificial Sequence
  Description of Artificial Sequence: Synthetic polypeptide
  VL of XENP020672
DTVLTQSPASLAVSLGQRATISCKASQSVDYDGDSYMNWYQQKPGQPPKLLIYAASNLKSGIPARLSGSGSGTDFTLNIHPVEEEDAATYYCQQSNEDPFTFGSGTKLEVK

SEQ ID NO: 20372 - protein, 15 aa, Artificial Sequence
  Description of Artificial Sequence: Synthetic peptide
  XENP020672 vlCDR1
KASQSVDYDGDSYMN

SEQ ID NO: 20373 - protein, 7 aa, Artificial Sequence
  Description of Artificial Sequence: Synthetic peptide
  XENP020672 vlCDR2
AASNLKS

SEQ ID NO: 20374 - protein, 9 aa, Artificial Sequence
  Description of Artificial Sequence: Synthetic peptide
  XENP020672 vlCDR3
QQSNEDPFT

SEQ ID NO: 20375 - protein, 450 aa, Artificial Sequence; identical to SEQ ID NO: 17585
  Description of Artificial Sequence: Synthetic polypeptide
  XENP020673 7G8_H0_L0.69_IgG1_PVA_/S267K Heavy Chain

SEQ ID NO: 20376 - protein, 121 aa, Artificial Sequence; identical to SEQ ID NO: 17586
  Description of Artificial Sequence: Synthetic polypeptide
  VH of XENP020673

SEQ ID NO: 20377 - protein, 5 aa, Artificial Sequence
  Description of Artificial Sequence: Synthetic peptide
  XENP020673 vhCDR1
DAWMD

SEQ ID NO: 20378 - protein, 19 aa, Artificial Sequence
  Description of Artificial Sequence: Synthetic peptide
  XENP020673 vhCDR2
EIRTKANNHATYYAESVKG

SEQ ID NO: 20379 - protein, 10 aa, Artificial Sequence
  Description of Artificial Sequence: Synthetic peptide
  XENP020673 vhCDR3
LANWDWYFDV

SEQ ID NO: 20380 - protein, 218 aa, Artificial Sequence
  Description of Artificial Sequence: Synthetic polypeptide
  XENP020673 7G8_H0_L0.69_IgG1_PVA_/S267K Light Chain
DTVLTQSPASLAVSLGQRATISCKASQSVDYDGDSYMNWYQQKPGQPPKLLIYAASNLHSGIPARLSGSGSGTDFTLNIHPVEEEDAATYYCQQSNEDPFTFGSGTKLEVKRTVAAPSVFIFPPSDEQLKSGTASVVCLLNNFYPREAKVQWKVDNALQSGNSQESVTEQDSKDSTYSLSSTLTLSKADYEKHKVYACEVTHQGLSSPVTKSFNRGEC

SEQ ID NO: 20381 - protein, 111 aa, Artificial Sequence
  Description of Artificial Sequence: Synthetic polypeptide
  VL of XENP020673
DTVLTQSPASLAVSLGQRATISCKASQSVDYDGDSYMNWYQQKPGQPPKLLIYAASNLHSGIPARLSGSGSGTDFTLNIHPVEEEDAATYYCQQSNEDPFTFGSGTKLEVK

SEQ ID NO: 20382 - protein, 15 aa, Artificial Sequence
  Description of Artificial Sequence: Synthetic peptide
  XENP020673 vlCDR1
KASQSVDYDGDSYMN

SEQ ID NO: 20383 - protein, 7 aa, Artificial Sequence
  Description of Artificial Sequence: Synthetic peptide
  XENP020673 vlCDR2
AASNLHS

SEQ ID NO: 20384 - protein, 9 aa, Artificial Sequence
  Description of Artificial Sequence: Synthetic peptide
  XENP020673 vlCDR3
QQSNEDPFT

SEQ ID NO: 20385 - protein, 450 aa, Artificial Sequence; identical to SEQ ID NO: 17585
  Description of Artificial Sequence: Synthetic polypeptide
  XENP020674 7G8_H0_L0.70_IgG1_PVA_/S267K Heavy Chain

SEQ ID NO: 20386 - protein, 121 aa, Artificial Sequence; identical to SEQ ID NO: 17586
  Description of Artificial Sequence: Synthetic polypeptide
  VH of XENP020674

SEQ ID NO: 20387 - protein, 5 aa, Artificial Sequence
  Description of Artificial Sequence: Synthetic peptide
  XENP020674 vhCDR1
DAWMD

SEQ ID NO: 20388 - protein, 19 aa, Artificial Sequence
  Description of Artificial Sequence: Synthetic peptide
  XENP020674 vhCDR2
EIRTKANNHATYYAESVKG

SEQ ID NO: 20389 - protein, 10 aa, Artificial Sequence
  Description of Artificial Sequence: Synthetic peptide
  XENP020674 vhCDR3
LANWDWYFDV

SEQ ID NO: 20390 - protein, 218 aa, Artificial Sequence
  Description of Artificial Sequence: Synthetic polypeptide
  XENP020674 7G8_H0_L0.70_IgG1_PVA_/S267K Light Chain
DTVLTQSPASLAVSLGQRATISCKASQSVDYDGDSYMNWYQQKPGQPPKLLIYAASNLASGIPARLSGSGSGTDFTLNIHPVEEEDAATYYCQQSNEDPFTFGSGTKLEVKRTVAAPSVFIFPPSDEQLKSGTASVVCLLNNFYPREAKVQWKVDNALQSGNSQESVTEQDSKDSTYSLSSTLTLSKADYEKHKVYACEVTHQGLSSPVTKSFNRGEC

SEQ ID NO: 20391 - protein, 111 aa, Artificial Sequence
  Description of Artificial Sequence: Synthetic polypeptide
  VL of XENP020674
DTVLTQSPASLAVSLGQRATISCKASQSVDYDGDSYMNWYQQKPGQPPKLLIYAASNLASGIPARLSGSGSGTDFTLNIHPVEEEDAATYYCQQSNEDPFTFGSGTKLEVK

SEQ ID NO: 20392 - protein, 15 aa, Artificial Sequence
  Description of Artificial Sequence: Synthetic peptide
  XENP020674 vlCDR1
KASQSVDYDGDSYMN

SEQ ID NO: 20393 - protein, 7 aa, Artificial Sequence
  Description of Artificial Sequence: Synthetic peptide
  XENP020674 vlCDR2
AASNLAS

SEQ ID NO: 20394 - protein, 9 aa, Artificial Sequence
  Description of Artificial Sequence: Synthetic peptide
  XENP020674 vlCDR3
QQSNEDPFT

SEQ ID NO: 20395 - protein, 450 aa, Artificial Sequence; identical to SEQ ID NO: 17585
  Description of Artificial Sequence: Synthetic polypeptide
  XENP020675 7G8_H0_L0.71_IgG1_PVA_/S267K Heavy Chain

SEQ ID NO: 20396 - protein, 121 aa, Artificial Sequence; identical to SEQ ID NO: 17586
  Description of Artificial Sequence: Synthetic polypeptide
  VH of XENP020675

SEQ ID NO: 20397 - protein, 5 aa, Artificial Sequence
  Description of Artificial Sequence: Synthetic peptide
  XENP020675 vhCDR1
DAWMD

SEQ ID NO: 20398 - protein, 19 aa, Artificial Sequence
  Description of Artificial Sequence: Synthetic peptide
  XENP020675 vhCDR2
EIRTKANNHATYYAESVKG

SEQ ID NO: 20399 - protein, 10 aa, Artificial Sequence
  Description of Artificial Sequence: Synthetic peptide
  XENP020675 vhCDR3
LANWDWYFDV

SEQ ID NO: 20400 - protein, 218 aa, Artificial Sequence
  Description of Artificial Sequence: Synthetic polypeptide
  XENP020675 7G8_H0_L0.71_IgG1_PVA_/S267K Light Chain
DTVLTQSPASLAVSLGQRATISCKASQSVDYDGDSYMNWYQQKPGQPPKLLIYAASNLGSGIPARLSGSGSGTDFTLNIHPVEEEDAATYYCQQSNEDPFTFGSGTKLEVKRTVAAPSVFIFPPSDEQLKSGTASVVCLLNNFYPREAKVQWKVDNALQSGNSQESVTEQDSKDSTYSLSSTLTLSKADYEKHKVYACEVTHQGLSSPVTKSFNRGEC

SEQ ID NO: 20401 - protein, 111 aa, Artificial Sequence
  Description of Artificial Sequence: Synthetic polypeptide
  VL of XENP020675
DTVLTQSPASLAVSLGQRATISCKASQSVDYDGDSYMNWYQQKPGQPPKLLIYAASNLGSGIPARLSGSGSGTDFTLNIHPVEEEDAATYYCQQSNEDPFTFGSGTKLEVK

SEQ ID NO: 20402 - protein, 15 aa, Artificial Sequence
  Description of Artificial Sequence: Synthetic peptide
  XENP020675 vlCDR1
KASQSVDYDGDSYMN

SEQ ID NO: 20403 - protein, 7 aa, Artificial Sequence
  Description of Artificial Sequence: Synthetic peptide
  XENP020675 vlCDR2
AASNLGS

SEQ ID NO: 20404 - protein, 9 aa, Artificial Sequence
  Description of Artificial Sequence: Synthetic peptide
  XENP020675 vlCDR3
QQSNEDPFT

SEQ ID NO: 20405 - protein, 450 aa, Artificial Sequence; identical to SEQ ID NO: 17585
  Description of Artificial Sequence: Synthetic polypeptide
  XENP020676 7G8_H0_L0.72_IgG1_PVA_/S267K Heavy Chain

SEQ ID NO: 20406 - protein, 121 aa, Artificial Sequence; identical to SEQ ID NO: 17586
  Description of Artificial Sequence: Synthetic polypeptide
  VH of XENP020676

SEQ ID NO: 20407 - protein, 5 aa, Artificial Sequence
  Description of Artificial Sequence: Synthetic peptide
  XENP020676 vhCDR1
DAWMD

SEQ ID NO: 20408 - protein, 19 aa, Artificial Sequence
  Description of Artificial Sequence: Synthetic peptide
  XENP020676 vhCDR2
EIRTKANNHATYYAESVKG

SEQ ID NO: 20409 - protein, 10 aa, Artificial Sequence
  Description of Artificial Sequence: Synthetic peptide
  XENP020676 vhCDR3
LANWDWYFDV

SEQ ID NO: 20410 - protein, 218 aa, Artificial Sequence
  Description of Artificial Sequence: Synthetic polypeptide
  XENP020676 7G8_H0_L0.72_IgG1_PVA_/S267K Light Chain
DTVLTQSPASLAVSLGQRATISCKASQSVDYDGDSYMNWYQQKPGQPPKLLIYAASNLYSGIPARLSGSGSGTDFTLNIHPVEEEDAATYYCQQSNEDPFTFGSGTKLEVKRTVAAPSVFIFPPSDEQLKSGTASVVCLLNNFYPREAKVQWKVDNALQSGNSQESVTEQDSKDSTYSLSSTLTLSKADYEKHKVYACEVTHQGLSSPVTKSFNRGEC

SEQ ID NO: 20411 - protein, 111 aa, Artificial Sequence
  Description of Artificial Sequence: Synthetic polypeptide
  VL of XENP020676
DTVLTQSPASLAVSLGQRATISCKASQSVDYDGDSYMNWYQQKPGQPPKLLIYAASNLYSGIPARLSGSGSGTDFTLNIHPVEEEDAATYYCQQSNEDPFTFGSGTKLEVK

SEQ ID NO: 20412 - protein, 15 aa, Artificial Sequence
  Description of Artificial Sequence: Synthetic peptide
  XENP020676 vlCDR1
KASQSVDYDGDSYMN

SEQ ID NO: 20413 - protein, 7 aa, Artificial Sequence
  Description of Artificial Sequence: Synthetic peptide
  XENP020676 vlCDR2
AASNLYS

SEQ ID NO: 20414 - protein, 9 aa, Artificial Sequence
  Description of Artificial Sequence: Synthetic peptide
  XENP020676 vlCDR3
QQSNEDPFT

SEQ ID NO: 20415 - protein, 450 aa, Artificial Sequence; identical to SEQ ID NO: 17585
  Description of Artificial Sequence: Synthetic polypeptide
  XENP020677 7G8_H0_L0.73_IgG1_PVA_/S267K Heavy Chain

SEQ ID NO: 20416 - protein, 121 aa, Artificial Sequence; identical to SEQ ID NO: 17586
  Description of Artificial Sequence: Synthetic polypeptide
  VH of XENP020677

SEQ ID NO: 20417 - protein, 5 aa, Artificial Sequence
  Description of Artificial Sequence: Synthetic peptide
  XENP020677 vhCDR1
DAWMD

SEQ ID NO: 20418 - protein, 19 aa, Artificial Sequence
  Description of Artificial Sequence: Synthetic peptide
  XENP020677 vhCDR2
EIRTKANNHATYYAESVKG

SEQ ID NO: 20419 - protein, 10 aa, Artificial Sequence
  Description of Artificial Sequence: Synthetic peptide
  XENP020677 vhCDR3
LANWDWYFDV

SEQ ID NO: 20420 - protein, 218 aa, Artificial Sequence
  Description of Artificial Sequence: Synthetic polypeptide
  XENP020677 7G8_H0_L0.73_IgG1_PVA_/S267K Light Chain
DTVLTQSPASLAVSLGQRATISCKASQSVDYDGDSYMNWYQQKPGQPPKLLIYAASNLISGIPARLSGSGSGTDFTLNIHPVEEEDAATYYCQQSNEDPFTFGSGTKLEVKRTVAAPSVFIFPPSDEQLKSGTASVVCLLNNFYPREAKVQWKVDNALQSGNSQESVTEQDSKDSTYSLSSTLTLSKADYEKHKVYACEVTHQGLSSPVTKSFNRGEC

SEQ ID NO: 20421 - protein, 111 aa, Artificial Sequence
  Description of Artificial Sequence: Synthetic polypeptide
  VL of XENP020677
DTVLTQSPASLAVSLGQRATISCKASQSVDYDGDSYMNWYQQKPGQPPKLLIYAASNLISGIPARLSGSGSGTDFTLNIHPVEEEDAATYYCQQSNEDPFTFGSGTKLEVK

SEQ ID NO: 20422 - protein, 15 aa, Artificial Sequence
  Description of Artificial Sequence: Synthetic peptide
  XENP020677 vlCDR1
KASQSVDYDGDSYMN

SEQ ID NO: 20423 - protein, 7 aa, Artificial Sequence
  Description of Artificial Sequence: Synthetic peptide
  XENP020677 vlCDR2
AASNLIS

SEQ ID NO: 20424 - protein, 9 aa, Artificial Sequence
  Description of Artificial Sequence: Synthetic peptide
  XENP020677 vlCDR3
QQSNEDPFT

SEQ ID NO: 20425 - protein, 450 aa, Artificial Sequence; identical to SEQ ID NO: 17585
  Description of Artificial Sequence: Synthetic polypeptide
  XENP020678 7G8_H0_L0.74_IgG1_PVA_/S267K Heavy Chain

SEQ ID NO: 20426 - protein, 121 aa, Artificial Sequence; identical to SEQ ID NO: 17586
  Description of Artificial Sequence: Synthetic polypeptide
  VH of XENP020678

SEQ ID NO: 20427 - protein, 5 aa, Artificial Sequence
  Description of Artificial Sequence: Synthetic peptide
  XENP020678 vhCDR1
DAWMD

SEQ ID NO: 20428 - protein, 19 aa, Artificial Sequence
  Description of Artificial Sequence: Synthetic peptide
  XENP020678 vhCDR2
EIRTKANNHATYYAESVKG

SEQ ID NO: 20429 - protein, 10 aa, Artificial Sequence
  Description of Artificial Sequence: Synthetic peptide
  XENP020678 vhCDR3
LANWDWYFDV

SEQ ID NO: 20430 - protein, 218 aa, Artificial Sequence
  Description of Artificial Sequence: Synthetic polypeptide
  XENP020678 7G8_H0_L0.74_IgG1_PVA_/S267K Light Chain
DTVLTQSPASLAVSLGQRATISCKASQSVDYDGDSYMNWYQQKPGQPPKLLIYAASNLESGIPARLSGSGSGTDFTLNIHPVEEEDAATYYCQQTNEDPFTFGSGTKLEVKRTVAAPSVFIFPPSDEQLKSGTASVVCLLNNFYPREAKVQWKVDNALQSGNSQESVTEQDSKDSTYSLSSTLTLSKADYEKHKVYACEVTHQGLSSPVTKSFNRGEC

SEQ ID NO: 20431 - protein, 111 aa, Artificial Sequence
  Description of Artificial Sequence: Synthetic polypeptide
  VL of XENP020678
DTVLTQSPASLAVSLGQRATISCKASQSVDYDGDSYMNWYQQKPGQPPKLLIYAASNLESGIPARLSGSGSGTDFTLNIHPVEEEDAATYYCQQTNEDPFTFGSGTKLEVK

SEQ ID NO: 20432 - protein, 15 aa, Artificial Sequence
  Description of Artificial Sequence: Synthetic peptide
  XENP020678 vlCDR1
KASQSVDYDGDSYMN

SEQ ID NO: 20433 - protein, 7 aa, Artificial Sequence
  Description of Artificial Sequence: Synthetic peptide
  XENP020678 vlCDR2
AASNLES

SEQ ID NO: 20434 - protein, 9 aa, Artificial Sequence
  Description of Artificial Sequence: Synthetic peptide
  XENP020678 vlCDR3
QQTNEDPFT

SEQ ID NO: 20435 - protein, 450 aa, Artificial Sequence; identical to SEQ ID NO: 17585
  Description of Artificial Sequence: Synthetic polypeptide
  XENP020679 7G8_H0_L0.75_IgG1_PVA_/S267K Heavy Chain

SEQ ID NO: 20436 - protein, 121 aa, Artificial Sequence; identical to SEQ ID NO: 17586
  Description of Artificial Sequence: Synthetic polypeptide
  VH of XENP020679

SEQ ID NO: 20437 - protein, 5 aa, Artificial Sequence
  Description of Artificial Sequence: Synthetic peptide
  XENP020679 vhCDR1
DAWMD

SEQ ID NO: 20438 - protein, 19 aa, Artificial Sequence
  Description of Artificial Sequence: Synthetic peptide
  XENP020679 vhCDR2
EIRTKANNHATYYAESVKG

SEQ ID NO: 20439 - protein, 10 aa, Artificial Sequence
  Description of Artificial Sequence: Synthetic peptide
  XENP020679 vhCDR3
LANWDWYFDV

SEQ ID NO: 20440 - protein, 218 aa, Artificial Sequence
  Description of Artificial Sequence: Synthetic polypeptide
  XENP020679 7G8_H0_L0.75_IgG1_PVA_/S267K Light Chain
DTVLTQSPASLAVSLGQRATISCKASQSVDYDGDSYMNWYQQKPGQPPKLLIYAASNLESGIPARLSGSGSGTDFTLNIHPVEEEDAATYYCQQANEDPFTFGSGTKLEVKRTVAAPSVFIFPPSDEQLKSGTASVVCLLNNFYPREAKVQWKVDNALQSGNSQESVTEQDSKDSTYSLSSTLTLSKADYEKHKVYACEVTHQGLSSPVTKSFNRGEC

SEQ ID NO: 20441 - protein, 111 aa, Artificial Sequence
  Description of Artificial Sequence: Synthetic polypeptide
  VL of XENP020679
DTVLTQSPASLAVSLGQRATISCKASQSVDYDGDSYMNWYQQKPGQPPKLLIYAASNLESGIPARLSGSGSGTDFTLNIHPVEEEDAATYYCQQANEDPFTFGSGTKLEVK

SEQ ID NO: 20442 - protein, 15 aa, Artificial Sequence
  Description of Artificial Sequence: Synthetic peptide
  XENP020679 vlCDR1
KASQSVDYDGDSYMN

SEQ ID NO: 20443 - protein, 7 aa, Artificial Sequence
  Description of Artificial Sequence: Synthetic peptide
  XENP020679 vlCDR2
AASNLES

SEQ ID NO: 20444 - protein, 9 aa, Artificial Sequence
  Description of Artificial Sequence: Synthetic peptide
  XENP020679 vlCDR3
QQANEDPFT

SEQ ID NO: 20445 - protein, 450 aa, Artificial Sequence; identical to SEQ ID NO: 17585
  Description of Artificial Sequence: Synthetic polypeptide
  XENP020680 7G8_H0_L0.76_IgG1_PVA_/S267K Heavy Chain

SEQ ID NO: 20446 - protein, 121 aa, Artificial Sequence; identical to SEQ ID NO: 17586
  Description of Artificial Sequence: Synthetic polypeptide
  VH of XENP020680

SEQ ID NO: 20447 - protein, 5 aa, Artificial Sequence
  Description of Artificial Sequence: Synthetic peptide
  XENP020680 vhCDR1
DAWMD

SEQ ID NO: 20448 - protein, 19 aa, Artificial Sequence
  Description of Artificial Sequence: Synthetic peptide
  XENP020680 vhCDR2
EIRTKANNHATYYAESVKG

SEQ ID NO: 20449 - protein, 10 aa, Artificial Sequence
  Description of Artificial Sequence: Synthetic peptide
  XENP020680 vhCDR3
LANWDWYFDV

SEQ ID NO: 20450 - protein, 218 aa, Artificial Sequence
  Description of Artificial Sequence: Synthetic polypeptide
  XENP020680 7G8_H0_L0.76_IgG1_PVA_/S267K Light Chain
DTVLTQSPASLAVSLGQRATISCKASQSVDYDGDSYMNWYQQKPGQPPKLLIYAASNLESGIPARLSGSGSGTDFTLNIHPVEEEDAATYYCQQQNEDPFTFGSGTKLEVKRTVAAPSVFIFPPSDEQLKSGTASVVCLLNNFYPREAKVQWKVDNALQSGNSQESVTEQDSKDSTYSLSSTLTLSKADYEKHKVYACEVTHQGLSSPVTKSFNRGEC

SEQ ID NO: 20451 - protein, 111 aa, Artificial Sequence
  Description of Artificial Sequence: Synthetic polypeptide
  VL of XENP020680
DTVLTQSPASLAVSLGQRATISCKASQSVDYDGDSYMNWYQQKPGQPPKLLIYAASNLESGIPARLSGSGSGTDFTLNIHPVEEEDAATYYCQQQNEDPFTFGSGTKLEVK

SEQ ID NO: 20452 - protein, 15 aa, Artificial Sequence
  Description of Artificial Sequence: Synthetic peptide
  XENP020680 vlCDR1
KASQSVDYDGDSYMN

SEQ ID NO: 20453 - protein, 7 aa, Artificial Sequence
  Description of Artificial Sequence: Synthetic peptide
  XENP020680 vlCDR2
AASNLES

SEQ ID NO: 20454 - protein, 9 aa, Artificial Sequence
  Description of Artificial Sequence: Synthetic peptide
  XENP020680 vlCDR3
QQQNEDPFT

SEQ ID NO: 20455 - protein, 450 aa, Artificial Sequence; identical to SEQ ID NO: 17585
  Description of Artificial Sequence: Synthetic polypeptide
  XENP020681 7G8_H0_L0.77_IgG1_PVA_/S267K Heavy Chain

SEQ ID NO: 20456 - protein, 121 aa, Artificial Sequence; identical to SEQ ID NO: 17586
  Description of Artificial Sequence: Synthetic polypeptide
  VH of XENP020681

SEQ ID NO: 20457 - protein, 5 aa, Artificial Sequence
  Description of Artificial Sequence: Synthetic peptide
  XENP020681 vhCDR1
DAWMD

SEQ ID NO: 20458 - protein, 19 aa, Artificial Sequence
  Description of Artificial Sequence: Synthetic peptide
  XENP020681 vhCDR2
EIRTKANNHATYYAESVKG

SEQ ID NO: 20459 - protein, 10 aa, Artificial Sequence
  Description of Artificial Sequence: Synthetic peptide
  XENP020681 vhCDR3
LANWDWYFDV

SEQ ID NO: 20460 - protein, 218 aa, Artificial Sequence
  Description of Artificial Sequence: Synthetic polypeptide
  XENP020681 7G8_H0_L0.77_IgG1_PVA_/S267K Light Chain
DTVLTQSPASLAVSLGQRATISCKASQSVDYDGDSYMNWYQQKPGQPPKLLIYAASNLESGIPARLSGSGSGTDFTLNIHPVEEEDAATYYCQQGNEDPFTFGSGTKLEVKRTVAAPSVFIFPPSDEQLKSGTASVVCLLNNFYPREAKVQWKVDNALQSGNSQESVTEQDSKDSTYSLSSTLTLSKADYEKHKVYACEVTHQGLSSPVTKSFNRGEC

SEQ ID NO: 20461 - protein, 111 aa, Artificial Sequence
  Description of Artificial Sequence: Synthetic polypeptide
  VL of XENP020681
DTVLTQSPASLAVSLGQRATISCKASQSVDYDGDSYMNWYQQKPGQPPKLLIYAASNLESGIPARLSGSGSGTDFTLNIHPVEEEDAATYYCQQGNEDPFTFGSGTKLEVK

SEQ ID NO: 20462 - protein, 15 aa, Artificial Sequence
  Description of Artificial Sequence: Synthetic peptide
  XENP020681 vlCDR1
KASQSVDYDGDSYMN

SEQ ID NO: 20463 - protein, 7 aa, Artificial Sequence
  Description of Artificial Sequence: Synthetic peptide
  XENP020681 vlCDR2
AASNLES

SEQ ID NO: 20464 - protein, 9 aa, Artificial Sequence
  Description of Artificial Sequence: Synthetic peptide
  XENP020681 vlCDR3
QQGNEDPFT

SEQ ID NO: 20465 - protein, 450 aa, Artificial Sequence; identical to SEQ ID NO: 17585
  Description of Artificial Sequence: Synthetic polypeptide
  XENP020682 7G8_H0_L0.78_IgG1_PVA_/S267K Heavy Chain

SEQ ID NO: 20466 - protein, 121 aa, Artificial Sequence; identical to SEQ ID NO: 17586
  Description of Artificial Sequence: Synthetic polypeptide
  VH of XENP020682

SEQ ID NO: 20467 - protein, 5 aa, Artificial Sequence
  Description of Artificial Sequence: Synthetic peptide
  XENP020682 vhCDR1
DAWMD

SEQ ID NO: 20468 - protein, 19 aa, Artificial Sequence
  Description of Artificial Sequence: Synthetic peptide
  XENP020682 vhCDR2
EIRTKANNHATYYAESVKG

SEQ ID NO: 20469 - protein, 10 aa, Artificial Sequence
  Description of Artificial Sequence: Synthetic peptide
  XENP020682 vhCDR3
LANWDWYFDV

SEQ ID NO: 20470 - protein, 218 aa, Artificial Sequence
  Description of Artificial Sequence: Synthetic polypeptide
  XENP020682 7G8_H0_L0.78_IgG1_PVA_/S267K Light Chain
DTVLTQSPASLAVSLGQRATISCKASQSVDYDGDSYMNWYQQKPGQPPKLLIYAASNLESGIPARLSGSGSGTDFTLNIHPVEEEDAATYYCQQVNEDPFTFGSGTKLEVKRTVAAPSVFIFPPSDEQLKSGTASVVCLLNNFYPREAKVQWKVDNALQSGNSQESVTEQDSKDSTYSLSSTLTLSKADYEKHKVYACEVTHQGLSSPVTKSFNRGEC

SEQ ID NO: 20471 - protein, 111 aa, Artificial Sequence
  Description of Artificial Sequence: Synthetic polypeptide
  VL of XENP020682
DTVLTQSPASLAVSLGQRATISCKASQSVDYDGDSYMNWYQQKPGQPPKLLIYAASNLESGIPARLSGSGSGTDFTLNIHPVEEEDAATYYCQQVNEDPFTFGSGTKLEVK

SEQ ID NO: 20472 - protein, 15 aa, Artificial Sequence
  Description of Artificial Sequence: Synthetic peptide
  XENP020682 vlCDR1
KASQSVDYDGDSYMN

SEQ ID NO: 20473 - protein, 7 aa, Artificial Sequence
  Description of Artificial Sequence: Synthetic peptide
  XENP020682 vlCDR2
AASNLES

SEQ ID NO: 20474 - protein, 9 aa, Artificial Sequence
  Description of Artificial Sequence: Synthetic peptide
  XENP020682 vlCDR3
QQVNEDPFT

SEQ ID NO: 20475 - protein, 450 aa, Artificial Sequence; identical to SEQ ID NO: 17585
  Description of Artificial Sequence: Synthetic polypeptide
  XENP020683 7G8_H0_L0.79_IgG1_PVA_/S267K Heavy Chain

SEQ ID NO: 20476 - protein, 121 aa, Artificial Sequence; identical to SEQ ID NO: 17586
  Description of Artificial Sequence: Synthetic polypeptide
  VH of XENP020683

SEQ ID NO: 20477 - protein, 5 aa, Artificial Sequence
  Description of Artificial Sequence: Synthetic peptide
  XENP020683 vhCDR1
DAWMD

SEQ ID NO: 20478 - protein, 19 aa, Artificial Sequence
  Description of Artificial Sequence: Synthetic peptide
  XENP020683 vhCDR2
EIRTKANNHATYYAESVKG

SEQ ID NO: 20479 - protein, 10 aa, Artificial Sequence
  Description of Artificial Sequence: Synthetic peptide
  XENP020683 vhCDR3
LANWDWYFDV

SEQ ID NO: 20480 - protein, 218 aa, Artificial Sequence
  Description of Artificial Sequence: Synthetic polypeptide
  XENP020683 7G8_H0_L0.79_IgG1_PVA_/S267K Light Chain
DTVLTQSPASLAVSLGQRATISCKASQSVDYDGDSYMNWYQQKPGQPPKLLIYAASNLESGIPARLSGSGSGTDFTLNIHPVEEEDAATYYCQQHNEDPFTFGSGTKLEVKRTVAAPSVFIFPPSDEQLKSGTASVVCLLNNFYPREAKVQWKVDNALQSGNSQESVTEQDSKDSTYSLSSTLTLSKADYEKHKVYACEVTHQGLSSPVTKSFNRGEC

SEQ ID NO: 20481 - protein, 111 aa, Artificial Sequence
  Description of Artificial Sequence: Synthetic polypeptide
  VL of XENP020683
DTVLTQSPASLAVSLGQRATISCKASQSVDYDGDSYMNWYQQKPGQPPKLLIYAASNLESGIPARLSGSGSGTDFTLNIHPVEEEDAATYYCQQHNEDPFTFGSGTKLEVK

SEQ ID NO: 20482 - protein, 15 aa, Artificial Sequence
  Description of Artificial Sequence: Synthetic peptide
  XENP020683 vlCDR1
KASQSVDYDGDSYMN

SEQ ID NO: 20483 - protein, 7 aa, Artificial Sequence
  Description of Artificial Sequence: Synthetic peptide
  XENP020683 vlCDR2
AASNLES

SEQ ID NO: 20484 - protein, 9 aa, Artificial Sequence
  Description of Artificial Sequence: Synthetic peptide
  XENP020683 vlCDR3
QQHNEDPFT

SEQ ID NO: 20485 - protein, 450 aa, Artificial Sequence; identical to SEQ ID NO: 17585
  Description of Artificial Sequence: Synthetic polypeptide
  XENP020684 7G8_H0_L0.80_IgG1_PVA_/S267K Heavy Chain

SEQ ID NO: 20486 - protein, 121 aa, Artificial Sequence; identical to SEQ ID NO: 17586
  Description of Artificial Sequence: Synthetic polypeptide
  VH of XENP020684

SEQ ID NO: 20487 - protein, 5 aa, Artificial Sequence
  Description of Artificial Sequence: Synthetic peptide
  XENP020684 vhCDR1
DAWMD

SEQ ID NO: 20488 - protein, 19 aa, Artificial Sequence
  Description of Artificial Sequence: Synthetic peptide
  XENP020684 vhCDR2
EIRTKANNHATYYAESVKG

SEQ ID NO: 20489 - protein, 10 aa, Artificial Sequence
  Description of Artificial Sequence: Synthetic peptide
  XENP020684 vhCDR3
LANWDWYFDV

SEQ ID NO: 20490 - protein, 218 aa, Artificial Sequence
  Description of Artificial Sequence: Synthetic polypeptide
  XENP020684 7G8_H0_L0.80_IgG1_PVA_/S267K Light Chain
DTVLTQSPASLAVSLGQRATISCKASQSVDYDGDSYMNWYQQKPGQPPKLLIYAASNLESGIPARLSGSGSGTDFTLNIHPVEEEDAATYYCQQDNEDPFTFGSGTKLEVKRTVAAPSVFIFPPSDEQLKSGTASVVCLLNNFYPREAKVQWKVDNALQSGNSQESVTEQDSKDSTYSLSSTLTLSKADYEKHKVYACEVTHQGLSSPVTKSFNRGEC

SEQ ID NO: 20491 - protein, 111 aa, Artificial Sequence
  Description of Artificial Sequence: Synthetic polypeptide
  VL of XENP020684
DTVLTQSPASLAVSLGQRATISCKASQSVDYDGDSYMNWYQQKPGQPPKLLIYAASNLESGIPARLSGSGSGTDFTLNIHPVEEEDAATYYCQQDNEDPFTFGSGTKLEVK

SEQ ID NO: 20492 - protein, 15 aa, Artificial Sequence
  Description of Artificial Sequence: Synthetic peptide
  XENP020684 vlCDR1
KASQSVDYDGDSYMN

SEQ ID NO: 20493 - protein, 7 aa, Artificial Sequence
  Description of Artificial Sequence: Synthetic peptide
  XENP020684 vlCDR2
AASNLES

SEQ ID NO: 20494 - protein, 9 aa, Artificial Sequence
  Description of Artificial Sequence: Synthetic peptide
  XENP020684 vlCDR3
QQDNEDPFT

SEQ ID NO: 20495 - protein, 450 aa, Artificial Sequence; identical to SEQ ID NO: 17585
  Description of Artificial Sequence: Synthetic polypeptide
  XENP020685 7G8_H0_L0.81_IgG1_PVA_/S267K Heavy Chain

SEQ ID NO: 20496 - protein, 121 aa, Artificial Sequence; identical to SEQ ID NO: 17586
  Description of Artificial Sequence: Synthetic polypeptide
  VH of XENP020685

SEQ ID NO: 20497 - protein, 5 aa, Artificial Sequence
  Description of Artificial Sequence: Synthetic peptide
  XENP020685 vhCDR1
DAWMD

SEQ ID NO: 20498 - protein, 19 aa, Artificial Sequence
  Description of Artificial Sequence: Synthetic peptide
  XENP020685 vhCDR2
EIRTKANNHATYYAESVKG

SEQ ID NO: 20499 - protein, 10 aa, Artificial Sequence
  Description of Artificial Sequence: Synthetic peptide
  XENP020685 vhCDR3
LANWDWYFDV

SEQ ID NO: 20500 - protein, 218 aa, Artificial Sequence
  Description of Artificial Sequence: Synthetic polypeptide
  XENP020685 7G8_H0_L0.81_IgG1_PVA_/S267K Light Chain
DTVLTQSPASLAVSLGQRATISCKASQSVDYDGDSYMNWYQQKPGQPPKLLIYAASNLESGIPARLSGSGSGTDFTLNIHPVEEEDAATYYCQQKNEDPFTFGSGTKLEVKRTVAAPSVFIFPPSDEQLKSGTASVVCLLNNFYPREAKVQWKVDNALQSGNSQESVTEQDSKDSTYSLSSTLTLSKADYEKHKVYACEVTHQGLSSPVTKSFNRGEC

SEQ ID NO: 20501 - protein, 111 aa, Artificial Sequence
  Description of Artificial Sequence: Synthetic polypeptide
  VL of XENP020685
DTVLTQSPASLAVSLGQRATISCKASQSVDYDGDSYMNWYQQKPGQPPKLLIYAASNLESGIPARLSGSGSGTDFTLNIHPVEEEDAATYYCQQKNEDPFTFGSGTKLEVK

SEQ ID NO: 20502 - protein, 15 aa, Artificial Sequence
  Description of Artificial Sequence: Synthetic peptide
  XENP020685 vlCDR1
KASQSVDYDGDSYMN

SEQ ID NO: 20503 - protein, 7 aa, Artificial Sequence
  Description of Artificial Sequence: Synthetic peptide
  XENP020685 vlCDR2
AASNLES

SEQ ID NO: 20504 - protein, 9 aa, Artificial Sequence
  Description of Artificial Sequence: Synthetic peptide
  XENP020685 vlCDR3
QQKNEDPFT

SEQ ID NO: 20505 - protein, 450 aa, Artificial Sequence; identical to SEQ ID NO: 17585
  Description of Artificial Sequence: Synthetic polypeptide
  XENP020686 7G8_H0_L0.82_IgG1_PVA_/S267K Heavy Chain

SEQ ID NO: 20506 - protein, 121 aa, Artificial Sequence; identical to SEQ ID NO: 17586
  Description of Artificial Sequence: Synthetic polypeptide
  VH of XENP020686

SEQ ID NO: 20507 - protein, 5 aa, Artificial Sequence
  Description of Artificial Sequence: Synthetic peptide
  XENP020686 vhCDR1
DAWMD

SEQ ID NO: 20508 - protein, 19 aa, Artificial Sequence
  Description of Artificial Sequence: Synthetic peptide
  XENP020686 vhCDR2
EIRTKANNHATYYAESVKG

SEQ ID NO: 20509 - protein, 10 aa, Artificial Sequence
  Description of Artificial Sequence: Synthetic peptide
  XENP020686 vhCDR3
LANWDWYFDV

SEQ ID NO: 20510 - protein, 218 aa, Artificial Sequence
  Description of Artificial Sequence: Synthetic polypeptide
  XENP020686 7G8_H0_L0.82_IgG1_PVA_/S267K Light Chain
DTVLTQSPASLAVSLGQRATISCKASQSVDYDGDSYMNWYQQKPGQPPKLLIYAASNLESGIPARLSGSGSGTDFTLNIHPVEEEDAATYYCQQYNEDPFTFGSGTKLEVKRTVAAPSVFIFPPSDEQLKSGTASVVCLLNNFYPREAKVQWKVDNALQSGNSQESVTEQDSKDSTYSLSSTLTLSKADYEKHKVYACEVTHQGLSSPVTKSFNRGEC

SEQ ID NO: 20511 - protein, 111 aa, Artificial Sequence
  Description of Artificial Sequence: Synthetic polypeptide
  VL of XENP020686
DTVLTQSPASLAVSLGQRATISCKASQSVDYDGDSYMNWYQQKPGQPPKLLIYAASNLESGIPARLSGSGSGTDFTLNIHPVEEEDAATYYCQQYNEDPFTFGSGTKLEVK

SEQ ID NO: 20512 - protein, 15 aa, Artificial Sequence
  Description of Artificial Sequence: Synthetic peptide
  XENP020686 vlCDR1
KASQSVDYDGDSYMN

SEQ ID NO: 20513 - protein, 7 aa, Artificial Sequence
  Description of Artificial Sequence: Synthetic peptide
  XENP020686 vlCDR2
AASNLES

SEQ ID NO: 20514 - protein, 9 aa, Artificial Sequence
  Description of Artificial Sequence: Synthetic peptide
  XENP020686 vlCDR3
QQYNEDPFT

SEQ ID NO: 20515 - protein, 450 aa, Artificial Sequence; identical to SEQ ID NO: 17585
  Description of Artificial Sequence: Synthetic polypeptide
  XENP020687 7G8_H0_L0.83_IgG1_PVA_/S267K Heavy Chain

SEQ ID NO: 20516 - protein, 121 aa, Artificial Sequence; identical to SEQ ID NO: 17586
  Description of Artificial Sequence: Synthetic polypeptide
  VH of XENP020687

SEQ ID NO: 20517 - protein, 5 aa, Artificial Sequence
  Description of Artificial Sequence: Synthetic peptide
  XENP020687 vhCDR1
DAWMD

SEQ ID NO: 20518 - protein, 19 aa, Artificial Sequence
  Description of Artificial Sequence: Synthetic peptide
  XENP020687 vhCDR2
EIRTKANNHATYYAESVKG

SEQ ID NO: 20519 - protein, 10 aa, Artificial Sequence
  Description of Artificial Sequence: Synthetic peptide
  XENP020687 vhCDR3
LANWDWYFDV

SEQ ID NO: 20520 - protein, 218 aa, Artificial Sequence
  Description of Artificial Sequence: Synthetic polypeptide
  XENP020687 7G8_H0_L0.83_IgG1_PVA_/S267K Light Chain
DTVLTQSPASLAVSLGQRATISCKASQSVDYDGDSYMNWYQQKPGQPPKLLIYAASNLESGIPARLSGSGSGTDFTLNIHPVEEEDAATYYCQQSDEDPFTFGSGTKLEVKRTVAAPSVFIFPPSDEQLKSGTASVVCLLNNFYPREAKVQWKVDNALQSGNSQESVTEQDSKDSTYSLSSTLTLSKADYEKHKVYACEVTHQGLSSPVTKSFNRGEC

SEQ ID NO: 20521 - protein, 111 aa, Artificial Sequence
  Description of Artificial Sequence: Synthetic polypeptide
  VL of XENP020687
DTVLTQSPASLAVSLGQRATISCKASQSVDYDGDSYMNWYQQKPGQPPKLLIYAASNLESGIPARLSGSGSGTDFTLNIHPVEEEDAATYYCQQSDEDPFTFGSGTKLEVK

SEQ ID NO: 20522 - protein, 15 aa, Artificial Sequence
  Description of Artificial Sequence: Synthetic peptide
  XENP020687 vlCDR1
KASQSVDYDGDSYMN

SEQ ID NO: 20523 - protein, 7 aa, Artificial Sequence
  Description of Artificial Sequence: Synthetic peptide
  XENP020687 vlCDR2
AASNLES

SEQ ID NO: 20524 - protein, 9 aa, Artificial Sequence
  Description of Artificial Sequence: Synthetic peptide
  XENP020687 vlCDR3
QQSDEDPFT

SEQ ID NO: 20525 - protein, 450 aa, Artificial Sequence; identical to SEQ ID NO: 17585
  Description of Artificial Sequence: Synthetic polypeptide
  XENP020688 7G8_H0_L0.84_IgG1_PVA_/S267K Heavy Chain

SEQ ID NO: 20526 - protein, 121 aa, Artificial Sequence; identical to SEQ ID NO: 17586
  Description of Artificial Sequence: Synthetic polypeptide
  VH of XENP020688

SEQ ID NO: 20527 - protein, 5 aa, Artificial Sequence
  Description of Artificial Sequence: Synthetic peptide
  XENP020688 vhCDR1
DAWMD

SEQ ID NO: 20528 - protein, 19 aa, Artificial Sequence
  Description of Artificial Sequence: Synthetic peptide
  XENP020688 vhCDR2
EIRTKANNHATYYAESVKG

SEQ ID NO: 20529 - protein, 10 aa, Artificial Sequence
  Description of Artificial Sequence: Synthetic peptide
  XENP020688 vhCDR3
LANWDWYFDV

SEQ ID NO: 20530 - protein, 218 aa, Artificial Sequence
  Description of Artificial Sequence: Synthetic polypeptide
  XENP020688 7G8_H0_L0.84_IgG1_PVA_/S267K Light Chain
DTVLTQSPASLAVSLGQRATISCKASQSVDYDGDSYMNWYQQKPGQPPKLLIYAASNLESGIPARLSGSGSGTDFTLNIHPVEEEDAATYYCQQSHEDPFTFGSGTKLEVKRTVAAPSVFIFPPSDEQLKSGTASVVCLLNNFYPREAKVQWKVDNALQSGNSQESVTEQDSKDSTYSLSSTLTLSKADYEKHKVYACEVTHQGLSSPVTKSFNRGEC

SEQ ID NO: 20531 - protein, 111 aa, Artificial Sequence
  Description of Artificial Sequence: Synthetic polypeptide
  VL of XENP020688
DTVLTQSPASLAVSLGQRATISCKASQSVDYDGDSYMNWYQQKPGQPPKLLIYAASNLESGIPARLSGSGSGTDFTLNIHPVEEEDAATYYCQQSHEDPFTFGSGTKLEVK

SEQ ID NO: 20532 - protein, 15 aa, Artificial Sequence
  Description of Artificial Sequence: Synthetic peptide
  XENP020688 vlCDR1
KASQSVDYDGDSYMN

SEQ ID NO: 20533 - protein, 7 aa, Artificial Sequence
  Description of Artificial Sequence: Synthetic peptide
  XENP020688 vlCDR2
AASNLES

SEQ ID NO: 20534 - protein, 9 aa, Artificial Sequence
  Description of Artificial Sequence: Synthetic peptide
  XENP020688 vlCDR3
QQSHEDPFT

SEQ ID NO: 20535 - protein, 450 aa, Artificial Sequence; identical to SEQ ID NO: 17585
  Description of Artificial Sequence: Synthetic polypeptide
  XENP020689 7G8_H0_L0.85_IgG1_PVA_/S267K Heavy Chain

SEQ ID NO: 20536 - protein, 121 aa, Artificial Sequence; identical to SEQ ID NO: 17586
  Description of Artificial Sequence: Synthetic polypeptide
  VH of XENP020689

SEQ ID NO: 20537 - protein, 5 aa, Artificial Sequence
  Description of Artificial Sequence: Synthetic peptide
  XENP020689 vhCDR1
DAWMD

SEQ ID NO: 20538 - protein, 19 aa, Artificial Sequence
  Description of Artificial Sequence: Synthetic peptide
  XENP020689 vhCDR2
EIRTKANNHATYYAESVKG

SEQ ID NO: 20539 - protein, 10 aa, Artificial Sequence
  Description of Artificial Sequence: Synthetic peptide
  XENP020689 vhCDR3
LANWDWYFDV

SEQ ID NO: 20540 - protein, 218 aa, Artificial Sequence
  Description of Artificial Sequence: Synthetic polypeptide
  XENP020689 7G8_H0_L0.85_IgG1_PVA_/S267K Light Chain
DTVLTQSPASLAVSLGQRATISCKASQSVDYDGDSYMNWYQQKPGQPPKLLIYAASNLESGIPARLSGSGSGTDFTLNIHPVEEEDAATYYCQQSEEDPFTFGSGTKLEVKRTVAAPSVFIFPPSDEQLKSGTASVVCLLNNFYPREAKVQWKVDNALQSGNSQESVTEQDSKDSTYSLSSTLTLSKADYEKHKVYACEVTHQGLSSPVTKSFNRGEC

SEQ ID NO: 20541 - protein, 111 aa, Artificial Sequence
  Description of Artificial Sequence: Synthetic polypeptide
  VL of XENP020689
DTVLTQSPASLAVSLGQRATISCKASQSVDYDGDSYMNWYQQKPGQPPKLLIYAASNLESGIPARLSGSGSGTDFTLNIHPVEEEDAATYYCQQSEEDPFTFGSGTKLEVK

SEQ ID NO: 20542 - protein, 15 aa, Artificial Sequence
  Description of Artificial Sequence: Synthetic peptide
  XENP020689 vlCDR1
KASQSVDYDGDSYMN

SEQ ID NO: 20543 - protein, 7 aa, Artificial Sequence
  Description of Artificial Sequence: Synthetic peptide
  XENP020689 vlCDR2
AASNLES

SEQ ID NO: 20544 - protein, 9 aa, Artificial Sequence
  Description of Artificial Sequence: Synthetic peptide
  XENP020689 vlCDR3
QQSEEDPFT

SEQ ID NO: 20545 - protein, 450 aa, Artificial Sequence; identical to SEQ ID NO: 17585
  Description of Artificial Sequence: Synthetic polypeptide
  XENP020690 7G8_H0_L0.86_IgG1_PVA_/S267K Heavy Chain

SEQ ID NO: 20546 - protein, 121 aa, Artificial Sequence; identical to SEQ ID NO: 17586
  Description of Artificial Sequence: Synthetic polypeptide
  VH of XENP020690

SEQ ID NO: 20547 - protein, 5 aa, Artificial Sequence
  Description of Artificial Sequence: Synthetic peptide
  XENP020690 vhCDR1
DAWMD

SEQ ID NO: 20548 - protein, 19 aa, Artificial Sequence
  Description of Artificial Sequence: Synthetic peptide
  XENP020690 vhCDR2
EIRTKANNHATYYAESVKG

SEQ ID NO: 20549 - protein, 10 aa, Artificial Sequence
  Description of Artificial Sequence: Synthetic peptide
  XENP020690 vhCDR3
LANWDWYFDV

SEQ ID NO: 20550 - protein, 218 aa, Artificial Sequence
  Description of Artificial Sequence: Synthetic polypeptide
  XENP020690 7G8_H0_L0.86_IgG1_PVA_/S267K Light Chain
DTVLTQSPASLAVSLGQRATISCKASQSVDYDGDSYMNWYQQKPGQPPKLLIYAASNLESGIPARLSGSGSGTDFTLNIHPVEEEDAATYYCQQSSEDPFTFGSGTKLEVKRTVAAPSVFIFPPSDEQLKSGTASVVCLLNNFYPREAKVQWKVDNALQSGNSQESVTEQDSKDSTYSLSSTLTLSKADYEKHKVYACEVTHQGLSSPVTKSFNRGEC

SEQ ID NO: 20551 - protein, 111 aa, Artificial Sequence
  Description of Artificial Sequence: Synthetic polypeptide
  VL of XENP020690
DTVLTQSPASLAVSLGQRATISCKASQSVDYDGDSYMNWYQQKPGQPPKLLIYAASNLESGIPARLSGSGSGTDFTLNIHPVEEEDAATYYCQQSSEDPFTFGSGTKLEVK

SEQ ID NO: 20552 - protein, 15 aa, Artificial Sequence
  Description of Artificial Sequence: Synthetic peptide
  XENP020690 vlCDR1
KASQSVDYDGDSYMN

SEQ ID NO: 20553 - protein, 7 aa, Artificial Sequence
  Description of Artificial Sequence: Synthetic peptide
  XENP020690 vlCDR2
AASNLES

SEQ ID NO: 20554 - protein, 9 aa, Artificial Sequence
  Description of Artificial Sequence: Synthetic peptide
  XENP020690 vlCDR3
QQSSEDPFT

SEQ ID NO: 20555 - protein, 450 aa, Artificial Sequence; identical to SEQ ID NO: 17585
  Description of Artificial Sequence: Synthetic polypeptide
  XENP020691 7G8_H0_L0.87_IgG1_PVA_/S267K Heavy Chain

SEQ ID NO: 20556 - protein, 121 aa, Artificial Sequence; identical to SEQ ID NO: 17586
  Description of Artificial Sequence: Synthetic polypeptide
  VH of XENP020691

SEQ ID NO: 20557 - protein, 5 aa, Artificial Sequence
  Description of Artificial Sequence: Synthetic peptide
  XENP020691 vhCDR1
DAWMD

SEQ ID NO: 20558 - protein, 19 aa, Artificial Sequence
  Description of Artificial Sequence: Synthetic peptide
  XENP020691 vhCDR2
EIRTKANNHATYYAESVKG

SEQ ID NO: 20559 - protein, 10 aa, Artificial Sequence
  Description of Artificial Sequence: Synthetic peptide
  XENP020691 vhCDR3
LANWDWYFDV

SEQ ID NO: 20560 - protein, 218 aa, Artificial Sequence
  Description of Artificial Sequence: Synthetic polypeptide
  XENP020691 7G8_H0_L0.87_IgG1_PVA_/S267K Light Chain
DTVLTQSPASLAVSLGQRATISCKASQSVDYDGDSYMNWYQQKPGQPPKLLIYAASNLESGIPARLSGSGSGTDFTLNIHPVEEEDAATYYCQQSREDPFTFGSGTKLEVKRTVAAPSVFIFPPSDEQLKSGTASVVCLLNNFYPREAKVQWKVDNALQSGNSQESVTEQDSKDSTYSLSSTLTLSKADYEKHKVYACEVTHQGLSSPVTKSFNRGEC

SEQ ID NO: 20561 - protein, 111 aa, Artificial Sequence
  Description of Artificial Sequence: Synthetic polypeptide
  VL of XENP020691
DTVLTQSPASLAVSLGQRATISCKASQSVDYDGDSYMNWYQQKPGQPPKLLIYAASNLESGIPARLSGSGSGTDFTLNIHPVEEEDAATYYCQQSREDPFTFGSGTKLEVK

SEQ ID NO: 20562 - protein, 15 aa, Artificial Sequence
  Description of Artificial Sequence: Synthetic peptide
  XENP020691 vlCDR1
KASQSVDYDGDSYMN

SEQ ID NO: 20563 - protein, 7 aa, Artificial Sequence
  Description of Artificial Sequence: Synthetic peptide
  XENP020691 vlCDR2
AASNLES

SEQ ID NO: 20564 - protein, 9 aa, Artificial Sequence
  Description of Artificial Sequence: Synthetic peptide
  XENP020691 vlCDR3
QQSREDPFT

SEQ ID NO: 20565 - protein, 450 aa, Artificial Sequence; identical to SEQ ID NO: 17585
  Description of Artificial Sequence: Synthetic polypeptide
  XENP020692 7G8_H0_L0.88_IgG1_PVA_/S267K Heavy Chain

SEQ ID NO: 20566 - protein, 121 aa, Artificial Sequence; identical to SEQ ID NO: 17586
  Description of Artificial Sequence: Synthetic polypeptide
  VH of XENP020692

SEQ ID NO: 20567 - protein, 5 aa, Artificial Sequence
  Description of Artificial Sequence: Synthetic peptide
  XENP020692 vhCDR1
DAWMD

SEQ ID NO: 20568 - protein, 19 aa, Artificial Sequence
  Description of Artificial Sequence: Synthetic peptide
  XENP020692 vhCDR2
EIRTKANNHATYYAESVKG

SEQ ID NO: 20569 - protein, 10 aa, Artificial Sequence
  Description of Artificial Sequence: Synthetic peptide
  XENP020692 vhCDR3
LANWDWYFDV

SEQ ID NO: 20570 - protein, 218 aa, Artificial Sequence
  Description of Artificial Sequence: Synthetic polypeptide
  XENP020692 7G8_H0_L0.88_IgG1_PVA_/S267K Light Chain
DTVLTQSPASLAVSLGQRATISCKASQSVDYDGDSYMNWYQQKPGQPPKLLIYAASNLESGIPARLSGSGSGTDFTLNIHPVEEEDAATYYCQQSLEDPFTFGSGTKLEVKRTVAAPSVFIFPPSDEQLKSGTASVVCLLNNFYPREAKVQWKVDNALQSGNSQESVTEQDSKDSTYSLSSTLTLSKADYEKHKVYACEVTHQGLSSPVTKSFNRGEC

SEQ ID NO: 20571 - protein, 111 aa, Artificial Sequence
  Description of Artificial Sequence: Synthetic polypeptide
  VL of XENP020692
DTVLTQSPASLAVSLGQRATISCKASQSVDYDGDSYMNWYQQKPGQPPKLLIYAASNLESGIPARLSGSGSGTDFTLNIHPVEEEDAATYYCQQSLEDPFTFGSGTKLEVK

SEQ ID NO: 20572 - protein, 15 aa, Artificial Sequence
  Description of Artificial Sequence: Synthetic peptide
  XENP020692 vlCDR1
KASQSVDYDGDSYMN

SEQ ID NO: 20573 - protein, 7 aa, Artificial Sequence
  Description of Artificial Sequence: Synthetic peptide
  XENP020692 vlCDR2
AASNLES

SEQ ID NO: 20574 - protein, 9 aa, Artificial Sequence
  Description of Artificial Sequence: Synthetic peptide
  XENP020692 vlCDR3
QQSLEDPFT

SEQ ID NO: 20575 - protein, 450 aa, Artificial Sequence; identical to SEQ ID NO: 17585
  Description of Artificial Sequence: Synthetic polypeptide
  XENP020693 7G8_H0_L0.89_IgG1_PVA_/S267K Heavy Chain

SEQ ID NO: 20576 - protein, 121 aa, Artificial Sequence; identical to SEQ ID NO: 17586
  Description of Artificial Sequence: Synthetic polypeptide
  VH of XENP020693

SEQ ID NO: 20577 - protein, 5 aa, Artificial Sequence
  Description of Artificial Sequence: Synthetic peptide
  XENP020693 vhCDR1
DAWMD

SEQ ID NO: 20578 - protein, 19 aa, Artificial Sequence
  Description of Artificial Sequence: Synthetic peptide
  XENP020693 vhCDR2
EIRTKANNHATYYAESVKG

SEQ ID NO: 20579 - protein, 10 aa, Artificial Sequence
  Description of Artificial Sequence: Synthetic peptide
  XENP020693 vhCDR3
LANWDWYFDV

SEQ ID NO: 20580 - protein, 218 aa, Artificial Sequence
  Description of Artificial Sequence: Synthetic polypeptide
  XENP020693 7G8_H0_L0.89_IgG1_PVA_/S267K Light Chain
DTVLTQSPASLAVSLGQRATISCKASQSVDYDGDSYMNWYQQKPGQPPKLLIYAASNLESGIPARLSGSGSGTDFTLNIHPVEEEDAATYYCQQSTEDPFTFGSGTKLEVKRTVAAPSVFIFPPSDEQLKSGTASVVCLLNNFYPREAKVQWKVDNALQSGNSQESVTEQDSKDSTYSLSSTLTLSKADYEKHKVYACEVTHQGLSSPVTKSFNRGEC

SEQ ID NO: 20581 - protein, 111 aa, Artificial Sequence
  Description of Artificial Sequence: Synthetic polypeptide
  VL of XENP020693
DTVLTQSPASLAVSLGQRATISCKASQSVDYDGDSYMNWYQQKPGQPPKLLIYAASNLESGIPARLSGSGSGTDFTLNIHPVEEEDAATYYCQQSTEDPFTFGSGTKLEVK

SEQ ID NO: 20582 - protein, 15 aa, Artificial Sequence
  Description of Artificial Sequence: Synthetic peptide
  XENP020693 vlCDR1
KASQSVDYDGDSYMN

SEQ ID NO: 20583 - protein, 7 aa, Artificial Sequence
  Description of Artificial Sequence: Synthetic peptide
  XENP020693 vlCDR2
AASNLES

SEQ ID NO: 20584 - protein, 9 aa, Artificial Sequence
  Description of Artificial Sequence: Synthetic peptide
  XENP020693 vlCDR3
QQSTEDPFT

SEQ ID NO: 20585 - protein, 450 aa, Artificial Sequence; identical to SEQ ID NO: 17585
  Description of Artificial Sequence: Synthetic polypeptide
  XENP020694 7G8_H0_L0.90_IgG1_PVA_/S267K Heavy Chain

SEQ ID NO: 20586 - protein, 121 aa, Artificial Sequence; identical to SEQ ID NO: 17586
  Description of Artificial Sequence: Synthetic polypeptide
  VH of XENP020694

SEQ ID NO: 20587 - protein, 5 aa, Artificial Sequence
  Description of Artificial Sequence: Synthetic peptide
  XENP020694 vhCDR1
DAWMD

SEQ ID NO: 20588 - protein, 19 aa, Artificial Sequence
  Description of Artificial Sequence: Synthetic peptide
  XENP020694 vhCDR2
EIRTKANNHATYYAESVKG

SEQ ID NO: 20589 - protein, 10 aa, Artificial Sequence
  Description of Artificial Sequence: Synthetic peptide
  XENP020694 vhCDR3
LANWDWYFDV

SEQ ID NO: 20590 - protein, 218 aa, Artificial Sequence
  Description of Artificial Sequence: Synthetic polypeptide
  XENP020694 7G8_H0_L0.90_IgG1_PVA_/S267K Light Chain
DTVLTQSPASLAVSLGQRATISCKASQSVDYDGDSYMNWYQQKPGQPPKLLIYAASNLESGIPARLSGSGSGTDFTLNIHPVEEEDAATYYCQQSGEDPFTFGSGTKLEVKRTVAAPSVFIFPPSDEQLKSGTASVVCLLNNFYPREAKVQWKVDNALQSGNSQESVTEQDSKDSTYSLSSTLTLSKADYEKHKVYACEVTHQGLSSPVTKSFNRGEC

SEQ ID NO: 20591 - protein, 111 aa, Artificial Sequence
  Description of Artificial Sequence: Synthetic polypeptide
  VL of XENP020694
DTVLTQSPASLAVSLGQRATISCKASQSVDYDGDSYMNWYQQKPGQPPKLLIYAASNLESGIPARLSGSGSGTDFTLNIHPVEEEDAATYYCQQSGEDPFTFGSGTKLEVK

SEQ ID NO: 20592 - protein, 15 aa, Artificial Sequence
  Description of Artificial Sequence: Synthetic peptide
  XENP020694 vlCDR1
KASQSVDYDGDSYMN

SEQ ID NO: 20593 - protein, 7 aa, Artificial Sequence
  Description of Artificial Sequence: Synthetic peptide
  XENP020694 vlCDR2
AASNLES

SEQ ID NO: 20594 - protein, 9 aa, Artificial Sequence
  Description of Artificial Sequence: Synthetic peptide
  XENP020694 vlCDR3
QQSGEDPFT

SEQ ID NO: 20595 - protein, 450 aa, Artificial Sequence; identical to SEQ ID NO: 17585
  Description of Artificial Sequence: Synthetic polypeptide
  XENP020695 7G8_H0_L0.91_IgG1_PVA_/S267K Heavy Chain

SEQ ID NO: 20596 - protein, 121 aa, Artificial Sequence; identical to SEQ ID NO: 17586
  Description of Artificial Sequence: Synthetic polypeptide
  VH of XENP020695

SEQ ID NO: 20597 - protein, 5 aa, Artificial Sequence
  Description of Artificial Sequence: Synthetic peptide
  XENP020695 vhCDR1
DAWMD

SEQ ID NO: 20598 - protein, 19 aa, Artificial Sequence
  Description of Artificial Sequence: Synthetic peptide
  XENP020695 vhCDR2
EIRTKANNHATYYAESVKG

SEQ ID NO: 20599 - protein, 10 aa, Artificial Sequence
  Description of Artificial Sequence: Synthetic peptide
  XENP020695 vhCDR3
LANWDWYFDV

SEQ ID NO: 20600 - protein, 218 aa, Artificial Sequence
  Description of Artificial Sequence: Synthetic polypeptide
  XENP020695 7G8_H0_L0.91_IgG1_PVA_/S267K Light Chain
DTVLTQSPASLAVSLGQRATISCKASQSVDYDGDSYMNWYQQKPGQPPKLLIYAASNLESGIPARLSGSGSGTDFTLNIHPVEEEDAATYYCQQSYEDPFTFGSGTKLEVKRTVAAPSVFIFPPSDEQLKSGTASVVCLLNNFYPREAKVQWKVDNALQSGNSQESVTEQDSKDSTYSLSSTLTLSKADYEKHKVYACEVTHQGLSSPVTKSFNRGEC

SEQ ID NO: 20601 - protein, 111 aa, Artificial Sequence
  Description of Artificial Sequence: Synthetic polypeptide
  VL of XENP020695
DTVLTQSPASLAVSLGQRATISCKASQSVDYDGDSYMNWYQQKPGQPPKLLIYAASNLESGIPARLSGSGSGTDFTLNIHPVEEEDAATYYCQQSYEDPFTFGSGTKLEVK

SEQ ID NO: 20602 - protein, 15 aa, Artificial Sequence
  Description of Artificial Sequence: Synthetic peptide
  XENP020695 vlCDR1
KASQSVDYDGDSYMN

SEQ ID NO: 20603 - protein, 7 aa, Artificial Sequence
  Description of Artificial Sequence: Synthetic peptide
  XENP020695 vlCDR2
AASNLES

SEQ ID NO: 20604 - protein, 9 aa, Artificial Sequence
  Description of Artificial Sequence: Synthetic peptide
  XENP020695 vlCDR3
QQSYEDPFT

SEQ ID NO: 20605 - protein, 450 aa, Artificial Sequence; identical to SEQ ID NO: 17585
  Description of Artificial Sequence: Synthetic polypeptide
  XENP020696 7G8_H0_L0.92_IgG1_PVA_/S267K Heavy Chain

SEQ ID NO: 20606 - protein, 121 aa, Artificial Sequence; identical to SEQ ID NO: 17586
  Description of Artificial Sequence: Synthetic polypeptide
  VH of XENP020696

SEQ ID NO: 20607 - protein, 5 aa, Artificial Sequence
  Description of Artificial Sequence: Synthetic peptide
  XENP020696 vhCDR1
DAWMD

SEQ ID NO: 20608 - protein, 19 aa, Artificial Sequence
  Description of Artificial Sequence: Synthetic peptide
  XENP020696 vhCDR2
EIRTKANNHATYYAESVKG

SEQ ID NO: 20609 - protein, 10 aa, Artificial Sequence
  Description of Artificial Sequence: Synthetic peptide
  XENP020696 vhCDR3
LANWDWYFDV

SEQ ID NO: 20610 - protein, 218 aa, Artificial Sequence
  Description of Artificial Sequence: Synthetic polypeptide
  XENP020696 7G8_H0_L0.92_IgG1_PVA_/S267K Light Chain
DTVLTQSPASLAVSLGQRATISCKASQSVDYDGDSYMNWYQQKPGQPPKLLIYAASNLESGIPARLSGSGSGTDFTLNIHPVEEEDAATYYCQQSNQDPFTFGSGTKLEVKRTVAAPSVFIFPPSDEQLKSGTASVVCLLNNFYPREAKVQWKVDNALQSGNSQESVTEQDSKDSTYSLSSTLTLSKADYEKHKVYACEVTHQGLSSPVTKSFNRGEC

SEQ ID NO: 20611 - protein, 111 aa, Artificial Sequence
  Description of Artificial Sequence: Synthetic polypeptide
  VL of XENP020696
DTVLTQSPASLAVSLGQRATISCKASQSVDYDGDSYMNWYQQKPGQPPKLLIYAASNLESGIPARLSGSGSGTDFTLNIHPVEEEDAATYYCQQSNQDPFTFGSGTKLEVK

SEQ ID NO: 20612 - protein, 15 aa, Artificial Sequence
  Description of Artificial Sequence: Synthetic peptide
  XENP020696 vlCDR1
KASQSVDYDGDSYMN

SEQ ID NO: 20613 - protein, 7 aa, Artificial Sequence
  Description of Artificial Sequence: Synthetic peptide
  XENP020696 vlCDR2
AASNLES

SEQ ID NO: 20614 - protein, 9 aa, Artificial Sequence
  Description of Artificial Sequence: Synthetic peptide
  XENP020696 vlCDR3
QQSNQDPFT

SEQ ID NO: 20615 - protein, 450 aa, Artificial Sequence; identical to SEQ ID NO: 17585
  Description of Artificial Sequence: Synthetic polypeptide
  XENP020701 7G8_H0_L0.93_IgG1_PVA_/S267K Heavy Chain

SEQ ID NO: 20616 - protein, 121 aa, Artificial Sequence; identical to SEQ ID NO: 17586
  Description of Artificial Sequence: Synthetic polypeptide
  VH of XENP020701

SEQ ID NO: 20617 - protein, 5 aa, Artificial Sequence
  Description of Artificial Sequence: Synthetic peptide
  XENP020701 vhCDR1
DAWMD

SEQ ID NO: 20618 - protein, 19 aa, Artificial Sequence
  Description of Artificial Sequence: Synthetic peptide
  XENP020701 vhCDR2
EIRTKANNHATYYAESVKG

SEQ ID NO: 20619 - protein, 10 aa, Artificial Sequence
  Description of Artificial Sequence: Synthetic peptide
  XENP020701 vhCDR3
LANWDWYFDV

SEQ ID NO: 20620 - protein, 218 aa, Artificial Sequence
  Description of Artificial Sequence: Synthetic polypeptide
  XENP020701 7G8_H0_L0.93_IgG1_PVA_/S267K Light Chain
DTVLTQSPASLAVSLGQRATISCKASQSVDYDGDSYMNWYQQKPGQPPKLLIYAASNLESGIPARLSGSGSGTDFTLNIHPVEEEDAATYYCQQSNDDPFTFGSGTKLEVKRTVAAPSVFIFPPSDEQLKSGTASVVCLLNNFYPREAKVQWKVDNALQSGNSQESVTEQDSKDSTYSLSSTLTLSKADYEKHKVYACEVTHQGLSSPVTKSFNRGEC

SEQ ID NO: 20621 - protein, 111 aa, Artificial Sequence
  Description of Artificial Sequence: Synthetic polypeptide
  VL of XENP020701
DTVLTQSPASLAVSLGQRATISCKASQSVDYDGDSYMNWYQQKPGQPPKLLIYAASNLESGIPARLSGSGSGTDFTLNIHPVEEEDAATYYCQQSNDDPFTFGSGTKLEVK

SEQ ID NO: 20622 - protein, 15 aa, Artificial Sequence
  Description of Artificial Sequence: Synthetic peptide
  XENP020701 vlCDR1
KASQSVDYDGDSYMN

SEQ ID NO: 20623 - protein, 7 aa, Artificial Sequence
  Description of Artificial Sequence: Synthetic peptide
  XENP020701 vlCDR2
AASNLES

SEQ ID NO: 20624 - protein, 9 aa, Artificial Sequence
  Description of Artificial Sequence: Synthetic peptide
  XENP020701 vlCDR3
QQSNDDPFT

SEQ ID NO: 20625 - protein, 450 aa, Artificial Sequence; identical to SEQ ID NO: 17585
  Description of Artificial Sequence: Synthetic polypeptide
  XENP020702 7G8_H0_L0.94_IgG1_PVA_/S267K Heavy Chain

SEQ ID NO: 20626 - protein, 121 aa, Artificial Sequence; identical to SEQ ID NO: 17586
  Description of Artificial Sequence: Synthetic polypeptide
  VH of XENP020702

SEQ ID NO: 20627 - protein, 5 aa, Artificial Sequence
  Description of Artificial Sequence: Synthetic peptide
  XENP020702 vhCDR1
DAWMD

SEQ ID NO: 20628 - protein, 19 aa, Artificial Sequence
  Description of Artificial Sequence: Synthetic peptide
  XENP020702 vhCDR2
EIRTKANNHATYYAESVKG

SEQ ID NO: 20629 - protein, 10 aa, Artificial Sequence
  Description of Artificial Sequence: Synthetic peptide
  XENP020702 vhCDR3
LANWDWYFDV

SEQ ID NO: 20630 - protein, 218 aa, Artificial Sequence
  Description of Artificial Sequence: Synthetic polypeptide
  XENP020702 7G8_H0_L0.94_IgG1_PVA_/S267K Light Chain
DTVLTQSPASLAVSLGQRATISCKASQSVDYDGDSYMNWYQQKPGQPPKLLIYAASNLESGIPARLSGSGSGTDFTLNIHPVEEEDAATYYCQQSNKDPFTFGSGTKLEVKRTVAAPSVFIFPPSDEQLKSGTASVVCLLNNFYPREAKVQWKVDNALQSGNSQESVTEQDSKDSTYSLSSTLTLSKADYEKHKVYACEVTHQGLSSPVTKSFNRGEC

SEQ ID NO: 20631 - protein, 111 aa, Artificial Sequence
  Description of Artificial Sequence: Synthetic polypeptide
  VL of XENP020702
DTVLTQSPASLAVSLGQRATISCKASQSVDYDGDSYMNWYQQKPGQPPKLLIYAASNLESGIPARLSGSGSGTDFTLNIHPVEEEDAATYYCQQSNKDPFTFGSGTKLEVK

SEQ ID NO: 20632 - protein, 15 aa, Artificial Sequence
  Description of Artificial Sequence: Synthetic peptide
  XENP020702 vlCDR1
KASQSVDYDGDSYMN

SEQ ID NO: 20633 - protein, 7 aa, Artificial Sequence
  Description of Artificial Sequence: Synthetic peptide
  XENP020702 vlCDR2
AASNLES

SEQ ID NO: 20634 - protein, 9 aa, Artificial Sequence
  Description of Artificial Sequence: Synthetic peptide
  XENP020702 vlCDR3
QQSNKDPFT

SEQ ID NO: 20635 - protein, 450 aa, Artificial Sequence; identical to SEQ ID NO: 17585
  Description of Artificial Sequence: Synthetic polypeptide
  XENP020703 7G8_H0_L0.95_IgG1_PVA_/S267K Heavy Chain

SEQ ID NO: 20636 - protein, 121 aa, Artificial Sequence; identical to SEQ ID NO: 17586
  Description of Artificial Sequence: Synthetic polypeptide
  VH of XENP020703

SEQ ID NO: 20637 - protein, 5 aa, Artificial Sequence
  Description of Artificial Sequence: Synthetic peptide
  XENP020703 vhCDR1
DAWMD

SEQ ID NO: 20638 - protein, 19 aa, Artificial Sequence
  Description of Artificial Sequence: Synthetic peptide
  XENP020703 vhCDR2
EIRTKANNHATYYAESVKG

SEQ ID NO: 20639 - protein, 10 aa, Artificial Sequence
  Description of Artificial Sequence: Synthetic peptide
  XENP020703 vhCDR3
LANWDWYFDV

SEQ ID NO: 20640 - protein, 218 aa, Artificial Sequence
  Description of Artificial Sequence: Synthetic polypeptide
  XENP020703 7G8_H0_L0.95_IgG1_PVA_/S267K Light Chain
DTVLTQSPASLAVSLGQRATISCKASQSVDYDGDSYMNWYQQKPGQPPKLLIYAASNLESGIPARLSGSGSGTDFTLNIHPVEEEDAATYYCQQSNSDPFTFGSGTKLEVKRTVAAPSVFIFPPSDEQLKSGTASVVCLLNNFYPREAKVQWKVDNALQSGNSQESVTEQDSKDSTYSLSSTLTLSKADYEKHKVYACEVTHQGLSSPVTKSFNRGEC

SEQ ID NO: 20641 - protein, 111 aa, Artificial Sequence
  Description of Artificial Sequence: Synthetic polypeptide
  VL of XENP020703
DTVLTQSPASLAVSLGQRATISCKASQSVDYDGDSYMNWYQQKPGQPPKLLIYAASNLESGIPARLSGSGSGTDFTLNIHPVEEEDAATYYCQQSNSDPFTFGSGTKLEVK

SEQ ID NO: 20642 - protein, 15 aa, Artificial Sequence
  Description of Artificial Sequence: Synthetic peptide
  XENP020703 vlCDR1
KASQSVDYDGDSYMN

SEQ ID NO: 20643 - protein, 7 aa, Artificial Sequence
  Description of Artificial Sequence: Synthetic peptide
  XENP020703 vlCDR2
AASNLES

SEQ ID NO: 20644 - protein, 9 aa, Artificial Sequence
  Description of Artificial Sequence: Synthetic peptide
  XENP020703 vlCDR3
QQSNSDPFT

SEQ ID NO: 20645 - protein, 450 aa, Artificial Sequence; identical to SEQ ID NO: 17585
  Description of Artificial Sequence: Synthetic polypeptide
  XENP020704 7G8_H0_L0.96_IgG1_PVA_/S267K Heavy Chain

SEQ ID NO: 20646 - protein, 121 aa, Artificial Sequence; identical to SEQ ID NO: 17586
  Description of Artificial Sequence: Synthetic polypeptide
  VH of XENP020704

SEQ ID NO: 20647 - protein, 5 aa, Artificial Sequence
  Description of Artificial Sequence: Synthetic peptide
  XENP020704 vhCDR1
DAWMD

SEQ ID NO: 20648 - protein, 19 aa, Artificial Sequence
  Description of Artificial Sequence: Synthetic peptide
  XENP020704 vhCDR2
EIRTKANNHATYYAESVKG

SEQ ID NO: 20649 - protein, 10 aa, Artificial Sequence
  Description of Artificial Sequence: Synthetic peptide
  XENP020704 vhCDR3
LANWDWYFDV

SEQ ID NO: 20650 - protein, 218 aa, Artificial Sequence
  Description of Artificial Sequence: Synthetic polypeptide
  XENP020704 7G8_H0_L0.96_IgG1_PVA_/S267K Light Chain
DTVLTQSPASLAVSLGQRATISCKASQSVDYDGDSYMNWYQQKPGQPPKLLIYAASNLESGIPARLSGSGSGTDFTLNIHPVEEEDAATYYCQQSNHDPFTFGSGTKLEVKRTVAAPSVFIFPPSDEQLKSGTASVVCLLNNFYPREAKVQWKVDNALQSGNSQESVTEQDSKDSTYSLSSTLTLSKADYEKHKVYACEVTHQGLSSPVTKSFNRGEC

SEQ ID NO: 20651 - protein, 111 aa, Artificial Sequence
  Description of Artificial Sequence: Synthetic polypeptide
  VL of XENP020704
DTVLTQSPASLAVSLGQRATISCKASQSVDYDGDSYMNWYQQKPGQPPKLLIYAASNLESGIPARLSGSGSGTDFTLNIHPVEEEDAATYYCQQSNHDPFTFGSGTKLEVK

SEQ ID NO: 20652 - protein, 15 aa, Artificial Sequence
  Description of Artificial Sequence: Synthetic peptide
  XENP020704 vlCDR1
KASQSVDYDGDSYMN

SEQ ID NO: 20653 - protein, 7 aa, Artificial Sequence
  Description of Artificial Sequence: Synthetic peptide
  XENP020704 vlCDR2
AASNLES

SEQ ID NO: 20654 - protein, 9 aa, Artificial Sequence
  Description of Artificial Sequence: Synthetic peptide
  XENP020704 vlCDR3
QQSNHDPFT

SEQ ID NO: 20655 - protein, 450 aa, Artificial Sequence; identical to SEQ ID NO: 17585
  Description of Artificial Sequence: Synthetic polypeptide
  XENP020705 7G8_H0_L0.97_IgG1_PVA_/S267K Heavy Chain

SEQ ID NO: 20656 - protein, 121 aa, Artificial Sequence; identical to SEQ ID NO: 17586
  Description of Artificial Sequence: Synthetic polypeptide
  VH of XENP020705

SEQ ID NO: 20657 - protein, 5 aa, Artificial Sequence
  Description of Artificial Sequence: Synthetic peptide
  XENP020705 vhCDR1
DAWMD

SEQ ID NO: 20658 - protein, 19 aa, Artificial Sequence
  Description of Artificial Sequence: Synthetic peptide
  XENP020705 vhCDR2
EIRTKANNHATYYAESVKG

SEQ ID NO: 20659 - protein, 10 aa, Artificial Sequence
  Description of Artificial Sequence: Synthetic peptide
  XENP020705 vhCDR3
LANWDWYFDV

SEQ ID NO: 20660 - protein, 218 aa, Artificial Sequence
  Description of Artificial Sequence: Synthetic polypeptide
  XENP020705 7G8_H0_L0.97_IgG1_PVA_/S267K Light Chain
DTVLTQSPASLAVSLGQRATISCKASQSVDYDGDSYMNWYQQKPGQPPKLLIYAASNLESGIPARLSGSGSGTDFTLNIHPVEEEDAATYYCQQSNADPFTFGSGTKLEVKRTVAAPSVFIFPPSDEQLKSGTASVVCLLNNFYPREAKVQWKVDNALQSGNSQESVTEQDSKDSTYSLSSTLTLSKADYEKHKVYACEVTHQGLSSPVTKSFNRGEC

SEQ ID NO: 20661 - protein, 111 aa, Artificial Sequence
  Description of Artificial Sequence: Synthetic polypeptide
  VL of XENP020705
DTVLTQSPASLAVSLGQRATISCKASQSVDYDGDSYMNWYQQKPGQPPKLLIYAASNLESGIPARLSGSGSGTDFTLNIHPVEEEDAATYYCQQSNADPFTFGSGTKLEVK

SEQ ID NO: 20662 - protein, 15 aa, Artificial Sequence
  Description of Artificial Sequence: Synthetic peptide
  XENP020705 vlCDR1
KASQSVDYDGDSYMN

SEQ ID NO: 20663 - protein, 7 aa, Artificial Sequence
  Description of Artificial Sequence: Synthetic peptide
  XENP020705 vlCDR2
AASNLES

SEQ ID NO: 20664 - protein, 9 aa, Artificial Sequence
  Description of Artificial Sequence: Synthetic peptide
  XENP020705 vlCDR3
QQSNADPFT

SEQ ID NO: 20665 - protein, 450 aa, Artificial Sequence; identical to SEQ ID NO: 17585
  Description of Artificial Sequence: Synthetic polypeptide
  XENP020706 7G8_H0_L0.98_IgG1_PVA_/S267K Heavy Chain

SEQ ID NO: 20666 - protein, 121 aa, Artificial Sequence; identical to SEQ ID NO: 17586
  Description of Artificial Sequence: Synthetic polypeptide
  VH of XENP020706

SEQ ID NO: 20667 - protein, 5 aa, Artificial Sequence
  Description of Artificial Sequence: Synthetic peptide
  XENP020706 vhCDR1
DAWMD

SEQ ID NO: 20668 - protein, 19 aa, Artificial Sequence
  Description of Artificial Sequence: Synthetic peptide
  XENP020706 vhCDR2
EIRTKANNHATYYAESVKG

SEQ ID NO: 20669 - protein, 10 aa, Artificial Sequence
  Description of Artificial Sequence: Synthetic peptide
  XENP020706 vhCDR3
LANWDWYFDV

SEQ ID NO: 20670 - protein, 218 aa, Artificial Sequence
  Description of Artificial Sequence: Synthetic polypeptide
  XENP020706 7G8_H0_L0.98_IgG1_PVA_/S267K Light Chain
DTVLTQSPASLAVSLGQRATISCKASQSVDYDGDSYMNWYQQKPGQPPKLLIYAASNLESGIPARLSGSGSGTDFTLNIHPVEEEDAATYYCQQSNGDPFTFGSGTKLEVKRTVAAPSVFIFPPSDEQLKSGTASVVCLLNNFYPREAKVQWKVDNALQSGNSQESVTEQDSKDSTYSLSSTLTLSKADYEKHKVYACEVTHQGLSSPVTKSFNRGEC

SEQ ID NO: 20671 - protein, 111 aa, Artificial Sequence
  Description of Artificial Sequence: Synthetic polypeptide
  VL of XENP020706
DTVLTQSPASLAVSLGQRATISCKASQSVDYDGDSYMNWYQQKPGQPPKLLIYAASNLESGIPARLSGSGSGTDFTLNIHPVEEEDAATYYCQQSNGDPFTFGSGTKLEVK

SEQ ID NO: 20672 - protein, 15 aa, Artificial Sequence
  Description of Artificial Sequence: Synthetic peptide
  XENP020706 vlCDR1
KASQSVDYDGDSYMN

SEQ ID NO: 20673 - protein, 7 aa, Artificial Sequence
  Description of Artificial Sequence: Synthetic peptide
  XENP020706 vlCDR2
AASNLES

SEQ ID NO: 20674 - protein, 9 aa, Artificial Sequence
  Description of Artificial Sequence: Synthetic peptide
  XENP020706 vlCDR3
QQSNGDPFT

SEQ ID NO: 20675 - protein, 450 aa, Artificial Sequence; identical to SEQ ID NO: 17585
  Description of Artificial Sequence: Synthetic polypeptide
  XENP020707 7G8_H0_L0.99_IgG1_PVA_/S267K Heavy Chain

SEQ ID NO: 20676 - protein, 121 aa, Artificial Sequence; identical to SEQ ID NO: 17586
  Description of Artificial Sequence: Synthetic polypeptide
  VH of XENP020707

SEQ ID NO: 20677 - protein, 5 aa, Artificial Sequence
  Description of Artificial Sequence: Synthetic peptide
  XENP020707 vhCDR1
DAWMD

SEQ ID NO: 20678 - protein, 19 aa, Artificial Sequence
  Description of Artificial Sequence: Synthetic peptide
  XENP020707 vhCDR2
EIRTKANNHATYYAESVKG

SEQ ID NO: 20679 - protein, 10 aa, Artificial Sequence
  Description of Artificial Sequence: Synthetic peptide
  XENP020707 vhCDR3
LANWDWYFDV

SEQ ID NO: 20680 - protein, 218 aa, Artificial Sequence
  Description of Artificial Sequence: Synthetic polypeptide
  XENP020707 7G8_H0_L0.99_IgG1_PVA_/S267K Light Chain
DTVLTQSPASLAVSLGQRATISCKASQSVDYDGDSYMNWYQQKPGQPPKLLIYAASNLESGIPARLSGSGSGTDFTLNIHPVEEEDAATYYCQQSNYDPFTFGSGTKLEVKRTVAAPSVFIFPPSDEQLKSGTASVVCLLNNFYPREAKVQWKVDNALQSGNSQESVTEQDSKDSTYSLSSTLTLSKADYEKHKVYACEVTHQGLSSPVTKSFNRGEC

SEQ ID NO: 20681 - protein, 111 aa, Artificial Sequence
  Description of Artificial Sequence: Synthetic polypeptide
  VL of XENP020707
DTVLTQSPASLAVSLGQRATISCKASQSVDYDGDSYMNWYQQKPGQPPKLLIYAASNLESGIPARLSGSGSGTDFTLNIHPVEEEDAATYYCQQSNYDPFTFGSGTKLEVK

SEQ ID NO: 20682 - protein, 15 aa, Artificial Sequence
  Description of Artificial Sequence: Synthetic peptide
  XENP020707 vlCDR1
KASQSVDYDGDSYMN

SEQ ID NO: 20683 - protein, 7 aa, Artificial Sequence
  Description of Artificial Sequence: Synthetic peptide
  XENP020707 vlCDR2
AASNLES

SEQ ID NO: 20684 - protein, 9 aa, Artificial Sequence
  Description of Artificial Sequence: Synthetic peptide
  XENP020707 vlCDR3
QQSNYDPFT

SEQ ID NO: 20685 - protein, 450 aa, Artificial Sequence; identical to SEQ ID NO: 17585
  Description of Artificial Sequence: Synthetic polypeptide
  XENP020708 7G8_H0_L0.100_IgG1_PVA_/S267K Heavy Chain

SEQ ID NO: 20686 - protein, 121 aa, Artificial Sequence; identical to SEQ ID NO: 17586
  Description of Artificial Sequence: Synthetic polypeptide
  VH of XENP020708

SEQ ID NO: 20687 - protein, 5 aa, Artificial Sequence
  Description of Artificial Sequence: Synthetic peptide
  XENP020708 vhCDR1
DAWMD

SEQ ID NO: 20688 - protein, 19 aa, Artificial Sequence
  Description of Artificial Sequence: Synthetic peptide
  XENP020708 vhCDR2
EIRTKANNHATYYAESVKG

SEQ ID NO: 20689 - protein, 10 aa, Artificial Sequence
  Description of Artificial Sequence: Synthetic peptide
  XENP020708 vhCDR3
LANWDWYFDV

SEQ ID NO: 20690 - protein, 218 aa, Artificial Sequence
  Description of Artificial Sequence: Synthetic polypeptide
  XENP020708 7G8_H0_L0.100_IgG1_PVA_/S267K Light Chain
DTVLTQSPASLAVSLGQRATISCKASQSVDYDGDSYMNWYQQKPGQPPKLLIYAASNLESGIPARLSGSGSGTDFTLNIHPVEEEDAATYYCQQSNIDPFTFGSGTKLEVKRTVAAPSVFIFPPSDEQLKSGTASVVCLLNNFYPREAKVQWKVDNALQSGNSQESVTEQDSKDSTYSLSSTLTLSKADYEKHKVYACEVTHQGLSSPVTKSFNRGEC

SEQ ID NO: 20691 - protein, 111 aa, Artificial Sequence
  Description of Artificial Sequence: Synthetic polypeptide
  VL of XENP020708
DTVLTQSPASLAVSLGQRATISCKASQSVDYDGDSYMNWYQQKPGQPPKLLIYAASNLESGIPARLSGSGSGTDFTLNIHPVEEEDAATYYCQQSNIDPFTFGSGTKLEVK

SEQ ID NO: 20692 - protein, 15 aa, Artificial Sequence
  Description of Artificial Sequence: Synthetic peptide
  XENP020708 vlCDR1
KASQSVDYDGDSYMN

SEQ ID NO: 20693 - protein, 7 aa, Artificial Sequence
  Description of Artificial Sequence: Synthetic peptide
  XENP020708 vlCDR2
AASNLES

SEQ ID NO: 20694 - protein, 9 aa, Artificial Sequence
  Description of Artificial Sequence: Synthetic peptide
  XENP020708 vlCDR3
QQSNIDPFT

SEQ ID NO: 20695 - protein, 450 aa, Artificial Sequence; identical to SEQ ID NO: 17585
  Description of Artificial Sequence: Synthetic polypeptide
  XENP020709 7G8_H0_L0.101_IgG1_PVA_/S267K Heavy Chain

SEQ ID NO: 20696 - protein, 121 aa, Artificial Sequence; identical to SEQ ID NO: 17586
  Description of Artificial Sequence: Synthetic polypeptide
  VH of XENP020709

SEQ ID NO: 20697 - protein, 5 aa, Artificial Sequence
  Description of Artificial Sequence: Synthetic peptide
  XENP020709 vhCDR1
DAWMD

SEQ ID NO: 20698 - protein, 19 aa, Artificial Sequence
  Description of Artificial Sequence: Synthetic peptide
  XENP020709 vhCDR2
EIRTKANNHATYYAESVKG

SEQ ID NO: 20699 - protein, 10 aa, Artificial Sequence
  Description of Artificial Sequence: Synthetic peptide
  XENP020709 vhCDR3
LANWDWYFDV

SEQ ID NO: 20700 - protein, 218 aa, Artificial Sequence
  Description of Artificial Sequence: Synthetic polypeptide
  XENP020709 7G8_H0_L0.101_IgG1_PVA_/S267K Light Chain
DTVLTQSPASLAVSLGQRATISCKASQSVDYDGDSYMNWYQQKPGQPPKLLIYAASNLESGIPARLSGSGSGTDFTLNIHPVEEEDAATYYCQQSNENPFTFGSGTKLEVKRTVAAPSVFIFPPSDEQLKSGTASVVCLLNNFYPREAKVQWKVDNALQSGNSQESVTEQDSKDSTYSLSSTLTLSKADYEKHKVYACEVTHQGLSSPVTKSFNRGEC

SEQ ID NO: 20701 - protein, 111 aa, Artificial Sequence
  Description of Artificial Sequence: Synthetic polypeptide
  VL of XENP020709
DTVLTQSPASLAVSLGQRATISCKASQSVDYDGDSYMNWYQQKPGQPPKLLIYAASNLESGIPARLSGSGSGTDFTLNIHPVEEEDAATYYCQQSNENPFTFGSGTKLEVK

SEQ ID NO: 20702 - protein, 15 aa, Artificial Sequence
  Description of Artificial Sequence: Synthetic peptide
  XENP020709 vlCDR1
KASQSVDYDGDSYMN

SEQ ID NO: 20703 - protein, 7 aa, Artificial Sequence
  Description of Artificial Sequence: Synthetic peptide
  XENP020709 vlCDR2
AASNLES

SEQ ID NO: 20704 - protein, 9 aa, Artificial Sequence
  Description of Artificial Sequence: Synthetic peptide
  XENP020709 vlCDR3
QQSNENPFT

SEQ ID NO: 20705 - protein, 450 aa, Artificial Sequence; identical to SEQ ID NO: 17585
  Description of Artificial Sequence: Synthetic polypeptide
  XENP020710 7G8_H0_L0.102_IgG1_PVA_/S267K Heavy Chain

SEQ ID NO: 20706 - protein, 121 aa, Artificial Sequence; identical to SEQ ID NO: 17586
  Description of Artificial Sequence: Synthetic polypeptide
  VH of XENP020710

SEQ ID NO: 20707 - protein, 5 aa, Artificial Sequence
  Description of Artificial Sequence: Synthetic peptide
  XENP020710 vhCDR1
DAWMD

SEQ ID NO: 20708 - protein, 19 aa, Artificial Sequence
  Description of Artificial Sequence: Synthetic peptide
  XENP020710 vhCDR2
EIRTKANNHATYYAESVKG

SEQ ID NO: 20709 - protein, 10 aa, Artificial Sequence
  Description of Artificial Sequence: Synthetic peptide
  XENP020710 vhCDR3
LANWDWYFDV

SEQ ID NO: 20710 - protein, 218 aa, Artificial Sequence
  Description of Artificial Sequence: Synthetic polypeptide
  XENP020710 7G8_H0_L0.102_IgG1_PVA_/S267K Light Chain
DTVLTQSPASLAVSLGQRATISCKASQSVDYDGDSYMNWYQQKPGQPPKLLIYAASNLESGIPARLSGSGSGTDFTLNIHPVEEEDAATYYCQQSNEEPFTFGSGTKLEVKRTVAAPSVFIFPPSDEQLKSGTASVVCLLNNFYPREAKVQWKVDNALQSGNSQESVTEQDSKDSTYSLSSTLTLSKADYEKHKVYACEVTHQGLSSPVTKSFNRGEC

SEQ ID NO: 20711 - protein, 111 aa, Artificial Sequence
  Description of Artificial Sequence: Synthetic polypeptide
  VL of XENP020710
DTVLTQSPASLAVSLGQRATISCKASQSVDYDGDSYMNWYQQKPGQPPKLLIYAASNLESGIPARLSGSGSGTDFTLNIHPVEEEDAATYYCQQSNEEPFTFGSGTKLEVK

SEQ ID NO: 20712 - protein, 15 aa, Artificial Sequence
  Description of Artificial Sequence: Synthetic peptide
  XENP020710 vlCDR1
KASQSVDYDGDSYMN

SEQ ID NO: 20713 - protein, 7 aa, Artificial Sequence
  Description of Artificial Sequence: Synthetic peptide
  XENP020710 vlCDR2
AASNLES

SEQ ID NO: 20714 - protein, 9 aa, Artificial Sequence
  Description of Artificial Sequence: Synthetic peptide
  XENP020710 vlCDR3
QQSNEEPFT

SEQ ID NO: 20715 - protein, 450 aa, Artificial Sequence; identical to SEQ ID NO: 17585
  Description of Artificial Sequence: Synthetic polypeptide
  XENP020711 7G8_H0_L0.103_IgG1_PVA_/S267K Heavy Chain

SEQ ID NO: 20716 - protein, 121 aa, Artificial Sequence; identical to SEQ ID NO: 17586
  Description of Artificial Sequence: Synthetic polypeptide
  VH of XENP020711

SEQ ID NO: 20717 - protein, 5 aa, Artificial Sequence
  Description of Artificial Sequence: Synthetic peptide
  XENP020711 vhCDR1
DAWMD

SEQ ID NO: 20718 - protein, 19 aa, Artificial Sequence
  Description of Artificial Sequence: Synthetic peptide
  XENP020711 vhCDR2
EIRTKANNHATYYAESVKG

SEQ ID NO: 20719 - protein, 10 aa, Artificial Sequence
  Description of Artificial Sequence: Synthetic peptide
  XENP020711 vhCDR3
LANWDWYFDV

SEQ ID NO: 20720 - protein, 218 aa, Artificial Sequence
  Description of Artificial Sequence: Synthetic polypeptide
  XENP020711 7G8_H0_L0.103_IgG1_PVA_/S267K Light Chain
DTVLTQSPASLAVSLGQRATISCKASQSVDYDGDSYMNWYQQKPGQPPKLLIYAASNLESGIPARLSGSGSGTDFTLNIHPVEEEDAATYYCQQSNEHPFTFGSGTKLEVKRTVAAPSVFIFPPSDEQLKSGTASVVCLLNNFYPREAKVQWKVDNALQSGNSQESVTEQDSKDSTYSLSSTLTLSKADYEKHKVYACEVTHQGLSSPVTKSFNRGEC

SEQ ID NO: 20721 - protein, 111 aa, Artificial Sequence
  Description of Artificial Sequence: Synthetic polypeptide
  VL of XENP020711
DTVLTQSPASLAVSLGQRATISCKASQSVDYDGDSYMNWYQQKPGQPPKLLIYAASNLESGIPARLSGSGSGTDFTLNIHPVEEEDAATYYCQQSNEHPFTFGSGTKLEVK

SEQ ID NO: 20722 - protein, 15 aa, Artificial Sequence
  Description of Artificial Sequence: Synthetic peptide
  XENP020711 vlCDR1
KASQSVDYDGDSYMN

SEQ ID NO: 20723 - protein, 7 aa, Artificial Sequence
  Description of Artificial Sequence: Synthetic peptide
  XENP020711 vlCDR2
AASNLES

SEQ ID NO: 20724 - protein, 9 aa, Artificial Sequence
  Description of Artificial Sequence: Synthetic peptide
  XENP020711 vlCDR3
QQSNEHPFT

SEQ ID NO: 20725 - protein, 450 aa, Artificial Sequence; identical to SEQ ID NO: 17585
  Description of Artificial Sequence: Synthetic polypeptide
  XENP020712 7G8_H0_L0.104_IgG1_PVA_/S267K Heavy Chain

SEQ ID NO: 20726 - protein, 121 aa, Artificial Sequence; identical to SEQ ID NO: 17586
  Description of Artificial Sequence: Synthetic polypeptide
  VH of XENP020712

SEQ ID NO: 20727 - protein, 5 aa, Artificial Sequence
  Description of Artificial Sequence: Synthetic peptide
  XENP020712 vhCDR1
DAWMD

SEQ ID NO: 20728 - protein, 19 aa, Artificial Sequence
  Description of Artificial Sequence: Synthetic peptide
  XENP020712 vhCDR2
EIRTKANNHATYYAESVKG

SEQ ID NO: 20729 - protein, 10 aa, Artificial Sequence
  Description of Artificial Sequence: Synthetic peptide
  XENP020712 vhCDR3
LANWDWYFDV

SEQ ID NO: 20730 - protein, 218 aa, Artificial Sequence
  Description of Artificial Sequence: Synthetic polypeptide
  XENP020712 7G8_H0_L0.104_IgG1_PVA_/S267K Light Chain
DTVLTQSPASLAVSLGQRATISCKASQSVDYDGDSYMNWYQQKPGQPPKLLIYAASNLESGIPARLSGSGSGTDFTLNIHPVEEEDAATYYCQQSNERPFTFGSGTKLEVKRTVAAPSVFIFPPSDEQLKSGTASVVCLLNNFYPREAKVQWKVDNALQSGNSQESVTEQDSKDSTYSLSSTLTLSKADYEKHKVYACEVTHQGLSSPVTKSFNRGEC

SEQ ID NO: 20731 - protein, 111 aa, Artificial Sequence
  Description of Artificial Sequence: Synthetic polypeptide
  VL of XENP020712
DTVLTQSPASLAVSLGQRATISCKASQSVDYDGDSYMNWYQQKPGQPPKLLIYAASNLESGIPARLSGSGSGTDFTLNIHPVEEEDAATYYCQQSNERPFTFGSGTKLEVK

SEQ ID NO: 20732 - protein, 15 aa, Artificial Sequence
  Description of Artificial Sequence: Synthetic peptide
  XENP020712 vlCDR1
KASQSVDYDGDSYMN

SEQ ID NO: 20733 - protein, 7 aa, Artificial Sequence
  Description of Artificial Sequence: Synthetic peptide
  XENP020712 vlCDR2
AASNLES

SEQ ID NO: 20734 - protein, 9 aa, Artificial Sequence
  Description of Artificial Sequence: Synthetic peptide
  XENP020712 vlCDR3
QQSNERPFT

SEQ ID NO: 20735 - protein, 450 aa, Artificial Sequence; identical to SEQ ID NO: 17585
  Description of Artificial Sequence: Synthetic polypeptide
  XENP020713 7G8_H0_L0.105_IgG1_PVA_/S267K Heavy Chain

SEQ ID NO: 20736 - protein, 121 aa, Artificial Sequence; identical to SEQ ID NO: 17586
  Description of Artificial Sequence: Synthetic polypeptide
  VH of XENP020713

SEQ ID NO: 20737 - protein, 5 aa, Artificial Sequence
  Description of Artificial Sequence: Synthetic peptide
  XENP020713 vhCDR1
DAWMD

SEQ ID NO: 20738 - protein, 19 aa, Artificial Sequence
  Description of Artificial Sequence: Synthetic peptide
  XENP020713 vhCDR2
EIRTKANNHATYYAESVKG

SEQ ID NO: 20739 - protein, 10 aa, Artificial Sequence
  Description of Artificial Sequence: Synthetic peptide
  XENP020713 vhCDR3
LANWDWYFDV

SEQ ID NO: 20740 - protein, 218 aa, Artificial Sequence
  Description of Artificial Sequence: Synthetic polypeptide
  XENP020713 7G8_H0_L0.105_IgG1_PVA_/S267K Light Chain
DTVLTQSPASLAVSLGQRATISCKASQSVDYDGDSYMNWYQQKPGQPPKLLIYAASNLESGIPARLSGSGSGTDFTLNIHPVEEEDAATYYCQQSNELPFTFGSGTKLEVKRTVAAPSVFIFPPSDEQLKSGTASVVCLLNNFYPREAKVQWKVDNALQSGNSQESVTEQDSKDSTYSLSSTLTLSKADYEKHKVYACEVTHQGLSSPVTKSFNRGEC

SEQ ID NO: 20741 - protein, 111 aa, Artificial Sequence
  Description of Artificial Sequence: Synthetic polypeptide
  VL of XENP020713
DTVLTQSPASLAVSLGQRATISCKASQSVDYDGDSYMNWYQQKPGQPPKLLIYAASNLESGIPARLSGSGSGTDFTLNIHPVEEEDAATYYCQQSNELPFTFGSGTKLEVK

SEQ ID NO: 20742 - protein, 15 aa, Artificial Sequence
  Description of Artificial Sequence: Synthetic peptide
  XENP020713 vlCDR1
KASQSVDYDGDSYMN

SEQ ID NO: 20743 - protein, 7 aa, Artificial Sequence
  Description of Artificial Sequence: Synthetic peptide
  XENP020713 vlCDR2
AASNLES

SEQ ID NO: 20744 - protein, 9 aa, Artificial Sequence
  Description of Artificial Sequence: Synthetic peptide
  XENP020713 vlCDR3
QQSNELPFT

SEQ ID NO: 20745 - protein, 450 aa, Artificial Sequence; identical to SEQ ID NO: 17585
  Description of Artificial Sequence: Synthetic polypeptide
  XENP020714 7G8_H0_L0.106_IgG1_PVA_/S267K Heavy Chain

SEQ ID NO: 20746 - protein, 121 aa, Artificial Sequence; identical to SEQ ID NO: 17586
  Description of Artificial Sequence: Synthetic polypeptide
  VH of XENP020714

SEQ ID NO: 20747 - protein, 5 aa, Artificial Sequence
  Description of Artificial Sequence: Synthetic peptide
  XENP020714 vhCDR1
DAWMD

SEQ ID NO: 20748 - protein, 19 aa, Artificial Sequence
  Description of Artificial Sequence: Synthetic peptide
  XENP020714 vhCDR2
EIRTKANNHATYYAESVKG

SEQ ID NO: 20749 - protein, 10 aa, Artificial Sequence
  Description of Artificial Sequence: Synthetic peptide
  XENP020714 vhCDR3
LANWDWYFDV

SEQ ID NO: 20750 - protein, 218 aa, Artificial Sequence
  Description of Artificial Sequence: Synthetic polypeptide
  XENP020714 7G8_H0_L0.106_IgG1_PVA_/S267K Light Chain
DTVLTQSPASLAVSLGQRATISCKASQSVDYDGDSYMNWYQQKPGQPPKLLIYAASNLESGIPARLSGSGSGTDFTLNIHPVEEEDAATYYCQQSNEGPFTFGSGTKLEVKRTVAAPSVFIFPPSDEQLKSGTASVVCLLNNFYPREAKVQWKVDNALQSGNSQESVTEQDSKDSTYSLSSTLTLSKADYEKHKVYACEVTHQGLSSPVTKSFNRGEC

SEQ ID NO: 20751 - protein, 111 aa, Artificial Sequence
  Description of Artificial Sequence: Synthetic polypeptide
  VL of XENP020714
DTVLTQSPASLAVSLGQRATISCKASQSVDYDGDSYMNWYQQKPGQPPKLLIYAASNLESGIPARLSGSGSGTDFTLNIHPVEEEDAATYYCQQSNEGPFTFGSGTKLEVK

SEQ ID NO: 20752 - protein, 15 aa, Artificial Sequence
  Description of Artificial Sequence: Synthetic peptide
  XENP020714 vlCDR1
KASQSVDYDGDSYMN

SEQ ID NO: 20753 - protein, 7 aa, Artificial Sequence
  Description of Artificial Sequence: Synthetic peptide
  XENP020714 vlCDR2
AASNLES

SEQ ID NO: 20754 - protein, 9 aa, Artificial Sequence
  Description of Artificial Sequence: Synthetic peptide
  XENP020714 vlCDR3
QQSNEGPFT

SEQ ID NO: 20755 - protein, 450 aa, Artificial Sequence; identical to SEQ ID NO: 17585
  Description of Artificial Sequence: Synthetic polypeptide
  XENP020715 7G8_H0_L0.107_IgG1_PVA_/S267K Heavy Chain

SEQ ID NO: 20756 - protein, 121 aa, Artificial Sequence; identical to SEQ ID NO: 17586
  Description of Artificial Sequence: Synthetic polypeptide
  VH of XENP020715

SEQ ID NO: 20757 - protein, 5 aa, Artificial Sequence
  Description of Artificial Sequence: Synthetic peptide
  XENP020715 vhCDR1
DAWMD

SEQ ID NO: 20758 - protein, 19 aa, Artificial Sequence
  Description of Artificial Sequence: Synthetic peptide
  XENP020715 vhCDR2
EIRTKANNHATYYAESVKG

SEQ ID NO: 20759 - protein, 10 aa, Artificial Sequence
  Description of Artificial Sequence: Synthetic peptide
  XENP020715 vhCDR3
LANWDWYFDV

SEQ ID NO: 20760 - protein, 218 aa, Artificial Sequence
  Description of Artificial Sequence: Synthetic polypeptide
  XENP020715 7G8_H0_L0.107_IgG1_PVA_/S267K Light Chain
DTVLTQSPASLAVSLGQRATISCKASQSVDYDGDSYMNWYQQKPGQPPKLLIYAASNLESGIPARLSGSGSGTDFTLNIHPVEEEDAATYYCQQSNEYPFTFGSGTKLEVKRTVAAPSVFIFPPSDEQLKSGTASVVCLLNNFYPREAKVQWKVDNALQSGNSQESVTEQDSKDSTYSLSSTLTLSKADYEKHKVYACEVTHQGLSSPVTKSFNRGEC

SEQ ID NO: 20761 - protein, 111 aa, Artificial Sequence
  Description of Artificial Sequence: Synthetic polypeptide
  VL of XENP020715
DTVLTQSPASLAVSLGQRATISCKASQSVDYDGDSYMNWYQQKPGQPPKLLIYAASNLESGIPARLSGSGSGTDFTLNIHPVEEEDAATYYCQQSNEYPFTFGSGTKLEVK

SEQ ID NO: 20762 - protein, 15 aa, Artificial Sequence
  Description of Artificial Sequence: Synthetic peptide
  XENP020715 vlCDR1
KASQSVDYDGDSYMN

SEQ ID NO: 20763 - protein, 7 aa, Artificial Sequence
  Description of Artificial Sequence: Synthetic peptide
  XENP020715 vlCDR2
AASNLES

SEQ ID NO: 20764 - protein, 9 aa, Artificial Sequence
  Description of Artificial Sequence: Synthetic peptide
  XENP020715 vlCDR3
QQSNEYPFT

SEQ ID NO: 20765 - protein, 446 aa, Artificial Sequence
  Description of Artificial Sequence: Synthetic polypeptide
  XENP016275 mAb8213_H0L0_IgG1_PVA_/S267K Heavy Chain
QVQLVQSGAEVKKPGASVKVSCKASGYTFTSYWMHWVRQAPGQGLEWMGEINPSNGRTNYNEKFKTRVTITADTSTSTAYMELSSLRSEDTAVYYCARGYYLYFDYWGQGTLVTVSSASTKGPSVFPLAPSSKSTSGGTAALGCLVKDYFPEPVTVSWNSGALTSGVHTFPAVLQSSGLYSLSSVVTVPSSSLGTQTYICNVNHKPSNTKVDKKVEPKSCDKTHTCPPCPAPPVAGPSVFLFPPKPKDTLMISRTPEVTCVVVDVKHEDPEVKFNWYVDGVEVHNAKTKPREEQYNSTYRVVSVLTVLHQDWLNGKEYKCKVSNKALPAPIEKTISKAKGQPREPQVYTLPPSREEMTKNQVSLTCLVKGFYPSDIAVEWESNGQPENNYKTTPPVLDSDGSFFLYSKLTVDKSRWQQGNVFSCSVMHEALHNHYTQKSLSLSPGK

SEQ ID NO: 20766 - protein, 117 aa, Artificial Sequence
  Description of Artificial Sequence: Synthetic polypeptide
  VH of XENP016275
QVQLVQSGAEVKKPGASVKVSCKASGYTFTSYWMHWVRQAPGQGLEWMGEINPSNGRTNYNEKFKTRVTITADTSTSTAYMELSSLRSEDTAVYYCARGYYLYFDYWGQGTLVTVSS

SEQ ID NO: 20767 - protein, 5 aa, Artificial Sequence
  Description of Artificial Sequence: Synthetic peptide
  XENP016275 vhCDR1
SYWMH

SEQ ID NO: 20768 - protein, 17 aa, Artificial Sequence
  Description of Artificial Sequence: Synthetic peptide
  XENP016275 vhCDR2
EINPSNGRTNYNEKFKT

SEQ ID NO: 20769 - protein, 8 aa, Artificial Sequence
  Description of Artificial Sequence: Synthetic peptide
  XENP016275 vhCDR3
GYYLYFDY

SEQ ID NO: 20770 - protein, 214 aa, Artificial Sequence
  Description of Artificial Sequence: Synthetic polypeptide
  XENP016275 mAb8213_H0L0_IgG1_PVA_/S267K Light Chain
DIQMTQSPSSLSASVGDRVTITCHASQGIRINIGWYQQKPGKAPKLLIYHGTNLEDGVPSRFSGSGSGTDFTLTISSLQPEDFATYYCVQYGQFPWTFGQGTKLEIKRTVAAPSVFIFPPSDEQLKSGTASVVCLLNNFYPREAKVQWKVDNALQSGNSQESVTEQDSKDSTYSLSSTLTLSKADYEKHKVYACEVTHQGLSSPVTKSFNRGEC

SEQ ID NO: 20771 - protein, 107 aa, Artificial Sequence
  Description of Artificial Sequence: Synthetic polypeptide
  VL of XENP016275
DIQMTQSPSSLSASVGDRVTITCHASQGIRINIGWYQQKPGKAPKLLIYHGTNLEDGVPSRFSGSGSGTDFTLTISSLQPEDFATYYCVQYGQFPWTFGQGTKLEIK

SEQ ID NO: 20772 - protein, 11 aa, Artificial Sequence
  Description of Artificial Sequence: Synthetic peptide
  XENP016275 vlCDR1
HASQGIRINIG

SEQ ID NO: 20773 - protein, 7 aa, Artificial Sequence
  Description of Artificial Sequence: Synthetic peptide
  XENP016275 vlCDR2
HGTNLED

SEQ ID NO: 20774 - protein, 9 aa, Artificial Sequence
  Description of Artificial Sequence: Synthetic peptide
  XENP016275 vlCDR3
VQYGQFPWT

SEQ ID NO: 20775 - protein, 447 aa, Artificial Sequence
  Description of Artificial Sequence: Synthetic polypeptide
  XENP017973 ABTIM3_H0L0_IgG1_PVA_/S267K Heavy Chain
QVQLQQPGAELVKPGASVKMSCKASGYTFTSYNMHWIKQTPGQGLEWIGDIYPGNGDTSYNQKFKGKATLTADKSSSTVYMQLSSLTSEDSAVYYCARVGGAFPMDYWGQGTSVTVSSASTKGPSVFPLAPSSKSTSGGTAALGCLVKDYFPEPVTVSWNSGALTSGVHTFPAVLQSSGLYSLSSVVTVPSSSLGTQTYICNVNHKPSNTKVDKKVEPKSCDKTHTCPPCPAPPVAGPSVFLFPPKPKDTLMISRTPEVTCVVVDVKHEDPEVKFNWYVDGVEVHNAKTKPREEQYNSTYRVVSVLTVLHQDWLNGKEYKCKVSNKALPAPIEKTISKAKGQPREPQVYTLPPSREEMTKNQVSLTCLVKGFYPSDIAVEWESNGQPENNYKTTPPVLDSDGSFFLYSKLTVDKSRWQQGNVFSCSVMHEALHNHYTQKSLSLSPGK

SEQ ID NO: 20776 - protein, 118 aa, Artificial Sequence
  Description of Artificial Sequence: Synthetic polypeptide
  VH of XENP017973
QVQLQQPGAELVKPGASVKMSCKASGYTFTSYNMHWIKQTPGQGLEWIGDIYPGNGDTSYNQKFKGKATLTADKSSSTVYMQLSSLTSEDSAVYYCARVGGAFPMDYWGQGTSVTVSS

SEQ ID NO: 20777 - protein, 5 aa, Artificial Sequence
  Description of Artificial Sequence: Synthetic peptide
  XENP017973 vhCDR1
SYNMH

SEQ ID NO: 20778 - protein, 17 aa, Artificial Sequence
  Description of Artificial Sequence: Synthetic peptide
  XENP017973 vhCDR2
DIYPGNGDTSYNQKFKG

SEQ ID NO: 20779 - protein, 9 aa, Artificial Sequence
  Description of Artificial Sequence: Synthetic peptide
  XENP017973 vhCDR3
VGGAFPMDY

SEQ ID NO: 20780 - protein, 218 aa, Artificial Sequence
  Description of Artificial Sequence: Synthetic polypeptide
  XENP017973 ABTIM3_H0L0_IgG1_PVA_/S267K Light Chain
DIVLTQSPASLAVSLGQRATISCRASESVEYYGTSLMQWYQQKPGQPPKLLIYAASNVESGVPARFSGSGSGTDFSLNIHPVEEDDIAIYFCQQSRKDPSTFGGGTKLEIKRTVAAPSVFIFPPSDEQLKSGTASVVCLLNNFYPREAKVQWKVDNALQSGNSQESVTEQDSKDSTYSLSSTLTLSKADYEKHKVYACEVTHQGLSSPVTKSFNRGEC

SEQ ID NO: 20781 - protein, 111 aa, Artificial Sequence
  Description of Artificial Sequence: Synthetic polypeptide
  VL of XENP017973
DIVLTQSPASLAVSLGQRATISCRASESVEYYGTSLMQWYQQKPGQPPKLLIYAASNVESGVPARFSGSGSGTDFSLNIHPVEEDDIAIYFCQQSRKDPSTFGGGTKLEIK

SEQ ID NO: 20782 - protein, 15 aa, Artificial Sequence
  Description of Artificial Sequence: Synthetic peptide
  XENP017973 vlCDR1
RASESVEYYGTSLMQ

SEQ ID NO: 20783 - protein, 7 aa, Artificial Sequence
  Description of Artificial Sequence: Synthetic peptide
  XENP017973 vlCDR2
AASNVES

SEQ ID NO: 20784 - protein, 9 aa, Artificial Sequence
  Description of Artificial Sequence: Synthetic peptide
  XENP017973 vlCDR3
QQSRKDPST

SEQ ID NO: 20785 - protein, 447 aa, Artificial Sequence
  Description of Artificial Sequence: Synthetic polypeptide
  XENP017975 ABTIM3-hum11_H0L0_IgG1_PVA_/S267K Heavy Chain
QVQLVQSGAEVKKPGSSVKVSCKASGYTFTSYNMHWVRQAPGQGLEWMGDIYPGNGDTSYNQKFKGRVTITADKSTSTVYMELSSLRSEDTAVYYCARVGGAFPMDYWGQGTTVTVSSASTKGPSVFPLAPSSKSTSGGTAALGCLVKDYFPEPVTVSWNSGALTSGVHTFPAVLQSSGLYSLSSVVTVPSSSLGTQTYICNVNHKPSNTKVDKKVEPKSCDKTHTCPPCPAPPVAGPSVFLFPPKPKDTLMISRTPEVTCVVVDVKHEDPEVKFNWYVDGVEVHNAKTKPREEQYNSTYRVVSVLTVLHQDWLNGKEYKCKVSNKALPAPIEKTISKAKGQPREPQVYTLPPSREEMTKNQVSLTCLVKGFYPSDIAVEWESNGQPENNYKTTPPVLDSDGSFFLYSKLTVDKSRWQQGNVFSCSVMHEALHNHYTQKSLSLSPGK

SEQ ID NO: 20786 - protein, 118 aa, Artificial Sequence
  Description of Artificial Sequence: Synthetic polypeptide
  VH of XENP017975
QVQLVQSGAEVKKPGSSVKVSCKASGYTFTSYNMHWVRQAPGQGLEWMGDIYPGNGDTSYNQKFKGRVTITADKSTSTVYMELSSLRSEDTAVYYCARVGGAFPMDYWGQGTTVTVSS

SEQ ID NO: 20787 - protein, 5 aa, Artificial Sequence
  Description of Artificial Sequence: Synthetic peptide
  XENP017975 vhCDR1
SYNMH

SEQ ID NO: 20788 - protein, 17 aa, Artificial Sequence
  Description of Artificial Sequence: Synthetic peptide
  XENP017975 vhCDR2
DIYPGNGDTSYNQKFKG

SEQ ID NO: 20789 - protein, 9 aa, Artificial Sequence
  Description of Artificial Sequence: Synthetic peptide
  XENP017975 vhCDR3
VGGAFPMDY

SEQ ID NO: 20790 - protein, 218 aa, Artificial Sequence
  Description of Artificial Sequence: Synthetic polypeptide
  XENP017975 ABTIM3-hum11_H0L0_IgG1_PVA_/S267K Light Chain
AIQLTQSPSSLSASVGDRVTITCRASESVEYYGTSLMQWYQQKPGKAPKLLIYAASNVESGVPSRFSGSGSGTDFTLTISSLQPEDFATYFCQQSRKDPSTFGGGTKVEIKRTVAAPSVFIFPPSDEQLKSGTASVVCLLNNFYPREAKVQWKVDNALQSGNSQESVTEQDSKDSTYSLSSTLTLSKADYEKHKVYACEVTHQGLSSPVTKSFNRGEC

SEQ ID NO: 20791 - protein, 111 aa, Artificial Sequence
  Description of Artificial Sequence: Synthetic polypeptide
  VL of XENP017975
AIQLTQSPSSLSASVGDRVTITCRASESVEYYGTSLMQWYQQKPGKAPKLLIYAASNVESGVPSRFSGSGSGTDFTLTISSLQPEDFATYFCQQSRKDPSTFGGGTKVEIK

SEQ ID NO: 20792 - protein, 15 aa, Artificial Sequence
  Description of Artificial Sequence: Synthetic peptide
  XENP017975 vlCDR1
RASESVEYYGTSLMQ

SEQ ID NO: 20793 - protein, 7 aa, Artificial Sequence
  Description of Artificial Sequence: Synthetic peptide
  XENP017975 vlCDR2
AASNVES

SEQ ID NO: 20794 - protein, 9 aa, Artificial Sequence
  Description of Artificial Sequence: Synthetic peptide
  XENP017975 vlCDR3
QQSRKDPST

SEQ ID NO: 20795 - protein, 446 aa, Artificial Sequence
  Description of Artificial Sequence: Synthetic polypeptide
  XENP020403 1B3_H0L0_IgG1_PVA_/S267K Heavy Chain
EVKLVESGGGLVKPGGSLTLSCAASEFTFSSYAMSWVRQTPEKRLEWVASISSGGRTYYPDSVKGRFTISRDNARNILYLQMSSLRSEDTAMYYCARGRGFDVMDYWGQGTSVTVSSASTKGPSVFPLAPSSKSTSGGTAALGCLVKDYFPEPVTVSWNSGALTSGVHTFPAVLQSSGLYSLSSVVTVPSSSLGTQTYICNVNHKPSNTKVDKKVEPKSCDKTHTCPPCPAPPVAGPSVFLFPPKPKDTLMISRTPEVTCVVVDVKHEDPEVKFNWYVDGVEVHNAKTKPREEQYNSTYRVVSVLTVLHQDWLNGKEYKCKVSNKALPAPIEKTISKAKGQPREPQVYTLPPSREEMTKNQVSLTCLVKGFYPSDIAVEWESNGQPENNYKTTPPVLDSDGSFFLYSKLTVDKSRWQQGNVFSCSVMHEALHNHYTQKSLSLSPGK

SEQ ID NO: 20796 - protein, 117 aa, Artificial Sequence
  Description of Artificial Sequence: Synthetic polypeptide
  VH of XENP020403
EVKLVESGGGLVKPGGSLTLSCAASEFTFSSYAMSWVRQTPEKRLEWVASISSGGRTYYPDSVKGRFTISRDNARNILYLQMSSLRSEDTAMYYCARGRGFDVMDYWGQGTSVTVSS

SEQ ID NO: 20797 - protein, 5 aa, Artificial Sequence
  Description of Artificial Sequence: Synthetic peptide
  XENP020403 vhCDR1
SYAMS

SEQ ID NO: 20798 - protein, 16 aa, Artificial Sequence
  Description of Artificial Sequence: Synthetic peptide
  XENP020403 vhCDR2
SISSGGRTYYPDSVKG

SEQ ID NO: 20799 - protein, 9 aa, Artificial Sequence
  Description of Artificial Sequence: Synthetic peptide
  XENP020403 vhCDR3
GRGFDVMDY

SEQ ID NO: 20800 - protein, 214 aa, Artificial Sequence
  Description of Artificial Sequence: Synthetic polypeptide
  XENP020403 1B3_H0L0_IgG1_PVA_/S267K Light Chain
DIQMTQTTSSLSASLGDRVTISCRASQDISNYLNWYQQKPDGTVKLLIYYTSRLHSGVPSRFSGSGSGTDYSLTISNLEQEDIATYFCQQGNTLPYTFGGGTKLEIKRTVAAPSVFIFPPSDEQLKSGTASVVCLLNNFYPREAKVQWKVDNALQSGNSQESVTEQDSKDSTYSLSSTLTLSKADYEKHKVYACEVTHQGLSSPVTKSFNRGEC

SEQ ID NO: 20801 - protein, 107 aa, Artificial Sequence
  Description of Artificial Sequence: Synthetic polypeptide
  VL of XENP020403
DIQMTQTTSSLSASLGDRVTISCRASQDISNYLNWYQQKPDGTVKLLIYYTSRLHSGVPSRFSGSGSGTDYSLTISNLEQEDIATYFCQQGNTLPYTFGGGTKLEIK

SEQ ID NO: 20802 - protein, 11 aa, Artificial Sequence
  Description of Artificial Sequence: Synthetic peptide
  XENP020403 vlCDR1
RASQDISNYLN

SEQ ID NO: 20803 - protein, 7 aa, Artificial Sequence
  Description of Artificial Sequence: Synthetic peptide
  XENP020403 vlCDR2
YTSRLHS

SEQ ID NO: 20804 - protein, 9 aa, Artificial Sequence
  Description of Artificial Sequence: Synthetic peptide
  XENP020403 vlCDR3
QQGNTLPYT

SEQ ID NO: 20805 - protein, 446 aa, Artificial Sequence
  Description of Artificial Sequence: Synthetic polypeptide
  XENP020404 1D12_H0L0_IgG1_PVA_/S267K Heavy Chain
QVQLQQSAADLARPGASVKLSCKASGYTFTSYTMHWVKQRPGQGLEWIGYLIPSSGYTDYNQRFKDKTTLTADKSSSTAYMQLSSLTSEDSAVYYCARGDSVYFDYWGQGTALTVSSASTKGPSVFPLAPSSKSTSGGTAALGCLVKDYFPEPVTVSWNSGALTSGVHTFPAVLQSSGLYSLSSVVTVPSSSLGTQTYICNVNHKPSNTKVDKKVEPKSCDKTHTCPPCPAPPVAGPSVFLFPPKPKDTLMISRTPEVTCVVVDVKHEDPEVKFNWYVDGVEVHNAKTKPREEQYNSTYRVVSVLTVLHQDWLNGKEYKCKVSNKALPAPIEKTISKAKGQPREPQVYTLPPSREEMTKNQVSLTCLVKGFYPSDIAVEWESNGQPENNYKTTPPVLDSDGSFFLYSKLTVDKSRWQQGNVFSCSVMHEALHNHYTQKSLSLSPGK

SEQ ID NO: 20806 - protein, 117 aa, Artificial Sequence
  Description of Artificial Sequence: Synthetic polypeptide
  VH of XENP020404
QVQLQQSAADLARPGASVKLSCKASGYTFTSYTMHWVKQRPGQGLEWIGYLIPSSGYTDYNQRFKDKTTLTADKSSSTAYMQLSSLTSEDSAVYYCARGDSVYFDYWGQGTALTVSS

SEQ ID NO: 20807 - protein, 5 aa, Artificial Sequence
  Description of Artificial Sequence: Synthetic peptide
  XENP020404 vhCDR1
SYTMH

SEQ ID NO: 20808 - protein, 17 aa, Artificial Sequence
  Description of Artificial Sequence: Synthetic peptide
  XENP020404 vhCDR2
YLIPSSGYTDYNQRFKD

SEQ ID NO: 20809 - protein, 8 aa, Artificial Sequence
  Description of Artificial Sequence: Synthetic peptide
  XENP020404 vhCDR3
GDSVYFDY

SEQ ID NO: 20810 - protein, 218 aa, Artificial Sequence
  Description of Artificial Sequence: Synthetic polypeptide
  XENP020404 1D12_H0L0_IgG1_PVA_/S267K Light Chain
DIVLTQSPASLAVSLGQRATISCRASESVEYYGTSLQQKYQQKPGQPPKLLIYAASNVESGVPARFSGSGSGTDFSLNIHPVEEDDIAQYFCQQSRKVPWTFGGGTKLEIKRTVAAPSVFIFPPSDEQLKSGTASVVCLLNNFYPREAKVQWKVDNALQSGNSQESVTEQDSKDSTYSLSSTLTLSKADYEKHKVYACEVTHQGLSSPVTKSFNRGEC

SEQ ID NO: 20811 - protein, 111 aa, Artificial Sequence
  Description of Artificial Sequence: Synthetic polypeptide
  VL of XENP020404
DIVLTQSPASLAVSLGQRATISCRASESVEYYGTSLQQKYQQKPGQPPKLLIYAASNVESGVPARFSGSGSGTDFSLNIHPVEEDDIAQYFCQQSRKVPWTFGGGTKLEIK

SEQ ID NO: 20812 - protein, 15 aa, Artificial Sequence
  Description of Artificial Sequence: Synthetic peptide
  XENP020404 vlCDR1
RASESVEYYGTSLQQ

SEQ ID NO: 20813 - protein, 7 aa, Artificial Sequence
  Description of Artificial Sequence: Synthetic peptide
  XENP020404 vlCDR2
AASNVES

SEQ ID NO: 20814 - protein, 9 aa, Artificial Sequence
  Description of Artificial Sequence: Synthetic peptide
  XENP020404 vlCDR3
QQSRKVPWT

SEQ ID NO: 20815 - protein, 446 aa, Artificial Sequence
  Description of Artificial Sequence: Synthetic polypeptide
  XENP020405 3H3_H0L0_IgG1_PVA_/S267K Heavy Chain
QVQLKESGPGLVAPSQSLSITCTVSGFSLNGYGVNWVRQPPGKGLEWLGYIIGDGSTDYNSALKSRLSISKDNSKSQVFLKMNSLQTDDTARYYCARSYYTSDEDYWGQGTLVTVSAASTKGPSVFPLAPSSKSTSGGTAALGCLVKDYFPEPVTVSWNSGALTSGVHTFPAVLQSSGLYSLSSVVTVPSSSLGTQTYICNVNHKPSNTKVDKKVEPKSCDKTHTCPPCPAPPVAGPSVFLFPPKPKDTLMISRTPEVTCVVVDVKHEDPEVKFNWYVDGVEVHNAKTKPREEQYNSTYRVVSVLTVLHQDWLNGKEYKCKVSNKALPAPIEKTISKAKGQPREPQVYTLPPSREEMTKNQVSLTCLVKGFYPSDIAVEWESNGQPENNYKTTPPVLDSDGSFFLYSKLTVDKSRWQQGNVFSCSVMHEALHNHYTQKSLSLSPGK

SEQ ID NO: 20816 - protein, 117 aa, Artificial Sequence
  Description of Artificial Sequence: Synthetic polypeptide
  VH of XENP020405
QVQLKESGPGLVAPSQSLSITCTVSGFSLNGYGVNWVRQPPGKGLEWLGYIIGDGSTDYNSALKSRLSISKDNSKSQVFLKMNSLQTDDTARYYCARSYYTSDEDYWGQGTLVTVSA

SEQ ID NO: 20817 - protein, 5 aa, Artificial Sequence
  Description of Artificial Sequence: Synthetic peptide
  XENP020405 vhCDR1
GYGVN

SEQ ID NO: 20818 - protein, 16 aa, Artificial Sequence
  Description of Artificial Sequence: Synthetic peptide
  XENP020405 vhCDR2
YIIGDGSTDYNSALKS

SEQ ID NO: 20819 - protein, 9 aa, Artificial Sequence
  Description of Artificial Sequence: Synthetic peptide
  XENP020405 vhCDR3
SYYTSDEDY

SEQ ID NO: 20820 - protein, 219 aa, Artificial Sequence
  Description of Artificial Sequence: Synthetic polypeptide
  XENP020405 3H3_H0L0_IgG1_PVA_/S267K Light Chain
DIVLSQSPSSLAVSAGEKVTISCKSSQSLLNSRTRKNYLAQYQQKPGQSPKLLIYSASTRESGVPDRFTGSGSGTDFTLTISSVLAEDLAVYYCKQSYSLRTFGGGTKLEIKRTVAAPSVFIFPPSDEQLKSGTASVVCLLNNFYPREAKVQWKVDNALQSGNSQESVTEQDSKDSTYSLSSTLTLSKADYEKHKVYACEVTHQGLSSPVTKSFNRGEC

SEQ ID NO: 20821 - protein, 112 aa, Artificial Sequence
  Description of Artificial Sequence: Synthetic polypeptide
  VL of XENP020405
DIVLSQSPSSLAVSAGEKVTISCKSSQSLLNSRTRKNYLAQYQQKPGQSPKLLIYSASTRESGVPDRFTGSGSGTDFTLTISSVLAEDLAVYYCKQSYSLRTFGGGTKLEIK

SEQ ID NO: 20822 - protein, 17 aa, Artificial Sequence
  Description of Artificial Sequence: Synthetic peptide
  XENP020405 vlCDR1
KSSQSLLNSRTRKNYLA

SEQ ID NO: 20823 - protein, 7 aa, Artificial Sequence
  Description of Artificial Sequence: Synthetic peptide
  XENP020405 vlCDR2
SASTRES

SEQ ID NO: 20824 - protein, 8 aa, Artificial Sequence
  Description of Artificial Sequence: Synthetic peptide
  XENP020405 vlCDR3
KQSYSLRT

SEQ ID NO: 20825 - protein, 446 aa, Artificial Sequence
  Description of Artificial Sequence: Synthetic polypeptide
  XENP020406 6D9_H0_1D12_L0_IgG1_PVA_/S267K Heavy Chain
QVQLKQSGPGLVQPSQSLSITCTVSGFSLTSYGVHWVRQSPGKGLEWLGVIISGGSTEYNAAFISRLSISKDNSKSQVFFKMNSLQADDTAIYYCARGGLLSPFDYWGQGTTLTVSSASTKGPSVFPLAPSSKSTSGGTAALGCLVKDYFPEPVTVSWNSGALTSGVHTFPAVLQSSGLYSLSSVVTVPSSSLGTQTYICNVNHKPSNTKVDKKVEPKSCDKTHTCPPCPAPPVAGPSVFLFPPKPKDTLMISRTPEVTCVVVDVKHEDPEVKFNWYVDGVEVHNAKTKPREEQYNSTYRVVSVLTVLHQDWLNGKEYKCKVSNKALPAPIEKTISKAKGQPREPQVYTLPPSREEMTKNQVSLTCLVKGFYPSDIAVEWESNGQPENNYKTTPPVLDSDGSFFLYSKLTVDKSRWQQGNVFSCSVMHEALHNHYTQKSLSLSPGK

SEQ ID NO: 20826 - protein, 117 aa, Artificial Sequence
  Description of Artificial Sequence: Synthetic polypeptide
  VH of XENP020406
QVQLKQSGPGLVQPSQSLSITCTVSGFSLTSYGVHWVRQSPGKGLEWLGVIISGGSTEYNAAFISRLSISKDNSKSQVFFKMNSLQADDTAIYYCARGGLLSPFDYWGQGTTLTVSS

SEQ ID NO: 20827 - protein, 5 aa, Artificial Sequence
  Description of Artificial Sequence: Synthetic peptide
  XENP020406 vhCDR1
SYGVH

SEQ ID NO: 20828 - protein, 16 aa, Artificial Sequence
  Description of Artificial Sequence: Synthetic peptide
  XENP020406 vhCDR2
VIISGGSTEYNAAFIS

SEQ ID NO: 20829 - protein, 9 aa, Artificial Sequence
  Description of Artificial Sequence: Synthetic peptide
  XENP020406 vhCDR3
GGLLSPFDY

SEQ ID NO: 20830 - protein, 218 aa, Artificial Sequence; identical to SEQ ID NO: 20810
  Description of Artificial Sequence: Synthetic polypeptide
  XENP020406 6D9_H0_1D12_L0_IgG1_PVA_/S267K Light Chain

SEQ ID NO: 20831 - protein, 111 aa, Artificial Sequence; identical to SEQ ID NO: 20811
  Description of Artificial Sequence: Synthetic polypeptide
  VL of XENP020406

SEQ ID NO: 20832 - protein, 15 aa, Artificial Sequence
  Description of Artificial Sequence: Synthetic peptide
  XENP020406 vlCDR1
RASESVEYYGTSLQQ

SEQ ID NO: 20833 - protein, 7 aa, Artificial Sequence
  Description of Artificial Sequence: Synthetic peptide
  XENP020406 vlCDR2
AASNVES

SEQ ID NO: 20834 - protein, 9 aa, Artificial Sequence
  Description of Artificial Sequence: Synthetic peptide
  XENP020406 vlCDR3
QQSRKVPWT

SEQ ID NO: 20835 - protein, 447 aa, Artificial Sequence
  Description of Artificial Sequence: Synthetic polypeptide
  XENP020407 7B11_H0L0_IgG1_PVA_/S267K Heavy Chain
QVQLKQSGPGLVQPSQSLSITCTVSGFSLTSYAVNWVRQSPGKGLEWLGVIWSGGSTDYNAAFISRLSISKDNSKSQVFFKMNSLQANDTAIYYCVSLYYRYDGFDYWGQGTLVTVSAASTKGPSVFPLAPSSKSTSGGTAALGCLVKDYFPEPVTVSWNSGALTSGVHTFPAVLQSSGLYSLSSVVTVPSSSLGTQTYICNVNHKPSNTKVDKKVEPKSCDKTHTCPPCPAPPVAGPSVFLFPPKPKDTLMISRTPEVTCVVVDVKHEDPEVKFNWYVDGVEVHNAKTKPREEQYNSTYRVVSVLTVLHQDWLNGKEYKCKVSNKALPAPIEKTISKAKGQPREPQVYTLPPSREEMTKNQVSLTCLVKGFYPSDIAVEWESNGQPENNYKTTPPVLDSDGSFFLYSKLTVDKSRWQQGNVFSCSVMHEALHNHYTQKSLSLSPGK

SEQ ID NO: 20836 - protein, 118 aa, Artificial Sequence
  Description of Artificial Sequence: Synthetic polypeptide
  VH of XENP020407
QVQLKQSGPGLVQPSQSLSITCTVSGFSLTSYAVNWVRQSPGKGLEWLGVIWSGGSTDYNAAFISRLSISKDNSKSQVFFKMNSLQANDTAIYYCVSLYYRYDGFDYWGQGTLVTVSA

SEQ ID NO: 20837 - protein, 5 aa, Artificial Sequence
  Description of Artificial Sequence: Synthetic peptide
  XENP020407 vhCDR1
SYAVN

SEQ ID NO: 20838 - protein, 16 aa, Artificial Sequence
  Description of Artificial Sequence: Synthetic peptide
  XENP020407 vhCDR2
VIWSGGSTDYNAAFIS

SEQ ID NO: 20839 - protein, 10 aa, Artificial Sequence
  Description of Artificial Sequence: Synthetic peptide
  XENP020407 vhCDR3
LYYRYDGFDY

SEQ ID NO: 20840 - protein, 214 aa, Artificial Sequence
  Description of Artificial Sequence: Synthetic polypeptide
  XENP020407 7B11_H0L0_IgG1_PVA_/S267K Light Chain
DIVLTQSQKFLSTSVGDRVSVTCKASQNVGTHVARYQQKPGQSPKALVYSASYRYSGVPDRFTGSGSGTDFTLTISNVQSEDLAEYFCQQYNSYPLTFGGGTKLEIKRTVAAPSVFIFPPSDEQLKSGTASVVCLLNNFYPREAKVQWKVDNALQSGNSQESVTEQDSKDSTYSLSSTLTLSKADYEKHKVYACEVTHQGLSSPVTKSFNRGEC

SEQ ID NO: 20841 - protein, 107 aa, Artificial Sequence
  Description of Artificial Sequence: Synthetic polypeptide
  VL of XENP020407
DIVLTQSQKFLSTSVGDRVSVTCKASQNVGTHVARYQQKPGQSPKALVYSASYRYSGVPDRFTGSGSGTDFTLTISNVQSEDLAEYFCQQYNSYPLTFGGGTKLEIK

SEQ ID NO: 20842 - protein, 11 aa, Artificial Sequence
  Description of Artificial Sequence: Synthetic peptide
  XENP020407 vlCDR1
KASQNVGTHVA

SEQ ID NO: 20843 - protein, 7 aa, Artificial Sequence
  Description of Artificial Sequence: Synthetic peptide
  XENP020407 vlCDR2
SASYRYS

SEQ ID NO: 20844 - protein, 9 aa, Artificial Sequence
  Description of Artificial Sequence: Synthetic peptide
  XENP020407 vlCDR3
QQYNSYPLT

SEQ ID NO: 20845 - protein, 447 aa, Artificial Sequence
  Description of Artificial Sequence: Synthetic polypeptide
  XENP020408 7B11var_H0L0_IgG1_PVA_/S267K Heavy Chain
QVQLKQSGPGLVQPSQSLSITCTVSGFSLTSYAVNWVRQSPGKGLEWLGVIWSGGSTDYNAAFISRLSISKDNSKSQVFFKMNSLQADDTAIYYCVSLYYRYDGFDYWGQGTLVTVSAASTKGPSVFPLAPSSKSTSGGTAALGCLVKDYFPEPVTVSWNSGALTSGVHTFPAVLQSSGLYSLSSVVTVPSSSLGTQTYICNVNHKPSNTKVDKKVEPKSCDKTHTCPPCPAPPVAGPSVFLFPPKPKDTLMISRTPEVTCVVVDVKHEDPEVKFNWYVDGVEVHNAKTKPREEQYNSTYRVVSVLTVLHQDWLNGKEYKCKVSNKALPAPIEKTISKAKGQPREPQVYTLPPSREEMTKNQVSLTCLVKGFYPSDIAVEWESNGQPENNYKTTPPVLDSDGSFFLYSKLTVDKSRWQQGNVFSCSVMHEALHNHYTQKSLSLSPGK

SEQ ID NO: 20846 - protein, 118 aa, Artificial Sequence
  Description of Artificial Sequence: Synthetic polypeptide
  VH of XENP020408
QVQLKQSGPGLVQPSQSLSITCTVSGFSLTSYAVNWVRQSPGKGLEWLGVIWSGGSTDYNAAFISRLSISKDNSKSQVFFKMNSLQADDTAIYYCVSLYYRYDGFDYWGQGTLVTVSA

SEQ ID NO: 20847 - protein, 5 aa, Artificial Sequence
  Description of Artificial Sequence: Synthetic peptide
  XENP020408 vhCDR1
SYAVN

SEQ ID NO: 20848 - protein, 16 aa, Artificial Sequence
  Description of Artificial Sequence: Synthetic peptide
  XENP020408 vhCDR2
VIWSGGSTDYNAAFIS

SEQ ID NO: 20849 - protein, 10 aa, Artificial Sequence
  Description of Artificial Sequence: Synthetic peptide
  XENP020408 vhCDR3
LYYRYDGFDY

SEQ ID NO: 20850 - protein, 214 aa, Artificial Sequence; identical to SEQ ID NO: 20840
  Description of Artificial Sequence: Synthetic polypeptide
  XENP020408 7B11var_H0L0_IgG1_PVA_/S267K Light Chain

SEQ ID NO: 20851 - protein, 107 aa, Artificial Sequence; identical to SEQ ID NO: 20841
  Description of Artificial Sequence: Synthetic polypeptide
  VL of XENP020408

SEQ ID NO: 20852 - protein, 11 aa, Artificial Sequence
  Description of Artificial Sequence: Synthetic peptide
  XENP020408 vlCDR1
KASQNVGTHVA

SEQ ID NO: 20853 - protein, 7 aa, Artificial Sequence
  Description of Artificial Sequence: Synthetic peptide
  XENP020408 vlCDR2
SASYRYS

SEQ ID NO: 20854 - protein, 9 aa, Artificial Sequence
  Description of Artificial Sequence: Synthetic peptide
  XENP020408 vlCDR3
QQYNSYPLT

SEQ ID NO: 20855 - protein, 446 aa, Artificial Sequence
  Description of Artificial Sequence: Synthetic polypeptide
  XENP020409 6C8_H0L0_IgG1_PVA_/S267K Heavy Chain
QVQLQQSGAELVRPGTSVKISCKAAGYTFTNYAIGWVKQRPGHGLEWIGDFYPGGGYTNYNEKFKGKATLTADTSSSTAYMQLSSLTSEDSAIYFCARGYYRVFDYWGQGTTLTVSSASTKGPSVFPLAPSSKSTSGGTAALGCLVKDYFPEPVTVSWNSGALTSGVHTFPAVLQSSGLYSLSSVVTVPSSSLGTQTYICNVNHKPSNTKVDKKVEPKSCDKTHTCPPCPAPPVAGPSVFLFPPKPKDTLMISRTPEVTCVVVDVKHEDPEVKFNWYVDGVEVHNAKTKPREEQYNSTYRVVSVLTVLHQDWLNGKEYKCKVSNKALPAPIEKTISKAKGQPREPQVYTLPPSREEMTKNQVSLTCLVKGFYPSDIAVEWESNGQPENNYKTTPPVLDSDGSFFLYSKLTVDKSRWQQGNVFSCSVMHEALHNHYTQKSLSLSPGK

SEQ ID NO: 20856 - protein, 117 aa, Artificial Sequence
  Description of Artificial Sequence: Synthetic polypeptide
  VH of XENP020409
QVQLQQSGAELVRPGTSVKISCKAAGYTFTNYAIGWVKQRPGHGLEWIGDFYPGGGYTNYNEKFKGKATLTADTSSSTAYMQLSSLTSEDSAIYFCARGYYRVFDYWGQGTTLTVSS

SEQ ID NO: 20857 - protein, 5 aa, Artificial Sequence
  Description of Artificial Sequence: Synthetic peptide
  XENP020409 vhCDR1
NYAIG

SEQ ID NO: 20858 - protein, 17 aa, Artificial Sequence
  Description of Artificial Sequence: Synthetic peptide
  XENP020409 vhCDR2
DFYPGGGYTNYNEKFKG

SEQ ID NO: 20859 - protein, 8 aa, Artificial Sequence
  Description of Artificial Sequence: Synthetic peptide
  XENP020409 vhCDR3
GYYRVFDY

SEQ ID NO: 20860 - protein, 214 aa, Artificial Sequence
  Description of Artificial Sequence: Synthetic polypeptide
  XENP020409 6C8_H0L0_IgG1_PVA_/S267K Light Chain
DIVLTQSQKFLSTSVGDRVSVTCKASQNVGSNVARCQQKPGQSPKALIYSASFRYSGVPDRFTGSGSGTDFTLTISNVQSEDLAEYFCQQYNSYPYTFGGGTKLEIKRTVAAPSVFIFPPSDEQLKSGTASVVCLLNNFYPREAKVQWKVDNALQSGNSQESVTEQDSKDSTYSLSSTLTLSKADYEKHKVYACEVTHQGLSSPVTKSFNRGEC

SEQ ID NO: 20861 - protein, 107 aa, Artificial Sequence
  Description of Artificial Sequence: Synthetic polypeptide
  VL of XENP020409
DIVLTQSQKFLSTSVGDRVSVTCKASQNVGSNVARCQQKPGQSPKALIYSASFRYSGVPDRFTGSGSGTDFTLTISNVQSEDLAEYFCQQYNSYPYTFGGGTKLEIK

SEQ ID NO: 20862 - protein, 11 aa, Artificial Sequence
  Description of Artificial Sequence: Synthetic peptide
  XENP020409 vlCDR1
KASQNVGSNVA

SEQ ID NO: 20863 - protein, 7 aa, Artificial Sequence
  Description of Artificial Sequence: Synthetic peptide
  XENP020409 vlCDR2
SASFRYS

SEQ ID NO: 20864 - protein, 9 aa, Artificial Sequence
  Description of Artificial Sequence: Synthetic peptide
  XENP020409 vlCDR3
QQYNSYPYT

SEQ ID NO: 20865 - protein, 446 aa, Artificial Sequence
  Description of Artificial Sequence: Synthetic polypeptide
  XENP020410 7C2_H0L0_IgG1_PVA_/S267K Heavy Chain
EVKVVESGGGLVKPGGSLKLSCAASGFTFSRYAISWVRQTPEKRLEWVASISSGGSTYYPDSVQGRFTISRDNARNILYLQMSSLRSEDTAMYYCARGDYEGYFDYWGQGTSLTVSSASTKGPSVFPLAPSSKSTSGGTAALGCLVKDYFPEPVTVSWNSGALTSGVHTFPAVLQSSGLYSLSSVVTVPSSSLGTQTYICNVNHKPSNTKVDKKVEPKSCDKTHTCPPCPAPPVAGPSVFLFPPKPKDTLMISRTPEVTCVVVDVKHEDPEVKFNWYVDGVEVHNAKTKPREEQYNSTYRVVSVLTVLHQDWLNGKEYKCKVSNKALPAPIEKTISKAKGQPREPQVYTLPPSREEMTKNQVSLTCLVKGFYPSDIAVEWESNGQPENNYKTTPPVLDSDGSFFLYSKLTVDKSRWQQGNVFSCSVMHEALHNHYTQKSLSLSPGK

SEQ ID NO: 20866 - protein, 117 aa, Artificial Sequence
  Description of Artificial Sequence: Synthetic polypeptide
  VH of XENP020410
EVKVVESGGGLVKPGGSLKLSCAASGFTFSRYAISWVRQTPEKRLEWVASISSGGSTYYPDSVQGRFTISRDNARNILYLQMSSLRSEDTAMYYCARGDYEGYFDYWGQGTSLTVSS

SEQ ID NO: 20867 - protein, 5 aa, Artificial Sequence
  Description of Artificial Sequence: Synthetic peptide
  XENP020410 vhCDR1
RYAIS

SEQ ID NO: 20868 - protein, 16 aa, Artificial Sequence
  Description of Artificial Sequence: Synthetic peptide
  XENP020410 vhCDR2
SISSGGSTYYPDSVQG

SEQ ID NO: 20869 - protein, 9 aa, Artificial Sequence
  Description of Artificial Sequence: Synthetic peptide
  XENP020410 vhCDR3
GDYEGYFDY

SEQ ID NO: 20870 - protein, 220 aa, Artificial Sequence
  Description of Artificial Sequence: Synthetic polypeptide
  XENP020410 7C2_H0L0_IgG1_PVA_/S267K Light Chain
DIVLTQSPSSLATSVGQKVTVSCKSSQSLLNSINQKNYLAGYQQKPGQSPKLLVYFASTRESGVPDRFIGSGSGTDFTLTISSVQAEDLADYFCQQHYSTPLTFGAGTKLELKRTVAAPSVFIFPPSDEQLKSGTASVVCLLNNFYPREAKVQWKVDNALQSGNSQESVTEQDSKDSTYSLSSTLTLSKADYEKHKVYACEVTHQGLSSPVTKSFNRGEC

SEQ ID NO: 20871 - protein, 113 aa, Artificial Sequence
  Description of Artificial Sequence: Synthetic polypeptide
  VL of XENP020410
DIVLTQSPSSLATSVGQKVTVSCKSSQSLLNSINQKNYLAGYQQKPGQSPKLLVYFASTRESGVPDRFIGSGSGTDFTLTISSVQAEDLADYFCQQHYSTPLTFGAGTKLELK

SEQ ID NO: 20872 - protein, 17 aa, Artificial Sequence
  Description of Artificial Sequence: Synthetic peptide
  XENP020410 vlCDR1
KSSQSLLNSINQKNYLA

SEQ ID NO: 20873 - protein, 7 aa, Artificial Sequence
  Description of Artificial Sequence: Synthetic peptide
  XENP020410 vlCDR2
FASTRES

SEQ ID NO: 20874 - protein, 9 aa, Artificial Sequence
  Description of Artificial Sequence: Synthetic peptide
  XENP020410 vlCDR3
QQHYSTPLT

SEQ ID NO: 20875 - protein, 442 aa, Artificial Sequence
  Description of Artificial Sequence: Synthetic polypeptide
  XENP020411 1D10_H0L0_IgG1_PVA_/S267K Heavy Chain
EVQLVESGGGLVKPGGSLKFSCAASGFAFSSFDISWVRQTPEKRLEWVAYISSDGASTFYPDTMKGRFTISRDNAKNTLYLQMSSLKSEDTAMYYCTRLGAYWGQGTLVTVSAASTKGPSVFPLAPSSKSTSGGTAALGCLVKDYFPEPVTVSWNSGALTSGVHTFPAVLQSSGLYSLSSVVTVPSSSLGTQTYICNVNHKPSNTKVDKKVEPKSCDKTHTCPPCPAPPVAGPSVFLFPPKPKDTLMISRTPEVTCVVVDVKHEDPEVKFNWYVDGVEVHNAKTKPREEQYNSTYRVVSVLTVLHQDWLNGKEYKCKVSNKALPAPIEKTISKAKGQPREPQVYTLPPSREEMTKNQVSLTCLVKGFYPSDIAVEWESNGQPENNYKTTPPVLDSDGSFFLYSKLTVDKSRWQQGNVFSCSVMHEALHNHYTQKSLSLSPGK

SEQ ID NO: 20876 - protein, 113 aa, Artificial Sequence
  Description of Artificial Sequence: Synthetic polypeptide
  VH of XENP020411
EVQLVESGGGLVKPGGSLKFSCAASGFAFSSFDISWVRQTPEKRLEWVAYISSDGASTFYPDTMKGRFTISRDNAKNTLYLQMSSLKSEDTAMYYCTRLGAYWGQGTLVTVSA

SEQ ID NO: 20877 - protein, 5 aa, Artificial Sequence
  Description of Artificial Sequence: Synthetic peptide
  XENP020411 vhCDR1
SFDIS

SEQ ID NO: 20878 - protein, 17 aa, Artificial Sequence
  Description of Artificial Sequence: Synthetic peptide
  XENP020411 vhCDR2
YISSDGASTFYPDTMKG

SEQ ID NO: 20879 - protein, 4 aa, Artificial Sequence
  Description of Artificial Sequence: Synthetic peptide
  XENP020411 vhCDR3
LGAY

SEQ ID NO: 20880 - protein, 219 aa, Artificial Sequence
  Description of Artificial Sequence: Synthetic polypeptide
  XENP020411 1D10_H0L0_IgG1_PVA_/S267K Light Chain
DVVLTQTPLTLSVTIGQPASISCKSSQSLLDSDGKTYLNWLLQRPGQSPKRLIYLVSKLDSGVPDRFTGSGSGTDFTLKISRVEAEDLGVYYCWQGTHFPYTFGGGTKLEIKRTVAAPSVFIFPPSDEQLKSGTASVVCLLNNFYPREAKVQWKVDNALQSGNSQESVTEQDSKDSTYSLSSTLTLSKADYEKHKVYACEVTHQGLSSPVTKSFNRGEC

SEQ ID NO: 20881 - protein, 112 aa, Artificial Sequence
  Description of Artificial Sequence: Synthetic polypeptide
  VL of XENP020411
DVVLTQTPLTLSVTIGQPASISCKSSQSLLDSDGKTYLNWLLQRPGQSPKRLIYLVSKLDSGVPDRFTGSGSGTDFTLKISRVEAEDLGVYYCWQGTHFPYTFGGGTKLEIK

SEQ ID NO: 20882 - protein, 16 aa, Artificial Sequence
  Description of Artificial Sequence: Synthetic peptide
  XENP020411 vlCDR1
KSSQSLLDSDGKTYLN

SEQ ID NO: 20883 - protein, 7 aa, Artificial Sequence
  Description of Artificial Sequence: Synthetic peptide
  XENP020411 vlCDR2
LVSKLDS

SEQ ID NO: 20884 - protein, 9 aa, Artificial Sequence
  Description of Artificial Sequence: Synthetic peptide
  XENP020411 vlCDR3
WQGTHFPYT

SEQ ID NO: 20885 - protein, 448 aa, Artificial Sequence
  Description of Artificial Sequence: Synthetic polypeptide
  XENP017883 4C7_H0L0_IgG1_PVA_/S267K Heavy Chain
QVQLQESGPGLVKPSETLSLTCTVHGGSINHYYWSWIRQPPGKGLEWIGYIYYSGSTKYNPSLKSRVSISVDTSKNQFSLKLTSVTAADTAVYYCAREWPYYYYEMDVWGQGTTVTVSSASTKGPSVFPLAPSSKSTSGGTAALGCLVKDYFPEPVTVSWNSGALTSGVHTFPAVLQSSGLYSLSSVVTVPSSSLGTQTYICNVNHKPSNTKVDKKVEPKSCDKTHTCPPCPAPPVAGPSVFLFPPKPKDTLMISRTPEVTCVVVDVKHEDPEVKFNWYVDGVEVHNAKTKPREEQYNSTYRVVSVLTVLHQDWLNGKEYKCKVSNKALPAPIEKTISKAKGQPREPQVYTLPPSREEMTKNQVSLTCLVKGFYPSDIAVEWESNGQPENNYKTTPPVLDSDGSFFLYSKLTVDKSRWQQGNVFSCSVMHEALHNHYTQKSLSLSPGK

SEQ ID NO: 20886 - protein, 119 aa, Artificial Sequence
  Description of Artificial Sequence: Synthetic polypeptide
  VH of XENP017883
QVQLQESGPGLVKPSETLSLTCTVHGGSINHYYWSWIRQPPGKGLEWIGYIYYSGSTKYNPSLKSRVSISVDTSKNQFSLKLTSVTAADTAVYYCAREWPYYYYEMDVWGQGTTVTVSS

SEQ ID NO: 20887 - protein, 5 aa, Artificial Sequence
  Description of Artificial Sequence: Synthetic peptide
  XENP017883 vhCDR1
HYYWS

SEQ ID NO: 20888 - protein, 16 aa, Artificial Sequence
  Description of Artificial Sequence: Synthetic peptide
  XENP017883 vhCDR2
YIYYSGSTKYNPSLKS

SEQ ID NO: 20889 - protein, 11 aa, Artificial Sequence
  Description of Artificial Sequence: Synthetic peptide
  XENP017883 vhCDR3
EWPYYYYEMDV

SEQ ID NO: 20890 - protein, 215 aa, Artificial Sequence
  Description of Artificial Sequence: Synthetic polypeptide
  XENP017883 4C7_H0L0_IgG1_PVA_/S267K Light Chain
EIVLTQSPGTLSLSPGERATLSCRASQSVSSSYLAWYQQKPGQAPRLLIYGASSRATGIPDRFSGSGSGTDFTLTISRLEPEDFAVYYCQQYGSSFRTFGQGTKVEIKRTVAAPSVFIFPPSDEQLKSGTASVVCLLNNFYPREAKVQWKVDNALQSGNSQESVTEQDSKDSTYSLSSTLTLSKADYEKHKVYACEVTHQGLSSPVTKSFNRGEC

SEQ ID NO: 20891 - protein, 108 aa, Artificial Sequence
  Description of Artificial Sequence: Synthetic polypeptide
  VL of XENP017883
EIVLTQSPGTLSLSPGERATLSCRASQSVSSSYLAWYQQKPGQAPRLLIYGASSRATGIPDRFSGSGSGTDFTLTISRLEPEDFAVYYCQQYGSSFRTFGQGTKVEIK

SEQ ID NO: 20892 - protein, 12 aa, Artificial Sequence
  Description of Artificial Sequence: Synthetic peptide
  XENP017883 vlCDR1
RASQSVSSSYLA

SEQ ID NO: 20893 - protein, 7 aa, Artificial Sequence
  Description of Artificial Sequence: Synthetic peptide
  XENP017883 vlCDR2
GASSRAT

SEQ ID NO: 20894 - protein, 9 aa, Artificial Sequence
  Description of Artificial Sequence: Synthetic peptide
  XENP017883 vlCDR3
QQYGSSFRT

SEQ ID NO: 20895 - protein, 450 aa, Artificial Sequence
  Description of Artificial Sequence: Synthetic polypeptide
  XENP017884 8D5_H0L0_IgG1_PVA_/S267K Heavy Chain
EVQLVESGGGLVQPGGSLRLSCAASGFTISSYDMHWVRQATGKGLEWVSVIGPAGDTYYPGSVKGRFTISRENAKNSLYLQMNSLRAGDTAVYYCAREGMAAHNYYGMDVWGQGTTVTVSSASTKGPSVFPLAPSSKSTSGGTAALGCLVKDYFPEPVTVSWNSGALTSGVHTFPAVLQSSGLYSLSSVVTVPSSSLGTQTYICNVNHKPSNTKVDKKVEPKSCDKTHTCPPCPAPPVAGPSVFLFPPKPKDTLMISRTPEVTCVVVDVKHEDPEVKFNWYVDGVEVHNAKTKPREEQYNSTYRVVSVLTVLHQDWLNGKEYKCKVSNKALPAPIEKTISKAKGQPREPQVYTLPPSREEMTKNQVSLTCLVKGFYPSDIAVEWESNGQPENNYKTTPPVLDSDGSFFLYSKLTVDKSRWQQGNVFSCSVMHEALHNHYTQKSLSLSPGK

SEQ ID NO: 20896 - protein, 121 aa, Artificial Sequence
  Description of Artificial Sequence: Synthetic polypeptide
  VH of XENP017884
EVQLVESGGGLVQPGGSLRLSCAASGFTISSYDMHWVRQATGKGLEWVSVIGPAGDTYYPGSVKGRFTISRENAKNSLYLQMNSLRAGDTAVYYCAREGMAAHNYYGMDVWGQGTTVTVSS

SEQ ID NO: 20897 - protein, 5 aa, Artificial Sequence
  Description of Artificial Sequence: Synthetic peptide
  XENP017884 vhCDR1
SYDMH

SEQ ID NO: 20898 - protein, 16 aa, Artificial Sequence
  Description of Artificial Sequence: Synthetic peptide
  XENP017884 vhCDR2
VIGPAGDTYYPGSVKG

SEQ ID NO: 20899 - protein, 13 aa, Artificial Sequence
  Description of Artificial Sequence: Synthetic peptide
  XENP017884 vhCDR3
EGMAAHNYYGMDV

SEQ ID NO: 20900 - protein, 215 aa, Artificial Sequence
  Description of Artificial Sequence: Synthetic polypeptide
  XENP017884 8D5_H0L0_IgG1_PVA_/S267K Light Chain
EIVLTQSPATLSLSPGERATLSCRASQSVSSYLAWYQQKPGQAPRLLIYDASNRATGIPARFSGSGSGTDFTLTISSLEPEDFAVYYCQQRSNWPPITFGQGTRLEIKRTVAAPSVFIFPPSDEQLKSGTASVVCLLNNFYPREAKVQWKVDNALQSGNSQESVTEQDSKDSTYSLSSTLTLSKADYEKHKVYACEVTHQGLSSPVTKSFNRGEC

SEQ ID NO: 20901 - protein, 108 aa, Artificial Sequence
  Description of Artificial Sequence: Synthetic polypeptide
  VL of XENP017884
EIVLTQSPATLSLSPGERATLSCRASQSVSSYLAWYQQKPGQAPRLLIYDASNRATGIPARFSGSGSGTDFTLTISSLEPEDFAVYYCQQRSNWPPITFGQGTRLEIK

SEQ ID NO: 20902 - protein, 11 aa, Artificial Sequence
  Description of Artificial Sequence: Synthetic peptide
  XENP017884 vlCDR1
RASQSVSSYLA

SEQ ID NO: 20903 - protein, 7 aa, Artificial Sequence
  Description of Artificial Sequence: Synthetic peptide
  XENP017884 vlCDR2
DASNRAT

SEQ ID NO: 20904 - protein, 10 aa, Artificial Sequence
  Description of Artificial Sequence: Synthetic peptide
  XENP017884 vlCDR3
QQRSNWPPIT

SEQ ID NO: 20905 - protein, 457 aa, Artificial Sequence
  Description of Artificial Sequence: Synthetic polypeptide
  XENP017885 E8D9_H0L0_IgG1_PVA_/S267K Heavy Chain
QITLKESGPTLVKPTQTLTLTCTFSGFSLSTSGVGVGWIRQPPGKALEWLALIYWDDDKRYSPSLKSRLTITKDTSKNQVVLTMTNMDPVDTATYYCAHTSITEVRGAIIYYYGMDVWGQGTTVTVSSASTKGPSVFPLAPSSKSTSGGTAALGCLVKDYFPEPVTVSWNSGALTSGVHTFPAVLQSSGLYSLSSVVTVPSSSLGTQTYICNVNHKPSNTKVDKKVEPKSCDKTHTCPPCPAPPVAGPSVFLFPPKPKDTLMISRTPEVTCVVVDVKHEDPEVKFNWYVDGVEVHNAKTKPREEQYNSTYRVVSVLTVLHQDWLNGKEYKCKVSNKALPAPIEKTISKAKGQPREPQVYTLPPSREEMTKNQVSLTCLVKGFYPSDIAVEWESNGQPENNYKTTPPVLDSDGSFFLYSKLTVDKSRWQQGNVFSCSVMHEALHNHYTQKSLSLSPGK

SEQ ID NO: 20906 - protein, 128 aa, Artificial Sequence
  Description of Artificial Sequence: Synthetic polypeptide
  VH of XENP017885
QITLKESGPTLVKPTQTLTLTCTFSGFSLSTSGVGVGWIRQPPGKALEWLALIYWDDDKRYSPSLKSRLTITKDTSKNQVVLTMTNMDPVDTATYYCAHTSITEVRGAIIYYYGMDVWGQGTTVTVSS

SEQ ID NO: 20907 - protein, 7 aa, Artificial Sequence
  Description of Artificial Sequence: Synthetic peptide
  XENP017885 vhCDR1
TSGVGVG

SEQ ID NO: 20908 - protein, 16 aa, Artificial Sequence
  Description of Artificial Sequence: Synthetic peptide
  XENP017885 vhCDR2
LIYWDDDKRYSPSLKS

SEQ ID NO: 20909 - protein, 18 aa, Artificial Sequence
  Description of Artificial Sequence: Synthetic peptide
  XENP017885 vhCDR3
TSITEVRGAIIYYYGMDV

SEQ ID NO: 20910 - protein, 214 aa, Artificial Sequence
  Description of Artificial Sequence: Synthetic polypeptide
  XENP017885 E8D9_H0L0_IgG1_PVA_/S267K Light Chain
EIVLTQSPGTLSLSPGERATLSCRASQSVSSSYLAWYQQKPGQAPRLLIYGASSRATGIPDRFSGSGSGTDFTLTISRLEPEDFAVYYCQQYGHSLTFGGGTKVEIKRTVAAPSVFIFPPSDEQLKSGTASVVCLLNNFYPREAKVQWKVDNALQSGNSQESVTEQDSKDSTYSLSSTLTLSKADYEKHKVYACEVTHQGLSSPVTKSFNRGEC

SEQ ID NO: 20911 - protein, 107 aa, Artificial Sequence
  Description of Artificial Sequence: Synthetic polypeptide
  VL of XENP017885
EIVLTQSPGTLSLSPGERATLSCRASQSVSSSYLAWYQQKPGQAPRLLIYGASSRATGIPDRFSGSGSGTDFTLTISRLEPEDFAVYYCQQYGHSLTFGGGTKVEIK

SEQ ID NO: 20912 - protein, 12 aa, Artificial Sequence
  Description of Artificial Sequence: Synthetic peptide
  XENP017885 vlCDR1
RASQSVSSSYLA

SEQ ID NO: 20913 - protein, 7 aa, Artificial Sequence
  Description of Artificial Sequence: Synthetic peptide
  XENP017885 vlCDR2
GASSRAT

SEQ ID NO: 20914 - protein, 8 aa, Artificial Sequence
  Description of Artificial Sequence: Synthetic peptide
  XENP017885 vlCDR3
QQYGHSLT

SEQ ID NO: 20915 - protein, 449 aa, Artificial Sequence
  Description of Artificial Sequence: Synthetic polypeptide
  XENP020267 3F6_H0L0_anti-BTLA_IgG1_PVA_/S267K Heavy Chain
EVQLQESGPSLVKPSQTLSLTCSVTGDSITSGYWNWIRKFPGNKLEYMGYLSYSGSTYYNPSLKSRISITRDTSKNQYYLQLNSVTTEDTATYYCARYFYGSYYEAMDYWGQGTSVTVSSASTKGPSVFPLAPSSKSTSGGTAALGCLVKDYFPEPVTVSWNSGALTSGVHTFPAVLQSSGLYSLSSVVTVPSSSLGTQTYICNVNHKPSNTKVDKKVEPKSCDKTHTCPPCPAPPVAGPSVFLFPPKPKDTLMISRTPEVTCVVVDVKHEDPEVKFNWYVDGVEVHNAKTKPREEQYNSTYRVVSVLTVLHQDWLNGKEYKCKVSNKALPAPIEKTISKAKGQPREPQVYTLPPSREEMTKNQVSLTCLVKGFYPSDIAVEWESNGQPENNYKTTPPVLDSDGSFFLYSKLTVDKSRWQQGNVFSCSVMHEALHNHYTQKSLSLSPGK

SEQ ID NO: 20916 - protein, 120 aa, Artificial Sequence
  Description of Artificial Sequence: Synthetic polypeptide
  VH of XENP020267
EVQLQESGPSLVKPSQTLSLTCSVTGDSITSGYWNWIRKFPGNKLEYMGYLSYSGSTYYNPSLKSRISITRDTSKNQYYLQLNSVTTEDTATYYCARYFYGSYYEAMDYWGQGTSVTVSS

SEQ ID NO: 20917 - protein, 5 aa, Artificial Sequence
  Description of Artificial Sequence: Synthetic peptide
  XENP020267 vhCDR1
SGYWN

SEQ ID NO: 20918 - protein, 16 aa, Artificial Sequence
  Description of Artificial Sequence: Synthetic peptide
  XENP020267 vhCDR2
YLSYSGSTYYNPSLKS

SEQ ID NO: 20919 - protein, 12 aa, Artificial Sequence
  Description of Artificial Sequence: Synthetic peptide
  XENP020267 vhCDR3
YFYGSYYEAMDY

SEQ ID NO: 20920 - protein, 214 aa, Artificial Sequence
  Description of Artificial Sequence: Synthetic polypeptide
  XENP020267 3F6_H0L0_anti-BTLA_IgG1_PVA_/S267K Light Chain
DVQITQSPSYLAASPGETISINCRASKSISKYLAWYQEKPGKTNKLLIYSGSTLQSGIPSRFSGSGSGTDFTLTISSLEPEDFAMYYCQQHNEYPWTFGGGTKLEIKRTVAAPSVFIFPPSDEQLKSGTASVVCLLNNFYPREAKVQWKVDNALQSGNSQESVTEQDSKDSTYSLSSTLTLSKADYEKHKVYACEVTHQGLSSPVTKSFNRGEC

SEQ ID NO: 20921 - protein, 107 aa, Artificial Sequence
  Description of Artificial Sequence: Synthetic polypeptide
  VL of XENP020267
DVQITQSPSYLAASPGETISINCRASKSISKYLAWYQEKPGKTNKLLIYSGSTLQSGIPSRFSGSGSGTDFTLTISSLEPEDFAMYYCQQHNEYPWTFGGGTKLEIK

SEQ ID NO: 20922 - protein, 11 aa, Artificial Sequence
  Description of Artificial Sequence: Synthetic peptide
  XENP020267 vlCDR1
RASKSISKYLA

SEQ ID NO: 20923 - protein, 7 aa, Artificial Sequence
  Description of Artificial Sequence: Synthetic peptide
  XENP020267 vlCDR2
SGSTLQS

SEQ ID NO: 20924 - protein, 9 aa, Artificial Sequence
  Description of Artificial Sequence: Synthetic peptide
  XENP020267 vlCDR3
QQHNEYPWT

SEQ ID NO: 20925 - protein, 448 aa, Artificial Sequence
  Description of Artificial Sequence: Synthetic polypeptide
  XENP020268 1A9_H0L0_anti-BTLA_IgG1_PVA_/S267K Heavy Chain
DVQLVESGGGLVQPGGSRKLSCAASGFTFSSFGMHWVRQAPEKGLEWVAYISSGISTIYYADTVKGRFTISRDNPKNTLFLQMTSLRSEDTAMYYCARDWLRGYAMDYWGQGTSVTVSSASTKGPSVFPLAPSSKSTSGGTAALGCLVKDYFPEPVTVSWNSGALTSGVHTFPAVLQSSGLYSLSSVVTVPSSSLGTQTYICNVNHKPSNTKVDKKVEPKSCDKTHTCPPCPAPPVAGPSVFLFPPKPKDTLMISRTPEVTCVVVDVKHEDPEVKFNWYVDGVEVHNAKTKPREEQYNSTYRVVSVLTVLHQDWLNGKEYKCKVSNKALPAPIEKTISKAKGQPREPQVYTLPPSREEMTKNQVSLTCLVKGFYPSDIAVEWESNGQPENNYKTTPPVLDSDGSFFLYSKLTVDKSRWQQGNVFSCSVMHEALHNHYTQKSLSLSPGK

SEQ ID NO: 20926 - protein, 119 aa, Artificial Sequence
  Description of Artificial Sequence: Synthetic polypeptide
  VH of XENP020268
DVQLVESGGGLVQPGGSRKLSCAASGFTFSSFGMHWVRQAPEKGLEWVAYISSGISTIYYADTVKGRFTISRDNPKNTLFLQMTSLRSEDTAMYYCARDWLRGYAMDYWGQGTSVTVSS

SEQ ID NO: 20927 - protein, 5 aa, Artificial Sequence
  Description of Artificial Sequence: Synthetic peptide
  XENP020268 vhCDR1
SFGMH

SEQ ID NO: 20928 - protein, 17 aa, Artificial Sequence
  Description of Artificial Sequence: Synthetic peptide
  XENP020268 vhCDR2
YISSGISTIYYADTVKG

SEQ ID NO: 20929 - protein, 10 aa, Artificial Sequence
  Description of Artificial Sequence: Synthetic peptide
  XENP020268 vhCDR3
DWLRGYAMDY

SEQ ID NO: 20930 - protein, 218 aa, Artificial Sequence
  Description of Artificial Sequence: Synthetic polypeptide
  XENP020268 1A9_H0L0_anti-BTLA_IgG1_PVA_/S267K Light Chain
DIVLTQSPASLAVSLGQRATISCKASQSIDYDGDSYMNWYQQKPGQPPKLLIYAASNLDFGIPARFSGSGSGTDFTLNIHPVEEEDAATYYCQQSNEDPWTFGGGTKLEIKRTVAAPSVFIFPPSDEQLKSGTASVVCLLNNFYPREAKVQWKVDNALQSGNSQESVTEQDSKDSTYSLSSTLTLSKADYEKHKVYACEVTHQGLSSPVTKSFNRGEC

SEQ ID NO: 20931 - protein, 111 aa, Artificial Sequence
  Description of Artificial Sequence: Synthetic polypeptide
  VL of XENP020268
DIVLTQSPASLAVSLGQRATISCKASQSIDYDGDSYMNWYQQKPGQPPKLLIYAASNLDFGIPARFSGSGSGTDFTLNIHPVEEEDAATYYCQQSNEDPWTFGGGTKLEIK

SEQ ID NO: 20932 - protein, 15 aa, Artificial Sequence
  Description of Artificial Sequence: Synthetic peptide
  XENP020268 vlCDR1
KASQSIDYDGDSYMN

SEQ ID NO: 20933 - protein, 7 aa, Artificial Sequence
  Description of Artificial Sequence: Synthetic peptide
  XENP020268 vlCDR2
AASNLDF

SEQ ID NO: 20934 - protein, 9 aa, Artificial Sequence
  Description of Artificial Sequence: Synthetic peptide
  XENP020268 vlCDR3
QQSNEDPWT

SEQ ID NO: 20935 - protein, 447 aa, Artificial Sequence
  Description of Artificial Sequence: Synthetic polypeptide
  XENP020269 9C6_H0L0_anti-BTLA_IgG1_PVA_/S267K Heavy Chain
QVQLKESGPGLVAPSQSLSITCTVSGFSLTGYGVNWVRQPPGKGLEWLGMIWIDGSTDYNSALKSRLSINKDNSKSQVFLKMNSLQTDDTARYYCARDRPDGRAMDYWGQGTSVTVSSASTKGPSVFPLAPSSKSTSGGTAALGCLVKDYFPEPVTVSWNSGALTSGVHTFPAVLQSSGLYSLSSVVTVPSSSLGTQTYICNVNHKPSNTKVDKKVEPKSCDKTHTCPPCPAPPVAGPSVFLFPPKPKDTLMISRTPEVTCVVVDVKHEDPEVKFNWYVDGVEVHNAKTKPREEQYNSTYRVVSVLTVLHQDWLNGKEYKCKVSNKALPAPIEKTISKAKGQPREPQVYTLPPSREEMTKNQVSLTCLVKGFYPSDIAVEWESNGQPENNYKTTPPVLDSDGSFFLYSKLTVDKSRWQQGNVFSCSVMHEALHNHYTQKSLSLSPGK

SEQ ID NO: 20936 - protein, 118 aa, Artificial Sequence
  Description of Artificial Sequence: Synthetic polypeptide
  VH of XENP020269
QVQLKESGPGLVAPSQSLSITCTVSGFSLTGYGVNWVRQPPGKGLEWLGMIWIDGSTDYNSALKSRLSINKDNSKSQVFLKMNSLQTDDTARYYCARDRPDGRAMDYWGQGTSVTVSS

SEQ ID NO: 20937 - protein, 5 aa, Artificial Sequence
  Description of Artificial Sequence: Synthetic peptide
  XENP020269 vhCDR1
GYGVN

SEQ ID NO: 20938 - protein, 16 aa, Artificial Sequence
  Description of Artificial Sequence: Synthetic peptide
  XENP020269 vhCDR2
MIWIDGSTDYNSALKS

SEQ ID NO: 20939 - protein, 10 aa, Artificial Sequence
  Description of Artificial Sequence: Synthetic peptide
  XENP020269 vhCDR3
DRPDGRAMDY

SEQ ID NO: 20940 - protein, 213 aa, Artificial Sequence
  Description of Artificial Sequence: Synthetic polypeptide
  XENP020269 9C6_H0L0_anti-BTLA_IgG1_PVA_/S267K Light Chain
SIVMTQTPKFLLVSAGDRVTITCKASQSVSNDVAWYQQKPGQSPKLLIYYASNRYTGVPDRFTGSGYGTDFTFTISTVQAEDLAVYFCQQDYSSPTFGGGTKLEIKRTVAAPSVFIFPPSDEQLKSGTASVVCLLNNFYPREAKVQWKVDNALQSGNSQESVTEQDSKDSTYSLSSTLTLSKADYEKHKVYACEVTHQGLSSPVTKSFNRGEC

SEQ ID NO: 20941 - protein, 106 aa, Artificial Sequence
  Description of Artificial Sequence: Synthetic polypeptide
  VL of XENP020269
SIVMTQTPKFLLVSAGDRVTITCKASQSVSNDVAWYQQKPGQSPKLLIYYASNRYTGVPDRFTGSGYGTDFTFTISTVQAEDLAVYFCQQDYSSPTFGGGTKLEIK

SEQ ID NO: 20942 - protein, 11 aa, Artificial Sequence
  Description of Artificial Sequence: Synthetic peptide
  XENP020269 vlCDR1
KASQSVSNDVA

SEQ ID NO: 20943 - protein, 7 aa, Artificial Sequence
  Description of Artificial Sequence: Synthetic peptide
  XENP020269 vlCDR2
YASNRYT

SEQ ID NO: 20944 - protein, 8 aa, Artificial Sequence
  Description of Artificial Sequence: Synthetic peptide
  XENP020269 vlCDR3
QQDYSSPT

SEQ ID NO: 20945 - protein, 447 aa, Artificial Sequence; identical to SEQ ID NO: 20935
  Description of Artificial Sequence: Synthetic polypeptide
  XENP020270 7H2_H0L0_anti-BTLA_IgG1_PVA_/S267K Heavy Chain

SEQ ID NO: 20946 - protein, 118 aa, Artificial Sequence; identical to SEQ ID NO: 20936
  Description of Artificial Sequence: Synthetic polypeptide
  VH of XENP020270

SEQ ID NO: 20947 - protein, 5 aa, Artificial Sequence
  Description of Artificial Sequence: Synthetic peptide
  XENP020270 vhCDR1
GYGVN

SEQ ID NO: 20948 - protein, 16 aa, Artificial Sequence
  Description of Artificial Sequence: Synthetic peptide
  XENP020270 vhCDR2
MIWIDGSTDYNSALKS

SEQ ID NO: 20949 - protein, 10 aa, Artificial Sequence
  Description of Artificial Sequence: Synthetic peptide
  XENP020270 vhCDR3
DRPDGRAMDY

SEQ ID NO: 20950 - protein, 213 aa, Artificial Sequence
  Description of Artificial Sequence: Synthetic polypeptide
  XENP020270 7H2_H0L0_anti-BTLA_IgG1_PVA_/S267K Light Chain
SIVMTQTPKFLLVSAGDRVTITCKASQSVSNDVAWYQQKPGQSPKLLIYYASNRYTGVPDRFTGSGYGTDFTFTISTVQAEDLAVYFCQQDYNSPTFGGGTKLEIKRTVAAPSVFIFPPSDEQLKSGTASVVCLLNNFYPREAKVQWKVDNALQSGNSQESVTEQDSKDSTYSLSSTLTLSKADYEKHKVYACEVTHQGLSSPVTKSFNRGEC

SEQ ID NO: 20951 - protein, 106 aa, Artificial Sequence
  Description of Artificial Sequence: Synthetic polypeptide
  VL of XENP020270
SIVMTQTPKFLLVSAGDRVTITCKASQSVSNDVAWYQQKPGQSPKLLIYYASNRYTGVPDRFTGSGYGTDFTFTISTVQAEDLAVYFCQQDYNSPTFGGGTKLEIK

SEQ ID NO: 20952 - protein, 11 aa, Artificial Sequence
  Description of Artificial Sequence: Synthetic peptide
  XENP020270 vlCDR1
KASQSVSNDVA

SEQ ID NO: 20953 - protein, 7 aa, Artificial Sequence
  Description of Artificial Sequence: Synthetic peptide
  XENP020270 vlCDR2
YASNRYT

SEQ ID NO: 20954 - protein, 8 aa, Artificial Sequence
  Description of Artificial Sequence: Synthetic peptide
  XENP020270 vlCDR3
QQDYNSPT

SEQ ID NO: 20955 - protein, 447 aa, Artificial Sequence
  Description of Artificial Sequence: Synthetic polypeptide
  XENP020271 6C3_H0L0_anti-BTLA_IgG1_PVA_/S267K Heavy Chain
EVQLQQSGAELVRSGASVKLSCTASGFNIKDYYMHWVKQRPEQGLEWIGWLDPENGDTVYVPKFQGKATMTADTSSNTAYLQLTSLTSEDSAVYYCNAGDYGSSFNYWGQGTTLTVSSASTKGPSVFPLAPSSKSTSGGTAALGCLVKDYFPEPVTVSWNSGALTSGVHTFPAVLQSSGLYSLSSVVTVPSSSLGTQTYICNVNHKPSNTKVDKKVEPKSCDKTHTCPPCPAPPVAGPSVFLFPPKPKDTLMISRTPEVTCVVVDVKHEDPEVKFNWYVDGVEVHNAKTKPREEQYNSTYRVVSVLTVLHQDWLNGKEYKCKVSNKALPAPIEKTISKAKGQPREPQVYTLPPSREEMTKNQVSLTCLVKGFYPSDIAVEWESNGQPENNYKTTPPVLDSDGSFFLYSKLTVDKSRWQQGNVFSCSVMHEALHNHYTQKSLSLSPGK

SEQ ID NO: 20956 - protein, 118 aa, Artificial Sequence
  Description of Artificial Sequence: Synthetic polypeptide
  VH of XENP020271
EVQLQQSGAELVRSGASVKLSCTASGFNIKDYYMHWVKQRPEQGLEWIGWLDPENGDTVYVPKFQGKATMTADTSSNTAYLQLTSLTSEDSAVYYCNAGDYGSSFNYWGQGTTLTVSS

SEQ ID NO: 20957 - protein, 5 aa, Artificial Sequence
  Description of Artificial Sequence: Synthetic peptide
  XENP020271 vhCDR1
DYYMH

SEQ ID NO: 20958 - protein, 17 aa, Artificial Sequence
  Description of Artificial Sequence: Synthetic peptide
  XENP020271 vhCDR2
WLDPENGDTVYVPKFQG

SEQ ID NO: 20959 - protein, 9 aa, Artificial Sequence
  Description of Artificial Sequence: Synthetic peptide
  XENP020271 vhCDR3
GDYGSSFNY

SEQ ID NO: 20960 - protein, 219 aa, Artificial Sequence
  Description of Artificial Sequence: Synthetic polypeptide
  XENP020271 6C3_H0L0_anti-BTLA_IgG1_PVA_/S267K Light Chain
DIVMSQSPSSLAVSVGEKVTMSCKSSQSLLYSGNQKNYLAWYQQRPGQSPKLLIYWASTRESGVPDRFTGSGSGTDFTLTISSVKTEDLAVYYCQQYYTYHTFGGGTKLEIKRTVAAPSVFIFPPSDEQLKSGTASVVCLLNNFYPREAKVQWKVDNALQSGNSQESVTEQDSKDSTYSLSSTLTLSKADYEKHKVYACEVTHQGLSSPVTKSFNRGEC

SEQ ID NO: 20961 - protein, 112 aa, Artificial Sequence
  Description of Artificial Sequence: Synthetic polypeptide
  VL of XENP020271
DIVMSQSPSSLAVSVGEKVTMSCKSSQSLLYSGNQKNYLAWYQQRPGQSPKLLIYWASTRESGVPDRFTGSGSGTDFTLTISSVKTEDLAVYYCQQYYTYHTFGGGTKLEIK

SEQ ID NO: 20962 - protein, 17 aa, Artificial Sequence
  Description of Artificial Sequence: Synthetic peptide
  XENP020271 vlCDR1
KSSQSLLYSGNQKNYLA

SEQ ID NO: 20963 - protein, 7 aa, Artificial Sequence
  Description of Artificial Sequence: Synthetic peptide
  XENP020271 vlCDR2
WASTRES

SEQ ID NO: 20964 - protein, 8 aa, Artificial Sequence
  Description of Artificial Sequence: Synthetic peptide
  XENP020271 vlCDR3
QQYYTYHT

SEQ ID NO: 20965 - protein, 449 aa, Artificial Sequence
  Description of Artificial Sequence: Synthetic polypeptide
  XENP020272 9C10_H0L0_anti-BTLA_IgG1_PVA_/S267K Heavy Chain
EVQLQESGPSLVKPSQTLSLTCSVTGDSITSGYWNWIRKFPGNKLEYMGYISYSGSTYYNPSLKSRISITRDTSKNQYYLQLNSVTTEDTATYYCARYYYGSYYEAMDYWGQGTSVTVSSASTKGPSVFPLAPSSKSTSGGTAALGCLVKDYFPEPVTVSWNSGALTSGVHTFPAVLQSSGLYSLSSVVTVPSSSLGTQTYICNVNHKPSNTKVDKKVEPKSCDKTHTCPPCPAPPVAGPSVFLFPPKPKDTLMISRTPEVTCVVVDVKHEDPEVKFNWYVDGVEVHNAKTKPREEQYNSTYRVVSVLTVLHQDWLNGKEYKCKVSNKALPAPIEKTISKAKGQPREPQVYTLPPSREEMTKNQVSLTCLVKGFYPSDIAVEWESNGQPENNYKTTPPVLDSDGSFFLYSKLTVDKSRWQQGNVFSCSVMHEALHNHYTQKSLSLSPGK

SEQ ID NO: 20966 - protein, 120 aa, Artificial Sequence
  Description of Artificial Sequence: Synthetic polypeptide
  VH of XENP020272
EVQLQESGPSLVKPSQTLSLTCSVTGDSITSGYWNWIRKFPGNKLEYMGYISYSGSTYYNPSLKSRISITRDTSKNQYYLQLNSVTTEDTATYYCARYYYGSYYEAMDYWGQGTSVTVSS

SEQ ID NO: 20967 - protein, 5 aa, Artificial Sequence
  Description of Artificial Sequence: Synthetic peptide
  XENP020272 vhCDR1
SGYWN

SEQ ID NO: 20968 - protein, 16 aa, Artificial Sequence
  Description of Artificial Sequence: Synthetic peptide
  XENP020272 vhCDR2
YISYSGSTYYNPSLKS

SEQ ID NO: 20969 - protein, 12 aa, Artificial Sequence
  Description of Artificial Sequence: Synthetic peptide
  XENP020272 vhCDR3
YYYGSYYEAMDY

SEQ ID NO: 20970 - protein, 214 aa, Artificial Sequence
  Description of Artificial Sequence: Synthetic polypeptide
  XENP020272 9C10_H0L0_anti-BTLA_IgG1_PVA_/S267K Light Chain
DVQITQSPSYLAASPGETITINCRASKSISKYLAWYQEKPGKTNKLLLYSGSTLQSGIPSRFSGSGSGTDFTLTISSLEPEDFAMYYCQQHNEYPWTFGGGTKLEIKRTVAAPSVFIFPPSDEQLKSGTASVVCLLNNFYPREAKVQWKVDNALQSGNSQESVTEQDSKDSTYSLSSTLTLSKADYEKHKVYACEVTHQGLSSPVTKSFNRGEC

SEQ ID NO: 20971 - protein, 107 aa, Artificial Sequence
  Description of Artificial Sequence: Synthetic polypeptide
  VL of XENP020272
DVQITQSPSYLAASPGETITINCRASKSISKYLAWYQEKPGKTNKLLLYSGSTLQSGIPSRFSGSGSGTDFTLTISSLEPEDFAMYYCQQHNEYPWTFGGGTKLEIK

SEQ ID NO: 20972 - protein, 11 aa, Artificial Sequence
  Description of Artificial Sequence: Synthetic peptide
  XENP020272 vlCDR1
RASKSISKYLA

SEQ ID NO: 20973 - protein, 7 aa, Artificial Sequence
  Description of Artificial Sequence: Synthetic peptide
  XENP020272 vlCDR2
SGSTLQS

SEQ ID NO: 20974 - protein, 9 aa, Artificial Sequence
  Description of Artificial Sequence: Synthetic peptide
  XENP020272 vlCDR3
QQHNEYPWT

SEQ ID NO: 20975 - protein, 443 aa, Artificial Sequence
  Description of Artificial Sequence: Synthetic polypeptide
  XENP020273 12E6_H0L0_anti-BTLA_IgG1_PVA_/S267K Heavy Chain
QVQLQQSGAELMKPGASVKISCKATGYTFSNYWIEWVKQRPGHGLEWIGEILPGSGGTNYNEKFKGKATFTADTSSNTAYMQLSGLTSEDSAVYYCASPRYDLWGQGTSVTASSASTKGPSVFPLAPSSKSTSGGTAALGCLVKDYFPEPVTVSWNSGALTSGVHTFPAVLQSSGLYSLSSVVTVPSSSLGTQTYICNVNHKPSNTKVDKKVEPKSCDKTHTCPPCPAPPVAGPSVFLFPPKPKDTLMISRTPEVTCVVVDVKHEDPEVKFNWYVDGVEVHNAKTKPREEQYNSTYRVVSVLTVLHQDWLNGKEYKCKVSNKALPAPIEKTISKAKGQPREPQVYTLPPSREEMTKNQVSLTCLVKGFYPSDIAVEWESNGQPENNYKTTPPVLDSDGSFFLYSKLTVDKSRWQQGNVFSCSVMHEALHNHYTQKSLSLSPGK

SEQ ID NO: 20976 - protein, 114 aa, Artificial Sequence
  Description of Artificial Sequence: Synthetic polypeptide
  VH of XENP020273
QVQLQQSGAELMKPGASVKISCKATGYTFSNYWIEWVKQRPGHGLEWIGEILPGSGGTNYNEKFKGKATFTADTSSNTAYMQLSGLTSEDSAVYYCASPRYDLWGQGTSVTASS

SEQ ID NO: 20977 - protein, 5 aa, Artificial Sequence
  Description of Artificial Sequence: Synthetic peptide
  XENP020273 vhCDR1
NYWIE

SEQ ID NO: 20978 - protein, 17 aa, Artificial Sequence
  Description of Artificial Sequence: Synthetic peptide
  XENP020273 vhCDR2
EILPGSGGTNYNEKFKG

SEQ ID NO: 20979 - protein, 5 aa, Artificial Sequence
  Description of Artificial Sequence: Synthetic peptide
  XENP020273 vhCDR3
PRYDL

SEQ ID NO: 20980 - protein, 219 aa, Artificial Sequence
  Description of Artificial Sequence: Synthetic polypeptide
  XENP020273 12E6_H0L0_anti-BTLA_IgG1_PVA_/S267K Light Chain
DVVMTQTPLTLSVTVGQPASISCKSSQSLLHSDGETYLNWFLQRPGQSPKRLIYLVSKRDSGVPDRFTGSGSGTDFTLKISRVEAEDLGVYYCWQGIHFPQTFGRGTKLEIKRTVAAPSVFIFPPSDEQLKSGTASVVCLLNNFYPREAKVQWKVDNALQSGNSQESVTEQDSKDSTYSLSSTLTLSKADYEKHKVYACEVTHQGLSSPVTKSFNRGEC

SEQ ID NO: 20981 - protein, 112 aa, Artificial Sequence
  Description of Artificial Sequence: Synthetic polypeptide
  VL of XENP020273
DVVMTQTPLTLSVTVGQPASISCKSSQSLLHSDGETYLNWFLQRPGQSPKRLIYLVSKRDSGVPDRFTGSGSGTDFTLKISRVEAEDLGVYYCWQGIHFPQTFGRGTKLEIK

SEQ ID NO: 20982 - protein, 16 aa, Artificial Sequence
  Description of Artificial Sequence: Synthetic peptide
  XENP020273 vlCDR1
KSSQSLLHSDGETYLN

SEQ ID NO: 20983 - protein, 7 aa, Artificial Sequence
  Description of Artificial Sequence: Synthetic peptide
  XENP020273 vlCDR2
LVSKRDS

SEQ ID NO: 20984 - protein, 9 aa, Artificial Sequence
  Description of Artificial Sequence: Synthetic peptide
  XENP020273 vlCDR3
WQGIHFPQT

SEQ ID NO: 20985 - protein, 442 aa, Artificial Sequence
  Description of Artificial Sequence: Synthetic polypeptide
  XENP020274 4C11A_H0L0_anti-BTLA_IgG1_PVA_/S267K Heavy Chain
QVQLQQSGAELVKPGASVKLSCKASGYTFTSYYMDWVKQRPGQGLEWIGEINPSNGDTKFNEKFKSKATLTVDKSSTTAYMQLSSLTSEDSAVYYCTRDYGYWGQGTTLTVSSASTKGPSVFPLAPSSKSTSGGTAALGCLVKDYFPEPVTVSWNSGALTSGVHTFPAVLQSSGLYSLSSVVTVPSSSLGTQTYICNVNHKPSNTKVDKKVEPKSCDKTHTCPPCPAPPVAGPSVFLFPPKPKDTLMISRTPEVTCVVVDVKHEDPEVKFNWYVDGVEVHNAKTKPREEQYNSTYRVVSVLTVLHQDWLNGKEYKCKVSNKALPAPIEKTISKAKGQPREPQVYTLPPSREEMTKNQVSLTCLVKGFYPSDIAVEWESNGQPENNYKTTPPVLDSDGSFFLYSKLTVDKSRWQQGNVFSCSVMHEALHNHYTQKSLSLSPGK

SEQ ID NO: 20986 - protein, 113 aa, Artificial Sequence
  Description of Artificial Sequence: Synthetic polypeptide
  VH of XENP020274
QVQLQQSGAELVKPGASVKLSCKASGYTFTSYYMDWVKQRPGQGLEWIGEINPSNGDTKFNEKFKSKATLTVDKSSTTAYMQLSSLTSEDSAVYYCTRDYGYWGQGTTLTVSS

SEQ ID NO: 20987 - protein, 5 aa, Artificial Sequence
  Description of Artificial Sequence: Synthetic peptide
  XENP020274 vhCDR1
SYYMD

SEQ ID NO: 20988 - protein, 17 aa, Artificial Sequence
  Description of Artificial Sequence: Synthetic peptide
  XENP020274 vhCDR2
EINPSNGDTKFNEKFKS

SEQ ID NO: 20989 - protein, 4 aa, Artificial Sequence
  Description of Artificial Sequence: Synthetic peptide
  XENP020274 vhCDR3
DYGY

SEQ ID NO: 20990 - protein, 214 aa, Artificial Sequence
  Description of Artificial Sequence: Synthetic polypeptide
  XENP020274 4C11A_H0L0_anti-BTLA_IgG1_PVA_/S267K Light Chain
DIVMTQSPATLSVTPGDRVSLSCRASQSISDYLHWYQQKSHESPRLLIKYASQSISGIPSRFSGSGSGSDFTLNINGVEPEDVGVYYCQNGHSFPPTFGGGTKLEIKRTVAAPSVFIFPPSDEQLKSGTASVVCLLNNFYPREAKVQWKVDNALQSGNSQESVTEQDSKDSTYSLSSTLTLSKADYEKHKVYACEVTHQGLSSPVTKSFNRGEC

SEQ ID NO: 20991 - protein, 107 aa, Artificial Sequence
  Description of Artificial Sequence: Synthetic polypeptide
  VL of XENP020274
DIVMTQSPATLSVTPGDRVSLSCRASQSISDYLHWYQQKSHESPRLLIKYASQSISGIPSRFSGSGSGSDFTLNINGVEPEDVGVYYCQNGHSFPPTFGGGTKLEIK

SEQ ID NO: 20992 - protein, 11 aa, Artificial Sequence
  Description of Artificial Sequence: Synthetic peptide
  XENP020274 vlCDR1
RASQSISDYLH

SEQ ID NO: 20993 - protein, 7 aa, Artificial Sequence
  Description of Artificial Sequence: Synthetic peptide
  XENP020274 vlCDR2
YASQSIS

SEQ ID NO: 20994 - protein, 9 aa, Artificial Sequence
  Description of Artificial Sequence: Synthetic peptide
  XENP020274 vlCDR3
QNGHSFPPT

SEQ ID NO: 20995 - protein, 442 aa, Artificial Sequence; identical to SEQ ID NO: 20985
  Description of Artificial Sequence: Synthetic polypeptide
  XENP020275 4C11B_H0L0_anti-BTLA_IgG1_PVA_/S267K Heavy Chain

SEQ ID NO: 20996 - protein, 113 aa, Artificial Sequence; identical to SEQ ID NO: 20986
  Description of Artificial Sequence: Synthetic polypeptide
  VH of XENP020275

SEQ ID NO: 20997 - protein, 5 aa, Artificial Sequence
  Description of Artificial Sequence: Synthetic peptide
  XENP020275 vhCDR1
SYYMD

SEQ ID NO: 20998 - protein, 17 aa, Artificial Sequence
  Description of Artificial Sequence: Synthetic peptide
  XENP020275 vhCDR2
EINPSNGDTKFNEKFKS

SEQ ID NO: 20999 - protein, 4 aa, Artificial Sequence
  Description of Artificial Sequence: Synthetic peptide
  XENP020275 vhCDR3
DYGY

SEQ ID NO: 21000 - protein, 213 aa, Artificial Sequence; identical to SEQ ID NO: 20940
  Description of Artificial Sequence: Synthetic polypeptide
  XENP020275 4C11B_H0L0_anti-BTLA_IgG1_PVA_/S267K Light Chain

SEQ ID NO: 21001 - protein, 106 aa, Artificial Sequence; identical to SEQ ID NO: 20941
  Description of Artificial Sequence: Synthetic polypeptide
  VL of XENP020275

SEQ ID NO: 21002 - protein, 11 aa, Artificial Sequence
  Description of Artificial Sequence: Synthetic peptide
  XENP020275 vlCDR1
KASQSVSNDVA

SEQ ID NO: 21003 - protein, 7 aa, Artificial Sequence
  Description of Artificial Sequence: Synthetic peptide
  XENP020275 vlCDR2
YASNRYT

SEQ ID NO: 21004 - protein, 8 aa, Artificial Sequence
  Description of Artificial Sequence: Synthetic peptide
  XENP020275 vlCDR3
QQDYSSPT

SEQ ID NO: 21005 - protein, 449 aa, Artificial Sequence
  Description of Artificial Sequence: Synthetic polypeptide
  XENP020276 7B10_H0L0_anti-BTLA_IgG1_PVA_/S267K Heavy Chain
QVTLKESGPGILQPSQTLSLTCSFSGFSLSTFGMGVNWIRQPSGKGLEWLAHIYWDDDKHYNPSLKSRLTISKDTSNNQVFLKITTVDTADTATYYCARYYRYDVPYIMDYWGQGTSVTVSSASTKGPSVFPLAPSSKSTSGGTAALGCLVKDYFPEPVTVSWNSGALTSGVHTFPAVLQSSGLYSLSSVVTVPSSSLGTQTYICNVNHKPSNTKVDKKVEPKSCDKTHTCPPCPAPPVAGPSVFLFPPKPKDTLMISRTPEVTCVVVDVKHEDPEVKFNWYVDGVEVHNAKTKPREEQYNSTYRVVSVLTVLHQDWLNGKEYKCKVSNKALPAPIEKTISKAKGQPREPQVYTLPPSREEMTKNQVSLTCLVKGFYPSDIAVEWESNGQPENNYKTTPPVLDSDGSFFLYSKLTVDKSRWQQGNVFSCSVMHEALHNHYTQKSLSLSP

SEQ ID NO: 21006 - protein, 122 aa, Artificial Sequence
  Description of Artificial Sequence: Synthetic polypeptide
  VH of XENP020276
QVTLKESGPGILQPSQTLSLTCSFSGFSLSTFGMGVNWIRQPSGKGLEWLAHIYWDDDKHYNPSLKSRLTISKDTSNNQVFLKITTVDTADTATYYCARYYRYDVPYIMDYWGQGTSVTVSS

SEQ ID NO: 21007 - protein, 7 aa, Artificial Sequence
  Description of Artificial Sequence: Synthetic peptide
  XENP020276 vhCDR1
TFGMGVN

SEQ ID NO: 21008 - protein, 16 aa, Artificial Sequence
  Description of Artificial Sequence: Synthetic peptide
  XENP020276 vhCDR2
HIYWDDDKHYNPSLKS

SEQ ID NO: 21009 - protein, 12 aa, Artificial Sequence
  Description of Artificial Sequence: Synthetic peptide
  XENP020276 vhCDR3
YYRYDVPYIMDY

SEQ ID NO: 21010 - protein, 219 aa, Artificial Sequence
  Description of Artificial Sequence: Synthetic polypeptide
  XENP020276 7B10_H0L0_anti-BTLA_IgG1_PVA_/S267K Light Chain
DIVMSQSPSSLAVSVGEKVTMSCKSSQSLLYSSNQKNYLAWYQQKPGQSPKLLIYWASTRESGVPDRFTGSGSGTDFTLTISSVKAEDLAVYYCHQYYSYYTFGGGTKLEIKRTVAAPSVFIFPPSDEQLKSGTASVVCLLNNFYPREAKVQWKVDNALQSGNSQESVTEQDSKDSTYSLSSTLTLSKADYEKHKVYACEVTHQGLSSPVTKSFNRGEC

SEQ ID NO: 21011 - protein, 112 aa, Artificial Sequence
  Description of Artificial Sequence: Synthetic polypeptide
  VL of XENP020276
DIVMSQSPSSLAVSVGEKVTMSCKSSQSLLYSSNQKNYLAWYQQKPGQSPKLLIYWASTRESGVPDRFTGSGSGTDFTLTISSVKAEDLAVYYCHQYYSYYTFGGGTKLEIK

SEQ ID NO: 21012 - protein, 17 aa, Artificial Sequence
  Description of Artificial Sequence: Synthetic peptide
  XENP020276 vlCDR1
KSSQSLLYSSNQKNYLA

SEQ ID NO: 21013 - protein, 7 aa, Artificial Sequence
  Description of Artificial Sequence: Synthetic peptide
  XENP020276 vlCDR2
WASTRES

SEQ ID NO: 21014 - protein, 8 aa, Artificial Sequence
  Description of Artificial Sequence: Synthetic peptide
  XENP020276 vlCDR3
HQYYSYYT

SEQ ID NO: 21015 - protein, 449 aa, Artificial Sequence
  Description of Artificial Sequence: Synthetic polypeptide
  XENP020277 8C1A_H0L0_anti-BTLA_IgG1_PVA_/S267K Heavy Chain
EVQLQESGPSLVKPSQTLSLTCSVTGDSVTSGYWNWIRKFPGNKLEYMGYINYSGSTYYNPSLKSRISITRDTSKNQYYLQLNSVTTEDTATYYCARSFIATVGYAMDYWGQGTSVTVSSASTKGPSVFPLAPSSKSTSGGTAALGCLVKDYFPEPVTVSWNSGALTSGVHTFPAVLQSSGLYSLSSVVTVPSSSLGTQTYICNVNHKPSNTKVDKKVEPKSCDKTHTCPPCPAPPVAGPSVFLFPPKPKDTLMISRTPEVTCVVVDVKHEDPEVKFNWYVDGVEVHNAKTKPREEQYNSTYRVVSVLTVLHQDWLNGKEYKCKVSNKALPAPIEKTISKAKGQPREPQVYTLPPSREEMTKNQVSLTCLVKGFYPSDIAVEWESNGQPENNYKTTPPVLDSDGSFFLYSKLTVDKSRWQQGNVFSCSVMHEALHNHYTQKSLSLSPGK

SEQ ID NO: 21016 - protein, 120 aa, Artificial Sequence
  Description of Artificial Sequence: Synthetic polypeptide
  VH of XENP020277
EVQLQESGPSLVKPSQTLSLTCSVTGDSVTSGYWNWIRKFPGNKLEYMGYINYSGSTYYNPSLKSRISITRDTSKNQYYLQLNSVTTEDTATYYCARSFIATVGYAMDYWGQGTSVTVSS

SEQ ID NO: 21017 - protein, 5 aa, Artificial Sequence
  Description of Artificial Sequence: Synthetic peptide
  XENP020277 vhCDR1
SGYWN

SEQ ID NO: 21018 - protein, 16 aa, Artificial Sequence
  Description of Artificial Sequence: Synthetic peptide
  XENP020277 vhCDR2
YINYSGSTYYNPSLKS

SEQ ID NO: 21019 - protein, 12 aa, Artificial Sequence
  Description of Artificial Sequence: Synthetic peptide
  XENP020277 vhCDR3
SFIATVGYAMDY

SEQ ID NO: 21020 - protein, 214 aa, Artificial Sequence
  Description of Artificial Sequence: Synthetic polypeptide
  XENP020277 8C1A_H0L0_anti-BTLA_IgG1_PVA_/S267K Light Chain
SIVMTQTPKFLLVSAGDRVTITCKASQSVNNDVSWYQQKPGQSPKLLIYSASNRYTGVPDRFTGSGYGTDFTFTISTVQAEDLAVYFCQQDYSSPWTFGGGTKLEIKRTVAAPSVFIFPPSDEQLKSGTASVVCLLNNFYPREAKVQWKVDNALQSGNSQESVTEQDSKDSTYSLSSTLTLSKADYEKHKVYACEVTHQGLSSPVTKSFNRGEC

SEQ ID NO: 21021 - protein, 107 aa, Artificial Sequence
  Description of Artificial Sequence: Synthetic polypeptide
  VL of XENP020277
SIVMTQTPKFLLVSAGDRVTITCKASQSVNNDVSWYQQKPGQSPKLLIYSASNRYTGVPDRFTGSGYGTDFTFTISTVQAEDLAVYFCQQDYSSPWTFGGGTKLEIK

SEQ ID NO: 21022 - protein, 11 aa, Artificial Sequence
  Description of Artificial Sequence: Synthetic peptide
  XENP020277 vlCDR1
KASQSVNNDVS

SEQ ID NO: 21023 - protein, 7 aa, Artificial Sequence
  Description of Artificial Sequence: Synthetic peptide
  XENP020277 vlCDR2
SASNRYT

SEQ ID NO: 21024 - protein, 9 aa, Artificial Sequence
  Description of Artificial Sequence: Synthetic peptide
  XENP020277 vlCDR3
QQDYSSPWT

SEQ ID NO: 21025 - protein, 441 aa, Artificial Sequence
  Description of Artificial Sequence: Synthetic polypeptide
  XENP020278 8C1B_H0L0_anti-BTLA_IgG1_PVA_/S267K Heavy Chain
QVQLQQPGAELVRPGASVRLSCKASGYTFTSYWIHWVKQRPGQGLEWIGNIYSSDSYTNYNQKFKDKATLTVDKSSSTAYIHLSSPTSEDSAVYYCTRVDYWGQGTTLTVSSASTKGPSVFPLAPSSKSTSGGTAALGCLVKDYFPEPVTVSWNSGALTSGVHTFPAVLQSSGLYSLSSVVTVPSSSLGTQTYICNVNHKPSNTKVDKKVEPKSCDKTHTCPPCPAPPVAGPSVFLFPPKPKDTLMISRTPEVTCVVVDVKHEDPEVKFNWYVDGVEVHNAKTKPREEQYNSTYRVVSVLTVLHQDWLNGKEYKCKVSNKALPAPIEKTISKAKGQPREPQVYTLPPSREEMTKNQVSLTCLVKGFYPSDIAVEWESNGQPENNYKTTPPVLDSDGSFFLYSKLTVDKSRWQQGNVFSCSVMHEALHNHYTQKSLSLSPGK

SEQ ID NO: 21026 - protein, 112 aa, Artificial Sequence
  Description of Artificial Sequence: Synthetic polypeptide
  VH of XENP020278
QVQLQQPGAELVRPGASVRLSCKASGYTFTSYWIHWVKQRPGQGLEWIGNIYSSDSYTNYNQKFKDKATLTVDKSSSTAYIHLSSPTSEDSAVYYCTRVDYWGQGTTLTVSS

SEQ ID NO: 21027 - protein, 5 aa, Artificial Sequence
  Description of Artificial Sequence: Synthetic peptide
  XENP020278 vhCDR1
SYWIH

SEQ ID NO: 21028 - protein, 17 aa, Artificial Sequence
  Description of Artificial Sequence: Synthetic peptide
  XENP020278 vhCDR2
NIYSSDSYTNYNQKFKD

SEQ ID NO: 21029 - protein, 3 aa, Artificial Sequence
  Description of Artificial Sequence: Synthetic peptide
  XENP020278 vhCDR3
VDY

SEQ ID NO: 21030 - protein, 214 aa, Artificial Sequence; identical to SEQ ID NO: 21020
  Description of Artificial Sequence: Synthetic polypeptide
  XENP020278 8C1B_H0L0_anti-BTLA_IgG1_PVA_/S267K Light Chain

SEQ ID NO: 21031 - protein, 107 aa, Artificial Sequence; identical to SEQ ID NO: 21021
  Description of Artificial Sequence: Synthetic polypeptide
  VL of XENP020278

SEQ ID NO: 21032 - protein, 11 aa, Artificial Sequence
  Description of Artificial Sequence: Synthetic peptide
  XENP020278 vlCDR1
KASQSVNNDVS

SEQ ID NO: 21033 - protein, 7 aa, Artificial Sequence
  Description of Artificial Sequence: Synthetic peptide
  XENP020278 vlCDR2
SASNRYT

SEQ ID NO: 21034 - protein, 9 aa, Artificial Sequence
  Description of Artificial Sequence: Synthetic peptide
  XENP020278 vlCDR3
QQDYSSPWT

SEQ ID NO: 21035 - protein, 447 aa, Artificial Sequence
  Description of Artificial Sequence: Synthetic polypeptide
  XENP020279 10B6_H0L0_anti-BTLA_IgG1_PVA_/S267K Heavy Chain
QVQLKESGPGLVAPSQSLSITCTVSGFSLTGYGVNWVRQPPGKGLEWLGMIWIDGSTDYNSALKSRLSISKDNSKSQVFLKMNSLQTDDTARYYCARDRPDGRAMDYWGQGTSVTVSSASTKGPSVFPLAPSSKSTSGGTAALGCLVKDYFPEPVTVSWNSGALTSGVHTFPAVLQSSGLYSLSSVVTVPSSSLGTQTYICNVNHKPSNTKVDKKVEPKSCDKTHTCPPCPAPPVAGPSVFLFPPKPKDTLMISRTPEVTCVVVDVKHEDPEVKFNWYVDGVEVHNAKTKPREEQYNSTYRVVSVLTVLHQDWLNGKEYKCKVSNKALPAPIEKTISKAKGQPREPQVYTLPPSREEMTKNQVSLTCLVKGFYPSDIAVEWESNGQPENNYKTTPPVLDSDGSFFLYSKLTVDKSRWQQGNVFSCSVMHEALHNHYTQKSLSLSPGK

SEQ ID NO: 21036 - protein, 118 aa, Artificial Sequence
  Description of Artificial Sequence: Synthetic polypeptide
  VH of XENP020279
QVQLKESGPGLVAPSQSLSITCTVSGFSLTGYGVNWVRQPPGKGLEWLGMIWIDGSTDYNSALKSRLSISKDNSKSQVFLKMNSLQTDDTARYYCARDRPDGRAMDYWGQGTSVTVSS

SEQ ID NO: 21037 - protein, 5 aa, Artificial Sequence
  Description of Artificial Sequence: Synthetic peptide
  XENP020279 vhCDR1
GYGVN

SEQ ID NO: 21038 - protein, 16 aa, Artificial Sequence
  Description of Artificial Sequence: Synthetic peptide
  XENP020279 vhCDR2
MIWIDGSTDYNSALKS

SEQ ID NO: 21039 - protein, 10 aa, Artificial Sequence
  Description of Artificial Sequence: Synthetic peptide
  XENP020279 vhCDR3
DRPDGRAMDY

SEQ ID NO: 21040 - protein, 213 aa, Artificial Sequence
  Description of Artificial Sequence: Synthetic polypeptide
  XENP020279 10B6_H0L0_anti-BTLA_IgG1_PVA_/S267K Light Chain
SIVMTQTPKFLLVSAGDRVTITCKASQTVSNDVTWYQQKPGQSPKLLIYYASNRYTGVPDRFTGSGYGTDFTFTISTVQAEDLAVYFCQQDYSSPTFGGGTKLEIKRTVAAPSVFIFPPSDEQLKSGTASVVCLLNNFYPREAKVQWKVDNALQSGNSQESVTEQDSKDSTYSLSSTLTLSKADYEKHKVYACEVTHQGLSSPVTKSFNRGEC

SEQ ID NO: 21041 - protein, 106 aa, Artificial Sequence
  Description of Artificial Sequence: Synthetic polypeptide
  VL of XENP020279
SIVMTQTPKFLLVSAGDRVTITCKASQTVSNDVTWYQQKPGQSPKLLIYYASNRYTGVPDRFTGSGYGTDFTFTISTVQAEDLAVYFCQQDYSSPTFGGGTKLEIK

SEQ ID NO: 21042 - protein, 11 aa, Artificial Sequence
  Description of Artificial Sequence: Synthetic peptide
  XENP020279 vlCDR1
KASQTVSNDVT

SEQ ID NO: 21043 - protein, 7 aa, Artificial Sequence
  Description of Artificial Sequence: Synthetic peptide
  XENP020279 vlCDR2
YASNRYT

SEQ ID NO: 21044 - protein, 8 aa, Artificial Sequence
  Description of Artificial Sequence: Synthetic peptide
  XENP020279 vlCDR3
QQDYSSPT

SEQ ID NO: 21045 - protein, 447 aa, Artificial Sequence; identical to SEQ ID NO: 20935
  Description of Artificial Sequence: Synthetic polypeptide
  XENP020744 9C6_H0L1_anti-BTLA_IgG1_PVA_/S267K Heavy Chain

SEQ ID NO: 21046 - protein, 118 aa, Artificial Sequence; identical to SEQ ID NO: 20936
  Description of Artificial Sequence: Synthetic polypeptide
  VH of XENP020744

SEQ ID NO: 21047 - protein, 5 aa, Artificial Sequence
  Description of Artificial Sequence: Synthetic peptide
  XENP020744 vhCDR1
GYGVN

SEQ ID NO: 21048 - protein, 16 aa, Artificial Sequence
  Description of Artificial Sequence: Synthetic peptide
  XENP020744 vhCDR2
MIWIDGSTDYNSALKS

SEQ ID NO: 21049 - protein, 10 aa, Artificial Sequence
  Description of Artificial Sequence: Synthetic peptide
  XENP020744 vhCDR3
DRPDGRAMDY

SEQ ID NO: 21050 - protein, 213 aa, Artificial Sequence
  Description of Artificial Sequence: Synthetic polypeptide
  XENP020744 9C6_H0L1_anti-BTLA_IgG1_PVA_/S267K Light Chain
SIVMTQSPDSLAVSLGERATINCKASQSVSNDVAWYQQKPGQSPKLLIYYASNRYTGVPDRFTGSGYGTDFTLTISSLQAEDVAVYFCQQDYSSPTFGGGTKLEIKRTVAAPSVFIFPPSDEQLKSGTASVVCLLNNFYPREAKVQWKVDNALQSGNSQESVTEQDSKDSTYSLSSTLTLSKADYEKHKVYACEVTHQGLSSPVTKSFNRGEC

SEQ ID NO: 21051 - protein, 106 aa, Artificial Sequence
  Description of Artificial Sequence: Synthetic polypeptide
  VL of XENP020744
SIVMTQSPDSLAVSLGERATINCKASQSVSNDVAWYQQKPGQSPKLLIYYASNRYTGVPDRFTGSGYGTDFTLTISSLQAEDVAVYFCQQDYSSPTFGGGTKLEIK

SEQ ID NO: 21052 - protein, 11 aa, Artificial Sequence
  Description of Artificial Sequence: Synthetic peptide
  XENP020744 vlCDR1
KASQSVSNDVA

SEQ ID NO: 21053 - protein, 7 aa, Artificial Sequence
  Description of Artificial Sequence: Synthetic peptide
  XENP020744 vlCDR2
YASNRYT

SEQ ID NO: 21054 - protein, 8 aa, Artificial Sequence
  Description of Artificial Sequence: Synthetic peptide
  XENP020744 vlCDR3
QQDYSSPT

SEQ ID NO: 21055 - protein, 447 aa, Artificial Sequence; identical to SEQ ID NO: 20935
  Description of Artificial Sequence: Synthetic polypeptide
  XENP020745 9C6_H0L2_anti-BTLA_IgG1_PVA_/S267K Heavy Chain

SEQ ID NO: 21056 - protein, 118 aa, Artificial Sequence; identical to SEQ ID NO: 20936
  Description of Artificial Sequence: Synthetic polypeptide
  VH of XENP020745

SEQ ID NO: 21057 - protein, 5 aa, Artificial Sequence
  Description of Artificial Sequence: Synthetic peptide
  XENP020745 vhCDR1
GYGVN

SEQ ID NO: 21058 - protein, 16 aa, Artificial Sequence
  Description of Artificial Sequence: Synthetic peptide
  XENP020745 vhCDR2
MIWIDGSTDYNSALKS

SEQ ID NO: 21059 - protein, 10 aa, Artificial Sequence
  Description of Artificial Sequence: Synthetic peptide
  XENP020745 vhCDR3
DRPDGRAMDY

SEQ ID NO: 21060 - protein, 213 aa, Artificial Sequence
  Description of Artificial Sequence: Synthetic polypeptide
  XENP020745 9C6_H0L2_anti-BTLA_IgG1_PVA_/S267K Light Chain
SIVMTQSPLSLPVTPGEPASISCRASQSVSNDVAWYLQKPGQSPQLLIYYASNRYTGVPDRFTGSGYGTDFTLKISRVEAEDVGVYFCQQDYSSPTFGGGTKLEIKRTVAAPSVFIFPPSDEQLKSGTASVVCLLNNFYPREAKVQWKVDNALQSGNSQESVTEQDSKDSTYSLSSTLTLSKADYEKHKVYACEVTHQGLSSPVTKSFNRGEC

SEQ ID NO: 21061 - protein, 106 aa, Artificial Sequence
  Description of Artificial Sequence: Synthetic polypeptide
  VL of XENP020745
SIVMTQSPLSLPVTPGEPASISCRASQSVSNDVAWYLQKPGQSPQLLIYYASNRYTGVPDRFTGSGYGTDFTLKISRVEAEDVGVYFCQQDYSSPTFGGGTKLEIK

SEQ ID NO: 21062 - protein, 11 aa, Artificial Sequence
  Description of Artificial Sequence: Synthetic peptide
  XENP020745 vlCDR1
RASQSVSNDVA

SEQ ID NO: 21063 - protein, 7 aa, Artificial Sequence
  Description of Artificial Sequence: Synthetic peptide
  XENP020745 vlCDR2
YASNRYT

SEQ ID NO: 21064 - protein, 8 aa, Artificial Sequence
  Description of Artificial Sequence: Synthetic peptide
  XENP020745 vlCDR3
QQDYSSPT

SEQ ID NO: 21065 - protein, 447 aa, Artificial Sequence
  Description of Artificial Sequence: Synthetic polypeptide
  XENP020746 9C6_H1L0_anti-BTLA_IgG1_PVA_/S267K Heavy Chain
QVQLVQSGAEVKKPGASVKVSCKVSGFSLTGYGVNWVRQAPGQGLEWMGMIWIDGSTDYNSKFQGRVTMTKDNSKSTVYMELSSLRSEDTAVYYCARDRPDGRAMDYWGQGTMVTVSSASTKGPSVFPLAPSSKSTSGGTAALGCLVKDYFPEPVTVSWNSGALTSGVHTFPAVLQSSGLYSLSSVVTVPSSSLGTQTYICNVNHKPSNTKVDKKVEPKSCDKTHTCPPCPAPPVAGPSVFLFPPKPKDTLMISRTPEVTCVVVDVKHEDPEVKFNWYVDGVEVHNAKTKPREEQYNSTYRVVSVLTVLHQDWLNGKEYKCKVSNKALPAPIEKTISKAKGQPREPQVYTLPPSREEMTKNQVSLTCLVKGFYPSDIAVEWESNGQPENNYKTTPPVLDSDGSFFLYSKLTVDKSRWQQGNVFSCSVMHEALHNHYTQKSLSLSPGK

SEQ ID NO: 21066 - protein, 118 aa, Artificial Sequence
  Description of Artificial Sequence: Synthetic polypeptide
  VH of XENP020746
QVQLVQSGAEVKKPGASVKVSCKVSGFSLTGYGVNWVRQAPGQGLEWMGMIWIDGSTDYNSKFQGRVTMTKDNSKSTVYMELSSLRSEDTAVYYCARDRPDGRAMDYWGQGTMVTVSS

SEQ ID NO: 21067 - protein, 5 aa, Artificial Sequence
  Description of Artificial Sequence: Synthetic peptide
  XENP020746 vhCDR1
GYGVN

SEQ ID NO: 21068 - protein, 16 aa, Artificial Sequence
  Description of Artificial Sequence: Synthetic peptide
  XENP020746 vhCDR2
MIWIDGSTDYNSKFQG

SEQ ID NO: 21069 - protein, 10 aa, Artificial Sequence
  Description of Artificial Sequence: Synthetic peptide
  XENP020746 vhCDR3
DRPDGRAMDY

SEQ ID NO: 21070 - protein, 213 aa, Artificial Sequence; identical to SEQ ID NO: 20940
  Description of Artificial Sequence: Synthetic polypeptide
  XENP020746 9C6_H1L0_anti-BTLA_IgG1_PVA_/S267K Light Chain

SEQ ID NO: 21071 - protein, 106 aa, Artificial Sequence; identical to SEQ ID NO: 20941
  Description of Artificial Sequence: Synthetic polypeptide
  VL of XENP020746

SEQ ID NO: 21072 - protein, 11 aa, Artificial Sequence
  Description of Artificial Sequence: Synthetic peptide
  XENP020746 vlCDR1
KASQSVSNDVA

SEQ ID NO: 21073 - protein, 7 aa, Artificial Sequence
  Description of Artificial Sequence: Synthetic peptide
  XENP020746 vlCDR2
YASNRYT

SEQ ID NO: 21074 - protein, 8 aa, Artificial Sequence
  Description of Artificial Sequence: Synthetic peptide
  XENP020746 vlCDR3
QQDYSSPT

SEQ ID NO: 21075 - protein, 447 aa, Artificial Sequence; identical to SEQ ID NO: 21065
  Description of Artificial Sequence: Synthetic polypeptide
  XENP020747 9C6_H1L1_anti-BTLA_IgG1_PVA_/S267K Heavy Chain

SEQ ID NO: 21076 - protein, 118 aa, Artificial Sequence; identical to SEQ ID NO: 21066
  Description of Artificial Sequence: Synthetic polypeptide
  VH of XENP020747

SEQ ID NO: 21077 - protein, 5 aa, Artificial Sequence
  Description of Artificial Sequence: Synthetic peptide
  XENP020747 vhCDR1
GYGVN

SEQ ID NO: 21078 - protein, 16 aa, Artificial Sequence
  Description of Artificial Sequence: Synthetic peptide
  XENP020747 vhCDR2
MIWIDGSTDYNSKFQG

SEQ ID NO: 21079 - protein, 10 aa, Artificial Sequence
  Description of Artificial Sequence: Synthetic peptide
  XENP020747 vhCDR3
DRPDGRAMDY

SEQ ID NO: 21080 - protein, 213 aa, Artificial Sequence; identical to SEQ ID NO: 21050
  Description of Artificial Sequence: Synthetic polypeptide
  XENP020747 9C6_H1L1_anti-BTLA_IgG1_PVA_/S267K Light Chain

SEQ ID NO: 21081 - protein, 106 aa, Artificial Sequence; identical to SEQ ID NO: 21051
  Description of Artificial Sequence: Synthetic polypeptide
  VL of XENP020747

SEQ ID NO: 21082 - protein, 11 aa, Artificial Sequence
  Description of Artificial Sequence: Synthetic peptide
  XENP020747 vlCDR1
KASQSVSNDVA

SEQ ID NO: 21083 - protein, 7 aa, Artificial Sequence
  Description of Artificial Sequence: Synthetic peptide
  XENP020747 vlCDR2
YASNRYT

SEQ ID NO: 21084 - protein, 8 aa, Artificial Sequence
  Description of Artificial Sequence: Synthetic peptide
  XENP020747 vlCDR3
QQDYSSPT

SEQ ID NO: 21085 - protein, 447 aa, Artificial Sequence; identical to SEQ ID NO: 21065
  Description of Artificial Sequence: Synthetic polypeptide
  XENP020748 9C6_H1L2_anti-BTLA_IgG1_PVA_/S267K Heavy Chain

SEQ ID NO: 21086 - protein, 118 aa, Artificial Sequence; identical to SEQ ID NO: 21066
  Description of Artificial Sequence: Synthetic polypeptide
  VH of XENP020748

SEQ ID NO: 21087 - protein, 5 aa, Artificial Sequence
  Description of Artificial Sequence: Synthetic peptide
  XENP020748 vhCDR1
GYGVN

SEQ ID NO: 21088 - protein, 16 aa, Artificial Sequence
  Description of Artificial Sequence: Synthetic peptide
  XENP020748 vhCDR2
MIWIDGSTDYNSKFQG

SEQ ID NO: 21089 - protein, 10 aa, Artificial Sequence
  Description of Artificial Sequence: Synthetic peptide
  XENP020748 vhCDR3
DRPDGRAMDY

SEQ ID NO: 21090 - protein, 213 aa, Artificial Sequence; identical to SEQ ID NO: 21060
  Description of Artificial Sequence: Synthetic polypeptide
  XENP020748 9C6_H1L2_anti-BTLA_IgG1_PVA_/S267K Light Chain

SEQ ID NO: 21091 - protein, 106 aa, Artificial Sequence; identical to SEQ ID NO: 21061
  Description of Artificial Sequence: Synthetic polypeptide
  VL of XENP020748

SEQ ID NO: 21092 - protein, 11 aa, Artificial Sequence
  Description of Artificial Sequence: Synthetic peptide
  XENP020748 vlCDR1
RASQSVSNDVA

SEQ ID NO: 21093 - protein, 7 aa, Artificial Sequence
  Description of Artificial Sequence: Synthetic peptide
  XENP020748 vlCDR2
YASNRYT

SEQ ID NO: 21094 - protein, 8 aa, Artificial Sequence
  Description of Artificial Sequence: Synthetic peptide
  XENP020748 vlCDR3
QQDYSSPT

SEQ ID NO: 21095 - protein, 447 aa, Artificial Sequence
  Description of Artificial Sequence: Synthetic polypeptide
  XENP020749 9C6_H2L0_anti-BTLA_IgG1_PVA_/S267K Heavy Chain
EVQLVESGGGLVQPGGSLRLSCAVSGFSLTGYGVNWVRQAPGKGLEWVSMIWIDGSTDYNPSVKGRFTISKDNSKSTVYLQMNSLRAEDTAVYYCARDRPDGRAMDYWGQGTMVTVSSASTKGPSVFPLAPSSKSTSGGTAALGCLVKDYFPEPVTVSWNSGALTSGVHTFPAVLQSSGLYSLSSVVTVPSSSLGTQTYICNVNHKPSNTKVDKKVEPKSCDKTHTCPPCPAPPVAGPSVFLFPPKPKDTLMISRTPEVTCVVVDVKHEDPEVKFNWYVDGVEVHNAKTKPREEQYNSTYRVVSVLTVLHQDWLNGKEYKCKVSNKALPAPIEKTISKAKGQPREPQVYTLPPSREEMTKNQVSLTCLVKGFYPSDIAVEWESNGQPENNYKTTPPVLDSDGSFFLYSKLTVDKSRWQQGNVFSCSVMHEALHNHYTQKSLSLSPGK

SEQ ID NO: 21096 - protein, 118 aa, Artificial Sequence
  Description of Artificial Sequence: Synthetic polypeptide
  VH of XENP020749
EVQLVESGGGLVQPGGSLRLSCAVSGFSLTGYGVNWVRQAPGKGLEWVSMIWIDGSTDYNPSVKGRFTISKDNSKSTVYLQMNSLRAEDTAVYYCARDRPDGRAMDYWGQGTMVTVSS

SEQ ID NO: 21097 - protein, 5 aa, Artificial Sequence
  Description of Artificial Sequence: Synthetic peptide
  XENP020749 vhCDR1
GYGVN

SEQ ID NO: 21098 - protein, 16 aa, Artificial Sequence
  Description of Artificial Sequence: Synthetic peptide
  XENP020749 vhCDR2
MIWIDGSTDYNPSVKG

SEQ ID NO: 21099 - protein, 10 aa, Artificial Sequence
  Description of Artificial Sequence: Synthetic peptide
  XENP020749 vhCDR3
DRPDGRAMDY

SEQ ID NO: 21100 - protein, 213 aa, Artificial Sequence; identical to SEQ ID NO: 20940
  Description of Artificial Sequence: Synthetic polypeptide
  XENP020749 9C6_H2L0_anti-BTLA_IgG1_PVA_/S267K Light Chain

SEQ ID NO: 21101 - protein, 106 aa, Artificial Sequence; identical to SEQ ID NO: 20941
  Description of Artificial Sequence: Synthetic polypeptide
  VL of XENP020749

SEQ ID NO: 21102 - protein, 11 aa, Artificial Sequence
  Description of Artificial Sequence: Synthetic peptide
  XENP020749 vlCDR1
KASQSVSNDVA

SEQ ID NO: 21103 - protein, 7 aa, Artificial Sequence
  Description of Artificial Sequence: Synthetic peptide
  XENP020749 vlCDR2
YASNRYT

SEQ ID NO: 21104 - protein, 8 aa, Artificial Sequence
  Description of Artificial Sequence: Synthetic peptide
  XENP020749 vlCDR3
QQDYSSPT

SEQ ID NO: 21105 - protein, 447 aa, Artificial Sequence; identical to SEQ ID NO: 21095
  Description of Artificial Sequence: Synthetic polypeptide
  XENP020750 9C6_H2L1_anti-BTLA_IgG1_PVA_/S267K Heavy Chain

SEQ ID NO: 21106 - protein, 118 aa, Artificial Sequence; identical to SEQ ID NO: 21096
  Description of Artificial Sequence: Synthetic polypeptide
  VH of XENP020750

SEQ ID NO: 21107 - protein, 5 aa, Artificial Sequence
  Description of Artificial Sequence: Synthetic peptide
  XENP020750 vhCDR1
GYGVN

SEQ ID NO: 21108 - protein, 16 aa, Artificial Sequence
  Description of Artificial Sequence: Synthetic peptide
  XENP020750 vhCDR2
MIWIDGSTDYNPSVKG

SEQ ID NO: 21109 - protein, 10 aa, Artificial Sequence
  Description of Artificial Sequence: Synthetic peptide
  XENP020750 vhCDR3
DRPDGRAMDY

SEQ ID NO: 21110 - protein, 213 aa, Artificial Sequence; identical to SEQ ID NO: 21050
  Description of Artificial Sequence: Synthetic polypeptide
  XENP020750 9C6_H2L1_anti-BTLA_IgG1_PVA_/S267K Light Chain

SEQ ID NO: 21111 - protein, 106 aa, Artificial Sequence; identical to SEQ ID NO: 21051
  Description of Artificial Sequence: Synthetic polypeptide
  VL of XENP020750

SEQ ID NO: 21112 - protein, 11 aa, Artificial Sequence
  Description of Artificial Sequence: Synthetic peptide
  XENP020750 vlCDR1
KASQSVSNDVA

SEQ ID NO: 21113 - protein, 7 aa, Artificial Sequence
  Description of Artificial Sequence: Synthetic peptide
  XENP020750 vlCDR2
YASNRYT

SEQ ID NO: 21114 - protein, 8 aa, Artificial Sequence
  Description of Artificial Sequence: Synthetic peptide
  XENP020750 vlCDR3
QQDYSSPT

SEQ ID NO: 21115 - protein, 447 aa, Artificial Sequence; identical to SEQ ID NO: 21095
  Description of Artificial Sequence: Synthetic polypeptide
  XENP020751 9C6_H2L2_anti-BTLA_IgG1_PVA_/S267K Heavy Chain

SEQ ID NO: 21116 - protein, 118 aa, Artificial Sequence; identical to SEQ ID NO: 21096
  Description of Artificial Sequence: Synthetic polypeptide
  VH of XENP020751

SEQ ID NO: 21117 - protein, 5 aa, Artificial Sequence
  Description of Artificial Sequence: Synthetic peptide
  XENP020751 vhCDR1
GYGVN

SEQ ID NO: 21118 - protein, 16 aa, Artificial Sequence
  Description of Artificial Sequence: Synthetic peptide
  XENP020751 vhCDR2
MIWIDGSTDYNPSVKG

SEQ ID NO: 21119 - protein, 10 aa, Artificial Sequence
  Description of Artificial Sequence: Synthetic peptide
  XENP020751 vhCDR3
DRPDGRAMDY

SEQ ID NO: 21120 - protein, 213 aa, Artificial Sequence; identical to SEQ ID NO: 21060
  Description of Artificial Sequence: Synthetic polypeptide
  XENP020751 9C6_H2L2_anti-BTLA_IgG1_PVA_/S267K Light Chain

SEQ ID NO: 21121 - protein, 106 aa, Artificial Sequence; identical to SEQ ID NO: 21061
  Description of Artificial Sequence: Synthetic polypeptide
  VL of XENP020751

SEQ ID NO: 21122 - protein, 11 aa, Artificial Sequence
  Description of Artificial Sequence: Synthetic peptide
  XENP020751 vlCDR1
RASQSVSNDVA

SEQ ID NO: 21123 - protein, 7 aa, Artificial Sequence
  Description of Artificial Sequence: Synthetic peptide
  XENP020751 vlCDR2
YASNRYT

SEQ ID NO: 21124 - protein, 8 aa, Artificial Sequence
  Description of Artificial Sequence: Synthetic peptide
  XENP020751 vlCDR3
QQDYSSPT

SEQ ID NO: 21125 - protein, 447 aa, Artificial Sequence
  Description of Artificial Sequence: Synthetic polypeptide
  XENP020752 9C6_H3L0_anti-BTLA_IgG1_PVA_/S267K Heavy Chain
QVTLKESGPVLVKPTETLTLTCTVSGFSLTGYGVNWVRQPPGKGLEWLAMIWIDGSTDYNPSLKSRLTISKDNSKSQVVLTMTNMDPVDTATYYCARDRPDGRAMDYWGQGTMVTVSSASTKGPSVFPLAPSSKSTSGGTAALGCLVKDYFPEPVTVSWNSGALTSGVHTFPAVLQSSGLYSLSSVVTVPSSSLGTQTYICNVNHKPSNTKVDKKVEPKSCDKTHTCPPCPAPPVAGPSVFLFPPKPKDTLMISRTPEVTCVVVDVKHEDPEVKFNWYVDGVEVHNAKTKPREEQYNSTYRVVSVLTVLHQDWLNGKEYKCKVSNKALPAPIEKTISKAKGQPREPQVYTLPPSREEMTKNQVSLTCLVKGFYPSDIAVEWESNGQPENNYKTTPPVLDSDGSFFLYSKLTVDKSRWQQGNVFSCSVMHEALHNHYTQKSLSLSPGK

SEQ ID NO: 21126 - protein, 118 aa, Artificial Sequence
  Description of Artificial Sequence: Synthetic polypeptide
  VH of XENP020752
QVTLKESGPVLVKPTETLTLTCTVSGFSLTGYGVNWVRQPPGKGLEWLAMIWIDGSTDYNPSLKSRLTISKDNSKSQVVLTMTNMDPVDTATYYCARDRPDGRAMDYWGQGTMVTVSS

SEQ ID NO: 21127 - protein, 5 aa, Artificial Sequence
  Description of Artificial Sequence: Synthetic peptide
  XENP020752 vhCDR1
GYGVN

SEQ ID NO: 21128 - protein, 16 aa, Artificial Sequence
  Description of Artificial Sequence: Synthetic peptide
  XENP020752 vhCDR2
MIWIDGSTDYNPSLKS

SEQ ID NO: 21129 - protein, 10 aa, Artificial Sequence
  Description of Artificial Sequence: Synthetic peptide
  XENP020752 vhCDR3
DRPDGRAMDY

SEQ ID NO: 21130 - protein, 213 aa, Artificial Sequence; identical to SEQ ID NO: 20940
  Description of Artificial Sequence: Synthetic polypeptide
  XENP020752 9C6_H3L0_anti-BTLA_IgG1_PVA_/S267K Light Chain

SEQ ID NO: 21131 - protein, 106 aa, Artificial Sequence; identical to SEQ ID NO: 20941
  Description of Artificial Sequence: Synthetic polypeptide
  VL of XENP020752

SEQ ID NO: 21132 - protein, 11 aa, Artificial Sequence
  Description of Artificial Sequence: Synthetic peptide
  XENP020752 vlCDR1
KASQSVSNDVA

SEQ ID NO: 21133 - protein, 7 aa, Artificial Sequence
  Description of Artificial Sequence: Synthetic peptide
  XENP020752 vlCDR2
YASNRYT

SEQ ID NO: 21134 - protein, 8 aa, Artificial Sequence
  Description of Artificial Sequence: Synthetic peptide
  XENP020752 vlCDR3
QQDYSSPT

SEQ ID NO: 21135 - protein, 447 aa, Artificial Sequence; identical to SEQ ID NO: 21125
  Description of Artificial Sequence: Synthetic polypeptide
  XENP020753 9C6_H3L1_anti-BTLA_IgG1_PVA_/S267K Heavy Chain

SEQ ID NO: 21136 - protein, 118 aa, Artificial Sequence; identical to SEQ ID NO: 21126
  Description of Artificial Sequence: Synthetic polypeptide
  VH of XENP020753

SEQ ID NO: 21137 - protein, 5 aa, Artificial Sequence
  Description of Artificial Sequence: Synthetic peptide
  XENP020753 vhCDR1
GYGVN

SEQ ID NO: 21138 - protein, 16 aa, Artificial Sequence
  Description of Artificial Sequence: Synthetic peptide
  XENP020753 vhCDR2
MIWIDGSTDYNPSLKS

SEQ ID NO: 21139 - protein, 10 aa, Artificial Sequence
  Description of Artificial Sequence: Synthetic peptide
  XENP020753 vhCDR3
DRPDGRAMDY

SEQ ID NO: 21140 - protein, 213 aa, Artificial Sequence; identical to SEQ ID NO: 21050
  Description of Artificial Sequence: Synthetic polypeptide
  XENP020753 9C6_H3L1_anti-BTLA_IgG1_PVA_/S267K Light Chain

SEQ ID NO: 21141 - protein, 106 aa, Artificial Sequence; identical to SEQ ID NO: 21051
  Description of Artificial Sequence: Synthetic polypeptide
  VL of XENP020753

SEQ ID NO: 21142 - protein, 11 aa, Artificial Sequence
  Description of Artificial Sequence: Synthetic peptide
  XENP020753 vlCDR1
KASQSVSNDVA

SEQ ID NO: 21143 - protein, 7 aa, Artificial Sequence
  Description of Artificial Sequence: Synthetic peptide
  XENP020753 vlCDR2
YASNRYT

SEQ ID NO: 21144 - protein, 8 aa, Artificial Sequence
  Description of Artificial Sequence: Synthetic peptide
  XENP020753 vlCDR3
QQDYSSPT

SEQ ID NO: 21145 - protein, 447 aa, Artificial Sequence; identical to SEQ ID NO: 21125
  Description of Artificial Sequence: Synthetic polypeptide
  XENP020754 9C6_H3L2_anti-BTLA_IgG1_PVA_/S267K Heavy Chain

SEQ ID NO: 21146 - protein, 118 aa, Artificial Sequence; identical to SEQ ID NO: 21126
  Description of Artificial Sequence: Synthetic polypeptide
  VH of XENP020754

SEQ ID NO: 21147 - protein, 5 aa, Artificial Sequence
  Description of Artificial Sequence: Synthetic peptide
  XENP020754 vhCDR1
GYGVN

SEQ ID NO: 21148 - protein, 16 aa, Artificial Sequence
  Description of Artificial Sequence: Synthetic peptide
  XENP020754 vhCDR2
MIWIDGSTDYNPSLKS

SEQ ID NO: 21149 - protein, 10 aa, Artificial Sequence
  Description of Artificial Sequence: Synthetic peptide
  XENP020754 vhCDR3
DRPDGRAMDY

SEQ ID NO: 21150 - protein, 213 aa, Artificial Sequence; identical to SEQ ID NO: 21060
  Description of Artificial Sequence: Synthetic polypeptide
  XENP020754 9C6_H3L2_anti-BTLA_IgG1_PVA_/S267K Light Chain

SEQ ID NO: 21151 - protein, 106 aa, Artificial Sequence; identical to SEQ ID NO: 21061
  Description of Artificial Sequence: Synthetic polypeptide
  VL of XENP020754

SEQ ID NO: 21152 - protein, 11 aa, Artificial Sequence
  Description of Artificial Sequence: Synthetic peptide
  XENP020754 vlCDR1
RASQSVSNDVA

SEQ ID NO: 21153 - protein, 7 aa, Artificial Sequence
  Description of Artificial Sequence: Synthetic peptide
  XENP020754 vlCDR2
YASNRYT

SEQ ID NO: 21154 - protein, 8 aa, Artificial Sequence
  Description of Artificial Sequence: Synthetic peptide
  XENP020754 vlCDR3
QQDYSSPT

SEQ ID NO: 21155 - protein, 443 aa, Artificial Sequence; identical to SEQ ID NO: 20975
  Description of Artificial Sequence: Synthetic polypeptide
  XENP020758 12E6_H0L1_anti-BTLA_IgG1_PVA_/S267K Heavy Chain

SEQ ID NO: 21156 - protein, 5 aa, Artificial Sequence
  Description of Artificial Sequence: Synthetic peptide
  XENP020758 vhCDR1
NYWIE

SEQ ID NO: 21157 - protein, 17 aa, Artificial Sequence
  Description of Artificial Sequence: Synthetic peptide
  XENP020758 vhCDR2
EILPGSGGTNYNEKFKG

SEQ ID NO: 21158 - protein, 5 aa, Artificial Sequence
  Description of Artificial Sequence: Synthetic peptide
  XENP020758 vhCDR3
PRYDL

SEQ ID NO: 21159 - protein, 219 aa, Artificial Sequence
  Description of Artificial Sequence: Synthetic polypeptide
  XENP020758 12E6_H0L1_anti-BTLA_IgG1_PVA_/S267K Light Chain
DVVLTQSPLSLPVTLGQPASISCRSSQSLLHSDGETYLNYFQQRPGQSPRRLIYLVSKRDSGVPDRFTGSGSGTDFTLKISRVEAEDVGVYYCWQGIHFPQTFGRGTKLEIKRTVAAPSVFIFPPSDEQLKSGTASVVCLLNNFYPREAKVQWKVDNALQSGNSQESVTEQDSKDSTYSLSSTLTLSKADYEKHKVYACEVTHQGLSSPVTKSFNRGEC

SEQ ID NO: 21160 - protein, 112 aa, Artificial Sequence
  Description of Artificial Sequence: Synthetic polypeptide
  VL of XENP020758
DVVLTQSPLSLPVTLGQPASISCRSSQSLLHSDGETYLNYFQQRPGQSPRRLIYLVSKRDSGVPDRFTGSGSGTDFTLKISRVEAEDVGVYYCWQGIHFPQTFGRGTKLEIK

SEQ ID NO: 21161 - protein, 16 aa, Artificial Sequence
  Description of Artificial Sequence: Synthetic peptide
  XENP020758 vlCDR1
RSSQSLLHSDGETYLN

SEQ ID NO: 21162 - protein, 7 aa, Artificial Sequence
  Description of Artificial Sequence: Synthetic peptide
  XENP020758 vlCDR2
LVSKRDS

SEQ ID NO: 21163 - protein, 9 aa, Artificial Sequence
  Description of Artificial Sequence: Synthetic peptide
  XENP020758 vlCDR3
WQGIHFPQT

SEQ ID NO: 21164 - protein, 443 aa, Artificial Sequence
  Description of Artificial Sequence: Synthetic polypeptide
  XENP020759 12E6_H1L0_anti-BTLA_IgG1_PVA_/S267K Heavy Chain
QVQLVQSGAEVKKPGASVKVSCKASGYTFSNYGIEWVRQAPGQGLEWMGEILPGSGGTNYNEKFQGRVTMTADTSINTAYMELSRLRSDDTAVYYCASPRYDLWGQGTLVTVSSASTKGPSVFPLAPSSKSTSGGTAALGCLVKDYFPEPVTVSWNSGALTSGVHTFPAVLQSSGLYSLSSVVTVPSSSLGTQTYICNVNHKPSNTKVDKKVEPKSCDKTHTCPPCPAPPVAGPSVFLFPPKPKDTLMISRTPEVTCVVVDVKHEDPEVKFNWYVDGVEVHNAKTKPREEQYNSTYRVVSVLTVLHQDWLNGKEYKCKVSNKALPAPIEKTISKAKGQPREPQVYTLPPSREEMTKNQVSLTCLVKGFYPSDIAVEWESNGQPENNYKTTPPVLDSDGSFFLYSKLTVDKSRWQQGNVFSCSVMHEALHNHYTQKSLSLSPGK

SEQ ID NO: 21165 - protein, 114 aa, Artificial Sequence
  Description of Artificial Sequence: Synthetic polypeptide
  VH of XENP020759
QVQLVQSGAEVKKPGASVKVSCKASGYTFSNYGIEWVRQAPGQGLEWMGEILPGSGGTNYNEKFQGRVTMTADTSINTAYMELSRLRSDDTAVYYCASPRYDLWGQGTLVTVSS

SEQ ID NO: 21166 - protein, 5 aa, Artificial Sequence
  Description of Artificial Sequence: Synthetic peptide
  XENP020759 vhCDR1
NYGIE

SEQ ID NO: 21167 - protein, 17 aa, Artificial Sequence
  Description of Artificial Sequence: Synthetic peptide
  XENP020759 vhCDR2
EILPGSGGTNYNEKFQG

SEQ ID NO: 21168 - protein, 5 aa, Artificial Sequence
  Description of Artificial Sequence: Synthetic peptide
  XENP020759 vhCDR3
PRYDL

SEQ ID NO: 21169 - protein, 219 aa, Artificial Sequence; identical to SEQ ID NO: 20980
  Description of Artificial Sequence: Synthetic polypeptide
  XENP020759 12E6_H1L0_anti-BTLA_IgG1_PVA_/S267K Light Chain

SEQ ID NO: 21170 - protein, 112 aa, Artificial Sequence; identical to SEQ ID NO: 20981
  Description of Artificial Sequence: Synthetic polypeptide
  VL of XENP020759

SEQ ID NO: 21171 - protein, 16 aa, Artificial Sequence
  Description of Artificial Sequence: Synthetic peptide
  XENP020759 vlCDR1
KSSQSLLHSDGETYLN

SEQ ID NO: 21172 - protein, 7 aa, Artificial Sequence
  Description of Artificial Sequence: Synthetic peptide
  XENP020759 vlCDR2
LVSKRDS

SEQ ID NO: 21173 - protein, 9 aa, Artificial Sequence
  Description of Artificial Sequence: Synthetic peptide
  XENP020759 vlCDR3
WQGIHFPQT

SEQ ID NO: 21174 - protein, 443 aa, Artificial Sequence; identical to SEQ ID NO: 21164
  Description of Artificial Sequence: Synthetic polypeptide
  XENP020760 12E6_H1L1_anti-BTLA_IgG1_PVA_/S267K Heavy Chain

SEQ ID NO: 21175 - protein, 114 aa, Artificial Sequence; identical to SEQ ID NO: 21165
  Description of Artificial Sequence: Synthetic polypeptide
  VH of XENP020760

SEQ ID NO: 21176 - protein, 5 aa, Artificial Sequence
  Description of Artificial Sequence: Synthetic peptide
  XENP020760 vhCDR1
NYGIE

SEQ ID NO: 21177 - protein, 17 aa, Artificial Sequence
  Description of Artificial Sequence: Synthetic peptide
  XENP020760 vhCDR2
EILPGSGGTNYNEKFQG

SEQ ID NO: 21178 - protein, 5 aa, Artificial Sequence
  Description of Artificial Sequence: Synthetic peptide
  XENP020760 vhCDR3
PRYDL

SEQ ID NO: 21179 - protein, 219 aa, Artificial Sequence; identical to SEQ ID NO: 21159
  Description of Artificial Sequence: Synthetic polypeptide
  XENP020760 12E6_H1L1_anti-BTLA_IgG1_PVA_/S267K Light Chain

SEQ ID NO: 21180 - protein, 112 aa, Artificial Sequence; identical to SEQ ID NO: 21160
  Description of Artificial Sequence: Synthetic polypeptide
  VL of XENP020760

SEQ ID NO: 21181 - protein, 16 aa, Artificial Sequence
  Description of Artificial Sequence: Synthetic peptide
  XENP020760 vlCDR1
RSSQSLLHSDGETYLN

SEQ ID NO: 21182 - protein, 7 aa, Artificial Sequence
  Description of Artificial Sequence: Synthetic peptide
  XENP020760 vlCDR2
LVSKRDS

SEQ ID NO: 21183 - protein, 9 aa, Artificial Sequence
  Description of Artificial Sequence: Synthetic peptide
  XENP020760 vlCDR3
WQGIHFPQT

SEQ ID NO: 21184 - protein, 443 aa, Artificial Sequence
  Description of Artificial Sequence: Synthetic polypeptide
  XENP020761 12E6_H2L0_anti-BTLA_IgG1_PVA_/S267K Heavy Chain
EVQLLESGGGLVQPGGSLRLSCAASGYTFSNYGIEWVRQAPGKGLEWVSEILPGSGGTNYNPSVKGRFTISADTSKNTAYLQMNSLRAEDTAVYYCASPRYDLWGQGTLVTVSSASTKGPSVFPLAPSSKSTSGGTAALGCLVKDYFPEPVTVSWNSGALTSGVHTFPAVLQSSGLYSLSSVVTVPSSSLGTQTYICNVNHKPSNTKVDKKVEPKSCDKTHTCPPCPAPPVAGPSVFLFPPKPKDTLMISRTPEVTCVVVDVKHEDPEVKFNWYVDGVEVHNAKTKPREEQYNSTYRVVSVLTVLHQDWLNGKEYKCKVSNKALPAPIEKTISKAKGQPREPQVYTLPPSREEMTKNQVSLTCLVKGFYPSDIAVEWESNGQPENNYKTTPPVLDSDGSFFLYSKLTVDKSRWQQGNVFSCSVMHEALHNHYTQKSLSLSPGK

SEQ ID NO: 21185 - protein, 114 aa, Artificial Sequence
  Description of Artificial Sequence: Synthetic polypeptide
  VH of XENP020761
EVQLLESGGGLVQPGGSLRLSCAASGYTFSNYGIEWVRQAPGKGLEWVSEILPGSGGTNYNPSVKGRFTISADTSKNTAYLQMNSLRAEDTAVYYCASPRYDLWGQGTLVTVSS

SEQ ID NO: 21186 - protein, 5 aa, Artificial Sequence
  Description of Artificial Sequence: Synthetic peptide
  XENP020761 vhCDR1
NYGIE

SEQ ID NO: 21187 - protein, 17 aa, Artificial Sequence
  Description of Artificial Sequence: Synthetic peptide
  XENP020761 vhCDR2
EILPGSGGTNYNPSVKG

SEQ ID NO: 21188 - protein, 5 aa, Artificial Sequence
  Description of Artificial Sequence: Synthetic peptide
  XENP020761 vhCDR3
PRYDL

SEQ ID NO: 21189 - protein, 219 aa, Artificial Sequence; identical to SEQ ID NO: 20980
  Description of Artificial Sequence: Synthetic polypeptide
  XENP020761 12E6_H2L0_anti-BTLA_IgG1_PVA_/S267K Light Chain

SEQ ID NO: 21190 - protein, 112 aa, Artificial Sequence; identical to SEQ ID NO: 20981
  Description of Artificial Sequence: Synthetic polypeptide
  VL of XENP020761

SEQ ID NO: 21191 - protein, 16 aa, Artificial Sequence
  Description of Artificial Sequence: Synthetic peptide
  XENP020761 vlCDR1
KSSQSLLHSDGETYLN

SEQ ID NO: 21192 - protein, 7 aa, Artificial Sequence
  Description of Artificial Sequence: Synthetic peptide
  XENP020761 vlCDR2
LVSKRDS

SEQ ID NO: 21193 - protein, 9 aa, Artificial Sequence
  Description of Artificial Sequence: Synthetic peptide
  XENP020761 vlCDR3
WQGIHFPQT

SEQ ID NO: 21194 - protein, 443 aa, Artificial Sequence; identical to SEQ ID NO: 21184
  Description of Artificial Sequence: Synthetic polypeptide
  XENP020762 12E6_H2L1_anti-BTLA_IgG1_PVA_/S267K Heavy Chain

SEQ ID NO: 21195 - protein, 114 aa, Artificial Sequence; identical to SEQ ID NO: 21185
  Description of Artificial Sequence: Synthetic polypeptide
  VH of XENP020762

SEQ ID NO: 21196 - protein, 5 aa, Artificial Sequence
  Description of Artificial Sequence: Synthetic peptide
  XENP020762 vhCDR1
NYGIE

SEQ ID NO: 21197 - protein, 17 aa, Artificial Sequence
  Description of Artificial Sequence: Synthetic peptide
  XENP020762 vhCDR2
EILPGSGGTNYNPSVKG

SEQ ID NO: 21198 - protein, 5 aa, Artificial Sequence
  Description of Artificial Sequence: Synthetic peptide
  XENP020762 vhCDR3
PRYDL

SEQ ID NO: 21199 - protein, 219 aa, Artificial Sequence; identical to SEQ ID NO: 21159
  Description of Artificial Sequence: Synthetic polypeptide
  XENP020762 12E6_H2L1_anti-BTLA_IgG1_PVA_/S267K Light Chain

SEQ ID NO: 21200 - protein, 112 aa, Artificial Sequence; identical to SEQ ID NO: 21160
  Description of Artificial Sequence: Synthetic polypeptide
  VL of XENP020762

SEQ ID NO: 21201 - protein, 16 aa, Artificial Sequence
  Description of Artificial Sequence: Synthetic peptide
  XENP020762 vlCDR1
RSSQSLLHSDGETYLN

SEQ ID NO: 21202 - protein, 7 aa, Artificial Sequence
  Description of Artificial Sequence: Synthetic peptide
  XENP020762 vlCDR2
LVSKRDS

SEQ ID NO: 21203 - protein, 9 aa, Artificial Sequence
  Description of Artificial Sequence: Synthetic peptide
  XENP020762 vlCDR3
WQGIHFPQT

SEQ ID NO: 21204 - protein, 447 aa, Artificial Sequence
  Description of Artificial Sequence: Synthetic polypeptide
  XENP020872 9C6_H1.1_L1_anti-BTLA_IgG1_PVA_/S267K Heavy Chain
QVQLKESGAEVKKPGASVKVSCKVSGFSLTGYGVNWVRQAPGQGLEWMGMIWIDGSTDYNSKFQGRVTMTKDNSKSTVYMELSSLRSEDTAVYYCARDRPDGRAMDYWGQGTMVTVSSASTKGPSVFPLAPSSKSTSGGTAALGCLVKDYFPEPVTVSWNSGALTSGVHTFPAVLQSSGLYSLSSVVTVPSSSLGTQTYICNVNHKPSNTKVDKKVEPKSCDKTHTCPPCPAPPVAGPSVFLFPPKPKDTLMISRTPEVTCVVVDVKHEDPEVKFNWYVDGVEVHNAKTKPREEQYNSTYRVVSVLTVLHQDWLNGKEYKCKVSNKALPAPIEKTISKAKGQPREPQVYTLPPSREEMTKNQVSLTCLVKGFYPSDIAVEWESNGQPENNYKTTPPVLDSDGSFFLYSKLTVDKSRWQQGNVFSCSVMHEALHNHYTQKSLSLSPGK

SEQ ID NO: 21205 - protein, 118 aa, Artificial Sequence
  Description of Artificial Sequence: Synthetic polypeptide
  VH of XENP020872
QVQLKESGAEVKKPGASVKVSCKVSGFSLTGYGVNWVRQAPGQGLEWMGMIWIDGSTDYNSKFQGRVTMTKDNSKSTVYMELSSLRSEDTAVYYCARDRPDGRAMDYWGQGTMVTVSS

SEQ ID NO: 21206 - protein, 5 aa, Artificial Sequence
  Description of Artificial Sequence: Synthetic peptide
  XENP020872 vhCDR1
GYGVN

SEQ ID NO: 21207 - protein, 16 aa, Artificial Sequence
  Description of Artificial Sequence: Synthetic peptide
  XENP020872 vhCDR2
MIWIDGSTDYNSKFQG

SEQ ID NO: 21208 - protein, 10 aa, Artificial Sequence
  Description of Artificial Sequence: Synthetic peptide
  XENP020872 vhCDR3
DRPDGRAMDY

SEQ ID NO: 21209 - protein, 213 aa, Artificial Sequence; identical to SEQ ID NO: 21050
  Description of Artificial Sequence: Synthetic polypeptide
  XENP020872 9C6_H1.1_L1_anti-BTLA_IgG1_PVA_/S267K Light Chain

SEQ ID NO: 21210 - protein, 106 aa, Artificial Sequence; identical to SEQ ID NO: 21051
  Description of Artificial Sequence: Synthetic polypeptide
  VL of XENP020872

SEQ ID NO: 21211 - protein, 11 aa, Artificial Sequence
  Description of Artificial Sequence: Synthetic peptide
  XENP020872 vlCDR1
KASQSVSNDVA

SEQ ID NO: 21212 - protein, 7 aa, Artificial Sequence
  Description of Artificial Sequence: Synthetic peptide
  XENP020872 vlCDR2
YASNRYT

SEQ ID NO: 21213 - protein, 8 aa, Artificial Sequence
  Description of Artificial Sequence: Synthetic peptide
  XENP020872 vlCDR3
QQDYSSPT

SEQ ID NO: 21214 - protein, 447 aa, Artificial Sequence
  Description of Artificial Sequence: Synthetic polypeptide
  XENP020873 9C6_H1.2_L1_anti-BTLA_IgG1_PVA_/S267K Heavy Chain
QVQLVQSGPGLVAPGASVKVSCKVSGFSLTGYGVNWVRQAPGQGLEWMGMIWIDGSTDYNSKFQGRVTMTKDNSKSTVYMELSSLRSEDTAVYYCARDRPDGRAMDYWGQGTMVTVSSASTKGPSVFPLAPSSKSTSGGTAALGCLVKDYFPEPVTVSWNSGALTSGVHTFPAVLQSSGLYSLSSVVTVPSSSLGTQTYICNVNHKPSNTKVDKKVEPKSCDKTHTCPPCPAPPVAGPSVFLFPPKPKDTLMISRTPEVTCVVVDVKHEDPEVKFNWYVDGVEVHNAKTKPREEQYNSTYRVVSVLTVLHQDWLNGKEYKCKVSNKALPAPIEKTISKAKGQPREPQVYTLPPSREEMTKNQVSLTCLVKGFYPSDIAVEWESNGQPENNYKTTPPVLDSDGSFFLYSKLTVDKSRWQQGNVFSCSVMHEALHNHYTQKSLSLSPGK

SEQ ID NO: 21215 - protein, 118 aa, Artificial Sequence
  Description of Artificial Sequence: Synthetic polypeptide
  VH of XENP020873
QVQLVQSGPGLVAPGASVKVSCKVSGFSLTGYGVNWVRQAPGQGLEWMGMIWIDGSTDYNSKFQGRVTMTKDNSKSTVYMELSSLRSEDTAVYYCARDRPDGRAMDYWGQGTMVTVSS

SEQ ID NO: 21216 - protein, 5 aa, Artificial Sequence
  Description of Artificial Sequence: Synthetic peptide
  XENP020873 vhCDR1
GYGVN

SEQ ID NO: 21217 - protein, 16 aa, Artificial Sequence
  Description of Artificial Sequence: Synthetic peptide
  XENP020873 vhCDR2
MIWIDGSTDYNSKFQG

SEQ ID NO: 21218 - protein, 10 aa, Artificial Sequence
  Description of Artificial Sequence: Synthetic peptide
  XENP020873 vhCDR3
DRPDGRAMDY

SEQ ID NO: 21219 - protein, 213 aa, Artificial Sequence; identical to SEQ ID NO: 21050
  Description of Artificial Sequence: Synthetic polypeptide
  XENP020873 9C6_H1.2_L1_anti-BTLA_IgG1_PVA_/S267K Light Chain

SEQ ID NO: 21220 - protein, 106 aa, Artificial Sequence; identical to SEQ ID NO: 21051
  Description of Artificial Sequence: Synthetic polypeptide
  VL of XENP020873

SEQ ID NO: 21221 - protein, 11 aa, Artificial Sequence
  Description of Artificial Sequence: Synthetic peptide
  XENP020873 vlCDR1
KASQSVSNDVA

SEQ ID NO: 21222 - protein, 7 aa, Artificial Sequence
  Description of Artificial Sequence: Synthetic peptide
  XENP020873 vlCDR2
YASNRYT

SEQ ID NO: 21223 - protein, 8 aa, Artificial Sequence
  Description of Artificial Sequence: Synthetic peptide
  XENP020873 vlCDR3
QQDYSSPT

SEQ ID NO: 21224 - protein, 447 aa, Artificial Sequence
  Description of Artificial Sequence: Synthetic polypeptide
  XENP020874 9C6_H1.3_L1_anti-BTLA_IgG1_PVA_/S267K Heavy Chain
QVQLVQSGAEVKKPSQSVKVSCKVSGFSLTGYGVNWVRQAPGQGLEWMGMIWIDGSTDYNSKFQGRVTMTKDNSKSTVYMELSSLRSEDTAVYYCARDRPDGRAMDYWGQGTMVTVSSASTKGPSVFPLAPSSKSTSGGTAALGCLVKDYFPEPVTVSWNSGALTSGVHTFPAVLQSSGLYSLSSVVTVPSSSLGTQTYICNVNHKPSNTKVDKKVEPKSCDKTHTCPPCPAPPVAGPSVFLFPPKPKDTLMISRTPEVTCVVVDVKHEDPEVKFNWYVDGVEVHNAKTKPREEQYNSTYRVVSVLTVLHQDWLNGKEYKCKVSNKALPAPIEKTISKAKGQPREPQVYTLPPSREEMTKNQVSLTCLVKGFYPSDIAVEWESNGQPENNYKTTPPVLDSDGSFFLYSKLTVDKSRWQQGNVFSCSVMHEALHNHYTQKSLSLSPGK

SEQ ID NO: 21225 - protein, 118 aa, Artificial Sequence
  Description of Artificial Sequence: Synthetic polypeptide
  VH of XENP020874
QVQLVQSGAEVKKPSQSVKVSCKVSGFSLTGYGVNWVRQAPGQGLEWMGMIWIDGSTDYNSKFQGRVTMTKDNSKSTVYMELSSLRSEDTAVYYCARDRPDGRAMDYWGQGTMVTVSS

SEQ ID NO: 21226 - protein, 5 aa, Artificial Sequence
  Description of Artificial Sequence: Synthetic peptide
  XENP020874 vhCDR1
GYGVN

SEQ ID NO: 21227 - protein, 16 aa, Artificial Sequence
  Description of Artificial Sequence: Synthetic peptide
  XENP020874 vhCDR2
MIWIDGSTDYNSKFQG

SEQ ID NO: 21228 - protein, 10 aa, Artificial Sequence
  Description of Artificial Sequence: Synthetic peptide
  XENP020874 vhCDR3
DRPDGRAMDY

SEQ ID NO: 21229 - protein, 213 aa, Artificial Sequence; identical to SEQ ID NO: 21050
  Description of Artificial Sequence: Synthetic polypeptide
  XENP020874 9C6_H1.3_L1_anti-BTLA_IgG1_PVA_/S267K Light Chain

SEQ ID NO: 21230 - protein, 106 aa, Artificial Sequence; identical to SEQ ID NO: 21051
  Description of Artificial Sequence: Synthetic polypeptide
  VL of XENP020874

SEQ ID NO: 21231 - protein, 11 aa, Artificial Sequence
  Description of Artificial Sequence: Synthetic peptide
  XENP020874 vlCDR1
KASQSVSNDVA

SEQ ID NO: 21232 - protein, 7 aa, Artificial Sequence
  Description of Artificial Sequence: Synthetic peptide
  XENP020874 vlCDR2
YASNRYT

SEQ ID NO: 21233 - protein, 8 aa, Artificial Sequence
  Description of Artificial Sequence: Synthetic peptide
  XENP020874 vlCDR3
QQDYSSPT

SEQ ID NO: 21234 - protein, 447 aa, Artificial Sequence
  Description of Artificial Sequence: Synthetic polypeptide
  XENP020875 9C6_H1.4_L1_anti-BTLA_IgG1_PVA_/S267K Heavy Chain
QVQLVQSGAEVKKPGASLSITCKVSGFSLTGYGVNWVRQAPGQGLEWMGMIWIDGSTDYNSKFQGRVTMTKDNSKSTVYMELSSLRSEDTAVYYCARDRPDGRAMDYWGQGTMVTVSSASTKGPSVFPLAPSSKSTSGGTAALGCLVKDYFPEPVTVSWNSGALTSGVHTFPAVLQSSGLYSLSSVVTVPSSSLGTQTYICNVNHKPSNTKVDKKVEPKSCDKTHTCPPCPAPPVAGPSVFLFPPKPKDTLMISRTPEVTCVVVDVKHEDPEVKFNWYVDGVEVHNAKTKPREEQYNSTYRVVSVLTVLHQDWLNGKEYKCKVSNKALPAPIEKTISKAKGQPREPQVYTLPPSREEMTKNQVSLTCLVKGFYPSDIAVEWESNGQPENNYKTTPPVLDSDGSFFLYSKLTVDKSRWQQGNVFSCSVMHEALHNHYTQKSLSLSPGK

SEQ ID NO: 21235 - protein, 118 aa, Artificial Sequence
  Description of Artificial Sequence: Synthetic polypeptide
  VH of XENP020875
QVQLVQSGAEVKKPGASLSITCKVSGFSLTGYGVNWVRQAPGQGLEWMGMIWIDGSTDYNSKFQGRVTMTKDNSKSTVYMELSSLRSEDTAVYYCARDRPDGRAMDYWGQGTMVTVSS

SEQ ID NO: 21236 - protein, 5 aa, Artificial Sequence
  Description of Artificial Sequence: Synthetic peptide
  XENP020875 vhCDR1
GYGVN

SEQ ID NO: 21237 - protein, 16 aa, Artificial Sequence
  Description of Artificial Sequence: Synthetic peptide
  XENP020875 vhCDR2
MIWIDGSTDYNSKFQG

SEQ ID NO: 21238 - protein, 10 aa, Artificial Sequence
  Description of Artificial Sequence: Synthetic peptide
  XENP020875 vhCDR3
DRPDGRAMDY

SEQ ID NO: 21239 - protein, 213 aa, Artificial Sequence; identical to SEQ ID NO: 21050
  Description of Artificial Sequence: Synthetic polypeptide
  XENP020875 9C6_H1.4_L1_anti-BTLA_IgG1_PVA_/S267K Light Chain

SEQ ID NO: 21240 - protein, 106 aa, Artificial Sequence; identical to SEQ ID NO: 21051
  Description of Artificial Sequence: Synthetic polypeptide
  VL of XENP020875

SEQ ID NO: 21241 - protein, 11 aa, Artificial Sequence
  Description of Artificial Sequence: Synthetic peptide
  XENP020875 vlCDR1
KASQSVSNDVA

SEQ ID NO: 21242 - protein, 7 aa, Artificial Sequence
  Description of Artificial Sequence: Synthetic peptide
  XENP020875 vlCDR2
YASNRYT

SEQ ID NO: 21243 - protein, 8 aa, Artificial Sequence
  Description of Artificial Sequence: Synthetic peptide
  XENP020875 vlCDR3
QQDYSSPT

SEQ ID NO: 21244 - protein, 447 aa, Artificial Sequence
  Description of Artificial Sequence: Synthetic polypeptide
  XENP020876 9C6_H1.5_L1_anti-BTLA_IgG1_PVA_/S267K Heavy Chain
QVQLVQSGAEVKKPGASVKVSCTVSGFSLTGYGVNWVRQAPGQGLEWMGMIWIDGSTDYNSKFQGRVTMTKDNSKSTVYMELSSLRSEDTAVYYCARDRPDGRAMDYWGQGTMVTVSSASTKGPSVFPLAPSSKSTSGGTAALGCLVKDYFPEPVTVSWNSGALTSGVHTFPAVLQSSGLYSLSSVVTVPSSSLGTQTYICNVNHKPSNTKVDKKVEPKSCDKTHTCPPCPAPPVAGPSVFLFPPKPKDTLMISRTPEVTCVVVDVKHEDPEVKFNWYVDGVEVHNAKTKPREEQYNSTYRVVSVLTVLHQDWLNGKEYKCKVSNKALPAPIEKTISKAKGQPREPQVYTLPPSREEMTKNQVSLTCLVKGFYPSDIAVEWESNGQPENNYKTTPPVLDSDGSFFLYSKLTVDKSRWQQGNVFSCSVMHEALHNHYTQKSLSLSPGK

SEQ ID NO: 21245 - protein, 118 aa, Artificial Sequence
  Description of Artificial Sequence: Synthetic polypeptide
  VH of XENP020876
QVQLVQSGAEVKKPGASVKVSCTVSGFSLTGYGVNWVRQAPGQGLEWMGMIWIDGSTDYNSKFQGRVTMTKDNSKSTVYMELSSLRSEDTAVYYCARDRPDGRAMDYWGQGTMVTVSS

SEQ ID NO: 21246 - protein, 5 aa, Artificial Sequence
  Description of Artificial Sequence: Synthetic peptide
  XENP020876 vhCDR1
GYGVN

SEQ ID NO: 21247 - protein, 16 aa, Artificial Sequence
  Description of Artificial Sequence: Synthetic peptide
  XENP020876 vhCDR2
MIWIDGSTDYNSKFQG

SEQ ID NO: 21248 - protein, 10 aa, Artificial Sequence
  Description of Artificial Sequence: Synthetic peptide
  XENP020876 vhCDR3
DRPDGRAMDY

SEQ ID NO: 21249 - protein, 213 aa, Artificial Sequence; identical to SEQ ID NO: 21050
  Description of Artificial Sequence: Synthetic polypeptide
  XENP020876 9C6_H1.5_L1_anti-BTLA_IgG1_PVA_/S267K Light Chain

SEQ ID NO: 21250 - protein, 106 aa, Artificial Sequence; identical to SEQ ID NO: 21051
  Description of Artificial Sequence: Synthetic polypeptide
  VL of XENP020876

SEQ ID NO: 21251 - protein, 11 aa, Artificial Sequence
  Description of Artificial Sequence: Synthetic peptide
  XENP020876 vlCDR1
KASQSVSNDVA

SEQ ID NO: 21252 - protein, 7 aa, Artificial Sequence
  Description of Artificial Sequence: Synthetic peptide
  XENP020876 vlCDR2
YASNRYT

SEQ ID NO: 21253 - protein, 8 aa, Artificial Sequence
  Description of Artificial Sequence: Synthetic peptide
  XENP020876 vlCDR3
QQDYSSPT

SEQ ID NO: 21254 - protein, 447 aa, Artificial Sequence
  Description of Artificial Sequence: Synthetic polypeptide
  XENP020877 9C6_H1.6_L1_anti-BTLA_IgG1_PVA_/S267K Heavy Chain
QVQLVQSGAEVKKPGASVKVSCKVSGFSLTGYGVNWVRQPPGKGLEWMGMIWIDGSTDYNSKFQGRVTMTKDNSKSTVYMELSSLRSEDTAVYYCARDRPDGRAMDYWGQGTMVTVSSASTKGPSVFPLAPSSKSTSGGTAALGCLVKDYFPEPVTVSWNSGALTSGVHTFPAVLQSSGLYSLSSVVTVPSSSLGTQTYICNVNHKPSNTKVDKKVEPKSCDKTHTCPPCPAPPVAGPSVFLFPPKPKDTLMISRTPEVTCVVVDVKHEDPEVKFNWYVDGVEVHNAKTKPREEQYNSTYRVVSVLTVLHQDWLNGKEYKCKVSNKALPAPIEKTISKAKGQPREPQVYTLPPSREEMTKNQVSLTCLVKGFYPSDIAVEWESNGQPENNYKTTPPVLDSDGSFFLYSKLTVDKSRWQQGNVFSCSVMHEALHNHYTQKSLSLSPGK

SEQ ID NO: 21255 - protein, 118 aa, Artificial Sequence
  Description of Artificial Sequence: Synthetic polypeptide
  VH of XENP020877
QVQLVQSGAEVKKPGASVKVSCKVSGFSLTGYGVNWVRQPPGKGLEWMGMIWIDGSTDYNSKFQGRVTMTKDNSKSTVYMELSSLRSEDTAVYYCARDRPDGRAMDYWGQGTMVTVSS

SEQ ID NO: 21256 - protein, 5 aa, Artificial Sequence
  Description of Artificial Sequence: Synthetic peptide
  XENP020877 vhCDR1
GYGVN

SEQ ID NO: 21257 - protein, 16 aa, Artificial Sequence
  Description of Artificial Sequence: Synthetic peptide
  XENP020877 vhCDR2
MIWIDGSTDYNSKFQG

SEQ ID NO: 21258 - protein, 10 aa, Artificial Sequence
  Description of Artificial Sequence: Synthetic peptide
  XENP020877 vhCDR3
DRPDGRAMDY

SEQ ID NO: 21259 - protein, 213 aa, Artificial Sequence; identical to SEQ ID NO: 21050
  Description of Artificial Sequence: Synthetic polypeptide
  XENP020877 9C6_H1.6_L1_anti-BTLA_IgG1_PVA_/S267K Light Chain

SEQ ID NO: 21260 - protein, 106 aa, Artificial Sequence; identical to SEQ ID NO: 21051
  Description of Artificial Sequence: Synthetic polypeptide
  VL of XENP020877

SEQ ID NO: 21261 - protein, 11 aa, Artificial Sequence
  Description of Artificial Sequence: Synthetic peptide
  XENP020877 vlCDR1
KASQSVSNDVA

SEQ ID NO: 21262 - protein, 7 aa, Artificial Sequence
  Description of Artificial Sequence: Synthetic peptide
  XENP020877 vlCDR2
YASNRYT

SEQ ID NO: 21263 - protein, 8 aa, Artificial Sequence
  Description of Artificial Sequence: Synthetic peptide
  XENP020877 vlCDR3
QQDYSSPT

SEQ ID NO: 21264 - protein, 447 aa, Artificial Sequence
  Description of Artificial Sequence: Synthetic polypeptide
  XENP020878 9C6_H1.7_L1_anti-BTLA_IgG1_PVA_/S267K Heavy Chain
QVQLVQSGAEVKKPGASVKVSCKVSGFSLTGYGVNWVRQAPGQGLEWLGMIWIDGSTDYNSKFQGRVTMTKDNSKSTVYMELSSLRSEDTAVYYCARDRPDGRAMDYWGQGTMVTVSSASTKGPSVFPLAPSSKSTSGGTAALGCLVKDYFPEPVTVSWNSGALTSGVHTFPAVLQSSGLYSLSSVVTVPSSSLGTQTYICNVNHKPSNTKVDKKVEPKSCDKTHTCPPCPAPPVAGPSVFLFPPKPKDTLMISRTPEVTCVVVDVKHEDPEVKFNWYVDGVEVHNAKTKPREEQYNSTYRVVSVLTVLHQDWLNGKEYKCKVSNKALPAPIEKTISKAKGQPREPQVYTLPPSREEMTKNQVSLTCLVKGFYPSDIAVEWESNGQPENNYKTTPPVLDSDGSFFLYSKLTVDKSRWQQGNVFSCSVMHEALHNHYTQKSLSLSPGK

SEQ ID NO: 21265 - protein, 118 aa, Artificial Sequence
  Description of Artificial Sequence: Synthetic polypeptide
  VH of XENP020878
QVQLVQSGAEVKKPGASVKVSCKVSGFSLTGYGVNWVRQAPGQGLEWLGMIWIDGSTDYNSKFQGRVTMTKDNSKSTVYMELSSLRSEDTAVYYCARDRPDGRAMDYWGQGTMVTVSS

SEQ ID NO: 21266 - protein, 5 aa, Artificial Sequence
  Description of Artificial Sequence: Synthetic peptide
  XENP020878 vhCDR1
GYGVN

SEQ ID NO: 21267 - protein, 16 aa, Artificial Sequence
  Description of Artificial Sequence: Synthetic peptide
  XENP020878 vhCDR2
MIWIDGSTDYNSKFQG

SEQ ID NO: 21268 - protein, 10 aa, Artificial Sequence
  Description of Artificial Sequence: Synthetic peptide
  XENP020878 vhCDR3
DRPDGRAMDY

SEQ ID NO: 21269 - protein, 213 aa, Artificial Sequence; identical to SEQ ID NO: 21050
  Description of Artificial Sequence: Synthetic polypeptide
  XENP020878 9C6_H1.7_L1_anti-BTLA_IgG1_PVA_/S267K Light Chain

SEQ ID NO: 21270 - protein, 106 aa, Artificial Sequence; identical to SEQ ID NO: 21051
  Description of Artificial Sequence: Synthetic polypeptide
  VL of XENP020878

SEQ ID NO: 21271 - protein, 11 aa, Artificial Sequence
  Description of Artificial Sequence: Synthetic peptide
  XENP020878 vlCDR1
KASQSVSNDVA

SEQ ID NO: 21272 - protein, 7 aa, Artificial Sequence
  Description of Artificial Sequence: Synthetic peptide
  XENP020878 vlCDR2
YASNRYT

SEQ ID NO: 21273 - protein, 8 aa, Artificial Sequence
  Description of Artificial Sequence: Synthetic peptide
  XENP020878 vlCDR3
QQDYSSPT

SEQ ID NO: 21274 - protein, 447 aa, Artificial Sequence
  Description of Artificial Sequence: Synthetic polypeptide
  XENP020879 9C6_H1.8_L1_anti-BTLA_IgG1_PVA_/S267K Heavy Chain
QVQLVQSGAEVKKPGASVKVSCKVSGFSLTGYGVNWVRQAPGQGLEWMGMIWIDGSTDYNSAFQGRVTMTKDNSKSTVYMELSSLRSEDTAVYYCARDRPDGRAMDYWGQGTMVTVSSASTKGPSVFPLAPSSKSTSGGTAALGCLVKDYFPEPVTVSWNSGALTSGVHTFPAVLQSSGLYSLSSVVTVPSSSLGTQTYICNVNHKPSNTKVDKKVEPKSCDKTHTCPPCPAPPVAGPSVFLFPPKPKDTLMISRTPEVTCVVVDVKHEDPEVKFNWYVDGVEVHNAKTKPREEQYNSTYRVVSVLTVLHQDWLNGKEYKCKVSNKALPAPIEKTISKAKGQPREPQVYTLPPSREEMTKNQVSLTCLVKGFYPSDIAVEWESNGQPENNYKTTPPVLDSDGSFFLYSKLTVDKSRWQQGNVFSCSVMHEALHNHYTQKSLSLSPGK

SEQ ID NO: 21275 - protein, 118 aa, Artificial Sequence
  Description of Artificial Sequence: Synthetic polypeptide
  VH of XENP020879
QVQLVQSGAEVKKPGASVKVSCKVSGFSLTGYGVNWVRQAPGQGLEWMGMIWIDGSTDYNSAFQGRVTMTKDNSKSTVYMELSSLRSEDTAVYYCARDRPDGRAMDYWGQGTMVTVSS

SEQ ID NO: 21276 - protein, 5 aa, Artificial Sequence
  Description of Artificial Sequence: Synthetic peptide
  XENP020879 vhCDR1
GYGVN

SEQ ID NO: 21277 - protein, 16 aa, Artificial Sequence
  Description of Artificial Sequence: Synthetic peptide
  XENP020879 vhCDR2
MIWIDGSTDYNSAFQG

SEQ ID NO: 21278 - protein, 10 aa, Artificial Sequence
  Description of Artificial Sequence: Synthetic peptide
  XENP020879 vhCDR3
DRPDGRAMDY

SEQ ID NO: 21279 - protein, 213 aa, Artificial Sequence; identical to SEQ ID NO: 21050
  Description of Artificial Sequence: Synthetic polypeptide
  XENP020879 9C6_H1.8_L1_anti-BTLA_IgG1_PVA_/S267K Light Chain

SEQ ID NO: 21280 - protein, 106 aa, Artificial Sequence; identical to SEQ ID NO: 21051
  Description of Artificial Sequence: Synthetic polypeptide
  VL of XENP020879

SEQ ID NO: 21281 - protein, 11 aa, Artificial Sequence
  Description of Artificial Sequence: Synthetic peptide
  XENP020879 vlCDR1
KASQSVSNDVA

SEQ ID NO: 21282 - protein, 7 aa, Artificial Sequence
  Description of Artificial Sequence: Synthetic peptide
  XENP020879 vlCDR2
YASNRYT

SEQ ID NO: 21283 - protein, 8 aa, Artificial Sequence
  Description of Artificial Sequence: Synthetic peptide
  XENP020879 vlCDR3
QQDYSSPT

SEQ ID NO: 21284 - protein, 447 aa, Artificial Sequence
  Description of Artificial Sequence: Synthetic polypeptide
  XENP020880 9C6_H1.9_L1_anti-BTLA_IgG1_PVA_/S267K Heavy Chain
QVQLVQSGAEVKKPGASVKVSCKVSGFSLTGYGVNWVRQAPGQGLEWMGMIWIDGSTDYNSALKSRVTMTKDNSKSTVYMELSSLRSEDTAVYYCARDRPDGRAMDYWGQGTMVTVSSASTKGPSVFPLAPSSKSTSGGTAALGCLVKDYFPEPVTVSWNSGALTSGVHTFPAVLQSSGLYSLSSVVTVPSSSLGTQTYICNVNHKPSNTKVDKKVEPKSCDKTHTCPPCPAPPVAGPSVFLFPPKPKDTLMISRTPEVTCVVVDVKHEDPEVKFNWYVDGVEVHNAKTKPREEQYNSTYRVVSVLTVLHQDWLNGKEYKCKVSNKALPAPIEKTISKAKGQPREPQVYTLPPSREEMTKNQVSLTCLVKGFYPSDIAVEWESNGQPENNYKTTPPVLDSDGSFFLYSKLTVDKSRWQQGNVFSCSVMHEALHNHYTQKSLSLSPGK

SEQ ID NO: 21285 - protein, 118 aa, Artificial Sequence
  Description of Artificial Sequence: Synthetic polypeptide
  VH of XENP020880
QVQLVQSGAEVKKPGASVKVSCKVSGFSLTGYGVNWVRQAPGQGLEWMGMIWIDGSTDYNSALKSRVTMTKDNSKSTVYMELSSLRSEDTAVYYCARDRPDGRAMDYWGQGTMVTVSS

SEQ ID NO: 21286 - protein, 5 aa, Artificial Sequence
  Description of Artificial Sequence: Synthetic peptide
  XENP020880 vhCDR1
GYGVN

SEQ ID NO: 21287 - protein, 16 aa, Artificial Sequence
  Description of Artificial Sequence: Synthetic peptide
  XENP020880 vhCDR2
MIWIDGSTDYNSALKS

SEQ ID NO: 21288 - protein, 10 aa, Artificial Sequence
  Description of Artificial Sequence: Synthetic peptide
  XENP020880 vhCDR3
DRPDGRAMDY

SEQ ID NO: 21289 - protein, 213 aa, Artificial Sequence; identical to SEQ ID NO: 21050
  Description of Artificial Sequence: Synthetic polypeptide
  XENP020880 9C6_H1.9_L1_anti-BTLA_IgG1_PVA_/S267K Light Chain

SEQ ID NO: 21290 - protein, 106 aa, Artificial Sequence; identical to SEQ ID NO: 21051
  Description of Artificial Sequence: Synthetic polypeptide
  VL of XENP020880

SEQ ID NO: 21291 - protein, 11 aa, Artificial Sequence
  Description of Artificial Sequence: Synthetic peptide
  XENP020880 vlCDR1
KASQSVSNDVA

SEQ ID NO: 21292 - protein, 7 aa, Artificial Sequence
  Description of Artificial Sequence: Synthetic peptide
  XENP020880 vlCDR2
YASNRYT

SEQ ID NO: 21293 - protein, 8 aa, Artificial Sequence
  Description of Artificial Sequence: Synthetic peptide
  XENP020880 vlCDR3
QQDYSSPT

SEQ ID NO: 21294 - protein, 447 aa, Artificial Sequence
  Description of Artificial Sequence: Synthetic polypeptide
  XENP020881 9C6_H1.10_L1_anti-BTLA_IgG1_PVA_/S267K Heavy Chain
QVQLVQSGAEVKKPGASVKVSCKVSGFSLTGYGVNWVRQAPGQGLEWMGMIWIDGSTDYNSKFKGRVTMTKDNSKSTVYMELSSLRSEDTAVYYCARDRPDGRAMDYWGQGTMVTVSSASTKGPSVFPLAPSSKSTSGGTAALGCLVKDYFPEPVTVSWNSGALTSGVHTFPAVLQSSGLYSLSSVVTVPSSSLGTQTYICNVNHKPSNTKVDKKVEPKSCDKTHTCPPCPAPPVAGPSVFLFPPKPKDTLMISRTPEVTCVVVDVKHEDPEVKFNWYVDGVEVHNAKTKPREEQYNSTYRVVSVLTVLHQDWLNGKEYKCKVSNKALPAPIEKTISKAKGQPREPQVYTLPPSREEMTKNQVSLTCLVKGFYPSDIAVEWESNGQPENNYKTTPPVLDSDGSFFLYSKLTVDKSRWQQGNVFSCSVMHEALHNHYTQKSLSLSPGK

SEQ ID NO: 21295 - protein, 118 aa, Artificial Sequence
  Description of Artificial Sequence: Synthetic polypeptide
  VH of XENP020881
QVQLVQSGAEVKKPGASVKVSCKVSGFSLTGYGVNWVRQAPGQGLEWMGMIWIDGSTDYNSKFKGRVTMTKDNSKSTVYMELSSLRSEDTAVYYCARDRPDGRAMDYWGQGTMVTVSS

SEQ ID NO: 21296 - protein, 5 aa, Artificial Sequence
  Description of Artificial Sequence: Synthetic peptide
  XENP020881 vhCDR1
GYGVN

SEQ ID NO: 21297 - protein, 16 aa, Artificial Sequence
  Description of Artificial Sequence: Synthetic peptide
  XENP020881 vhCDR2
MIWIDGSTDYNSKFKG

SEQ ID NO: 21298 - protein, 10 aa, Artificial Sequence
  Description of Artificial Sequence: Synthetic peptide
  XENP020881 vhCDR3
DRPDGRAMDY

SEQ ID NO: 21299 - protein, 213 aa, Artificial Sequence; identical to SEQ ID NO: 21050
  Description of Artificial Sequence: Synthetic polypeptide
  XENP020881 9C6_H1.10_L1_anti-BTLA_IgG1_PVA_/S267K Light Chain

SEQ ID NO: 21300 - protein, 106 aa, Artificial Sequence; identical to SEQ ID NO: 21051
  Description of Artificial Sequence: Synthetic polypeptide
  VL of XENP020881

SEQ ID NO: 21301 - protein, 11 aa, Artificial Sequence
  Description of Artificial Sequence: Synthetic peptide
  XENP020881 vlCDR1
KASQSVSNDVA

SEQ ID NO: 21302 - protein, 7 aa, Artificial Sequence
  Description of Artificial Sequence: Synthetic peptide
  XENP020881 vlCDR2
YASNRYT

SEQ ID NO: 21303 - protein, 8 aa, Artificial Sequence
  Description of Artificial Sequence: Synthetic peptide
  XENP020881 vlCDR3
QQDYSSPT

SEQ ID NO: 21304 - protein, 447 aa, Artificial Sequence
  Description of Artificial Sequence: Synthetic polypeptide
  XENP020882 9C6_H1.11_L1_anti-BTLA_IgG1_PVA_/S267K Heavy Chain
QVQLVQSGAEVKKPGASVKVSCKVSGFSLTGYGVNWVRQAPGQGLEWMGMIWIDGSTDYNSKFQGRLSINKDNSKSTVYMELSSLRSEDTAVYYCARDRPDGRAMDYWGQGTMVTVSSASTKGPSVFPLAPSSKSTSGGTAALGCLVKDYFPEPVTVSWNSGALTSGVHTFPAVLQSSGLYSLSSVVTVPSSSLGTQTYICNVNHKPSNTKVDKKVEPKSCDKTHTCPPCPAPPVAGPSVFLFPPKPKDTLMISRTPEVTCVVVDVKHEDPEVKFNWYVDGVEVHNAKTKPREEQYNSTYRVVSVLTVLHQDWLNGKEYKCKVSNKALPAPIEKTISKAKGQPREPQVYTLPPSREEMTKNQVSLTCLVKGFYPSDIAVEWESNGQPENNYKTTPPVLDSDGSFFLYSKLTVDKSRWQQGNVFSCSVMHEALHNHYTQKSLSLSPGK

SEQ ID NO: 21305 - protein, 118 aa, Artificial Sequence
  Description of Artificial Sequence: Synthetic polypeptide
  VH of XENP020882
QVQLVQSGAEVKKPGASVKVSCKVSGFSLTGYGVNWVRQAPGQGLEWMGMIWIDGSTDYNSKFQGRLSINKDNSKSTVYMELSSLRSEDTAVYYCARDRPDGRAMDYWGQGTMVTVSS

SEQ ID NO: 21306 - protein, 5 aa, Artificial Sequence
  Description of Artificial Sequence: Synthetic peptide
  XENP020882 vhCDR1
GYGVN

SEQ ID NO: 21307 - protein, 16 aa, Artificial Sequence
  Description of Artificial Sequence: Synthetic peptide
  XENP020882 vhCDR2
MIWIDGSTDYNSKFQG

SEQ ID NO: 21308 - protein, 10 aa, Artificial Sequence
  Description of Artificial Sequence: Synthetic peptide
  XENP020882 vhCDR3
DRPDGRAMDY

SEQ ID NO: 21309 - protein, 213 aa, Artificial Sequence; identical to SEQ ID NO: 21050
  Description of Artificial Sequence: Synthetic polypeptide
  XENP020882 9C6_H1.11_L1_anti-BTLA_IgG1_PVA_/S267K Light Chain

SEQ ID NO: 21310 - protein, 106 aa, Artificial Sequence; identical to SEQ ID NO: 21051
  Description of Artificial Sequence: Synthetic polypeptide
  VL of XENP020882

SEQ ID NO: 21311 - protein, 11 aa, Artificial Sequence
  Description of Artificial Sequence: Synthetic peptide
  XENP020882 vlCDR1
KASQSVSNDVA

SEQ ID NO: 21312 - protein, 7 aa, Artificial Sequence
  Description of Artificial Sequence: Synthetic peptide
  XENP020882 vlCDR2
YASNRYT

SEQ ID NO: 21313 - protein, 8 aa, Artificial Sequence
  Description of Artificial Sequence: Synthetic peptide
  XENP020882 vlCDR3
QQDYSSPT

SEQ ID NO: 21314 - protein, 447 aa, Artificial Sequence
  Description of Artificial Sequence: Synthetic polypeptide
  XENP020883 9C6_H1.12_L1_anti-BTLA_IgG1_PVA_/S267K Heavy Chain
QVQLVQSGAEVKKPGASVKVSCKVSGFSLTGYGVNWVRQAPGQGLEWMGMIWIDGSTDYNSKFQGRVTMTKDNSKSQVYMELSSLRSEDTAVYYCARDRPDGRAMDYWGQGTMVTVSSASTKGPSVFPLAPSSKSTSGGTAALGCLVKDYFPEPVTVSWNSGALTSGVHTFPAVLQSSGLYSLSSVVTVPSSSLGTQTYICNVNHKPSNTKVDKKVEPKSCDKTHTCPPCPAPPVAGPSVFLFPPKPKDTLMISRTPEVTCVVVDVKHEDPEVKFNWYVDGVEVHNAKTKPREEQYNSTYRVVSVLTVLHQDWLNGKEYKCKVSNKALPAPIEKTISKAKGQPREPQVYTLPPSREEMTKNQVSLTCLVKGFYPSDIAVEWESNGQPENNYKTTPPVLDSDGSFFLYSKLTVDKSRWQQGNVFSCSVMHEALHNHYTQKSLSLSPGK

SEQ ID NO: 21315 - protein, 118 aa, Artificial Sequence
  Description of Artificial Sequence: Synthetic polypeptide
  VH of XENP020883
QVQLVQSGAEVKKPGASVKVSCKVSGFSLTGYGVNWVRQAPGQGLEWMGMIWIDGSTDYNSKFQGRVTMTKDNSKSQVYMELSSLRSEDTAVYYCARDRPDGRAMDYWGQGTMVTVSS

SEQ ID NO: 21316 - protein, 5 aa, Artificial Sequence
  Description of Artificial Sequence: Synthetic peptide
  XENP020883 vhCDR1
GYGVN

SEQ ID NO: 21317 - protein, 16 aa, Artificial Sequence
  Description of Artificial Sequence: Synthetic peptide
  XENP020883 vhCDR2
MIWIDGSTDYNSKFQG

SEQ ID NO: 21318 - protein, 10 aa, Artificial Sequence
  Description of Artificial Sequence: Synthetic peptide
  XENP020883 vhCDR3
DRPDGRAMDY

SEQ ID NO: 21319 - protein, 213 aa, Artificial Sequence; identical to SEQ ID NO: 21050
  Description of Artificial Sequence: Synthetic polypeptide
  XENP020883 9C6_H1.12_L1_anti-BTLA_IgG1_PVA_/S267K Light Chain

SEQ ID NO: 21320 - protein, 106 aa, Artificial Sequence; identical to SEQ ID NO: 21051
  Description of Artificial Sequence: Synthetic polypeptide
  VL of XENP020883

SEQ ID NO: 21321 - protein, 11 aa, Artificial Sequence
  Description of Artificial Sequence: Synthetic peptide
  XENP020883 vlCDR1
KASQSVSNDVA

SEQ ID NO: 21322 - protein, 7 aa, Artificial Sequence
  Description of Artificial Sequence: Synthetic peptide
  XENP020883 vlCDR2
YASNRYT

SEQ ID NO: 21323 - protein, 8 aa, Artificial Sequence
  Description of Artificial Sequence: Synthetic peptide
  XENP020883 vlCDR3
QQDYSSPT

SEQ ID NO: 21324 - protein, 447 aa, Artificial Sequence
  Description of Artificial Sequence: Synthetic polypeptide
  XENP020884 9C6_H1.13_L1_anti-BTLA_IgG1_PVA_/S267K Heavy Chain
QVQLVQSGAEVKKPGASVKVSCKVSGFSLTGYGVNWVRQAPGQGLEWMGMIWIDGSTDYNSKFQGRVTMTKDNSKSTVFLKMNSLRSEDTAVYYCARDRPDGRAMDYWGQGTMVTVSSASTKGPSVFPLAPSSKSTSGGTAALGCLVKDYFPEPVTVSWNSGALTSGVHTFPAVLQSSGLYSLSSVVTVPSSSLGTQTYICNVNHKPSNTKVDKKVEPKSCDKTHTCPPCPAPPVAGPSVFLFPPKPKDTLMISRTPEVTCVVVDVKHEDPEVKFNWYVDGVEVHNAKTKPREEQYNSTYRVVSVLTVLHQDWLNGKEYKCKVSNKALPAPIEKTISKAKGQPREPQVYTLPPSREEMTKNQVSLTCLVKGFYPSDIAVEWESNGQPENNYKTTPPVLDSDGSFFLYSKLTVDKSRWQQGNVFSCSVMHEALHNHYTQKSLSLSPGK

SEQ ID NO: 21325 - protein, 118 aa, Artificial Sequence
  Description of Artificial Sequence: Synthetic polypeptide
  VH of XENP020884
QVQLVQSGAEVKKPGASVKVSCKVSGFSLTGYGVNWVRQAPGQGLEWMGMIWIDGSTDYNSKFQGRVTMTKDNSKSTVFLKMNSLRSEDTAVYYCARDRPDGRAMDYWGQGTMVTVSS

SEQ ID NO: 21326 - protein, 5 aa, Artificial Sequence
  Description of Artificial Sequence: Synthetic peptide
  XENP020884 vhCDR1
GYGVN

SEQ ID NO: 21327 - protein, 16 aa, Artificial Sequence
  Description of Artificial Sequence: Synthetic peptide
  XENP020884 vhCDR2
MIWIDGSTDYNSKFQG

SEQ ID NO: 21328 - protein, 10 aa, Artificial Sequence
  Description of Artificial Sequence: Synthetic peptide
  XENP020884 vhCDR3
DRPDGRAMDY

SEQ ID NO: 21329 - protein, 213 aa, Artificial Sequence; identical to SEQ ID NO: 21050
  Description of Artificial Sequence: Synthetic polypeptide
  XENP020884 9C6_H1.13_L1_anti-BTLA_IgG1_PVA_/S267K Light Chain

SEQ ID NO: 21330 - protein, 106 aa, Artificial Sequence; identical to SEQ ID NO: 21051
  Description of Artificial Sequence: Synthetic polypeptide
  VL of XENP020884

SEQ ID NO: 21331 - protein, 11 aa, Artificial Sequence
  Description of Artificial Sequence: Synthetic peptide
  XENP020884 vlCDR1
KASQSVSNDVA

SEQ ID NO: 21332 - protein, 7 aa, Artificial Sequence
  Description of Artificial Sequence: Synthetic peptide
  XENP020884 vlCDR2
YASNRYT

SEQ ID NO: 21333 - protein, 8 aa, Artificial Sequence
  Description of Artificial Sequence: Synthetic peptide
  XENP020884 vlCDR3
QQDYSSPT

SEQ ID NO: 21334 - protein, 447 aa, Artificial Sequence
  Description of Artificial Sequence: Synthetic polypeptide
  XENP020885 9C6_H1.14_L1_anti-BTLA_IgG1_PVA_/S267K Heavy Chain
QVQLVQSGAEVKKPGASVKVSCKVSGFSLTGYGVNWVRQAPGQGLEWMGMIWIDGSTDYNSKFQGRVTMTKDNSKSTVYMELSSLQTDDTAVYYCARDRPDGRAMDYWGQGTMVTVSSASTKGPSVFPLAPSSKSTSGGTAALGCLVKDYFPEPVTVSWNSGALTSGVHTFPAVLQSSGLYSLSSVVTVPSSSLGTQTYICNVNHKPSNTKVDKKVEPKSCDKTHTCPPCPAPPVAGPSVFLFPPKPKDTLMISRTPEVTCVVVDVKHEDPEVKFNWYVDGVEVHNAKTKPREEQYNSTYRVVSVLTVLHQDWLNGKEYKCKVSNKALPAPIEKTISKAKGQPREPQVYTLPPSREEMTKNQVSLTCLVKGFYPSDIAVEWESNGQPENNYKTTPPVLDSDGSFFLYSKLTVDKSRWQQGNVFSCSVMHEALHNHYTQKSLSLSPGK

SEQ ID NO: 21335 - protein, 118 aa, Artificial Sequence
  Description of Artificial Sequence: Synthetic polypeptide
  VH of XENP020885
QVQLVQSGAEVKKPGASVKVSCKVSGFSLTGYGVNWVRQAPGQGLEWMGMIWIDGSTDYNSKFQGRVTMTKDNSKSTVYMELSSLQTDDTAVYYCARDRPDGRAMDYWGQGTMVTVSS

SEQ ID NO: 21336 - protein, 5 aa, Artificial Sequence
  Description of Artificial Sequence: Synthetic peptide
  XENP020885 vhCDR1
GYGVN

SEQ ID NO: 21337 - protein, 16 aa, Artificial Sequence
  Description of Artificial Sequence: Synthetic peptide
  XENP020885 vhCDR2
MIWIDGSTDYNSKFQG

SEQ ID NO: 21338 - protein, 10 aa, Artificial Sequence
  Description of Artificial Sequence: Synthetic peptide
  XENP020885 vhCDR3
DRPDGRAMDY

SEQ ID NO: 21339 - protein, 213 aa, Artificial Sequence; identical to SEQ ID NO: 21050
  Description of Artificial Sequence: Synthetic polypeptide
  XENP020885 9C6_H1.14_L1_anti-BTLA_IgG1_PVA_/S267K Light Chain

SEQ ID NO: 21340 - protein, 106 aa, Artificial Sequence; identical to SEQ ID NO: 21051
  Description of Artificial Sequence: Synthetic polypeptide
  VL of XENP020885

SEQ ID NO: 21341 - protein, 11 aa, Artificial Sequence
  Description of Artificial Sequence: Synthetic peptide
  XENP020885 vlCDR1
KASQSVSNDVA

SEQ ID NO: 21342 - protein, 7 aa, Artificial Sequence
  Description of Artificial Sequence: Synthetic peptide
  XENP020885 vlCDR2
YASNRYT

SEQ ID NO: 21343 - protein, 8 aa, Artificial Sequence
  Description of Artificial Sequence: Synthetic peptide
  XENP020885 vlCDR3
QQDYSSPT

SEQ ID NO: 21344 - protein, 447 aa, Artificial Sequence
  Description of Artificial Sequence: Synthetic polypeptide
  XENP020886 9C6_H1.15_L1_anti-BTLA_IgG1_PVA_/S267K Heavy Chain
QVQLVQSGAEVKKPGASVKVSCKVSGFSLTGYGVNWVRQAPGQGLEWMGMIWIDGSTDYNSKFQGRVTMTKDNSKSTVYMELSSLRSEDTARYYCARDRPDGRAMDYWGQGTMVTVSSASTKGPSVFPLAPSSKSTSGGTAALGCLVKDYFPEPVTVSWNSGALTSGVHTFPAVLQSSGLYSLSSVVTVPSSSLGTQTYICNVNHKPSNTKVDKKVEPKSCDKTHTCPPCPAPPVAGPSVFLFPPKPKDTLMISRTPEVTCVVVDVKHEDPEVKFNWYVDGVEVHNAKTKPREEQYNSTYRVVSVLTVLHQDWLNGKEYKCKVSNKALPAPIEKTISKAKGQPREPQVYTLPPSREEMTKNQVSLTCLVKGFYPSDIAVEWESNGQPENNYKTTPPVLDSDGSFFLYSKLTVDKSRWQQGNVFSCSVMHEALHNHYTQKSLSLSPGK

SEQ ID NO: 21345 - protein, 118 aa, Artificial Sequence
  Description of Artificial Sequence: Synthetic polypeptide
  VH of XENP020886
QVQLVQSGAEVKKPGASVKVSCKVSGFSLTGYGVNWVRQAPGQGLEWMGMIWIDGSTDYNSKFQGRVTMTKDNSKSTVYMELSSLRSEDTARYYCARDRPDGRAMDYWGQGTMVTVSS

SEQ ID NO: 21346 - protein, 5 aa, Artificial Sequence
  Description of Artificial Sequence: Synthetic peptide
  XENP020886 vhCDR1
GYGVN

SEQ ID NO: 21347 - protein, 16 aa, Artificial Sequence
  Description of Artificial Sequence: Synthetic peptide
  XENP020886 vhCDR2
MIWIDGSTDYNSKFQG

SEQ ID NO: 21348 - protein, 10 aa, Artificial Sequence
  Description of Artificial Sequence: Synthetic peptide
  XENP020886 vhCDR3
DRPDGRAMDY

SEQ ID NO: 21349 - protein, 213 aa, Artificial Sequence; identical to SEQ ID NO: 21050
  Description of Artificial Sequence: Synthetic polypeptide
  XENP020886 9C6_H1.15_L1_anti-BTLA_IgG1_PVA_/S267K Light Chain

SEQ ID NO: 21350 - protein, 106 aa, Artificial Sequence; identical to SEQ ID NO: 21051
  Description of Artificial Sequence: Synthetic polypeptide
  VL of XENP020886

SEQ ID NO: 21351 - protein, 11 aa, Artificial Sequence
  Description of Artificial Sequence: Synthetic peptide
  XENP020886 vlCDR1
KASQSVSNDVA

SEQ ID NO: 21352 - protein, 7 aa, Artificial Sequence
  Description of Artificial Sequence: Synthetic peptide
  XENP020886 vlCDR2
YASNRYT

SEQ ID NO: 21353 - protein, 8 aa, Artificial Sequence
  Description of Artificial Sequence: Synthetic peptide
  XENP020886 vlCDR3
QQDYSSPT

SEQ ID NO: 21354 - protein, 447 aa, Artificial Sequence
  Description of Artificial Sequence: Synthetic polypeptide
  XENP020887 9C6_H1.16_L1_anti-BTLA_IgG1_PVA_/S267K Heavy Chain
QVQLVQSGAEVKKPGASVKVSCKVSGFSLTGYGVNWVRQAPGQGLEWMGMIWIDGSTDYNSKFQGRVTMTKDNSKSTVYMELSSLRSEDTAVYYCARDRPDGRAMDYWGQGTSVTVSSASTKGPSVFPLAPSSKSTSGGTAALGCLVKDYFPEPVTVSWNSGALTSGVHTFPAVLQSSGLYSLSSVVTVPSSSLGTQTYICNVNHKPSNTKVDKKVEPKSCDKTHTCPPCPAPPVAGPSVFLFPPKPKDTLMISRTPEVTCVVVDVKHEDPEVKFNWYVDGVEVHNAKTKPREEQYNSTYRVVSVLTVLHQDWLNGKEYKCKVSNKALPAPIEKTISKAKGQPREPQVYTLPPSREEMTKNQVSLTCLVKGFYPSDIAVEWESNGQPENNYKTTPPVLDSDGSFFLYSKLTVDKSRWQQGNVFSCSVMHEALHNHYTQKSLSLSPGK

SEQ ID NO: 21355 - protein, 118 aa, Artificial Sequence
  Description of Artificial Sequence: Synthetic polypeptide
  VH of XENP020887
QVQLVQSGAEVKKPGASVKVSCKVSGFSLTGYGVNWVRQAPGQGLEWMGMIWIDGSTDYNSKFQGRVTMTKDNSKSTVYMELSSLRSEDTAVYYCARDRPDGRAMDYWGQGTSVTVSS

SEQ ID NO: 21356 - protein, 5 aa, Artificial Sequence
  Description of Artificial Sequence: Synthetic peptide
  XENP020887 vhCDR1
GYGVN

SEQ ID NO: 21357 - protein, 16 aa, Artificial Sequence
  Description of Artificial Sequence: Synthetic peptide
  XENP020887 vhCDR2
MIWIDGSTDYNSKFQG

SEQ ID NO: 21358 - protein, 10 aa, Artificial Sequence
  Description of Artificial Sequence: Synthetic peptide
  XENP020887 vhCDR3
DRPDGRAMDY

SEQ ID NO: 21359 - protein, 213 aa, Artificial Sequence; identical to SEQ ID NO: 21050
  Description of Artificial Sequence: Synthetic polypeptide
  XENP020887 9C6_H1.16_L1_anti-BTLA_IgG1_PVA_/S267K Light Chain

SEQ ID NO: 21360 - protein, 106 aa, Artificial Sequence; identical to SEQ ID NO: 21051
  Description of Artificial Sequence: Synthetic polypeptide
  VL of XENP020887

SEQ ID NO: 21361 - protein, 11 aa, Artificial Sequence
  Description of Artificial Sequence: Synthetic peptide
  XENP020887 vlCDR1
KASQSVSNDVA

SEQ ID NO: 21362 - protein, 7 aa, Artificial Sequence
  Description of Artificial Sequence: Synthetic peptide
  XENP020887 vlCDR2
YASNRYT

SEQ ID NO: 21363 - protein, 8 aa, Artificial Sequence
  Description of Artificial Sequence: Synthetic peptide
  XENP020887 vlCDR3
QQDYSSPT

SEQ ID NO: 21364 - protein, 447 aa, Artificial Sequence; identical to SEQ ID NO: 21065
  Description of Artificial Sequence: Synthetic polypeptide
  XENP020888 9C6_H1_L1.1_anti-BTLA_IgG1_PVA_/S267K Heavy Chain

SEQ ID NO: 21365 - protein, 118 aa, Artificial Sequence; identical to SEQ ID NO: 21066
  Description of Artificial Sequence: Synthetic polypeptide
  VH of XENP020888

SEQ ID NO: 21366 - protein, 5 aa, Artificial Sequence
  Description of Artificial Sequence: Synthetic peptide
  XENP020888 vhCDR1
GYGVN

SEQ ID NO: 21367 - protein, 16 aa, Artificial Sequence
  Description of Artificial Sequence: Synthetic peptide
  XENP020888 vhCDR2
MIWIDGSTDYNSKFQG

SEQ ID NO: 21368 - protein, 10 aa, Artificial Sequence
  Description of Artificial Sequence: Synthetic peptide
  XENP020888 vhCDR3
DRPDGRAMDY

SEQ ID NO: 21369 - protein, 213 aa, Artificial Sequence
  Description of Artificial Sequence: Synthetic polypeptide
  XENP020888 9C6_H1_L1.1_anti-BTLA_IgG1_PVA_/S267K Light Chain
SIVMTQTPDSLAVSLGERATINCKASQSVSNDVAWYQQKPGQSPKLLIYYASNRYTGVPDRFTGSGYGTDFTLTISSLQAEDVAVYFCQQDYSSPTFGGGTKLEIKRTVAAPSVFIFPPSDEQLKSGTASVVCLLNNFYPREAKVQWKVDNALQSGNSQESVTEQDSKDSTYSLSSTLTLSKADYEKHKVYACEVTHQGLSSPVTKSFNRGEC

SEQ ID NO: 21370 - protein, 106 aa, Artificial Sequence
  Description of Artificial Sequence: Synthetic polypeptide
  VL of XENP020888
SIVMTQTPDSLAVSLGERATINCKASQSVSNDVAWYQQKPGQSPKLLIYYASNRYTGVPDRFTGSGYGTDFTLTISSLQAEDVAVYFCQQDYSSPTFGGGTKLEIK

SEQ ID NO: 21371 - protein, 11 aa, Artificial Sequence
  Description of Artificial Sequence: Synthetic peptide
  XENP020888 vlCDR1
KASQSVSNDVA

SEQ ID NO: 21372 - protein, 7 aa, Artificial Sequence
  Description of Artificial Sequence: Synthetic peptide
  XENP020888 vlCDR2
YASNRYT

SEQ ID NO: 21373 - protein, 8 aa, Artificial Sequence
  Description of Artificial Sequence: Synthetic peptide
  XENP020888 vlCDR3
QQDYSSPT

SEQ ID NO: 21374 - protein, 447 aa, Artificial Sequence; identical to SEQ ID NO: 21065
  Description of Artificial Sequence: Synthetic polypeptide
  XENP020889 9C6_H1_L1.2_anti-BTLA_IgG1_PVA_/S267K Heavy Chain

SEQ ID NO: 21375 - protein, 118 aa, Artificial Sequence; identical to SEQ ID NO: 21066
  Description of Artificial Sequence: Synthetic polypeptide
  VH of XENP020889

SEQ ID NO: 21376 - protein, 5 aa, Artificial Sequence
  Description of Artificial Sequence: Synthetic peptide
  XENP020889 vhCDR1
GYGVN

SEQ ID NO: 21377 - protein, 16 aa, Artificial Sequence
  Description of Artificial Sequence: Synthetic peptide
  XENP020889 vhCDR2
MIWIDGSTDYNSKFQG

SEQ ID NO: 21378 - protein, 10 aa, Artificial Sequence
  Description of Artificial Sequence: Synthetic peptide
  XENP020889 vhCDR3
DRPDGRAMDY

SEQ ID NO: 21379 - protein, 213 aa, Artificial Sequence
  Description of Artificial Sequence: Synthetic polypeptide
  XENP020889 9C6_H1_L1.2_anti-BTLA_IgG1_PVA_/S267K Light Chain
SIVMTQTPKFLLVSLGERATINCKASQSVSNDVAWYQQKPGQSPKLLIYYASNRYTGVPDRFTGSGYGTDFTLTISSLQAEDVAVYFCQQDYSSPTFGGGTKLEIKRTVAAPSVFIFPPSDEQLKSGTASVVCLLNNFYPREAKVQWKVDNALQSGNSQESVTEQDSKDSTYSLSSTLTLSKADYEKHKVYACEVTHQGLSSPVTKSFNRGEC

SEQ ID NO: 21380 - protein, 106 aa, Artificial Sequence
  Description of Artificial Sequence: Synthetic polypeptide
  VL of XENP020889
SIVMTQTPKFLLVSLGERATINCKASQSVSNDVAWYQQKPGQSPKLLIYYASNRYTGVPDRFTGSGYGTDFTLTISSLQAEDVAVYFCQQDYSSPTFGGGTKLEIK

SEQ ID NO: 21381 - protein, 11 aa, Artificial Sequence
  Description of Artificial Sequence: Synthetic peptide
  XENP020889 vlCDR1
KASQSVSNDVA

SEQ ID NO: 21382 - protein, 7 aa, Artificial Sequence
  Description of Artificial Sequence: Synthetic peptide
  XENP020889 vlCDR2
YASNRYT

SEQ ID NO: 21383 - protein, 8 aa, Artificial Sequence
  Description of Artificial Sequence: Synthetic peptide
  XENP020889 vlCDR3
QQDYSSPT

SEQ ID NO: 21384 - protein, 447 aa, Artificial Sequence; identical to SEQ ID NO: 21065
  Description of Artificial Sequence: Synthetic polypeptide
  XENP020890 9C6_H1_L1.3_anti-BTLA_IgG1_PVA_/S267K Heavy Chain

SEQ ID NO: 21385 - protein, 118 aa, Artificial Sequence; identical to SEQ ID NO: 21066
  Description of Artificial Sequence: Synthetic polypeptide
  VH of XENP020890

SEQ ID NO: 21386 - protein, 5 aa, Artificial Sequence
  Description of Artificial Sequence: Synthetic peptide
  XENP020890 vhCDR1
GYGVN

SEQ ID NO: 21387 - protein, 16 aa, Artificial Sequence
  Description of Artificial Sequence: Synthetic peptide
  XENP020890 vhCDR2
MIWIDGSTDYNSKFQG

SEQ ID NO: 21388 - protein, 10 aa, Artificial Sequence
  Description of Artificial Sequence: Synthetic peptide
  XENP020890 vhCDR3
DRPDGRAMDY

SEQ ID NO: 21389 - protein, 213 aa, Artificial Sequence
  Description of Artificial Sequence: Synthetic polypeptide
  XENP020890 9C6_H1_L1.3_anti-BTLA_IgG1_PVA_/S267K Light Chain
SIVMTQSPDSLAVSAGDRVTINCKASQSVSNDVAWYQQKPGQSPKLLIYYASNRYTGVPDRFTGSGYGTDFTLTISSLQAEDVAVYFCQQDYSSPTFGGGTKLEIKRTVAAPSVFIFPPSDEQLKSGTASVVCLLNNFYPREAKVQWKVDNALQSGNSQESVTEQDSKDSTYSLSSTLTLSKADYEKHKVYACEVTHQGLSSPVTKSFNRGEC

SEQ ID NO: 21390 - protein, 106 aa, Artificial Sequence
  Description of Artificial Sequence: Synthetic polypeptide
  VL of XENP020890
SIVMTQSPDSLAVSAGDRVTINCKASQSVSNDVAWYQQKPGQSPKLLIYYASNRYTGVPDRFTGSGYGTDFTLTISSLQAEDVAVYFCQQDYSSPTFGGGTKLEIK

SEQ ID NO: 21391 - protein, 11 aa, Artificial Sequence
  Description of Artificial Sequence: Synthetic peptide
  XENP020890 vlCDR1
KASQSVSNDVA

SEQ ID NO: 21392 - protein, 7 aa, Artificial Sequence
  Description of Artificial Sequence: Synthetic peptide
  XENP020890 vlCDR2
YASNRYT

SEQ ID NO: 21393 - protein, 8 aa, Artificial Sequence
  Description of Artificial Sequence: Synthetic peptide
  XENP020890 vlCDR3
QQDYSSPT

SEQ ID NO: 21394 - protein, 447 aa, Artificial Sequence; identical to SEQ ID NO: 21065
  Description of Artificial Sequence: Synthetic polypeptide
  XENP020891 9C6_H1_L1.4_anti-BTLA_IgG1_PVA_/S267K Heavy Chain

SEQ ID NO: 21395 - protein, 118 aa, Artificial Sequence; identical to SEQ ID NO: 21066
  Description of Artificial Sequence: Synthetic polypeptide
  VH of XENP020891

SEQ ID NO: 21396 - protein, 5 aa, Artificial Sequence
  Description of Artificial Sequence: Synthetic peptide
  XENP020891 vhCDR1
GYGVN

SEQ ID NO: 21397 - protein, 16 aa, Artificial Sequence
  Description of Artificial Sequence: Synthetic peptide
  XENP020891 vhCDR2
MIWIDGSTDYNSKFQG

SEQ ID NO: 21398 - protein, 10 aa, Artificial Sequence
  Description of Artificial Sequence: Synthetic peptide
  XENP020891 vhCDR3
DRPDGRAMDY

SEQ ID NO: 21399 - protein, 213 aa, Artificial Sequence
  Description of Artificial Sequence: Synthetic polypeptide
  XENP020891 9C6_H1_L1.4_anti-BTLA_IgG1_PVA_/S267K Light Chain
SIVMTQSPDSLAVSLGERATITCKASQSVSNDVAWYQQKPGQSPKLLIYYASNRYTGVPDRFTGSGYGTDFTLTISSLQAEDVAVYFCQQDYSSPTFGGGTKLEIKRTVAAPSVFIFPPSDEQLKSGTASVVCLLNNFYPREAKVQWKVDNALQSGNSQESVTEQDSKDSTYSLSSTLTLSKADYEKHKVYACEVTHQGLSSPVTKSFNRGEC

SEQ ID NO: 21400 - protein, 106 aa, Artificial Sequence
  Description of Artificial Sequence: Synthetic polypeptide
  VL of XENP020891
SIVMTQSPDSLAVSLGERATITCKASQSVSNDVAWYQQKPGQSPKLLIYYASNRYTGVPDRFTGSGYGTDFTLTISSLQAEDVAVYFCQQDYSSPTFGGGTKLEIK

SEQ ID NO: 21401 - protein, 11 aa, Artificial Sequence
  Description of Artificial Sequence: Synthetic peptide
  XENP020891 vlCDR1
KASQSVSNDVA

SEQ ID NO: 21402 - protein, 7 aa, Artificial Sequence
  Description of Artificial Sequence: Synthetic peptide
  XENP020891 vlCDR2
YASNRYT

SEQ ID NO: 21403 - protein, 8 aa, Artificial Sequence
  Description of Artificial Sequence: Synthetic peptide
  XENP020891 vlCDR3
QQDYSSPT

SEQ ID NO: 21404 - protein, 447 aa, Artificial Sequence; identical to SEQ ID NO: 21065
  Description of Artificial Sequence: Synthetic polypeptide
  XENP020892 9C6_H1_L1.5_anti-BTLA_IgG1_PVA_/S267K Heavy Chain

SEQ ID NO: 21405 - protein, 118 aa, Artificial Sequence; identical to SEQ ID NO: 21066
  Description of Artificial Sequence: Synthetic polypeptide
  VH of XENP020892

SEQ ID NO: 21406 - protein, 5 aa, Artificial Sequence
  Description of Artificial Sequence: Synthetic peptide
  XENP020892 vhCDR1
GYGVN

SEQ ID NO: 21407 - protein, 16 aa, Artificial Sequence
  Description of Artificial Sequence: Synthetic peptide
  XENP020892 vhCDR2
MIWIDGSTDYNSKFQG

SEQ ID NO: 21408 - protein, 10 aa, Artificial Sequence
  Description of Artificial Sequence: Synthetic peptide
  XENP020892 vhCDR3
DRPDGRAMDY

SEQ ID NO: 21409 - protein, 213 aa, Artificial Sequence
  Description of Artificial Sequence: Synthetic polypeptide
  XENP020892 9C6_H1_L1.5_anti-BTLA_IgG1_PVA_/S267K Light Chain
SIVMTQSPDSLAVSLGERATINCKASQSVSNDVAWYQQKPGQSPKLLIYYASNRYTGVPDRFTGSGYGTDFTFTISSLQAEDVAVYFCQQDYSSPTFGGGTKLEIKRTVAAPSVFIFPPSDEQLKSGTASVVCLLNNFYPREAKVQWKVDNALQSGNSQESVTEQDSKDSTYSLSSTLTLSKADYEKHKVYACEVTHQGLSSPVTKSFNRGEC

SEQ ID NO: 21410 - protein, 106 aa, Artificial Sequence
  Description of Artificial Sequence: Synthetic polypeptide
  VL of XENP020892
SIVMTQSPDSLAVSLGERATINCKASQSVSNDVAWYQQKPGQSPKLLIYYASNRYTGVPDRFTGSGYGTDFTFTISSLQAEDVAVYFCQQDYSSPTFGGGTKLEIK

SEQ ID NO: 21411 - protein, 11 aa, Artificial Sequence
  Description of Artificial Sequence: Synthetic peptide
  XENP020892 vlCDR1
KASQSVSNDVA

SEQ ID NO: 21412 - protein, 7 aa, Artificial Sequence
  Description of Artificial Sequence: Synthetic peptide
  XENP020892 vlCDR2
YASNRYT

SEQ ID NO: 21413 - protein, 8 aa, Artificial Sequence
  Description of Artificial Sequence: Synthetic peptide
  XENP020892 vlCDR3
QQDYSSPT

SEQ ID NO: 21414 - protein, 447 aa, Artificial Sequence; identical to SEQ ID NO: 21065
  Description of Artificial Sequence: Synthetic polypeptide
  XENP020893 9C6_H1_L1.6_anti-BTLA_IgG1_PVA_/S267K Heavy Chain

SEQ ID NO: 21415 - protein, 118 aa, Artificial Sequence; identical to SEQ ID NO: 21066
  Description of Artificial Sequence: Synthetic polypeptide
  VH of XENP020893

SEQ ID NO: 21416 - protein, 5 aa, Artificial Sequence
  Description of Artificial Sequence: Synthetic peptide
  XENP020893 vhCDR1
GYGVN

SEQ ID NO: 21417 - protein, 16 aa, Artificial Sequence
  Description of Artificial Sequence: Synthetic peptide
  XENP020893 vhCDR2
MIWIDGSTDYNSKFQG

SEQ ID NO: 21418 - protein, 10 aa, Artificial Sequence
  Description of Artificial Sequence: Synthetic peptide
  XENP020893 vhCDR3
DRPDGRAMDY

SEQ ID NO: 21419 - protein, 213 aa, Artificial Sequence
  Description of Artificial Sequence: Synthetic polypeptide
  XENP020893 9C6_H1_L1.6_anti-BTLA_IgG1_PVA_/S267K Light Chain
SIVMTQSPDSLAVSLGERATINCKASQSVSNDVAWYQQKPGQSPKLLIYYASNRYTGVPDRFTGSGYGTDFTLTISTVQAEDVAVYFCQQDYSSPTFGGGTKLEIKRTVAAPSVFIFPPSDEQLKSGTASVVCLLNNFYPREAKVQWKVDNALQSGNSQESVTEQDSKDSTYSLSSTLTLSKADYEKHKVYACEVTHQGLSSPVTKSFNRGEC

SEQ ID NO: 21420 - protein, 106 aa, Artificial Sequence
  Description of Artificial Sequence: Synthetic polypeptide
  VL of XENP020893
SIVMTQSPDSLAVSLGERATINCKASQSVSNDVAWYQQKPGQSPKLLIYYASNRYTGVPDRFTGSGYGTDFTLTISTVQAEDVAVYFCQQDYSSPTFGGGTKLEIK

SEQ ID NO: 21421 - protein, 11 aa, Artificial Sequence
  Description of Artificial Sequence: Synthetic peptide
  XENP020893 vlCDR1
KASQSVSNDVA

SEQ ID NO: 21422 - protein, 7 aa, Artificial Sequence
  Description of Artificial Sequence: Synthetic peptide
  XENP020893 vlCDR2
YASNRYT

SEQ ID NO: 21423 - protein, 8 aa, Artificial Sequence
  Description of Artificial Sequence: Synthetic peptide
  XENP020893 vlCDR3
QQDYSSPT

SEQ ID NO: 21424 - protein, 447 aa, Artificial Sequence; identical to SEQ ID NO: 21065
  Description of Artificial Sequence: Synthetic polypeptide
  XENP020894 9C6_H1_L1.7_anti-BTLA_IgG1_PVA_/S267K Heavy Chain

SEQ ID NO: 21425 - protein, 118 aa, Artificial Sequence; identical to SEQ ID NO: 21066
  Description of Artificial Sequence: Synthetic polypeptide
  VH of XENP020894

SEQ ID NO: 21426 - protein, 5 aa, Artificial Sequence
  Description of Artificial Sequence: Synthetic peptide
  XENP020894 vhCDR1
GYGVN

SEQ ID NO: 21427 - protein, 16 aa, Artificial Sequence
  Description of Artificial Sequence: Synthetic peptide
  XENP020894 vhCDR2
MIWIDGSTDYNSKFQG

SEQ ID NO: 21428 - protein, 10 aa, Artificial Sequence
  Description of Artificial Sequence: Synthetic peptide
  XENP020894 vhCDR3
DRPDGRAMDY

SEQ ID NO: 21429 - protein, 213 aa, Artificial Sequence
  Description of Artificial Sequence: Synthetic polypeptide
  XENP020894 9C6_H1_L1.7_anti-BTLA_IgG1_PVA_/S267K Light Chain
SIVMTQSPDSLAVSLGERATINCKASQSVSNDVAWYQQKPGQSPKLLIYYASNRYTGVPDRFTGSGYGTDFTLTISSLQAEDLAVYFCQQDYSSPTFGGGTKLEIKRTVAAPSVFIFPPSDEQLKSGTASVVCLLNNFYPREAKVQWKVDNALQSGNSQESVTEQDSKDSTYSLSSTLTLSKADYEKHKVYACEVTHQGLSSPVTKSFNRGEC

SEQ ID NO: 21430 - protein, 106 aa, Artificial Sequence
  Description of Artificial Sequence: Synthetic polypeptide
  VL of XENP020894
SIVMTQSPDSLAVSLGERATINCKASQSVSNDVAWYQQKPGQSPKLLIYYASNRYTGVPDRFTGSGYGTDFTLTISSLQAEDLAVYFCQQDYSSPTFGGGTKLEIK

SEQ ID NO: 21431 - protein, 11 aa, Artificial Sequence
  Description of Artificial Sequence: Synthetic peptide
  XENP020894 vlCDR1
KASQSVSNDVA

SEQ ID NO: 21432 - protein, 7 aa, Artificial Sequence
  Description of Artificial Sequence: Synthetic peptide
  XENP020894 vlCDR2
YASNRYT

SEQ ID NO: 21433 - protein, 8 aa, Artificial Sequence
  Description of Artificial Sequence: Synthetic peptide
  XENP020894 vlCDR3
QQDYSSPT

SEQ ID NO: 21434 - protein, 449 aa, Artificial Sequence
  Description of Artificial Sequence: Synthetic polypeptide
  XENP021208 3F6_H1L0_anti-BTLA_IgG1_PVA_/S267K Heavy Chain
QVQLQESGPGLVKPSQTLSLTCTVSGDSITSGYWNWIRKPPGKKLEYIGYLSYSGSTYYNPSLKSRVTISRDTSKNQYSLKLSSVTAADTAVYYCARYFYGSYYEAMDYWGQGTTVTVSSASTKGPSVFPLAPSSKSTSGGTAALGCLVKDYFPEPVTVSWNSGALTSGVHTFPAVLQSSGLYSLSSVVTVPSSSLGTQTYICNVNHKPSNTKVDKKVEPKSCDKTHTCPPCPAPPVAGPSVFLFPPKPKDTLMISRTPEVTCVVVDVKHEDPEVKFNWYVDGVEVHNAKTKPREEQYNSTYRVVSVLTVLHQDWLNGKEYKCKVSNKALPAPIEKTISKAKGQPREPQVYTLPPSREEMTKNQVSLTCLVKGFYPSDIAVEWESNGQPENNYKTTPPVLDSDGSFFLYSKLTVDKSRWQQGNVFSCSVMHEALHNHYTQKSLSLSPGK

SEQ ID NO: 21435 - protein, 120 aa, Artificial Sequence
  Description of Artificial Sequence: Synthetic polypeptide
  VH of XENP021208
QVQLQESGPGLVKPSQTLSLTCTVSGDSITSGYWNWIRKPPGKKLEYIGYLSYSGSTYYNPSLKSRVTISRDTSKNQYSLKLSSVTAADTAVYYCARYFYGSYYEAMDYWGQGTTVTVSS

SEQ ID NO: 21436 - protein, 5 aa, Artificial Sequence
  Description of Artificial Sequence: Synthetic peptide
  XENP021208 vhCDR1
SGYWN

SEQ ID NO: 21437 - protein, 16 aa, Artificial Sequence
  Description of Artificial Sequence: Synthetic peptide
  XENP021208 vhCDR2
YLSYSGSTYYNPSLKS

SEQ ID NO: 21438 - protein, 12 aa, Artificial Sequence
  Description of Artificial Sequence: Synthetic peptide
  XENP021208 vhCDR3
YFYGSYYEAMDY

SEQ ID NO: 21439 - protein, 214 aa, Artificial Sequence; identical to SEQ ID NO: 20920
  Description of Artificial Sequence: Synthetic polypeptide
  XENP021208 3F6_H1L0_anti-BTLA_IgG1_PVA_/S267K Light Chain

SEQ ID NO: 21440 - protein, 107 aa, Artificial Sequence; identical to SEQ ID NO: 20921
  Description of Artificial Sequence: Synthetic polypeptide
  VL of XENP021208

SEQ ID NO: 21441 - protein, 11 aa, Artificial Sequence
  Description of Artificial Sequence: Synthetic peptide
  XENP021208 vlCDR1
RASKSISKYLA

SEQ ID NO: 21442 - protein, 7 aa, Artificial Sequence
  Description of Artificial Sequence: Synthetic peptide
  XENP021208 vlCDR2
SGSTLQS

SEQ ID NO: 21443 - protein, 9 aa, Artificial Sequence
  Description of Artificial Sequence: Synthetic peptide
  XENP021208 vlCDR3
QQHNEYPWT

SEQ ID NO: 21444 - protein, 449 aa, Artificial Sequence; identical to SEQ ID NO: 21434
  Description of Artificial Sequence: Synthetic polypeptide
  XENP021209 3F6_H1L1_anti-BTLA_IgG1_PVA_/S267K Heavy Chain

SEQ ID NO: 21445 - protein, 120 aa, Artificial Sequence; identical to SEQ ID NO: 21435
  Description of Artificial Sequence: Synthetic polypeptide
  VH of XENP021209

SEQ ID NO: 21446 - protein, 5 aa, Artificial Sequence
  Description of Artificial Sequence: Synthetic peptide
  XENP021209 vhCDR1
SGYWN

SEQ ID NO: 21447 - protein, 16 aa, Artificial Sequence
  Description of Artificial Sequence: Synthetic peptide
  XENP021209 vhCDR2
YLSYSGSTYYNPSLKS

SEQ ID NO: 21448 - protein, 12 aa, Artificial Sequence
  Description of Artificial Sequence: Synthetic peptide
  XENP021209 vhCDR3
YFYGSYYEAMDY

SEQ ID NO: 21449 - protein, 214 aa, Artificial Sequence
  Description of Artificial Sequence: Synthetic polypeptide
  XENP021209 3F6_H1L1_anti-BTLA_IgG1_PVA_/S267K Light Chain
DVQITQSPSFLSASVGDRVTITCRASKSISKYLAWYQEKPGKTNKLLIYSGSTLQSGIPSRFSGSGSGTEFTLTISSLQPEDFATYYCQQHNEYPWTFGGGTKVEIKRTVAAPSVFIFPPSDEQLKSGTASVVCLLNNFYPREAKVQWKVDNALQSGNSQESVTEQDSKDSTYSLSSTLTLSKADYEKHKVYACEVTHQGLSSPVTKSFNRGEC

SEQ ID NO: 21450 - protein, 107 aa, Artificial Sequence
  Description of Artificial Sequence: Synthetic polypeptide
  VL of XENP021209
DVQITQSPSFLSASVGDRVTITCRASKSISKYLAWYQEKPGKTNKLLIYSGSTLQSGIPSRFSGSGSGTEFTLTISSLQPEDFATYYCQQHNEYPWTFGGGTKVEIK

SEQ ID NO: 21451 - protein, 11 aa, Artificial Sequence
  Description of Artificial Sequence: Synthetic peptide
  XENP021209 vlCDR1
RASKSISKYLA

SEQ ID NO: 21452 - protein, 7 aa, Artificial Sequence
  Description of Artificial Sequence: Synthetic peptide
  XENP021209 vlCDR2
SGSTLQS

SEQ ID NO: 21453 - protein, 9 aa, Artificial Sequence
  Description of Artificial Sequence: Synthetic peptide
  XENP021209 vlCDR3
QQHNEYPWT

SEQ ID NO: 21454 - protein, 448 aa, Artificial Sequence; identical to SEQ ID NO: 20925
  Description of Artificial Sequence: Synthetic polypeptide
  XENP021210 1A9_H0L1_anti-BTLA_IgG1_PVA_/S267K Heavy Chain

SEQ ID NO: 21455 - protein, 119 aa, Artificial Sequence; identical to SEQ ID NO: 20926
  Description of Artificial Sequence: Synthetic polypeptide
  VH of XENP021210

SEQ ID NO: 21456 - protein, 5 aa, Artificial Sequence
  Description of Artificial Sequence: Synthetic peptide
  XENP021210 vhCDR1
SFGMH

SEQ ID NO: 21457 - protein, 17 aa, Artificial Sequence
  Description of Artificial Sequence: Synthetic peptide
  XENP021210 vhCDR2
YISSGISTIYYADTVKG

SEQ ID NO: 21458 - protein, 10 aa, Artificial Sequence
  Description of Artificial Sequence: Synthetic peptide
  XENP021210 vhCDR3
DWLRGYAMDY

SEQ ID NO: 21459 - protein, 218 aa, Artificial Sequence
  Description of Artificial Sequence: Synthetic polypeptide
  XENP021210 1A9_H0L1_anti-BTLA_IgG1_PVA_/S267K Light Chain
DIVLTQSPSSLSASVGDRVTITCRASQSIDYDGDSYMNWYQQKPGKPPKLLIYAASNLDFGIPARFSGSGSGTDFTLTISSLQPEDFATYYCQQSNEDPWTFGGGTKVEIKRTVAAPSVFIFPPSDEQLKSGTASVVCLLNNFYPREAKVQWKVDNALQSGNSQESVTEQDSKDSTYSLSSTLTLSKADYEKHKVYACEVTHQGLSSPVTKSFNRGEC

SEQ ID NO: 21460 - protein, 111 aa, Artificial Sequence
  Description of Artificial Sequence: Synthetic polypeptide
  VL of XENP021210
DIVLTQSPSSLSASVGDRVTITCRASQSIDYDGDSYMNWYQQKPGKPPKLLIYAASNLDFGIPARFSGSGSGTDFTLTISSLQPEDFATYYCQQSNEDPWTFGGGTKVEIK

SEQ ID NO: 21461 - protein, 15 aa, Artificial Sequence
  Description of Artificial Sequence: Synthetic peptide
  XENP021210 vlCDR1
RASQSIDYDGDSYMN

SEQ ID NO: 21462 - protein, 7 aa, Artificial Sequence
  Description of Artificial Sequence: Synthetic peptide
  XENP021210 vlCDR2
AASNLDF

SEQ ID NO: 21463 - protein, 9 aa, Artificial Sequence
  Description of Artificial Sequence: Synthetic peptide
  XENP021210 vlCDR3
QQSNEDPWT

SEQ ID NO: 21464 - protein, 448 aa, Artificial Sequence
  Description of Artificial Sequence: Synthetic polypeptide
  XENP021211 1A9_H1L0_anti-BTLA_IgG1_PVA_/S267K Heavy Chain
EVQLVESGGGLVQPGGSLRLSCAASGFTFSSFGMHWVRQAPGKGLEWVSYISSGISTIYYADSVKGRFTISRDNSKNTLYLQMNSLRAEDTAVYYCARDWLRGYAMDYWGQGTTVTVSSASTKGPSVFPLAPSSKSTSGGTAALGCLVKDYFPEPVTVSWNSGALTSGVHTFPAVLQSSGLYSLSSVVTVPSSSLGTQTYICNVNHKPSNTKVDKKVEPKSCDKTHTCPPCPAPPVAGPSVFLFPPKPKDTLMISRTPEVTCVVVDVKHEDPEVKFNWYVDGVEVHNAKTKPREEQYNSTYRVVSVLTVLHQDWLNGKEYKCKVSNKALPAPIEKTISKAKGQPREPQVYTLPPSREEMTKNQVSLTCLVKGFYPSDIAVEWESNGQPENNYKTTPPVLDSDGSFFLYSKLTVDKSRWQQGNVFSCSVMHEALHNHYTQKSLSLSPGK

SEQ ID NO: 21465 - protein, 119 aa, Artificial Sequence
  Description of Artificial Sequence: Synthetic polypeptide
  VH of XENP021211
EVQLVESGGGLVQPGGSLRLSCAASGFTFSSFGMHWVRQAPGKGLEWVSYISSGISTIYYADSVKGRFTISRDNSKNTLYLQMNSLRAEDTAVYYCARDWLRGYAMDYWGQGTTVTVSS

SEQ ID NO: 21466 - protein, 5 aa, Artificial Sequence
  Description of Artificial Sequence: Synthetic peptide
  XENP021211 vhCDR1
SFGMH

SEQ ID NO: 21467 - protein, 17 aa, Artificial Sequence
  Description of Artificial Sequence: Synthetic peptide
  XENP021211 vhCDR2
YISSGISTIYYADSVKG

SEQ ID NO: 21468 - protein, 10 aa, Artificial Sequence
  Description of Artificial Sequence: Synthetic peptide
  XENP021211 vhCDR3
DWLRGYAMDY

SEQ ID NO: 21469 - protein, 218 aa, Artificial Sequence; identical to SEQ ID NO: 20930
  Description of Artificial Sequence: Synthetic polypeptide
  XENP021211 1A9_H1L0_anti-BTLA_IgG1_PVA_/S267K Light Chain

SEQ ID NO: 21470 - protein, 111 aa, Artificial Sequence; identical to SEQ ID NO: 20931
  Description of Artificial Sequence: Synthetic polypeptide
  VL of XENP021211

SEQ ID NO: 21471 - protein, 15 aa, Artificial Sequence
  Description of Artificial Sequence: Synthetic peptide
  XENP021211 vlCDR1
KASQSIDYDGDSYMN

SEQ ID NO: 21472 - protein, 7 aa, Artificial Sequence
  Description of Artificial Sequence: Synthetic peptide
  XENP021211 vlCDR2
AASNLDF

SEQ ID NO: 21473 - protein, 9 aa, Artificial Sequence
  Description of Artificial Sequence: Synthetic peptide
  XENP021211 vlCDR3
QQSNEDPWT

SEQ ID NO: 21474 - protein, 448 aa, Artificial Sequence; identical to SEQ ID NO: 21464
  Description of Artificial Sequence: Synthetic polypeptide
  XENP021212 1A9_H1L1_anti-BTLA_IgG1_PVA_/S267K Heavy Chain

SEQ ID NO: 21475 - protein, 119 aa, Artificial Sequence; identical to SEQ ID NO: 21465
  Description of Artificial Sequence: Synthetic polypeptide
  VH of XENP021212

SEQ ID NO: 21476 - protein, 5 aa, Artificial Sequence
  Description of Artificial Sequence: Synthetic peptide
  XENP021212 vhCDR1
SFGMH

SEQ ID NO: 21477 - protein, 17 aa, Artificial Sequence
  Description of Artificial Sequence: Synthetic peptide
  XENP021212 vhCDR2
YISSGISTIYYADSVKG

SEQ ID NO: 21478 - protein, 10 aa, Artificial Sequence
  Description of Artificial Sequence: Synthetic peptide
  XENP021212 vhCDR3
DWLRGYAMDY

SEQ ID NO: 21479 - protein, 218 aa, Artificial Sequence; identical to SEQ ID NO: 21459
  Description of Artificial Sequence: Synthetic polypeptide
  XENP021212 1A9_H1L1_anti-BTLA_IgG1_PVA_/S267K Light Chain

SEQ ID NO: 21480 - protein, 111 aa, Artificial Sequence; identical to SEQ ID NO: 21460
  Description of Artificial Sequence: Synthetic polypeptide
  VL of XENP021212

SEQ ID NO: 21481 - protein, 15 aa, Artificial Sequence
  Description of Artificial Sequence: Synthetic peptide
  XENP021212 vlCDR1
RASQSIDYDGDSYMN

SEQ ID NO: 21482 - protein, 7 aa, Artificial Sequence
  Description of Artificial Sequence: Synthetic peptide
  XENP021212 vlCDR2
AASNLDF

SEQ ID NO: 21483 - protein, 9 aa, Artificial Sequence
  Description of Artificial Sequence: Synthetic peptide
  XENP021212 vlCDR3
QQSNEDPWT

SEQ ID NO: 21484 - protein, 448 aa, Artificial Sequence; identical to SEQ ID NO: 21464
  Description of Artificial Sequence: Synthetic polypeptide
  XENP021213 1A9_H1L2_anti-BTLA_IgG1_PVA_/S267K Heavy Chain

SEQ ID NO: 21485 - protein, 119 aa, Artificial Sequence; identical to SEQ ID NO: 21465
  Description of Artificial Sequence: Synthetic polypeptide
  VH of XENP021213

SEQ ID NO: 21486 - protein, 5 aa, Artificial Sequence
  Description of Artificial Sequence: Synthetic peptide
  XENP021213 vhCDR1
SFGMH

SEQ ID NO: 21487 - protein, 17 aa, Artificial Sequence
  Description of Artificial Sequence: Synthetic peptide
  XENP021213 vhCDR2
YISSGISTIYYADSVKG

SEQ ID NO: 21488 - protein, 10 aa, Artificial Sequence
  Description of Artificial Sequence: Synthetic peptide
  XENP021213 vhCDR3
DWLRGYAMDY

SEQ ID NO: 21489 - protein, 218 aa, Artificial Sequence
  Description of Artificial Sequence: Synthetic polypeptide
  XENP021213 1A9_H1L2_anti-BTLA_IgG1_PVA_/S267K Light Chain
DIVLTQSPATLSVSPGERATLSCRASQSIDYDGDSYMNWYQQKPGQPPRLLIYAASNLDFGIPARFSGSGSGTEFTLTISSLQSEDFAVYYCQQSNEDPWTFGGGTKVEIKRTVAAPSVFIFPPSDEQLKSGTASVVCLLNNFYPREAKVQWKVDNALQSGNSQESVTEQDSKDSTYSLSSTLTLSKADYEKHKVYACEVTHQGLSSPVTKSFNRGEC

SEQ ID NO: 21490 - protein, 111 aa, Artificial Sequence
  Description of Artificial Sequence: Synthetic polypeptide
  VL of XENP021213
DIVLTQSPATLSVSPGERATLSCRASQSIDYDGDSYMNWYQQKPGQPPRLLIYAASNLDFGIPARFSGSGSGTEFTLTISSLQSEDFAVYYCQQSNEDPWTFGGGTKVEIK

SEQ ID NO: 21491 - protein, 15 aa, Artificial Sequence
  Description of Artificial Sequence: Synthetic peptide
  XENP021213 vlCDR1
RASQSIDYDGDSYMN

SEQ ID NO: 21492 - protein, 7 aa, Artificial Sequence
  Description of Artificial Sequence: Synthetic peptide
  XENP021213 vlCDR2
AASNLDF

SEQ ID NO: 21493 - protein, 9 aa, Artificial Sequence
  Description of Artificial Sequence: Synthetic peptide
  XENP021213 vlCDR3
QQSNEDPWT

SEQ ID NO: 21494 - protein, 448 aa, Artificial Sequence
  Description of Artificial Sequence: Synthetic polypeptide
  XENP021214 1A9_H2L1_anti-BTLA_IgG1_PVA_/S267K Heavy Chain
QVQLVQSGAEVKKPGASVKVSCKASGFTFSSFGMHWVRQAPGQGLEWMGYISSGISTIYYADKFQGRVTMTRDNSKNTLYMELSSLRSEDTAVYYCARDWLRGYAMDYWGQGTTVTVSSASTKGPSVFPLAPSSKSTSGGTAALGCLVKDYFPEPVTVSWNSGALTSGVHTFPAVLQSSGLYSLSSVVTVPSSSLGTQTYICNVNHKPSNTKVDKKVEPKSCDKTHTCPPCPAPPVAGPSVFLFPPKPKDTLMISRTPEVTCVVVDVKHEDPEVKFNWYVDGVEVHNAKTKPREEQYNSTYRVVSVLTVLHQDWLNGKEYKCKVSNKALPAPIEKTISKAKGQPREPQVYTLPPSREEMTKNQVSLTCLVKGFYPSDIAVEWESNGQPENNYKTTPPVLDSDGSFFLYSKLTVDKSRWQQGNVFSCSVMHEALHNHYTQKSLSLSPGK

SEQ ID NO: 21495 - protein, 119 aa, Artificial Sequence
  Description of Artificial Sequence: Synthetic polypeptide
  VH of XENP021214
QVQLVQSGAEVKKPGASVKVSCKASGFTFSSFGMHWVRQAPGQGLEWMGYISSGISTIYYADKFQGRVTMTRDNSKNTLYMELSSLRSEDTAVYYCARDWLRGYAMDYWGQGTTVTVSS

SEQ ID NO: 21496 - protein, 5 aa, Artificial Sequence
  Description of Artificial Sequence: Synthetic peptide
  XENP021214 vhCDR1
SFGMH

SEQ ID NO: 21497 - protein, 17 aa, Artificial Sequence
  Description of Artificial Sequence: Synthetic peptide
  XENP021214 vhCDR2
YISSGISTIYYADKFQG

SEQ ID NO: 21498 - protein, 10 aa, Artificial Sequence
  Description of Artificial Sequence: Synthetic peptide
  XENP021214 vhCDR3
DWLRGYAMDY

SEQ ID NO: 21499 - protein, 218 aa, Artificial Sequence; identical to SEQ ID NO: 21459
  Description of Artificial Sequence: Synthetic polypeptide
  XENP021214 1A9_H2L1_anti-BTLA_IgG1_PVA_/S267K Light Chain

SEQ ID NO: 21500 - protein, 111 aa, Artificial Sequence; identical to SEQ ID NO: 21460
  Description of Artificial Sequence: Synthetic polypeptide
  VL of XENP021214

SEQ ID NO: 21501 - protein, 15 aa, Artificial Sequence
  Description of Artificial Sequence: Synthetic peptide
  XENP021214 vlCDR1
RASQSIDYDGDSYMN

SEQ ID NO: 21502 - protein, 7 aa, Artificial Sequence
  Description of Artificial Sequence: Synthetic peptide
  XENP021214 vlCDR2
AASNLDF

SEQ ID NO: 21503 - protein, 9 aa, Artificial Sequence
  Description of Artificial Sequence: Synthetic peptide
  XENP021214 vlCDR3
QQSNEDPWT

SEQ ID NO: 21504 - protein, 448 aa, Artificial Sequence
  Description of Artificial Sequence: Synthetic polypeptide
  XENP019351 10A7_H0L0_IgG1_PVA_/S267K Heavy Chain
EVQLVESGGGLTQPGKSLKLSCEASGFTFSSFTMHWVRQSPGKGLEWVAFIRSGSGIVFYADAVRGRFTISRDNAKNLLFLQMNDLKSEDTAMYYCARRPLGHNTFDSWGQGTLVTVSSASTKGPSVFPLAPSSKSTSGGTAALGCLVKDYFPEPVTVSWNSGALTSGVHTFPAVLQSSGLYSLSSVVTVPSSSLGTQTYICNVNHKPSNTKVDKKVEPKSCDKTHTCPPCPAPPVAGPSVFLFPPKPKDTLMISRTPEVTCVVVDVKHEDPEVKFNWYVDGVEVHNAKTKPREEQYNSTYRVVSVLTVLHQDWLNGKEYKCKVSNKALPAPIEKTISKAKGQPREPQVYTLPPSREEMTKNQVSLTCLVKGFYPSDIAVEWESNGQPENNYKTTPPVLDSDGSFFLYSKLTVDKSRWQQGNVFSCSVMHEALHNHYTQKSLSLSPGK

SEQ ID NO: 21505 - protein, 119 aa, Artificial Sequence
  Description of Artificial Sequence: Synthetic polypeptide
  VH of XENP019351
EVQLVESGGGLTQPGKSLKLSCEASGFTFSSFTMHWVRQSPGKGLEWVAFIRSGSGIVFYADAVRGRFTISRDNAKNLLFLQMNDLKSEDTAMYYCARRPLGHNTFDSWGQGTLVTVSS

SEQ ID NO: 21506 - protein, 5 aa, Artificial Sequence
  Description of Artificial Sequence: Synthetic peptide
  XENP019351 vhCDR1
SFTMH

SEQ ID NO: 21507 - protein, 17 aa, Artificial Sequence
  Description of Artificial Sequence: Synthetic peptide
  XENP019351 vhCDR2
FIRSGSGIVFYADAVRG

SEQ ID NO: 21508 - protein, 10 aa, Artificial Sequence
  Description of Artificial Sequence: Synthetic peptide
  XENP019351 vhCDR3
RPLGHNTFDS

SEQ ID NO: 21509 - protein, 220 aa, Artificial Sequence
  Description of Artificial Sequence: Synthetic polypeptide
  XENP019351 10A7_H0L0_IgG1_PVA_/S267K Light Chain
DIVMTQSPSSLAVSPGEKVTMTCKSSQSLYYSGVKENLLAWYQQKPGQSPKLLIYYASIRFTGVPDRFTGSGSGTDYTLTITSVQAEDMGQYFCQQGINNPLTFGDGTKLEIKRTVAAPSVFIFPPSDEQLKSGTASVVCLLNNFYPREAKVQWKVDNALQSGNSQESVTEQDSKDSTYSLSSTLTLSKADYEKHKVYACEVTHQGLSSPVTKSFNRGEC

SEQ ID NO: 21510 - protein, 113 aa, Artificial Sequence
  Description of Artificial Sequence: Synthetic polypeptide
  VL of XENP019351
DIVMTQSPSSLAVSPGEKVTMTCKSSQSLYYSGVKENLLAWYQQKPGQSPKLLIYYASIRFTGVPDRFTGSGSGTDYTLTITSVQAEDMGQYFCQQGINNPLTFGDGTKLEIK

SEQ ID NO: 21511 - protein, 17 aa, Artificial Sequence
  Description of Artificial Sequence: Synthetic peptide
  XENP019351 vlCDR1
KSSQSLYYSGVKENLLA

SEQ ID NO: 21512 - protein, 7 aa, Artificial Sequence
  Description of Artificial Sequence: Synthetic peptide
  XENP019351 vlCDR2
YASIRFT

SEQ ID NO: 21513 - protein, 9 aa, Artificial Sequence
  Description of Artificial Sequence: Synthetic peptide
  XENP019351 vlCDR3
QQGINNPLT

SEQ ID NO: 21514 - protein, 448 aa, Artificial Sequence
  Description of Artificial Sequence: Synthetic polypeptide
  XENP019352 1F4_H0L0_IgG1_PVA_/S267K Heavy Chain
EVQLQQSGPELVKPGTSMKISCKASGYSFTGHLMNWVKQSHGKNLEWIGLIIPYNGGTSYNQKFKGKATLTVDKSSSTAYMELLSLTSDDSAVYFCSRGLRGFYAMDYWGQGTSVTVSSASTKGPSVFPLAPSSKSTSGGTAALGCLVKDYFPEPVTVSWNSGALTSGVHTFPAVLQSSGLYSLSSVVTVPSSSLGTQTYICNVNHKPSNTKVDKKVEPKSCDKTHTCPPCPAPPVAGPSVFLFPPKPKDTLMISRTPEVTCVVVDVKHEDPEVKFNWYVDGVEVHNAKTKPREEQYNSTYRVVSVLTVLHQDWLNGKEYKCKVSNKALPAPIEKTISKAKGQPREPQVYTLPPSREEMTKNQVSLTCLVKGFYPSDIAVEWESNGQPENNYKTTPPVLDSDGSFFLYSKLTVDKSRWQQGNVFSCSVMHEALHNHYTQKSLSLSPGK

SEQ ID NO: 21515 - protein, 119 aa, Artificial Sequence
  Description of Artificial Sequence: Synthetic polypeptide
  VH of XENP019352
EVQLQQSGPELVKPGTSMKISCKASGYSFTGHLMNWVKQSHGKNLEWIGLIIPYNGGTSYNQKFKGKATLTVDKSSSTAYMELLSLTSDDSAVYFCSRGLRGFYAMDYWGQGTSVTVSS

SEQ ID NO: 21516 - protein, 5 aa, Artificial Sequence
  Description of Artificial Sequence: Synthetic peptide
  XENP019352 vhCDR1
GHLMN

SEQ ID NO: 21517 - protein, 17 aa, Artificial Sequence
  Description of Artificial Sequence: Synthetic peptide
  XENP019352 vhCDR2
LIIPYNGGTSYNQKFKG

SEQ ID NO: 21518 - protein, 10 aa, Artificial Sequence
  Description of Artificial Sequence: Synthetic peptide
  XENP019352 vhCDR3
GLRGFYAMDY

SEQ ID NO: 21519 - protein, 219 aa, Artificial Sequence
  Description of Artificial Sequence: Synthetic polypeptide
  XENP019352 1F4_H0L0_IgG1_PVA_/S267K Light Chain
DVVLTQTPLSLSVSFGDQVSISCRSSQSLVNSYGNTFLSWYLHKPGQSPQLLIFGISNRFSGVPDRFSGSGSGTDFTLKISTIKPEDLGMYYCLQGTHQPPTFGPGTKLEVKRTVAAPSVFIFPPSDEQLKSGTASVVCLLNNFYPREAKVQWKVDNALQSGNSQESVTEQDSKDSTYSLSSTLTLSKADYEKHKVYACEVTHQGLSSPVTKSFNRGEC

SEQ ID NO: 21520 - protein, 112 aa, Artificial Sequence
  Description of Artificial Sequence: Synthetic polypeptide
  VL of XENP019352
DVVLTQTPLSLSVSFGDQVSISCRSSQSLVNSYGNTFLSWYLHKPGQSPQLLIFGISNRFSGVPDRFSGSGSGTDFTLKISTIKPEDLGMYYCLQGTHQPPTFGPGTKLEVK

SEQ ID NO: 21521 - protein, 16 aa, Artificial Sequence
  Description of Artificial Sequence: Synthetic peptide
  XENP019352 vlCDR1
RSSQSLVNSYGNTFLS

SEQ ID NO: 21522 - protein, 7 aa, Artificial Sequence
  Description of Artificial Sequence: Synthetic peptide
  XENP019352 vlCDR2
GISNRFS

SEQ ID NO: 21523 - protein, 9 aa, Artificial Sequence
  Description of Artificial Sequence: Synthetic peptide
  XENP019352 vlCDR3
LQGTHQPPT

SEQ ID NO: 21524 - protein, 449 aa, Artificial Sequence
  Description of Artificial Sequence: Synthetic polypeptide
  XENP016430 25F7_H0L0-ipilimumab_H0L0 Fab-Fc Heavy Chain
QVQLQQWGAGLLKPSETLSLTCAVYGGSFSDYYWNWIRQPPGKGLEWIGEINHNGNTNSNPSLKSRVTLSLDTSKNQFSLKLRSVTAADTAVYYCAFGYSDYEYNWFDPWGQGTLVTVSSASTKGPSVFPLAPSSKSTSGGTAALGCLVKDYFPEPVTVSWNSGALTSGVHTFPAVLQSSGLYSLSSVVTVPSSSLGTQTYICNVNHKPSDTKVDKKVEPKSCDKTHTCPPCPAPPVAGPSVFLFPPKPKDTLMISRTPEVTCVVVDVKHEDPEVKFNWYVDGVEVHNAKTKPREEEYNSTYRVVSVLTVLHQDWLNGKEYKCKVSNKALPAPIEKTISKAKGQPREPQVYTLPPSREEMTKNQVSLTCDVSGFYPSDIAVEWESDGQPENNYKTTPPVLDSDGSFFLYSKLTVDKSRWEQGDVFSCSVMHEALHNHYTQKSLSLSPGK

SEQ ID NO: 21525 - protein, 120 aa, Artificial Sequence; identical to SEQ ID NO: 17136
  Description of Artificial Sequence: Synthetic polypeptide
  VH of XENP016430

SEQ ID NO: 21526 - protein, 5 aa, Artificial Sequence
  Description of Artificial Sequence: Synthetic peptide
  XENP016430 vhCDR1
DYYWN

SEQ ID NO: 21527 - protein, 16 aa, Artificial Sequence
  Description of Artificial Sequence: Synthetic peptide
  XENP016430 vhCDR2
EINHNGNTNSNPSLKS

SEQ ID NO: 21528 - protein, 12 aa, Artificial Sequence
  Description of Artificial Sequence: Synthetic peptide
  XENP016430 vhCDR3
GYSDYEYNWFDP

SEQ ID NO: 21529 - protein, 477 aa, Artificial Sequence
  Description of Artificial Sequence: Synthetic polypeptide
  XENP016430 25F7_H0L0-ipilimumab_H0L0 scFv-Fc Heavy Chain
QVQLVESGGGVVQPGRSLRLSCAASGFTFSSYTMHWVRQAPGKGLEWVTFISYDGNNKYYADSVKGRFTISRDNSKNTLYLQMNSLRAEDTAIYYCARTGWLGPFDYWGQGTLVTVSSGKPGSGKPGSGKPGSGKPGSEIVLTQSPGTLSLSPGERATLSCRASQSVGSSYLAWYQQKPGQAPRLLIYGAFSRATGIPDRFSGSGSGTDFTLTISRLEPEDFAVYYCQQYGSSPWTFGQGTKVEIKEPKSSDKTHTCPPCPAPPVAGPSVFLFPPKPKDTLMISRTPEVTCVVVDVKHEDPEVKFNWYVDGVEVHNAKTKPREEQYNSTYRVVSVLTVLHQDWLNGKEYKCKVSNKALPAPIEKTISKAKGQPREPQVYTLPPSREQMTKNQVKLTCLVKGFYPSDIAVEWESNGQPENNYKTTPPVLDSDGSFFLYSKLTVDKSRWQQGNVFSCSVMHEALHNHYTQKSLSLSPGK

SEQ ID NO: 21530 - protein, 118 aa, Artificial Sequence; identical to SEQ ID NO: 22
  Description of Artificial Sequence: Synthetic polypeptide
  VH of XENP016430

SEQ ID NO: 21531 - protein, 108 aa, Artificial Sequence; identical to SEQ ID NO: 23
  Description of Artificial Sequence: Synthetic polypeptide
  VL of XENP016430

SEQ ID NO: 21532 - protein, 231 aa, Artificial Sequence
  Description of Artificial Sequence: Synthetic polypeptide
  Fc chain of XENP016430
EPKSSDKTHTCPPCPAPPVAGPSVFLFPPKPKDTLMISRTPEVTCVVVDVKHEDPEVKFNWYVDGVEVHNAKTKPREEQYNSTYRVVSVLTVLHQDWLNGKEYKCKVSNKALPAPIEKTISKAKGQPREPQVYTLPPSREQMTKNQVKLTCLVKGFYPSDIAVEWESNGQPENNYKTTPPVLDSDGSFFLYSKLTVDKSRWQQGNVFSCSVMHEALHNHYTQKSLSLSPGK

SEQ ID NO: 21533 - protein, 5 aa, Artificial Sequence
  Description of Artificial Sequence: Synthetic peptide
  XENP016430 vhCDR1
SYTMH

SEQ ID NO: 21534 - protein, 17 aa, Artificial Sequence
  Description of Artificial Sequence: Synthetic peptide
  XENP016430 vhCDR2
FISYDGNNKYYADSVKG

SEQ ID NO: 21535 - protein, 9 aa, Artificial Sequence
  Description of Artificial Sequence: Synthetic peptide
  XENP016430 vhCDR3
TGWLGPFDY

SEQ ID NO: 21536 - protein, 12 aa, Artificial Sequence
  Description of Artificial Sequence: Synthetic peptide
  XENP016430 vlCDR1
RASQSVGSSYLA

SEQ ID NO: 21537 - protein, 7 aa, Artificial Sequence
  Description of Artificial Sequence: Synthetic peptide
  XENP016430 vlCDR2
GAFSRAT

SEQ ID NO: 21538 - protein, 9 aa, Artificial Sequence
  Description of Artificial Sequence: Synthetic peptide
  XENP016430 vlCDR3
QQYGSSPWT

SEQ ID NO: 21539 - protein, 214 aa, Artificial Sequence; identical to SEQ ID NO: 17140
  Description of Artificial Sequence: Synthetic polypeptide
  XENP016430 25F7_H0L0-ipilimumab_H0L0 Light Chain

SEQ ID NO: 21540 - protein, 107 aa, Artificial Sequence; identical to SEQ ID NO: 17141
  Description of Artificial Sequence: Synthetic polypeptide
  VL of XENP016430

SEQ ID NO: 21541 - protein, 11 aa, Artificial Sequence
  Description of Artificial Sequence: Synthetic peptide
  XENP016430 vlCDR1
RASQSISSYLA

SEQ ID NO: 21542 - protein, 7 aa, Artificial Sequence
  Description of Artificial Sequence: Synthetic peptide
  XENP016430 vlCDR2
DASNRAT

SEQ ID NO: 21543 - protein, 9 aa, Artificial Sequence
  Description of Artificial Sequence: Synthetic peptide
  XENP016430 vlCDR3
QQRSNWPLT

SEQ ID NO: 21544 - protein, 447 aa, Artificial Sequence; identical to SEQ ID NO: 17235
  Description of Artificial Sequence: Synthetic polypeptide
  XENP020153 2A11_H1L2-ipilimumab_H3.4_L0.12 Fab-Fc Heavy Chain

SEQ ID NO: 21545 - protein, 118 aa, Artificial Sequence; identical to SEQ ID NO: 17236
  Description of Artificial Sequence: Synthetic polypeptide
  VH of XENP020153

SEQ ID NO: 21546 - protein, 5 aa, Artificial Sequence
  Description of Artificial Sequence: Synthetic peptide
  XENP020153 vhCDR1
DYYMH

SEQ ID NO: 21547 - protein, 17 aa, Artificial Sequence
  Description of Artificial Sequence: Synthetic peptide
  XENP020153 vhCDR2
WIDPENGDTEYAPKFQG

SEQ ID NO: 21548 - protein, 9 aa, Artificial Sequence
  Description of Artificial Sequence: Synthetic peptide
  XENP020153 vhCDR3
RGVRQALDY

SEQ ID NO: 21549 - protein, 477 aa, Artificial Sequence
  Description of Artificial Sequence: Synthetic polypeptide
  XENP020153 2A11_H1L2-ipilimumab_H3.4_L0.12 scFv-Fc Heavy Chain
EVQLVESGGGLVKPGGSLRLSCAASGFTFSSYTMHWVRQAPGKGLEWVSFISYDGNHKYYADSVKGRFTISRDNAKNSLYLQMNSLRAEDTAVYYCARTGHLGPFDLWGQGTMVTVSSGKPGSGKPGSGKPGSGKPGSEIVLTQSPGTLSVSPGERATLSCRASQSVGSSYLAWYQQKPGQAPRLLIYGAFSRATGIPDRFSGSGSGTDFTLTISRLEPEDFAVYYCQQYGSSPWTFGQGTKVEIKEPKSSDKTHTCPPCPAPPVAGPSVFLFPPKPKDTLMISRTPEVTCVVVDVKHEDPEVKFNWYVDGVEVHNAKTKPREEQYNSTYRVVSVLTVLHQDWLNGKEYKCKVSNKALPAPIEKTISKAKGQPREPQVYTLPPSREQMTKNQVKLTCLVKGFYPSDIAVEWESNGQPENNYKTTPPVLDSDGSFFLYSKLTVDKSRWQQGNVFSCSVMHEALHNHYTQKSLSLSPGK

SEQ ID NO: 21550 - protein, 118 aa, Artificial Sequence; identical to SEQ ID NO: 2461
  Description of Artificial Sequence: Synthetic polypeptide
  VH of XENP020153

SEQ ID NO: 21551 - protein, 108 aa, Artificial Sequence; identical to SEQ ID NO: 1517
  Description of Artificial Sequence: Synthetic polypeptide
  VL of XENP020153

SEQ ID NO: 21552 - protein, 231 aa, Artificial Sequence; identical to SEQ ID NO: 21532
  Description of Artificial Sequence: Synthetic polypeptide
  Fc chain of XENP020153

SEQ ID NO: 21553 - protein, 5 aa, Artificial Sequence
  Description of Artificial Sequence: Synthetic peptide
  XENP020153 vhCDR1
SYTMH

SEQ ID NO: 21554 - protein, 17 aa, Artificial Sequence
  Description of Artificial Sequence: Synthetic peptide
  XENP020153 vhCDR2
FISYDGNHKYYADSVKG

SEQ ID NO: 21555 - protein, 9 aa, Artificial Sequence
  Description of Artificial Sequence: Synthetic peptide
  XENP020153 vhCDR3
TGHLGPFDL

SEQ ID NO: 21556 - protein, 12 aa, Artificial Sequence
  Description of Artificial Sequence: Synthetic peptide
  XENP020153 vlCDR1
RASQSVGSSYLA

SEQ ID NO: 21557 - protein, 7 aa, Artificial Sequence
  Description of Artificial Sequence: Synthetic peptide
  XENP020153 vlCDR2
GAFSRAT

SEQ ID NO: 21558 - protein, 9 aa, Artificial Sequence
  Description of Artificial Sequence: Synthetic peptide
  XENP020153 vlCDR3
QQYGSSPWT

SEQ ID NO: 21559 - protein, 214 aa, Artificial Sequence; identical to SEQ ID NO: 17250
  Description of Artificial Sequence: Synthetic polypeptide
  XENP020153 2A11_H1L2-ipilimumab_H3.4_L0.12 Light Chain

SEQ ID NO: 21560 - protein, 107 aa, Artificial Sequence; identical to SEQ ID NO: 17251
  Description of Artificial Sequence: Synthetic polypeptide
  VL of XENP020153

SEQ ID NO: 21561 - protein, 11 aa, Artificial Sequence
  Description of Artificial Sequence: Synthetic peptide
  XENP020153 vlCDR1
QASQDIGNYLN

SEQ ID NO: 21562 - protein, 7 aa, Artificial Sequence
  Description of Artificial Sequence: Synthetic peptide
  XENP020153 vlCDR2
YTSRLHS

SEQ ID NO: 21563 - protein, 9 aa, Artificial Sequence
  Description of Artificial Sequence: Synthetic peptide
  XENP020153 vlCDR3
QQGNTLPYT

SEQ ID NO: 21564 - protein, 447 aa, Artificial Sequence
  Description of Artificial Sequence: Synthetic polypeptide
  XENP020721 2A11_H1L2-ipilimumab_H3.4_L0.12 Fab-Fc Heavy Chain
EVQLVQSGAEVKKPGATVKISCKASGFNIKDYYMHWVQQAPGKGLEWMGWIDPENGDTEYAPKFQGRVTITADTSTNTAYMELSSLRSEDTAVYYCYARGVRQALDYWGQGTLVTVSSASTKGPSVFPLAPSSKSTSGGTAALGCLVKDYFPEPVTVSWNSGALTSGVHTFPAVLQSSGLYSLSSVVTVPSSSLGTQTYICNVNHKPSDTKVDKKVEPKSCDKTHTCPPCPAPPVAGPSVFLFPPKPKDTLMISRTPEVTCVVVDVKHEDPEVKFNWYVDGVEVHNAKTKPREEEYNSTYRVVSVLTVLHQDWLNGKEYKCKVSNKALPAPIEKTISKAKGQPREPQVYTLPPSREEMTKNQVSLTCDVSGFYPSDIAVEWESDGQPENNYKTTPPVLDSDGSFFLYSKLTVDKSRWEQGDVFSCSVLHEALHSHYTQKSLSLSPGK

SEQ ID NO: 21565 - protein, 118 aa, Artificial Sequence; identical to SEQ ID NO: 17236
  Description of Artificial Sequence: Synthetic polypeptide
  VH of XENP020721

SEQ ID NO: 21566 - protein, 5 aa, Artificial Sequence
  Description of Artificial Sequence: Synthetic peptide
  XENP020721 vhCDR1
DYYMH

SEQ ID NO: 21567 - protein, 17 aa, Artificial Sequence
  Description of Artificial Sequence: Synthetic peptide
  XENP020721 vhCDR2
WIDPENGDTEYAPKFQG

SEQ ID NO: 21568 - protein, 9 aa, Artificial Sequence
  Description of Artificial Sequence: Synthetic peptide
  XENP020721 vhCDR3
RGVRQALDY

SEQ ID NO: 21569 - protein, 477 aa, Artificial Sequence
  Description of Artificial Sequence: Synthetic polypeptide
  XENP020721 2A11_H1L2-ipilimumab_H3.4_L0.12 scFv-Fc Heavy Chain
EVQLVESGGGLVKPGGSLRLSCAASGFTFSSYTMHWVRQAPGKGLEWVSFISYDGNHKYYADSVKGRFTISRDNAKNSLYLQMNSLRAEDTAVYYCARTGHLGPFDLWGQGTMVTVSSGKPGSGKPGSGKPGSGKPGSEIVLTQSPGTLSVSPGERATLSCRASQSVGSSYLAWYQQKPGQAPRLLIYGAFSRATGIPDRFSGSGSGTDFTLTISRLEPEDFAVYYCQQYGSSPWTFGQGTKVEIKEPKSSDKTHTCPPCPAPPVAGPSVFLFPPKPKDTLMISRTPEVTCVVVDVKHEDPEVKFNWYVDGVEVHNAKTKPREEQYNSTYRVVSVLTVLHQDWLNGKEYKCKVSNKALPAPIEKTISKAKGQPREPQVYTLPPSREQMTKNQVKLTCLVKGFYPSDIAVEWESNGQPENNYKTTPPVLDSDGSFFLYSKLTVDKSRWQQGNVFSCSVLHEALHSHYTQKSLSLSPGK

SEQ ID NO: 21570 - protein, 118 aa, Artificial Sequence; identical to SEQ ID NO: 2461
  Description of Artificial Sequence: Synthetic polypeptide
  VH of XENP020721

SEQ ID NO: 21571 - protein, 108 aa, Artificial Sequence; identical to SEQ ID NO: 1517
  Description of Artificial Sequence: Synthetic polypeptide
  VL of XENP020721

SEQ ID NO: 21572 - protein, 231 aa, Artificial Sequence
  Description of Artificial Sequence: Synthetic polypeptide
  Fc chain of XENP020721
EPKSSDKTHTCPPCPAPPVAGPSVFLFPPKPKDTLMISRTPEVTCVVVDVKHEDPEVKFNWYVDGVEVHNAKTKPREEQYNSTYRVVSVLTVLHQDWLNGKEYKCKVSNKALPAPIEKTISKAKGQPREPQVYTLPPSREQMTKNQVKLTCLVKGFYPSDIAVEWESNGQPENNYKTTPPVLDSDGSFFLYSKLTVDKSRWQQGNVFSCSVLHEALHSHYTQKSLSLSPGK

SEQ ID NO: 21573 - protein, 5 aa, Artificial Sequence
  Description of Artificial Sequence: Synthetic peptide
  XENP020721 vhCDR1
SYTMH

SEQ ID NO: 21574 - protein, 17 aa, Artificial Sequence
  Description of Artificial Sequence: Synthetic peptide
  XENP020721 vhCDR2
FISYDGNHKYYADSVKG

SEQ ID NO: 21575 - protein, 9 aa, Artificial Sequence
  Description of Artificial Sequence: Synthetic peptide
  XENP020721 vhCDR3
TGHLGPFDL

SEQ ID NO: 21576 - protein, 12 aa, Artificial Sequence
  Description of Artificial Sequence: Synthetic peptide
  XENP020721 vlCDR1
RASQSVGSSYLA

SEQ ID NO: 21577 - protein, 7 aa, Artificial Sequence
  Description of Artificial Sequence: Synthetic peptide
  XENP020721 vlCDR2
GAFSRAT

SEQ ID NO: 21578 - protein, 9 aa, Artificial Sequence
  Description of Artificial Sequence: Synthetic peptide
  XENP020721 vlCDR3
QQYGSSPWT

SEQ ID NO: 21579 - protein, 214 aa, Artificial Sequence; identical to SEQ ID NO: 17250
  Description of Artificial Sequence: Synthetic polypeptide
  XENP020721 2A11_H1L2-ipilimumab_H3.4_L0.12 Light Chain

SEQ ID NO: 21580 - protein, 107 aa, Artificial Sequence; identical to SEQ ID NO: 17251
  Description of Artificial Sequence: Synthetic polypeptide
  VL of XENP020721

SEQ ID NO: 21581 - protein, 11 aa, Artificial Sequence
  Description of Artificial Sequence: Synthetic peptide
  XENP020721 vlCDR1
QASQDIGNYLN

SEQ ID NO: 21582 - protein, 7 aa, Artificial Sequence
  Description of Artificial Sequence: Synthetic peptide
  XENP020721 vlCDR2
YTSRLHS

SEQ ID NO: 21583 - protein, 9 aa, Artificial Sequence
  Description of Artificial Sequence: Synthetic peptide
  XENP020721 vlCDR3
QQGNTLPYT

SEQ ID NO: 21584 - protein, 447 aa, Artificial Sequence; identical to SEQ ID NO: 17235
  Description of Artificial Sequence: Synthetic polypeptide
  XENP020440 2A11_H1L2-ipilimumab_H3.21_L0.124 Fab-Fc Heavy Chain

SEQ ID NO: 21585 - protein, 118 aa, Artificial Sequence; identical to SEQ ID NO: 17236
  Description of Artificial Sequence: Synthetic polypeptide
  VH of XENP020440

SEQ ID NO: 21586 - protein, 5 aa, Artificial Sequence
  Description of Artificial Sequence: Synthetic peptide
  XENP020440 vhCDR1
DYYMH

SEQ ID NO: 21587 - protein, 17 aa, Artificial Sequence
  Description of Artificial Sequence: Synthetic peptide
  XENP020440 vhCDR2
WIDPENGDTEYAPKFQG

SEQ ID NO: 21588 - protein, 9 aa, Artificial Sequence
  Description of Artificial Sequence: Synthetic peptide
  XENP020440 vhCDR3
RGVRQALDY

SEQ ID NO: 21589 - protein, 477 aa, Artificial Sequence
  Description of Artificial Sequence: Synthetic polypeptide
  XENP020440 2A11_H1L2-ipilimumab_H3.21_L0.124 scFv-Fc Heavy Chain
EVQLVESGGGLVKPGGSLRLSCAASGFTFSSYTMHWVRQAPGKGLEWVSFISYDGNTKYYADSVKGRFTISRDNAKNSLYLQMNSLRAEDTAVYYCARGGLLGPFDLWGQGTMVTVSSGKPGSGKPGSGKPGSGKPGSEIVLTQSPATLSVSPGERATLSCRASQSVGSSYLAWYQQKPGQAPRLLIYGASSRATGIPDRFSGSGSGTDFTLTISRLEPEDFAVYYCQQYGSSPWTFGQGTKVEIKEPKSSDKTHTCPPCPAPPVAGPSVFLFPPKPKDTLMISRTPEVTCVVVDVKHEDPEVKFNWYVDGVEVHNAKTKPREEQYNSTYRVVSVLTVLHQDWLNGKEYKCKVSNKALPAPIEKTISKAKGQPREPQVYTLPPSREQMTKNQVKLTCLVKGFYPSDIAVEWESNGQPENNYKTTPPVLDSDGSFFLYSKLTVDKSRWQQGNVFSCSVMHEALHNHYTQKSLSLSPGK

SEQ ID NO: 21590 - protein, 118 aa, Artificial Sequence; identical to SEQ ID NO: 2614
  Description of Artificial Sequence: Synthetic polypeptide
  VH of XENP020440

SEQ ID NO: 21591 - protein, 108 aa, Artificial Sequence; identical to SEQ ID NO: 2723
  Description of Artificial Sequence: Synthetic polypeptide
  VL of XENP020440

SEQ ID NO: 21592 - protein, 231 aa, Artificial Sequence; identical to SEQ ID NO: 21532
  Description of Artificial Sequence: Synthetic polypeptide
  Fc chain of XENP020440

SEQ ID NO: 21593 - protein, 5 aa, Artificial Sequence
  Description of Artificial Sequence: Synthetic peptide
  XENP020440 vhCDR1
SYTMH

SEQ ID NO: 21594 - protein, 17 aa, Artificial Sequence
  Description of Artificial Sequence: Synthetic peptide
  XENP020440 vhCDR2
FISYDGNTKYYADSVKG

SEQ ID NO: 21595 - protein, 9 aa, Artificial Sequence
  Description of Artificial Sequence: Synthetic peptide
  XENP020440 vhCDR3
GGLLGPFDL

SEQ ID NO: 21596 - protein, 12 aa, Artificial Sequence
  Description of Artificial Sequence: Synthetic peptide
  XENP020440 vlCDR1
RASQSVGSSYLA

SEQ ID NO: 21597 - protein, 7 aa, Artificial Sequence
  Description of Artificial Sequence: Synthetic peptide
  XENP020440 vlCDR2
GASSRAT

SEQ ID NO: 21598 - protein, 9 aa, Artificial Sequence
  Description of Artificial Sequence: Synthetic peptide
  XENP020440 vlCDR3
QQYGSSPWT

SEQ ID NO: 21599 - protein, 214 aa, Artificial Sequence; identical to SEQ ID NO: 17250
  Description of Artificial Sequence: Synthetic polypeptide
  XENP020440 2A11_H1L2-ipilimumab_H3.21_L0.124 Light Chain

SEQ ID NO: 21600 - protein, 107 aa, Artificial Sequence; identical to SEQ ID NO: 17251
  Description of Artificial Sequence: Synthetic polypeptide
  VL of XENP020440

SEQ ID NO: 21601 - protein, 11 aa, Artificial Sequence
  Description of Artificial Sequence: Synthetic peptide
  XENP020440 vlCDR1
QASQDIGNYLN

SEQ ID NO: 21602 - protein, 7 aa, Artificial Sequence
  Description of Artificial Sequence: Synthetic peptide
  XENP020440 vlCDR2
YTSRLHS

SEQ ID NO: 21603 - protein, 9 aa, Artificial Sequence
  Description of Artificial Sequence: Synthetic peptide
  XENP020440 vlCDR3
QQGNTLPYT

SEQ ID NO: 21604 - protein, 447 aa, Artificial Sequence; identical to SEQ ID NO: 17235
  Description of Artificial Sequence: Synthetic polypeptide
  XENP020441 2A11_H1L2-ipilimumab_H3.21_L0.129 Fab-Fc Heavy Chain

SEQ ID NO: 21605 - protein, 118 aa, Artificial Sequence; identical to SEQ ID NO: 17236
  Description of Artificial Sequence: Synthetic polypeptide
  VH of XENP020441

SEQ ID NO: 21606 - protein, 5 aa, Artificial Sequence
  Description of Artificial Sequence: Synthetic peptide
  XENP020441 vhCDR1
DYYMH

SEQ ID NO: 21607 - protein, 17 aa, Artificial Sequence
  Description of Artificial Sequence: Synthetic peptide
  XENP020441 vhCDR2
WIDPENGDTEYAPKFQG

SEQ ID NO: 21608 - protein, 9 aa, Artificial Sequence
  Description of Artificial Sequence: Synthetic peptide
  XENP020441 vhCDR3
RGVRQALDY

SEQ ID NO: 21609 - protein, 477 aa, Artificial Sequence
  Description of Artificial Sequence: Synthetic polypeptide
  XENP020441 2A11_H1L2-ipilimumab_H3.21_L0.129 scFv-Fc Heavy Chain
EVQLVESGGGLVKPGGSLRLSCAASGFTFSSYTMHWVRQAPGKGLEWVSFISYDGNTKYYADSVKGRFTISRDNAKNSLYLQMNSLRAEDTAVYYCARGGLLGPFDLWGQGTMVTVSSGKPGSGKPGSGKPGSGKPGSEIVLTQSPATLSLSPGERATLSCRASQSVGSSYLAWYQQKPGQAPRLLIYGASSRATGIPDRFSGSGSGTDFTLTISRLEPEDFAVYYCQQYGSSPWTFGQGTKVEIKEPKSSDKTHTCPPCPAPPVAGPSVFLFPPKPKDTLMISRTPEVTCVVVDVKHEDPEVKFNWYVDGVEVHNAKTKPREEQYNSTYRVVSVLTVLHQDWLNGKEYKCKVSNKALPAPIEKTISKAKGQPREPQVYTLPPSREQMTKNQVKLTCLVKGFYPSDIAVEWESNGQPENNYKTTPPVLDSDGSFFLYSKLTVDKSRWQQGNVFSCSVMHEALHNHYTQKSLSLSPGK

SEQ ID NO: 21610 - protein, 118 aa, Artificial Sequence; identical to SEQ ID NO: 2614
  Description of Artificial Sequence: Synthetic polypeptide
  VH of XENP020441

SEQ ID NO: 21611 - protein, 108 aa, Artificial Sequence; identical to SEQ ID NO: 2768
  Description of Artificial Sequence: Synthetic polypeptide
  VL of XENP020441

SEQ ID NO: 21612 - protein, 231 aa, Artificial Sequence; identical to SEQ ID NO: 21532
  Description of Artificial Sequence: Synthetic polypeptide
  Fc chain of XENP020441

SEQ ID NO: 21613 - protein, 5 aa, Artificial Sequence
  Description of Artificial Sequence: Synthetic peptide
  XENP020441 vhCDR1
SYTMH

SEQ ID NO: 21614 - protein, 17 aa, Artificial Sequence
  Description of Artificial Sequence: Synthetic peptide
  XENP020441 vhCDR2
FISYDGNTKYYADSVKG

SEQ ID NO: 21615 - protein, 9 aa, Artificial Sequence
  Description of Artificial Sequence: Synthetic peptide
  XENP020441 vhCDR3
GGLLGPFDL

SEQ ID NO: 21616 - protein, 12 aa, Artificial Sequence
  Description of Artificial Sequence: Synthetic peptide
  XENP020441 vlCDR1
RASQSVGSSYLA

SEQ ID NO: 21617 - protein, 7 aa, Artificial Sequence
  Description of Artificial Sequence: Synthetic peptide
  XENP020441 vlCDR2
GASSRAT

SEQ ID NO: 21618 - protein, 9 aa, Artificial Sequence
  Description of Artificial Sequence: Synthetic peptide
  XENP020441 vlCDR3
QQYGSSPWT

SEQ ID NO: 21619 - protein, 214 aa, Artificial Sequence; identical to SEQ ID NO: 17250
  Description of Artificial Sequence: Synthetic polypeptide
  XENP020441 2A11_H1L2-ipilimumab_H3.21_L0.129 Light Chain

SEQ ID NO: 21620 - protein, 107 aa, Artificial Sequence; identical to SEQ ID NO: 17251
  Description of Artificial Sequence: Synthetic polypeptide
  VL of XENP020441

SEQ ID NO: 21621 - protein, 11 aa, Artificial Sequence
  Description of Artificial Sequence: Synthetic peptide
  XENP020441 vlCDR1
QASQDIGNYLN

SEQ ID NO: 21622 - protein, 7 aa, Artificial Sequence
  Description of Artificial Sequence: Synthetic peptide
  XENP020441 vlCDR2
YTSRLHS

SEQ ID NO: 21623 - protein, 9 aa, Artificial Sequence
  Description of Artificial Sequence: Synthetic peptide
  XENP020441 vlCDR3
QQGNTLPYT

SEQ ID NO: 21624 - protein, 447 aa, Artificial Sequence; identical to SEQ ID NO: 17235
  Description of Artificial Sequence: Synthetic polypeptide
  XENP020442 2A11_H1L2-ipilimumab_H3.21_L0.132 Fab-Fc Heavy Chain

SEQ ID NO: 21625 - protein, 118 aa, Artificial Sequence; identical to SEQ ID NO: 17236
  Description of Artificial Sequence: Synthetic polypeptide
  VH of XENP020442

SEQ ID NO: 21626 - protein, 5 aa, Artificial Sequence
  Description of Artificial Sequence: Synthetic peptide
  XENP020442 vhCDR1
DYYMH

SEQ ID NO: 21627 - protein, 17 aa, Artificial Sequence
  Description of Artificial Sequence: Synthetic peptide
  XENP020442 vhCDR2
WIDPENGDTEYAPKFQG

SEQ ID NO: 21628 - protein, 9 aa, Artificial Sequence
  Description of Artificial Sequence: Synthetic peptide
  XENP020442 vhCDR3
RGVRQALDY

SEQ ID NO: 21629 - protein, 477 aa, Artificial Sequence
  Description of Artificial Sequence: Synthetic polypeptide
  XENP020442 2A11_H1L2-ipilimumab_H3.21_L0.132 scFv-Fc Heavy Chain
EVQLVESGGGLVKPGGSLRLSCAASGFTFSSYTMHWVRQAPGKGLEWVSFISYDGNTKYYADSVKGRFTISRDNAKNSLYLQMNSLRAEDTAVYYCARGGLLGPFDLWGQGTMVTVSSGKPGSGKPGSGKPGSGKPGSEIVLTQSPATLSLSPGERATLSCRASQSVSSSYLAWYQQKPGQAPRLLIYGASSRATGIPDRFSGSGSGTDFTLTISRLEPEDFAVYYCQQYGSSPWTFGQGTKVEIKEPKSSDKTHTCPPCPAPPVAGPSVFLFPPKPKDTLMISRTPEVTCVVVDVKHEDPEVKFNWYVDGVEVHNAKTKPREEQYNSTYRVVSVLTVLHQDWLNGKEYKCKVSNKALPAPIEKTISKAKGQPREPQVYTLPPSREQMTKNQVKLTCLVKGFYPSDIAVEWESNGQPENNYKTTPPVLDSDGSFFLYSKLTVDKSRWQQGNVFSCSVMHEALHNHYTQKSLSLSPGK

SEQ ID NO: 21630 - protein, 118 aa, Artificial Sequence; identical to SEQ ID NO: 2614
  Description of Artificial Sequence: Synthetic polypeptide
  VH of XENP020442

SEQ ID NO: 21631 - protein, 108 aa, Artificial Sequence; identical to SEQ ID NO: 2795
  Description of Artificial Sequence: Synthetic polypeptide
  VL of XENP020442

SEQ ID NO: 21632 - protein, 231 aa, Artificial Sequence; identical to SEQ ID NO: 21532
  Description of Artificial Sequence: Synthetic polypeptide
  Fc chain of XENP020442

SEQ ID NO: 21633 - protein, 5 aa, Artificial Sequence
  Description of Artificial Sequence: Synthetic peptide
  XENP020442 vhCDR1
SYTMH

SEQ ID NO: 21634 - protein, 17 aa, Artificial Sequence
  Description of Artificial Sequence: Synthetic peptide
  XENP020442 vhCDR2
FISYDGNTKYYADSVKG

SEQ ID NO: 21635 - protein, 9 aa, Artificial Sequence
  Description of Artificial Sequence: Synthetic peptide
  XENP020442 vhCDR3
GGLLGPFDL

SEQ ID NO: 21636 - protein, 12 aa, Artificial Sequence
  Description of Artificial Sequence: Synthetic peptide
  XENP020442 vlCDR1
RASQSVSSSYLA

SEQ ID NO: 21637 - protein, 7 aa, Artificial Sequence
  Description of Artificial Sequence: Synthetic peptide
  XENP020442 vlCDR2
GASSRAT

SEQ ID NO: 21638 - protein, 9 aa, Artificial Sequence
  Description of Artificial Sequence: Synthetic peptide
  XENP020442 vlCDR3
QQYGSSPWT

SEQ ID NO: 21639 - protein, 214 aa, Artificial Sequence; identical to SEQ ID NO: 17250
  Description of Artificial Sequence: Synthetic polypeptide
  XENP020442 2A11_H1L2-ipilimumab_H3.21_L0.132 Light Chain

SEQ ID NO: 21640 - protein, 107 aa, Artificial Sequence; identical to SEQ ID NO: 17251
  Description of Artificial Sequence: Synthetic polypeptide
  VL of XENP020442

SEQ ID NO: 21641 - protein, 11 aa, Artificial Sequence
  Description of Artificial Sequence: Synthetic peptide
  XENP020442 vlCDR1
QASQDIGNYLN

SEQ ID NO: 21642 - protein, 7 aa, Artificial Sequence
  Description of Artificial Sequence: Synthetic peptide
  XENP020442 vlCDR2
YTSRLHS

SEQ ID NO: 21643 - protein, 9 aa, Artificial Sequence
  Description of Artificial Sequence: Synthetic peptide
  XENP020442 vlCDR3
QQGNTLPYT

SEQ ID NO: 21644 - protein, 447 aa, Artificial Sequence; identical to SEQ ID NO: 17235
  Description of Artificial Sequence: Synthetic polypeptide
  XENP020443 2A11_H1L2-ipilimumab_H3.23_L0.124 Fab-Fc Heavy Chain

SEQ ID NO: 21645 - protein, 118 aa, Artificial Sequence; identical to SEQ ID NO: 17236
  Description of Artificial Sequence: Synthetic polypeptide
  VH of XENP020443

SEQ ID NO: 21646 - protein, 5 aa, Artificial Sequence
  Description of Artificial Sequence: Synthetic peptide
  XENP020443 vhCDR1
DYYMH

SEQ ID NO: 21647 - protein, 17 aa, Artificial Sequence
  Description of Artificial Sequence: Synthetic peptide
  XENP020443 vhCDR2
WIDPENGDTEYAPKFQG

SEQ ID NO: 21648 - protein, 9 aa, Artificial Sequence
  Description of Artificial Sequence: Synthetic peptide
  XENP020443 vhCDR3
RGVRQALDY

SEQ ID NO: 21649 - protein, 477 aa, Artificial Sequence
  Description of Artificial Sequence: Synthetic polypeptide
  XENP020443 2A11_H1L2-ipilimumab_H3.23_L0.124 scFv-Fc Heavy Chain
EVQLVESGGGLVKPGGSLRLSCAASGFTFSSYTMHWVRQAPGKGLEWVSFISYDGNYKYYADSVKGRFTISRDNAKNSLYLQMNSLRAEDTAVYYCARGGHLGPFDLWGQGTMVTVSSGKPGSGKPGSGKPGSGKPGSEIVLTQSPATLSVSPGERATLSCRASQSVGSSYLAWYQQKPGQAPRLLIYGASSRATGIPDRFSGSGSGTDFTLTISRLEPEDFAVYYCQQYGSSPWTFGQGTKVEIKEPKSSDKTHTCPPCPAPPVAGPSVFLFPPKPKDTLMISRTPEVTCVVVDVKHEDPEVKFNWYVDGVEVHNAKTKPREEQYNSTYRVVSVLTVLHQDWLNGKEYKCKVSNKALPAPIEKTISKAKGQPREPQVYTLPPSREQMTKNQVKLTCLVKGFYPSDIAVEWESNGQPENNYKTTPPVLDSDGSFFLYSKLTVDKSRWQQGNVFSCSVMHEALHNHYTQKSLSLSPGK

SEQ ID NO: 21650 - protein, 118 aa, Artificial Sequence; identical to SEQ ID NO: 2632
  Description of Artificial Sequence: Synthetic polypeptide
  VH of XENP020443

SEQ ID NO: 21651 - protein, 108 aa, Artificial Sequence; identical to SEQ ID NO: 2723
  Description of Artificial Sequence: Synthetic polypeptide
  VL of XENP020443

SEQ ID NO: 21652 - protein, 231 aa, Artificial Sequence; identical to SEQ ID NO: 21532
  Description of Artificial Sequence: Synthetic polypeptide
  Fc chain of XENP020443

SEQ ID NO: 21653 - protein, 5 aa, Artificial Sequence
  Description of Artificial Sequence: Synthetic peptide
  XENP020443 vhCDR1
SYTMH

SEQ ID NO: 21654 - protein, 17 aa, Artificial Sequence
  Description of Artificial Sequence: Synthetic peptide
  XENP020443 vhCDR2
FISYDGNYKYYADSVKG

SEQ ID NO: 21655 - protein, 9 aa, Artificial Sequence
  Description of Artificial Sequence: Synthetic peptide
  XENP020443 vhCDR3
GGHLGPFDL

SEQ ID NO: 21656 - protein, 12 aa, Artificial Sequence
  Description of Artificial Sequence: Synthetic peptide
  XENP020443 vlCDR1
RASQSVGSSYLA

SEQ ID NO: 21657 - protein, 7 aa, Artificial Sequence
  Description of Artificial Sequence: Synthetic peptide
  XENP020443 vlCDR2
GASSRAT

SEQ ID NO: 21658 - protein, 9 aa, Artificial Sequence
  Description of Artificial Sequence: Synthetic peptide
  XENP020443 vlCDR3
QQYGSSPWT

SEQ ID NO: 21659 - protein, 214 aa, Artificial Sequence; identical to SEQ ID NO: 17250
  Description of Artificial Sequence: Synthetic polypeptide
  XENP020443 2A11_H1L2-ipilimumab_H3.23_L0.124 Light Chain

SEQ ID NO: 21660 - protein, 107 aa, Artificial Sequence; identical to SEQ ID NO: 17251
  Description of Artificial Sequence: Synthetic polypeptide
  VL of XENP020443

SEQ ID NO: 21661 - protein, 11 aa, Artificial Sequence
  Description of Artificial Sequence: Synthetic peptide
  XENP020443 vlCDR1
QASQDIGNYLN

SEQ ID NO: 21662 - protein, 7 aa, Artificial Sequence
  Description of Artificial Sequence: Synthetic peptide
  XENP020443 vlCDR2
YTSRLHS

SEQ ID NO: 21663 - protein, 9 aa, Artificial Sequence
  Description of Artificial Sequence: Synthetic peptide
  XENP020443 vlCDR3
QQGNTLPYT

SEQ ID NO: 21664 - protein, 447 aa, Artificial Sequence; identical to SEQ ID NO: 17235
  Description of Artificial Sequence: Synthetic polypeptide
  XENP020444 2A11_H1L2-ipilimumab_H3.23_L0.129 Fab-Fc Heavy Chain

SEQ ID NO: 21665 - protein, 118 aa, Artificial Sequence; identical to SEQ ID NO: 17236
  Description of Artificial Sequence: Synthetic polypeptide
  VH of XENP020444

SEQ ID NO: 21666 - protein, 5 aa, Artificial Sequence
  Description of Artificial Sequence: Synthetic peptide
  XENP020444 vhCDR1
DYYMH

SEQ ID NO: 21667 - protein, 17 aa, Artificial Sequence
  Description of Artificial Sequence: Synthetic peptide
  XENP020444 vhCDR2
WIDPENGDTEYAPKFQG

SEQ ID NO: 21668 - protein, 9 aa, Artificial Sequence
  Description of Artificial Sequence: Synthetic peptide
  XENP020444 vhCDR3
RGVRQALDY

SEQ ID NO: 21669 - protein, 477 aa, Artificial Sequence
  Description of Artificial Sequence: Synthetic polypeptide
  XENP020444 2A11_H1L2-ipilimumab_H3.23_L0.129 scFv-Fc Heavy Chain
EVQLVESGGGLVKPGGSLRLSCAASGFTFSSYTMHWVRQAPGKGLEWVSFISYDGNYKYYADSVKGRFTISRDNAKNSLYLQMNSLRAEDTAVYYCARGGHLGPFDLWGQGTMVTVSSGKPGSGKPGSGKPGSGKPGSEIVLTQSPATLSLSPGERATLSCRASQSVGSSYLAWYQQKPGQAPRLLIYGASSRATGIPDRFSGSGSGTDFTLTISRLEPEDFAVYYCQQYGSSPWTFGQGTKVEIKEPKSSDKTHTCPPCPAPPVAGPSVFLFPPKPKDTLMISRTPEVTCVVVDVKHEDPEVKFNWYVDGVEVHNAKTKPREEQYNSTYRVVSVLTVLHQDWLNGKEYKCKVSNKALPAPIEKTISKAKGQPREPQVYTLPPSREQMTKNQVKLTCLVKGFYPSDIAVEWESNGQPENNYKTTPPVLDSDGSFFLYSKLTVDKSRWQQGNVFSCSVMHEALHNHYTQKSLSLSPGK

SEQ ID NO: 21670 - protein, 118 aa, Artificial Sequence; identical to SEQ ID NO: 2632
  Description of Artificial Sequence: Synthetic polypeptide
  VH of XENP020444

SEQ ID NO: 21671 - protein, 108 aa, Artificial Sequence; identical to SEQ ID NO: 2768
  Description of Artificial Sequence: Synthetic polypeptide
  VL of XENP020444

SEQ ID NO: 21672 - protein, 231 aa, Artificial Sequence; identical to SEQ ID NO: 21532
  Description of Artificial Sequence: Synthetic polypeptide
  Fc chain of XENP020444

SEQ ID NO: 21673 - protein, 5 aa, Artificial Sequence
  Description of Artificial Sequence: Synthetic peptide
  XENP020444 vhCDR1
SYTMH

SEQ ID NO: 21674 - protein, 17 aa, Artificial Sequence
  Description of Artificial Sequence: Synthetic peptide
  XENP020444 vhCDR2
FISYDGNYKYYADSVKG

SEQ ID NO: 21675 - protein, 9 aa, Artificial Sequence
  Description of Artificial Sequence: Synthetic peptide
  XENP020444 vhCDR3
GGHLGPFDL

SEQ ID NO: 21676 - protein, 12 aa, Artificial Sequence
  Description of Artificial Sequence: Synthetic peptide
  XENP020444 vlCDR1
RASQSVGSSYLA

SEQ ID NO: 21677 - protein, 7 aa, Artificial Sequence
  Description of Artificial Sequence: Synthetic peptide
  XENP020444 vlCDR2
GASSRAT

SEQ ID NO: 21678 - protein, 9 aa, Artificial Sequence
  Description of Artificial Sequence: Synthetic peptide
  XENP020444 vlCDR3
QQYGSSPWT

SEQ ID NO: 21679 - protein, 214 aa, Artificial Sequence; identical to SEQ ID NO: 17250
  Description of Artificial Sequence: Synthetic polypeptide
  XENP020444 2A11_H1L2-ipilimumab_H3.23_L0.129 Light Chain

SEQ ID NO: 21680 - protein, 107 aa, Artificial Sequence; identical to SEQ ID NO: 17251
  Description of Artificial Sequence: Synthetic polypeptide
  VL of XENP020444

SEQ ID NO: 21681 - protein, 11 aa, Artificial Sequence
  Description of Artificial Sequence: Synthetic peptide
  XENP020444 vlCDR1
QASQDIGNYLN

SEQ ID NO: 21682 - protein, 7 aa, Artificial Sequence
  Description of Artificial Sequence: Synthetic peptide
  XENP020444 vlCDR2
YTSRLHS

SEQ ID NO: 21683 - protein, 9 aa, Artificial Sequence
  Description of Artificial Sequence: Synthetic peptide
  XENP020444 vlCDR3
QQGNTLPYT

SEQ ID NO: 21684 - protein, 447 aa, Artificial Sequence; identical to SEQ ID NO: 17235
  Description of Artificial Sequence: Synthetic polypeptide
  XENP020445 2A11_H1L2-ipilimumab_H3.23_L0.132 Fab-Fc Heavy Chain

SEQ ID NO: 21685 - protein, 118 aa, Artificial Sequence; identical to SEQ ID NO: 17236
  Description of Artificial Sequence: Synthetic polypeptide
  VH of XENP020445

SEQ ID NO: 21686 - protein, 5 aa, Artificial Sequence
  Description of Artificial Sequence: Synthetic peptide
  XENP020445 vhCDR1
DYYMH

SEQ ID NO: 21687 - protein, 17 aa, Artificial Sequence
  Description of Artificial Sequence: Synthetic peptide
  XENP020445 vhCDR2
WIDPENGDTEYAPKFQG

SEQ ID NO: 21688 - protein, 9 aa, Artificial Sequence
  Description of Artificial Sequence: Synthetic peptide
  XENP020445 vhCDR3
RGVRQALDY

SEQ ID NO: 21689 - protein, 477 aa, Artificial Sequence
  Description of Artificial Sequence: Synthetic polypeptide
  XENP020445 2A11_H1L2-ipilimumab_H3.23_L0.132 scFv-Fc Heavy Chain
EVQLVESGGGLVKPGGSLRLSCAASGFTFSSYTMHWVRQAPGKGLEWVSFISYDGNYKYYADSVKGRFTISRDNAKNSLYLQMNSLRAEDTAVYYCARGGHLGPFDLWGQGTMVTVSSGKPGSGKPGSGKPGSGKPGSEIVLTQSPATLSLSPGERATLSCRASQSVSSSYLAWYQQKPGQAPRLLIYGASSRATGIPDRFSGSGSGTDFTLTISRLEPEDFAVYYCQQYGSSPWTFGQGTKVEIKEPKSSDKTHTCPPCPAPPVAGPSVFLFPPKPKDTLMISRTPEVTCVVVDVKHEDPEVKFNWYVDGVEVHNAKTKPREEQYNSTYRVVSVLTVLHQDWLNGKEYKCKVSNKALPAPIEKTISKAKGQPREPQVYTLPPSREQMTKNQVKLTCLVKGFYPSDIAVEWESNGQPENNYKTTPPVLDSDGSFFLYSKLTVDKSRWQQGNVFSCSVMHEALHNHYTQKSLSLSPGK

SEQ ID NO: 21690 - protein, 118 aa, Artificial Sequence; identical to SEQ ID NO: 2632
  Description of Artificial Sequence: Synthetic polypeptide
  VH of XENP020445

SEQ ID NO: 21691 - protein, 108 aa, Artificial Sequence; identical to SEQ ID NO: 2795
  Description of Artificial Sequence: Synthetic polypeptide
  VL of XENP020445

SEQ ID NO: 21692 - protein, 231 aa, Artificial Sequence; identical to SEQ ID NO: 21532
  Description of Artificial Sequence: Synthetic polypeptide
  Fc chain of XENP020445

SEQ ID NO: 21693 - protein, 5 aa, Artificial Sequence
  Description of Artificial Sequence: Synthetic peptide
  XENP020445 vhCDR1
SYTMH

SEQ ID NO: 21694 - protein, 17 aa, Artificial Sequence
  Description of Artificial Sequence: Synthetic peptide
  XENP020445 vhCDR2
FISYDGNYKYYADSVKG

SEQ ID NO: 21695 - protein, 9 aa, Artificial Sequence
  Description of Artificial Sequence: Synthetic peptide
  XENP020445 vhCDR3
GGHLGPFDL

SEQ ID NO: 21696 - protein, 12 aa, Artificial Sequence
  Description of Artificial Sequence: Synthetic peptide
  XENP020445 vlCDR1
RASQSVSSSYLA

SEQ ID NO: 21697 - protein, 7 aa, Artificial Sequence
  Description of Artificial Sequence: Synthetic peptide
  XENP020445 vlCDR2
GASSRAT

SEQ ID NO: 21698 - protein, 9 aa, Artificial Sequence
  Description of Artificial Sequence: Synthetic peptide
  XENP020445 vlCDR3
QQYGSSPWT

SEQ ID NO: 21699 - protein, 214 aa, Artificial Sequence; identical to SEQ ID NO: 17250
  Description of Artificial Sequence: Synthetic polypeptide
  XENP020445 2A11_H1L2-ipilimumab_H3.23_L0.132 Light Chain

SEQ ID NO: 21700 - protein, 107 aa, Artificial Sequence; identical to SEQ ID NO: 17251
  Description of Artificial Sequence: Synthetic polypeptide
  VL of XENP020445

SEQ ID NO: 21701 - protein, 11 aa, Artificial Sequence
  Description of Artificial Sequence: Synthetic peptide
  XENP020445 vlCDR1
QASQDIGNYLN

SEQ ID NO: 21702 - protein, 7 aa, Artificial Sequence
  Description of Artificial Sequence: Synthetic peptide
  XENP020445 vlCDR2
YTSRLHS

SEQ ID NO: 21703 - protein, 9 aa, Artificial Sequence
  Description of Artificial Sequence: Synthetic peptide
  XENP020445 vlCDR3
QQGNTLPYT

SEQ ID NO: 21704 - protein, 447 aa, Artificial Sequence; identical to SEQ ID NO: 17235
  Description of Artificial Sequence: Synthetic polypeptide
  XENP020446 2A11_H1L2-ipilimumab_H3.25_L0.124 Fab-Fc Heavy Chain

SEQ ID NO: 21705 - protein, 118 aa, Artificial Sequence; identical to SEQ ID NO: 17236
  Description of Artificial Sequence: Synthetic polypeptide
  VH of XENP020446

SEQ ID NO: 21706 - protein, 5 aa, Artificial Sequence
  Description of Artificial Sequence: Synthetic peptide
  XENP020446 vhCDR1
DYYMH

SEQ ID NO: 21707 - protein, 17 aa, Artificial Sequence
  Description of Artificial Sequence: Synthetic peptide
  XENP020446 vhCDR2
WIDPENGDTEYAPKFQG

SEQ ID NO: 21708 - protein, 9 aa, Artificial Sequence
  Description of Artificial Sequence: Synthetic peptide
  XENP020446 vhCDR3
RGVRQALDY

SEQ ID NO: 21709 - protein, 477 aa, Artificial Sequence
  Description of Artificial Sequence: Synthetic polypeptide
  XENP020446 2A11_H1L2-ipilimumab_H3.25_L0.124 scFv-Fc Heavy Chain
EVQLVESGGGLVKPGGSLRLSCAASGFTFSSYTMHWVRQAPGKGLEWVSFISYDGNYKYYADSVKGRFTISRDNAKNSLYLQMNSLRAEDTAVYYCARGGLLGPFDLWGQGTMVTVSSGKPGSGKPGSGKPGSGKPGSEIVLTQSPATLSVSPGERATLSCRASQSVGSSYLAWYQQKPGQAPRLLIYGASSRATGIPDRFSGSGSGTDFTLTISRLEPEDFAVYYCQQYGSSPWTFGQGTKVEIKEPKSSDKTHTCPPCPAPPVAGPSVFLFPPKPKDTLMISRTPEVTCVVVDVKHEDPEVKFNWYVDGVEVHNAKTKPREEQYNSTYRVVSVLTVLHQDWLNGKEYKCKVSNKALPAPIEKTISKAKGQPREPQVYTLPPSREQMTKNQVKLTCLVKGFYPSDIAVEWESNGQPENNYKTTPPVLDSDGSFFLYSKLTVDKSRWQQGNVFSCSVMHEALHNHYTQKSLSLSPGK

SEQ ID NO: 21710 - protein, 118 aa, Artificial Sequence; identical to SEQ ID NO: 2650
  Description of Artificial Sequence: Synthetic polypeptide
  VH of XENP020446

SEQ ID NO: 21711 - protein, 108 aa, Artificial Sequence; identical to SEQ ID NO: 2723
  Description of Artificial Sequence: Synthetic polypeptide
  VL of XENP020446

SEQ ID NO: 21712 - protein, 231 aa, Artificial Sequence; identical to SEQ ID NO: 21532
  Description of Artificial Sequence: Synthetic polypeptide
  Fc chain of XENP020446

SEQ ID NO: 21713 - protein, 5 aa, Artificial Sequence
  Description of Artificial Sequence: Synthetic peptide
  XENP020446 vhCDR1
SYTMH

SEQ ID NO: 21714 - protein, 17 aa, Artificial Sequence
  Description of Artificial Sequence: Synthetic peptide
  XENP020446 vhCDR2
FISYDGNYKYYADSVKG

SEQ ID NO: 21715 - protein, 9 aa, Artificial Sequence
  Description of Artificial Sequence: Synthetic peptide
  XENP020446 vhCDR3
GGLLGPFDL

SEQ ID NO: 21716 - protein, 12 aa, Artificial Sequence
  Description of Artificial Sequence: Synthetic peptide
  XENP020446 vlCDR1
RASQSVGSSYLA

SEQ ID NO: 21717 - protein, 7 aa, Artificial Sequence
  Description of Artificial Sequence: Synthetic peptide
  XENP020446 vlCDR2
GASSRAT

SEQ ID NO: 21718 - protein, 9 aa, Artificial Sequence
  Description of Artificial Sequence: Synthetic peptide
  XENP020446 vlCDR3
QQYGSSPWT

SEQ ID NO: 21719 - protein, 214 aa, Artificial Sequence; identical to SEQ ID NO: 17250
  Description of Artificial Sequence: Synthetic polypeptide
  XENP020446 2A11_H1L2-ipilimumab_H3.25_L0.124 Light Chain

SEQ ID NO: 21720 - protein, 107 aa, Artificial Sequence; identical to SEQ ID NO: 17251
  Description of Artificial Sequence: Synthetic polypeptide
  VL of XENP020446

SEQ ID NO: 21721 - protein, 11 aa, Artificial Sequence
  Description of Artificial Sequence: Synthetic peptide
  XENP020446 vlCDR1
QASQDIGNYLN

SEQ ID NO: 21722 - protein, 7 aa, Artificial Sequence
  Description of Artificial Sequence: Synthetic peptide
  XENP020446 vlCDR2
YTSRLHS

SEQ ID NO: 21723 - protein, 9 aa, Artificial Sequence
  Description of Artificial Sequence: Synthetic peptide
  XENP020446 vlCDR3
QQGNTLPYT

SEQ ID NO: 21724 - protein, 447 aa, Artificial Sequence; identical to SEQ ID NO: 17235
  Description of Artificial Sequence: Synthetic polypeptide
  XENP020447 2A11_H1L2-ipilimumab_H3.25_L0.129 Fab-Fc Heavy Chain

SEQ ID NO: 21725 - protein, 118 aa, Artificial Sequence; identical to SEQ ID NO: 17236
  Description of Artificial Sequence: Synthetic polypeptide
  VH of XENP020447

SEQ ID NO: 21726 - protein, 5 aa, Artificial Sequence
  Description of Artificial Sequence: Synthetic peptide
  XENP020447 vhCDR1
DYYMH

SEQ ID NO: 21727 - protein, 17 aa, Artificial Sequence
  Description of Artificial Sequence: Synthetic peptide
  XENP020447 vhCDR2
WIDPENGDTEYAPKFQG

SEQ ID NO: 21728 - protein, 9 aa, Artificial Sequence
  Description of Artificial Sequence: Synthetic peptide
  XENP020447 vhCDR3
RGVRQALDY

SEQ ID NO: 21729 - protein, 477 aa, Artificial Sequence
  Description of Artificial Sequence: Synthetic polypeptide
  XENP020447 2A11_H1L2-ipilimumab_H3.25_L0.129 scFv-Fc Heavy Chain
EVQLVESGGGLVKPGGSLRLSCAASGFTFSSYTMHWVRQAPGKGLEWVSFISYDGNYKYYADSVKGRFTISRDNAKNSLYLQMNSLRAEDTAVYYCARGGLLGPFDLWGQGTMVTVSSGKPGSGKPGSGKPGSGKPGSEIVLTQSPATLSLSPGERATLSCRASQSVGSSYLAWYQQKPGQAPRLLIYGASSRATGIPDRFSGSGSGTDFTLTISRLEPEDFAVYYCQQYGSSPWTFGQGTKVEIKEPKSSDKTHTCPPCPAPPVAGPSVFLFPPKPKDTLMISRTPEVTCVVVDVKHEDPEVKFNWYVDGVEVHNAKTKPREEQYNSTYRVVSVLTVLHQDWLNGKEYKCKVSNKALPAPIEKTISKAKGQPREPQVYTLPPSREQMTKNQVKLTCLVKGFYPSDIAVEWESNGQPENNYKTTPPVLDSDGSFFLYSKLTVDKSRWQQGNVFSCSVMHEALHNHYTQKSLSLSPGK

SEQ ID NO: 21730 - protein, 118 aa, Artificial Sequence; identical to SEQ ID NO: 2650
  Description of Artificial Sequence: Synthetic polypeptide
  VH of XENP020447

SEQ ID NO: 21731 - protein, 108 aa, Artificial Sequence; identical to SEQ ID NO: 2768
  Description of Artificial Sequence: Synthetic polypeptide
  VL of XENP020447

SEQ ID NO: 21732 - protein, 231 aa, Artificial Sequence; identical to SEQ ID NO: 21532
  Description of Artificial Sequence: Synthetic polypeptide
  Fc chain of XENP020447

SEQ ID NO: 21733 - protein, 5 aa, Artificial Sequence
  Description of Artificial Sequence: Synthetic peptide
  XENP020447 vhCDR1
SYTMH

SEQ ID NO: 21734 - protein, 17 aa, Artificial Sequence
  Description of Artificial Sequence: Synthetic peptide
  XENP020447 vhCDR2
FISYDGNYKYYADSVKG

SEQ ID NO: 21735 - protein, 9 aa, Artificial Sequence
  Description of Artificial Sequence: Synthetic peptide
  XENP020447 vhCDR3
GGLLGPFDL

SEQ ID NO: 21736 - protein, 12 aa, Artificial Sequence
  Description of Artificial Sequence: Synthetic peptide
  XENP020447 vlCDR1
RASQSVGSSYLA

SEQ ID NO: 21737 - protein, 7 aa, Artificial Sequence
  Description of Artificial Sequence: Synthetic peptide
  XENP020447 vlCDR2
GASSRAT

SEQ ID NO: 21738 - protein, 9 aa, Artificial Sequence
  Description of Artificial Sequence: Synthetic peptide
  XENP020447 vlCDR3
QQYGSSPWT

SEQ ID NO: 21739 - protein, 214 aa, Artificial Sequence; identical to SEQ ID NO: 17250
  Description of Artificial Sequence: Synthetic polypeptide
  XENP020447 2A11_H1L2-ipilimumab_H3.25_L0.129 Light Chain

SEQ ID NO: 21740 - protein, 107 aa, Artificial Sequence; identical to SEQ ID NO: 17251
  Description of Artificial Sequence: Synthetic polypeptide
  VL of XENP020447

SEQ ID NO: 21741 - protein, 11 aa, Artificial Sequence
  Description of Artificial Sequence: Synthetic peptide
  XENP020447 vlCDR1
QASQDIGNYLN

SEQ ID NO: 21742 - protein, 7 aa, Artificial Sequence
  Description of Artificial Sequence: Synthetic peptide
  XENP020447 vlCDR2
YTSRLHS

SEQ ID NO: 21743 - protein, 9 aa, Artificial Sequence
  Description of Artificial Sequence: Synthetic peptide
  XENP020447 vlCDR3
QQGNTLPYT

SEQ ID NO: 21744 - protein, 447 aa, Artificial Sequence; identical to SEQ ID NO: 17235
  Description of Artificial Sequence: Synthetic polypeptide
  XENP020448 2A11_H1L2-ipilimumab_H3.25_L0.132 Fab-Fc Heavy Chain

SEQ ID NO: 21745 - protein, 118 aa, Artificial Sequence; identical to SEQ ID NO: 17236
  Description of Artificial Sequence: Synthetic polypeptide
  VH of XENP020448

SEQ ID NO: 21746 - protein, 5 aa, Artificial Sequence
  Description of Artificial Sequence: Synthetic peptide
  XENP020448 vhCDR1
DYYMH

SEQ ID NO: 21747 - protein, 17 aa, Artificial Sequence
  Description of Artificial Sequence: Synthetic peptide
  XENP020448 vhCDR2
WIDPENGDTEYAPKFQG

SEQ ID NO: 21748 - protein, 9 aa, Artificial Sequence
  Description of Artificial Sequence: Synthetic peptide
  XENP020448 vhCDR3
RGVRQALDY

SEQ ID NO: 21749 - protein, 477 aa, Artificial Sequence
  Description of Artificial Sequence: Synthetic polypeptide
  XENP020448 2A11_H1L2-ipilimumab_H3.25_L0.132 scFv-Fc Heavy Chain
EVQLVESGGGLVKPGGSLRLSCAASGFTFSSYTMHWVRQAPGKGLEWVSFISYDGNYKYYADSVKGRFTISRDNAKNSLYLQMNSLRAEDTAVYYCARGGLLGPFDLWGQGTMVTVSSGKPGSGKPGSGKPGSGKPGSEIVLTQSPATLSLSPGERATLSCRASQSVSSSYLAWYQQKPGQAPRLLIYGASSRATGIPDRFSGSGSGTDFTLTISRLEPEDFAVYYCQQYGSSPWTFGQGTKVEIKEPKSSDKTHTCPPCPAPPVAGPSVFLFPPKPKDTLMISRTPEVTCVVVDVKHEDPEVKFNWYVDGVEVHNAKTKPREEQYNSTYRVVSVLTVLHQDWLNGKEYKCKVSNKALPAPIEKTISKAKGQPREPQVYTLPPSREQMTKNQVKLTCLVKGFYPSDIAVEWESNGQPENNYKTTPPVLDSDGSFFLYSKLTVDKSRWQQGNVFSCSVMHEALHNHYTQKSLSLSPGK

SEQ ID NO: 21750 - protein, 118 aa, Artificial Sequence; identical to SEQ ID NO: 2650
  Description of Artificial Sequence: Synthetic polypeptide
  VH of XENP020448

SEQ ID NO: 21751 - protein, 108 aa, Artificial Sequence; identical to SEQ ID NO: 2795
  Description of Artificial Sequence: Synthetic polypeptide
  VL of XENP020448

SEQ ID NO: 21752 - protein, 231 aa, Artificial Sequence; identical to SEQ ID NO: 21532
  Description of Artificial Sequence: Synthetic polypeptide
  Fc chain of XENP020448

SEQ ID NO: 21753 - protein, 5 aa, Artificial Sequence
  Description of Artificial Sequence: Synthetic peptide
  XENP020448 vhCDR1
SYTMH

SEQ ID NO: 21754 - protein, 17 aa, Artificial Sequence
  Description of Artificial Sequence: Synthetic peptide
  XENP020448 vhCDR2
FISYDGNYKYYADSVKG

SEQ ID NO: 21755 - protein, 9 aa, Artificial Sequence
  Description of Artificial Sequence: Synthetic peptide
  XENP020448 vhCDR3
GGLLGPFDL

SEQ ID NO: 21756 - protein, 12 aa, Artificial Sequence
  Description of Artificial Sequence: Synthetic peptide
  XENP020448 vlCDR1
RASQSVSSSYLA

SEQ ID NO: 21757 - protein, 7 aa, Artificial Sequence
  Description of Artificial Sequence: Synthetic peptide
  XENP020448 vlCDR2
GASSRAT

SEQ ID NO: 21758 - protein, 9 aa, Artificial Sequence
  Description of Artificial Sequence: Synthetic peptide
  XENP020448 vlCDR3
QQYGSSPWT

SEQ ID NO: 21759 - protein, 214 aa, Artificial Sequence; identical to SEQ ID NO: 17250
  Description of Artificial Sequence: Synthetic polypeptide
  XENP020448 2A11_H1L2-ipilimumab_H3.25_L0.132 Light Chain

SEQ ID NO: 21760 - protein, 107 aa, Artificial Sequence; identical to SEQ ID NO: 17251
  Description of Artificial Sequence: Synthetic polypeptide
  VL of XENP020448

SEQ ID NO: 21761 - protein, 11 aa, Artificial Sequence
  Description of Artificial Sequence: Synthetic peptide
  XENP020448 vlCDR1
QASQDIGNYLN

SEQ ID NO: 21762 - protein, 7 aa, Artificial Sequence
  Description of Artificial Sequence: Synthetic peptide
  XENP020448 vlCDR2
YTSRLHS

SEQ ID NO: 21763 - protein, 9 aa, Artificial Sequence
  Description of Artificial Sequence: Synthetic peptide
  XENP020448 vlCDR3
QQGNTLPYT

SEQ ID NO: 21764 - protein, 447 aa, Artificial Sequence; identical to SEQ ID NO: 17235
  Description of Artificial Sequence: Synthetic polypeptide
  XENP020041 2A11_H1L2_Fab-ipilimumab_H3L0 Fab-Fc Heavy Chain

SEQ ID NO: 21765 - protein, 118 aa, Artificial Sequence; identical to SEQ ID NO: 17236
  Description of Artificial Sequence: Synthetic polypeptide
  VH of XENP020041

SEQ ID NO: 21766 - protein, 5 aa, Artificial Sequence
  Description of Artificial Sequence: Synthetic peptide
  XENP020041 vhCDR1
DYYMH

SEQ ID NO: 21767 - protein, 17 aa, Artificial Sequence
  Description of Artificial Sequence: Synthetic peptide
  XENP020041 vhCDR2
WIDPENGDTEYAPKFQG

SEQ ID NO: 21768 - protein, 9 aa, Artificial Sequence
  Description of Artificial Sequence: Synthetic peptide
  XENP020041 vhCDR3
RGVRQALDY

SEQ ID NO: 21769 - protein, 477 aa, Artificial Sequence
  Description of Artificial Sequence: Synthetic polypeptide
  XENP020041 2A11_H1L2_Fab-ipilimumab_H3L0 scFv-Fc Heavy Chain
EVQLVESGGGLVKPGGSLRLSCAASGFTFSSYTMHWVRQAPGKGLEWVSFISYDGNNKYYADSVKGRFTISRDNAKNSLYLQMNSLRAEDTAVYYCARTGWLGPFDYWGQGTLVTVSSGKPGSGKPGSGKPGSGKPGSEIVLTQSPGTLSLSPGERATLSCRASQSVGSSYLAWYQQKPGQAPRLLIYGAFSRATGIPDRFSGSGSGTDFTLTISRLEPEDFAVYYCQQYGSSPWTFGQGTKVEIKEPKSSDKTHTCPPCPAPPVAGPSVFLFPPKPKDTLMISRTPEVTCVVVDVKHEDPEVKFNWYVDGVEVHNAKTKPREEQYNSTYRVVSVLTVLHQDWLNGKEYKCKVSNKALPAPIEKTISKAKGQPREPQVYTLPPSREQMTKNQVKLTCLVKGFYPSDIAVEWESNGQPENNYKTTPPVLDSDGSFFLYSKLTVDKSRWQQGNVFSCSVMHEALHNHYTQKSLSLSPGK

SEQ ID NO: 21770 - protein, 118 aa, Artificial Sequence; identical to SEQ ID NO: 139
  Description of Artificial Sequence: Synthetic polypeptide
  VH of XENP020041

SEQ ID NO: 21771 - protein, 108 aa, Artificial Sequence; identical to SEQ ID NO: 23
  Description of Artificial Sequence: Synthetic polypeptide
  VL of XENP020041

SEQ ID NO: 21772 - protein, 231 aa, Artificial Sequence; identical to SEQ ID NO: 21532
  Description of Artificial Sequence: Synthetic polypeptide
  Fc chain of XENP020041

SEQ ID NO: 21773 - protein, 5 aa, Artificial Sequence
  Description of Artificial Sequence: Synthetic peptide
  XENP020041 vhCDR1
SYTMH

SEQ ID NO: 21774 - protein, 17 aa, Artificial Sequence
  Description of Artificial Sequence: Synthetic peptide
  XENP020041 vhCDR2
FISYDGNNKYYADSVKG

SEQ ID NO: 21775 - protein, 9 aa, Artificial Sequence
  Description of Artificial Sequence: Synthetic peptide
  XENP020041 vhCDR3
TGWLGPFDY

SEQ ID NO: 21776 - protein, 12 aa, Artificial Sequence
  Description of Artificial Sequence: Synthetic peptide
  XENP020041 vlCDR1
RASQSVGSSYLA

SEQ ID NO: 21777 - protein, 7 aa, Artificial Sequence
  Description of Artificial Sequence: Synthetic peptide
  XENP020041 vlCDR2
GAFSRAT

SEQ ID NO: 21778 - protein, 9 aa, Artificial Sequence
  Description of Artificial Sequence: Synthetic peptide
  XENP020041 vlCDR3
QQYGSSPWT

SEQ ID NO: 21779 - protein, 214 aa, Artificial Sequence; identical to SEQ ID NO: 17250
  Description of Artificial Sequence: Synthetic polypeptide
  XENP020041 2A11_H1L2_Fab-ipilimumab_H3L0 Light Chain

SEQ ID NO: 21780 - protein, 107 aa, Artificial Sequence; identical to SEQ ID NO: 17251
  Description of Artificial Sequence: Synthetic polypeptide
  VL of XENP020041

SEQ ID NO: 21781 - protein, 11 aa, Artificial Sequence
  Description of Artificial Sequence: Synthetic peptide
  XENP020041 vlCDR1
QASQDIGNYLN

SEQ ID NO: 21782 - protein, 7 aa, Artificial Sequence
  Description of Artificial Sequence: Synthetic peptide
  XENP020041 vlCDR2
YTSRLHS

SEQ ID NO: 21783 - protein, 9 aa, Artificial Sequence
  Description of Artificial Sequence: Synthetic peptide
  XENP020041 vlCDR3
QQGNTLPYT

SEQ ID NO: 21784 - protein, 447 aa, Artificial Sequence; identical to SEQ ID NO: 17235
  Description of Artificial Sequence: Synthetic polypeptide
  XENP020152 2A11_H1L2_Fab-ipilimumab_H3.3_L0.12 Fab-Fc Heavy Chain

SEQ ID NO: 21785 - protein, 118 aa, Artificial Sequence; identical to SEQ ID NO: 17236
  Description of Artificial Sequence: Synthetic polypeptide
  VH of XENP020152

SEQ ID NO: 21786 - protein, 5 aa, Artificial Sequence
  Description of Artificial Sequence: Synthetic peptide
  XENP020152 vhCDR1
DYYMH

SEQ ID NO: 21787 - protein, 17 aa, Artificial Sequence
  Description of Artificial Sequence: Synthetic peptide
  XENP020152 vhCDR2
WIDPENGDTEYAPKFQG

SEQ ID NO: 21788 - protein, 9 aa, Artificial Sequence
  Description of Artificial Sequence: Synthetic peptide
  XENP020152 vhCDR3
RGVRQALDY

SEQ ID NO: 21789 - protein, 477 aa, Artificial Sequence
  Description of Artificial Sequence: Synthetic polypeptide
  XENP020152 2A11_H1L2_Fab-ipilimumab_H3.3_L0.12 scFv-Fc Heavy Chain
EVQLVESGGGLVKPGGSLRLSCAASGFTFSSYTMHWVRQAPGKGLEWVSFISYDGNQKYYADSVKGRFTISRDNAKNSLYLQMNSLRAEDTAVYYCARTGLLGPFDLWGQGTMVTVSSGKPGSGKPGSGKPGSGKPGSEIVLTQSPGTLSVSPGERATLSCRASQSVGSSYLAWYQQKPGQAPRLLIYGAFSRATGIPDRFSGSGSGTDFTLTISRLEPEDFAVYYCQQYGSSPWTFGQGTKVEIKEPKSSDKTHTCPPCPAPPVAGPSVFLFPPKPKDTLMISRTPEVTCVVVDVKHEDPEVKFNWYVDGVEVHNAKTKPREEQYNSTYRVVSVLTVLHQDWLNGKEYKCKVSNKALPAPIEKTISKAKGQPREPQVYTLPPSREQMTKNQVKLTCLVKGFYPSDIAVEWESNGQPENNYKTTPPVLDSDGSFFLYSKLTVDKSRWQQGNVFSCSVMHEALHNHYTQKSLSLSPGK

SEQ ID NO: 21790 - protein, 118 aa, Artificial Sequence; identical to SEQ ID NO: 2452
  Description of Artificial Sequence: Synthetic polypeptide
  VH of XENP020152

SEQ ID NO: 21791 - protein, 108 aa, Artificial Sequence; identical to SEQ ID NO: 1517
  Description of Artificial Sequence: Synthetic polypeptide
  VL of XENP020152

SEQ ID NO: 21792 - protein, 231 aa, Artificial Sequence; identical to SEQ ID NO: 21532
  Description of Artificial Sequence: Synthetic polypeptide
  Fc chain of XENP020152

SEQ ID NO: 21793 - protein, 5 aa, Artificial Sequence
  Description of Artificial Sequence: Synthetic peptide
  XENP020152 vhCDR1
SYTMH

SEQ ID NO: 21794 - protein, 17 aa, Artificial Sequence
  Description of Artificial Sequence: Synthetic peptide
  XENP020152 vhCDR2
FISYDGNQKYYADSVKG

SEQ ID NO: 21795 - protein, 9 aa, Artificial Sequence
  Description of Artificial Sequence: Synthetic peptide
  XENP020152 vhCDR3
TGLLGPFDL

SEQ ID NO: 21796 - protein, 12 aa, Artificial Sequence
  Description of Artificial Sequence: Synthetic peptide
  XENP020152 vlCDR1
RASQSVGSSYLA

SEQ ID NO: 21797 - protein, 7 aa, Artificial Sequence
  Description of Artificial Sequence: Synthetic peptide
  XENP020152 vlCDR2
GAFSRAT

SEQ ID NO: 21798 - protein, 9 aa, Artificial Sequence
  Description of Artificial Sequence: Synthetic peptide
  XENP020152 vlCDR3
QQYGSSPWT

SEQ ID NO: 21799 - protein, 214 aa, Artificial Sequence; identical to SEQ ID NO: 17250
  Description of Artificial Sequence: Synthetic polypeptide
  XENP020152 2A11_H1L2_Fab-ipilimumab_H3.3_L0.12 Light Chain

SEQ ID NO: 21800 - protein, 107 aa, Artificial Sequence; identical to SEQ ID NO: 17251
  Description of Artificial Sequence: Synthetic polypeptide
  VL of XENP020152

SEQ ID NO: 21801 - protein, 11 aa, Artificial Sequence
  Description of Artificial Sequence: Synthetic peptide
  XENP020152 vlCDR1
QASQDIGNYLN

SEQ ID NO: 21802 - protein, 7 aa, Artificial Sequence
  Description of Artificial Sequence: Synthetic peptide
  XENP020152 vlCDR2
YTSRLHS

SEQ ID NO: 21803 - protein, 9 aa, Artificial Sequence
  Description of Artificial Sequence: Synthetic peptide
  XENP020152 vlCDR3
QQGNTLPYT

SEQ ID NO: 21804 - protein, 447 aa, Artificial Sequence; identical to SEQ ID NO: 17235
  Description of Artificial Sequence: Synthetic polypeptide
  XENP020153 2A11_H1L2_Fab-ipilimumab_H3.4_L0.12 Fab-Fc Heavy Chain

SEQ ID NO: 21805 - protein, 118 aa, Artificial Sequence; identical to SEQ ID NO: 17236
  Description of Artificial Sequence: Synthetic polypeptide
  VH of XENP020153

SEQ ID NO: 21806 - protein, 5 aa, Artificial Sequence
  Description of Artificial Sequence: Synthetic peptide
  XENP020153 vhCDR1
DYYMH

SEQ ID NO: 21807 - protein, 17 aa, Artificial Sequence
  Description of Artificial Sequence: Synthetic peptide
  XENP020153 vhCDR2
WIDPENGDTEYAPKFQG

SEQ ID NO: 21808 - protein, 9 aa, Artificial Sequence
  Description of Artificial Sequence: Synthetic peptide
  XENP020153 vhCDR3
RGVRQALDY

SEQ ID NO: 21809 - protein, 477 aa, Artificial Sequence; identical to SEQ ID NO: 21549
  Description of Artificial Sequence: Synthetic polypeptide
  XENP020153 2A11_H1L2_Fab-ipilimumab_H3.4_L0.12 scFv-Fc Heavy Chain

SEQ ID NO: 21810 - protein, 118 aa, Artificial Sequence; identical to SEQ ID NO: 2461
  Description of Artificial Sequence: Synthetic polypeptide
  VH of XENP020153

SEQ ID NO: 21811 - protein, 108 aa, Artificial Sequence; identical to SEQ ID NO: 1517
  Description of Artificial Sequence: Synthetic polypeptide
  VL of XENP020153

SEQ ID NO: 21812 - protein, 231 aa, Artificial Sequence; identical to SEQ ID NO: 21532
  Description of Artificial Sequence: Synthetic polypeptide
  Fc chain of XENP020153

SEQ ID NO: 21813 - protein, 5 aa, Artificial Sequence
  Description of Artificial Sequence: Synthetic peptide
  XENP020153 vhCDR1
SYTMH

SEQ ID NO: 21814 - protein, 17 aa, Artificial Sequence
  Description of Artificial Sequence: Synthetic peptide
  XENP020153 vhCDR2
FISYDGNHKYYADSVKG

SEQ ID NO: 21815 - protein, 9 aa, Artificial Sequence
  Description of Artificial Sequence: Synthetic peptide
  XENP020153 vhCDR3
TGHLGPFDL

SEQ ID NO: 21816 - protein, 12 aa, Artificial Sequence
  Description of Artificial Sequence: Synthetic peptide
  XENP020153 vlCDR1
RASQSVGSSYLA

SEQ ID NO: 21817 - protein, 7 aa, Artificial Sequence
  Description of Artificial Sequence: Synthetic peptide
  XENP020153 vlCDR2
GAFSRAT

SEQ ID NO: 21818 - protein, 9 aa, Artificial Sequence
  Description of Artificial Sequence: Synthetic peptide
  XENP020153 vlCDR3
QQYGSSPWT

SEQ ID NO: 21819 - protein, 214 aa, Artificial Sequence; identical to SEQ ID NO: 17250
  Description of Artificial Sequence: Synthetic polypeptide
  XENP020153 2A11_H1L2_Fab-ipilimumab_H3.4_L0.12 Light Chain

SEQ ID NO: 21820 - protein, 107 aa, Artificial Sequence; identical to SEQ ID NO: 17251
  Description of Artificial Sequence: Synthetic polypeptide
  VL of XENP020153

SEQ ID NO: 21821 - protein, 11 aa, Artificial Sequence
  Description of Artificial Sequence: Synthetic peptide
  XENP020153 vlCDR1
QASQDIGNYLN

SEQ ID NO: 21822 - protein, 7 aa, Artificial Sequence
  Description of Artificial Sequence: Synthetic peptide
  XENP020153 vlCDR2
YTSRLHS

SEQ ID NO: 21823 - protein, 9 aa, Artificial Sequence
  Description of Artificial Sequence: Synthetic peptide
  XENP020153 vlCDR3
QQGNTLPYT

SEQ ID NO: 21824 - protein, 447 aa, Artificial Sequence; identical to SEQ ID NO: 17235
  Description of Artificial Sequence: Synthetic polypeptide
  XENP020440 2A11_H1L2_Fab-ipilimumab_H3.21_L0.124 Fab-Fc Heavy Chain

SEQ ID NO: 21825 - protein, 118 aa, Artificial Sequence; identical to SEQ ID NO: 17236
  Description of Artificial Sequence: Synthetic polypeptide
  VH of XENP020440

SEQ ID NO: 21826 - protein, 5 aa, Artificial Sequence
  Description of Artificial Sequence: Synthetic peptide
  XENP020440 vhCDR1
DYYMH

SEQ ID NO: 21827 - protein, 17 aa, Artificial Sequence
  Description of Artificial Sequence: Synthetic peptide
  XENP020440 vhCDR2
WIDPENGDTEYAPKFQG

SEQ ID NO: 21828 - protein, 9 aa, Artificial Sequence
  Description of Artificial Sequence: Synthetic peptide
  XENP020440 vhCDR3
RGVRQALDY

SEQ ID NO: 21829 - protein, 477 aa, Artificial Sequence; identical to SEQ ID NO: 21589
  Description of Artificial Sequence: Synthetic polypeptide
  XENP020440 2A11_H1L2_Fab-ipilimumab_H3.21_L0.124 scFv-Fc Heavy Chain

SEQ ID NO: 21830 - protein, 118 aa, Artificial Sequence; identical to SEQ ID NO: 2614
  Description of Artificial Sequence: Synthetic polypeptide
  VH of XENP020440

SEQ ID NO: 21831 - protein, 108 aa, Artificial Sequence; identical to SEQ ID NO: 2723
  Description of Artificial Sequence: Synthetic polypeptide
  VL of XENP020440

SEQ ID NO: 21832 - protein, 231 aa, Artificial Sequence; identical to SEQ ID NO: 21532
  Description of Artificial Sequence: Synthetic polypeptide
  Fc chain of XENP020440

SEQ ID NO: 21833 - protein, 5 aa, Artificial Sequence
  Description of Artificial Sequence: Synthetic peptide
  XENP020440 vhCDR1
SYTMH

SEQ ID NO: 21834 - protein, 17 aa, Artificial Sequence
  Description of Artificial Sequence: Synthetic peptide
  XENP020440 vhCDR2
FISYDGNTKYYADSVKG

SEQ ID NO: 21835 - protein, 9 aa, Artificial Sequence
  Description of Artificial Sequence: Synthetic peptide
  XENP020440 vhCDR3
GGLLGPFDL

SEQ ID NO: 21836 - protein, 12 aa, Artificial Sequence
  Description of Artificial Sequence: Synthetic peptide
  XENP020440 vlCDR1
RASQSVGSSYLA

SEQ ID NO: 21837 - protein, 7 aa, Artificial Sequence
  Description of Artificial Sequence: Synthetic peptide
  XENP020440 vlCDR2
GASSRAT

SEQ ID NO: 21838 - protein, 9 aa, Artificial Sequence
  Description of Artificial Sequence: Synthetic peptide
  XENP020440 vlCDR3
QQYGSSPWT

SEQ ID NO: 21839 - protein, 214 aa, Artificial Sequence; identical to SEQ ID NO: 17250
  Description of Artificial Sequence: Synthetic polypeptide
  XENP020440 2A11_H1L2_Fab-ipilimumab_H3.21_L0.124 Light Chain

SEQ ID NO: 21840 - protein, 107 aa, Artificial Sequence; identical to SEQ ID NO: 17251
  Description of Artificial Sequence: Synthetic polypeptide
  VL of XENP020440

SEQ ID NO: 21841 - protein, 11 aa, Artificial Sequence
  Description of Artificial Sequence: Synthetic peptide
  XENP020440 vlCDR1
QASQDIGNYLN

SEQ ID NO: 21842 - protein, 7 aa, Artificial Sequence
  Description of Artificial Sequence: Synthetic peptide
  XENP020440 vlCDR2
YTSRLHS

SEQ ID NO: 21843 - protein, 9 aa, Artificial Sequence
  Description of Artificial Sequence: Synthetic peptide
  XENP020440 vlCDR3
QQGNTLPYT

SEQ ID NO: 21844 - protein, 447 aa, Artificial Sequence; identical to SEQ ID NO: 17235
  Description of Artificial Sequence: Synthetic polypeptide
  XENP020441 2A11_H1L2_Fab-ipilimumab_H3.21_L0.129 Fab-Fc Heavy Chain

SEQ ID NO: 21845 - protein, 118 aa, Artificial Sequence; identical to SEQ ID NO: 17236
  Description of Artificial Sequence: Synthetic polypeptide
  VH of XENP020441

SEQ ID NO: 21846 - protein, 5 aa, Artificial Sequence
  Description of Artificial Sequence: Synthetic peptide
  XENP020441 vhCDR1
DYYMH

SEQ ID NO: 21847 - protein, 17 aa, Artificial Sequence
  Description of Artificial Sequence: Synthetic peptide
  XENP020441 vhCDR2
WIDPENGDTEYAPKFQG

SEQ ID NO: 21848 - protein, 9 aa, Artificial Sequence
  Description of Artificial Sequence: Synthetic peptide
  XENP020441 vhCDR3
RGVRQALDY

SEQ ID NO: 21849 - protein, 477 aa, Artificial Sequence; identical to SEQ ID NO: 21609
  Description of Artificial Sequence: Synthetic polypeptide
  XENP020441 2A11_H1L2_Fab-ipilimumab_H3.21_L0.129 scFv-Fc Heavy Chain

SEQ ID NO: 21850 - protein, 118 aa, Artificial Sequence; identical to SEQ ID NO: 2614
  Description of Artificial Sequence: Synthetic polypeptide
  VH of XENP020441

SEQ ID NO: 21851 - protein, 108 aa, Artificial Sequence; identical to SEQ ID NO: 2768
  Description of Artificial Sequence: Synthetic polypeptide
  VL of XENP020441

SEQ ID NO: 21852 - protein, 231 aa, Artificial Sequence; identical to SEQ ID NO: 21532
  Description of Artificial Sequence: Synthetic polypeptide
  Fc chain of XENP020441

SEQ ID NO: 21853 - protein, 5 aa, Artificial Sequence
  Description of Artificial Sequence: Synthetic peptide
  XENP020441 vhCDR1
SYTMH

SEQ ID NO: 21854 - protein, 17 aa, Artificial Sequence
  Description of Artificial Sequence: Synthetic peptide
  XENP020441 vhCDR2
FISYDGNTKYYADSVKG

SEQ ID NO: 21855 - protein, 9 aa, Artificial Sequence
  Description of Artificial Sequence: Synthetic peptide
  XENP020441 vhCDR3
GGLLGPFDL

SEQ ID NO: 21856 - protein, 12 aa, Artificial Sequence
  Description of Artificial Sequence: Synthetic peptide
  XENP020441 vlCDR1
RASQSVGSSYLA

SEQ ID NO: 21857 - protein, 7 aa, Artificial Sequence
  Description of Artificial Sequence: Synthetic peptide
  XENP020441 vlCDR2
GASSRAT

SEQ ID NO: 21858 - protein, 9 aa, Artificial Sequence
  Description of Artificial Sequence: Synthetic peptide
  XENP020441 vlCDR3
QQYGSSPWT

SEQ ID NO: 21859 - protein, 214 aa, Artificial Sequence; identical to SEQ ID NO: 17250
  Description of Artificial Sequence: Synthetic polypeptide
  XENP020441 2A11_H1L2_Fab-ipilimumab_H3.21_L0.129 Light Chain

SEQ ID NO: 21860 - protein, 107 aa, Artificial Sequence; identical to SEQ ID NO: 17251
  Description of Artificial Sequence: Synthetic polypeptide
  VL of XENP020441

SEQ ID NO: 21861 - protein, 11 aa, Artificial Sequence
  Description of Artificial Sequence: Synthetic peptide
  XENP020441 vlCDR1
QASQDIGNYLN

SEQ ID NO: 21862 - protein, 7 aa, Artificial Sequence
  Description of Artificial Sequence: Synthetic peptide
  XENP020441 vlCDR2
YTSRLHS

SEQ ID NO: 21863 - protein, 9 aa, Artificial Sequence
  Description of Artificial Sequence: Synthetic peptide
  XENP020441 vlCDR3
QQGNTLPYT

SEQ ID NO: 21864 - protein, 447 aa, Artificial Sequence; identical to SEQ ID NO: 17235
  Description of Artificial Sequence: Synthetic polypeptide
  XENP020442 2A11_H1L2_Fab-ipilimumab_H3.21_L0.132 Fab-Fc Heavy Chain

SEQ ID NO: 21865 - protein, 118 aa, Artificial Sequence; identical to SEQ ID NO: 17236
  Description of Artificial Sequence: Synthetic polypeptide
  VH of XENP020442

SEQ ID NO: 21866 - protein, 5 aa, Artificial Sequence
  Description of Artificial Sequence: Synthetic peptide
  XENP020442 vhCDR1
DYYMH

SEQ ID NO: 21867 - protein, 17 aa, Artificial Sequence
  Description of Artificial Sequence: Synthetic peptide
  XENP020442 vhCDR2
WIDPENGDTEYAPKFQG

SEQ ID NO: 21868 - protein, 9 aa, Artificial Sequence
  Description of Artificial Sequence: Synthetic peptide
  XENP020442 vhCDR3
RGVRQALDY

SEQ ID NO: 21869 - protein, 477 aa, Artificial Sequence; identical to SEQ ID NO: 21629
  Description of Artificial Sequence: Synthetic polypeptide
  XENP020442 2A11_H1L2_Fab-ipilimumab_H3.21_L0.132 scFv-Fc Heavy Chain

SEQ ID NO: 21870 - protein, 118 aa, Artificial Sequence; identical to SEQ ID NO: 2614
  Description of Artificial Sequence: Synthetic polypeptide
  VH of XENP020442

SEQ ID NO: 21871 - protein, 108 aa, Artificial Sequence; identical to SEQ ID NO: 2795
  Description of Artificial Sequence: Synthetic polypeptide
  VL of XENP020442

SEQ ID NO: 21872 - protein, 231 aa, Artificial Sequence; identical to SEQ ID NO: 21532
  Description of Artificial Sequence: Synthetic polypeptide
  Fc chain of XENP020442

SEQ ID NO: 21873 - protein, 5 aa, Artificial Sequence
  Description of Artificial Sequence: Synthetic peptide
  XENP020442 vhCDR1
SYTMH

SEQ ID NO: 21874 - protein, 17 aa, Artificial Sequence
  Description of Artificial Sequence: Synthetic peptide
  XENP020442 vhCDR2
FISYDGNTKYYADSVKG

SEQ ID NO: 21875 - protein, 9 aa, Artificial Sequence
  Description of Artificial Sequence: Synthetic peptide
  XENP020442 vhCDR3
GGLLGPFDL

SEQ ID NO: 21876 - protein, 12 aa, Artificial Sequence
  Description of Artificial Sequence: Synthetic peptide
  XENP020442 vlCDR1
RASQSVSSSYLA

SEQ ID NO: 21877 - protein, 7 aa, Artificial Sequence
  Description of Artificial Sequence: Synthetic peptide
  XENP020442 vlCDR2
GASSRAT

SEQ ID NO: 21878 - protein, 9 aa, Artificial Sequence
  Description of Artificial Sequence: Synthetic peptide
  XENP020442 vlCDR3
QQYGSSPWT

SEQ ID NO: 21879 - protein, 214 aa, Artificial Sequence; identical to SEQ ID NO: 17250
  Description of Artificial Sequence: Synthetic polypeptide
  XENP020442 2A11_H1L2_Fab-ipilimumab_H3.21_L0.132 Light Chain

SEQ ID NO: 21880 - protein, 107 aa, Artificial Sequence; identical to SEQ ID NO: 17251
  Description of Artificial Sequence: Synthetic polypeptide
  VL of XENP020442

SEQ ID NO: 21881 - protein, 11 aa, Artificial Sequence
  Description of Artificial Sequence: Synthetic peptide
  XENP020442 vlCDR1
QASQDIGNYLN

SEQ ID NO: 21882 - protein, 7 aa, Artificial Sequence
  Description of Artificial Sequence: Synthetic peptide
  XENP020442 vlCDR2
YTSRLHS

SEQ ID NO: 21883 - protein, 9 aa, Artificial Sequence
  Description of Artificial Sequence: Synthetic peptide
  XENP020442 vlCDR3
QQGNTLPYT

SEQ ID NO: 21884 - protein, 447 aa, Artificial Sequence; identical to SEQ ID NO: 17235
  Description of Artificial Sequence: Synthetic polypeptide
  XENP020443 2A11_H1L2_Fab-ipilimumab_H3.23_L0.124 Fab-Fc Heavy Chain

SEQ ID NO: 21885 - protein, 118 aa, Artificial Sequence; identical to SEQ ID NO: 17236
  Description of Artificial Sequence: Synthetic polypeptide
  VH of XENP020443

SEQ ID NO: 21886 - protein, 5 aa, Artificial Sequence
  Description of Artificial Sequence: Synthetic peptide
  XENP020443 vhCDR1
DYYMH

SEQ ID NO: 21887 - protein, 17 aa, Artificial Sequence
  Description of Artificial Sequence: Synthetic peptide
  XENP020443 vhCDR2
WIDPENGDTEYAPKFQG

SEQ ID NO: 21888 - protein, 9 aa, Artificial Sequence
  Description of Artificial Sequence: Synthetic peptide
  XENP020443 vhCDR3
RGVRQALDY

SEQ ID NO: 21889 - protein, 477 aa, Artificial Sequence; identical to SEQ ID NO: 21649
  Description of Artificial Sequence: Synthetic polypeptide
  XENP020443 2A11_H1L2_Fab-ipilimumab_H3.23_L0.124 scFv-Fc Heavy Chain

SEQ ID NO: 21890 - protein, 118 aa, Artificial Sequence; identical to SEQ ID NO: 2632
  Description of Artificial Sequence: Synthetic polypeptide
  VH of XENP020443

SEQ ID NO: 21891 - protein, 108 aa, Artificial Sequence; identical to SEQ ID NO: 2723
  Description of Artificial Sequence: Synthetic polypeptide
  VL of XENP020443

SEQ ID NO: 21892 - protein, 231 aa, Artificial Sequence; identical to SEQ ID NO: 21532
  Description of Artificial Sequence: Synthetic polypeptide
  Fc chain of XENP020443

SEQ ID NO: 21893 - protein, 5 aa, Artificial Sequence
  Description of Artificial Sequence: Synthetic peptide
  XENP020443 vhCDR1
SYTMH

SEQ ID NO: 21894 - protein, 17 aa, Artificial Sequence
  Description of Artificial Sequence: Synthetic peptide
  XENP020443 vhCDR2
FISYDGNYKYYADSVKG

SEQ ID NO: 21895 - protein, 9 aa, Artificial Sequence
  Description of Artificial Sequence: Synthetic peptide
  XENP020443 vhCDR3
GGHLGPFDL

SEQ ID NO: 21896 - protein, 12 aa, Artificial Sequence
  Description of Artificial Sequence: Synthetic peptide
  XENP020443 vlCDR1
RASQSVGSSYLA

SEQ ID NO: 21897 - protein, 7 aa, Artificial Sequence
  Description of Artificial Sequence: Synthetic peptide
  XENP020443 vlCDR2
GASSRAT

SEQ ID NO: 21898 - protein, 9 aa, Artificial Sequence
  Description of Artificial Sequence: Synthetic peptide
  XENP020443 vlCDR3
QQYGSSPWT

SEQ ID NO: 21899 - protein, 214 aa, Artificial Sequence; identical to SEQ ID NO: 17250
  Description of Artificial Sequence: Synthetic polypeptide
  XENP020443 2A11_H1L2_Fab-ipilimumab_H3.23_L0.124 Light Chain

SEQ ID NO: 21900 - protein, 107 aa, Artificial Sequence; identical to SEQ ID NO: 17251
  Description of Artificial Sequence: Synthetic polypeptide
  VL of XENP020443

SEQ ID NO: 21901 - protein, 11 aa, Artificial Sequence
  Description of Artificial Sequence: Synthetic peptide
  XENP020443 vlCDR1
QASQDIGNYLN

SEQ ID NO: 21902 - protein, 7 aa, Artificial Sequence
  Description of Artificial Sequence: Synthetic peptide
  XENP020443 vlCDR2
YTSRLHS

SEQ ID NO: 21903 - protein, 9 aa, Artificial Sequence
  Description of Artificial Sequence: Synthetic peptide
  XENP020443 vlCDR3
QQGNTLPYT

SEQ ID NO: 21904 - protein, 447 aa, Artificial Sequence; identical to SEQ ID NO: 17235
  Description of Artificial Sequence: Synthetic polypeptide
  XENP020444 2A11_H1L2_Fab-ipilimumab_H3.23_L0.129 Fab-Fc Heavy Chain

SEQ ID NO: 21905 - protein, 118 aa, Artificial Sequence; identical to SEQ ID NO: 17236
  Description of Artificial Sequence: Synthetic polypeptide
  VH of XENP020444

SEQ ID NO: 21906 - protein, 5 aa, Artificial Sequence
  Description of Artificial Sequence: Synthetic peptide
  XENP020444 vhCDR1
DYYMH

SEQ ID NO: 21907 - protein, 17 aa, Artificial Sequence
  Description of Artificial Sequence: Synthetic peptide
  XENP020444 vhCDR2
WIDPENGDTEYAPKFQG

SEQ ID NO: 21908 - protein, 9 aa, Artificial Sequence
  Description of Artificial Sequence: Synthetic peptide
  XENP020444 vhCDR3
RGVRQALDY

SEQ ID NO: 21909 - protein, 477 aa, Artificial Sequence; identical to SEQ ID NO: 21669
  Description of Artificial Sequence: Synthetic polypeptide
  XENP020444 2A11_H1L2_Fab-ipilimumab_H3.23_L0.129 scFv-Fc Heavy Chain

SEQ ID NO: 21910 - protein, 118 aa, Artificial Sequence; identical to SEQ ID NO: 2632
  Description of Artificial Sequence: Synthetic polypeptide
  VH of XENP020444

SEQ ID NO: 21911 - protein, 108 aa, Artificial Sequence; identical to SEQ ID NO: 2768
  Description of Artificial Sequence: Synthetic polypeptide
  VL of XENP020444

SEQ ID NO: 21912 - protein, 231 aa, Artificial Sequence; identical to SEQ ID NO: 21532
  Description of Artificial Sequence: Synthetic polypeptide
  Fc chain of XENP020444

SEQ ID NO: 21913 - protein, 5 aa, Artificial Sequence
  Description of Artificial Sequence: Synthetic peptide
  XENP020444 vhCDR1
SYTMH

SEQ ID NO: 21914 - protein, 17 aa, Artificial Sequence
  Description of Artificial Sequence: Synthetic peptide
  XENP020444 vhCDR2
FISYDGNYKYYADSVKG

SEQ ID NO: 21915 - protein, 9 aa, Artificial Sequence
  Description of Artificial Sequence: Synthetic peptide
  XENP020444 vhCDR3
GGHLGPFDL

SEQ ID NO: 21916 - protein, 12 aa, Artificial Sequence
  Description of Artificial Sequence: Synthetic peptide
  XENP020444 vlCDR1
RASQSVGSSYLA

SEQ ID NO: 21917 - protein, 7 aa, Artificial Sequence
  Description of Artificial Sequence: Synthetic peptide
  XENP020444 vlCDR2
GASSRAT

SEQ ID NO: 21918 - protein, 9 aa, Artificial Sequence
  Description of Artificial Sequence: Synthetic peptide
  XENP020444 vlCDR3
QQYGSSPWT

SEQ ID NO: 21919 - protein, 214 aa, Artificial Sequence; identical to SEQ ID NO: 17250
  Description of Artificial Sequence: Synthetic polypeptide
  XENP020444 2A11_H1L2_Fab-ipilimumab_H3.23_L0.129 Light Chain

SEQ ID NO: 21920 - protein, 107 aa, Artificial Sequence; identical to SEQ ID NO: 17251
  Description of Artificial Sequence: Synthetic polypeptide
  VL of XENP020444

SEQ ID NO: 21921 - protein, 11 aa, Artificial Sequence
  Description of Artificial Sequence: Synthetic peptide
  XENP020444 vlCDR1
QASQDIGNYLN

SEQ ID NO: 21922 - protein, 7 aa, Artificial Sequence
  Description of Artificial Sequence: Synthetic peptide
  XENP020444 vlCDR2
YTSRLHS

SEQ ID NO: 21923 - protein, 9 aa, Artificial Sequence
  Description of Artificial Sequence: Synthetic peptide
  XENP020444 vlCDR3
QQGNTLPYT

SEQ ID NO: 21924 - protein, 447 aa, Artificial Sequence; identical to SEQ ID NO: 17235
  Description of Artificial Sequence: Synthetic polypeptide
  XENP020445 2A11_H1L2_Fab-ipilimumab_H3.23_L0.132 Fab-Fc Heavy Chain

SEQ ID NO: 21925 - protein, 118 aa, Artificial Sequence; identical to SEQ ID NO: 17236
  Description of Artificial Sequence: Synthetic polypeptide
  VH of XENP020445

SEQ ID NO: 21926 - protein, 5 aa, Artificial Sequence
  Description of Artificial Sequence: Synthetic peptide
  XENP020445 vhCDR1
DYYMH

SEQ ID NO: 21927 - protein, 17 aa, Artificial Sequence
  Description of Artificial Sequence: Synthetic peptide
  XENP020445 vhCDR2
WIDPENGDTEYAPKFQG

SEQ ID NO: 21928 - protein, 9 aa, Artificial Sequence
  Description of Artificial Sequence: Synthetic peptide
  XENP020445 vhCDR3
RGVRQALDY

SEQ ID NO: 21929 - protein, 477 aa, Artificial Sequence; identical to SEQ ID NO: 21689
  Description of Artificial Sequence: Synthetic polypeptide
  XENP020445 2A11_H1L2_Fab-ipilimumab_H3.23_L0.132 scFv-Fc Heavy Chain

SEQ ID NO: 21930 - protein, 118 aa, Artificial Sequence; identical to SEQ ID NO: 2632
  Description of Artificial Sequence: Synthetic polypeptide
  VH of XENP020445

SEQ ID NO: 21931 - protein, 108 aa, Artificial Sequence; identical to SEQ ID NO: 2795
  Description of Artificial Sequence: Synthetic polypeptide
  VL of XENP020445

SEQ ID NO: 21932 - protein, 231 aa, Artificial Sequence; identical to SEQ ID NO: 21532
  Description of Artificial Sequence: Synthetic polypeptide
  Fc chain of XENP020445

SEQ ID NO: 21933 - protein, 5 aa, Artificial Sequence
  Description of Artificial Sequence: Synthetic peptide
  XENP020445 vhCDR1
SYTMH

SEQ ID NO: 21934 - protein, 17 aa, Artificial Sequence
  Description of Artificial Sequence: Synthetic peptide
  XENP020445 vhCDR2
FISYDGNYKYYADSVKG

SEQ ID NO: 21935 - protein, 9 aa, Artificial Sequence
  Description of Artificial Sequence: Synthetic peptide
  XENP020445 vhCDR3
GGHLGPFDL

SEQ ID NO: 21936 - protein, 12 aa, Artificial Sequence
  Description of Artificial Sequence: Synthetic peptide
  XENP020445 vlCDR1
RASQSVSSSYLA

SEQ ID NO: 21937 - protein, 7 aa, Artificial Sequence
  Description of Artificial Sequence: Synthetic peptide
  XENP020445 vlCDR2
GASSRAT

SEQ ID NO: 21938 - protein, 9 aa, Artificial Sequence
  Description of Artificial Sequence: Synthetic peptide
  XENP020445 vlCDR3
QQYGSSPWT

SEQ ID NO: 21939 - protein, 214 aa, Artificial Sequence; identical to SEQ ID NO: 17250
  Description of Artificial Sequence: Synthetic polypeptide
  XENP020445 2A11_H1L2_Fab-ipilimumab_H3.23_L0.132 Light Chain

SEQ ID NO: 21940 - protein, 107 aa, Artificial Sequence; identical to SEQ ID NO: 17251
  Description of Artificial Sequence: Synthetic polypeptide
  VL of XENP020445

SEQ ID NO: 21941 - protein, 11 aa, Artificial Sequence
  Description of Artificial Sequence: Synthetic peptide
  XENP020445 vlCDR1
QASQDIGNYLN

SEQ ID NO: 21942 - protein, 7 aa, Artificial Sequence
  Description of Artificial Sequence: Synthetic peptide
  XENP020445 vlCDR2
YTSRLHS

SEQ ID NO: 21943 - protein, 9 aa, Artificial Sequence
  Description of Artificial Sequence: Synthetic peptide
  XENP020445 vlCDR3
QQGNTLPYT

SEQ ID NO: 21944 - protein, 447 aa, Artificial Sequence; identical to SEQ ID NO: 17235
  Description of Artificial Sequence: Synthetic polypeptide
  XENP020446 2A11_H1L2_Fab-ipilimumab_H3.25_L0.124 Fab-Fc Heavy Chain

SEQ ID NO: 21945 - protein, 118 aa, Artificial Sequence; identical to SEQ ID NO: 17236
  Description of Artificial Sequence: Synthetic polypeptide
  VH of XENP020446

SEQ ID NO: 21946 - protein, 5 aa, Artificial Sequence
  Description of Artificial Sequence: Synthetic peptide
  XENP020446 vhCDR1
DYYMH

SEQ ID NO: 21947 - protein, 17 aa, Artificial Sequence
  Description of Artificial Sequence: Synthetic peptide
  XENP020446 vhCDR2
WIDPENGDTEYAPKFQG

SEQ ID NO: 21948 - protein, 9 aa, Artificial Sequence
  Description of Artificial Sequence: Synthetic peptide
  XENP020446 vhCDR3
RGVRQALDY

SEQ ID NO: 21949 - protein, 477 aa, Artificial Sequence; identical to SEQ ID NO: 21709
  Description of Artificial Sequence: Synthetic polypeptide
  XENP020446 2A11_H1L2_Fab-ipilimumab_H3.25_L0.124 scFv-Fc Heavy Chain

SEQ ID NO: 21950 - protein, 118 aa, Artificial Sequence; identical to SEQ ID NO: 2650
  Description of Artificial Sequence: Synthetic polypeptide
  VH of XENP020446

SEQ ID NO: 21951 - protein, 108 aa, Artificial Sequence; identical to SEQ ID NO: 2723
  Description of Artificial Sequence: Synthetic polypeptide
  VL of XENP020446

SEQ ID NO: 21952 - protein, 231 aa, Artificial Sequence; identical to SEQ ID NO: 21532
  Description of Artificial Sequence: Synthetic polypeptide
  Fc chain of XENP020446

SEQ ID NO: 21953 - protein, 5 aa, Artificial Sequence
  Description of Artificial Sequence: Synthetic peptide
  XENP020446 vhCDR1
SYTMH

SEQ ID NO: 21954 - protein, 17 aa, Artificial Sequence
  Description of Artificial Sequence: Synthetic peptide
  XENP020446 vhCDR2
FISYDGNYKYYADSVKG

SEQ ID NO: 21955 - protein, 9 aa, Artificial Sequence
  Description of Artificial Sequence: Synthetic peptide
  XENP020446 vhCDR3
GGLLGPFDL

SEQ ID NO: 21956 - protein, 12 aa, Artificial Sequence
  Description of Artificial Sequence: Synthetic peptide
  XENP020446 vlCDR1
RASQSVGSSYLA

SEQ ID NO: 21957 - protein, 7 aa, Artificial Sequence
  Description of Artificial Sequence: Synthetic peptide
  XENP020446 vlCDR2
GASSRAT

SEQ ID NO: 21958 - protein, 9 aa, Artificial Sequence
  Description of Artificial Sequence: Synthetic peptide
  XENP020446 vlCDR3
QQYGSSPWT

SEQ ID NO: 21959 - protein, 214 aa, Artificial Sequence; identical to SEQ ID NO: 17250
  Description of Artificial Sequence: Synthetic polypeptide
  XENP020446 2A11_H1L2_Fab-ipilimumab_H3.25_L0.124 Light Chain

SEQ ID NO: 21960 - protein, 107 aa, Artificial Sequence; identical to SEQ ID NO: 17251
  Description of Artificial Sequence: Synthetic polypeptide
  VL of XENP020446

SEQ ID NO: 21961 - protein, 11 aa, Artificial Sequence
  Description of Artificial Sequence: Synthetic peptide
  XENP020446 vlCDR1
QASQDIGNYLN

SEQ ID NO: 21962 - protein, 7 aa, Artificial Sequence
  Description of Artificial Sequence: Synthetic peptide
  XENP020446 vlCDR2
YTSRLHS

SEQ ID NO: 21963 - protein, 9 aa, Artificial Sequence
  Description of Artificial Sequence: Synthetic peptide
  XENP020446 vlCDR3
QQGNTLPYT

SEQ ID NO: 21964 - protein, 447 aa, Artificial Sequence; identical to SEQ ID NO: 17235
  Description of Artificial Sequence: Synthetic polypeptide
  XENP020447 2A11_H1L2_Fab-ipilimumab_H3.25_L0.129 Fab-Fc Heavy Chain

SEQ ID NO: 21965 - protein, 118 aa, Artificial Sequence; identical to SEQ ID NO: 17236
  Description of Artificial Sequence: Synthetic polypeptide
  VH of XENP020447

SEQ ID NO: 21966 - protein, 5 aa, Artificial Sequence
  Description of Artificial Sequence: Synthetic peptide
  XENP020447 vhCDR1
DYYMH

SEQ ID NO: 21967 - protein, 17 aa, Artificial Sequence
  Description of Artificial Sequence: Synthetic peptide
  XENP020447 vhCDR2
WIDPENGDTEYAPKFQG

SEQ ID NO: 21968 - protein, 9 aa, Artificial Sequence
  Description of Artificial Sequence: Synthetic peptide
  XENP020447 vhCDR3
RGVRQALDY

SEQ ID NO: 21969 - protein, 477 aa, Artificial Sequence; identical to SEQ ID NO: 21729
  Description of Artificial Sequence: Synthetic polypeptide
  XENP020447 2A11_H1L2_Fab-ipilimumab_H3.25_L0.129 scFv-Fc Heavy Chain

SEQ ID NO: 21970 - protein, 118 aa, Artificial Sequence; identical to SEQ ID NO: 2650
  Description of Artificial Sequence: Synthetic polypeptide
  VH of XENP020447

SEQ ID NO: 21971 - protein, 108 aa, Artificial Sequence; identical to SEQ ID NO: 2768
  Description of Artificial Sequence: Synthetic polypeptide
  VL of XENP020447

SEQ ID NO: 21972 - protein, 231 aa, Artificial Sequence; identical to SEQ ID NO: 21532
  Description of Artificial Sequence: Synthetic polypeptide
  Fc chain of XENP020447

SEQ ID NO: 21973 - protein, 5 aa, Artificial Sequence
  Description of Artificial Sequence: Synthetic peptide
  XENP020447 vhCDR1
SYTMH

SEQ ID NO: 21974 - protein, 17 aa, Artificial Sequence
  Description of Artificial Sequence: Synthetic peptide
  XENP020447 vhCDR2
FISYDGNYKYYADSVKG

SEQ ID NO: 21975 - protein, 9 aa, Artificial Sequence
  Description of Artificial Sequence: Synthetic peptide
  XENP020447 vhCDR3
GGLLGPFDL

SEQ ID NO: 21976 - protein, 12 aa, Artificial Sequence
  Description of Artificial Sequence: Synthetic peptide
  XENP020447 vlCDR1
RASQSVGSSYLA

SEQ ID NO: 21977 - protein, 7 aa, Artificial Sequence
  Description of Artificial Sequence: Synthetic peptide
  XENP020447 vlCDR2
GASSRAT

SEQ ID NO: 21978 - protein, 9 aa, Artificial Sequence
  Description of Artificial Sequence: Synthetic peptide
  XENP020447 vlCDR3
QQYGSSPWT

SEQ ID NO: 21979 - protein, 214 aa, Artificial Sequence; identical to SEQ ID NO: 17250
  Description of Artificial Sequence: Synthetic polypeptide
  XENP020447 2A11_H1L2_Fab-ipilimumab_H3.25_L0.129 Light Chain

SEQ ID NO: 21980 - protein, 107 aa, Artificial Sequence; identical to SEQ ID NO: 17251
  Description of Artificial Sequence: Synthetic polypeptide
  VL of XENP020447

SEQ ID NO: 21981 - protein, 11 aa, Artificial Sequence
  Description of Artificial Sequence: Synthetic peptide
  XENP020447 vlCDR1
QASQDIGNYLN

SEQ ID NO: 21982 - protein, 7 aa, Artificial Sequence
  Description of Artificial Sequence: Synthetic peptide
  XENP020447 vlCDR2
YTSRLHS

SEQ ID NO: 21983 - protein, 9 aa, Artificial Sequence
  Description of Artificial Sequence: Synthetic peptide
  XENP020447 vlCDR3
QQGNTLPYT

SEQ ID NO: 21984 - protein, 447 aa, Artificial Sequence; identical to SEQ ID NO: 17235
  Description of Artificial Sequence: Synthetic polypeptide
  XENP020448 2A11_H1L2_Fab-ipilimumab_H3.25_L0.132 Fab-Fc Heavy Chain

SEQ ID NO: 21985 - protein, 118 aa, Artificial Sequence; identical to SEQ ID NO: 17236
  Description of Artificial Sequence: Synthetic polypeptide
  VH of XENP020448

SEQ ID NO: 21986 - protein, 5 aa, Artificial Sequence
  Description of Artificial Sequence: Synthetic peptide
  XENP020448 vhCDR1
DYYMH

SEQ ID NO: 21987 - protein, 17 aa, Artificial Sequence
  Description of Artificial Sequence: Synthetic peptide
  XENP020448 vhCDR2
WIDPENGDTEYAPKFQG

SEQ ID NO: 21988 - protein, 9 aa, Artificial Sequence
  Description of Artificial Sequence: Synthetic peptide
  XENP020448 vhCDR3
RGVRQALDY

SEQ ID NO: 21989 - protein, 477 aa, Artificial Sequence; identical to SEQ ID NO: 21749
  Description of Artificial Sequence: Synthetic polypeptide
  XENP020448 2A11_H1L2_Fab-ipilimumab_H3.25_L0.132 scFv-Fc Heavy Chain

SEQ ID NO: 21990 - protein, 118 aa, Artificial Sequence; identical to SEQ ID NO: 2650
  Description of Artificial Sequence: Synthetic polypeptide
  VH of XENP020448

SEQ ID NO: 21991 - protein, 108 aa, Artificial Sequence; identical to SEQ ID NO: 2795
  Description of Artificial Sequence: Synthetic polypeptide
  VL of XENP020448

SEQ ID NO: 21992 - protein, 231 aa, Artificial Sequence; identical to SEQ ID NO: 21532
  Description of Artificial Sequence: Synthetic polypeptide
  Fc chain of XENP020448

SEQ ID NO: 21993 - protein, 5 aa, Artificial Sequence
  Description of Artificial Sequence: Synthetic peptide
  XENP020448 vhCDR1
SYTMH

SEQ ID NO: 21994 - protein, 17 aa, Artificial Sequence
  Description of Artificial Sequence: Synthetic peptide
  XENP020448 vhCDR2
FISYDGNYKYYADSVKG

SEQ ID NO: 21995 - protein, 9 aa, Artificial Sequence
  Description of Artificial Sequence: Synthetic peptide
  XENP020448 vhCDR3
GGLLGPFDL

SEQ ID NO: 21996 - protein, 12 aa, Artificial Sequence
  Description of Artificial Sequence: Synthetic peptide
  XENP020448 vlCDR1
RASQSVSSSYLA

SEQ ID NO: 21997 - protein, 7 aa, Artificial Sequence
  Description of Artificial Sequence: Synthetic peptide
  XENP020448 vlCDR2
GASSRAT

SEQ ID NO: 21998 - protein, 9 aa, Artificial Sequence
  Description of Artificial Sequence: Synthetic peptide
  XENP020448 vlCDR3
QQYGSSPWT

SEQ ID NO: 21999 - protein, 214 aa, Artificial Sequence; identical to SEQ ID NO: 17250
  Description of Artificial Sequence: Synthetic polypeptide
  XENP020448 2A11_H1L2_Fab-ipilimumab_H3.25_L0.132 Light Chain

SEQ ID NO: 22000 - protein, 107 aa, Artificial Sequence; identical to SEQ ID NO: 17251
  Description of Artificial Sequence: Synthetic polypeptide
  VL of XENP020448

SEQ ID NO: 22001 - protein, 11 aa, Artificial Sequence
  Description of Artificial Sequence: Synthetic peptide
  XENP020448 vlCDR1
QASQDIGNYLN

SEQ ID NO: 22002 - protein, 7 aa, Artificial Sequence
  Description of Artificial Sequence: Synthetic peptide
  XENP020448 vlCDR2
YTSRLHS

SEQ ID NO: 22003 - protein, 9 aa, Artificial Sequence
  Description of Artificial Sequence: Synthetic peptide
  XENP020448 vlCDR3
QQGNTLPYT

SEQ ID NO: 22004 - protein, 447 aa, Artificial Sequence; identical to SEQ ID NO: 21564
  Description of Artificial Sequence: Synthetic polypeptide
  XENP020721 2A11_H1L2_Fab-ipilimumab_H3.4_L0.12 Fab-Fc Heavy Chain

SEQ ID NO: 22005 - protein, 118 aa, Artificial Sequence; identical to SEQ ID NO: 17236
  Description of Artificial Sequence: Synthetic polypeptide
  VH of XENP020721

SEQ ID NO: 22006 - protein, 5 aa, Artificial Sequence
  Description of Artificial Sequence: Synthetic peptide
  XENP020721 vhCDR1
DYYMH

SEQ ID NO: 22007 - protein, 17 aa, Artificial Sequence
  Description of Artificial Sequence: Synthetic peptide
  XENP020721 vhCDR2
WIDPENGDTEYAPKFQG

SEQ ID NO: 22008 - protein, 9 aa, Artificial Sequence
  Description of Artificial Sequence: Synthetic peptide
  XENP020721 vhCDR3
RGVRQALDY

SEQ ID NO: 22009 - protein, 477 aa, Artificial Sequence; identical to SEQ ID NO: 21569
  Description of Artificial Sequence: Synthetic polypeptide
  XENP020721 2A11_H1L2_Fab-ipilimumab_H3.4_L0.12 scFv-Fc Heavy Chain

SEQ ID NO: 22010 - protein, 118 aa, Artificial Sequence; identical to SEQ ID NO: 2461
  Description of Artificial Sequence: Synthetic polypeptide
  VH of XENP020721

SEQ ID NO: 22011 - protein, 108 aa, Artificial Sequence; identical to SEQ ID NO: 1517
  Description of Artificial Sequence: Synthetic polypeptide
  VL of XENP020721

SEQ ID NO: 22012 - protein, 231 aa, Artificial Sequence; identical to SEQ ID NO: 21572
  Description of Artificial Sequence: Synthetic polypeptide
  Fc chain of XENP020721

SEQ ID NO: 22013 - protein, 5 aa, Artificial Sequence
  Description of Artificial Sequence: Synthetic peptide
  XENP020721 vhCDR1
SYTMH

SEQ ID NO: 22014 - protein, 17 aa, Artificial Sequence
  Description of Artificial Sequence: Synthetic peptide
  XENP020721 vhCDR2
FISYDGNHKYYADSVKG

SEQ ID NO: 22015 - protein, 9 aa, Artificial Sequence
  Description of Artificial Sequence: Synthetic peptide
  XENP020721 vhCDR3
TGHLGPFDL

SEQ ID NO: 22016 - protein, 12 aa, Artificial Sequence
  Description of Artificial Sequence: Synthetic peptide
  XENP020721 vlCDR1
RASQSVGSSYLA

SEQ ID NO: 22017 - protein, 7 aa, Artificial Sequence
  Description of Artificial Sequence: Synthetic peptide
  XENP020721 vlCDR2
GAFSRAT

SEQ ID NO: 22018 - protein, 9 aa, Artificial Sequence
  Description of Artificial Sequence: Synthetic peptide
  XENP020721 vlCDR3
QQYGSSPWT

SEQ ID NO: 22019 - protein, 214 aa, Artificial Sequence; identical to SEQ ID NO: 17250
  Description of Artificial Sequence: Synthetic polypeptide
  XENP020721 2A11_H1L2_Fab-ipilimumab_H3.4_L0.12 Light Chain

SEQ ID NO: 22020 - protein, 107 aa, Artificial Sequence; identical to SEQ ID NO: 17251
  Description of Artificial Sequence: Synthetic polypeptide
  VL of XENP020721

SEQ ID NO: 22021 - protein, 11 aa, Artificial Sequence
  Description of Artificial Sequence: Synthetic peptide
  XENP020721 vlCDR1
QASQDIGNYLN

SEQ ID NO: 22022 - protein, 7 aa, Artificial Sequence
  Description of Artificial Sequence: Synthetic peptide
  XENP020721 vlCDR2
YTSRLHS

SEQ ID NO: 22023 - protein, 9 aa, Artificial Sequence
  Description of Artificial Sequence: Synthetic peptide
  XENP020721 vlCDR3
QQGNTLPYT

SEQ ID NO: 22024 - protein, 447 aa, Artificial Sequence; identical to SEQ ID NO: 17235
  Description of Artificial Sequence: Synthetic polypeptide
  XENP021859 2A11_H1_L2.47_Fab-ipilimumab_H3.23_L0.129 Fab-Fc Heavy Chain

SEQ ID NO: 22025 - protein, 118 aa, Artificial Sequence; identical to SEQ ID NO: 17236
  Description of Artificial Sequence: Synthetic polypeptide
  VH of XENP021859

SEQ ID NO: 22026 - protein, 5 aa, Artificial Sequence
  Description of Artificial Sequence: Synthetic peptide
  XENP021859 vhCDR1
DYYMH

SEQ ID NO: 22027 - protein, 17 aa, Artificial Sequence
  Description of Artificial Sequence: Synthetic peptide
  XENP021859 vhCDR2
WIDPENGDTEYAPKFQG

SEQ ID NO: 22028 - protein, 9 aa, Artificial Sequence
  Description of Artificial Sequence: Synthetic peptide
  XENP021859 vhCDR3
RGVRQALDY

SEQ ID NO: 22029 - protein, 477 aa, Artificial Sequence; identical to SEQ ID NO: 21669
  Description of Artificial Sequence: Synthetic polypeptide
  XENP021859 2A11_H1_L2.47_Fab-ipilimumab_H3.23_L0.129 scFv-Fc Heavy Chain

SEQ ID NO: 22030 - protein, 118 aa, Artificial Sequence; identical to SEQ ID NO: 2632
  Description of Artificial Sequence: Synthetic polypeptide
  VH of XENP021859

SEQ ID NO: 22031 - protein, 108 aa, Artificial Sequence; identical to SEQ ID NO: 2768
  Description of Artificial Sequence: Synthetic polypeptide
  VL of XENP021859

SEQ ID NO: 22032 - protein, 231 aa, Artificial Sequence; identical to SEQ ID NO: 21532
  Description of Artificial Sequence: Synthetic polypeptide
  Fc chain of XENP021859

SEQ ID NO: 22033 - protein, 5 aa, Artificial Sequence
  Description of Artificial Sequence: Synthetic peptide
  XENP021859 vhCDR1
SYTMH

SEQ ID NO: 22034 - protein, 17 aa, Artificial Sequence
  Description of Artificial Sequence: Synthetic peptide
  XENP021859 vhCDR2
FISYDGNYKYYADSVKG

SEQ ID NO: 22035 - protein, 9 aa, Artificial Sequence
  Description of Artificial Sequence: Synthetic peptide
  XENP021859 vhCDR3
GGHLGPFDL

SEQ ID NO: 22036 - protein, 12 aa, Artificial Sequence
  Description of Artificial Sequence: Synthetic peptide
  XENP021859 vlCDR1
RASQSVGSSYLA

SEQ ID NO: 22037 - protein, 7 aa, Artificial Sequence
  Description of Artificial Sequence: Synthetic peptide
  XENP021859 vlCDR2
GASSRAT

SEQ ID NO: 22038 - protein, 9 aa, Artificial Sequence
  Description of Artificial Sequence: Synthetic peptide
  XENP021859 vlCDR3
QQYGSSPWT

SEQ ID NO: 22039 - protein, 214 aa, Artificial Sequence
  Description of Artificial Sequence: Synthetic polypeptide
  XENP021859 2A11_H1_L2.47_Fab-ipilimumab_H3.23_L0.129 Light Chain
DIQMTQSPAFLSVTPGEKVTITCQASQDIGNYLNWFQQKPDQTVKLLIYYTSHLHSGVPSRFSGSGSGTDYTFTISSLEAEDAATYFCQQGNTLPYTFGGGTKVEIKRTVAAPSVFIFPPSDEQLKSGTASVVCLLNNFYPREAKVQWKVDNALQSGNSQESVTEQDSKDSTYSLSSTLTLSKADYEKHKVYACEVTHQGLSSPVTKSFNRGEC

SEQ ID NO: 22040 - protein, 107 aa, Artificial Sequence
  Description of Artificial Sequence: Synthetic polypeptide
  VL of XENP021859
DIQMTQSPAFLSVTPGEKVTITCQASQDIGNYLNWFQQKPDQTVKLLIYYTSHLHSGVPSRFSGSGSGTDYTFTISSLEAEDAATYFCQQGNTLPYTFGGGTKVEIK

SEQ ID NO: 22041 - protein, 11 aa, Artificial Sequence
  Description of Artificial Sequence: Synthetic peptide
  XENP021859 vlCDR1
QASQDIGNYLN

SEQ ID NO: 22042 - protein, 7 aa, Artificial Sequence
  Description of Artificial Sequence: Synthetic peptide
  XENP021859 vlCDR2
YTSHLHS

SEQ ID NO: 22043 - protein, 9 aa, Artificial Sequence
  Description of Artificial Sequence: Synthetic peptide
  XENP021859 vlCDR3
QQGNTLPYT

SEQ ID NO: 22044 - protein, 447 aa, Artificial Sequence; identical to SEQ ID NO: 17235
  Description of Artificial Sequence: Synthetic polypeptide
  XENP021860 2A11_H1_L2.50_Fab-ipilimumab_H3.23_L0.129 Fab-Fc Heavy Chain

SEQ ID NO: 22045 - protein, 118 aa, Artificial Sequence; identical to SEQ ID NO: 17236
  Description of Artificial Sequence: Synthetic polypeptide
  VH of XENP021860

SEQ ID NO: 22046 - protein, 5 aa, Artificial Sequence
  Description of Artificial Sequence: Synthetic peptide
  XENP021860 vhCDR1
DYYMH

SEQ ID NO: 22047 - protein, 17 aa, Artificial Sequence
  Description of Artificial Sequence: Synthetic peptide
  XENP021860 vhCDR2
WIDPENGDTEYAPKFQG

SEQ ID NO: 22048 - protein, 9 aa, Artificial Sequence
  Description of Artificial Sequence: Synthetic peptide
  XENP021860 vhCDR3
RGVRQALDY

SEQ ID NO: 22049 - protein, 477 aa, Artificial Sequence; identical to SEQ ID NO: 21669
  Description of Artificial Sequence: Synthetic polypeptide
  XENP021860 2A11_H1_L2.50_Fab-ipilimumab_H3.23_L0.129 scFv-Fc Heavy Chain

SEQ ID NO: 22050 - protein, 118 aa, Artificial Sequence; identical to SEQ ID NO: 2632
  Description of Artificial Sequence: Synthetic polypeptide
  VH of XENP021860

SEQ ID NO: 22051 - protein, 108 aa, Artificial Sequence; identical to SEQ ID NO: 2768
  Description of Artificial Sequence: Synthetic polypeptide
  VL of XENP021860

SEQ ID NO: 22052 - protein, 231 aa, Artificial Sequence; identical to SEQ ID NO: 21532
  Description of Artificial Sequence: Synthetic polypeptide
  Fc chain of XENP021860

SEQ ID NO: 22053 - protein, 5 aa, Artificial Sequence
  Description of Artificial Sequence: Synthetic peptide
  XENP021860 vhCDR1
SYTMH

SEQ ID NO: 22054 - protein, 17 aa, Artificial Sequence
  Description of Artificial Sequence: Synthetic peptide
  XENP021860 vhCDR2
FISYDGNYKYYADSVKG

SEQ ID NO: 22055 - protein, 9 aa, Artificial Sequence
  Description of Artificial Sequence: Synthetic peptide
  XENP021860 vhCDR3
GGHLGPFDL

SEQ ID NO: 22056 - protein, 12 aa, Artificial Sequence
  Description of Artificial Sequence: Synthetic peptide
  XENP021860 vlCDR1
RASQSVGSSYLA

SEQ ID NO: 22057 - protein, 7 aa, Artificial Sequence
  Description of Artificial Sequence: Synthetic peptide
  XENP021860 vlCDR2
GASSRAT

SEQ ID NO: 22058 - protein, 9 aa, Artificial Sequence
  Description of Artificial Sequence: Synthetic peptide
  XENP021860 vlCDR3
QQYGSSPWT

SEQ ID NO: 22059 - protein, 214 aa, Artificial Sequence
  Description of Artificial Sequence: Synthetic polypeptide
  XENP021860 2A11_H1_L2.50_Fab-ipilimumab_H3.23_L0.129 Light Chain
DIQMTQSPAFLSVTPGEKVTITCQASQDIGNYLNWFQQKPDQTVKLLIYYTSYLHSGVPSRFSGSGSGTDYTFTISSLEAEDAATYFCQQGNTLPYTFGGGTKVEIKRTVAAPSVFIFPPSDEQLKSGTASVVCLLNNFYPREAKVQWKVDNALQSGNSQESVTEQDSKDSTYSLSSTLTLSKADYEKHKVYACEVTHQGLSSPVTKSFNRGEC

SEQ ID NO: 22060 - protein, 107 aa, Artificial Sequence
  Description of Artificial Sequence: Synthetic polypeptide
  VL of XENP021860
DIQMTQSPAFLSVTPGEKVTITCQASQDIGNYLNWFQQKPDQTVKLLIYYTSYLHSGVPSRFSGSGSGTDYTFTISSLEAEDAATYFCQQGNTLPYTFGGGTKVEIK

SEQ ID NO: 22061 - protein, 11 aa, Artificial Sequence
  Description of Artificial Sequence: Synthetic peptide
  XENP021860 vlCDR1
QASQDIGNYLN

SEQ ID NO: 22062 - protein, 7 aa, Artificial Sequence
  Description of Artificial Sequence: Synthetic peptide
  XENP021860 vlCDR2
YTSYLHS

SEQ ID NO: 22063 - protein, 9 aa, Artificial Sequence
  Description of Artificial Sequence: Synthetic peptide
  XENP021860 vlCDR3
QQGNTLPYT

SEQ ID NO: 22064 - protein, 447 aa, Artificial Sequence
  Description of Artificial Sequence: Synthetic polypeptide
  XENP022505 2A11_H1.125_L2.113_Fab-ipilimumab_H3.23_L0.129 Fab -Fc Heavy Chain
EVQLVQSGAEVKKPGATVKISCKASGFNIKHYFMHWVQQAPGKGLEWMGWIDPYLGDTEYAPKFQGRVTITADTSTNTAYMELSSLRSEDTAVYYCYARGVYQALDYWGQGTLVTVSSASTKGPSVFPLAPSSKSTSGGTAALGCLVKDYFPEPVTVSWNSGALTSGVHTFPAVLQSSGLYSLSSVVTVPSSSLGTQTYICNVNHKPSDTKVDKKVEPKSCDKTHTCPPCPAPPVAGPSVFLFPPKPKDTLMISRTPEVTCVVVDVKHEDPEVKFNWYVDGVEVHNAKTKPREEEYNSTYRVVSVLTVLHQDWLNGKEYKCKVSNKALPAPIEKTISKAKGQPREPQVYTLPPSREEMTKNQVSLTCDVSGFYPSDIAVEWESDGQPENNYKTTPPVLDSDGSFFLYSKLTVDKSRWEQGDVFSCSVMHEALHNHYTQKSLSLSPGK

SEQ ID NO: 22065 - protein, 118 aa, Artificial Sequence
  Description of Artificial Sequence: Synthetic polypeptide
  VH of XENP022505
EVQLVQSGAEVKKPGATVKISCKASGFNIKHYFMHWVQQAPGKGLEWMGWIDPYLGDTEYAPKFQGRVTITADTSTNTAYMELSSLRSEDTAVYYCYARGVYQALDYWGQGTLVTVSS

SEQ ID NO: 22066 - protein, 5 aa, Artificial Sequence
  Description of Artificial Sequence: Synthetic peptide
  XENP022505 vhCDR1
HYFMH

SEQ ID NO: 22067 - protein, 17 aa, Artificial Sequence
  Description of Artificial Sequence: Synthetic peptide
  XENP022505 vhCDR2
WIDPYLGDTEYAPKFQG

SEQ ID NO: 22068 - protein, 9 aa, Artificial Sequence
  Description of Artificial Sequence: Synthetic peptide
  XENP022505 vhCDR3
RGVYQALDY

SEQ ID NO: 22069 - protein, 477 aa, Artificial Sequence; identical to SEQ ID NO: 21669
  Description of Artificial Sequence: Synthetic polypeptide
  XENP022505 2A11_H1.125_L2.113_Fab-ipilimumab_H3.23_L0.129 scFv-Fc Heavy Chain

SEQ ID NO: 22070 - protein, 118 aa, Artificial Sequence; identical to SEQ ID NO: 2632
  Description of Artificial Sequence: Synthetic polypeptide
  VH of XENP022505

SEQ ID NO: 22071 - protein, 108 aa, Artificial Sequence; identical to SEQ ID NO: 2768
  Description of Artificial Sequence: Synthetic polypeptide
  VL of XENP022505

SEQ ID NO: 22072 - protein, 231 aa, Artificial Sequence; identical to SEQ ID NO: 21532
  Description of Artificial Sequence: Synthetic polypeptide
  Fc chain of XENP022505

SEQ ID NO: 22073 - protein, 5 aa, Artificial Sequence
  Description of Artificial Sequence: Synthetic peptide
  XENP022505 vhCDR1
SYTMH

SEQ ID NO: 22074 - protein, 17 aa, Artificial Sequence
  Description of Artificial Sequence: Synthetic peptide
  XENP022505 vhCDR2
FISYDGNYKYYADSVKG

SEQ ID NO: 22075 - protein, 9 aa, Artificial Sequence
  Description of Artificial Sequence: Synthetic peptide
  XENP022505 vhCDR3
GGHLGPFDL

SEQ ID NO: 22076 - protein, 12 aa, Artificial Sequence
  Description of Artificial Sequence: Synthetic peptide
  XENP022505 vlCDR1
RASQSVGSSYLA

SEQ ID NO: 22077 - protein, 7 aa, Artificial Sequence
  Description of Artificial Sequence: Synthetic peptide
  XENP022505 vlCDR2
GASSRAT

SEQ ID NO: 22078 - protein, 9 aa, Artificial Sequence
  Description of Artificial Sequence: Synthetic peptide
  XENP022505 vlCDR3
QQYGSSPWT

SEQ ID NO: 22079 - protein, 214 aa, Artificial Sequence
  Description of Artificial Sequence: Synthetic polypeptide
  XENP022505 2A11_H1.125_L2.113_Fab-ipilimumab_H3.23_L0.129 Light Chain
DIQMTQSPAFLSVTPGEKVTITCQASQDIGNYLNWFQQKPDQTVKLLIYFTSYLHSGVPSRFSGSGSGTDYTFTISSLEAEDAATYFCQQGNTLPYTFGGGTKVEIKRTVAAPSVFIFPPSDEQLKSGTASVVCLLNNFYPREAKVQWKVDNALQSGNSQESVTEQDSKDSTYSLSSTLTLSKADYEKHKVYACEVTHQGLSSPVTKSFNRGEC

SEQ ID NO: 22080 - protein, 107 aa, Artificial Sequence
  Description of Artificial Sequence: Synthetic polypeptide
  VL of XENP022505
DIQMTQSPAFLSVTPGEKVTITCQASQDIGNYLNWFQQKPDQTVKLLIYFTSYLHSGVPSRFSGSGSGTDYTFTISSLEAEDAATYFCQQGNTLPYTFGGGTKVEIK

SEQ ID NO: 22081 - protein, 11 aa, Artificial Sequence
  Description of Artificial Sequence: Synthetic peptide
  XENP022505 vlCDR1
QASQDIGNYLN

SEQ ID NO: 22082 - protein, 7 aa, Artificial Sequence
  Description of Artificial Sequence: Synthetic peptide
  XENP022505 vlCDR2
FTSYLHS

SEQ ID NO: 22083 - protein, 9 aa, Artificial Sequence
  Description of Artificial Sequence: Synthetic peptide
  XENP022505 vlCDR3
QQGNTLPYT

SEQ ID NO: 22084 - protein, 447 aa, Artificial Sequence
  Description of Artificial Sequence: Synthetic polypeptide
  XENP022506 2A11_H1.144_L2.113_Fab-ipilimumab_H3.23_L0.129 Fab-Fc Heavy Chain
EVQLVQSGAEVKKPGATVKISCKASGFNIKDYFMHWVQQAPGKGLEWMGWIDPELGDTEYAPKFQGRVTITADTSTNTAYMELSSLRSEDTAVYYCYARGVYQALDYWGQGTLVTVSSASTKGPSVFPLAPSSKSTSGGTAALGCLVKDYFPEPVTVSWNSGALTSGVHTFPAVLQSSGLYSLSSVVTVPSSSLGTQTYICNVNHKPSDTKVDKKVEPKSCDKTHTCPPCPAPPVAGPSVFLFPPKPKDTLMISRTPEVTCVVVDVKHEDPEVKFNWYVDGVEVHNAKTKPREEEYNSTYRVVSVLTVLHQDWLNGKEYKCKVSNKALPAPIEKTISKAKGQPREPQVYTLPPSREEMTKNQVSLTCDVSGFYPSDIAVEWESDGQPENNYKTTPPVLDSDGSFFLYSKLTVDKSRWEQGDVFSCSVMHEALHNHYTQKSLSLSPGK

SEQ ID NO: 22085 - protein, 118 aa, Artificial Sequence
  Description of Artificial Sequence: Synthetic polypeptide
  VH of XENP022506
EVQLVQSGAEVKKPGATVKISCKASGFNIKDYFMHWVQQAPGKGLEWMGWIDPELGDTEYAPKFQGRVTITADTSTNTAYMELSSLRSEDTAVYYCYARGVYQALDYWGQGTLVTVSS

SEQ ID NO: 22086 - protein, 5 aa, Artificial Sequence
  Description of Artificial Sequence: Synthetic peptide
  XENP022506 vhCDR1
DYFMH

SEQ ID NO: 22087 - protein, 17 aa, Artificial Sequence
  Description of Artificial Sequence: Synthetic peptide
  XENP022506 vhCDR2
WIDPELGDTEYAPKFQG

SEQ ID NO: 22088 - protein, 9 aa, Artificial Sequence
  Description of Artificial Sequence: Synthetic peptide
  XENP022506 vhCDR3
RGVYQALDY

SEQ ID NO: 22089 - protein, 477 aa, Artificial Sequence; identical to SEQ ID NO: 21669
  Description of Artificial Sequence: Synthetic polypeptide
  XENP022506 2A11_H1.144_L2.113_Fab-ipilimumab_H3.23_L0.129 scFv-Fc Heavy Chain

SEQ ID NO: 22090 - protein, 118 aa, Artificial Sequence; identical to SEQ ID NO: 2632
  Description of Artificial Sequence: Synthetic polypeptide
  VH of XENP022506

SEQ ID NO: 22091 - protein, 108 aa, Artificial Sequence; identical to SEQ ID NO: 2768
  Description of Artificial Sequence: Synthetic polypeptide
  VL of XENP022506

SEQ ID NO: 22092 - protein, 231 aa, Artificial Sequence; identical to SEQ ID NO: 21532
  Description of Artificial Sequence: Synthetic polypeptide
  Fc chain of XENP022506

SEQ ID NO: 22093 - protein, 5 aa, Artificial Sequence
  Description of Artificial Sequence: Synthetic peptide
  XENP022506 vhCDR1
SYTMH

SEQ ID NO: 22094 - protein, 17 aa, Artificial Sequence
  Description of Artificial Sequence: Synthetic peptide
  XENP022506 vhCDR2
FISYDGNYKYYADSVKG

SEQ ID NO: 22095 - protein, 9 aa, Artificial Sequence
  Description of Artificial Sequence: Synthetic peptide
  XENP022506 vhCDR3
GGHLGPFDL

SEQ ID NO: 22096 - protein, 12 aa, Artificial Sequence
  Description of Artificial Sequence: Synthetic peptide
  XENP022506 vlCDR1
RASQSVGSSYLA

SEQ ID NO: 22097 - protein, 7 aa, Artificial Sequence
  Description of Artificial Sequence: Synthetic peptide
  XENP022506 vlCDR2
GASSRAT

SEQ ID NO: 22098 - protein, 9 aa, Artificial Sequence
  Description of Artificial Sequence: Synthetic peptide
  XENP022506 vlCDR3
QQYGSSPWT

SEQ ID NO: 22099 - protein, 214 aa, Artificial Sequence; identical to SEQ ID NO: 22079
  Description of Artificial Sequence: Synthetic polypeptide
  XENP022506 2A11_H1.144_L2.113_Fab-ipilimumab_H3.23_L0.129 Light Chain

SEQ ID NO: 22100 - protein, 107 aa, Artificial Sequence; identical to SEQ ID NO: 22080
  Description of Artificial Sequence: Synthetic polypeptide
  VL of XENP022506

SEQ ID NO: 22101 - protein, 11 aa, Artificial Sequence
  Description of Artificial Sequence: Synthetic peptide
  XENP022506 vlCDR1
QASQDIGNYLN

SEQ ID NO: 22102 - protein, 7 aa, Artificial Sequence
  Description of Artificial Sequence: Synthetic peptide
  XENP022506 vlCDR2
FTSYLHS

SEQ ID NO: 22103 - protein, 9 aa, Artificial Sequence
  Description of Artificial Sequence: Synthetic peptide
  XENP022506 vlCDR3
QQGNTLPYT

SEQ ID NO: 22104 - protein, 447 aa, Artificial Sequence
  Description of Artificial Sequence: Synthetic polypeptide
  XENP022507 2A11_H1.117_L2.116_Fab-ipilimumab_H3.23_L0.129 Fab-Fc Heavy Chain
EVQLVQSGAEVKKPGATVKISCKASGFNIKHYFMHWVQQAPGKGLEWMGWIDPYLGDTEYAPKFQGRVTITADTSTNTAYMELSSLRSEDTAVYYCYARGVRQALDYWGQGTLVTVSSASTKGPSVFPLAPSSKSTSGGTAALGCLVKDYFPEPVTVSWNSGALTSGVHTFPAVLQSSGLYSLSSVVTVPSSSLGTQTYICNVNHKPSDTKVDKKVEPKSCDKTHTCPPCPAPPVAGPSVFLFPPKPKDTLMISRTPEVTCVVVDVKHEDPEVKFNWYVDGVEVHNAKTKPREEEYNSTYRVVSVLTVLHQDWLNGKEYKCKVSNKALPAPIEKTISKAKGQPREPQVYTLPPSREEMTKNQVSLTCDVSGFYPSDIAVEWESDGQPENNYKTTPPVLDSDGSFFLYSKLTVDKSRWEQGDVFSCSVMHEALHNHYTQKSLSLSPGK

SEQ ID NO: 22105 - protein, 118 aa, Artificial Sequence
  Description of Artificial Sequence: Synthetic polypeptide
  VH of XENP022507
EVQLVQSGAEVKKPGATVKISCKASGFNIKHYFMHWVQQAPGKGLEWMGWIDPYLGDTEYAPKFQGRVTITADTSTNTAYMELSSLRSEDTAVYYCYARGVRQALDYWGQGTLVTVSS

SEQ ID NO: 22106 - protein, 5 aa, Artificial Sequence
  Description of Artificial Sequence: Synthetic peptide
  XENP022507 vhCDR1
HYFMH

SEQ ID NO: 22107 - protein, 17 aa, Artificial Sequence
  Description of Artificial Sequence: Synthetic peptide
  XENP022507 vhCDR2
WIDPYLGDTEYAPKFQG

SEQ ID NO: 22108 - protein, 9 aa, Artificial Sequence
  Description of Artificial Sequence: Synthetic peptide
  XENP022507 vhCDR3
RGVRQALDY

SEQ ID NO: 22109 - protein, 477 aa, Artificial Sequence; identical to SEQ ID NO: 21669
  Description of Artificial Sequence: Synthetic polypeptide
  XENP022507 2A11_H1.117_L2.116_Fab-ipilimumab_H3.23_L0.129 scFv-Fc Heavy Chain

SEQ ID NO: 22110 - protein, 118 aa, Artificial Sequence; identical to SEQ ID NO: 2632
  Description of Artificial Sequence: Synthetic polypeptide
  VH of XENP022507

SEQ ID NO: 22111 - protein, 108 aa, Artificial Sequence; identical to SEQ ID NO: 2768
  Description of Artificial Sequence: Synthetic polypeptide
  VL of XENP022507

SEQ ID NO: 22112 - protein, 231 aa, Artificial Sequence; identical to SEQ ID NO: 21532
  Description of Artificial Sequence: Synthetic polypeptide
  Fc chain of XENP022507

SEQ ID NO: 22113 - protein, 5 aa, Artificial Sequence
  Description of Artificial Sequence: Synthetic peptide
  XENP022507 vhCDR1
SYTMH

SEQ ID NO: 22114 - protein, 17 aa, Artificial Sequence
  Description of Artificial Sequence: Synthetic peptide
  XENP022507 vhCDR2
FISYDGNYKYYADSVKG

SEQ ID NO: 22115 - protein, 9 aa, Artificial Sequence
  Description of Artificial Sequence: Synthetic peptide
  XENP022507 vhCDR3
GGHLGPFDL

SEQ ID NO: 22116 - protein, 12 aa, Artificial Sequence
  Description of Artificial Sequence: Synthetic peptide
  XENP022507 vlCDR1
RASQSVGSSYLA

SEQ ID NO: 22117 - protein, 7 aa, Artificial Sequence
  Description of Artificial Sequence: Synthetic peptide
  XENP022507 vlCDR2
GASSRAT

SEQ ID NO: 22118 - protein, 9 aa, Artificial Sequence
  Description of Artificial Sequence: Synthetic peptide
  XENP022507 vlCDR3
QQYGSSPWT

SEQ ID NO: 22119 - protein, 214 aa, Artificial Sequence
  Description of Artificial Sequence: Synthetic polypeptide
  XENP022507 2A11_H1.117_L2.116_Fab-ipilimumab_H3.23_L0.129 Light Chain
DIQMTQSPAFLSVTPGEKVTITCQASQDIGNYLNWFQQKPDQTVKLLIYFTSHLHSGVPSRFSGSGSGTDYTFTISSLEAEDAATYFCQQGHQLPYTFGGGTKVEIKRTVAAPSVFIFPPSDEQLKSGTASVVCLLNNFYPREAKVQWKVDNALQSGNSQESVTEQDSKDSTYSLSSTLTLSKADYEKHKVYACEVTHQGLSSPVTKSFNRGEC

SEQ ID NO: 22120 - protein, 107 aa, Artificial Sequence
  Description of Artificial Sequence: Synthetic polypeptide
  VL of XENP022507
DIQMTQSPAFLSVTPGEKVTITCQASQDIGNYLNWFQQKPDQTVKLLIYFTSHLHSGVPSRFSGSGSGTDYTFTISSLEAEDAATYFCQQGHQLPYTFGGGTKVEIK

SEQ ID NO: 22121 - protein, 11 aa, Artificial Sequence
  Description of Artificial Sequence: Synthetic peptide
  XENP022507 vlCDR1
QASQDIGNYLN

SEQ ID NO: 22122 - protein, 7 aa, Artificial Sequence
  Description of Artificial Sequence: Synthetic peptide
  XENP022507 vlCDR2
FTSHLHS

SEQ ID NO: 22123 - protein, 9 aa, Artificial Sequence
  Description of Artificial Sequence: Synthetic peptide
  XENP022507 vlCDR3
QQGHQLPYT

SEQ ID NO: 22124 - protein, 447 aa, Artificial Sequence; identical to SEQ ID NO: 22084
  Description of Artificial Sequence: Synthetic polypeptide
  XENP022508 2A11_H1.144_L2_Fab-ipilimumab_H3.23_L0.129 Fab- Fc Heavy Chain

SEQ ID NO: 22125 - protein, 118 aa, Artificial Sequence; identical to SEQ ID NO: 22085
  Description of Artificial Sequence: Synthetic polypeptide
  VH of XENP022508

SEQ ID NO: 22126 - protein, 5 aa, Artificial Sequence
  Description of Artificial Sequence: Synthetic peptide
  XENP022508 vhCDR1
DYFMH

SEQ ID NO: 22127 - protein, 17 aa, Artificial Sequence
  Description of Artificial Sequence: Synthetic peptide
  XENP022508 vhCDR2
WIDPELGDTEYAPKFQG

SEQ ID NO: 22128 - protein, 9 aa, Artificial Sequence
  Description of Artificial Sequence: Synthetic peptide
  XENP022508 vhCDR3
RGVYQALDY

SEQ ID NO: 22129 - protein, 477 aa, Artificial Sequence; identical to SEQ ID NO: 21669
  Description of Artificial Sequence: Synthetic polypeptide
  XENP022508 2A11_H1.144_L2_Fab-ipilimumab_H3.23_L0.129 scFv -Fc Heavy Chain

SEQ ID NO: 22130 - protein, 118 aa, Artificial Sequence; identical to SEQ ID NO: 2632
  Description of Artificial Sequence: Synthetic polypeptide
  VH of XENP022508

SEQ ID NO: 22131 - protein, 108 aa, Artificial Sequence; identical to SEQ ID NO: 2768
  Description of Artificial Sequence: Synthetic polypeptide
  VL of XENP022508

SEQ ID NO: 22132 - protein, 231 aa, Artificial Sequence; identical to SEQ ID NO: 21532
  Description of Artificial Sequence: Synthetic polypeptide
  Fc chain of XENP022508

SEQ ID NO: 22133 - protein, 5 aa, Artificial Sequence
  Description of Artificial Sequence: Synthetic peptide
  XENP022508 vhCDR1
SYTMH

SEQ ID NO: 22134 - protein, 17 aa, Artificial Sequence
  Description of Artificial Sequence: Synthetic peptide
  XENP022508 vhCDR2
FISYDGNYKYYADSVKG

SEQ ID NO: 22135 - protein, 9 aa, Artificial Sequence
  Description of Artificial Sequence: Synthetic peptide
  XENP022508 vhCDR3
GGHLGPFDL

SEQ ID NO: 22136 - protein, 12 aa, Artificial Sequence
  Description of Artificial Sequence: Synthetic peptide
  XENP022508 vlCDR1
RASQSVGSSYLA

SEQ ID NO: 22137 - protein, 7 aa, Artificial Sequence
  Description of Artificial Sequence: Synthetic peptide
  XENP022508 vlCDR2
GASSRAT

SEQ ID NO: 22138 - protein, 9 aa, Artificial Sequence
  Description of Artificial Sequence: Synthetic peptide
  XENP022508 vlCDR3
QQYGSSPWT

SEQ ID NO: 22139 - protein, 214 aa, Artificial Sequence; identical to SEQ ID NO: 17250
  Description of Artificial Sequence: Synthetic polypeptide
  XENP022508 2A11_H1.144_L2_Fab-ipilimumab_H3.23_L0.129 Light Chain

SEQ ID NO: 22140 - protein, 107 aa, Artificial Sequence; identical to SEQ ID NO: 17251
  Description of Artificial Sequence: Synthetic polypeptide
  VL of XENP022508

SEQ ID NO: 22141 - protein, 11 aa, Artificial Sequence
  Description of Artificial Sequence: Synthetic peptide
  XENP022508 vlCDR1
QASQDIGNYLN

SEQ ID NO: 22142 - protein, 7 aa, Artificial Sequence
  Description of Artificial Sequence: Synthetic peptide
  XENP022508 vlCDR2
YTSRLHS

SEQ ID NO: 22143 - protein, 9 aa, Artificial Sequence
  Description of Artificial Sequence: Synthetic peptide
  XENP022508 vlCDR3
QQGNTLPYT

SEQ ID NO: 22144 - protein, 447 aa, Artificial Sequence; identical to SEQ ID NO: 17235
  Description of Artificial Sequence: Synthetic polypeptide
  XENP022509 2A11_H1_L2.113_Fab-ipilimumab_H3.23_L0.129 Fab- Fc Heavy Chain

SEQ ID NO: 22145 - protein, 118 aa, Artificial Sequence; identical to SEQ ID NO: 17236
  Description of Artificial Sequence: Synthetic polypeptide
  VH of XENP022509

SEQ ID NO: 22146 - protein, 5 aa, Artificial Sequence
  Description of Artificial Sequence: Synthetic peptide
  XENP022509 vhCDR1
DYYMH

SEQ ID NO: 22147 - protein, 17 aa, Artificial Sequence
  Description of Artificial Sequence: Synthetic peptide
  XENP022509 vhCDR2
WIDPENGDTEYAPKFQG

SEQ ID NO: 22148 - protein, 9 aa, Artificial Sequence
  Description of Artificial Sequence: Synthetic peptide
  XENP022509 vhCDR3
RGVRQALDY

SEQ ID NO: 22149 - protein, 477 aa, Artificial Sequence; identical to SEQ ID NO: 21669
  Description of Artificial Sequence: Synthetic polypeptide
  XENP022509 2A11_H1_L2.113_Fab-ipilimumab_H3.23_L0.129 scFv- Fc Heavy Chain

SEQ ID NO: 22150 - protein, 118 aa, Artificial Sequence; identical to SEQ ID NO: 2632
  Description of Artificial Sequence: Synthetic polypeptide
  VH of XENP022509

SEQ ID NO: 22151 - protein, 108 aa, Artificial Sequence; identical to SEQ ID NO: 2768
  Description of Artificial Sequence: Synthetic polypeptide
  VL of XENP022509

SEQ ID NO: 22152 - protein, 231 aa, Artificial Sequence; identical to SEQ ID NO: 21532
  Description of Artificial Sequence: Synthetic polypeptide
  Fc chain of XENP022509

SEQ ID NO: 22153 - protein, 5 aa, Artificial Sequence
  Description of Artificial Sequence: Synthetic peptide
  XENP022509 vhCDR1
SYTMH

SEQ ID NO: 22154 - protein, 17 aa, Artificial Sequence
  Description of Artificial Sequence: Synthetic peptide
  XENP022509 vhCDR2
FISYDGNYKYYADSVKG

SEQ ID NO: 22155 - protein, 9 aa, Artificial Sequence
  Description of Artificial Sequence: Synthetic peptide
  XENP022509 vhCDR3
GGHLGPFDL

SEQ ID NO: 22156 - protein, 12 aa, Artificial Sequence
  Description of Artificial Sequence: Synthetic peptide
  XENP022509 vlCDR1
RASQSVGSSYLA

SEQ ID NO: 22157 - protein, 7 aa, Artificial Sequence
  Description of Artificial Sequence: Synthetic peptide
  XENP022509 vlCDR2
GASSRAT

SEQ ID NO: 22158 - protein, 9 aa, Artificial Sequence
  Description of Artificial Sequence: Synthetic peptide
  XENP022509 vlCDR3
QQYGSSPWT

SEQ ID NO: 22159 - protein, 214 aa, Artificial Sequence; identical to SEQ ID NO: 22079
  Description of Artificial Sequence: Synthetic polypeptide
  XENP022509 2A11_H1_L2.113_Fab-ipilimumab_H3.23_L0.129 Light Chain

SEQ ID NO: 22160 - protein, 107 aa, Artificial Sequence; identical to SEQ ID NO: 22080
  Description of Artificial Sequence: Synthetic polypeptide
  VL of XENP022509

SEQ ID NO: 22161 - protein, 11 aa, Artificial Sequence
  Description of Artificial Sequence: Synthetic peptide
  XENP022509 vlCDR1
QASQDIGNYLN

SEQ ID NO: 22162 - protein, 7 aa, Artificial Sequence
  Description of Artificial Sequence: Synthetic peptide
  XENP022509 vlCDR2
FTSYLHS

SEQ ID NO: 22163 - protein, 9 aa, Artificial Sequence
  Description of Artificial Sequence: Synthetic peptide
  XENP022509 vlCDR3
QQGNTLPYT

SEQ ID NO: 22164 - protein, 447 aa, Artificial Sequence; identical to SEQ ID NO: 17235
  Description of Artificial Sequence: Synthetic polypeptide
  XENP022510 2A11_H1_L2.25_Fab-ipilimumab_H3.23_L0.129 Fab-Fc Heavy Chain

SEQ ID NO: 22165 - protein, 118 aa, Artificial Sequence; identical to SEQ ID NO: 17236
  Description of Artificial Sequence: Synthetic polypeptide
  VH of XENP022510

SEQ ID NO: 22166 - protein, 5 aa, Artificial Sequence
  Description of Artificial Sequence: Synthetic peptide
  XENP022510 vhCDR1
DYYMH

SEQ ID NO: 22167 - protein, 17 aa, Artificial Sequence
  Description of Artificial Sequence: Synthetic peptide
  XENP022510 vhCDR2
WIDPENGDTEYAPKFQG

SEQ ID NO: 22168 - protein, 9 aa, Artificial Sequence
  Description of Artificial Sequence: Synthetic peptide
  XENP022510 vhCDR3
RGVRQALDY

SEQ ID NO: 22169 - protein, 477 aa, Artificial Sequence; identical to SEQ ID NO: 21669
  Description of Artificial Sequence: Synthetic polypeptide
  XENP022510 2A11_H1_L2.25_Fab-ipilimumab_H3.23_L0.129 scFv-Fc Heavy Chain

SEQ ID NO: 22170 - protein, 118 aa, Artificial Sequence; identical to SEQ ID NO: 2632
  Description of Artificial Sequence: Synthetic polypeptide
  VH of XENP022510

SEQ ID NO: 22171 - protein, 108 aa, Artificial Sequence; identical to SEQ ID NO: 2768
  Description of Artificial Sequence: Synthetic polypeptide
  VL of XENP022510

SEQ ID NO: 22172 - protein, 231 aa, Artificial Sequence; identical to SEQ ID NO: 21532
  Description of Artificial Sequence: Synthetic polypeptide
  Fc chain of XENP022510

SEQ ID NO: 22173 - protein, 5 aa, Artificial Sequence
  Description of Artificial Sequence: Synthetic peptide
  XENP022510 vhCDR1
SYTMH

SEQ ID NO: 22174 - protein, 17 aa, Artificial Sequence
  Description of Artificial Sequence: Synthetic peptide
  XENP022510 vhCDR2
FISYDGNYKYYADSVKG

SEQ ID NO: 22175 - protein, 9 aa, Artificial Sequence
  Description of Artificial Sequence: Synthetic peptide
  XENP022510 vhCDR3
GGHLGPFDL

SEQ ID NO: 22176 - protein, 12 aa, Artificial Sequence
  Description of Artificial Sequence: Synthetic peptide
  XENP022510 vlCDR1
RASQSVGSSYLA

SEQ ID NO: 22177 - protein, 7 aa, Artificial Sequence
  Description of Artificial Sequence: Synthetic peptide
  XENP022510 vlCDR2
GASSRAT

SEQ ID NO: 22178 - protein, 9 aa, Artificial Sequence
  Description of Artificial Sequence: Synthetic peptide
  XENP022510 vlCDR3
QQYGSSPWT

SEQ ID NO: 22179 - protein, 214 aa, Artificial Sequence
  Description of Artificial Sequence: Synthetic polypeptide
  XENP022510 2A11_H1_L2.25_Fab-ipilimumab_H3.23_L0.129 Light Chain
DIQMTQSPAFLSVTPGEKVTITCQASQDIGNHLNWFQQKPDQTVKLLIYYTSRLHSGVPSRFSGSGSGTDYTFTISSLEAEDAATYFCQQGNTLPYTFGGGTKVEIKRTVAAPSVFIFPPSDEQLKSGTASVVCLLNNFYPREAKVQWKVDNALQSGNSQESVTEQDSKDSTYSLSSTLTLSKADYEKHKVYACEVTHQGLSSPVTKSFNRGEC

SEQ ID NO: 22180 - protein, 107 aa, Artificial Sequence
  Description of Artificial Sequence: Synthetic polypeptide
  VL of XENP022510
DIQMTQSPAFLSVTPGEKVTITCQASQDIGNHLNWFQQKPDQTVKLLIYYTSRLHSGVPSRFSGSGSGTDYTFTISSLEAEDAATYFCQQGNTLPYTFGGGTKVEIK

SEQ ID NO: 22181 - protein, 11 aa, Artificial Sequence
  Description of Artificial Sequence: Synthetic peptide
  XENP022510 vlCDR1
QASQDIGNHLN

SEQ ID NO: 22182 - protein, 7 aa, Artificial Sequence
  Description of Artificial Sequence: Synthetic peptide
  XENP022510 vlCDR2
YTSRLHS

SEQ ID NO: 22183 - protein, 9 aa, Artificial Sequence
  Description of Artificial Sequence: Synthetic peptide
  XENP022510 vlCDR3
QQGNTLPYT

SEQ ID NO: 22184 - protein, 447 aa, Artificial Sequence; identical to SEQ ID NO: 22084
  Description of Artificial Sequence: Synthetic polypeptide
  XENP022518 2A11_H1.144_L2.133_Fab-ipilimumab_H3.23_L0.129 Fab-Fc Heavy Chain

SEQ ID NO: 22185 - protein, 118 aa, Artificial Sequence; identical to SEQ ID NO: 22085
  Description of Artificial Sequence: Synthetic polypeptide
  VH of XENP022518

SEQ ID NO: 22186 - protein, 5 aa, Artificial Sequence
  Description of Artificial Sequence: Synthetic peptide
  XENP022518 vhCDR1
DYFMH

SEQ ID NO: 22187 - protein, 17 aa, Artificial Sequence
  Description of Artificial Sequence: Synthetic peptide
  XENP022518 vhCDR2
WIDPELGDTEYAPKFQG

SEQ ID NO: 22188 - protein, 9 aa, Artificial Sequence
  Description of Artificial Sequence: Synthetic peptide
  XENP022518 vhCDR3
RGVYQALDY

SEQ ID NO: 22189 - protein, 477 aa, Artificial Sequence; identical to SEQ ID NO: 21669
  Description of Artificial Sequence: Synthetic polypeptide
  XENP022518 2A11_H1.144_L2.133_Fab-ipilimumab_H3.23_L0.129 scFv-Fc Heavy Chain

SEQ ID NO: 22190 - protein, 118 aa, Artificial Sequence; identical to SEQ ID NO: 2632
  Description of Artificial Sequence: Synthetic polypeptide
  VH of XENP022518

SEQ ID NO: 22191 - protein, 108 aa, Artificial Sequence; identical to SEQ ID NO: 2768
  Description of Artificial Sequence: Synthetic polypeptide
  VL of XENP022518

SEQ ID NO: 22192 - protein, 231 aa, Artificial Sequence; identical to SEQ ID NO: 21532
  Description of Artificial Sequence: Synthetic polypeptide
  Fc chain of XENP022518

SEQ ID NO: 22193 - protein, 5 aa, Artificial Sequence
  Description of Artificial Sequence: Synthetic peptide
  XENP022518 vhCDR1
SYTMH

SEQ ID NO: 22194 - protein, 17 aa, Artificial Sequence
  Description of Artificial Sequence: Synthetic peptide
  XENP022518 vhCDR2
FISYDGNYKYYADSVKG

SEQ ID NO: 22195 - protein, 9 aa, Artificial Sequence
  Description of Artificial Sequence: Synthetic peptide
  XENP022518 vhCDR3
GGHLGPFDL

SEQ ID NO: 22196 - protein, 12 aa, Artificial Sequence
  Description of Artificial Sequence: Synthetic peptide
  XENP022518 vlCDR1
RASQSVGSSYLA

SEQ ID NO: 22197 - protein, 7 aa, Artificial Sequence
  Description of Artificial Sequence: Synthetic peptide
  XENP022518 vlCDR2
GASSRAT

SEQ ID NO: 22198 - protein, 9 aa, Artificial Sequence
  Description of Artificial Sequence: Synthetic peptide
  XENP022518 vlCDR3
QQYGSSPWT

SEQ ID NO: 22199 - protein, 214 aa, Artificial Sequence
  Description of Artificial Sequence: Synthetic polypeptide
  XENP022518 2A11_H1.144_L2.133_Fab-ipilimumab_H3.23_L0.129 Light Chain
DIQMTQSPAFLSVTPGEKVTITCQASQDIGNYLNWFQQKPDQTPKLLIYFTSYLHSGVPSRFSGSGSGTDYTFTISSLEAEDAATYFCQEGNTLPYTFGGGTKVEIKRTVAAPSVFIFPPSDEQLKSGTASVVCLLNNFYPREAKVQWKVDNALQSGNSQESVTEQDSKDSTYSLSSTLTLSKADYEKHKVYACEVTHQGLSSPVTKSFNRGEC

SEQ ID NO: 22200 - protein, 107 aa, Artificial Sequence
  Description of Artificial Sequence: Synthetic polypeptide
  VL of XENP022518
DIQMTQSPAFLSVTPGEKVTITCQASQDIGNYLNWFQQKPDQTPKLLIYFTSYLHSGVPSRFSGSGSGTDYTFTISSLEAEDAATYFCQEGNTLPYTFGGGTKVEIK

SEQ ID NO: 22201 - protein, 11 aa, Artificial Sequence
  Description of Artificial Sequence: Synthetic peptide
  XENP022518 vlCDR1
QASQDIGNYLN

SEQ ID NO: 22202 - protein, 7 aa, Artificial Sequence
  Description of Artificial Sequence: Synthetic peptide
  XENP022518 vlCDR2
FTSYLHS

SEQ ID NO: 22203 - protein, 9 aa, Artificial Sequence
  Description of Artificial Sequence: Synthetic peptide
  XENP022518 vlCDR3
QEGNTLPYT

SEQ ID NO: 22204 - protein, 447 aa, Artificial Sequence; identical to SEQ ID NO: 22064
  Description of Artificial Sequence: Synthetic polypeptide
  XENP022625 2A11_H1.125_L2.132_Fab-ipilimumab_H3.23_L0.129 Fab-Fc Heavy Chain

SEQ ID NO: 22205 - protein, 118 aa, Artificial Sequence; identical to SEQ ID NO: 22065
  Description of Artificial Sequence: Synthetic polypeptide
  VH of XENP022625

SEQ ID NO: 22206 - protein, 5 aa, Artificial Sequence
  Description of Artificial Sequence: Synthetic peptide
  XENP022625 vhCDR1
HYFMH

SEQ ID NO: 22207 - protein, 17 aa, Artificial Sequence
  Description of Artificial Sequence: Synthetic peptide
  XENP022625 vhCDR2
WIDPYLGDTEYAPKFQG

SEQ ID NO: 22208 - protein, 9 aa, Artificial Sequence
  Description of Artificial Sequence: Synthetic peptide
  XENP022625 vhCDR3
RGVYQALDY

SEQ ID NO: 22209 - protein, 477 aa, Artificial Sequence; identical to SEQ ID NO: 21669
  Description of Artificial Sequence: Synthetic polypeptide
  XENP022625 2A11_H1.125_L2.132_Fab-ipilimumab_H3.23_L0.129 scFv-Fc Heavy Chain

SEQ ID NO: 22210 - protein, 118 aa, Artificial Sequence; identical to SEQ ID NO: 2632
  Description of Artificial Sequence: Synthetic polypeptide
  VH of XENP022625

SEQ ID NO: 22211 - protein, 108 aa, Artificial Sequence; identical to SEQ ID NO: 2768
  Description of Artificial Sequence: Synthetic polypeptide
  VL of XENP022625

SEQ ID NO: 22212 - protein, 231 aa, Artificial Sequence; identical to SEQ ID NO: 21532
  Description of Artificial Sequence: Synthetic polypeptide
  Fc chain of XENP022625

SEQ ID NO: 22213 - protein, 5 aa, Artificial Sequence
  Description of Artificial Sequence: Synthetic peptide
  XENP022625 vhCDR1
SYTMH

SEQ ID NO: 22214 - protein, 17 aa, Artificial Sequence
  Description of Artificial Sequence: Synthetic peptide
  XENP022625 vhCDR2
FISYDGNYKYYADSVKG

SEQ ID NO: 22215 - protein, 9 aa, Artificial Sequence
  Description of Artificial Sequence: Synthetic peptide
  XENP022625 vhCDR3
GGHLGPFDL

SEQ ID NO: 22216 - protein, 12 aa, Artificial Sequence
  Description of Artificial Sequence: Synthetic peptide
  XENP022625 vlCDR1
RASQSVGSSYLA

SEQ ID NO: 22217 - protein, 7 aa, Artificial Sequence
  Description of Artificial Sequence: Synthetic peptide
  XENP022625 vlCDR2
GASSRAT

SEQ ID NO: 22218 - protein, 9 aa, Artificial Sequence
  Description of Artificial Sequence: Synthetic peptide
  XENP022625 vlCDR3
QQYGSSPWT

SEQ ID NO: 22219 - protein, 214 aa, Artificial Sequence
  Description of Artificial Sequence: Synthetic polypeptide
  XENP022625 2A11_H1.125_L2.132_Fab-ipilimumab_H3.23_L0.129 Light Chain
DIQMTQSPAFLSVTPGEKVTITCQASQDIGNYLNWFQQKPGQTVKLLIYFTSYLHSGVPSRFSGSGSGTDYTFTISSLEAEDAATYFCQEGNTLPYTFGGGTKVEIKRTVAAPSVFIFPPSDEQLKSGTASVVCLLNNFYPREAKVQWKVDNALQSGNSQESVTEQDSKDSTYSLSSTLTLSKADYEKHKVYACEVTHQGLSSPVTKSFNRGEC

SEQ ID NO: 22220 - protein, 107 aa, Artificial Sequence
  Description of Artificial Sequence: Synthetic polypeptide
  VL of XENP022625
DIQMTQSPAFLSVTPGEKVTITCQASQDIGNYLNWFQQKPGQTVKLLIYFTSYLHSGVPSRFSGSGSGTDYTFTISSLEAEDAATYFCQEGNTLPYTFGGGTKVEIK

SEQ ID NO: 22221 - protein, 11 aa, Artificial Sequence
  Description of Artificial Sequence: Synthetic peptide
  XENP022625 vlCDR1
QASQDIGNYLN

SEQ ID NO: 22222 - protein, 7 aa, Artificial Sequence
  Description of Artificial Sequence: Synthetic peptide
  XENP022625 vlCDR2
FTSYLHS

SEQ ID NO: 22223 - protein, 9 aa, Artificial Sequence
  Description of Artificial Sequence: Synthetic peptide
  XENP022625 vlCDR3
QEGNTLPYT

SEQ ID NO: 22224 - protein, 447 aa, Artificial Sequence; identical to SEQ ID NO: 22084
  Description of Artificial Sequence: Synthetic polypeptide
  XENP022630 2A11_H1.144_L2.137_Fab-ipilimumab_H3.23_L0.129 Fab-Fc Heavy Chain

SEQ ID NO: 22225 - protein, 118 aa, Artificial Sequence; identical to SEQ ID NO: 22085
  Description of Artificial Sequence: Synthetic polypeptide
  VH of XENP022630

SEQ ID NO: 22226 - protein, 5 aa, Artificial Sequence
  Description of Artificial Sequence: Synthetic peptide
  XENP022630 vhCDR1
DYFMH

SEQ ID NO: 22227 - protein, 17 aa, Artificial Sequence
  Description of Artificial Sequence: Synthetic peptide
  XENP022630 vhCDR2
WIDPELGDTEYAPKFQG

SEQ ID NO: 22228 - protein, 9 aa, Artificial Sequence
  Description of Artificial Sequence: Synthetic peptide
  XENP022630 vhCDR3
RGVYQALDY

SEQ ID NO: 22229 - protein, 477 aa, Artificial Sequence; identical to SEQ ID NO: 21669
  Description of Artificial Sequence: Synthetic polypeptide
  XENP022630 2A11_H1.144_L2.137_Fab-ipilimumab_H3.23_L0.129 scFv-Fc Heavy Chain

SEQ ID NO: 22230 - protein, 118 aa, Artificial Sequence; identical to SEQ ID NO: 2632
  Description of Artificial Sequence: Synthetic polypeptide
  VH of XENP022630

SEQ ID NO: 22231 - protein, 108 aa, Artificial Sequence; identical to SEQ ID NO: 2768
  Description of Artificial Sequence: Synthetic polypeptide
  VL of XENP022630

SEQ ID NO: 22232 - protein, 231 aa, Artificial Sequence; identical to SEQ ID NO: 21532
  Description of Artificial Sequence: Synthetic polypeptide
  Fc chain of XENP022630

SEQ ID NO: 22233 - protein, 5 aa, Artificial Sequence
  Description of Artificial Sequence: Synthetic peptide
  XENP022630 vhCDR1
SYTMH

SEQ ID NO: 22234 - protein, 17 aa, Artificial Sequence
  Description of Artificial Sequence: Synthetic peptide
  XENP022630 vhCDR2
FISYDGNYKYYADSVKG

SEQ ID NO: 22235 - protein, 9 aa, Artificial Sequence
  Description of Artificial Sequence: Synthetic peptide
  XENP022630 vhCDR3
GGHLGPFDL

SEQ ID NO: 22236 - protein, 12 aa, Artificial Sequence
  Description of Artificial Sequence: Synthetic peptide
  XENP022630 vlCDR1
RASQSVGSSYLA

SEQ ID NO: 22237 - protein, 7 aa, Artificial Sequence
  Description of Artificial Sequence: Synthetic peptide
  XENP022630 vlCDR2
GASSRAT

SEQ ID NO: 22238 - protein, 9 aa, Artificial Sequence
  Description of Artificial Sequence: Synthetic peptide
  XENP022630 vlCDR3
QQYGSSPWT

SEQ ID NO: 22239 - protein, 214 aa, Artificial Sequence
  Description of Artificial Sequence: Synthetic polypeptide
  XENP022630 2A11_H1.144_L2.137_Fab-ipilimumab_H3.23_L0.129 Light Chain
DIQMTQSPAFLSVTPGEKVTITCQASQDIGNYLNWFQQKPGKVPKLLIYFTSYLHSGVPSRFSGSGSGTDYTFTISSLEAEDAATYFCQEGNTLPYTFGGGTKVEIKRTVAAPSVFIFPPSDEQLKSGTASVVCLLNNFYPREAKVQWKVDNALQSGNSQESVTEQDSKDSTYSLSSTLTLSKADYEKHKVYACEVTHQGLSSPVTKSFNRGEC

SEQ ID NO: 22240 - protein, 107 aa, Artificial Sequence
  Description of Artificial Sequence: Synthetic polypeptide
  VL of XENP022630
DIQMTQSPAFLSVTPGEKVTITCQASQDIGNYLNWFQQKPGKVPKLLIYFTSYLHSGVPSRFSGSGSGTDYTFTISSLEAEDAATYFCQEGNTLPYTFGGGTKVEIK

SEQ ID NO: 22241 - protein, 11 aa, Artificial Sequence
  Description of Artificial Sequence: Synthetic peptide
  XENP022630 vlCDR1
QASQDIGNYLN

SEQ ID NO: 22242 - protein, 7 aa, Artificial Sequence
  Description of Artificial Sequence: Synthetic peptide
  XENP022630 vlCDR2
FTSYLHS

SEQ ID NO: 22243 - protein, 9 aa, Artificial Sequence
  Description of Artificial Sequence: Synthetic peptide
  XENP022630 vlCDR3
QEGNTLPYT

SEQ ID NO: 22244 - protein, 447 aa, Artificial Sequence; identical to SEQ ID NO: 22064
  Description of Artificial Sequence: Synthetic polypeptide
  XENP022673 2A11_H1.125_L2.126_Fab-ipilimumab_H3.23_L0.129 Fab-Fc Heavy Chain

SEQ ID NO: 22245 - protein, 118 aa, Artificial Sequence; identical to SEQ ID NO: 22065
  Description of Artificial Sequence: Synthetic polypeptide
  VH of XENP022673

SEQ ID NO: 22246 - protein, 5 aa, Artificial Sequence
  Description of Artificial Sequence: Synthetic peptide
  XENP022673 vhCDR1
HYFMH

SEQ ID NO: 22247 - protein, 17 aa, Artificial Sequence
  Description of Artificial Sequence: Synthetic peptide
  XENP022673 vhCDR2
WIDPYLGDTEYAPKFQG

SEQ ID NO: 22248 - protein, 9 aa, Artificial Sequence
  Description of Artificial Sequence: Synthetic peptide
  XENP022673 vhCDR3
RGVYQALDY

SEQ ID NO: 22249 - protein, 477 aa, Artificial Sequence; identical to SEQ ID NO: 21669
  Description of Artificial Sequence: Synthetic polypeptide
  XENP022673 2A11_H1.125_L2.126_Fab-ipilimumab_H3.23_L0.129 scFv-Fc Heavy Chain

SEQ ID NO: 22250 - protein, 118 aa, Artificial Sequence; identical to SEQ ID NO: 2632
  Description of Artificial Sequence: Synthetic polypeptide
  VH of XENP022673

SEQ ID NO: 22251 - protein, 108 aa, Artificial Sequence; identical to SEQ ID NO: 2768
  Description of Artificial Sequence: Synthetic polypeptide
  VL of XENP022673

SEQ ID NO: 22252 - protein, 231 aa, Artificial Sequence; identical to SEQ ID NO: 21532
  Description of Artificial Sequence: Synthetic polypeptide
  Fc chain of XENP022673

SEQ ID NO: 22253 - protein, 5 aa, Artificial Sequence
  Description of Artificial Sequence: Synthetic peptide
  XENP022673 vhCDR1
SYTMH

SEQ ID NO: 22254 - protein, 17 aa, Artificial Sequence
  Description of Artificial Sequence: Synthetic peptide
  XENP022673 vhCDR2
FISYDGNYKYYADSVKG

SEQ ID NO: 22255 - protein, 9 aa, Artificial Sequence
  Description of Artificial Sequence: Synthetic peptide
  XENP022673 vhCDR3
GGHLGPFDL

SEQ ID NO: 22256 - protein, 12 aa, Artificial Sequence
  Description of Artificial Sequence: Synthetic peptide
  XENP022673 vlCDR1
RASQSVGSSYLA

SEQ ID NO: 22257 - protein, 7 aa, Artificial Sequence
  Description of Artificial Sequence: Synthetic peptide
  XENP022673 vlCDR2
GASSRAT

SEQ ID NO: 22258 - protein, 9 aa, Artificial Sequence
  Description of Artificial Sequence: Synthetic peptide
  XENP022673 vlCDR3
QQYGSSPWT

SEQ ID NO: 22259 - protein, 214 aa, Artificial Sequence
  Description of Artificial Sequence: Synthetic polypeptide
  XENP022673 2A11_H1.125_L2.126_Fab-ipilimumab_H3.23_L0.129 Light Chain
DIQMTQSPAFLSVTPGEKVTITCQASQDIGNYLNWFQQKPDQTVKLLIYFTSYLHSGVPSRFSGSGSGTDYTFTISSLEAEDAATYFCQEGNTLPYTFGGGTKVEIKRTVAAPSVFIFPPSDEQLKSGTASVVCLLNNFYPREAKVQWKVDNALQSGNSQESVTEQDSKDSTYSLSSTLTLSKADYEKHKVYACEVTHQGLSSPVTKSFNRGEC

SEQ ID NO: 22260 - protein, 107 aa, Artificial Sequence
  Description of Artificial Sequence: Synthetic polypeptide
  VL of XENP022673
DIQMTQSPAFLSVTPGEKVTITCQASQDIGNYLNWFQQKPDQTVKLLIYFTSYLHSGVPSRFSGSGSGTDYTFTISSLEAEDAATYFCQEGNTLPYTFGGGTKVEIK

SEQ ID NO: 22261 - protein, 11 aa, Artificial Sequence
  Description of Artificial Sequence: Synthetic peptide
  XENP022673 vlCDR1
QASQDIGNYLN

SEQ ID NO: 22262 - protein, 7 aa, Artificial Sequence
  Description of Artificial Sequence: Synthetic peptide
  XENP022673 vlCDR2
FTSYLHS

SEQ ID NO: 22263 - protein, 9 aa, Artificial Sequence
  Description of Artificial Sequence: Synthetic peptide
  XENP022673 vlCDR3
QEGNTLPYT

SEQ ID NO: 22264 - protein, 447 aa, Artificial Sequence; identical to SEQ ID NO: 22084
  Description of Artificial Sequence: Synthetic polypeptide
  XENP022675 2A11_H1.144_L2.142_Fab-ipilimumab_H3.23_L0.129 Fab-Fc Heavy Chain

SEQ ID NO: 22265 - protein, 118 aa, Artificial Sequence; identical to SEQ ID NO: 22085
  Description of Artificial Sequence: Synthetic polypeptide
  VH of XENP022675

SEQ ID NO: 22266 - protein, 5 aa, Artificial Sequence
  Description of Artificial Sequence: Synthetic peptide
  XENP022675 vhCDR1
DYFMH

SEQ ID NO: 22267 - protein, 17 aa, Artificial Sequence
  Description of Artificial Sequence: Synthetic peptide
  XENP022675 vhCDR2
WIDPELGDTEYAPKFQG

SEQ ID NO: 22268 - protein, 9 aa, Artificial Sequence
  Description of Artificial Sequence: Synthetic peptide
  XENP022675 vhCDR3
RGVYQALDY

SEQ ID NO: 22269 - protein, 477 aa, Artificial Sequence; identical to SEQ ID NO: 21669
  Description of Artificial Sequence: Synthetic polypeptide
  XENP022675 2A11_H1.144_L2.142_Fab-ipilimumab_H3.23_L0.129 scFv-Fc Heavy Chain

SEQ ID NO: 22270 - protein, 118 aa, Artificial Sequence; identical to SEQ ID NO: 2632
  Description of Artificial Sequence: Synthetic polypeptide
  VH of XENP022675

SEQ ID NO: 22271 - protein, 108 aa, Artificial Sequence; identical to SEQ ID NO: 2768
  Description of Artificial Sequence: Synthetic polypeptide
  VL of XENP022675

SEQ ID NO: 22272 - protein, 231 aa, Artificial Sequence; identical to SEQ ID NO: 21532
  Description of Artificial Sequence: Synthetic polypeptide
  Fc chain of XENP022675

SEQ ID NO: 22273 - protein, 5 aa, Artificial Sequence
  Description of Artificial Sequence: Synthetic peptide
  XENP022675 vhCDR1
SYTMH

SEQ ID NO: 22274 - protein, 17 aa, Artificial Sequence
  Description of Artificial Sequence: Synthetic peptide
  XENP022675 vhCDR2
FISYDGNYKYYADSVKG

SEQ ID NO: 22275 - protein, 9 aa, Artificial Sequence
  Description of Artificial Sequence: Synthetic peptide
  XENP022675 vhCDR3
GGHLGPFDL

SEQ ID NO: 22276 - protein, 12 aa, Artificial Sequence
  Description of Artificial Sequence: Synthetic peptide
  XENP022675 vlCDR1
RASQSVGSSYLA

SEQ ID NO: 22277 - protein, 7 aa, Artificial Sequence
  Description of Artificial Sequence: Synthetic peptide
  XENP022675 vlCDR2
GASSRAT

SEQ ID NO: 22278 - protein, 9 aa, Artificial Sequence
  Description of Artificial Sequence: Synthetic peptide
  XENP022675 vlCDR3
QQYGSSPWT

SEQ ID NO: 22279 - protein, 214 aa, Artificial Sequence
  Description of Artificial Sequence: Synthetic polypeptide
  XENP022675 2A11_H1.144_L2.142_Fab-ipilimumab_H3.23_L0.129 Light Chain
DIQMTQSPAFLSVTPGEKVTITCQASQDIGNYLNWFQQKPGQTVKLLIYFTSYLHSGVPSRFSGSGSGTDYTFTISSLEAEDAATYFCQQGNTLPYTFGGGTKVEIKRTVAAPSVFIFPPSDEQLKSGTASVVCLLNNFYPREAKVQWKVDNALQSGNSQESVTEQDSKDSTYSLSSTLTLSKADYEKHKVYACEVTHQGLSSPVTKSFNRGEC

SEQ ID NO: 22280 - protein, 107 aa, Artificial Sequence
  Description of Artificial Sequence: Synthetic polypeptide
  VL of XENP022675
DIQMTQSPAFLSVTPGEKVTITCQASQDIGNYLNWFQQKPGQTVKLLIYFTSYLHSGVPSRFSGSGSGTDYTFTISSLEAEDAATYFCQQGNTLPYTFGGGTKVEIK

SEQ ID NO: 22281 - protein, 11 aa, Artificial Sequence
  Description of Artificial Sequence: Synthetic peptide
  XENP022675 vlCDR1
QASQDIGNYLN

SEQ ID NO: 22282 - protein, 7 aa, Artificial Sequence
  Description of Artificial Sequence: Synthetic peptide
  XENP022675 vlCDR2
FTSYLHS

SEQ ID NO: 22283 - protein, 9 aa, Artificial Sequence
  Description of Artificial Sequence: Synthetic peptide
  XENP022675 vlCDR3
QQGNTLPYT

SEQ ID NO: 22284 - protein, 450 aa, Artificial Sequence; identical to SEQ ID NO: 17625
  Description of Artificial Sequence: Synthetic polypeptide
  XENP020045 7G8_H2L2_Fab-ipilimumab_H3L0 Fab-Fc Heavy Chain

SEQ ID NO: 22285 - protein, 121 aa, Artificial Sequence; identical to SEQ ID NO: 17626
  Description of Artificial Sequence: Synthetic polypeptide
  VH of XENP020045

SEQ ID NO: 22286 - protein, 5 aa, Artificial Sequence
  Description of Artificial Sequence: Synthetic peptide
  XENP020045 vhCDR1
DAWMD

SEQ ID NO: 22287 - protein, 19 aa, Artificial Sequence
  Description of Artificial Sequence: Synthetic peptide
  XENP020045 vhCDR2
EIRTKANNHATYYAESVKG

SEQ ID NO: 22288 - protein, 10 aa, Artificial Sequence
  Description of Artificial Sequence: Synthetic peptide
  XENP020045 vhCDR3
LANWDWYFDV

SEQ ID NO: 22289 - protein, 477 aa, Artificial Sequence; identical to SEQ ID NO: 21769
  Description of Artificial Sequence: Synthetic polypeptide
  XENP020045 7G8_H2L2_Fab-ipilimumab_H3L0 scFv-Fc Heavy Chain

SEQ ID NO: 22290 - protein, 118 aa, Artificial Sequence; identical to SEQ ID NO: 139
  Description of Artificial Sequence: Synthetic polypeptide
  VH of XENP020045

SEQ ID NO: 22291 - protein, 108 aa, Artificial Sequence; identical to SEQ ID NO: 23
  Description of Artificial Sequence: Synthetic polypeptide
  VL of XENP020045

SEQ ID NO: 22292 - protein, 231 aa, Artificial Sequence; identical to SEQ ID NO: 21532
  Description of Artificial Sequence: Synthetic polypeptide
  Fc chain of XENP020045

SEQ ID NO: 22293 - protein, 5 aa, Artificial Sequence
  Description of Artificial Sequence: Synthetic peptide
  XENP020045 vhCDR1
SYTMH

SEQ ID NO: 22294 - protein, 17 aa, Artificial Sequence
  Description of Artificial Sequence: Synthetic peptide
  XENP020045 vhCDR2
FISYDGNNKYYADSVKG

SEQ ID NO: 22295 - protein, 9 aa, Artificial Sequence
  Description of Artificial Sequence: Synthetic peptide
  XENP020045 vhCDR3
TGWLGPFDY

SEQ ID NO: 22296 - protein, 12 aa, Artificial Sequence
  Description of Artificial Sequence: Synthetic peptide
  XENP020045 vlCDR1
RASQSVGSSYLA

SEQ ID NO: 22297 - protein, 7 aa, Artificial Sequence
  Description of Artificial Sequence: Synthetic peptide
  XENP020045 vlCDR2
GAFSRAT

SEQ ID NO: 22298 - protein, 9 aa, Artificial Sequence
  Description of Artificial Sequence: Synthetic peptide
  XENP020045 vlCDR3
QQYGSSPWT

SEQ ID NO: 22299 - protein, 218 aa, Artificial Sequence; identical to SEQ ID NO: 17610
  Description of Artificial Sequence: Synthetic polypeptide
  XENP020045 7G8_H2L2_Fab-ipilimumab_H3L0 Light Chain

SEQ ID NO: 22300 - protein, 111 aa, Artificial Sequence; identical to SEQ ID NO: 17611
  Description of Artificial Sequence: Synthetic polypeptide
  VL of XENP020045

SEQ ID NO: 22301 - protein, 15 aa, Artificial Sequence
  Description of Artificial Sequence: Synthetic peptide
  XENP020045 vlCDR1
RASQSVDYDGDSYMN

SEQ ID NO: 22302 - protein, 7 aa, Artificial Sequence
  Description of Artificial Sequence: Synthetic peptide
  XENP020045 vlCDR2
AASNLES

SEQ ID NO: 22303 - protein, 9 aa, Artificial Sequence
  Description of Artificial Sequence: Synthetic peptide
  XENP020045 vlCDR3
QQSNEDPFT

SEQ ID NO: 22304 - protein, 450 aa, Artificial Sequence
  Description of Artificial Sequence: Synthetic polypeptide
  XENP020833 7G8_H3L1_Fab-ipilimumab_H3.23_L0.129 Fab-Fc Heavy Chain
EVQLVESGGGLVQPGGSLRLSCAASGFTFSDAWMDWVRQAPGKGLEWVAEIRTKANNHATYYAESVKGRFTISRDDSKSSVYLQMNSLRAEDTAVYYCTRLANWDWYFDVWGQGTTVTVSSASTKGPSVFPLAPSSKSTSGGTAALGCLVKDYFPEPVTVSWNSGALTSGVHTFPAVLQSSGLYSLSSVVTVPSSSLGTQTYICNVNHKPSDTKVDKKVEPKSCDKTHTCPPCPAPPVAGPSVFLFPPKPKDTLMISRTPEVTCVVVDVKHEDPEVKFNWYVDGVEVHNAKTKPREEEYNSTYRVVSVLTVLHQDWLNGKEYKCKVSNKALPAPIEKTISKAKGQPREPQVYTLPPSREEMTKNQVSLTCDVSGFYPSDIAVEWESDGQPENNYKTTPPVLDSDGSFFLYSKLTVDKSRWEQGDVFSCSVMHEALHNHYTQKSLSLSPGK

SEQ ID NO: 22305 - protein, 121 aa, Artificial Sequence; identical to SEQ ID NO: 17806
  Description of Artificial Sequence: Synthetic polypeptide
  VH of XENP020833

SEQ ID NO: 22306 - protein, 5 aa, Artificial Sequence
  Description of Artificial Sequence: Synthetic peptide
  XENP020833 vhCDR1
DAWMD

SEQ ID NO: 22307 - protein, 19 aa, Artificial Sequence
  Description of Artificial Sequence: Synthetic peptide
  XENP020833 vhCDR2
EIRTKANNHATYYAESVKG

SEQ ID NO: 22308 - protein, 10 aa, Artificial Sequence
  Description of Artificial Sequence: Synthetic peptide
  XENP020833 vhCDR3
LANWDWYFDV

SEQ ID NO: 22309 - protein, 477 aa, Artificial Sequence; identical to SEQ ID NO: 21669
  Description of Artificial Sequence: Synthetic polypeptide
  XENP020833 7G8_H3L1_Fab-ipilimumab_H3.23_L0.129 scFv-Fc Heavy Chain

SEQ ID NO: 22310 - protein, 118 aa, Artificial Sequence; identical to SEQ ID NO: 2632
  Description of Artificial Sequence: Synthetic polypeptide
  VH of XENP020833

SEQ ID NO: 22311 - protein, 108 aa, Artificial Sequence; identical to SEQ ID NO: 2768
  Description of Artificial Sequence: Synthetic polypeptide
  VL of XENP020833

SEQ ID NO: 22312 - protein, 231 aa, Artificial Sequence; identical to SEQ ID NO: 21532
  Description of Artificial Sequence: Synthetic polypeptide
  Fc chain of XENP020833

SEQ ID NO: 22313 - protein, 5 aa, Artificial Sequence
  Description of Artificial Sequence: Synthetic peptide
  XENP020833 vhCDR1
SYTMH

SEQ ID NO: 22314 - protein, 17 aa, Artificial Sequence
  Description of Artificial Sequence: Synthetic peptide
  XENP020833 vhCDR2
FISYDGNYKYYADSVKG

SEQ ID NO: 22315 - protein, 9 aa, Artificial Sequence
  Description of Artificial Sequence: Synthetic peptide
  XENP020833 vhCDR3
GGHLGPFDL

SEQ ID NO: 22316 - protein, 12 aa, Artificial Sequence
  Description of Artificial Sequence: Synthetic peptide
  XENP020833 vlCDR1
RASQSVGSSYLA

SEQ ID NO: 22317 - protein, 7 aa, Artificial Sequence
  Description of Artificial Sequence: Synthetic peptide
  XENP020833 vlCDR2
GASSRAT

SEQ ID NO: 22318 - protein, 9 aa, Artificial Sequence
  Description of Artificial Sequence: Synthetic peptide
  XENP020833 vlCDR3
QQYGSSPWT

SEQ ID NO: 22319 - protein, 218 aa, Artificial Sequence; identical to SEQ ID NO: 17600
  Description of Artificial Sequence: Synthetic polypeptide
  XENP020833 7G8_H3L1_Fab-ipilimumab_H3.23_L0.129 Light Chain

SEQ ID NO: 22320 - protein, 111 aa, Artificial Sequence; identical to SEQ ID NO: 17601
  Description of Artificial Sequence: Synthetic polypeptide
  VL of XENP020833

SEQ ID NO: 22321 - protein, 15 aa, Artificial Sequence
  Description of Artificial Sequence: Synthetic peptide
  XENP020833 vlCDR1
RASQSVDYDGDSYMN

SEQ ID NO: 22322 - protein, 7 aa, Artificial Sequence
  Description of Artificial Sequence: Synthetic peptide
  XENP020833 vlCDR2
AASNLES

SEQ ID NO: 22323 - protein, 9 aa, Artificial Sequence
  Description of Artificial Sequence: Synthetic peptide
  XENP020833 vlCDR3
QQSNEDPFT

SEQ ID NO: 22324 - protein, 450 aa, Artificial Sequence
  Description of Artificial Sequence: Synthetic polypeptide
  XENP021895 7G8_H3.18_L1-ipilimumab_H3.23_L0.129 Fab-Fc Heavy Chain
EVQLVESGGGLVQPGGSLRLSCAASGFTFDDAWMDWVRQAPGKGLEWVAEISTKANNHATYYAESVKGRFTISRDDSKSSVYLQMNSLRAEDTAVYYCTRLATWDWYFDVWGQGTTVTVSSASTKGPSVFPLAPSSKSTSGGTAALGCLVKDYFPEPVTVSWNSGALTSGVHTFPAVLQSSGLYSLSSVVTVPSSSLGTQTYICNVNHKPSDTKVDKKVEPKSCDKTHTCPPCPAPPVAGPSVFLFPPKPKDTLMISRTPEVTCVVVDVKHEDPEVKFNWYVDGVEVHNAKTKPREEEYNSTYRVVSVLTVLHQDWLNGKEYKCKVSNKALPAPIEKTISKAKGQPREPQVYTLPPSREEMTKNQVSLTCDVSGFYPSDIAVEWESDGQPENNYKTTPPVLDSDGSFFLYSKLTVDKSRWEQGDVFSCSVMHEALHNHYTQKSLSLSPGK

SEQ ID NO: 22325 - protein, 121 aa, Artificial Sequence
  Description of Artificial Sequence: Synthetic polypeptide
  VH of XENP021895
EVQLVESGGGLVQPGGSLRLSCAASGFTFDDAWMDWVRQAPGKGLEWVAEISTKANNHATYYAESVKGRFTISRDDSKSSVYLQMNSLRAEDTAVYYCTRLATWDWYFDVWGQGTTVTVSS

SEQ ID NO: 22326 - protein, 5 aa, Artificial Sequence
  Description of Artificial Sequence: Synthetic peptide
  XENP021895 vhCDR1
DAWMD

SEQ ID NO: 22327 - protein, 19 aa, Artificial Sequence
  Description of Artificial Sequence: Synthetic peptide
  XENP021895 vhCDR2
EISTKANNHATYYAESVKG

SEQ ID NO: 22328 - protein, 10 aa, Artificial Sequence
  Description of Artificial Sequence: Synthetic peptide
  XENP021895 vhCDR3
LATWDWYFDV

SEQ ID NO: 22329 - protein, 477 aa, Artificial Sequence; identical to SEQ ID NO: 21669
  Description of Artificial Sequence: Synthetic polypeptide
  XENP021895 7G8_H3.18_L1-ipilimumab_H3.23_L0.129 scFv-Fc Heavy Chain

SEQ ID NO: 22330 - protein, 118 aa, Artificial Sequence; identical to SEQ ID NO: 2632
  Description of Artificial Sequence: Synthetic polypeptide
  VH of XENP021895

SEQ ID NO: 22331 - protein, 108 aa, Artificial Sequence; identical to SEQ ID NO: 2768
  Description of Artificial Sequence: Synthetic polypeptide
  VL of XENP021895

SEQ ID NO: 22332 - protein, 231 aa, Artificial Sequence; identical to SEQ ID NO: 21532
  Description of Artificial Sequence: Synthetic polypeptide
  Fc chain of XENP021895

SEQ ID NO: 22333 - protein, 5 aa, Artificial Sequence
  Description of Artificial Sequence: Synthetic peptide
  XENP021895 vhCDR1
SYTMH

SEQ ID NO: 22334 - protein, 17 aa, Artificial Sequence
  Description of Artificial Sequence: Synthetic peptide
  XENP021895 vhCDR2
FISYDGNYKYYADSVKG

SEQ ID NO: 22335 - protein, 9 aa, Artificial Sequence
  Description of Artificial Sequence: Synthetic peptide
  XENP021895 vhCDR3
GGHLGPFDL

SEQ ID NO: 22336 - protein, 12 aa, Artificial Sequence
  Description of Artificial Sequence: Synthetic peptide
  XENP021895 vlCDR1
RASQSVGSSYLA

SEQ ID NO: 22337 - protein, 7 aa, Artificial Sequence
  Description of Artificial Sequence: Synthetic peptide
  XENP021895 vlCDR2
GASSRAT

SEQ ID NO: 22338 - protein, 9 aa, Artificial Sequence
  Description of Artificial Sequence: Synthetic peptide
  XENP021895 vlCDR3
QQYGSSPWT

SEQ ID NO: 22339 - protein, 218 aa, Artificial Sequence; identical to SEQ ID NO: 17600
  Description of Artificial Sequence: Synthetic polypeptide
  XENP021895 7G8_H3.18_L1-ipilimumab_H3.23_L0.129 Light Chain

SEQ ID NO: 22340 - protein, 111 aa, Artificial Sequence; identical to SEQ ID NO: 17601
  Description of Artificial Sequence: Synthetic polypeptide
  VL of XENP021895

SEQ ID NO: 22341 - protein, 15 aa, Artificial Sequence
  Description of Artificial Sequence: Synthetic peptide
  XENP021895 vlCDR1
RASQSVDYDGDSYMN

SEQ ID NO: 22342 - protein, 7 aa, Artificial Sequence
  Description of Artificial Sequence: Synthetic peptide
  XENP021895 vlCDR2
AASNLES

SEQ ID NO: 22343 - protein, 9 aa, Artificial Sequence
  Description of Artificial Sequence: Synthetic peptide
  XENP021895 vlCDR3
QQSNEDPFT

SEQ ID NO: 22344 - protein, 450 aa, Artificial Sequence; identical to SEQ ID NO: 22324
  Description of Artificial Sequence: Synthetic polypeptide
  XENP021896 7G8_H3.18_L1.11-ipilimumab_H3.23_L0.129 Fab-Fc Heavy Chain

SEQ ID NO: 22345 - protein, 121 aa, Artificial Sequence; identical to SEQ ID NO: 22325
  Description of Artificial Sequence: Synthetic polypeptide
  VH of XENP021896

SEQ ID NO: 22346 - protein, 5 aa, Artificial Sequence
  Description of Artificial Sequence: Synthetic peptide
  XENP021896 vhCDR1
DAWMD

SEQ ID NO: 22347 - protein, 19 aa, Artificial Sequence
  Description of Artificial Sequence: Synthetic peptide
  XENP021896 vhCDR2
EISTKANNHATYYAESVKG

SEQ ID NO: 22348 - protein, 10 aa, Artificial Sequence
  Description of Artificial Sequence: Synthetic peptide
  XENP021896 vhCDR3
LATWDWYFDV

SEQ ID NO: 22349 - protein, 477 aa, Artificial Sequence; identical to SEQ ID NO: 21669
  Description of Artificial Sequence: Synthetic polypeptide
  XENP021896 7G8_H3.18_L1.11-ipilimumab_H3.23_L0.129 scFv-Fc Heavy Chain

SEQ ID NO: 22350 - protein, 118 aa, Artificial Sequence; identical to SEQ ID NO: 2632
  Description of Artificial Sequence: Synthetic polypeptide
  VH of XENP021896

SEQ ID NO: 22351 - protein, 108 aa, Artificial Sequence; identical to SEQ ID NO: 2768
  Description of Artificial Sequence: Synthetic polypeptide
  VL of XENP021896

SEQ ID NO: 22352 - protein, 231 aa, Artificial Sequence; identical to SEQ ID NO: 21532
  Description of Artificial Sequence: Synthetic polypeptide
  Fc chain of XENP021896

SEQ ID NO: 22353 - protein, 5 aa, Artificial Sequence
  Description of Artificial Sequence: Synthetic peptide
  XENP021896 vhCDR1
SYTMH

SEQ ID NO: 22354 - protein, 17 aa, Artificial Sequence
  Description of Artificial Sequence: Synthetic peptide
  XENP021896 vhCDR2
FISYDGNYKYYADSVKG

SEQ ID NO: 22355 - protein, 9 aa, Artificial Sequence
  Description of Artificial Sequence: Synthetic peptide
  XENP021896 vhCDR3
GGHLGPFDL

SEQ ID NO: 22356 - protein, 12 aa, Artificial Sequence
  Description of Artificial Sequence: Synthetic peptide
  XENP021896 vlCDR1
RASQSVGSSYLA

SEQ ID NO: 22357 - protein, 7 aa, Artificial Sequence
  Description of Artificial Sequence: Synthetic peptide
  XENP021896 vlCDR2
GASSRAT

SEQ ID NO: 22358 - protein, 9 aa, Artificial Sequence
  Description of Artificial Sequence: Synthetic peptide
  XENP021896 vlCDR3
QQYGSSPWT

SEQ ID NO: 22359 - protein, 218 aa, Artificial Sequence
  Description of Artificial Sequence: Synthetic polypeptide
  XENP021896 7G8_H3.18_L1.11-ipilimumab_H3.23_L0.129 Light Chain
DTVLTQSPSSLSASVGDRVTITCRASQSVDYDGDSYMNWYQQKPGKPPKLLIYAASELESGIPARLSGSGSGTDFTLTISSLQPEDFATYYCQQSNEDPFTFGSGTKLEIKRTVAAPSVFIFPPSDEQLKSGTASVVCLLNNFYPREAKVQWKVDNALQSGNSQESVTEQDSKDSTYSLSSTLTLSKADYEKHKVYACEVTHQGLSSPVTKSFNRGEC

SEQ ID NO: 22360 - protein, 111 aa, Artificial Sequence
  Description of Artificial Sequence: Synthetic polypeptide
  VL of XENP021896
DTVLTQSPSSLSASVGDRVTITCRASQSVDYDGDSYMNWYQQKPGKPPKLLIYAASELESGIPARLSGSGSGTDFTLTISSLQPEDFATYYCQQSNEDPFTFGSGTKLEIK

SEQ ID NO: 22361 - protein, 15 aa, Artificial Sequence
  Description of Artificial Sequence: Synthetic peptide
  XENP021896 vlCDR1
RASQSVDYDGDSYMN

SEQ ID NO: 22362 - protein, 7 aa, Artificial Sequence
  Description of Artificial Sequence: Synthetic peptide
  XENP021896 vlCDR2
AASELES

SEQ ID NO: 22363 - protein, 9 aa, Artificial Sequence
  Description of Artificial Sequence: Synthetic peptide
  XENP021896 vlCDR3
QQSNEDPFT

SEQ ID NO: 22364 - protein, 450 aa, Artificial Sequence
  Description of Artificial Sequence: Synthetic polypeptide
  XENP021901 7G8_H3.15_L1.11-ipilimumab_H3.23_L0.129 Fab-Fc Heavy Chain
EVQLVESGGGLVQPGGSLRLSCAASGDTFDDAWMDWVRQAPGKGLEWVAEISTKANNHATYYAESVKGRFTISRDDSKSSVYLQMNSLRAEDTAVYYCTRLATWDWYFDVWGQGTTVTVSSASTKGPSVFPLAPSSKSTSGGTAALGCLVKDYFPEPVTVSWNSGALTSGVHTFPAVLQSSGLYSLSSVVTVPSSSLGTQTYICNVNHKPSDTKVDKKVEPKSCDKTHTCPPCPAPPVAGPSVFLFPPKPKDTLMISRTPEVTCVVVDVKHEDPEVKFNWYVDGVEVHNAKTKPREEEYNSTYRVVSVLTVLHQDWLNGKEYKCKVSNKALPAPIEKTISKAKGQPREPQVYTLPPSREEMTKNQVSLTCDVSGFYPSDIAVEWESDGQPENNYKTTPPVLDSDGSFFLYSKLTVDKSRWEQGDVFSCSVMHEALHNHYTQKSLSLSPGK

SEQ ID NO: 22365 - protein, 121 aa, Artificial Sequence
  Description of Artificial Sequence: Synthetic polypeptide
  VH of XENP021901
EVQLVESGGGLVQPGGSLRLSCAASGDTFDDAWMDWVRQAPGKGLEWVAEISTKANNHATYYAESVKGRFTISRDDSKSSVYLQMNSLRAEDTAVYYCTRLATWDWYFDVWGQGTTVTVSS

SEQ ID NO: 22366 - protein, 5 aa, Artificial Sequence
  Description of Artificial Sequence: Synthetic peptide
  XENP021901 vhCDR1
DAWMD

SEQ ID NO: 22367 - protein, 19 aa, Artificial Sequence
  Description of Artificial Sequence: Synthetic peptide
  XENP021901 vhCDR2
EISTKANNHATYYAESVKG

SEQ ID NO: 22368 - protein, 10 aa, Artificial Sequence
  Description of Artificial Sequence: Synthetic peptide
  XENP021901 vhCDR3
LATWDWYFDV

SEQ ID NO: 22369 - protein, 477 aa, Artificial Sequence; identical to SEQ ID NO: 21669
  Description of Artificial Sequence: Synthetic polypeptide
  XENP021901 7G8_H3.15_L1.11-ipilimumab_H3.23_L0.129 scFv-Fc Heavy Chain

SEQ ID NO: 22370 - protein, 118 aa, Artificial Sequence; identical to SEQ ID NO: 2632
  Description of Artificial Sequence: Synthetic polypeptide
  VH of XENP021901

SEQ ID NO: 22371 - protein, 108 aa, Artificial Sequence; identical to SEQ ID NO: 2768
  Description of Artificial Sequence: Synthetic polypeptide
  VL of XENP021901

SEQ ID NO: 22372 - protein, 231 aa, Artificial Sequence; identical to SEQ ID NO: 21532
  Description of Artificial Sequence: Synthetic polypeptide
  Fc chain of XENP021901

SEQ ID NO: 22373 - protein, 5 aa, Artificial Sequence
  Description of Artificial Sequence: Synthetic peptide
  XENP021901 vhCDR1
SYTMH

SEQ ID NO: 22374 - protein, 17 aa, Artificial Sequence
  Description of Artificial Sequence: Synthetic peptide
  XENP021901 vhCDR2
FISYDGNYKYYADSVKG

SEQ ID NO: 22375 - protein, 9 aa, Artificial Sequence
  Description of Artificial Sequence: Synthetic peptide
  XENP021901 vhCDR3
GGHLGPFDL

SEQ ID NO: 22376 - protein, 12 aa, Artificial Sequence
  Description of Artificial Sequence: Synthetic peptide
  XENP021901 vlCDR1
RASQSVGSSYLA

SEQ ID NO: 22377 - protein, 7 aa, Artificial Sequence
  Description of Artificial Sequence: Synthetic peptide
  XENP021901 vlCDR2
GASSRAT

SEQ ID NO: 22378 - protein, 9 aa, Artificial Sequence
  Description of Artificial Sequence: Synthetic peptide
  XENP021901 vlCDR3
QQYGSSPWT

SEQ ID NO: 22379 - protein, 218 aa, Artificial Sequence; identical to SEQ ID NO: 22359
  Description of Artificial Sequence: Synthetic polypeptide
  XENP021901 7G8_H3.15_L1.11-ipilimumab_H3.23_L0.129 Light Chain

SEQ ID NO: 22380 - protein, 111 aa, Artificial Sequence; identical to SEQ ID NO: 22360
  Description of Artificial Sequence: Synthetic polypeptide
  VL of XENP021901

SEQ ID NO: 22381 - protein, 15 aa, Artificial Sequence
  Description of Artificial Sequence: Synthetic peptide
  XENP021901 vlCDR1
RASQSVDYDGDSYMN

SEQ ID NO: 22382 - protein, 7 aa, Artificial Sequence
  Description of Artificial Sequence: Synthetic peptide
  XENP021901 vlCDR2
AASELES

SEQ ID NO: 22383 - protein, 9 aa, Artificial Sequence
  Description of Artificial Sequence: Synthetic peptide
  XENP021901 vlCDR3
QQSNEDPFT

SEQ ID NO: 22384 - protein, 450 aa, Artificial Sequence
  Description of Artificial Sequence: Synthetic polypeptide
  XENP021902 7G8_H3.23_L1.11-ipilimumab_H3.23_L0.129 Fab-Fc Heavy Chain
EVQLVESGGGLVQPGGSLRLSCAASGFTFSDAWMDWVRQAPGKGLEWVAEISTKANNHATYYAESVKGRFTISRDDSKSSVYLQMNSLRAEDTAVYYCTRLATWDWYFDVWGQGTTVTVSSASTKGPSVFPLAPSSKSTSGGTAALGCLVKDYFPEPVTVSWNSGALTSGVHTFPAVLQSSGLYSLSSVVTVPSSSLGTQTYICNVNHKPSDTKVDKKVEPKSCDKTHTCPPCPAPPVAGPSVFLFPPKPKDTLMISRTPEVTCVVVDVKHEDPEVKFNWYVDGVEVHNAKTKPREEEYNSTYRVVSVLTVLHQDWLNGKEYKCKVSNKALPAPIEKTISKAKGQPREPQVYTLPPSREEMTKNQVSLTCDVSGFYPSDIAVEWESDGQPENNYKTTPPVLDSDGSFFLYSKLTVDKSRWEQGDVFSCSVMHEALHNHYTQKSLSLSPGK

SEQ ID NO: 22385 - protein, 121 aa, Artificial Sequence
  Description of Artificial Sequence: Synthetic polypeptide
  VH of XENP021902
EVQLVESGGGLVQPGGSLRLSCAASGFTFSDAWMDWVRQAPGKGLEWVAEISTKANNHATYYAESVKGRFTISRDDSKSSVYLQMNSLRAEDTAVYYCTRLATWDWYFDVWGQGTTVTVSS

SEQ ID NO: 22386 - protein, 5 aa, Artificial Sequence
  Description of Artificial Sequence: Synthetic peptide
  XENP021902 vhCDR1
DAWMD

SEQ ID NO: 22387 - protein, 19 aa, Artificial Sequence
  Description of Artificial Sequence: Synthetic peptide
  XENP021902 vhCDR2
EISTKANNHATYYAESVKG

SEQ ID NO: 22388 - protein, 10 aa, Artificial Sequence
  Description of Artificial Sequence: Synthetic peptide
  XENP021902 vhCDR3
LATWDWYFDV

SEQ ID NO: 22389 - protein, 477 aa, Artificial Sequence; identical to SEQ ID NO: 21669
  Description of Artificial Sequence: Synthetic polypeptide
  XENP021902 7G8_H3.23_L1.11-ipilimumab_H3.23_L0.129 scFv-Fc Heavy Chain

SEQ ID NO: 22390 - protein, 118 aa, Artificial Sequence; identical to SEQ ID NO: 2632
  Description of Artificial Sequence: Synthetic polypeptide
  VH of XENP021902

SEQ ID NO: 22391 - protein, 108 aa, Artificial Sequence; identical to SEQ ID NO: 2768
  Description of Artificial Sequence: Synthetic polypeptide
  VL of XENP021902

SEQ ID NO: 22392 - protein, 231 aa, Artificial Sequence; identical to SEQ ID NO: 21532
  Description of Artificial Sequence: Synthetic polypeptide
  Fc chain of XENP021902

SEQ ID NO: 22393 - protein, 5 aa, Artificial Sequence
  Description of Artificial Sequence: Synthetic peptide
  XENP021902 vhCDR1
SYTMH

SEQ ID NO: 22394 - protein, 17 aa, Artificial Sequence
  Description of Artificial Sequence: Synthetic peptide
  XENP021902 vhCDR2
FISYDGNYKYYADSVKG

SEQ ID NO: 22395 - protein, 9 aa, Artificial Sequence
  Description of Artificial Sequence: Synthetic peptide
  XENP021902 vhCDR3
GGHLGPFDL

SEQ ID NO: 22396 - protein, 12 aa, Artificial Sequence
  Description of Artificial Sequence: Synthetic peptide
  XENP021902 vlCDR1
RASQSVGSSYLA

SEQ ID NO: 22397 - protein, 7 aa, Artificial Sequence
  Description of Artificial Sequence: Synthetic peptide
  XENP021902 vlCDR2
GASSRAT

SEQ ID NO: 22398 - protein, 9 aa, Artificial Sequence
  Description of Artificial Sequence: Synthetic peptide
  XENP021902 vlCDR3
QQYGSSPWT

SEQ ID NO: 22399 - protein, 218 aa, Artificial Sequence; identical to SEQ ID NO: 22359
  Description of Artificial Sequence: Synthetic polypeptide
  XENP021902 7G8_H3.23_L1.11-ipilimumab_H3.23_L0.129 Light Chain

SEQ ID NO: 22400 - protein, 111 aa, Artificial Sequence; identical to SEQ ID NO: 22360
  Description of Artificial Sequence: Synthetic polypeptide
  VL of XENP021902

SEQ ID NO: 22401 - protein, 15 aa, Artificial Sequence
  Description of Artificial Sequence: Synthetic peptide
  XENP021902 vlCDR1
RASQSVDYDGDSYMN

SEQ ID NO: 22402 - protein, 7 aa, Artificial Sequence
  Description of Artificial Sequence: Synthetic peptide
  XENP021902 vlCDR2
AASELES

SEQ ID NO: 22403 - protein, 9 aa, Artificial Sequence
  Description of Artificial Sequence: Synthetic peptide
  XENP021902 vlCDR3
QQSNEDPFT

SEQ ID NO: 22404 - protein, 450 aa, Artificial Sequence; identical to SEQ ID NO: 22324
  Description of Artificial Sequence: Synthetic polypeptide
  XENP021903 7G8_H3.18_L1.13-ipilimumab_H3.23_L0.129 Fab-Fc Heavy Chain

SEQ ID NO: 22405 - protein, 121 aa, Artificial Sequence; identical to SEQ ID NO: 22325
  Description of Artificial Sequence: Synthetic polypeptide
  VH of XENP021903

SEQ ID NO: 22406 - protein, 5 aa, Artificial Sequence
  Description of Artificial Sequence: Synthetic peptide
  XENP021903 vhCDR1
DAWMD

SEQ ID NO: 22407 - protein, 19 aa, Artificial Sequence
  Description of Artificial Sequence: Synthetic peptide
  XENP021903 vhCDR2
EISTKANNHATYYAESVKG

SEQ ID NO: 22408 - protein, 10 aa, Artificial Sequence
  Description of Artificial Sequence: Synthetic peptide
  XENP021903 vhCDR3
LATWDWYFDV

SEQ ID NO: 22409 - protein, 477 aa, Artificial Sequence; identical to SEQ ID NO: 21669
  Description of Artificial Sequence: Synthetic polypeptide
  XENP021903 7G8_H3.18_L1.13-ipilimumab_H3.23_L0.129 scFv-Fc Heavy Chain

SEQ ID NO: 22410 - protein, 118 aa, Artificial Sequence; identical to SEQ ID NO: 2632
  Description of Artificial Sequence: Synthetic polypeptide
  VH of XENP021903

SEQ ID NO: 22411 - protein, 108 aa, Artificial Sequence; identical to SEQ ID NO: 2768
  Description of Artificial Sequence: Synthetic polypeptide
  VL of XENP021903

SEQ ID NO: 22412 - protein, 231 aa, Artificial Sequence; identical to SEQ ID NO: 21532
  Description of Artificial Sequence: Synthetic polypeptide
  Fc chain of XENP021903

SEQ ID NO: 22413 - protein, 5 aa, Artificial Sequence
  Description of Artificial Sequence: Synthetic peptide
  XENP021903 vhCDR1
SYTMH

SEQ ID NO: 22414 - protein, 17 aa, Artificial Sequence
  Description of Artificial Sequence: Synthetic peptide
  XENP021903 vhCDR2
FISYDGNYKYYADSVKG

SEQ ID NO: 22415 - protein, 9 aa, Artificial Sequence
  Description of Artificial Sequence: Synthetic peptide
  XENP021903 vhCDR3
GGHLGPFDL

SEQ ID NO: 22416 - protein, 12 aa, Artificial Sequence
  Description of Artificial Sequence: Synthetic peptide
  XENP021903 vlCDR1
RASQSVGSSYLA

SEQ ID NO: 22417 - protein, 7 aa, Artificial Sequence
  Description of Artificial Sequence: Synthetic peptide
  XENP021903 vlCDR2
GASSRAT

SEQ ID NO: 22418 - protein, 9 aa, Artificial Sequence
  Description of Artificial Sequence: Synthetic peptide
  XENP021903 vlCDR3
QQYGSSPWT

SEQ ID NO: 22419 - protein, 218 aa, Artificial Sequence
  Description of Artificial Sequence: Synthetic polypeptide
  XENP021903 7G8_H3.18_L1.13-ipilimumab_H3.23_L0.129 Light Chain
DTVLTQSPSSLSASVGDRVTITCRASQSVDHDGDSYMNWYQQKPGKPPKLLIYAASELESGIPARLSGSGSGTDFTLTISSLQPEDFATYYCQQSNEDPFTFGSGTKLEIKRTVAAPSVFIFPPSDEQLKSGTASVVCLLNNFYPREAKVQWKVDNALQSGNSQESVTEQDSKDSTYSLSSTLTLSKADYEKHKVYACEVTHQGLSSPVTKSFNRGEC

SEQ ID NO: 22420 - protein, 111 aa, Artificial Sequence
  Description of Artificial Sequence: Synthetic polypeptide
  VL of XENP021903
DTVLTQSPSSLSASVGDRVTITCRASQSVDHDGDSYMNWYQQKPGKPPKLLIYAASELESGIPARLSGSGSGTDFTLTISSLQPEDFATYYCQQSNEDPFTFGSGTKLEIK

SEQ ID NO: 22421 - protein, 15 aa, Artificial Sequence
  Description of Artificial Sequence: Synthetic peptide
  XENP021903 vlCDR1
RASQSVDHDGDSYMN

SEQ ID NO: 22422 - protein, 7 aa, Artificial Sequence
  Description of Artificial Sequence: Synthetic peptide
  XENP021903 vlCDR2
AASELES

SEQ ID NO: 22423 - protein, 9 aa, Artificial Sequence
  Description of Artificial Sequence: Synthetic peptide
  XENP021903 vlCDR3
QQSNEDPFT

SEQ ID NO: 22424 - protein, 450 aa, Artificial Sequence
  Description of Artificial Sequence: Synthetic polypeptide
  XENP021904 7G8_H3.28_L1-ipilimumab_H3.23_L0.129 Fab-Fc Heavy Chain
EVQLVESGGGLVQPGGSLRLSCAASGFTFDDAWMDWVRQAPGKGLEWVAEISTKAYNHATYYAESVKGRFTISRDDSKSSVYLQMNSLRAEDTAVYYCTRLATWDWYFDVWGQGTTVTVSSASTKGPSVFPLAPSSKSTSGGTAALGCLVKDYFPEPVTVSWNSGALTSGVHTFPAVLQSSGLYSLSSVVTVPSSSLGTQTYICNVNHKPSDTKVDKKVEPKSCDKTHTCPPCPAPPVAGPSVFLFPPKPKDTLMISRTPEVTCVVVDVKHEDPEVKFNWYVDGVEVHNAKTKPREEEYNSTYRVVSVLTVLHQDWLNGKEYKCKVSNKALPAPIEKTISKAKGQPREPQVYTLPPSREEMTKNQVSLTCDVSGFYPSDIAVEWESDGQPENNYKTTPPVLDSDGSFFLYSKLTVDKSRWEQGDVFSCSVMHEALHNHYTQKSLSLSPGK

SEQ ID NO: 22425 - protein, 121 aa, Artificial Sequence
  Description of Artificial Sequence: Synthetic polypeptide
  VH of XENP021904
EVQLVESGGGLVQPGGSLRLSCAASGFTFDDAWMDWVRQAPGKGLEWVAEISTKAYNHATYYAESVKGRFTISRDDSKSSVYLQMNSLRAEDTAVYYCTRLATWDWYFDVWGQGTTVTVSS

SEQ ID NO: 22426 - protein, 5 aa, Artificial Sequence
  Description of Artificial Sequence: Synthetic peptide
  XENP021904 vhCDR1
DAWMD

SEQ ID NO: 22427 - protein, 19 aa, Artificial Sequence
  Description of Artificial Sequence: Synthetic peptide
  XENP021904 vhCDR2
EISTKAYNHATYYAESVKG

SEQ ID NO: 22428 - protein, 10 aa, Artificial Sequence
  Description of Artificial Sequence: Synthetic peptide
  XENP021904 vhCDR3
LATWDWYFDV

SEQ ID NO: 22429 - protein, 477 aa, Artificial Sequence; identical to SEQ ID NO: 21669
  Description of Artificial Sequence: Synthetic polypeptide
  XENP021904 7G8_H3.28_L1-ipilimumab_H3.23_L0.129 scFv-Fc Heavy Chain

SEQ ID NO: 22430 - protein, 118 aa, Artificial Sequence; identical to SEQ ID NO: 2632
  Description of Artificial Sequence: Synthetic polypeptide
  VH of XENP021904

SEQ ID NO: 22431 - protein, 108 aa, Artificial Sequence; identical to SEQ ID NO: 2768
  Description of Artificial Sequence: Synthetic polypeptide
  VL of XENP021904

SEQ ID NO: 22432 - protein, 231 aa, Artificial Sequence; identical to SEQ ID NO: 21532
  Description of Artificial Sequence: Synthetic polypeptide
  Fc chain of XENP021904

SEQ ID NO: 22433 - protein, 5 aa, Artificial Sequence
  Description of Artificial Sequence: Synthetic peptide
  XENP021904 vhCDR1
SYTMH

SEQ ID NO: 22434 - protein, 17 aa, Artificial Sequence
  Description of Artificial Sequence: Synthetic peptide
  XENP021904 vhCDR2
FISYDGNYKYYADSVKG

SEQ ID NO: 22435 - protein, 9 aa, Artificial Sequence
  Description of Artificial Sequence: Synthetic peptide
  XENP021904 vhCDR3
GGHLGPFDL

SEQ ID NO: 22436 - protein, 12 aa, Artificial Sequence
  Description of Artificial Sequence: Synthetic peptide
  XENP021904 vlCDR1
RASQSVGSSYLA

SEQ ID NO: 22437 - protein, 7 aa, Artificial Sequence
  Description of Artificial Sequence: Synthetic peptide
  XENP021904 vlCDR2
GASSRAT

SEQ ID NO: 22438 - protein, 9 aa, Artificial Sequence
  Description of Artificial Sequence: Synthetic peptide
  XENP021904 vlCDR3
QQYGSSPWT

SEQ ID NO: 22439 - protein, 218 aa, Artificial Sequence; identical to SEQ ID NO: 17600
  Description of Artificial Sequence: Synthetic polypeptide
  XENP021904 7G8_H3.28_L1-ipilimumab_H3.23_L0.129 Light Chain

SEQ ID NO: 22440 - protein, 111 aa, Artificial Sequence; identical to SEQ ID NO: 17601
  Description of Artificial Sequence: Synthetic polypeptide
  VL of XENP021904

SEQ ID NO: 22441 - protein, 15 aa, Artificial Sequence
  Description of Artificial Sequence: Synthetic peptide
  XENP021904 vlCDR1
RASQSVDYDGDSYMN

SEQ ID NO: 22442 - protein, 7 aa, Artificial Sequence
  Description of Artificial Sequence: Synthetic peptide
  XENP021904 vlCDR2
AASNLES

SEQ ID NO: 22443 - protein, 9 aa, Artificial Sequence
  Description of Artificial Sequence: Synthetic peptide
  XENP021904 vlCDR3
QQSNEDPFT

SEQ ID NO: 22444 - protein, 450 aa, Artificial Sequence; identical to SEQ ID NO: 22424
  Description of Artificial Sequence: Synthetic polypeptide
  XENP021905 7G8_H3.28_L1.11-ipilimumab_H3.23_L0.129 Fab-Fc Heavy Chain

SEQ ID NO: 22445 - protein, 121 aa, Artificial Sequence; identical to SEQ ID NO: 22425
  Description of Artificial Sequence: Synthetic polypeptide
  VH of XENP021905

SEQ ID NO: 22446 - protein, 5 aa, Artificial Sequence
  Description of Artificial Sequence: Synthetic peptide
  XENP021905 vhCDR1
DAWMD

SEQ ID NO: 22447 - protein, 19 aa, Artificial Sequence
  Description of Artificial Sequence: Synthetic peptide
  XENP021905 vhCDR2
EISTKAYNHATYYAESVKG

SEQ ID NO: 22448 - protein, 10 aa, Artificial Sequence
  Description of Artificial Sequence: Synthetic peptide
  XENP021905 vhCDR3
LATWDWYFDV

SEQ ID NO: 22449 - protein, 477 aa, Artificial Sequence; identical to SEQ ID NO: 21669
  Description of Artificial Sequence: Synthetic polypeptide
  XENP021905 7G8_H3.28_L1.11-ipilimumab_H3.23_L0.129 scFv-Fc Heavy Chain

SEQ ID NO: 22450 - protein, 118 aa, Artificial Sequence; identical to SEQ ID NO: 2632
  Description of Artificial Sequence: Synthetic polypeptide
  VH of XENP021905

SEQ ID NO: 22451 - protein, 108 aa, Artificial Sequence; identical to SEQ ID NO: 2768
  Description of Artificial Sequence: Synthetic polypeptide
  VL of XENP021905

SEQ ID NO: 22452 - protein, 231 aa, Artificial Sequence; identical to SEQ ID NO: 21532
  Description of Artificial Sequence: Synthetic polypeptide
  Fc chain of XENP021905

SEQ ID NO: 22453 - protein, 5 aa, Artificial Sequence
  Description of Artificial Sequence: Synthetic peptide
  XENP021905 vhCDR1
SYTMH

SEQ ID NO: 22454 - protein, 17 aa, Artificial Sequence
  Description of Artificial Sequence: Synthetic peptide
  XENP021905 vhCDR2
FISYDGNYKYYADSVKG

SEQ ID NO: 22455 - protein, 9 aa, Artificial Sequence
  Description of Artificial Sequence: Synthetic peptide
  XENP021905 vhCDR3
GGHLGPFDL

SEQ ID NO: 22456 - protein, 12 aa, Artificial Sequence
  Description of Artificial Sequence: Synthetic peptide
  XENP021905 vlCDR1
RASQSVGSSYLA

SEQ ID NO: 22457 - protein, 7 aa, Artificial Sequence
  Description of Artificial Sequence: Synthetic peptide
  XENP021905 vlCDR2
GASSRAT

SEQ ID NO: 22458 - protein, 9 aa, Artificial Sequence
  Description of Artificial Sequence: Synthetic peptide
  XENP021905 vlCDR3
QQYGSSPWT

SEQ ID NO: 22459 - protein, 218 aa, Artificial Sequence; identical to SEQ ID NO: 22359
  Description of Artificial Sequence: Synthetic polypeptide
  XENP021905 7G8_H3.28_L1.11-ipilimumab_H3.23_L0.129 Light Chain

SEQ ID NO: 22460 - protein, 111 aa, Artificial Sequence; identical to SEQ ID NO: 22360
  Description of Artificial Sequence: Synthetic polypeptide
  VL of XENP021905

SEQ ID NO: 22461 - protein, 15 aa, Artificial Sequence
  Description of Artificial Sequence: Synthetic peptide
  XENP021905 vlCDR1
RASQSVDYDGDSYMN

SEQ ID NO: 22462 - protein, 7 aa, Artificial Sequence
  Description of Artificial Sequence: Synthetic peptide
  XENP021905 vlCDR2
AASELES

SEQ ID NO: 22463 - protein, 9 aa, Artificial Sequence
  Description of Artificial Sequence: Synthetic peptide
  XENP021905 vlCDR3
QQSNEDPFT

SEQ ID NO: 22464 - protein, 450 aa, Artificial Sequence; identical to SEQ ID NO: 22424
  Description of Artificial Sequence: Synthetic polypeptide
  XENP021906 7G8_H3.28_L1.13-ipilimumab_H3.23_L0.129 Fab-Fc Heavy Chain

SEQ ID NO: 22465 - protein, 121 aa, Artificial Sequence; identical to SEQ ID NO: 22425
  Description of Artificial Sequence: Synthetic polypeptide
  VH of XENP021906

SEQ ID NO: 22466 - protein, 5 aa, Artificial Sequence
  Description of Artificial Sequence: Synthetic peptide
  XENP021906 vhCDR1
DAWMD

SEQ ID NO: 22467 - protein, 19 aa, Artificial Sequence
  Description of Artificial Sequence: Synthetic peptide
  XENP021906 vhCDR2
EISTKAYNHATYYAESVKG

SEQ ID NO: 22468 - protein, 10 aa, Artificial Sequence
  Description of Artificial Sequence: Synthetic peptide
  XENP021906 vhCDR3
LATWDWYFDV

SEQ ID NO: 22469 - protein, 477 aa, Artificial Sequence; identical to SEQ ID NO: 21669
  Description of Artificial Sequence: Synthetic polypeptide
  XENP021906 7G8_H3.28_L1.13-ipilimumab_H3.23_L0.129 scFv-Fc Heavy Chain

SEQ ID NO: 22470 - protein, 118 aa, Artificial Sequence; identical to SEQ ID NO: 2632
  Description of Artificial Sequence: Synthetic polypeptide
  VH of XENP021906

SEQ ID NO: 22471 - protein, 108 aa, Artificial Sequence; identical to SEQ ID NO: 2768
  Description of Artificial Sequence: Synthetic polypeptide
  VL of XENP021906

SEQ ID NO: 22472 - protein, 231 aa, Artificial Sequence; identical to SEQ ID NO: 21532
  Description of Artificial Sequence: Synthetic polypeptide
  Fc chain of XENP021906

SEQ ID NO: 22473 - protein, 5 aa, Artificial Sequence
  Description of Artificial Sequence: Synthetic peptide
  XENP021906 vhCDR1
SYTMH

SEQ ID NO: 22474 - protein, 17 aa, Artificial Sequence
  Description of Artificial Sequence: Synthetic peptide
  XENP021906 vhCDR2
FISYDGNYKYYADSVKG

SEQ ID NO: 22475 - protein, 9 aa, Artificial Sequence
  Description of Artificial Sequence: Synthetic peptide
  XENP021906 vhCDR3
GGHLGPFDL

SEQ ID NO: 22476 - protein, 12 aa, Artificial Sequence
  Description of Artificial Sequence: Synthetic peptide
  XENP021906 vlCDR1
RASQSVGSSYLA

SEQ ID NO: 22477 - protein, 7 aa, Artificial Sequence
  Description of Artificial Sequence: Synthetic peptide
  XENP021906 vlCDR2
GASSRAT

SEQ ID NO: 22478 - protein, 9 aa, Artificial Sequence
  Description of Artificial Sequence: Synthetic peptide
  XENP021906 vlCDR3
QQYGSSPWT

SEQ ID NO: 22479 - protein, 218 aa, Artificial Sequence; identical to SEQ ID NO: 22419
  Description of Artificial Sequence: Synthetic polypeptide
  XENP021906 7G8_H3.28_L1.13-ipilimumab_H3.23_L0.129 Light Chain

SEQ ID NO: 22480 - protein, 111 aa, Artificial Sequence; identical to SEQ ID NO: 22420
  Description of Artificial Sequence: Synthetic polypeptide
  VL of XENP021906

SEQ ID NO: 22481 - protein, 15 aa, Artificial Sequence
  Description of Artificial Sequence: Synthetic peptide
  XENP021906 vlCDR1
RASQSVDHDGDSYMN

SEQ ID NO: 22482 - protein, 7 aa, Artificial Sequence
  Description of Artificial Sequence: Synthetic peptide
  XENP021906 vlCDR2
AASELES

SEQ ID NO: 22483 - protein, 9 aa, Artificial Sequence
  Description of Artificial Sequence: Synthetic peptide
  XENP021906 vlCDR3
QQSNEDPFT

SEQ ID NO: 22484 - protein, 450 aa, Artificial Sequence
  Description of Artificial Sequence: Synthetic polypeptide
  XENP022555 7G8_H3.30_L1.11-ipilimumab_H3.23_L0.129 Fab-Fc Heavy Chain
EVQLVESGGGLVQPGGSLRLSCAASGFTFDDAWMSWVRQAPGKGLEWVAEISTKANNHATYYAESVKGRFTISRDDSKSSVYLQMNSLRAEDTAVYYCTRLATWDWYFDVWGQGTTVTVSSASTKGPSVFPLAPSSKSTSGGTAALGCLVKDYFPEPVTVSWNSGALTSGVHTFPAVLQSSGLYSLSSVVTVPSSSLGTQTYICNVNHKPSDTKVDKKVEPKSCDKTHTCPPCPAPPVAGPSVFLFPPKPKDTLMISRTPEVTCVVVDVKHEDPEVKFNWYVDGVEVHNAKTKPREEEYNSTYRVVSVLTVLHQDWLNGKEYKCKVSNKALPAPIEKTISKAKGQPREPQVYTLPPSREEMTKNQVSLTCDVSGFYPSDIAVEWESDGQPENNYKTTPPVLDSDGSFFLYSKLTVDKSRWEQGDVFSCSVMHEALHNHYTQKSLSLSPGK

SEQ ID NO: 22485 - protein, 121 aa, Artificial Sequence
  Description of Artificial Sequence: Synthetic polypeptide
  VH of XENP022555
EVQLVESGGGLVQPGGSLRLSCAASGFTFDDAWMSWVRQAPGKGLEWVAEISTKANNHATYYAESVKGRFTISRDDSKSSVYLQMNSLRAEDTAVYYCTRLATWDWYFDVWGQGTTVTVSS

SEQ ID NO: 22486 - protein, 5 aa, Artificial Sequence
  Description of Artificial Sequence: Synthetic peptide
  XENP022555 vhCDR1
DAWMS

SEQ ID NO: 22487 - protein, 19 aa, Artificial Sequence
  Description of Artificial Sequence: Synthetic peptide
  XENP022555 vhCDR2
EISTKANNHATYYAESVKG

SEQ ID NO: 22488 - protein, 10 aa, Artificial Sequence
  Description of Artificial Sequence: Synthetic peptide
  XENP022555 vhCDR3
LATWDWYFDV

SEQ ID NO: 22489 - protein, 477 aa, Artificial Sequence; identical to SEQ ID NO: 21669
  Description of Artificial Sequence: Synthetic polypeptide
  XENP022555 7G8_H3.30_L1.11-ipilimumab_H3.23_L0.129 scFv-Fc Heavy Chain

SEQ ID NO: 22490 - protein, 118 aa, Artificial Sequence; identical to SEQ ID NO: 2632
  Description of Artificial Sequence: Synthetic polypeptide
  VH of XENP022555

SEQ ID NO: 22491 - protein, 108 aa, Artificial Sequence; identical to SEQ ID NO: 2768
  Description of Artificial Sequence: Synthetic polypeptide
  VL of XENP022555

SEQ ID NO: 22492 - protein, 231 aa, Artificial Sequence; identical to SEQ ID NO: 21532
  Description of Artificial Sequence: Synthetic polypeptide
  Fc chain of XENP022555

SEQ ID NO: 22493 - protein, 5 aa, Artificial Sequence
  Description of Artificial Sequence: Synthetic peptide
  XENP022555 vhCDR1
SYTMH

SEQ ID NO: 22494 - protein, 17 aa, Artificial Sequence
  Description of Artificial Sequence: Synthetic peptide
  XENP022555 vhCDR2
FISYDGNYKYYADSVKG

SEQ ID NO: 22495 - protein, 9 aa, Artificial Sequence
  Description of Artificial Sequence: Synthetic peptide
  XENP022555 vhCDR3
GGHLGPFDL

SEQ ID NO: 22496 - protein, 12 aa, Artificial Sequence
  Description of Artificial Sequence: Synthetic peptide
  XENP022555 vlCDR1
RASQSVGSSYLA

SEQ ID NO: 22497 - protein, 7 aa, Artificial Sequence
  Description of Artificial Sequence: Synthetic peptide
  XENP022555 vlCDR2
GASSRAT

SEQ ID NO: 22498 - protein, 9 aa, Artificial Sequence
  Description of Artificial Sequence: Synthetic peptide
  XENP022555 vlCDR3
QQYGSSPWT

SEQ ID NO: 22499 - protein, 218 aa, Artificial Sequence; identical to SEQ ID NO: 22359
  Description of Artificial Sequence: Synthetic polypeptide
  XENP022555 7G8_H3.30_L1.11-ipilimumab_H3.23_L0.129 Light Chain

SEQ ID NO: 22500 - protein, 111 aa, Artificial Sequence; identical to SEQ ID NO: 22360
  Description of Artificial Sequence: Synthetic polypeptide
  VL of XENP022555

SEQ ID NO: 22501 - protein, 15 aa, Artificial Sequence
  Description of Artificial Sequence: Synthetic peptide
  XENP022555 vlCDR1
RASQSVDYDGDSYMN

SEQ ID NO: 22502 - protein, 7 aa, Artificial Sequence
  Description of Artificial Sequence: Synthetic peptide
  XENP022555 vlCDR2
AASELES

SEQ ID NO: 22503 - protein, 9 aa, Artificial Sequence
  Description of Artificial Sequence: Synthetic peptide
  XENP022555 vlCDR3
QQSNEDPFT

SEQ ID NO: 22504 - protein, 450 aa, Artificial Sequence
  Description of Artificial Sequence: Synthetic polypeptide
  XENP022556 7G8_H3.33_L1.11-ipilimumab_H3.23_L0.129 Fab-Fc Heavy Chain
EVQLVESGGGLVQPGGSLRLSCAASGFTFDDAWMGWVRQAPGKGLEWVAEISTKANNHATYYAESVKGRFTISRDDSKSSVYLQMNSLRAEDTAVYYCTRLATWDWYFDVWGQGTTVTVSSASTKGPSVFPLAPSSKSTSGGTAALGCLVKDYFPEPVTVSWNSGALTSGVHTFPAVLQSSGLYSLSSVVTVPSSSLGTQTYICNVNHKPSDTKVDKKVEPKSCDKTHTCPPCPAPPVAGPSVFLFPPKPKDTLMISRTPEVTCVVVDVKHEDPEVKFNWYVDGVEVHNAKTKPREEEYNSTYRVVSVLTVLHQDWLNGKEYKCKVSNKALPAPIEKTISKAKGQPREPQVYTLPPSREEMTKNQVSLTCDVSGFYPSDIAVEWESDGQPENNYKTTPPVLDSDGSFFLYSKLTVDKSRWEQGDVFSCSVMHEALHNHYTQKSLSLSPGK

SEQ ID NO: 22505 - protein, 121 aa, Artificial Sequence
  Description of Artificial Sequence: Synthetic polypeptide
  VH of XENP022556
EVQLVESGGGLVQPGGSLRLSCAASGFTFDDAWMGWVRQAPGKGLEWVAEISTKANNHATYYAESVKGRFTISRDDSKSSVYLQMNSLRAEDTAVYYCTRLATWDWYFDVWGQGTTVTVSS

SEQ ID NO: 22506 - protein, 5 aa, Artificial Sequence
  Description of Artificial Sequence: Synthetic peptide
  XENP022556 vhCDR1
DAWMG

SEQ ID NO: 22507 - protein, 19 aa, Artificial Sequence
  Description of Artificial Sequence: Synthetic peptide
  XENP022556 vhCDR2
EISTKANNHATYYAESVKG

SEQ ID NO: 22508 - protein, 10 aa, Artificial Sequence
  Description of Artificial Sequence: Synthetic peptide
  XENP022556 vhCDR3
LATWDWYFDV

SEQ ID NO: 22509 - protein, 477 aa, Artificial Sequence; identical to SEQ ID NO: 21669
  Description of Artificial Sequence: Synthetic polypeptide
  XENP022556 7G8_H3.33_L1.11-ipilimumab_H3.23_L0.129 scFv-Fc Heavy Chain

SEQ ID NO: 22510 - protein, 118 aa, Artificial Sequence; identical to SEQ ID NO: 2632
  Description of Artificial Sequence: Synthetic polypeptide
  VH of XENP022556

SEQ ID NO: 22511 - protein, 108 aa, Artificial Sequence; identical to SEQ ID NO: 2768
  Description of Artificial Sequence: Synthetic polypeptide
  VL of XENP022556

SEQ ID NO: 22512 - protein, 231 aa, Artificial Sequence; identical to SEQ ID NO: 21532
  Description of Artificial Sequence: Synthetic polypeptide
  Fc chain of XENP022556

SEQ ID NO: 22513 - protein, 5 aa, Artificial Sequence
  Description of Artificial Sequence: Synthetic peptide
  XENP022556 vhCDR1
SYTMH

SEQ ID NO: 22514 - protein, 17 aa, Artificial Sequence
  Description of Artificial Sequence: Synthetic peptide
  XENP022556 vhCDR2
FISYDGNYKYYADSVKG

SEQ ID NO: 22515 - protein, 9 aa, Artificial Sequence
  Description of Artificial Sequence: Synthetic peptide
  XENP022556 vhCDR3
GGHLGPFDL

SEQ ID NO: 22516 - protein, 12 aa, Artificial Sequence
  Description of Artificial Sequence: Synthetic peptide
  XENP022556 vlCDR1
RASQSVGSSYLA

SEQ ID NO: 22517 - protein, 7 aa, Artificial Sequence
  Description of Artificial Sequence: Synthetic peptide
  XENP022556 vlCDR2
GASSRAT

SEQ ID NO: 22518 - protein, 9 aa, Artificial Sequence
  Description of Artificial Sequence: Synthetic peptide
  XENP022556 vlCDR3
QQYGSSPWT

SEQ ID NO: 22519 - protein, 218 aa, Artificial Sequence; identical to SEQ ID NO: 22359
  Description of Artificial Sequence: Synthetic polypeptide
  XENP022556 7G8_H3.33_L1.11-ipilimumab_H3.23_L0.129 Light Chain

SEQ ID NO: 22520 - protein, 111 aa, Artificial Sequence; identical to SEQ ID NO: 22360
  Description of Artificial Sequence: Synthetic polypeptide
  VL of XENP022556

SEQ ID NO: 22521 - protein, 15 aa, Artificial Sequence
  Description of Artificial Sequence: Synthetic peptide
  XENP022556 vlCDR1
RASQSVDYDGDSYMN

SEQ ID NO: 22522 - protein, 7 aa, Artificial Sequence
  Description of Artificial Sequence: Synthetic peptide
  XENP022556 vlCDR2
AASELES

SEQ ID NO: 22523 - protein, 9 aa, Artificial Sequence
  Description of Artificial Sequence: Synthetic peptide
  XENP022556 vlCDR3
QQSNEDPFT

SEQ ID NO: 22524 - protein, 450 aa, Artificial Sequence; identical to SEQ ID NO: 22324
  Description of Artificial Sequence: Synthetic polypeptide
  XENP022557 7G8_H3.18_L1.30-ipilimumab_H3.23_L0.129 Fab-Fc Heavy Chain

SEQ ID NO: 22525 - protein, 121 aa, Artificial Sequence; identical to SEQ ID NO: 22325
  Description of Artificial Sequence: Synthetic polypeptide
  VH of XENP022557

SEQ ID NO: 22526 - protein, 5 aa, Artificial Sequence
  Description of Artificial Sequence: Synthetic peptide
  XENP022557 vhCDR1
DAWMD

SEQ ID NO: 22527 - protein, 19 aa, Artificial Sequence
  Description of Artificial Sequence: Synthetic peptide
  XENP022557 vhCDR2
EISTKANNHATYYAESVKG

SEQ ID NO: 22528 - protein, 10 aa, Artificial Sequence
  Description of Artificial Sequence: Synthetic peptide
  XENP022557 vhCDR3
LATWDWYFDV

SEQ ID NO: 22529 - protein, 477 aa, Artificial Sequence; identical to SEQ ID NO: 21669
  Description of Artificial Sequence: Synthetic polypeptide
  XENP022557 7G8_H3.18_L1.30-ipilimumab_H3.23_L0.129 scFv-Fc Heavy Chain

SEQ ID NO: 22530 - protein, 118 aa, Artificial Sequence; identical to SEQ ID NO: 2632
  Description of Artificial Sequence: Synthetic polypeptide
  VH of XENP022557

SEQ ID NO: 22531 - protein, 108 aa, Artificial Sequence; identical to SEQ ID NO: 2768
  Description of Artificial Sequence: Synthetic polypeptide
  VL of XENP022557

SEQ ID NO: 22532 - protein, 231 aa, Artificial Sequence; identical to SEQ ID NO: 21532
  Description of Artificial Sequence: Synthetic polypeptide
  Fc chain of XENP022557

SEQ ID NO: 22533 - protein, 5 aa, Artificial Sequence
  Description of Artificial Sequence: Synthetic peptide
  XENP022557 vhCDR1
SYTMH

SEQ ID NO: 22534 - protein, 17 aa, Artificial Sequence
  Description of Artificial Sequence: Synthetic peptide
  XENP022557 vhCDR2
FISYDGNYKYYADSVKG

SEQ ID NO: 22535 - protein, 9 aa, Artificial Sequence
  Description of Artificial Sequence: Synthetic peptide
  XENP022557 vhCDR3
GGHLGPFDL

SEQ ID NO: 22536 - protein, 12 aa, Artificial Sequence
  Description of Artificial Sequence: Synthetic peptide
  XENP022557 vlCDR1
RASQSVGSSYLA

SEQ ID NO: 22537 - protein, 7 aa, Artificial Sequence
  Description of Artificial Sequence: Synthetic peptide
  XENP022557 vlCDR2
GASSRAT

SEQ ID NO: 22538 - protein, 9 aa, Artificial Sequence
  Description of Artificial Sequence: Synthetic peptide
  XENP022557 vlCDR3
QQYGSSPWT

SEQ ID NO: 22539 - protein, 218 aa, Artificial Sequence
  Description of Artificial Sequence: Synthetic polypeptide
  XENP022557 7G8_H3.18_L1.30-ipilimumab_H3.23_L0.129 Light Chain
DTVLTQSPSSLSASVGDRVTITCRASQSVDYDGDSYMNWYQQKPGKPPKLLIYAASELESGIPARFSGSGSGTDFTLTISSLQPEDFATYYCQQSNEDPFTFGSGTKLEIKRTVAAPSVFIFPPSDEQLKSGTASVVCLLNNFYPREAKVQWKVDNALQSGNSQESVTEQDSKDSTYSLSSTLTLSKADYEKHKVYACEVTHQGLSSPVTKSFNRGEC

SEQ ID NO: 22540 - protein, 111 aa, Artificial Sequence
  Description of Artificial Sequence: Synthetic polypeptide
  VL of XENP022557
DTVLTQSPSSLSASVGDRVTITCRASQSVDYDGDSYMNWYQQKPGKPPKLLIYAASELESGIPARFSGSGSGTDFTLTISSLQPEDFATYYCQQSNEDPFTFGSGTKLEIK

SEQ ID NO: 22541 - protein, 15 aa, Artificial Sequence
  Description of Artificial Sequence: Synthetic peptide
  XENP022557 vlCDR1
RASQSVDYDGDSYMN

SEQ ID NO: 22542 - protein, 7 aa, Artificial Sequence
  Description of Artificial Sequence: Synthetic peptide
  XENP022557 vlCDR2
AASELES

SEQ ID NO: 22543 - protein, 9 aa, Artificial Sequence
  Description of Artificial Sequence: Synthetic peptide
  XENP022557 vlCDR3
QQSNEDPFT

SEQ ID NO: 22544 - protein, 450 aa, Artificial Sequence; identical to SEQ ID NO: 22484
  Description of Artificial Sequence: Synthetic polypeptide
  XENP022558 7G8_H3.30_L1.30-ipilimumab_H3.23_L0.129 Fab-Fc Heavy Chain

SEQ ID NO: 22545 - protein, 121 aa, Artificial Sequence; identical to SEQ ID NO: 22485
  Description of Artificial Sequence: Synthetic polypeptide
  VH of XENP022558

SEQ ID NO: 22546 - protein, 5 aa, Artificial Sequence
  Description of Artificial Sequence: Synthetic peptide
  XENP022558 vhCDR1
DAWMS

SEQ ID NO: 22547 - protein, 19 aa, Artificial Sequence
  Description of Artificial Sequence: Synthetic peptide
  XENP022558 vhCDR2
EISTKANNHATYYAESVKG

SEQ ID NO: 22548 - protein, 10 aa, Artificial Sequence
  Description of Artificial Sequence: Synthetic peptide
  XENP022558 vhCDR3
LATWDWYFDV

SEQ ID NO: 22549 - protein, 477 aa, Artificial Sequence; identical to SEQ ID NO: 21669
  Description of Artificial Sequence: Synthetic polypeptide
  XENP022558 7G8_H3.30_L1.30-ipilimumab_H3.23_L0.129 scFv-Fc Heavy Chain

SEQ ID NO: 22550 - protein, 118 aa, Artificial Sequence; identical to SEQ ID NO: 2632
  Description of Artificial Sequence: Synthetic polypeptide
  VH of XENP022558

SEQ ID NO: 22551 - protein, 108 aa, Artificial Sequence; identical to SEQ ID NO: 2768
  Description of Artificial Sequence: Synthetic polypeptide
  VL of XENP022558

SEQ ID NO: 22552 - protein, 231 aa, Artificial Sequence; identical to SEQ ID NO: 21532
  Description of Artificial Sequence: Synthetic polypeptide
  Fc chain of XENP022558

SEQ ID NO: 22553 - protein, 5 aa, Artificial Sequence
  Description of Artificial Sequence: Synthetic peptide
  XENP022558 vhCDR1
SYTMH

SEQ ID NO: 22554 - protein, 17 aa, Artificial Sequence
  Description of Artificial Sequence: Synthetic peptide
  XENP022558 vhCDR2
FISYDGNYKYYADSVKG

SEQ ID NO: 22555 - protein, 9 aa, Artificial Sequence
  Description of Artificial Sequence: Synthetic peptide
  XENP022558 vhCDR3
GGHLGPFDL

SEQ ID NO: 22556 - protein, 12 aa, Artificial Sequence
  Description of Artificial Sequence: Synthetic peptide
  XENP022558 vlCDR1
RASQSVGSSYLA

SEQ ID NO: 22557 - protein, 7 aa, Artificial Sequence
  Description of Artificial Sequence: Synthetic peptide
  XENP022558 vlCDR2
GASSRAT

SEQ ID NO: 22558 - protein, 9 aa, Artificial Sequence
  Description of Artificial Sequence: Synthetic peptide
  XENP022558 vlCDR3
QQYGSSPWT

SEQ ID NO: 22559 - protein, 218 aa, Artificial Sequence; identical to SEQ ID NO: 22539
  Description of Artificial Sequence: Synthetic polypeptide
  XENP022558 7G8_H3.30_L1.30-ipilimumab_H3.23_L0.129 Light Chain

SEQ ID NO: 22560 - protein, 111 aa, Artificial Sequence; identical to SEQ ID NO: 22540
  Description of Artificial Sequence: Synthetic polypeptide
  VL of XENP022558

SEQ ID NO: 22561 - protein, 15 aa, Artificial Sequence
  Description of Artificial Sequence: Synthetic peptide
  XENP022558 vlCDR1
RASQSVDYDGDSYMN

SEQ ID NO: 22562 - protein, 7 aa, Artificial Sequence
  Description of Artificial Sequence: Synthetic peptide
  XENP022558 vlCDR2
AASELES

SEQ ID NO: 22563 - protein, 9 aa, Artificial Sequence
  Description of Artificial Sequence: Synthetic peptide
  XENP022558 vlCDR3
QQSNEDPFT

SEQ ID NO: 22564 - protein, 450 aa, Artificial Sequence; identical to SEQ ID NO: 22504
  Description of Artificial Sequence: Synthetic polypeptide
  XENP022559 7G8_H3.33_L1.30-ipilimumab_H3.23_L0.129 Fab-Fc Heavy Chain

SEQ ID NO: 22565 - protein, 121 aa, Artificial Sequence; identical to SEQ ID NO: 22505
  Description of Artificial Sequence: Synthetic polypeptide
  VH of XENP022559

SEQ ID NO: 22566 - protein, 5 aa, Artificial Sequence
  Description of Artificial Sequence: Synthetic peptide
  XENP022559 vhCDR1
DAWMG

SEQ ID NO: 22567 - protein, 19 aa, Artificial Sequence
  Description of Artificial Sequence: Synthetic peptide
  XENP022559 vhCDR2
EISTKANNHATYYAESVKG

SEQ ID NO: 22568 - protein, 10 aa, Artificial Sequence
  Description of Artificial Sequence: Synthetic peptide
  XENP022559 vhCDR3
LATWDWYFDV

SEQ ID NO: 22569 - protein, 477 aa, Artificial Sequence; identical to SEQ ID NO: 21669
  Description of Artificial Sequence: Synthetic polypeptide
  XENP022559 7G8_H3.33_L1.30-ipilimumab_H3.23_L0.129 scFv-Fc Heavy Chain

SEQ ID NO: 22570 - protein, 118 aa, Artificial Sequence; identical to SEQ ID NO: 2632
  Description of Artificial Sequence: Synthetic polypeptide
  VH of XENP022559

SEQ ID NO: 22571 - protein, 108 aa, Artificial Sequence; identical to SEQ ID NO: 2768
  Description of Artificial Sequence: Synthetic polypeptide
  VL of XENP022559

SEQ ID NO: 22572 - protein, 231 aa, Artificial Sequence; identical to SEQ ID NO: 21532
  Description of Artificial Sequence: Synthetic polypeptide
  Fc chain of XENP022559

SEQ ID NO: 22573 - protein, 5 aa, Artificial Sequence
  Description of Artificial Sequence: Synthetic peptide
  XENP022559 vhCDR1
SYTMH

SEQ ID NO: 22574 - protein, 17 aa, Artificial Sequence
  Description of Artificial Sequence: Synthetic peptide
  XENP022559 vhCDR2
FISYDGNYKYYADSVKG

SEQ ID NO: 22575 - protein, 9 aa, Artificial Sequence
  Description of Artificial Sequence: Synthetic peptide
  XENP022559 vhCDR3
GGHLGPFDL

SEQ ID NO: 22576 - protein, 12 aa, Artificial Sequence
  Description of Artificial Sequence: Synthetic peptide
  XENP022559 vlCDR1
RASQSVGSSYLA

SEQ ID NO: 22577 - protein, 7 aa, Artificial Sequence
  Description of Artificial Sequence: Synthetic peptide
  XENP022559 vlCDR2
GASSRAT

SEQ ID NO: 22578 - protein, 9 aa, Artificial Sequence
  Description of Artificial Sequence: Synthetic peptide
  XENP022559 vlCDR3
QQYGSSPWT

SEQ ID NO: 22579 - protein, 218 aa, Artificial Sequence; identical to SEQ ID NO: 22539
  Description of Artificial Sequence: Synthetic polypeptide
  XENP022559 7G8_H3.33_L1.30-ipilimumab_H3.23_L0.129 Light Chain

SEQ ID NO: 22580 - protein, 111 aa, Artificial Sequence; identical to SEQ ID NO: 22540
  Description of Artificial Sequence: Synthetic polypeptide
  VL of XENP022559

SEQ ID NO: 22581 - protein, 15 aa, Artificial Sequence
  Description of Artificial Sequence: Synthetic peptide
  XENP022559 vlCDR1
RASQSVDYDGDSYMN

SEQ ID NO: 22582 - protein, 7 aa, Artificial Sequence
  Description of Artificial Sequence: Synthetic peptide
  XENP022559 vlCDR2
AASELES

SEQ ID NO: 22583 - protein, 9 aa, Artificial Sequence
  Description of Artificial Sequence: Synthetic peptide
  XENP022559 vlCDR3
QQSNEDPFT

SEQ ID NO: 22584 - protein, 450 aa, Artificial Sequence; identical to SEQ ID NO: 22484
  Description of Artificial Sequence: Synthetic polypeptide
  XENP022602 7G8_H3.30_L1.34-ipilimumab_H3.23_L0.129 Fab-Fc Heavy Chain

SEQ ID NO: 22585 - protein, 121 aa, Artificial Sequence; identical to SEQ ID NO: 22485
  Description of Artificial Sequence: Synthetic polypeptide
  VH of XENP022602

SEQ ID NO: 22586 - protein, 5 aa, Artificial Sequence
  Description of Artificial Sequence: Synthetic peptide
  XENP022602 vhCDR1
DAWMS

SEQ ID NO: 22587 - protein, 19 aa, Artificial Sequence
  Description of Artificial Sequence: Synthetic peptide
  XENP022602 vhCDR2
EISTKANNHATYYAESVKG

SEQ ID NO: 22588 - protein, 10 aa, Artificial Sequence
  Description of Artificial Sequence: Synthetic peptide
  XENP022602 vhCDR3
LATWDWYFDV

SEQ ID NO: 22589 - protein, 477 aa, Artificial Sequence; identical to SEQ ID NO: 21669
  Description of Artificial Sequence: Synthetic polypeptide
  XENP022602 7G8_H3.30_L1.34-ipilimumab_H3.23_L0.129 scFv-Fc Heavy Chain

SEQ ID NO: 22590 - protein, 118 aa, Artificial Sequence; identical to SEQ ID NO: 2632
  Description of Artificial Sequence: Synthetic polypeptide
  VH of XENP022602

SEQ ID NO: 22591 - protein, 108 aa, Artificial Sequence; identical to SEQ ID NO: 2768
  Description of Artificial Sequence: Synthetic polypeptide
  VL of XENP022602

SEQ ID NO: 22592 - protein, 231 aa, Artificial Sequence; identical to SEQ ID NO: 21532
  Description of Artificial Sequence: Synthetic polypeptide
  Fc chain of XENP022602

SEQ ID NO: 22593 - protein, 5 aa, Artificial Sequence
  Description of Artificial Sequence: Synthetic peptide
  XENP022602 vhCDR1
SYTMH

SEQ ID NO: 22594 - protein, 17 aa, Artificial Sequence
  Description of Artificial Sequence: Synthetic peptide
  XENP022602 vhCDR2
FISYDGNYKYYADSVKG

SEQ ID NO: 22595 - protein, 9 aa, Artificial Sequence
  Description of Artificial Sequence: Synthetic peptide
  XENP022602 vhCDR3
GGHLGPFDL

SEQ ID NO: 22596 - protein, 12 aa, Artificial Sequence
  Description of Artificial Sequence: Synthetic peptide
  XENP022602 vlCDR1
RASQSVGSSYLA

SEQ ID NO: 22597 - protein, 7 aa, Artificial Sequence
  Description of Artificial Sequence: Synthetic peptide
  XENP022602 vlCDR2
GASSRAT

SEQ ID NO: 22598 - protein, 9 aa, Artificial Sequence
  Description of Artificial Sequence: Synthetic peptide
  XENP022602 vlCDR3
QQYGSSPWT

SEQ ID NO: 22599 - protein, 218 aa, Artificial Sequence
  Description of Artificial Sequence: Synthetic polypeptide
  XENP022602 7G8_H3.30_L1.34-ipilimumab_H3.23_L0.129 Light Chain
DIVLTQSPSSLSASVGDRVTITCRASQSVDYDGDSYMNWYQQKPGKPPKLLIYAASELESGIPARFSGSGSGTDFTLTISSLQPEDFATYYCQQSNEDPFTFGSGTKLEIKRTVAAPSVFIFPPSDEQLKSGTASVVCLLNNFYPREAKVQWKVDNALQSGNSQESVTEQDSKDSTYSLSSTLTLSKADYEKHKVYACEVTHQGLSSPVTKSFNRGEC

SEQ ID NO: 22600 - protein, 111 aa, Artificial Sequence
  Description of Artificial Sequence: Synthetic polypeptide
  VL of XENP022602
DIVLTQSPSSLSASVGDRVTITCRASQSVDYDGDSYMNWYQQKPGKPPKLLIYAASELESGIPARFSGSGSGTDFTLTISSLQPEDFATYYCQQSNEDPFTFGSGTKLEIK

SEQ ID NO: 22601 - protein, 15 aa, Artificial Sequence
  Description of Artificial Sequence: Synthetic peptide
  XENP022602 vlCDR1
RASQSVDYDGDSYMN

SEQ ID NO: 22602 - protein, 7 aa, Artificial Sequence
  Description of Artificial Sequence: Synthetic peptide
  XENP022602 vlCDR2
AASELES

SEQ ID NO: 22603 - protein, 9 aa, Artificial Sequence
  Description of Artificial Sequence: Synthetic peptide
  XENP022602 vlCDR3
QQSNEDPFT

SEQ ID NO: 22604 - protein, 450 aa, Artificial Sequence; identical to SEQ ID NO: 22484
  Description of Artificial Sequence: Synthetic polypeptide
  XENP022603 7G8_H3.30_L1.36-ipilimumab_H3.23_L0.129 Fab-Fc Heavy Chain

SEQ ID NO: 22605 - protein, 121 aa, Artificial Sequence; identical to SEQ ID NO: 22485
  Description of Artificial Sequence: Synthetic polypeptide
  VH of XENP022603

SEQ ID NO: 22606 - protein, 5 aa, Artificial Sequence
  Description of Artificial Sequence: Synthetic peptide
  XENP022603 vhCDR1
DAWMS

SEQ ID NO: 22607 - protein, 19 aa, Artificial Sequence
  Description of Artificial Sequence: Synthetic peptide
  XENP022603 vhCDR2
EISTKANNHATYYAESVKG

SEQ ID NO: 22608 - protein, 10 aa, Artificial Sequence
  Description of Artificial Sequence: Synthetic peptide
  XENP022603 vhCDR3
LATWDWYFDV

SEQ ID NO: 22609 - protein, 477 aa, Artificial Sequence; identical to SEQ ID NO: 21669
  Description of Artificial Sequence: Synthetic polypeptide
  XENP022603 7G8_H3.30_L1.36-ipilimumab_H3.23_L0.129 scFv-Fc Heavy Chain

SEQ ID NO: 22610 - protein, 118 aa, Artificial Sequence; identical to SEQ ID NO: 2632
  Description of Artificial Sequence: Synthetic polypeptide
  VH of XENP022603

SEQ ID NO: 22611 - protein, 108 aa, Artificial Sequence; identical to SEQ ID NO: 2768
  Description of Artificial Sequence: Synthetic polypeptide
  VL of XENP022603

SEQ ID NO: 22612 - protein, 231 aa, Artificial Sequence; identical to SEQ ID NO: 21532
  Description of Artificial Sequence: Synthetic polypeptide
  Fc chain of XENP022603

SEQ ID NO: 22613 - protein, 5 aa, Artificial Sequence
  Description of Artificial Sequence: Synthetic peptide
  XENP022603 vhCDR1
SYTMH

SEQ ID NO: 22614 - protein, 17 aa, Artificial Sequence
  Description of Artificial Sequence: Synthetic peptide
  XENP022603 vhCDR2
FISYDGNYKYYADSVKG

SEQ ID NO: 22615 - protein, 9 aa, Artificial Sequence
  Description of Artificial Sequence: Synthetic peptide
  XENP022603 vhCDR3
GGHLGPFDL

SEQ ID NO: 22616 - protein, 12 aa, Artificial Sequence
  Description of Artificial Sequence: Synthetic peptide
  XENP022603 vlCDR1
RASQSVGSSYLA

SEQ ID NO: 22617 - protein, 7 aa, Artificial Sequence
  Description of Artificial Sequence: Synthetic peptide
  XENP022603 vlCDR2
GASSRAT

SEQ ID NO: 22618 - protein, 9 aa, Artificial Sequence
  Description of Artificial Sequence: Synthetic peptide
  XENP022603 vlCDR3
QQYGSSPWT

SEQ ID NO: 22619 - protein, 218 aa, Artificial Sequence
  Description of Artificial Sequence: Synthetic polypeptide
  XENP022603 7G8_H3.30_L1.36-ipilimumab_H3.23_L0.129 Light Chain
DIVLTQSPSSLSASVGDRVTITCRASQSVDHDGDSYMNWYQQKPGKPPKLLIYAASELESGIPARFSGSGSGTDFTLTISSLQPEDFATYYCQQSNEDPFTFGSGTKLEIKRTVAAPSVFIFPPSDEQLKSGTASVVCLLNNFYPREAKVQWKVDNALQSGNSQESVTEQDSKDSTYSLSSTLTLSKADYEKHKVYACEVTHQGLSSPVTKSFNRGEC

SEQ ID NO: 22620 - protein, 111 aa, Artificial Sequence
  Description of Artificial Sequence: Synthetic polypeptide
  VL of XENP022603
DIVLTQSPSSLSASVGDRVTITCRASQSVDHDGDSYMNWYQQKPGKPPKLLIYAASELESGIPARFSGSGSGTDFTLTISSLQPEDFATYYCQQSNEDPFTFGSGTKLEIK

SEQ ID NO: 22621 - protein, 15 aa, Artificial Sequence
  Description of Artificial Sequence: Synthetic peptide
  XENP022603 vlCDR1
RASQSVDHDGDSYMN

SEQ ID NO: 22622 - protein, 7 aa, Artificial Sequence
  Description of Artificial Sequence: Synthetic peptide
  XENP022603 vlCDR2
AASELES

SEQ ID NO: 22623 - protein, 9 aa, Artificial Sequence
  Description of Artificial Sequence: Synthetic peptide
  XENP022603 vlCDR3
QQSNEDPFT

SEQ ID NO: 22624 - protein, 448 aa, Artificial Sequence
  Description of Artificial Sequence: Synthetic polypeptide
  XENP017979 4C7_H0L0-ipilimumab_H0L0 Fab-Fc Heavy Chain
QVQLQESGPGLVKPSETLSLTCTVHGGSINHYYWSWIRQPPGKGLEWIGYIYYSGSTKYNPSLKSRVSISVDTSKNQFSLKLTSVTAADTAVYYCAREWPYYYYEMDVWGQGTTVTVSSASTKGPSVFPLAPSSKSTSGGTAALGCLVKDYFPEPVTVSWNSGALTSGVHTFPAVLQSSGLYSLSSVVTVPSSSLGTQTYICNVNHKPSDTKVDKKVEPKSCDKTHTCPPCPAPPVAGPSVFLFPPKPKDTLMISRTPEVTCVVVDVKHEDPEVKFNWYVDGVEVHNAKTKPREEEYNSTYRVVSVLTVLHQDWLNGKEYKCKVSNKALPAPIEKTISKAKGQPREPQVYTLPPSREEMTKNQVSLTCDVSGFYPSDIAVEWESDGQPENNYKTTPPVLDSDGSFFLYSKLTVDKSRWEQGDVFSCSVMHEALHNHYTQKSLSLSPGK

SEQ ID NO: 22625 - protein, 119 aa, Artificial Sequence; identical to SEQ ID NO: 20886
  Description of Artificial Sequence: Synthetic polypeptide
  VH of XENP017979

SEQ ID NO: 22626 - protein, 5 aa, Artificial Sequence
  Description of Artificial Sequence: Synthetic peptide
  XENP017979 vhCDR1
HYYWS

SEQ ID NO: 22627 - protein, 16 aa, Artificial Sequence
  Description of Artificial Sequence: Synthetic peptide
  XENP017979 vhCDR2
YIYYSGSTKYNPSLKS

SEQ ID NO: 22628 - protein, 11 aa, Artificial Sequence
  Description of Artificial Sequence: Synthetic peptide
  XENP017979 vhCDR3
EWPYYYYEMDV

SEQ ID NO: 22629 - protein, 477 aa, Artificial Sequence; identical to SEQ ID NO: 21529
  Description of Artificial Sequence: Synthetic polypeptide
  XENP017979 4C7_H0L0-ipilimumab_H0L0 scFv-Fc Heavy Chain

SEQ ID NO: 22630 - protein, 118 aa, Artificial Sequence; identical to SEQ ID NO: 22
  Description of Artificial Sequence: Synthetic polypeptide
  VH of XENP017979

SEQ ID NO: 22631 - protein, 108 aa, Artificial Sequence; identical to SEQ ID NO: 23
  Description of Artificial Sequence: Synthetic polypeptide
  VL of XENP017979

SEQ ID NO: 22632 - protein, 231 aa, Artificial Sequence; identical to SEQ ID NO: 21532
  Description of Artificial Sequence: Synthetic polypeptide
  Fc chain of XENP017979

SEQ ID NO: 22633 - protein, 5 aa, Artificial Sequence
  Description of Artificial Sequence: Synthetic peptide
  XENP017979 vhCDR1
SYTMH

SEQ ID NO: 22634 - protein, 17 aa, Artificial Sequence
  Description of Artificial Sequence: Synthetic peptide
  XENP017979 vhCDR2
FISYDGNNKYYADSVKG

SEQ ID NO: 22635 - protein, 9 aa, Artificial Sequence
  Description of Artificial Sequence: Synthetic peptide
  XENP017979 vhCDR3
TGWLGPFDY

SEQ ID NO: 22636 - protein, 12 aa, Artificial Sequence
  Description of Artificial Sequence: Synthetic peptide
  XENP017979 vlCDR1
RASQSVGSSYLA

SEQ ID NO: 22637 - protein, 7 aa, Artificial Sequence
  Description of Artificial Sequence: Synthetic peptide
  XENP017979 vlCDR2
GAFSRAT

SEQ ID NO: 22638 - protein, 9 aa, Artificial Sequence
  Description of Artificial Sequence: Synthetic peptide
  XENP017979 vlCDR3
QQYGSSPWT

SEQ ID NO: 22639 - protein, 215 aa, Artificial Sequence; identical to SEQ ID NO: 20890
  Description of Artificial Sequence: Synthetic polypeptide
  XENP017979 4C7_H0L0-ipilimumab_H0L0 Light Chain

SEQ ID NO: 22640 - protein, 108 aa, Artificial Sequence; identical to SEQ ID NO: 20891
  Description of Artificial Sequence: Synthetic polypeptide
  VL of XENP017979

SEQ ID NO: 22641 - protein, 12 aa, Artificial Sequence
  Description of Artificial Sequence: Synthetic peptide
  XENP017979 vlCDR1
RASQSVSSSYLA

SEQ ID NO: 22642 - protein, 7 aa, Artificial Sequence
  Description of Artificial Sequence: Synthetic peptide
  XENP017979 vlCDR2
GASSRAT

SEQ ID NO: 22643 - protein, 9 aa, Artificial Sequence
  Description of Artificial Sequence: Synthetic peptide
  XENP017979 vlCDR3
QQYGSSFRT

SEQ ID NO: 22644 - protein, 450 aa, Artificial Sequence
  Description of Artificial Sequence: Synthetic polypeptide
  XENP017980 8D5_H0L0-ipilimumab_H0L0 Fab-Fc Heavy Chain
EVQLVESGGGLVQPGGSLRLSCAASGFTISSYDMHWVRQATGKGLEWVSVIGPAGDTYYPGSVKGRFTISRENAKNSLYLQMNSLRAGDTAVYYCAREGMAAHNYYGMDVWGQGTTVTVSSASTKGPSVFPLAPSSKSTSGGTAALGCLVKDYFPEPVTVSWNSGALTSGVHTFPAVLQSSGLYSLSSVVTVPSSSLGTQTYICNVNHKPSDTKVDKKVEPKSCDKTHTCPPCPAPPVAGPSVFLFPPKPKDTLMISRTPEVTCVVVDVKHEDPEVKFNWYVDGVEVHNAKTKPREEEYNSTYRVVSVLTVLHQDWLNGKEYKCKVSNKALPAPIEKTISKAKGQPREPQVYTLPPSREEMTKNQVSLTCDVSGFYPSDIAVEWESDGQPENNYKTTPPVLDSDGSFFLYSKLTVDKSRWEQGDVFSCSVMHEALHNHYTQKSLSLSPGK

SEQ ID NO: 22645 - protein, 121 aa, Artificial Sequence; identical to SEQ ID NO: 20896
  Description of Artificial Sequence: Synthetic polypeptide
  VH of XENP017980

SEQ ID NO: 22646 - protein, 5 aa, Artificial Sequence
  Description of Artificial Sequence: Synthetic peptide
  XENP017980 vhCDR1
SYDMH

SEQ ID NO: 22647 - protein, 16 aa, Artificial Sequence
  Description of Artificial Sequence: Synthetic peptide
  XENP017980 vhCDR2
VIGPAGDTYYPGSVKG

SEQ ID NO: 22648 - protein, 13 aa, Artificial Sequence
  Description of Artificial Sequence: Synthetic peptide
  XENP017980 vhCDR3
EGMAAHNYYGMDV

SEQ ID NO: 22649 - protein, 477 aa, Artificial Sequence; identical to SEQ ID NO: 21529
  Description of Artificial Sequence: Synthetic polypeptide
  XENP017980 8D5_H0L0-ipilimumab_H0L0 scFv-Fc Heavy Chain

SEQ ID NO: 22650 - protein, 118 aa, Artificial Sequence; identical to SEQ ID NO: 22
  Description of Artificial Sequence: Synthetic polypeptide
  VH of XENP017980

SEQ ID NO: 22651 - protein, 108 aa, Artificial Sequence; identical to SEQ ID NO: 23
  Description of Artificial Sequence: Synthetic polypeptide
  VL of XENP017980

SEQ ID NO: 22652 - protein, 231 aa, Artificial Sequence; identical to SEQ ID NO: 21532
  Description of Artificial Sequence: Synthetic polypeptide
  Fc chain of XENP017980

SEQ ID NO: 22653 - protein, 5 aa, Artificial Sequence
  Description of Artificial Sequence: Synthetic peptide
  XENP017980 vhCDR1
SYTMH

SEQ ID NO: 22654 - protein, 17 aa, Artificial Sequence
  Description of Artificial Sequence: Synthetic peptide
  XENP017980 vhCDR2
FISYDGNNKYYADSVKG

SEQ ID NO: 22655 - protein, 9 aa, Artificial Sequence
  Description of Artificial Sequence: Synthetic peptide
  XENP017980 vhCDR3
TGWLGPFDY

SEQ ID NO: 22656 - protein, 12 aa, Artificial Sequence
  Description of Artificial Sequence: Synthetic peptide
  XENP017980 vlCDR1
RASQSVGSSYLA

SEQ ID NO: 22657 - protein, 7 aa, Artificial Sequence
  Description of Artificial Sequence: Synthetic peptide
  XENP017980 vlCDR2
GAFSRAT

SEQ ID NO: 22658 - protein, 9 aa, Artificial Sequence
  Description of Artificial Sequence: Synthetic peptide
  XENP017980 vlCDR3
QQYGSSPWT

SEQ ID NO: 22659 - protein, 215 aa, Artificial Sequence; identical to SEQ ID NO: 20900
  Description of Artificial Sequence: Synthetic polypeptide
  XENP017980 8D5_H0L0-ipilimumab_H0L0 Light Chain

SEQ ID NO: 22660 - protein, 108 aa, Artificial Sequence; identical to SEQ ID NO: 20901
  Description of Artificial Sequence: Synthetic polypeptide
  VL of XENP017980

SEQ ID NO: 22661 - protein, 11 aa, Artificial Sequence
  Description of Artificial Sequence: Synthetic peptide
  XENP017980 vlCDR1
RASQSVSSYLA

SEQ ID NO: 22662 - protein, 7 aa, Artificial Sequence
  Description of Artificial Sequence: Synthetic peptide
  XENP017980 vlCDR2
DASNRAT

SEQ ID NO: 22663 - protein, 10 aa, Artificial Sequence
  Description of Artificial Sequence: Synthetic peptide
  XENP017980 vlCDR3
QQRSNWPPIT

SEQ ID NO: 22664 - protein, 457 aa, Artificial Sequence
  Description of Artificial Sequence: Synthetic polypeptide
  XENP017981 E8D9_H0L0-ipilimumab_H0L0 Fab-Fc Heavy Chain
QITLKESGPTLVKPTQTLTLTCTFSGFSLSTSGVGVGWIRQPPGKALEWLALIYWDDDKRYSPSLKSRLTITKDTSKNQVVLTMTNMDPVDTATYYCAHTSITEVRGAIIYYYGMDVWGQGTTVTVSSASTKGPSVFPLAPSSKSTSGGTAALGCLVKDYFPEPVTVSWNSGALTSGVHTFPAVLQSSGLYSLSSVVTVPSSSLGTQTYICNVNHKPSDTKVDKKVEPKSCDKTHTCPPCPAPPVAGPSVFLFPPKPKDTLMISRTPEVTCVVVDVKHEDPEVKFNWYVDGVEVHNAKTKPREEEYNSTYRVVSVLTVLHQDWLNGKEYKCKVSNKALPAPIEKTISKAKGQPREPQVYTLPPSREEMTKNQVSLTCDVSGFYPSDIAVEWESDGQPENNYKTTPPVLDSDGSFFLYSKLTVDKSRWEQGDVFSCSVMHEALHNHYTQKSLSLSPGK

SEQ ID NO: 22665 - protein, 128 aa, Artificial Sequence; identical to SEQ ID NO: 20906
  Description of Artificial Sequence: Synthetic polypeptide
  VH of XENP017981

SEQ ID NO: 22666 - protein, 7 aa, Artificial Sequence
  Description of Artificial Sequence: Synthetic peptide
  XENP017981 vhCDR1
TSGVGVG

SEQ ID NO: 22667 - protein, 16 aa, Artificial Sequence
  Description of Artificial Sequence: Synthetic peptide
  XENP017981 vhCDR2
LIYWDDDKRYSPSLKS

SEQ ID NO: 22668 - protein, 18 aa, Artificial Sequence
  Description of Artificial Sequence: Synthetic peptide
  XENP017981 vhCDR3
TSITEVRGAIIYYYGMDV

SEQ ID NO: 22669 - protein, 477 aa, Artificial Sequence; identical to SEQ ID NO: 21529
  Description of Artificial Sequence: Synthetic polypeptide
  XENP017981 E8D9_H0L0-ipilimumab_H0L0 scFv-Fc Heavy Chain

SEQ ID NO: 22670 - protein, 118 aa, Artificial Sequence; identical to SEQ ID NO: 22
  Description of Artificial Sequence: Synthetic polypeptide
  VH of XENP017981

SEQ ID NO: 22671 - protein, 108 aa, Artificial Sequence; identical to SEQ ID NO: 23
  Description of Artificial Sequence: Synthetic polypeptide
  VL of XENP017981

SEQ ID NO: 22672 - protein, 231 aa, Artificial Sequence; identical to SEQ ID NO: 21532
  Description of Artificial Sequence: Synthetic polypeptide
  Fc chain of XENP017981

SEQ ID NO: 22673 - protein, 5 aa, Artificial Sequence
  Description of Artificial Sequence: Synthetic peptide
  XENP017981 vhCDR1
SYTMH

SEQ ID NO: 22674 - protein, 17 aa, Artificial Sequence
  Description of Artificial Sequence: Synthetic peptide
  XENP017981 vhCDR2
FISYDGNNKYYADSVKG

SEQ ID NO: 22675 - protein, 9 aa, Artificial Sequence
  Description of Artificial Sequence: Synthetic peptide
  XENP017981 vhCDR3
TGWLGPFDY

SEQ ID NO: 22676 - protein, 12 aa, Artificial Sequence
  Description of Artificial Sequence: Synthetic peptide
  XENP017981 vlCDR1
RASQSVGSSYLA

SEQ ID NO: 22677 - protein, 7 aa, Artificial Sequence
  Description of Artificial Sequence: Synthetic peptide
  XENP017981 vlCDR2
GAFSRAT

SEQ ID NO: 22678 - protein, 9 aa, Artificial Sequence
  Description of Artificial Sequence: Synthetic peptide
  XENP017981 vlCDR3
QQYGSSPWT

SEQ ID NO: 22679 - protein, 214 aa, Artificial Sequence; identical to SEQ ID NO: 20910
  Description of Artificial Sequence: Synthetic polypeptide
  XENP017981 E8D9_H0L0-ipilimumab_H0L0 Light Chain

SEQ ID NO: 22680 - protein, 107 aa, Artificial Sequence; identical to SEQ ID NO: 20911
  Description of Artificial Sequence: Synthetic polypeptide
  VL of XENP017981

SEQ ID NO: 22681 - protein, 12 aa, Artificial Sequence
  Description of Artificial Sequence: Synthetic peptide
  XENP017981 vlCDR1
RASQSVSSSYLA

SEQ ID NO: 22682 - protein, 7 aa, Artificial Sequence
  Description of Artificial Sequence: Synthetic peptide
  XENP017981 vlCDR2
GASSRAT

SEQ ID NO: 22683 - protein, 8 aa, Artificial Sequence
  Description of Artificial Sequence: Synthetic peptide
  XENP017981 vlCDR3
QQYGHSLT

SEQ ID NO: 22684 - protein, 448 aa, Artificial Sequence; identical to SEQ ID NO: 22624
  Description of Artificial Sequence: Synthetic polypeptide
  XENP017982 4C7_H0L0-Tremelimumab_H0L0 Fab-Fc Heavy Chain

SEQ ID NO: 22685 - protein, 119 aa, Artificial Sequence; identical to SEQ ID NO: 20886
  Description of Artificial Sequence: Synthetic polypeptide
  VH of XENP017982

SEQ ID NO: 22686 - protein, 5 aa, Artificial Sequence
  Description of Artificial Sequence: Synthetic peptide
  XENP017982 vhCDR1
HYYWS

SEQ ID NO: 22687 - protein, 16 aa, Artificial Sequence
  Description of Artificial Sequence: Synthetic peptide
  XENP017982 vhCDR2
YIYYSGSTKYNPSLKS

SEQ ID NO: 22688 - protein, 11 aa, Artificial Sequence
  Description of Artificial Sequence: Synthetic peptide
  XENP017982 vhCDR3
EWPYYYYEMDV

SEQ ID NO: 22689 - protein, 483 aa, Artificial Sequence
  Description of Artificial Sequence: Synthetic polypeptide
  XENP017982 4C7_H0L0-Tremelimumab_H0L0 scFv-Fc Heavy Chain
QVQLVESGGGVVQPGRSLRLSCAASGFTFSSYGMHWVRQAPGKGLEWVAVIWYDGSNKYYADSVKGRFTISRDNSKNTLYLQMNSLRAEDTAVYYCARDPRGATLYYYYYGMDVWGQGTTVTVSSGKPGSGKPGSGKPGSGKPGSDIQMTQSPSSLSASVGDRVTITCRASQSINSYLDWYQQKPGKAPKLLIYAASSLQSGVPSRFSGSGSGTDFTLTISSLQPEDFATYYCQQYYSTPFTFGPGTKVEIKEPKSSDKTHTCPPCPAPPVAGPSVFLFPPKPKDTLMISRTPEVTCVVVDVKHEDPEVKFNWYVDGVEVHNAKTKPREEQYNSTYRVVSVLTVLHQDWLNGKEYKCKVSNKALPAPIEKTISKAKGQPREPQVYTLPPSREQMTKNQVKLTCLVKGFYPSDIAVEWESNGQPENNYKTTPPVLDSDGSFFLYSKLTVDKSRWQQGNVFSCSVMHEALHNHYTQKSLSLSPGK

SEQ ID NO: 22690 - protein, 125 aa, Artificial Sequence
  Description of Artificial Sequence: Synthetic polypeptide
  VH of XENP017982
QVQLVESGGGVVQPGRSLRLSCAASGFTFSSYGMHWVRQAPGKGLEWVAVIWYDGSNKYYADSVKGRFTISRDNSKNTLYLQMNSLRAEDTAVYYCARDPRGATLYYYYYGMDVWGQGTTVTVSS

SEQ ID NO: 22691 - protein, 107 aa, Artificial Sequence
  Description of Artificial Sequence: Synthetic polypeptide
  VL of XENP017982
DIQMTQSPSSLSASVGDRVTITCRASQSINSYLDWYQQKPGKAPKLLIYAASSLQSGVPSRFSGSGSGTDFTLTISSLQPEDFATYYCQQYYSTPFTFGPGTKVEIK

SEQ ID NO: 22692 - protein, 231 aa, Artificial Sequence; identical to SEQ ID NO: 21532
  Description of Artificial Sequence: Synthetic polypeptide
  Fc chain of XENP017982

SEQ ID NO: 22693 - protein, 5 aa, Artificial Sequence
  Description of Artificial Sequence: Synthetic peptide
  XENP017982 vhCDR1
SYGMH

SEQ ID NO: 22694 - protein, 17 aa, Artificial Sequence
  Description of Artificial Sequence: Synthetic peptide
  XENP017982 vhCDR2
VIWYDGSNKYYADSVKG

SEQ ID NO: 22695 - protein, 16 aa, Artificial Sequence
  Description of Artificial Sequence: Synthetic peptide
  XENP017982 vhCDR3
DPRGATLYYYYYGMDV

SEQ ID NO: 22696 - protein, 11 aa, Artificial Sequence
  Description of Artificial Sequence: Synthetic peptide
  XENP017982 vlCDR1
RASQSINSYLD

SEQ ID NO: 22697 - protein, 7 aa, Artificial Sequence
  Description of Artificial Sequence: Synthetic peptide
  XENP017982 vlCDR2
AASSLQS

SEQ ID NO: 22698 - protein, 9 aa, Artificial Sequence
  Description of Artificial Sequence: Synthetic peptide
  XENP017982 vlCDR3
QQYYSTPFT

SEQ ID NO: 22699 - protein, 215 aa, Artificial Sequence; identical to SEQ ID NO: 20890
  Description of Artificial Sequence: Synthetic polypeptide
  XENP017982 4C7_H0L0-Tremelimumab_H0L0 Light Chain

SEQ ID NO: 22700 - protein, 108 aa, Artificial Sequence; identical to SEQ ID NO: 20891
  Description of Artificial Sequence: Synthetic polypeptide
  VL of XENP017982

SEQ ID NO: 22701 - protein, 12 aa, Artificial Sequence
  Description of Artificial Sequence: Synthetic peptide
  XENP017982 vlCDR1
RASQSVSSSYLA

SEQ ID NO: 22702 - protein, 7 aa, Artificial Sequence
  Description of Artificial Sequence: Synthetic peptide
  XENP017982 vlCDR2
GASSRAT

SEQ ID NO: 22703 - protein, 9 aa, Artificial Sequence
  Description of Artificial Sequence: Synthetic peptide
  XENP017982 vlCDR3
QQYGSSFRT

SEQ ID NO: 22704 - protein, 450 aa, Artificial Sequence; identical to SEQ ID NO: 22644
  Description of Artificial Sequence: Synthetic polypeptide
  XENP017983 8D5_H0L0-Tremelimumab_H0L0 Fab-Fc Heavy Chain

SEQ ID NO: 22705 - protein, 121 aa, Artificial Sequence; identical to SEQ ID NO: 20896
  Description of Artificial Sequence: Synthetic polypeptide
  VH of XENP017983

SEQ ID NO: 22706 - protein, 5 aa, Artificial Sequence
  Description of Artificial Sequence: Synthetic peptide
  XENP017983 vhCDR1
SYDMH

SEQ ID NO: 22707 - protein, 16 aa, Artificial Sequence
  Description of Artificial Sequence: Synthetic peptide
  XENP017983 vhCDR2
VIGPAGDTYYPGSVKG

SEQ ID NO: 22708 - protein, 13 aa, Artificial Sequence
  Description of Artificial Sequence: Synthetic peptide
  XENP017983 vhCDR3
EGMAAHNYYGMDV

SEQ ID NO: 22709 - protein, 483 aa, Artificial Sequence; identical to SEQ ID NO: 22689
  Description of Artificial Sequence: Synthetic polypeptide
  XENP017983 8D5_H0L0-Tremelimumab_H0L0 scFv-Fc Heavy Chain

SEQ ID NO: 22710 - protein, 125 aa, Artificial Sequence; identical to SEQ ID NO: 22690
  Description of Artificial Sequence: Synthetic polypeptide
  VH of XENP017983

SEQ ID NO: 22711 - protein, 107 aa, Artificial Sequence; identical to SEQ ID NO: 22691
  Description of Artificial Sequence: Synthetic polypeptide
  VL of XENP017983

SEQ ID NO: 22712 - protein, 231 aa, Artificial Sequence; identical to SEQ ID NO: 21532
  Description of Artificial Sequence: Synthetic polypeptide
  Fc chain of XENP017983

SEQ ID NO: 22713 - protein, 5 aa, Artificial Sequence
  Description of Artificial Sequence: Synthetic peptide
  XENP017983 vhCDR1
SYGMH

SEQ ID NO: 22714 - protein, 17 aa, Artificial Sequence
  Description of Artificial Sequence: Synthetic peptide
  XENP017983 vhCDR2
VIWYDGSNKYYADSVKG

SEQ ID NO: 22715 - protein, 16 aa, Artificial Sequence
  Description of Artificial Sequence: Synthetic peptide
  XENP017983 vhCDR3
DPRGATLYYYYYGMDV

SEQ ID NO: 22716 - protein, 11 aa, Artificial Sequence
  Description of Artificial Sequence: Synthetic peptide
  XENP017983 vlCDR1
RASQSINSYLD

SEQ ID NO: 22717 - protein, 7 aa, Artificial Sequence
  Description of Artificial Sequence: Synthetic peptide
  XENP017983 vlCDR2
AASSLQS

SEQ ID NO: 22718 - protein, 9 aa, Artificial Sequence
  Description of Artificial Sequence: Synthetic peptide
  XENP017983 vlCDR3
QQYYSTPFT

SEQ ID NO: 22719 - protein, 215 aa, Artificial Sequence; identical to SEQ ID NO: 20900
  Description of Artificial Sequence: Synthetic polypeptide
  XENP017983 8D5_H0L0-Tremelimumab_H0L0 Light Chain

SEQ ID NO: 22720 - protein, 108 aa, Artificial Sequence; identical to SEQ ID NO: 20901
  Description of Artificial Sequence: Synthetic polypeptide
  VL of XENP017983

SEQ ID NO: 22721 - protein, 11 aa, Artificial Sequence
  Description of Artificial Sequence: Synthetic peptide
  XENP017983 vlCDR1
RASQSVSSYLA

SEQ ID NO: 22722 - protein, 7 aa, Artificial Sequence
  Description of Artificial Sequence: Synthetic peptide
  XENP017983 vlCDR2
DASNRAT

SEQ ID NO: 22723 - protein, 10 aa, Artificial Sequence
  Description of Artificial Sequence: Synthetic peptide
  XENP017983 vlCDR3
QQRSNWPPIT

SEQ ID NO: 22724 - protein, 457 aa, Artificial Sequence; identical to SEQ ID NO: 22664
  Description of Artificial Sequence: Synthetic polypeptide
  XENP017984 E8D9_H0L0-Tremelimumab_H0L0 Fab-Fc Heavy Chain

SEQ ID NO: 22725 - protein, 128 aa, Artificial Sequence; identical to SEQ ID NO: 20906
  Description of Artificial Sequence: Synthetic polypeptide
  VH of XENP017984

SEQ ID NO: 22726 - protein, 7 aa, Artificial Sequence
  Description of Artificial Sequence: Synthetic peptide
  XENP017984 vhCDR1
TSGVGVG

SEQ ID NO: 22727 - protein, 16 aa, Artificial Sequence
  Description of Artificial Sequence: Synthetic peptide
  XENP017984 vhCDR2
LIYWDDDKRYSPSLKS

SEQ ID NO: 22728 - protein, 18 aa, Artificial Sequence
  Description of Artificial Sequence: Synthetic peptide
  XENP017984 vhCDR3
TSITEVRGAIIYYYGMDV

SEQ ID NO: 22729 - protein, 483 aa, Artificial Sequence; identical to SEQ ID NO: 22689
  Description of Artificial Sequence: Synthetic polypeptide
  XENP017984 E8D9_H0L0-Tremelimumab_H0L0 scFv-Fc Heavy Chain

SEQ ID NO: 22730 - protein, 125 aa, Artificial Sequence; identical to SEQ ID NO: 22690
  Description of Artificial Sequence: Synthetic polypeptide
  VH of XENP017984

SEQ ID NO: 22731 - protein, 107 aa, Artificial Sequence; identical to SEQ ID NO: 22691
  Description of Artificial Sequence: Synthetic polypeptide
  VL of XENP017984

SEQ ID NO: 22732 - protein, 231 aa, Artificial Sequence; identical to SEQ ID NO: 21532
  Description of Artificial Sequence: Synthetic polypeptide
  Fc chain of XENP017984

SEQ ID NO: 22733 - protein, 5 aa, Artificial Sequence
  Description of Artificial Sequence: Synthetic peptide
  XENP017984 vhCDR1
SYGMH

SEQ ID NO: 22734 - protein, 17 aa, Artificial Sequence
  Description of Artificial Sequence: Synthetic peptide
  XENP017984 vhCDR2
VIWYDGSNKYYADSVKG

SEQ ID NO: 22735 - protein, 16 aa, Artificial Sequence
  Description of Artificial Sequence: Synthetic peptide
  XENP017984 vhCDR3
DPRGATLYYYYYGMDV

SEQ ID NO: 22736 - protein, 11 aa, Artificial Sequence
  Description of Artificial Sequence: Synthetic peptide
  XENP017984 vlCDR1
RASQSINSYLD

SEQ ID NO: 22737 - protein, 7 aa, Artificial Sequence
  Description of Artificial Sequence: Synthetic peptide
  XENP017984 vlCDR2
AASSLQS

SEQ ID NO: 22738 - protein, 9 aa, Artificial Sequence
  Description of Artificial Sequence: Synthetic peptide
  XENP017984 vlCDR3
QQYYSTPFT

SEQ ID NO: 22739 - protein, 214 aa, Artificial Sequence; identical to SEQ ID NO: 20910
  Description of Artificial Sequence: Synthetic polypeptide
  XENP017984 E8D9_H0L0-Tremelimumab_H0L0 Light Chain

SEQ ID NO: 22740 - protein, 107 aa, Artificial Sequence; identical to SEQ ID NO: 20911
  Description of Artificial Sequence: Synthetic polypeptide
  VL of XENP017984

SEQ ID NO: 22741 - protein, 12 aa, Artificial Sequence
  Description of Artificial Sequence: Synthetic peptide
  XENP017984 vlCDR1
RASQSVSSSYLA

SEQ ID NO: 22742 - protein, 7 aa, Artificial Sequence
  Description of Artificial Sequence: Synthetic peptide
  XENP017984 vlCDR2
GASSRAT

SEQ ID NO: 22743 - protein, 8 aa, Artificial Sequence
  Description of Artificial Sequence: Synthetic peptide
  XENP017984 vlCDR3
QQYGHSLT

SEQ ID NO: 22744 - protein, 448 aa, Artificial Sequence; identical to SEQ ID NO: 22624
  Description of Artificial Sequence: Synthetic polypeptide
  XENP017886 4C7_H0L0-nivolumab_H0.1_L0 Fab-Fc Heavy Chain

SEQ ID NO: 22745 - protein, 119 aa, Artificial Sequence; identical to SEQ ID NO: 20886
  Description of Artificial Sequence: Synthetic polypeptide
  VH of XENP017886

SEQ ID NO: 22746 - protein, 5 aa, Artificial Sequence
  Description of Artificial Sequence: Synthetic peptide
  XENP017886 vhCDR1
HYYWS

SEQ ID NO: 22747 - protein, 16 aa, Artificial Sequence
  Description of Artificial Sequence: Synthetic peptide
  XENP017886 vhCDR2
YIYYSGSTKYNPSLKS

SEQ ID NO: 22748 - protein, 11 aa, Artificial Sequence
  Description of Artificial Sequence: Synthetic peptide
  XENP017886 vhCDR3
EWPYYYYEMDV

SEQ ID NO: 22749 - protein, 471 aa, Artificial Sequence
  Description of Artificial Sequence: Synthetic polypeptide
  XENP017886 4C7_H0L0-nivolumab_H0.1_L0 scFv-Fc Heavy Chain
QVQLVESGGGVVQPGRSLRLSCKASGITFSNSGMHWVRQAPGKGLEWVAVIWYDGSKRYYADSVKGRFTISRDNSKNTLFLQMNSLRAEDTAVYYCATNDDYWGQGTLVTVSSGKPGSGKPGSGKPGSGKPGSEIVLTQSPATLSLSPGERATLSCRASQSVSSYLAWYQQKPGQAPRLLIYDASNRATGIPARFSGSGSGTDFTLTISSLEPEDFAVYYCQQSSNWPRTFGQGTKVEIKEPKSSDKTHTCPPCPAPPVAGPSVFLFPPKPKDTLMISRTPEVTCVVVDVKHEDPEVKFNWYVDGVEVHNAKTKPREEQYNSTYRVVSVLTVLHQDWLNGKEYKCKVSNKALPAPIEKTISKAKGQPREPQVYTLPPSREQMTKNQVKLTCLVKGFYPSDIAVEWESNGQPENNYKTTPPVLDSDGSFFLYSKLTVDKSRWQQGNVFSCSVMHEALHNHYTQKSLSLSPGK

SEQ ID NO: 22750 - protein, 113 aa, Artificial Sequence; identical to SEQ ID NO: 6210
  Description of Artificial Sequence: Synthetic polypeptide
  VH of XENP017886

SEQ ID NO: 22751 - protein, 107 aa, Artificial Sequence [sequence omitted]

SEQ ID NO: 22752 - protein, 231 aa, Artificial Sequence; identical to SEQ ID NO: 21532
  Description of Artificial Sequence: Synthetic polypeptide
  Fc chain of XENP017886

SEQ ID NO: 22753 - protein, 5 aa, Artificial Sequence
  Description of Artificial Sequence: Synthetic peptide
  XENP017886 vhCDR1
NSGMH

SEQ ID NO: 22754 - protein, 17 aa, Artificial Sequence
  Description of Artificial Sequence: Synthetic peptide
  XENP017886 vhCDR2
VIWYDGSKRYYADSVKG

SEQ ID NO: 22755 - protein, 4 aa, Artificial Sequence
  Description of Artificial Sequence: Synthetic peptide
  XENP017886 vhCDR3
NDDY

SEQ ID NO: 22756 - protein, 11 aa, Artificial Sequence
  Description of Artificial Sequence: Synthetic peptide
  XENP017886 vlCDR1
RASQSVSSYLA

SEQ ID NO: 22757 - protein, 7 aa, Artificial Sequence
  Description of Artificial Sequence: Synthetic peptide
  XENP017886 vlCDR2
DASNRAT

SEQ ID NO: 22758 - protein, 9 aa, Artificial Sequence
  Description of Artificial Sequence: Synthetic peptide
  XENP017886 vlCDR3
QQSSNWPRT

SEQ ID NO: 22759 - protein, 215 aa, Artificial Sequence; identical to SEQ ID NO: 20890
  Description of Artificial Sequence: Synthetic polypeptide
  XENP017886 4C7_H0L0-nivolumab_H0.1_L0 Light Chain

SEQ ID NO: 22760 - protein, 108 aa, Artificial Sequence; identical to SEQ ID NO: 20891
  Description of Artificial Sequence: Synthetic polypeptide
  VL of XENP017886

SEQ ID NO: 22761 - protein, 12 aa, Artificial Sequence
  Description of Artificial Sequence: Synthetic peptide
  XENP017886 vlCDR1
RASQSVSSSYLA

SEQ ID NO: 22762 - protein, 7 aa, Artificial Sequence
  Description of Artificial Sequence: Synthetic peptide
  XENP017886 vlCDR2
GASSRAT

SEQ ID NO: 22763 - protein, 9 aa, Artificial Sequence
  Description of Artificial Sequence: Synthetic peptide
  XENP017886 vlCDR3
QQYGSSFRT

SEQ ID NO: 22764 - protein, 450 aa, Artificial Sequence; identical to SEQ ID NO: 22644
  Description of Artificial Sequence: Synthetic polypeptide
  XENP017887 8D5_H0L0-nivolumab_H0.1_L0 Fab-Fc Heavy Chain

SEQ ID NO: 22765 - protein, 121 aa, Artificial Sequence; identical to SEQ ID NO: 20896
  Description of Artificial Sequence: Synthetic polypeptide
  VH of XENP017887

SEQ ID NO: 22766 - protein, 5 aa, Artificial Sequence
  Description of Artificial Sequence: Synthetic peptide
  XENP017887 vhCDR1
SYDMH

SEQ ID NO: 22767 - protein, 16 aa, Artificial Sequence
  Description of Artificial Sequence: Synthetic peptide
  XENP017887 vhCDR2
VIGPAGDTYYPGSVKG

SEQ ID NO: 22768 - protein, 13 aa, Artificial Sequence
  Description of Artificial Sequence: Synthetic peptide
  XENP017887 vhCDR3
EGMAAHNYYGMDV

SEQ ID NO: 22769 - protein, 471 aa, Artificial Sequence; identical to SEQ ID NO: 22749
  Description of Artificial Sequence: Synthetic polypeptide
  XENP017887 8D5_H0L0-nivolumab_H0.1_L0 scFv-Fc Heavy Chain

SEQ ID NO: 22770 - protein, 113 aa, Artificial Sequence; identical to SEQ ID NO: 6210
  Description of Artificial Sequence: Synthetic polypeptide
  VH of XENP017887

SEQ ID NO: 22771 - protein, 107 aa, Artificial Sequence [sequence omitted]

SEQ ID NO: 22772 - protein, 231 aa, Artificial Sequence; identical to SEQ ID NO: 21532
  Description of Artificial Sequence: Synthetic polypeptide
  Fc chain of XENP017887

SEQ ID NO: 22773 - protein, 5 aa, Artificial Sequence
  Description of Artificial Sequence: Synthetic peptide
  XENP017887 vhCDR1
NSGMH

SEQ ID NO: 22774 - protein, 17 aa, Artificial Sequence
  Description of Artificial Sequence: Synthetic peptide
  XENP017887 vhCDR2
VIWYDGSKRYYADSVKG

SEQ ID NO: 22775 - protein, 4 aa, Artificial Sequence
  Description of Artificial Sequence: Synthetic peptide
  XENP017887 vhCDR3
NDDY

SEQ ID NO: 22776 - protein, 11 aa, Artificial Sequence
  Description of Artificial Sequence: Synthetic peptide
  XENP017887 vlCDR1
RASQSVSSYLA

SEQ ID NO: 22777 - protein, 7 aa, Artificial Sequence
  Description of Artificial Sequence: Synthetic peptide
  XENP017887 vlCDR2
DASNRAT

SEQ ID NO: 22778 - protein, 9 aa, Artificial Sequence
  Description of Artificial Sequence: Synthetic peptide
  XENP017887 vlCDR3
QQSSNWPRT

SEQ ID NO: 22779 - protein, 215 aa, Artificial Sequence; identical to SEQ ID NO: 20900
  Description of Artificial Sequence: Synthetic polypeptide
  XENP017887 8D5_H0L0-nivolumab_H0.1_L0 Light Chain

SEQ ID NO: 22780 - protein, 108 aa, Artificial Sequence; identical to SEQ ID NO: 20901
  Description of Artificial Sequence: Synthetic polypeptide
  VL of XENP017887

SEQ ID NO: 22781 - protein, 11 aa, Artificial Sequence
  Description of Artificial Sequence: Synthetic peptide
  XENP017887 vlCDR1
RASQSVSSYLA

SEQ ID NO: 22782 - protein, 7 aa, Artificial Sequence
  Description of Artificial Sequence: Synthetic peptide
  XENP017887 vlCDR2
DASNRAT

SEQ ID NO: 22783 - protein, 10 aa, Artificial Sequence
  Description of Artificial Sequence: Synthetic peptide
  XENP017887 vlCDR3
QQRSNWPPIT

SEQ ID NO: 22784 - protein, 457 aa, Artificial Sequence; identical to SEQ ID NO: 22664
  Description of Artificial Sequence: Synthetic polypeptide
  XENP017888 E8D9_H0L0-nivolumab_H0.1_L0 Fab-Fc Heavy Chain

SEQ ID NO: 22785 - protein, 128 aa, Artificial Sequence; identical to SEQ ID NO: 20906
  Description of Artificial Sequence: Synthetic polypeptide
  VH of XENP017888

SEQ ID NO: 22786 - protein, 7 aa, Artificial Sequence
  Description of Artificial Sequence: Synthetic peptide
  XENP017888 vhCDR1
TSGVGVG

SEQ ID NO: 22787 - protein, 16 aa, Artificial Sequence
  Description of Artificial Sequence: Synthetic peptide
  XENP017888 vhCDR2
LIYWDDDKRYSPSLKS

SEQ ID NO: 22788 - protein, 18 aa, Artificial Sequence
  Description of Artificial Sequence: Synthetic peptide
  XENP017888 vhCDR3
TSITEVRGAIIYYYGMDV

SEQ ID NO: 22789 - protein, 471 aa, Artificial Sequence; identical to SEQ ID NO: 22749
  Description of Artificial Sequence: Synthetic polypeptide
  XENP017888 E8D9_H0L0-nivolumab_H0.1_L0 scFv-Fc Heavy Chain

SEQ ID NO: 22790 - protein, 113 aa, Artificial Sequence; identical to SEQ ID NO: 6210
  Description of Artificial Sequence: Synthetic polypeptide
  VH of XENP017888

SEQ ID NO: 22791 - protein, 107 aa, Artificial Sequence [sequence omitted]

SEQ ID NO: 22792 - protein, 231 aa, Artificial Sequence; identical to SEQ ID NO: 21532
  Description of Artificial Sequence: Synthetic polypeptide
  Fc chain of XENP017888

SEQ ID NO: 22793 - protein, 5 aa, Artificial Sequence
  Description of Artificial Sequence: Synthetic peptide
  XENP017888 vhCDR1
NSGMH

SEQ ID NO: 22794 - protein, 17 aa, Artificial Sequence
  Description of Artificial Sequence: Synthetic peptide
  XENP017888 vhCDR2
VIWYDGSKRYYADSVKG

SEQ ID NO: 22795 - protein, 4 aa, Artificial Sequence
  Description of Artificial Sequence: Synthetic peptide
  XENP017888 vhCDR3
NDDY

SEQ ID NO: 22796 - protein, 11 aa, Artificial Sequence
  Description of Artificial Sequence: Synthetic peptide
  XENP017888 vlCDR1
RASQSVSSYLA

SEQ ID NO: 22797 - protein, 7 aa, Artificial Sequence
  Description of Artificial Sequence: Synthetic peptide
  XENP017888 vlCDR2
DASNRAT

SEQ ID NO: 22798 - protein, 9 aa, Artificial Sequence
  Description of Artificial Sequence: Synthetic peptide
  XENP017888 vlCDR3
QQSSNWPRT

SEQ ID NO: 22799 - protein, 214 aa, Artificial Sequence; identical to SEQ ID NO: 20910
  Description of Artificial Sequence: Synthetic polypeptide
  XENP017888 E8D9_H0L0-nivolumab_H0.1_L0 Light Chain

SEQ ID NO: 22800 - protein, 107 aa, Artificial Sequence; identical to SEQ ID NO: 20911
  Description of Artificial Sequence: Synthetic polypeptide
  VL of XENP017888

SEQ ID NO: 22801 - protein, 12 aa, Artificial Sequence
  Description of Artificial Sequence: Synthetic peptide
  XENP017888 vlCDR1
RASQSVSSSYLA

SEQ ID NO: 22802 - protein, 7 aa, Artificial Sequence
  Description of Artificial Sequence: Synthetic peptide
  XENP017888 vlCDR2
GASSRAT

SEQ ID NO: 22803 - protein, 8 aa, Artificial Sequence
  Description of Artificial Sequence: Synthetic peptide
  XENP017888 vlCDR3
QQYGHSLT

SEQ ID NO: 22804 - protein, 449 aa, Artificial Sequence
  Description of Artificial Sequence: Synthetic polypeptide
  XENP020280 3F6_H0L0_anti-BTLA-1G6_H1.280_L1.224 Fab-Fc Heavy Chain
EVQLQESGPSLVKPSQTLSLTCSVTGDSITSGYWNWIRKFPGNKLEYMGYLSYSGSTYYNPSLKSRISITRDTSKNQYYLQLNSVTTEDTATYYCARYFYGSYYEAMDYWGQGTSVTVSSASTKGPSVFPLAPSSKSTSGGTAALGCLVKDYFPEPVTVSWNSGALTSGVHTFPAVLQSSGLYSLSSVVTVPSSSLGTQTYICNVNHKPSDTKVDKKVEPKSCDKTHTCPPCPAPPVAGPSVFLFPPKPKDTLMISRTPEVTCVVVDVKHEDPEVKFNWYVDGVEVHNAKTKPREEEYNSTYRVVSVLTVLHQDWLNGKEYKCKVSNKALPAPIEKTISKAKGQPREPQVYTLPPSREEMTKNQVSLTCDVSGFYPSDIAVEWESDGQPENNYKTTPPVLDSDGSFFLYSKLTVDKSRWEQGDVFSCSVMHEALHNHYTQKSLSLSPGK

SEQ ID NO: 22805 - protein, 120 aa, Artificial Sequence; identical to SEQ ID NO: 20916
  Description of Artificial Sequence: Synthetic polypeptide
  VH of XENP020280

SEQ ID NO: 22806 - protein, 5 aa, Artificial Sequence
  Description of Artificial Sequence: Synthetic peptide
  XENP020280 vhCDR1
SGYWN

SEQ ID NO: 22807 - protein, 16 aa, Artificial Sequence
  Description of Artificial Sequence: Synthetic peptide
  XENP020280 vhCDR2
YLSYSGSTYYNPSLKS

SEQ ID NO: 22808 - protein, 12 aa, Artificial Sequence
  Description of Artificial Sequence: Synthetic peptide
  XENP020280 vhCDR3
YFYGSYYEAMDY

SEQ ID NO: 22809 - protein, 480 aa, Artificial Sequence
  Description of Artificial Sequence: Synthetic polypeptide
  XENP020280 3F6_H0L0_anti-BTLA-1G6_H1.280_L1.224 scFv-Fc Heavy Chain
EVQLVESGGGLVKPGGSLRLTCVASGFTFSNYWMNWVRQAPGKGLEWVAEIRLYSNNYATHYAESVKGRFTISRDDSKSTLYLQMNNLKTEDTGVYYCTRYYGNYGGYFDVWGRGTLVTVSSGKPGSGKPGSGKPGSGKPGSEIVLTQSPATLSVSPGERVTLTCRASQSVGNDVAWYQQKPGQAPRLLINYASHRYTSVPDRFTGSGYGTEFTLTISSVQSEDFAVYYCQQDWSSPRTFGGGTKVEIKEPKSSDKTHTCPPCPAPPVAGPSVFLFPPKPKDTLMISRTPEVTCVVVDVKHEDPEVKFNWYVDGVEVHNAKTKPREEQYNSTYRVVSVLTVLHQDWLNGKEYKCKVSNKALPAPIEKTISKAKGQPREPQVYTLPPSREQMTKNQVKLTCLVKGFYPSDIAVEWESNGQPENNYKTTPPVLDSDGSFFLYSKLTVDKSRWQQGNVFSCSVMHEALHNHYTQKSLSLSPGK

SEQ ID NO: 22810 - protein, 122 aa, Artificial Sequence; identical to SEQ ID NO: 10917
  Description of Artificial Sequence: Synthetic polypeptide
  VH of XENP020280

SEQ ID NO: 22811 - protein, 107 aa, Artificial Sequence
  Description of Artificial Sequence: Synthetic polypeptide
  VL of XENP020280
EIVLTQSPATLSVSPGERVTLTCRASQSVGNDVAWYQQKPGQAPRLLINYASHRYTSVPDRFTGSGYGTEFTLTISSVQSEDFAVYYCQQDWSSPRTFGGGTKVEIK

SEQ ID NO: 22812 - protein, 231 aa, Artificial Sequence; identical to SEQ ID NO: 21532
  Description of Artificial Sequence: Synthetic polypeptide
  Fc chain of XENP020280

SEQ ID NO: 22813 - protein, 5 aa, Artificial Sequence
  Description of Artificial Sequence: Synthetic peptide
  XENP020280 vhCDR1
NYWMN

SEQ ID NO: 22814 - protein, 19 aa, Artificial Sequence
  Description of Artificial Sequence: Synthetic peptide
  XENP020280 vhCDR2
EIRLYSNNYATHYAESVKG

SEQ ID NO: 22815 - protein, 11 aa, Artificial Sequence
  Description of Artificial Sequence: Synthetic peptide
  XENP020280 vhCDR3
YYGNYGGYFDV

SEQ ID NO: 22816 - protein, 11 aa, Artificial Sequence
  Description of Artificial Sequence: Synthetic peptide
  XENP020280 vlCDR1
RASQSVGNDVA

SEQ ID NO: 22817 - protein, 7 aa, Artificial Sequence
  Description of Artificial Sequence: Synthetic peptide
  XENP020280 vlCDR2
YASHRYT

SEQ ID NO: 22818 - protein, 9 aa, Artificial Sequence
  Description of Artificial Sequence: Synthetic peptide
  XENP020280 vlCDR3
QQDWSSPRT

SEQ ID NO: 22819 - protein, 214 aa, Artificial Sequence; identical to SEQ ID NO: 20920
  Description of Artificial Sequence: Synthetic polypeptide
  XENP020280 3F6_H0L0_anti-BTLA-1G6_H1.280_L1.224 Light Chain

SEQ ID NO: 22820 - protein, 107 aa, Artificial Sequence; identical to SEQ ID NO: 20921
  Description of Artificial Sequence: Synthetic polypeptide
  VL of XENP020280

SEQ ID NO: 22821 - protein, 11 aa, Artificial Sequence
  Description of Artificial Sequence: Synthetic peptide
  XENP020280 vlCDR1
RASKSISKYLA

SEQ ID NO: 22822 - protein, 7 aa, Artificial Sequence
  Description of Artificial Sequence: Synthetic peptide
  XENP020280 vlCDR2
SGSTLQS

SEQ ID NO: 22823 - protein, 9 aa, Artificial Sequence
  Description of Artificial Sequence: Synthetic peptide
  XENP020280 vlCDR3
QQHNEYPWT

SEQ ID NO: 22824 - protein, 448 aa, Artificial Sequence
  Description of Artificial Sequence: Synthetic polypeptide
  XENP020281 1A9_H0L0_anti-BTLA-1G6_H1.280_L1.224 Fab-Fc Heavy Chain
DVQLVESGGGLVQPGGSRKLSCAASGFTFSSFGMHWVRQAPEKGLEWVAYISSGISTIYYADTVKGRFTISRDNPKNTLFLQMTSLRSEDTAMYYCARDWLRGYAMDYWGQGTSVTVSSASTKGPSVFPLAPSSKSTSGGTAALGCLVKDYFPEPVTVSWNSGALTSGVHTFPAVLQSSGLYSLSSVVTVPSSSLGTQTYICNVNHKPSDTKVDKKVEPKSCDKTHTCPPCPAPPVAGPSVFLFPPKPKDTLMISRTPEVTCVVVDVKHEDPEVKFNWYVDGVEVHNAKTKPREEEYNSTYRVVSVLTVLHQDWLNGKEYKCKVSNKALPAPIEKTISKAKGQPREPQVYTLPPSREEMTKNQVSLTCDVSGFYPSDIAVEWESDGQPENNYKTTPPVLDSDGSFFLYSKLTVDKSRWEQGDVFSCSVMHEALHNHYTQKSLSLSPGK

SEQ ID NO: 22825 - protein, 119 aa, Artificial Sequence; identical to SEQ ID NO: 20926
  Description of Artificial Sequence: Synthetic polypeptide
  VH of XENP020281

SEQ ID NO: 22826 - protein, 5 aa, Artificial Sequence
  Description of Artificial Sequence: Synthetic peptide
  XENP020281 vhCDR1
SFGMH

SEQ ID NO: 22827 - protein, 17 aa, Artificial Sequence
  Description of Artificial Sequence: Synthetic peptide
  XENP020281 vhCDR2
YISSGISTIYYADTVKG

SEQ ID NO: 22828 - protein, 10 aa, Artificial Sequence
  Description of Artificial Sequence: Synthetic peptide
  XENP020281 vhCDR3
DWLRGYAMDY

SEQ ID NO: 22829 - protein, 480 aa, Artificial Sequence; identical to SEQ ID NO: 22809
  Description of Artificial Sequence: Synthetic polypeptide
  XENP020281 1A9_H0L0_anti-BTLA-1G6_H1.280_L1.224 scFv-Fc Heavy Chain

SEQ ID NO: 22830 - protein, 122 aa, Artificial Sequence; identical to SEQ ID NO: 10917
  Description of Artificial Sequence: Synthetic polypeptide
  VH of XENP020281

SEQ ID NO: 22831 - protein, 107 aa, Artificial Sequence; identical to SEQ ID NO: 22811
  Description of Artificial Sequence: Synthetic polypeptide
  VL of XENP020281

SEQ ID NO: 22832 - protein, 231 aa, Artificial Sequence; identical to SEQ ID NO: 21532
  Description of Artificial Sequence: Synthetic polypeptide
  Fc chain of XENP020281

SEQ ID NO: 22833 - protein, 5 aa, Artificial Sequence
  Description of Artificial Sequence: Synthetic peptide
  XENP020281 vhCDR1
NYWMN

SEQ ID NO: 22834 - protein, 19 aa, Artificial Sequence
  Description of Artificial Sequence: Synthetic peptide
  XENP020281 vhCDR2
EIRLYSNNYATHYAESVKG

SEQ ID NO: 22835 - protein, 11 aa, Artificial Sequence
  Description of Artificial Sequence: Synthetic peptide
  XENP020281 vhCDR3
YYGNYGGYFDV

SEQ ID NO: 22836 - protein, 11 aa, Artificial Sequence
  Description of Artificial Sequence: Synthetic peptide
  XENP020281 vlCDR1
RASQSVGNDVA

SEQ ID NO: 22837 - protein, 7 aa, Artificial Sequence
  Description of Artificial Sequence: Synthetic peptide
  XENP020281 vlCDR2
YASHRYT

SEQ ID NO: 22838 - protein, 9 aa, Artificial Sequence
  Description of Artificial Sequence: Synthetic peptide
  XENP020281 vlCDR3
QQDWSSPRT

SEQ ID NO: 22839 - protein, 218 aa, Artificial Sequence; identical to SEQ ID NO: 20930
  Description of Artificial Sequence: Synthetic polypeptide
  XENP020281 1A9_H0L0_anti-BTLA-1G6_H1.280_L1.224 Light Chain

SEQ ID NO: 22840 - protein, 111 aa, Artificial Sequence; identical to SEQ ID NO: 20931
  Description of Artificial Sequence: Synthetic polypeptide
  VL of XENP020281

SEQ ID NO: 22841 - protein, 15 aa, Artificial Sequence
  Description of Artificial Sequence: Synthetic peptide
  XENP020281 vlCDR1
KASQSIDYDGDSYMN

SEQ ID NO: 22842 - protein, 7 aa, Artificial Sequence
  Description of Artificial Sequence: Synthetic peptide
  XENP020281 vlCDR2
AASNLDF

SEQ ID NO: 22843 - protein, 9 aa, Artificial Sequence
  Description of Artificial Sequence: Synthetic peptide
  XENP020281 vlCDR3
QQSNEDPWT

SEQ ID NO: 22844 - protein, 447 aa, Artificial Sequence
  Description of Artificial Sequence: Synthetic polypeptide
  XENP020282 9C6_H0L0_anti-BTLA-1G6_H1.280_L1.224 Fab-Fc Heavy Chain
QVQLKESGPGLVAPSQSLSITCTVSGFSLTGYGVNWVRQPPGKGLEWLGMIWIDGSTDYNSALKSRLSINKDNSKSQVFLKMNSLQTDDTARYYCARDRPDGRAMDYWGQGTSVTVSSASTKGPSVFPLAPSSKSTSGGTAALGCLVKDYFPEPVTVSWNSGALTSGVHTFPAVLQSSGLYSLSSVVTVPSSSLGTQTYICNVNHKPSDTKVDKKVEPKSCDKTHTCPPCPAPPVAGPSVFLFPPKPKDTLMISRTPEVTCVVVDVKHEDPEVKFNWYVDGVEVHNAKTKPREEEYNSTYRVVSVLTVLHQDWLNGKEYKCKVSNKALPAPIEKTISKAKGQPREPQVYTLPPSREEMTKNQVSLTCDVSGFYPSDIAVEWESDGQPENNYKTTPPVLDSDGSFFLYSKLTVDKSRWEQGDVFSCSVMHEALHNHYTQKSLSLSPGK

SEQ ID NO: 22845 - protein, 118 aa, Artificial Sequence; identical to SEQ ID NO: 20936
  Description of Artificial Sequence: Synthetic polypeptide
  VH of XENP020282

SEQ ID NO: 22846 - protein, 5 aa, Artificial Sequence
  Description of Artificial Sequence: Synthetic peptide
  XENP020282 vhCDR1
GYGVN

SEQ ID NO: 22847 - protein, 16 aa, Artificial Sequence
  Description of Artificial Sequence: Synthetic peptide
  XENP020282 vhCDR2
MIWIDGSTDYNSALKS

SEQ ID NO: 22848 - protein, 10 aa, Artificial Sequence
  Description of Artificial Sequence: Synthetic peptide
  XENP020282 vhCDR3
DRPDGRAMDY

SEQ ID NO: 22849 - protein, 480 aa, Artificial Sequence; identical to SEQ ID NO: 22809
  Description of Artificial Sequence: Synthetic polypeptide
  XENP020282 9C6_H0L0_anti-BTLA-1G6_H1.280_L1.224 scFv-Fc Heavy Chain

SEQ ID NO: 22850 - protein, 122 aa, Artificial Sequence; identical to SEQ ID NO: 10917
  Description of Artificial Sequence: Synthetic polypeptide
  VH of XENP020282

SEQ ID NO: 22851 - protein, 107 aa, Artificial Sequence; identical to SEQ ID NO: 22811
  Description of Artificial Sequence: Synthetic polypeptide
  VL of XENP020282

SEQ ID NO: 22852 - protein, 231 aa, Artificial Sequence; identical to SEQ ID NO: 21532
  Description of Artificial Sequence: Synthetic polypeptide
  Fc chain of XENP020282

SEQ ID NO: 22853 - protein, 5 aa, Artificial Sequence
  Description of Artificial Sequence: Synthetic peptide
  XENP020282 vhCDR1
NYWMN

SEQ ID NO: 22854 - protein, 19 aa, Artificial Sequence
  Description of Artificial Sequence: Synthetic peptide
  XENP020282 vhCDR2
EIRLYSNNYATHYAESVKG

SEQ ID NO: 22855 - protein, 11 aa, Artificial Sequence
  Description of Artificial Sequence: Synthetic peptide
  XENP020282 vhCDR3
YYGNYGGYFDV

SEQ ID NO: 22856 - protein, 11 aa, Artificial Sequence
  Description of Artificial Sequence: Synthetic peptide
  XENP020282 vlCDR1
RASQSVGNDVA

SEQ ID NO: 22857 - protein, 7 aa, Artificial Sequence
  Description of Artificial Sequence: Synthetic peptide
  XENP020282 vlCDR2
YASHRYT

SEQ ID NO: 22858 - protein, 9 aa, Artificial Sequence
  Description of Artificial Sequence: Synthetic peptide
  XENP020282 vlCDR3
QQDWSSPRT

SEQ ID NO: 22859 - protein, 213 aa, Artificial Sequence; identical to SEQ ID NO: 20940
  Description of Artificial Sequence: Synthetic polypeptide
  XENP020282 9C6_H0L0_anti-BTLA-1G6_H1.280_L1.224 Light Chain

SEQ ID NO: 22860 - protein, 106 aa, Artificial Sequence; identical to SEQ ID NO: 20941
  Description of Artificial Sequence: Synthetic polypeptide
  VL of XENP020282

SEQ ID NO: 22861 - protein, 11 aa, Artificial Sequence
  Description of Artificial Sequence: Synthetic peptide
  XENP020282 vlCDR1
KASQSVSNDVA

SEQ ID NO: 22862 - protein, 7 aa, Artificial Sequence
  Description of Artificial Sequence: Synthetic peptide
  XENP020282 vlCDR2
YASNRYT

SEQ ID NO: 22863 - protein, 8 aa, Artificial Sequence
  Description of Artificial Sequence: Synthetic peptide
  XENP020282 vlCDR3
QQDYSSPT

SEQ ID NO: 22864 - protein, 447 aa, Artificial Sequence; identical to SEQ ID NO: 22844
  Description of Artificial Sequence: Synthetic polypeptide
  XENP020283 7H2_H0L0_anti-BTLA-1G6_H1.280_L1.224 Fab-Fc Heavy Chain

SEQ ID NO: 22865 - protein, 118 aa, Artificial Sequence; identical to SEQ ID NO: 20936
  Description of Artificial Sequence: Synthetic polypeptide
  VH of XENP020283

SEQ ID NO: 22866 - protein, 5 aa, Artificial Sequence
  Description of Artificial Sequence: Synthetic peptide
  XENP020283 vhCDR1
GYGVN

SEQ ID NO: 22867 - protein, 16 aa, Artificial Sequence
  Description of Artificial Sequence: Synthetic peptide
  XENP020283 vhCDR2
MIWIDGSTDYNSALKS

SEQ ID NO: 22868 - protein, 10 aa, Artificial Sequence
  Description of Artificial Sequence: Synthetic peptide
  XENP020283 vhCDR3
DRPDGRAMDY

SEQ ID NO: 22869 - protein, 480 aa, Artificial Sequence; identical to SEQ ID NO: 22809
  Description of Artificial Sequence: Synthetic polypeptide
  XENP020283 7H2_H0L0_anti-BTLA-1G6_H1.280_L1.224 scFv-Fc Heavy Chain

SEQ ID NO: 22870 - protein, 122 aa, Artificial Sequence; identical to SEQ ID NO: 10917
  Description of Artificial Sequence: Synthetic polypeptide
  VH of XENP020283

SEQ ID NO: 22871 - protein, 107 aa, Artificial Sequence; identical to SEQ ID NO: 22811
  Description of Artificial Sequence: Synthetic polypeptide
  VL of XENP020283

SEQ ID NO: 22872 - protein, 231 aa, Artificial Sequence; identical to SEQ ID NO: 21532
  Description of Artificial Sequence: Synthetic polypeptide
  Fc chain of XENP020283

SEQ ID NO: 22873 - protein, 5 aa, Artificial Sequence
  Description of Artificial Sequence: Synthetic peptide
  XENP020283 vhCDR1
NYWMN

SEQ ID NO: 22874 - protein, 19 aa, Artificial Sequence
  Description of Artificial Sequence: Synthetic peptide
  XENP020283 vhCDR2
EIRLYSNNYATHYAESVKG

SEQ ID NO: 22875 - protein, 11 aa, Artificial Sequence
  Description of Artificial Sequence: Synthetic peptide
  XENP020283 vhCDR3
YYGNYGGYFDV

SEQ ID NO: 22876 - protein, 11 aa, Artificial Sequence
  Description of Artificial Sequence: Synthetic peptide
  XENP020283 vlCDR1
RASQSVGNDVA

SEQ ID NO: 22877 - protein, 7 aa, Artificial Sequence
  Description of Artificial Sequence: Synthetic peptide
  XENP020283 vlCDR2
YASHRYT

SEQ ID NO: 22878 - protein, 9 aa, Artificial Sequence
  Description of Artificial Sequence: Synthetic peptide
  XENP020283 vlCDR3
QQDWSSPRT

SEQ ID NO: 22879 - protein, 213 aa, Artificial Sequence; identical to SEQ ID NO: 20950
  Description of Artificial Sequence: Synthetic polypeptide
  XENP020283 7H2_H0L0_anti-BTLA-1G6_H1.280_L1.224 Light Chain

SEQ ID NO: 22880 - protein, 106 aa, Artificial Sequence; identical to SEQ ID NO: 20951
  Description of Artificial Sequence: Synthetic polypeptide
  VL of XENP020283

SEQ ID NO: 22881 - protein, 11 aa, Artificial Sequence
  Description of Artificial Sequence: Synthetic peptide
  XENP020283 vlCDR1
KASQSVSNDVA

SEQ ID NO: 22882 - protein, 7 aa, Artificial Sequence
  Description of Artificial Sequence: Synthetic peptide
  XENP020283 vlCDR2
YASNRYT

SEQ ID NO: 22883 - protein, 8 aa, Artificial Sequence
  Description of Artificial Sequence: Synthetic peptide
  XENP020283 vlCDR3
QQDYNSPT

SEQ ID NO: 22884 - protein, 447 aa, Artificial Sequence
  Description of Artificial Sequence: Synthetic polypeptide
  XENP020284 6C3_H0L0_anti-BTLA-1G6_H1.280_L1.224 Fab-Fc Heavy Chain
EVQLQQSGAELVRSGASVKLSCTASGFNIKDYYMHWVKQRPEQGLEWIGWLDPENGDTVYVPKFQGKATMTADTSSNTAYLQLTSLTSEDSAVYYCNAGDYGSSFNYWGQGTTLTVSSASTKGPSVFPLAPSSKSTSGGTAALGCLVKDYFPEPVTVSWNSGALTSGVHTFPAVLQSSGLYSLSSVVTVPSSSLGTQTYICNVNHKPSDTKVDKKVEPKSCDKTHTCPPCPAPPVAGPSVFLFPPKPKDTLMISRTPEVTCVVVDVKHEDPEVKFNWYVDGVEVHNAKTKPREEEYNSTYRVVSVLTVLHQDWLNGKEYKCKVSNKALPAPIEKTISKAKGQPREPQVYTLPPSREEMTKNQVSLTCDVSGFYPSDIAVEWESDGQPENNYKTTPPVLDSDGSFFLYSKLTVDKSRWEQGDVFSCSVMHEALHNHYTQKSLSLSPGK

SEQ ID NO: 22885 - protein, 118 aa, Artificial Sequence; identical to SEQ ID NO: 20956
  Description of Artificial Sequence: Synthetic polypeptide
  VH of XENP020284

SEQ ID NO: 22886 - protein, 5 aa, Artificial Sequence
  Description of Artificial Sequence: Synthetic peptide
  XENP020284 vhCDR1
DYYMH

SEQ ID NO: 22887 - protein, 17 aa, Artificial Sequence
  Description of Artificial Sequence: Synthetic peptide
  XENP020284 vhCDR2
WLDPENGDTVYVPKFQG

SEQ ID NO: 22888 - protein, 9 aa, Artificial Sequence
  Description of Artificial Sequence: Synthetic peptide
  XENP020284 vhCDR3
GDYGSSFNY

SEQ ID NO: 22889 - protein, 480 aa, Artificial Sequence; identical to SEQ ID NO: 22809
  Description of Artificial Sequence: Synthetic polypeptide
  XENP020284 6C3_H0L0_anti-BTLA-1G6_H1.280_L1.224 scFv-Fc Heavy Chain

SEQ ID NO: 22890 - protein, 122 aa, Artificial Sequence; identical to SEQ ID NO: 10917
  Description of Artificial Sequence: Synthetic polypeptide
  VH of XENP020284

SEQ ID NO: 22891 - protein, 107 aa, Artificial Sequence; identical to SEQ ID NO: 22811
  Description of Artificial Sequence: Synthetic polypeptide
  VL of XENP020284

SEQ ID NO: 22892 - protein, 231 aa, Artificial Sequence; identical to SEQ ID NO: 21532
  Description of Artificial Sequence: Synthetic polypeptide
  Fc chain of XENP020284

SEQ ID NO: 22893 - protein, 5 aa, Artificial Sequence
  Description of Artificial Sequence: Synthetic peptide
  XENP020284 vhCDR1
NYWMN

SEQ ID NO: 22894 - protein, 19 aa, Artificial Sequence
  Description of Artificial Sequence: Synthetic peptide
  XENP020284 vhCDR2
EIRLYSNNYATHYAESVKG

SEQ ID NO: 22895 - protein, 11 aa, Artificial Sequence
  Description of Artificial Sequence: Synthetic peptide
  XENP020284 vhCDR3
YYGNYGGYFDV

SEQ ID NO: 22896 - protein, 11 aa, Artificial Sequence
  Description of Artificial Sequence: Synthetic peptide
  XENP020284 vlCDR1
RASQSVGNDVA

SEQ ID NO: 22897 - protein, 7 aa, Artificial Sequence
  Description of Artificial Sequence: Synthetic peptide
  XENP020284 vlCDR2
YASHRYT

SEQ ID NO: 22898 - protein, 9 aa, Artificial Sequence
  Description of Artificial Sequence: Synthetic peptide
  XENP020284 vlCDR3
QQDWSSPRT

SEQ ID NO: 22899 - protein, 219 aa, Artificial Sequence; identical to SEQ ID NO: 20960
  Description of Artificial Sequence: Synthetic polypeptide
  XENP020284 6C3_H0L0_anti-BTLA-1G6_H1.280_L1.224 Light Chain

SEQ ID NO: 22900 - protein, 112 aa, Artificial Sequence; identical to SEQ ID NO: 20961
  Description of Artificial Sequence: Synthetic polypeptide
  VL of XENP020284

SEQ ID NO: 22901 - protein, 17 aa, Artificial Sequence
  Description of Artificial Sequence: Synthetic peptide
  XENP020284 vlCDR1
KSSQSLLYSGNQKNYLA

SEQ ID NO: 22902 - protein, 7 aa, Artificial Sequence
  Description of Artificial Sequence: Synthetic peptide
  XENP020284 vlCDR2
WASTRES

SEQ ID NO: 22903 - protein, 8 aa, Artificial Sequence
  Description of Artificial Sequence: Synthetic peptide
  XENP020284 vlCDR3
QQYYTYHT

SEQ ID NO: 22904 - protein, 449 aa, Artificial Sequence
  Description of Artificial Sequence: Synthetic polypeptide
  XENP020285 9C10_H0L0_anti-BTLA-1G6_H1.280_L1.224 Fab-Fc Heavy Chain
EVQLQESGPSLVKPSQTLSLTCSVTGDSITSGYWNWIRKFPGNKLEYMGYISYSGSTYYNPSLKSRISITRDTSKNQYYLQLNSVTTEDTATYYCARYYYGSYYEAMDYWGQGTSVTVSSASTKGPSVFPLAPSSKSTSGGTAALGCLVKDYFPEPVTVSWNSGALTSGVHTFPAVLQSSGLYSLSSVVTVPSSSLGTQTYICNVNHKPSDTKVDKKVEPKSCDKTHTCPPCPAPPVAGPSVFLFPPKPKDTLMISRTPEVTCVVVDVKHEDPEVKFNWYVDGVEVHNAKTKPREEEYNSTYRVVSVLTVLHQDWLNGKEYKCKVSNKALPAPIEKTISKAKGQPREPQVYTLPPSREEMTKNQVSLTCDVSGFYPSDIAVEWESDGQPENNYKTTPPVLDSDGSFFLYSKLTVDKSRWEQGDVFSCSVMHEALHNHYTQKSLSLSPGK

SEQ ID NO: 22905 - protein, 120 aa, Artificial Sequence; identical to SEQ ID NO: 20966
  Description of Artificial Sequence: Synthetic polypeptide
  VH of XENP020285

SEQ ID NO: 22906 - protein, 5 aa, Artificial Sequence
  Description of Artificial Sequence: Synthetic peptide
  XENP020285 vhCDR1
SGYWN

SEQ ID NO: 22907 - protein, 16 aa, Artificial Sequence
  Description of Artificial Sequence: Synthetic peptide
  XENP020285 vhCDR2
YISYSGSTYYNPSLKS

SEQ ID NO: 22908 - protein, 12 aa, Artificial Sequence
  Description of Artificial Sequence: Synthetic peptide
  XENP020285 vhCDR3
YYYGSYYEAMDY

SEQ ID NO: 22909 - protein, 480 aa, Artificial Sequence; identical to SEQ ID NO: 22809
  Description of Artificial Sequence: Synthetic polypeptide
  XENP020285 9C10_H0L0_anti-BTLA-1G6_H1.280_L1.224 scFv-Fc Heavy Chain

SEQ ID NO: 22910 - protein, 122 aa, Artificial Sequence; identical to SEQ ID NO: 10917
  Description of Artificial Sequence: Synthetic polypeptide
  VH of XENP020285

SEQ ID NO: 22911 - protein, 107 aa, Artificial Sequence; identical to SEQ ID NO: 22811
  Description of Artificial Sequence: Synthetic polypeptide
  VL of XENP020285

SEQ ID NO: 22912 - protein, 231 aa, Artificial Sequence; identical to SEQ ID NO: 21532
  Description of Artificial Sequence: Synthetic polypeptide
  Fc chain of XENP020285

SEQ ID NO: 22913 - protein, 5 aa, Artificial Sequence
  Description of Artificial Sequence: Synthetic peptide
  XENP020285 vhCDR1
NYWMN

SEQ ID NO: 22914 - protein, 19 aa, Artificial Sequence
  Description of Artificial Sequence: Synthetic peptide
  XENP020285 vhCDR2
EIRLYSNNYATHYAESVKG

SEQ ID NO: 22915 - protein, 11 aa, Artificial Sequence
  Description of Artificial Sequence: Synthetic peptide
  XENP020285 vhCDR3
YYGNYGGYFDV

SEQ ID NO: 22916 - protein, 11 aa, Artificial Sequence
  Description of Artificial Sequence: Synthetic peptide
  XENP020285 vlCDR1
RASQSVGNDVA

SEQ ID NO: 22917 - protein, 7 aa, Artificial Sequence
  Description of Artificial Sequence: Synthetic peptide
  XENP020285 vlCDR2
YASHRYT

SEQ ID NO: 22918 - protein, 9 aa, Artificial Sequence
  Description of Artificial Sequence: Synthetic peptide
  XENP020285 vlCDR3
QQDWSSPRT

SEQ ID NO: 22919 - protein, 214 aa, Artificial Sequence; identical to SEQ ID NO: 20970
  Description of Artificial Sequence: Synthetic polypeptide
  XENP020285 9C10_H0L0_anti-BTLA-1G6_H1.280_L1.224 Light Chain

SEQ ID NO: 22920 - protein, 107 aa, Artificial Sequence; identical to SEQ ID NO: 20971
  Description of Artificial Sequence: Synthetic polypeptide
  VL of XENP020285

SEQ ID NO: 22921 - protein, 11 aa, Artificial Sequence
  Description of Artificial Sequence: Synthetic peptide
  XENP020285 vlCDR1
RASKSISKYLA

SEQ ID NO: 22922 - protein, 7 aa, Artificial Sequence
  Description of Artificial Sequence: Synthetic peptide
  XENP020285 vlCDR2
SGSTLQS

SEQ ID NO: 22923 - protein, 9 aa, Artificial Sequence
  Description of Artificial Sequence: Synthetic peptide
  XENP020285 vlCDR3
QQHNEYPWT

SEQ ID NO: 22924 - protein, 443 aa, Artificial Sequence
  Description of Artificial Sequence: Synthetic polypeptide
  XENP020286 12E6_H0L0_anti-BTLA-1G6_H1.280_L1.224 Fab-Fc Heavy Chain
QVQLQQSGAELMKPGASVKISCKATGYTFSNYWIEWVKQRPGHGLEWIGEILPGSGGTNYNEKFKGKATFTADTSSNTAYMQLSGLTSEDSAVYYCASPRYDLWGQGTSVTASSASTKGPSVFPLAPSSKSTSGGTAALGCLVKDYFPEPVTVSWNSGALTSGVHTFPAVLQSSGLYSLSSVVTVPSSSLGTQTYICNVNHKPSDTKVDKKVEPKSCDKTHTCPPCPAPPVAGPSVFLFPPKPKDTLMISRTPEVTCVVVDVKHEDPEVKFNWYVDGVEVHNAKTKPREEEYNSTYRVVSVLTVLHQDWLNGKEYKCKVSNKALPAPIEKTISKAKGQPREPQVYTLPPSREEMTKNQVSLTCDVSGFYPSDIAVEWESDGQPENNYKTTPPVLDSDGSFFLYSKLTVDKSRWEQGDVFSCSVMHEALHNHYTQKSLSLSPGK

SEQ ID NO: 22925 - protein, 114 aa, Artificial Sequence; identical to SEQ ID NO: 20976
  Description of Artificial Sequence: Synthetic polypeptide
  VH of XENP020286

SEQ ID NO: 22926 - protein, 5 aa, Artificial Sequence
  Description of Artificial Sequence: Synthetic peptide
  XENP020286 vhCDR1
NYWIE

SEQ ID NO: 22927 - protein, 17 aa, Artificial Sequence
  Description of Artificial Sequence: Synthetic peptide
  XENP020286 vhCDR2
EILPGSGGTNYNEKFKG

SEQ ID NO: 22928 - protein, 5 aa, Artificial Sequence
  Description of Artificial Sequence: Synthetic peptide
  XENP020286 vhCDR3
PRYDL

SEQ ID NO: 22929 - protein, 480 aa, Artificial Sequence; identical to SEQ ID NO: 22809
  Description of Artificial Sequence: Synthetic polypeptide
  XENP020286 12E6_H0L0_anti-BTLA-1G6_H1.280_L1.224 scFv-Fc Heavy Chain

SEQ ID NO: 22930 - protein, 122 aa, Artificial Sequence; identical to SEQ ID NO: 10917
  Description of Artificial Sequence: Synthetic polypeptide
  VH of XENP020286

SEQ ID NO: 22931 - protein, 107 aa, Artificial Sequence; identical to SEQ ID NO: 22811
  Description of Artificial Sequence: Synthetic polypeptide
  VL of XENP020286

SEQ ID NO: 22932 - protein, 231 aa, Artificial Sequence; identical to SEQ ID NO: 21532
  Description of Artificial Sequence: Synthetic polypeptide
  Fc chain of XENP020286

SEQ ID NO: 22933 - protein, 5 aa, Artificial Sequence
  Description of Artificial Sequence: Synthetic peptide
  XENP020286 vhCDR1
NYWMN

SEQ ID NO: 22934 - protein, 19 aa, Artificial Sequence
  Description of Artificial Sequence: Synthetic peptide
  XENP020286 vhCDR2
EIRLYSNNYATHYAESVKG

SEQ ID NO: 22935 - protein, 11 aa, Artificial Sequence
  Description of Artificial Sequence: Synthetic peptide
  XENP020286 vhCDR3
YYGNYGGYFDV

SEQ ID NO: 22936 - protein, 11 aa, Artificial Sequence
  Description of Artificial Sequence: Synthetic peptide
  XENP020286 vlCDR1
RASQSVGNDVA

SEQ ID NO: 22937 - protein, 7 aa, Artificial Sequence
  Description of Artificial Sequence: Synthetic peptide
  XENP020286 vlCDR2
YASHRYT

SEQ ID NO: 22938 - protein, 9 aa, Artificial Sequence
  Description of Artificial Sequence: Synthetic peptide
  XENP020286 vlCDR3
QQDWSSPRT

SEQ ID NO: 22939 - protein, 219 aa, Artificial Sequence; identical to SEQ ID NO: 20980
  Description of Artificial Sequence: Synthetic polypeptide
  XENP020286 12E6_H0L0_anti-BTLA-1G6_H1.280_L1.224 Light Chain

SEQ ID NO: 22940 - protein, 112 aa, Artificial Sequence; identical to SEQ ID NO: 20981
  Description of Artificial Sequence: Synthetic polypeptide
  VL of XENP020286

SEQ ID NO: 22941 - protein, 16 aa, Artificial Sequence
  Description of Artificial Sequence: Synthetic peptide
  XENP020286 vlCDR1
KSSQSLLHSDGETYLN

SEQ ID NO: 22942 - protein, 7 aa, Artificial Sequence
  Description of Artificial Sequence: Synthetic peptide
  XENP020286 vlCDR2
LVSKRDS

SEQ ID NO: 22943 - protein, 9 aa, Artificial Sequence
  Description of Artificial Sequence: Synthetic peptide
  XENP020286 vlCDR3
WQGIHFPQT

SEQ ID NO: 22944 - protein, 442 aa, Artificial Sequence
  Description of Artificial Sequence: Synthetic polypeptide
  XENP020287 4C11A_H0L0_anti-BTLA-1G6_H1.280_L1.224 Fab-Fc Heavy Chain
QVQLQQSGAELVKPGASVKLSCKASGYTFTSYYMDWVKQRPGQGLEWIGEINPSNGDTKFNEKFKSKATLTVDKSSTTAYMQLSSLTSEDSAVYYCTRDYGYWGQGTTLTVSSASTKGPSVFPLAPSSKSTSGGTAALGCLVKDYFPEPVTVSWNSGALTSGVHTFPAVLQSSGLYSLSSVVTVPSSSLGTQTYICNVNHKPSDTKVDKKVEPKSCDKTHTCPPCPAPPVAGPSVFLFPPKPKDTLMISRTPEVTCVVVDVKHEDPEVKFNWYVDGVEVHNAKTKPREEEYNSTYRVVSVLTVLHQDWLNGKEYKCKVSNKALPAPIEKTISKAKGQPREPQVYTLPPSREEMTKNQVSLTCDVSGFYPSDIAVEWESDGQPENNYKTTPPVLDSDGSFFLYSKLTVDKSRWEQGDVFSCSVMHEALHNHYTQKSLSLSPGK

SEQ ID NO: 22945 - protein, 113 aa, Artificial Sequence; identical to SEQ ID NO: 20986
  Description of Artificial Sequence: Synthetic polypeptide
  VH of XENP020287

SEQ ID NO: 22946 - protein, 5 aa, Artificial Sequence
  Description of Artificial Sequence: Synthetic peptide
  XENP020287 vhCDR1
SYYMD

SEQ ID NO: 22947 - protein, 17 aa, Artificial Sequence
  Description of Artificial Sequence: Synthetic peptide
  XENP020287 vhCDR2
EINPSNGDTKFNEKFKS

SEQ ID NO: 22948 - protein, 4 aa, Artificial Sequence
  Description of Artificial Sequence: Synthetic peptide
  XENP020287 vhCDR3
DYGY

SEQ ID NO: 22949 - protein, 480 aa, Artificial Sequence; identical to SEQ ID NO: 22809
  Description of Artificial Sequence: Synthetic polypeptide
  XENP020287 4C11A_H0L0_anti-BTLA-1G6_H1.280_L1.224 scFv-Fc Heavy Chain

SEQ ID NO: 22950 - protein, 122 aa, Artificial Sequence; identical to SEQ ID NO: 10917
  Description of Artificial Sequence: Synthetic polypeptide
  VH of XENP020287

SEQ ID NO: 22951 - protein, 107 aa, Artificial Sequence; identical to SEQ ID NO: 22811
  Description of Artificial Sequence: Synthetic polypeptide
  VL of XENP020287

SEQ ID NO: 22952 - protein, 231 aa, Artificial Sequence; identical to SEQ ID NO: 21532
  Description of Artificial Sequence: Synthetic polypeptide
  Fc chain of XENP020287

SEQ ID NO: 22953 - protein, 5 aa, Artificial Sequence
  Description of Artificial Sequence: Synthetic peptide
  XENP020287 vhCDR1
NYWMN

SEQ ID NO: 22954 - protein, 19 aa, Artificial Sequence
  Description of Artificial Sequence: Synthetic peptide
  XENP020287 vhCDR2
EIRLYSNNYATHYAESVKG

SEQ ID NO: 22955 - protein, 11 aa, Artificial Sequence
  Description of Artificial Sequence: Synthetic peptide
  XENP020287 vhCDR3
YYGNYGGYFDV

SEQ ID NO: 22956 - protein, 11 aa, Artificial Sequence
  Description of Artificial Sequence: Synthetic peptide
  XENP020287 vlCDR1
RASQSVGNDVA

SEQ ID NO: 22957 - protein, 7 aa, Artificial Sequence
  Description of Artificial Sequence: Synthetic peptide
  XENP020287 vlCDR2
YASHRYT

SEQ ID NO: 22958 - protein, 9 aa, Artificial Sequence
  Description of Artificial Sequence: Synthetic peptide
  XENP020287 vlCDR3
QQDWSSPRT

SEQ ID NO: 22959 - protein, 214 aa, Artificial Sequence; identical to SEQ ID NO: 20990
  Description of Artificial Sequence: Synthetic polypeptide
  XENP020287 4C11A_H0L0_anti-BTLA-1G6_H1.280_L1.224 Light Chain

SEQ ID NO: 22960 - protein, 107 aa, Artificial Sequence; identical to SEQ ID NO: 20991
  Description of Artificial Sequence: Synthetic polypeptide
  VL of XENP020287

SEQ ID NO: 22961 - protein, 11 aa, Artificial Sequence
  Description of Artificial Sequence: Synthetic peptide
  XENP020287 vlCDR1
RASQSISDYLH

SEQ ID NO: 22962 - protein, 7 aa, Artificial Sequence
  Description of Artificial Sequence: Synthetic peptide
  XENP020287 vlCDR2
YASQSIS

SEQ ID NO: 22963 - protein, 9 aa, Artificial Sequence
  Description of Artificial Sequence: Synthetic peptide
  XENP020287 vlCDR3
QNGHSFPPT

SEQ ID NO: 22964 - protein, 442 aa, Artificial Sequence; identical to SEQ ID NO: 22944
  Description of Artificial Sequence: Synthetic polypeptide
  XENP020288 4C11B_H0L0_anti-BTLA-1G6_H1.280_L1.224 Fab-Fc Heavy Chain

SEQ ID NO: 22965 - protein, 113 aa, Artificial Sequence; identical to SEQ ID NO: 20986
  Description of Artificial Sequence: Synthetic polypeptide
  VH of XENP020288

SEQ ID NO: 22966 - protein, 5 aa, Artificial Sequence
  Description of Artificial Sequence: Synthetic peptide
  XENP020288 vhCDR1
SYYMD

SEQ ID NO: 22967 - protein, 17 aa, Artificial Sequence
  Description of Artificial Sequence: Synthetic peptide
  XENP020288 vhCDR2
EINPSNGDTKFNEKFKS

SEQ ID NO: 22968 - protein, 4 aa, Artificial Sequence
  Description of Artificial Sequence: Synthetic peptide
  XENP020288 vhCDR3
DYGY

SEQ ID NO: 22969 - protein, 480 aa, Artificial Sequence; identical to SEQ ID NO: 22809
  Description of Artificial Sequence: Synthetic polypeptide
  XENP020288 4C11B_H0L0_anti-BTLA-1G6_H1.280_L1.224 scFv-Fc Heavy Chain

SEQ ID NO: 22970 - protein, 122 aa, Artificial Sequence; identical to SEQ ID NO: 10917
  Description of Artificial Sequence: Synthetic polypeptide
  VH of XENP020288

SEQ ID NO: 22971 - protein, 107 aa, Artificial Sequence; identical to SEQ ID NO: 22811
  Description of Artificial Sequence: Synthetic polypeptide
  VL of XENP020288

SEQ ID NO: 22972 - protein, 231 aa, Artificial Sequence; identical to SEQ ID NO: 21532
  Description of Artificial Sequence: Synthetic polypeptide
  Fc chain of XENP020288

SEQ ID NO: 22973 - protein, 5 aa, Artificial Sequence
  Description of Artificial Sequence: Synthetic peptide
  XENP020288 vhCDR1
NYWMN

SEQ ID NO: 22974 - protein, 19 aa, Artificial Sequence
  Description of Artificial Sequence: Synthetic peptide
  XENP020288 vhCDR2
EIRLYSNNYATHYAESVKG

SEQ ID NO: 22975 - protein, 11 aa, Artificial Sequence
  Description of Artificial Sequence: Synthetic peptide
  XENP020288 vhCDR3
YYGNYGGYFDV

SEQ ID NO: 22976 - protein, 11 aa, Artificial Sequence
  Description of Artificial Sequence: Synthetic peptide
  XENP020288 vlCDR1
RASQSVGNDVA

SEQ ID NO: 22977 - protein, 7 aa, Artificial Sequence
  Description of Artificial Sequence: Synthetic peptide
  XENP020288 vlCDR2
YASHRYT

SEQ ID NO: 22978 - protein, 9 aa, Artificial Sequence
  Description of Artificial Sequence: Synthetic peptide
  XENP020288 vlCDR3
QQDWSSPRT

SEQ ID NO: 22979 - protein, 213 aa, Artificial Sequence; identical to SEQ ID NO: 20940
  Description of Artificial Sequence: Synthetic polypeptide
  XENP020288 4C11B_H0L0_anti-BTLA-1G6_H1.280_L1.224 Light Chain

SEQ ID NO: 22980 - protein, 106 aa, Artificial Sequence; identical to SEQ ID NO: 20941
  Description of Artificial Sequence: Synthetic polypeptide
  VL of XENP020288

SEQ ID NO: 22981 - protein, 11 aa, Artificial Sequence
  Description of Artificial Sequence: Synthetic peptide
  XENP020288 vlCDR1
KASQSVSNDVA

SEQ ID NO: 22982 - protein, 7 aa, Artificial Sequence
  Description of Artificial Sequence: Synthetic peptide
  XENP020288 vlCDR2
YASNRYT

SEQ ID NO: 22983 - protein, 8 aa, Artificial Sequence
  Description of Artificial Sequence: Synthetic peptide
  XENP020288 vlCDR3
QQDYSSPT

SEQ ID NO: 22984 - protein, 449 aa, Artificial Sequence
  Description of Artificial Sequence: Synthetic polypeptide
  XENP020289 7B10_H0L0_anti-BTLA-1G6_H1.280_L1.224 Fab-Fc Heavy Chain
QVTLKESGPGILQPSQTLSLTCSFSGFSLSTFGMGVNWIRQPSGKGLEWLAHIYWDDDKHYNPSLKSRLTISKDTSNNQVFLKITTVDTADTATYYCARYYRYDVPYIMDYWGQGTSVTVSSASTKGPSVFPLAPSSKSTSGGTAALGCLVKDYFPEPVTVSWNSGALTSGVHTFPAVLQSSGLYSLSSVVTVPSSSLGTQTYICNVNHKPSDTKVDKKVEPKSCDKTHTCPPCPAPPVAGPSVFLFPPKPKDTLMISRTPEVTCVVVDVKHEDPEVKFNWYVDGVEVHNAKTKPREEEYNSTYRVVSVLTVLHQDWLNGKEYKCKVSNKALPAPIEKTISKAKGQPREPQVYTLPPSREEMTKNQVSLTCDVSGFYPSDIAVEWESDGQPENNYKTTPPVLDSDGSFFLYSKLTVDKSRWEQGDVFSCSVMHEALHNHYTQKSLSLSP

SEQ ID NO: 22985 - protein, 122 aa, Artificial Sequence; identical to SEQ ID NO: 21006
  Description of Artificial Sequence: Synthetic polypeptide
  VH of XENP020289

SEQ ID NO: 22986 - protein, 7 aa, Artificial Sequence
  Description of Artificial Sequence: Synthetic peptide
  XENP020289 vhCDR1
TFGMGVN

SEQ ID NO: 22987 - protein, 16 aa, Artificial Sequence
  Description of Artificial Sequence: Synthetic peptide
  XENP020289 vhCDR2
HIYWDDDKHYNPSLKS

SEQ ID NO: 22988 - protein, 12 aa, Artificial Sequence
  Description of Artificial Sequence: Synthetic peptide
  XENP020289 vhCDR3
YYRYDVPYIMDY

SEQ ID NO: 22989 - protein, 480 aa, Artificial Sequence; identical to SEQ ID NO: 22809
  Description of Artificial Sequence: Synthetic polypeptide
  XENP020289 7B10_H0L0_anti-BTLA-1G6_H1.280_L1.224 scFv-Fc Heavy Chain

SEQ ID NO: 22990 - protein, 122 aa, Artificial Sequence; identical to SEQ ID NO: 10917
  Description of Artificial Sequence: Synthetic polypeptide
  VH of XENP020289

SEQ ID NO: 22991 - protein, 107 aa, Artificial Sequence; identical to SEQ ID NO: 22811
  Description of Artificial Sequence: Synthetic polypeptide
  VL of XENP020289

SEQ ID NO: 22992 - protein, 231 aa, Artificial Sequence; identical to SEQ ID NO: 21532
  Description of Artificial Sequence: Synthetic polypeptide
  Fc chain of XENP020289

SEQ ID NO: 22993 - protein, 5 aa, Artificial Sequence
  Description of Artificial Sequence: Synthetic peptide
  XENP020289 vhCDR1
NYWMN

SEQ ID NO: 22994 - protein, 19 aa, Artificial Sequence
  Description of Artificial Sequence: Synthetic peptide
  XENP020289 vhCDR2
EIRLYSNNYATHYAESVKG

SEQ ID NO: 22995 - protein, 11 aa, Artificial Sequence
  Description of Artificial Sequence: Synthetic peptide
  XENP020289 vhCDR3
YYGNYGGYFDV

SEQ ID NO: 22996 - protein, 11 aa, Artificial Sequence
  Description of Artificial Sequence: Synthetic peptide
  XENP020289 vlCDR1
RASQSVGNDVA

SEQ ID NO: 22997 - protein, 7 aa, Artificial Sequence
  Description of Artificial Sequence: Synthetic peptide
  XENP020289 vlCDR2
YASHRYT

SEQ ID NO: 22998 - protein, 9 aa, Artificial Sequence
  Description of Artificial Sequence: Synthetic peptide
  XENP020289 vlCDR3
QQDWSSPRT

SEQ ID NO: 22999 - protein, 219 aa, Artificial Sequence; identical to SEQ ID NO: 21010
  Description of Artificial Sequence: Synthetic polypeptide
  XENP020289 7B10_H0L0_anti-BTLA-1G6_H1.280_L1.224 Light Chain

SEQ ID NO: 23000 - protein, 112 aa, Artificial Sequence; identical to SEQ ID NO: 21011
  Description of Artificial Sequence: Synthetic polypeptide
  VL of XENP020289

SEQ ID NO: 23001 - protein, 17 aa, Artificial Sequence
  Description of Artificial Sequence: Synthetic peptide
  XENP020289 vlCDR1
KSSQSLLYSSNQKNYLA

SEQ ID NO: 23002 - protein, 7 aa, Artificial Sequence
  Description of Artificial Sequence: Synthetic peptide
  XENP020289 vlCDR2
WASTRES

SEQ ID NO: 23003 - protein, 8 aa, Artificial Sequence
  Description of Artificial Sequence: Synthetic peptide
  XENP020289 vlCDR3
HQYYSYYT

SEQ ID NO: 23004 - protein, 449 aa, Artificial Sequence
  Description of Artificial Sequence: Synthetic polypeptide
  XENP020290 8C1A_H0L0_anti-BTLA-1G6_H1.280_L1.224 Fab-Fc Heavy Chain
EVQLQESGPSLVKPSQTLSLTCSVTGDSVTSGYWNWIRKFPGNKLEYMGYINYSGSTYYNPSLKSRISITRDTSKNQYYLQLNSVTTEDTATYYCARSFIATVGYAMDYWGQGTSVTVSSASTKGPSVFPLAPSSKSTSGGTAALGCLVKDYFPEPVTVSWNSGALTSGVHTFPAVLQSSGLYSLSSVVTVPSSSLGTQTYICNVNHKPSDTKVDKKVEPKSCDKTHTCPPCPAPPVAGPSVFLFPPKPKDTLMISRTPEVTCVVVDVKHEDPEVKFNWYVDGVEVHNAKTKPREEEYNSTYRVVSVLTVLHQDWLNGKEYKCKVSNKALPAPIEKTISKAKGQPREPQVYTLPPSREEMTKNQVSLTCDVSGFYPSDIAVEWESDGQPENNYKTTPPVLDSDGSFFLYSKLTVDKSRWEQGDVFSCSVMHEALHNHYTQKSLSLSPGK

SEQ ID NO: 23005 - protein, 120 aa, Artificial Sequence; identical to SEQ ID NO: 21016
  Description of Artificial Sequence: Synthetic polypeptide
  VH of XENP020290

SEQ ID NO: 23006 - protein, 5 aa, Artificial Sequence
  Description of Artificial Sequence: Synthetic peptide
  XENP020290 vhCDR1
SGYWN

SEQ ID NO: 23007 - protein, 16 aa, Artificial Sequence
  Description of Artificial Sequence: Synthetic peptide
  XENP020290 vhCDR2
YINYSGSTYYNPSLKS

SEQ ID NO: 23008 - protein, 12 aa, Artificial Sequence
  Description of Artificial Sequence: Synthetic peptide
  XENP020290 vhCDR3
SFIATVGYAMDY

SEQ ID NO: 23009 - protein, 480 aa, Artificial Sequence; identical to SEQ ID NO: 22809
  Description of Artificial Sequence: Synthetic polypeptide
  XENP020290 8C1A_H0L0_anti-BTLA-1G6_H1.280_L1.224 scFv-Fc Heavy Chain

SEQ ID NO: 23010 - protein, 122 aa, Artificial Sequence; identical to SEQ ID NO: 10917
  Description of Artificial Sequence: Synthetic polypeptide
  VH of XENP020290

SEQ ID NO: 23011 - protein, 107 aa, Artificial Sequence; identical to SEQ ID NO: 22811
  Description of Artificial Sequence: Synthetic polypeptide
  VL of XENP020290

SEQ ID NO: 23012 - protein, 231 aa, Artificial Sequence; identical to SEQ ID NO: 21532
  Description of Artificial Sequence: Synthetic polypeptide
  Fc chain of XENP020290

SEQ ID NO: 23013 - protein, 5 aa, Artificial Sequence
  Description of Artificial Sequence: Synthetic peptide
  XENP020290 vhCDR1
NYWMN

SEQ ID NO: 23014 - protein, 19 aa, Artificial Sequence
  Description of Artificial Sequence: Synthetic peptide
  XENP020290 vhCDR2
EIRLYSNNYATHYAESVKG

SEQ ID NO: 23015 - protein, 11 aa, Artificial Sequence
  Description of Artificial Sequence: Synthetic peptide
  XENP020290 vhCDR3
YYGNYGGYFDV

SEQ ID NO: 23016 - protein, 11 aa, Artificial Sequence
  Description of Artificial Sequence: Synthetic peptide
  XENP020290 vlCDR1
RASQSVGNDVA

SEQ ID NO: 23017 - protein, 7 aa, Artificial Sequence
  Description of Artificial Sequence: Synthetic peptide
  XENP020290 vlCDR2
YASHRYT

SEQ ID NO: 23018 - protein, 9 aa, Artificial Sequence
  Description of Artificial Sequence: Synthetic peptide
  XENP020290 vlCDR3
QQDWSSPRT

SEQ ID NO: 23019 - protein, 214 aa, Artificial Sequence; identical to SEQ ID NO: 21020
  Description of Artificial Sequence: Synthetic polypeptide
  XENP020290 8C1A_H0L0_anti-BTLA-1G6_H1.280_L1.224 Light Chain

SEQ ID NO: 23020 - protein, 107 aa, Artificial Sequence; identical to SEQ ID NO: 21021
  Description of Artificial Sequence: Synthetic polypeptide
  VL of XENP020290

SEQ ID NO: 23021 - protein, 11 aa, Artificial Sequence
  Description of Artificial Sequence: Synthetic peptide
  XENP020290 vlCDR1
KASQSVNNDVS

SEQ ID NO: 23022 - protein, 7 aa, Artificial Sequence
  Description of Artificial Sequence: Synthetic peptide
  XENP020290 vlCDR2
SASNRYT

SEQ ID NO: 23023 - protein, 9 aa, Artificial Sequence
  Description of Artificial Sequence: Synthetic peptide
  XENP020290 vlCDR3
QQDYSSPWT

SEQ ID NO: 23024 - protein, 441 aa, Artificial Sequence
  Description of Artificial Sequence: Synthetic polypeptide
  XENP020291 8C1B_H0L0_anti-BTLA-1G6_H1.280_L1.224 Fab-Fc Heavy Chain
QVQLQQPGAELVRPGASVRLSCKASGYTFTSYWIHWVKQRPGQGLEWIGNIYSSDSYTNYNQKFKDKATLTVDKSSSTAYIHLSSPTSEDSAVYYCTRVDYWGQGTTLTVSSASTKGPSVFPLAPSSKSTSGGTAALGCLVKDYFPEPVTVSWNSGALTSGVHTFPAVLQSSGLYSLSSVVTVPSSSLGTQTYICNVNHKPSDTKVDKKVEPKSCDKTHTCPPCPAPPVAGPSVFLFPPKPKDTLMISRTPEVTCVVVDVKHEDPEVKFNWYVDGVEVHNAKTKPREEEYNSTYRVVSVLTVLHQDWLNGKEYKCKVSNKALPAPIEKTISKAKGQPREPQVYTLPPSREEMTKNQVSLTCDVSGFYPSDIAVEWESDGQPENNYKTTPPVLDSDGSFFLYSKLTVDKSRWEQGDVFSCSVMHEALHNHYTQKSLSLSPGK

SEQ ID NO: 23025 - protein, 112 aa, Artificial Sequence; identical to SEQ ID NO: 21026
  Description of Artificial Sequence: Synthetic polypeptide
  VH of XENP020291

SEQ ID NO: 23026 - protein, 5 aa, Artificial Sequence
  Description of Artificial Sequence: Synthetic peptide
  XENP020291 vhCDR1
SYWIH

SEQ ID NO: 23027 - protein, 17 aa, Artificial Sequence
  Description of Artificial Sequence: Synthetic peptide
  XENP020291 vhCDR2
NIYSSDSYTNYNQKFKD

SEQ ID NO: 23028 - protein, 3 aa, Artificial Sequence
  Description of Artificial Sequence: Synthetic peptide
  XENP020291 vhCDR3
VDY

SEQ ID NO: 23029 - protein, 480 aa, Artificial Sequence; identical to SEQ ID NO: 22809
  Description of Artificial Sequence: Synthetic polypeptide
  XENP020291 8C1B_H0L0_anti-BTLA-1G6_H1.280_L1.224 scFv-Fc Heavy Chain

SEQ ID NO: 23030 - protein, 122 aa, Artificial Sequence; identical to SEQ ID NO: 10917
  Description of Artificial Sequence: Synthetic polypeptide
  VH of XENP020291

SEQ ID NO: 23031 - protein, 107 aa, Artificial Sequence; identical to SEQ ID NO: 22811
  Description of Artificial Sequence: Synthetic polypeptide
  VL of XENP020291

SEQ ID NO: 23032 - protein, 231 aa, Artificial Sequence; identical to SEQ ID NO: 21532
  Description of Artificial Sequence: Synthetic polypeptide
  Fc chain of XENP020291

SEQ ID NO: 23033 - protein, 5 aa, Artificial Sequence
  Description of Artificial Sequence: Synthetic peptide
  XENP020291 vhCDR1
NYWMN

SEQ ID NO: 23034 - protein, 19 aa, Artificial Sequence
  Description of Artificial Sequence: Synthetic peptide
  XENP020291 vhCDR2
EIRLYSNNYATHYAESVKG

SEQ ID NO: 23035 - protein, 11 aa, Artificial Sequence
  Description of Artificial Sequence: Synthetic peptide
  XENP020291 vhCDR3
YYGNYGGYFDV

SEQ ID NO: 23036 - protein, 11 aa, Artificial Sequence
  Description of Artificial Sequence: Synthetic peptide
  XENP020291 vlCDR1
RASQSVGNDVA

SEQ ID NO: 23037 - protein, 7 aa, Artificial Sequence
  Description of Artificial Sequence: Synthetic peptide
  XENP020291 vlCDR2
YASHRYT

SEQ ID NO: 23038 - protein, 9 aa, Artificial Sequence
  Description of Artificial Sequence: Synthetic peptide
  XENP020291 vlCDR3
QQDWSSPRT

SEQ ID NO: 23039 - protein, 214 aa, Artificial Sequence; identical to SEQ ID NO: 21020
  Description of Artificial Sequence: Synthetic polypeptide
  XENP020291 8C1B_H0L0_anti-BTLA-1G6_H1.280_L1.224 Light Chain

SEQ ID NO: 23040 - protein, 107 aa, Artificial Sequence; identical to SEQ ID NO: 21021
  Description of Artificial Sequence: Synthetic polypeptide
  VL of XENP020291

SEQ ID NO: 23041 - protein, 11 aa, Artificial Sequence
  Description of Artificial Sequence: Synthetic peptide
  XENP020291 vlCDR1
KASQSVNNDVS

SEQ ID NO: 23042 - protein, 7 aa, Artificial Sequence
  Description of Artificial Sequence: Synthetic peptide
  XENP020291 vlCDR2
SASNRYT

SEQ ID NO: 23043 - protein, 9 aa, Artificial Sequence
  Description of Artificial Sequence: Synthetic peptide
  XENP020291 vlCDR3
QQDYSSPWT

SEQ ID NO: 23044 - protein, 447 aa, Artificial Sequence
  Description of Artificial Sequence: Synthetic polypeptide
  XENP020292 10B6_H0L0_anti-BTLA-1G6_H1.280_L1.224 Fab-Fc Heavy Chain
QVQLKESGPGLVAPSQSLSITCTVSGFSLTGYGVNWVRQPPGKGLEWLGMIWIDGSTDYNSALKSRLSISKDNSKSQVFLKMNSLQTDDTARYYCARDRPDGRAMDYWGQGTSVTVSSASTKGPSVFPLAPSSKSTSGGTAALGCLVKDYFPEPVTVSWNSGALTSGVHTFPAVLQSSGLYSLSSVVTVPSSSLGTQTYICNVNHKPSDTKVDKKVEPKSCDKTHTCPPCPAPPVAGPSVFLFPPKPKDTLMISRTPEVTCVVVDVKHEDPEVKFNWYVDGVEVHNAKTKPREEEYNSTYRVVSVLTVLHQDWLNGKEYKCKVSNKALPAPIEKTISKAKGQPREPQVYTLPPSREEMTKNQVSLTCDVSGFYPSDIAVEWESDGQPENNYKTTPPVLDSDGSFFLYSKLTVDKSRWEQGDVFSCSVMHEALHNHYTQKSLSLSPGK

SEQ ID NO: 23045 - protein, 118 aa, Artificial Sequence; identical to SEQ ID NO: 21036
  Description of Artificial Sequence: Synthetic polypeptide
  VH of XENP020292

SEQ ID NO: 23046 - protein, 5 aa, Artificial Sequence
  Description of Artificial Sequence: Synthetic peptide
  XENP020292 vhCDR1
GYGVN

SEQ ID NO: 23047 - protein, 16 aa, Artificial Sequence
  Description of Artificial Sequence: Synthetic peptide
  XENP020292 vhCDR2
MIWIDGSTDYNSALKS

SEQ ID NO: 23048 - protein, 10 aa, Artificial Sequence
  Description of Artificial Sequence: Synthetic peptide
  XENP020292 vhCDR3
DRPDGRAMDY

SEQ ID NO: 23049 - protein, 480 aa, Artificial Sequence; identical to SEQ ID NO: 22809
  Description of Artificial Sequence: Synthetic polypeptide
  XENP020292 10B6_H0L0_anti-BTLA-1G6_H1.280_L1.224 scFv-Fc Heavy Chain

SEQ ID NO: 23050 - protein, 122 aa, Artificial Sequence; identical to SEQ ID NO: 10917
  Description of Artificial Sequence: Synthetic polypeptide
  VH of XENP020292

SEQ ID NO: 23051 - protein, 107 aa, Artificial Sequence; identical to SEQ ID NO: 22811
  Description of Artificial Sequence: Synthetic polypeptide
  VL of XENP020292

SEQ ID NO: 23052 - protein, 231 aa, Artificial Sequence; identical to SEQ ID NO: 21532
  Description of Artificial Sequence: Synthetic polypeptide
  Fc chain of XENP020292

SEQ ID NO: 23053 - protein, 5 aa, Artificial Sequence
  Description of Artificial Sequence: Synthetic peptide
  XENP020292 vhCDR1
NYWMN

SEQ ID NO: 23054 - protein, 19 aa, Artificial Sequence
  Description of Artificial Sequence: Synthetic peptide
  XENP020292 vhCDR2
EIRLYSNNYATHYAESVKG

SEQ ID NO: 23055 - protein, 11 aa, Artificial Sequence
  Description of Artificial Sequence: Synthetic peptide
  XENP020292 vhCDR3
YYGNYGGYFDV

SEQ ID NO: 23056 - protein, 11 aa, Artificial Sequence
  Description of Artificial Sequence: Synthetic peptide
  XENP020292 vlCDR1
RASQSVGNDVA

SEQ ID NO: 23057 - protein, 7 aa, Artificial Sequence
  Description of Artificial Sequence: Synthetic peptide
  XENP020292 vlCDR2
YASHRYT

SEQ ID NO: 23058 - protein, 9 aa, Artificial Sequence
  Description of Artificial Sequence: Synthetic peptide
  XENP020292 vlCDR3
QQDWSSPRT

SEQ ID NO: 23059 - protein, 213 aa, Artificial Sequence; identical to SEQ ID NO: 21040
  Description of Artificial Sequence: Synthetic polypeptide
  XENP020292 10B6_H0L0_anti-BTLA-1G6_H1.280_L1.224 Light Chain

SEQ ID NO: 23060 - protein, 106 aa, Artificial Sequence; identical to SEQ ID NO: 21041
  Description of Artificial Sequence: Synthetic polypeptide
  VL of XENP020292

SEQ ID NO: 23061 - protein, 11 aa, Artificial Sequence
  Description of Artificial Sequence: Synthetic peptide
  XENP020292 vlCDR1
KASQTVSNDVT

SEQ ID NO: 23062 - protein, 7 aa, Artificial Sequence
  Description of Artificial Sequence: Synthetic peptide
  XENP020292 vlCDR2
YASNRYT

SEQ ID NO: 23063 - protein, 8 aa, Artificial Sequence
  Description of Artificial Sequence: Synthetic peptide
  XENP020292 vlCDR3
QQDYSSPT

SEQ ID NO: 23064 - protein, 448 aa, Artificial Sequence; identical to SEQ ID NO: 22624
  Description of Artificial Sequence: Synthetic polypeptide
  XENP017886 4C7_H0L0-nivolumab_H0.1_L0 Fab-Fc Heavy Chain

SEQ ID NO: 23065 - protein, 119 aa, Artificial Sequence; identical to SEQ ID NO: 20886
  Description of Artificial Sequence: Synthetic polypeptide
  VH of XENP017886

SEQ ID NO: 23066 - protein, 5 aa, Artificial Sequence
  Description of Artificial Sequence: Synthetic peptide
  XENP017886 vhCDR1
HYYWS

SEQ ID NO: 23067 - protein, 16 aa, Artificial Sequence
  Description of Artificial Sequence: Synthetic peptide
  XENP017886 vhCDR2
YIYYSGSTKYNPSLKS

SEQ ID NO: 23068 - protein, 11 aa, Artificial Sequence
  Description of Artificial Sequence: Synthetic peptide
  XENP017886 vhCDR3
EWPYYYYEMDV

SEQ ID NO: 23069 - protein, 471 aa, Artificial Sequence; identical to SEQ ID NO: 22749
  Description of Artificial Sequence: Synthetic polypeptide
  XENP017886 4C7_H0L0-nivolumab_H0.1_L0 scFv-Fc Heavy Chain

SEQ ID NO: 23070 - protein, 113 aa, Artificial Sequence; identical to SEQ ID NO: 6210
  Description of Artificial Sequence: Synthetic polypeptide
  VH of XENP017886

SEQ ID NO: 23071 - protein, 107 aa, Artificial Sequence [sequence omitted]

SEQ ID NO: 23072 - protein, 231 aa, Artificial Sequence; identical to SEQ ID NO: 21532
  Description of Artificial Sequence: Synthetic polypeptide
  Fc chain of XENP017886

SEQ ID NO: 23073 - protein, 5 aa, Artificial Sequence
  Description of Artificial Sequence: Synthetic peptide
  XENP017886 vhCDR1
NSGMH

SEQ ID NO: 23074 - protein, 17 aa, Artificial Sequence
  Description of Artificial Sequence: Synthetic peptide
  XENP017886 vhCDR2
VIWYDGSKRYYADSVKG

SEQ ID NO: 23075 - protein, 4 aa, Artificial Sequence
  Description of Artificial Sequence: Synthetic peptide
  XENP017886 vhCDR3
NDDY

SEQ ID NO: 23076 - protein, 11 aa, Artificial Sequence
  Description of Artificial Sequence: Synthetic peptide
  XENP017886 vlCDR1
RASQSVSSYLA

SEQ ID NO: 23077 - protein, 7 aa, Artificial Sequence
  Description of Artificial Sequence: Synthetic peptide
  XENP017886 vlCDR2
DASNRAT

SEQ ID NO: 23078 - protein, 9 aa, Artificial Sequence
  Description of Artificial Sequence: Synthetic peptide
  XENP017886 vlCDR3
QQSSNWPRT

SEQ ID NO: 23079 - protein, 215 aa, Artificial Sequence; identical to SEQ ID NO: 20890
  Description of Artificial Sequence: Synthetic polypeptide
  XENP017886 4C7_H0L0-nivolumab_H0.1_L0 Light Chain

SEQ ID NO: 23080 - protein, 108 aa, Artificial Sequence; identical to SEQ ID NO: 20891
  Description of Artificial Sequence: Synthetic polypeptide
  VL of XENP017886

SEQ ID NO: 23081 - protein, 12 aa, Artificial Sequence
  Description of Artificial Sequence: Synthetic peptide
  XENP017886 vlCDR1
RASQSVSSSYLA

SEQ ID NO: 23082 - protein, 7 aa, Artificial Sequence
  Description of Artificial Sequence: Synthetic peptide
  XENP017886 vlCDR2
GASSRAT

SEQ ID NO: 23083 - protein, 9 aa, Artificial Sequence
  Description of Artificial Sequence: Synthetic peptide
  XENP017886 vlCDR3
QQYGSSFRT

SEQ ID NO: 23084 - protein, 450 aa, Artificial Sequence; identical to SEQ ID NO: 22644
  Description of Artificial Sequence: Synthetic polypeptide
  XENP017887 8D5_H0L0-nivolumab_H0.1_L0 Fab-Fc Heavy Chain

SEQ ID NO: 23085 - protein, 121 aa, Artificial Sequence; identical to SEQ ID NO: 20896
  Description of Artificial Sequence: Synthetic polypeptide
  VH of XENP017887

SEQ ID NO: 23086 - protein, 5 aa, Artificial Sequence
  Description of Artificial Sequence: Synthetic peptide
  XENP017887 vhCDR1
SYDMH

SEQ ID NO: 23087 - protein, 16 aa, Artificial Sequence
  Description of Artificial Sequence: Synthetic peptide
  XENP017887 vhCDR2
VIGPAGDTYYPGSVKG

SEQ ID NO: 23088 - protein, 13 aa, Artificial Sequence
  Description of Artificial Sequence: Synthetic peptide
  XENP017887 vhCDR3
EGMAAHNYYGMDV

SEQ ID NO: 23089 - protein, 471 aa, Artificial Sequence; identical to SEQ ID NO: 22749
  Description of Artificial Sequence: Synthetic polypeptide
  XENP017887 8D5_H0L0-nivolumab_H0.1_L0 scFv-Fc Heavy Chain

SEQ ID NO: 23090 - protein, 113 aa, Artificial Sequence; identical to SEQ ID NO: 6210
  Description of Artificial Sequence: Synthetic polypeptide
  VH of XENP017887

SEQ ID NO: 23091 - protein, 107 aa, Artificial Sequence [sequence omitted]

SEQ ID NO: 23092 - protein, 231 aa, Artificial Sequence; identical to SEQ ID NO: 21532
  Description of Artificial Sequence: Synthetic polypeptide
  Fc chain of XENP017887

SEQ ID NO: 23093 - protein, 5 aa, Artificial Sequence
  Description of Artificial Sequence: Synthetic peptide
  XENP017887 vhCDR1
NSGMH

SEQ ID NO: 23094 - protein, 17 aa, Artificial Sequence
  Description of Artificial Sequence: Synthetic peptide
  XENP017887 vhCDR2
VIWYDGSKRYYADSVKG

SEQ ID NO: 23095 - protein, 4 aa, Artificial Sequence
  Description of Artificial Sequence: Synthetic peptide
  XENP017887 vhCDR3
NDDY

SEQ ID NO: 23096 - protein, 11 aa, Artificial Sequence
  Description of Artificial Sequence: Synthetic peptide
  XENP017887 vlCDR1
RASQSVSSYLA

SEQ ID NO: 23097 - protein, 7 aa, Artificial Sequence
  Description of Artificial Sequence: Synthetic peptide
  XENP017887 vlCDR2
DASNRAT

SEQ ID NO: 23098 - protein, 9 aa, Artificial Sequence
  Description of Artificial Sequence: Synthetic peptide
  XENP017887 vlCDR3
QQSSNWPRT

SEQ ID NO: 23099 - protein, 215 aa, Artificial Sequence; identical to SEQ ID NO: 20900
  Description of Artificial Sequence: Synthetic polypeptide
  XENP017887 8D5_H0L0-nivolumab_H0.1_L0 Light Chain

SEQ ID NO: 23100 - protein, 108 aa, Artificial Sequence; identical to SEQ ID NO: 20901
  Description of Artificial Sequence: Synthetic polypeptide
  VL of XENP017887

SEQ ID NO: 23101 - protein, 11 aa, Artificial Sequence
  Description of Artificial Sequence: Synthetic peptide
  XENP017887 vlCDR1
RASQSVSSYLA

SEQ ID NO: 23102 - protein, 7 aa, Artificial Sequence
  Description of Artificial Sequence: Synthetic peptide
  XENP017887 vlCDR2
DASNRAT

SEQ ID NO: 23103 - protein, 10 aa, Artificial Sequence
  Description of Artificial Sequence: Synthetic peptide
  XENP017887 vlCDR3
QQRSNWPPIT

SEQ ID NO: 23104 - protein, 457 aa, Artificial Sequence; identical to SEQ ID NO: 22664
  Description of Artificial Sequence: Synthetic polypeptide
  XENP017888 E8D9_H0L0-nivolumab_H0.1_L0 Fab-Fc Heavy Chain

SEQ ID NO: 23105 - protein, 128 aa, Artificial Sequence; identical to SEQ ID NO: 20906
  Description of Artificial Sequence: Synthetic polypeptide
  VH of XENP017888

SEQ ID NO: 23106 - protein, 7 aa, Artificial Sequence
  Description of Artificial Sequence: Synthetic peptide
  XENP017888 vhCDR1
TSGVGVG

SEQ ID NO: 23107 - protein, 16 aa, Artificial Sequence
  Description of Artificial Sequence: Synthetic peptide
  XENP017888 vhCDR2
LIYWDDDKRYSPSLKS

SEQ ID NO: 23108 - protein, 18 aa, Artificial Sequence
  Description of Artificial Sequence: Synthetic peptide
  XENP017888 vhCDR3
TSITEVRGAIIYYYGMDV

SEQ ID NO: 23109 - protein, 471 aa, Artificial Sequence; identical to SEQ ID NO: 22749
  Description of Artificial Sequence: Synthetic polypeptide
  XENP017888 E8D9_H0L0-nivolumab_H0.1_L0 scFv-Fc Heavy Chain

SEQ ID NO: 23110 - protein, 113 aa, Artificial Sequence; identical to SEQ ID NO: 6210
  Description of Artificial Sequence: Synthetic polypeptide
  VH of XENP017888

SEQ ID NO: 23111 - protein, 107 aa, Artificial Sequence [sequence omitted]

SEQ ID NO: 23112 - protein, 231 aa, Artificial Sequence; identical to SEQ ID NO: 21532
  Description of Artificial Sequence: Synthetic polypeptide
  Fc chain of XENP017888

SEQ ID NO: 23113 - protein, 5 aa, Artificial Sequence
  Description of Artificial Sequence: Synthetic peptide
  XENP017888 vhCDR1
NSGMH

SEQ ID NO: 23114 - protein, 17 aa, Artificial Sequence
  Description of Artificial Sequence: Synthetic peptide
  XENP017888 vhCDR2
VIWYDGSKRYYADSVKG

SEQ ID NO: 23115 - protein, 4 aa, Artificial Sequence
  Description of Artificial Sequence: Synthetic peptide
  XENP017888 vhCDR3
NDDY

SEQ ID NO: 23116 - protein, 11 aa, Artificial Sequence
  Description of Artificial Sequence: Synthetic peptide
  XENP017888 vlCDR1
RASQSVSSYLA

SEQ ID NO: 23117 - protein, 7 aa, Artificial Sequence
  Description of Artificial Sequence: Synthetic peptide
  XENP017888 vlCDR2
DASNRAT

SEQ ID NO: 23118 - protein, 9 aa, Artificial Sequence
  Description of Artificial Sequence: Synthetic peptide
  XENP017888 vlCDR3
QQSSNWPRT

SEQ ID NO: 23119 - protein, 214 aa, Artificial Sequence; identical to SEQ ID NO: 20910
  Description of Artificial Sequence: Synthetic polypeptide
  XENP017888 E8D9_H0L0-nivolumab_H0.1_L0 Light Chain

SEQ ID NO: 23120 - protein, 107 aa, Artificial Sequence; identical to SEQ ID NO: 20911
  Description of Artificial Sequence: Synthetic polypeptide
  VL of XENP017888

SEQ ID NO: 23121 - protein, 12 aa, Artificial Sequence
  Description of Artificial Sequence: Synthetic peptide
  XENP017888 vlCDR1
RASQSVSSSYLA

SEQ ID NO: 23122 - protein, 7 aa, Artificial Sequence
  Description of Artificial Sequence: Synthetic peptide
  XENP017888 vlCDR2
GASSRAT

SEQ ID NO: 23123 - protein, 8 aa, Artificial Sequence
  Description of Artificial Sequence: Synthetic peptide
  XENP017888 vlCDR3
QQYGHSLT

SEQ ID NO: 23124 - protein, 448 aa, Artificial Sequence; identical to SEQ ID NO: 22624
  Description of Artificial Sequence: Synthetic polypeptide
  XENP017889 4C7_H0L0-one-arm Fab-Fc Heavy Chain

SEQ ID NO: 23125 - protein, 119 aa, Artificial Sequence; identical to SEQ ID NO: 20886
  Description of Artificial Sequence: Synthetic polypeptide
  VH of XENP017889

SEQ ID NO: 23126 - protein, 5 aa, Artificial Sequence
  Description of Artificial Sequence: Synthetic peptide
  XENP017889 vhCDR1
HYYWS

SEQ ID NO: 23127 - protein, 16 aa, Artificial Sequence
  Description of Artificial Sequence: Synthetic peptide
  XENP017889 vhCDR2
YIYYSGSTKYNPSLKS

SEQ ID NO: 23128 - protein, 11 aa, Artificial Sequence
  Description of Artificial Sequence: Synthetic peptide
  XENP017889 vhCDR3
EWPYYYYEMDV

SEQ ID NO: 23129 - protein, 231 aa, Artificial Sequence; identical to SEQ ID NO: 21532
  Description of Artificial Sequence: Synthetic polypeptide
  XENP017889 4C7_H0L0-one-arm Fab-Fc only Heavy Chain

SEQ ID NO: 23130 - protein, 215 aa, Artificial Sequence; identical to SEQ ID NO: 20890
  Description of Artificial Sequence: Synthetic polypeptide
  XENP017889 4C7_H0L0-one-arm Light Chain

SEQ ID NO: 23131 - protein, 108 aa, Artificial Sequence; identical to SEQ ID NO: 20891
  Description of Artificial Sequence: Synthetic polypeptide
  VL of XENP017889

SEQ ID NO: 23132 - protein, 12 aa, Artificial Sequence
  Description of Artificial Sequence: Synthetic peptide
  XENP017889 vlCDR1
RASQSVSSSYLA

SEQ ID NO: 23133 - protein, 7 aa, Artificial Sequence
  Description of Artificial Sequence: Synthetic peptide
  XENP017889 vlCDR2
GASSRAT

SEQ ID NO: 23134 - protein, 9 aa, Artificial Sequence
  Description of Artificial Sequence: Synthetic peptide
  XENP017889 vlCDR3
QQYGSSFRT

SEQ ID NO: 23135 - protein, 450 aa, Artificial Sequence; identical to SEQ ID NO: 22644
  Description of Artificial Sequence: Synthetic polypeptide
  XENP017890 8D5_H0L0-one-arm Fab-Fc Heavy Chain

SEQ ID NO: 23136 - protein, 121 aa, Artificial Sequence; identical to SEQ ID NO: 20896
  Description of Artificial Sequence: Synthetic polypeptide
  VH of XENP017890

SEQ ID NO: 23137 - protein, 5 aa, Artificial Sequence
  Description of Artificial Sequence: Synthetic peptide
  XENP017890 vhCDR1
SYDMH

SEQ ID NO: 23138 - protein, 16 aa, Artificial Sequence
  Description of Artificial Sequence: Synthetic peptide
  XENP017890 vhCDR2
VIGPAGDTYYPGSVKG

SEQ ID NO: 23139 - protein, 13 aa, Artificial Sequence
  Description of Artificial Sequence: Synthetic peptide
  XENP017890 vhCDR3
EGMAAHNYYGMDV

SEQ ID NO: 23140 - protein, 231 aa, Artificial Sequence; identical to SEQ ID NO: 21532
  Description of Artificial Sequence: Synthetic polypeptide
  XENP017890 8D5_H0L0-one-arm Fab-Fc only Heavy Chain

SEQ ID NO: 23141 - protein, 215 aa, Artificial Sequence; identical to SEQ ID NO: 20900
  Description of Artificial Sequence: Synthetic polypeptide
  XENP017890 8D5_H0L0-one-arm Light Chain

SEQ ID NO: 23142 - protein, 108 aa, Artificial Sequence; identical to SEQ ID NO: 20901
  Description of Artificial Sequence: Synthetic polypeptide
  VL of XENP017890

SEQ ID NO: 23143 - protein, 11 aa, Artificial Sequence
  Description of Artificial Sequence: Synthetic peptide
  XENP017890 vlCDR1
RASQSVSSYLA

SEQ ID NO: 23144 - protein, 7 aa, Artificial Sequence
  Description of Artificial Sequence: Synthetic peptide
  XENP017890 vlCDR2
DASNRAT

SEQ ID NO: 23145 - protein, 10 aa, Artificial Sequence
  Description of Artificial Sequence: Synthetic peptide
  XENP017890 vlCDR3
QQRSNWPPIT

SEQ ID NO: 23146 - protein, 457 aa, Artificial Sequence; identical to SEQ ID NO: 22664
  Description of Artificial Sequence: Synthetic polypeptide
  XENP017891 E8D9_H0L0-one-arm Fab-Fc Heavy Chain

SEQ ID NO: 23147 - protein, 128 aa, Artificial Sequence; identical to SEQ ID NO: 20906
  Description of Artificial Sequence: Synthetic polypeptide
  VH of XENP017891

SEQ ID NO: 23148 - protein, 7 aa, Artificial Sequence
  Description of Artificial Sequence: Synthetic peptide
  XENP017891 vhCDR1
TSGVGVG

SEQ ID NO: 23149 - protein, 16 aa, Artificial Sequence
  Description of Artificial Sequence: Synthetic peptide
  XENP017891 vhCDR2
LIYWDDDKRYSPSLKS

SEQ ID NO: 23150 - protein, 18 aa, Artificial Sequence
  Description of Artificial Sequence: Synthetic peptide
  XENP017891 vhCDR3
TSITEVRGAIIYYYGMDV

SEQ ID NO: 23151 - protein, 231 aa, Artificial Sequence; identical to SEQ ID NO: 21532
  Description of Artificial Sequence: Synthetic polypeptide
  XENP017891 E8D9_H0L0-one-arm Fab-Fc only Heavy Chain

SEQ ID NO: 23152 - protein, 214 aa, Artificial Sequence; identical to SEQ ID NO: 20910
  Description of Artificial Sequence: Synthetic polypeptide
  XENP017891 E8D9-one-arm_H0L0 Light Chain

SEQ ID NO: 23153 - protein, 107 aa, Artificial Sequence; identical to SEQ ID NO: 20911
  Description of Artificial Sequence: Synthetic polypeptide
  VL of XENP017891

SEQ ID NO: 23154 - protein, 12 aa, Artificial Sequence
  Description of Artificial Sequence: Synthetic peptide
  XENP017891 vlCDR1
RASQSVSSSYLA

SEQ ID NO: 23155 - protein, 7 aa, Artificial Sequence
  Description of Artificial Sequence: Synthetic peptide
  XENP017891 vlCDR2
GASSRAT

SEQ ID NO: 23156 - protein, 8 aa, Artificial Sequence
  Description of Artificial Sequence: Synthetic peptide
  XENP017891 vlCDR3
QQYGHSLT

SEQ ID NO: 23157 - protein, 447 aa, Artificial Sequence; identical to SEQ ID NO: 22844
  Description of Artificial Sequence: Synthetic polypeptide
  XENP020282 9C6_H0L0-1G6_H1.280_L1.224 Fab-Fc Heavy Chain

SEQ ID NO: 23158 - protein, 118 aa, Artificial Sequence; identical to SEQ ID NO: 20936
  Description of Artificial Sequence: Synthetic polypeptide
  VH of XENP020282

SEQ ID NO: 23159 - protein, 5 aa, Artificial Sequence
  Description of Artificial Sequence: Synthetic peptide
  XENP020282 vhCDR1
GYGVN

SEQ ID NO: 23160 - protein, 16 aa, Artificial Sequence
  Description of Artificial Sequence: Synthetic peptide
  XENP020282 vhCDR2
MIWIDGSTDYNSALKS

SEQ ID NO: 23161 - protein, 10 aa, Artificial Sequence
  Description of Artificial Sequence: Synthetic peptide
  XENP020282 vhCDR3
DRPDGRAMDY

SEQ ID NO: 23162 - protein, 480 aa, Artificial Sequence; identical to SEQ ID NO: 22809
  Description of Artificial Sequence: Synthetic polypeptide
  XENP020282 9C6_H0L0-1G6_H1.280_L1.224 scFv-Fc Heavy Chain

SEQ ID NO: 23163 - protein, 122 aa, Artificial Sequence; identical to SEQ ID NO: 10917
  Description of Artificial Sequence: Synthetic polypeptide
  VH of XENP020282

SEQ ID NO: 23164 - protein, 107 aa, Artificial Sequence; identical to SEQ ID NO: 22811
  Description of Artificial Sequence: Synthetic polypeptide
  VL of XENP020282

SEQ ID NO: 23165 - protein, 231 aa, Artificial Sequence; identical to SEQ ID NO: 21532
  Description of Artificial Sequence: Synthetic polypeptide
  Fc chain of XENP020282

SEQ ID NO: 23166 - protein, 5 aa, Artificial Sequence
  Description of Artificial Sequence: Synthetic peptide
  XENP020282 vhCDR1
NYWMN

SEQ ID NO: 23167 - protein, 19 aa, Artificial Sequence
  Description of Artificial Sequence: Synthetic peptide
  XENP020282 vhCDR2
EIRLYSNNYATHYAESVKG

SEQ ID NO: 23168 - protein, 11 aa, Artificial Sequence
  Description of Artificial Sequence: Synthetic peptide
  XENP020282 vhCDR3
YYGNYGGYFDV

SEQ ID NO: 23169 - protein, 11 aa, Artificial Sequence
  Description of Artificial Sequence: Synthetic peptide
  XENP020282 vlCDR1
RASQSVGNDVA

SEQ ID NO: 23170 - protein, 7 aa, Artificial Sequence
  Description of Artificial Sequence: Synthetic peptide
  XENP020282 vlCDR2
YASHRYT

SEQ ID NO: 23171 - protein, 9 aa, Artificial Sequence
  Description of Artificial Sequence: Synthetic peptide
  XENP020282 vlCDR3
QQDWSSPRT

SEQ ID NO: 23172 - protein, 213 aa, Artificial Sequence; identical to SEQ ID NO: 20940
  Description of Artificial Sequence: Synthetic polypeptide
  XENP020282 9C6_H0L0-1G6_H1.280_L1.224 Light Chain

SEQ ID NO: 23173 - protein, 106 aa, Artificial Sequence; identical to SEQ ID NO: 20941
  Description of Artificial Sequence: Synthetic polypeptide
  VL of XENP020282

SEQ ID NO: 23174 - protein, 11 aa, Artificial Sequence
  Description of Artificial Sequence: Synthetic peptide
  XENP020282 vlCDR1
KASQSVSNDVA

SEQ ID NO: 23175 - protein, 7 aa, Artificial Sequence
  Description of Artificial Sequence: Synthetic peptide
  XENP020282 vlCDR2
YASNRYT

SEQ ID NO: 23176 - protein, 8 aa, Artificial Sequence
  Description of Artificial Sequence: Synthetic peptide
  XENP020282 vlCDR3
QQDYSSPT

SEQ ID NO: 23177 - protein, 447 aa, Artificial Sequence
  Description of Artificial Sequence: Synthetic polypeptide
  XENP020808 9C6_H1L1-1G6_H1.280_L1.224 Fab-Fc Heavy Chain
QVQLVQSGAEVKKPGASVKVSCKVSGFSLTGYGVNWVRQAPGQGLEWMGMIWIDGSTDYNSKFQGRVTMTKDNSKSTVYMELSSLRSEDTAVYYCARDRPDGRAMDYWGQGTMVTVSSASTKGPSVFPLAPSSKSTSGGTAALGCLVKDYFPEPVTVSWNSGALTSGVHTFPAVLQSSGLYSLSSVVTVPSSSLGTQTYICNVNHKPSDTKVDKKVEPKSCDKTHTCPPCPAPPVAGPSVFLFPPKPKDTLMISRTPEVTCVVVDVKHEDPEVKFNWYVDGVEVHNAKTKPREEEYNSTYRVVSVLTVLHQDWLNGKEYKCKVSNKALPAPIEKTISKAKGQPREPQVYTLPPSREEMTKNQVSLTCDVSGFYPSDIAVEWESDGQPENNYKTTPPVLDSDGSFFLYSKLTVDKSRWEQGDVFSCSVMHEALHNHYTQKSLSLSPGK

SEQ ID NO: 23178 - protein, 118 aa, Artificial Sequence; identical to SEQ ID NO: 21066
  Description of Artificial Sequence: Synthetic polypeptide
  VH of XENP020808

SEQ ID NO: 23179 - protein, 5 aa, Artificial Sequence
  Description of Artificial Sequence: Synthetic peptide
  XENP020808 vhCDR1
GYGVN

SEQ ID NO: 23180 - protein, 16 aa, Artificial Sequence
  Description of Artificial Sequence: Synthetic peptide
  XENP020808 vhCDR2
MIWIDGSTDYNSKFQG

SEQ ID NO: 23181 - protein, 10 aa, Artificial Sequence
  Description of Artificial Sequence: Synthetic peptide
  XENP020808 vhCDR3
DRPDGRAMDY

SEQ ID NO: 23182 - protein, 480 aa, Artificial Sequence; identical to SEQ ID NO: 22809
  Description of Artificial Sequence: Synthetic polypeptide
  XENP020808 9C6_H1L1-1G6_H1.280_L1.224 scFv-Fc Heavy Chain

SEQ ID NO: 23183 - protein, 122 aa, Artificial Sequence; identical to SEQ ID NO: 10917
  Description of Artificial Sequence: Synthetic polypeptide
  VH of XENP020808

SEQ ID NO: 23184 - protein, 107 aa, Artificial Sequence; identical to SEQ ID NO: 22811
  Description of Artificial Sequence: Synthetic polypeptide
  VL of XENP020808

SEQ ID NO: 23185 - protein, 231 aa, Artificial Sequence; identical to SEQ ID NO: 21532
  Description of Artificial Sequence: Synthetic polypeptide
  Fc chain of XENP020808

SEQ ID NO: 23186 - protein, 5 aa, Artificial Sequence
  Description of Artificial Sequence: Synthetic peptide
  XENP020808 vhCDR1
NYWMN

SEQ ID NO: 23187 - protein, 19 aa, Artificial Sequence
  Description of Artificial Sequence: Synthetic peptide
  XENP020808 vhCDR2
EIRLYSNNYATHYAESVKG

SEQ ID NO: 23188 - protein, 11 aa, Artificial Sequence
  Description of Artificial Sequence: Synthetic peptide
  XENP020808 vhCDR3
YYGNYGGYFDV

SEQ ID NO: 23189 - protein, 11 aa, Artificial Sequence
  Description of Artificial Sequence: Synthetic peptide
  XENP020808 vlCDR1
RASQSVGNDVA

SEQ ID NO: 23190 - protein, 7 aa, Artificial Sequence
  Description of Artificial Sequence: Synthetic peptide
  XENP020808 vlCDR2
YASHRYT

SEQ ID NO: 23191 - protein, 9 aa, Artificial Sequence
  Description of Artificial Sequence: Synthetic peptide
  XENP020808 vlCDR3
QQDWSSPRT

SEQ ID NO: 23192 - protein, 213 aa, Artificial Sequence; identical to SEQ ID NO: 21050
  Description of Artificial Sequence: Synthetic polypeptide
  XENP020808 9C6_H1L1-1G6_H1.280_L1.224 Light Chain

SEQ ID NO: 23193 - protein, 11 aa, Artificial Sequence
  Description of Artificial Sequence: Synthetic peptide
  XENP020808 vlCDR1
KASQSVSNDVA

SEQ ID NO: 23194 - protein, 7 aa, Artificial Sequence
  Description of Artificial Sequence: Synthetic peptide
  XENP020808 vlCDR2
YASNRYT

SEQ ID NO: 23195 - protein, 8 aa, Artificial Sequence
  Description of Artificial Sequence: Synthetic peptide
  XENP020808 vlCDR3
QQDYSSPT

SEQ ID NO: 23196 - protein, 447 aa, Artificial Sequence; identical to SEQ ID NO: 23177
  Description of Artificial Sequence: Synthetic polypeptide
  XENP020809 9C6_H1L2-1G6_H1.280_L1.224 Fab-Fc Heavy Chain

SEQ ID NO: 23197 - protein, 118 aa, Artificial Sequence; identical to SEQ ID NO: 21066
  Description of Artificial Sequence: Synthetic polypeptide
  VH of XENP020809

SEQ ID NO: 23198 - protein, 5 aa, Artificial Sequence
  Description of Artificial Sequence: Synthetic peptide
  XENP020809 vhCDR1
GYGVN

SEQ ID NO: 23199 - protein, 16 aa, Artificial Sequence
  Description of Artificial Sequence: Synthetic peptide
  XENP020809 vhCDR2
MIWIDGSTDYNSKFQG

SEQ ID NO: 23200 - protein, 10 aa, Artificial Sequence
  Description of Artificial Sequence: Synthetic peptide
  XENP020809 vhCDR3
DRPDGRAMDY

SEQ ID NO: 23201 - protein, 480 aa, Artificial Sequence; identical to SEQ ID NO: 22809
  Description of Artificial Sequence: Synthetic polypeptide
  XENP020809 9C6_H1L2-1G6_H1.280_L1.224 scFv-Fc Heavy Chain

SEQ ID NO: 23202 - protein, 122 aa, Artificial Sequence; identical to SEQ ID NO: 10917
  Description of Artificial Sequence: Synthetic polypeptide
  VH of XENP020809

SEQ ID NO: 23203 - protein, 107 aa, Artificial Sequence; identical to SEQ ID NO: 22811
  Description of Artificial Sequence: Synthetic polypeptide
  VL of XENP020809

SEQ ID NO: 23204 - protein, 231 aa, Artificial Sequence; identical to SEQ ID NO: 21532
  Description of Artificial Sequence: Synthetic polypeptide
  Fc chain of XENP020809

SEQ ID NO: 23205 - protein, 5 aa, Artificial Sequence
  Description of Artificial Sequence: Synthetic peptide
  XENP020809 vhCDR1
NYWMN

SEQ ID NO: 23206 - protein, 19 aa, Artificial Sequence
  Description of Artificial Sequence: Synthetic peptide
  XENP020809 vhCDR2
EIRLYSNNYATHYAESVKG

SEQ ID NO: 23207 - protein, 11 aa, Artificial Sequence
  Description of Artificial Sequence: Synthetic peptide
  XENP020809 vhCDR3
YYGNYGGYFDV

SEQ ID NO: 23208 - protein, 11 aa, Artificial Sequence
  Description of Artificial Sequence: Synthetic peptide
  XENP020809 vlCDR1
RASQSVGNDVA

SEQ ID NO: 23209 - protein, 7 aa, Artificial Sequence
  Description of Artificial Sequence: Synthetic peptide
  XENP020809 vlCDR2
YASHRYT

SEQ ID NO: 23210 - protein, 9 aa, Artificial Sequence
  Description of Artificial Sequence: Synthetic peptide
  XENP020809 vlCDR3
QQDWSSPRT

SEQ ID NO: 23211 - protein, 213 aa, Artificial Sequence; identical to SEQ ID NO: 21060
  Description of Artificial Sequence: Synthetic polypeptide
  XENP020809 9C6_H1L2-1G6_H1.280_L1.224 Light Chain

SEQ ID NO: 23212 - protein, 106 aa, Artificial Sequence; identical to SEQ ID NO: 21061
  Description of Artificial Sequence: Synthetic polypeptide
  VL of XENP020809

SEQ ID NO: 23213 - protein, 11 aa, Artificial Sequence
  Description of Artificial Sequence: Synthetic peptide
  XENP020809 vlCDR1
RASQSVSNDVA

SEQ ID NO: 23214 - protein, 7 aa, Artificial Sequence
  Description of Artificial Sequence: Synthetic peptide
  XENP020809 vlCDR2
YASNRYT

SEQ ID NO: 23215 - protein, 8 aa, Artificial Sequence
  Description of Artificial Sequence: Synthetic peptide
  XENP020809 vlCDR3
QQDYSSPT

SEQ ID NO: 23216 - protein, 447 aa, Artificial Sequence; identical to SEQ ID NO: 22844
  Description of Artificial Sequence: Synthetic polypeptide
  XENP020895 9C6_H0L0-1G6_L1.194_H1.279 Fab-Fc Heavy Chain

SEQ ID NO: 23217 - protein, 118 aa, Artificial Sequence; identical to SEQ ID NO: 20936
  Description of Artificial Sequence: Synthetic polypeptide
  VH of XENP020895

SEQ ID NO: 23218 - protein, 5 aa, Artificial Sequence
  Description of Artificial Sequence: Synthetic peptide
  XENP020895 vhCDR1
GYGVN

SEQ ID NO: 23219 - protein, 16 aa, Artificial Sequence
  Description of Artificial Sequence: Synthetic peptide
  XENP020895 vhCDR2
MIWIDGSTDYNSALKS

SEQ ID NO: 23220 - protein, 10 aa, Artificial Sequence
  Description of Artificial Sequence: Synthetic peptide
  XENP020895 vhCDR3
DRPDGRAMDY

SEQ ID NO: 23221 - protein, 480 aa, Artificial Sequence
  Description of Artificial Sequence: Synthetic polypeptide
  XENP020895 9C6_H0L0-1G6_L1.194_H1.279 scFv-Fc Heavy Chain
EIVLTQSPATLSASPGERVTLTCRASQSVGNDVAWYQQKPGQAPRLLINYASHRYTGVPDRFTGSGYGTEFTLTISSVQSEDFGVYYCQQDFSSPRTFGGGTKVEIKGKPGSGKPGSGKPGSGKPGSEVQLVESGGGLVKPGGSLRLSCVASGFTFSNYWMNWVRQAPGKGLEWVAEIRLYSNNYATHYAESVKGRFTISRDDSKSTLYLQMNNLKTEDTGVYYCTRYYGNYGGYFDVWGRGTLVTVSSEPKSSDKTHTCPPCPAPPVAGPSVFLFPPKPKDTLMISRTPEVTCVVVDVKHEDPEVKFNWYVDGVEVHNAKTKPREEQYNSTYRVVSVLTVLHQDWLNGKEYKCKVSNKALPAPIEKTISKAKGQPREPQVYTLPPSREQMTKNQVKLTCLVKGFYPSDIAVEWESNGQPENNYKTTPPVLDSDGSFFLYSKLTVDKSRWQQGNVFSCSVMHEALHNHYTQKSLSLSPGK

SEQ ID NO: 23222 - protein, 107 aa, Artificial Sequence; identical to SEQ ID NO: 10999
  Description of Artificial Sequence: Synthetic polypeptide
  VH of XENP020895

SEQ ID NO: 23223 - protein, 122 aa, Artificial Sequence; identical to SEQ ID NO: 10908
  Description of Artificial Sequence: Synthetic polypeptide
  VL of XENP020895

SEQ ID NO: 23224 - protein, 231 aa, Artificial Sequence; identical to SEQ ID NO: 21532
  Description of Artificial Sequence: Synthetic polypeptide
  Fc chain of XENP020895

SEQ ID NO: 23225 - protein, 11 aa, Artificial Sequence
  Description of Artificial Sequence: Synthetic peptide
  XENP020895 vhCDR1
RASQSVGNDVA

SEQ ID NO: 23226 - protein, 7 aa, Artificial Sequence
  Description of Artificial Sequence: Synthetic peptide
  XENP020895 vhCDR2
YASHRYT

SEQ ID NO: 23227 - protein, 9 aa, Artificial Sequence
  Description of Artificial Sequence: Synthetic peptide
  XENP020895 vhCDR3
QQDFSSPRT

SEQ ID NO: 23228 - protein, 5 aa, Artificial Sequence
  Description of Artificial Sequence: Synthetic peptide
  XENP020895 vlCDR1
NYWMN

SEQ ID NO: 23229 - protein, 19 aa, Artificial Sequence
  Description of Artificial Sequence: Synthetic peptide
  XENP020895 vlCDR2
EIRLYSNNYATHYAESVKG

SEQ ID NO: 23230 - protein, 11 aa, Artificial Sequence
  Description of Artificial Sequence: Synthetic peptide
  XENP020895 vlCDR3
YYGNYGGYFDV

SEQ ID NO: 23231 - protein, 213 aa, Artificial Sequence; identical to SEQ ID NO: 20940
  Description of Artificial Sequence: Synthetic polypeptide
  XENP020895 9C6_H0L0-1G6_L1.194_H1.279 Light Chain

SEQ ID NO: 23232 - protein, 106 aa, Artificial Sequence; identical to SEQ ID NO: 20941
  Description of Artificial Sequence: Synthetic polypeptide
  VL of XENP020895

SEQ ID NO: 23233 - protein, 11 aa, Artificial Sequence
  Description of Artificial Sequence: Synthetic peptide
  XENP020895 vlCDR1
KASQSVSNDVA

SEQ ID NO: 23234 - protein, 7 aa, Artificial Sequence
  Description of Artificial Sequence: Synthetic peptide
  XENP020895 vlCDR2
YASNRYT

SEQ ID NO: 23235 - protein, 8 aa, Artificial Sequence
  Description of Artificial Sequence: Synthetic peptide
  XENP020895 vlCDR3
QQDYSSPT

SEQ ID NO: 23236 - protein, 447 aa, Artificial Sequence
  Description of Artificial Sequence: Synthetic polypeptide
  XENP021218 9C6_H1.1_L1-1G6_H1.280_L1.224 Fab-Fc Heavy Chain
QVQLKESGAEVKKPGASVKVSCKVSGFSLTGYGVNWVRQAPGQGLEWMGMIWIDGSTDYNSKFQGRVTMTKDNSKSTVYMELSSLRSEDTAVYYCARDRPDGRAMDYWGQGTMVTVSSASTKGPSVFPLAPSSKSTSGGTAALGCLVKDYFPEPVTVSWNSGALTSGVHTFPAVLQSSGLYSLSSVVTVPSSSLGTQTYICNVNHKPSDTKVDKKVEPKSCDKTHTCPPCPAPPVAGPSVFLFPPKPKDTLMISRTPEVTCVVVDVKHEDPEVKFNWYVDGVEVHNAKTKPREEEYNSTYRVVSVLTVLHQDWLNGKEYKCKVSNKALPAPIEKTISKAKGQPREPQVYTLPPSREEMTKNQVSLTCDVSGFYPSDIAVEWESDGQPENNYKTTPPVLDSDGSFFLYSKLTVDKSRWEQGDVFSCSVMHEALHNHYTQKSLSLSPGK

SEQ ID NO: 23237 - protein, 118 aa, Artificial Sequence; identical to SEQ ID NO: 21205
  Description of Artificial Sequence: Synthetic polypeptide
  VH of XENP021218

SEQ ID NO: 23238 - protein, 5 aa, Artificial Sequence
  Description of Artificial Sequence: Synthetic peptide
  XENP021218 vhCDR1
GYGVN

SEQ ID NO: 23239 - protein, 16 aa, Artificial Sequence
  Description of Artificial Sequence: Synthetic peptide
  XENP021218 vhCDR2
MIWIDGSTDYNSKFQG

SEQ ID NO: 23240 - protein, 10 aa, Artificial Sequence
  Description of Artificial Sequence: Synthetic peptide
  XENP021218 vhCDR3
DRPDGRAMDY

SEQ ID NO: 23241 - protein, 480 aa, Artificial Sequence; identical to SEQ ID NO: 22809
  Description of Artificial Sequence: Synthetic polypeptide
  XENP021218 9C6_H1.1_L1-1G6_H1.280_L1.224 scFv-Fc Heavy Chain

SEQ ID NO: 23242 - protein, 122 aa, Artificial Sequence; identical to SEQ ID NO: 10917
  Description of Artificial Sequence: Synthetic polypeptide
  VH of XENP021218

SEQ ID NO: 23243 - protein, 107 aa, Artificial Sequence; identical to SEQ ID NO: 22811
  Description of Artificial Sequence: Synthetic polypeptide
  VL of XENP021218

SEQ ID NO: 23244 - protein, 231 aa, Artificial Sequence; identical to SEQ ID NO: 21532
  Description of Artificial Sequence: Synthetic polypeptide
  Fc chain of XENP021218

SEQ ID NO: 23245 - protein, 5 aa, Artificial Sequence
  Description of Artificial Sequence: Synthetic peptide
  XENP021218 vhCDR1
NYWMN

SEQ ID NO: 23246 - protein, 19 aa, Artificial Sequence
  Description of Artificial Sequence: Synthetic peptide
  XENP021218 vhCDR2
EIRLYSNNYATHYAESVKG

SEQ ID NO: 23247 - protein, 11 aa, Artificial Sequence
  Description of Artificial Sequence: Synthetic peptide
  XENP021218 vhCDR3
YYGNYGGYFDV

SEQ ID NO: 23248 - protein, 11 aa, Artificial Sequence
  Description of Artificial Sequence: Synthetic peptide
  XENP021218 vlCDR1
RASQSVGNDVA

SEQ ID NO: 23249 - protein, 7 aa, Artificial Sequence
  Description of Artificial Sequence: Synthetic peptide
  XENP021218 vlCDR2
YASHRYT

SEQ ID NO: 23250 - protein, 9 aa, Artificial Sequence
  Description of Artificial Sequence: Synthetic peptide
  XENP021218 vlCDR3
QQDWSSPRT

SEQ ID NO: 23251 - protein, 213 aa, Artificial Sequence; identical to SEQ ID NO: 21050
  Description of Artificial Sequence: Synthetic polypeptide
  XENP021218 9C6_H1.1_L1-1G6_H1.280_L1.224 Light Chain

SEQ ID NO: 23252 - protein, 106 aa, Artificial Sequence; identical to SEQ ID NO: 21051
  Description of Artificial Sequence: Synthetic polypeptide
  VL of XENP021218

SEQ ID NO: 23253 - protein, 11 aa, Artificial Sequence
  Description of Artificial Sequence: Synthetic peptide
  XENP021218 vlCDR1
KASQSVSNDVA

SEQ ID NO: 23254 - protein, 7 aa, Artificial Sequence
  Description of Artificial Sequence: Synthetic peptide
  XENP021218 vlCDR2
YASNRYT

SEQ ID NO: 23255 - protein, 8 aa, Artificial Sequence
  Description of Artificial Sequence: Synthetic peptide
  XENP021218 vlCDR3
QQDYSSPT

SEQ ID NO: 23256 - protein, 447 aa, Artificial Sequence
  Description of Artificial Sequence: Synthetic polypeptide
  XENP021219 9C6_H1.11_L1-1G6_H1.280_L1.224 Fab-Fc Heavy Chain
QVQLVQSGAEVKKPGASVKVSCKVSGFSLTGYGVNWVRQAPGQGLEWMGMIWIDGSTDYNSKFQGRLSINKDNSKSTVYMELSSLRSEDTAVYYCARDRPDGRAMDYWGQGTMVTVSSASTKGPSVFPLAPSSKSTSGGTAALGCLVKDYFPEPVTVSWNSGALTSGVHTFPAVLQSSGLYSLSSVVTVPSSSLGTQTYICNVNHKPSDTKVDKKVEPKSCDKTHTCPPCPAPPVAGPSVFLFPPKPKDTLMISRTPEVTCVVVDVKHEDPEVKFNWYVDGVEVHNAKTKPREEEYNSTYRVVSVLTVLHQDWLNGKEYKCKVSNKALPAPIEKTISKAKGQPREPQVYTLPPSREEMTKNQVSLTCDVSGFYPSDIAVEWESDGQPENNYKTTPPVLDSDGSFFLYSKLTVDKSRWEQGDVFSCSVMHEALHNHYTQKSLSLSPGK

SEQ ID NO: 23257 - protein, 118 aa, Artificial Sequence; identical to SEQ ID NO: 21305
  Description of Artificial Sequence: Synthetic polypeptide
  VH of XENP021219

SEQ ID NO: 23258 - protein, 5 aa, Artificial Sequence
  Description of Artificial Sequence: Synthetic peptide
  XENP021219 vhCDR1
GYGVN

SEQ ID NO: 23259 - protein, 16 aa, Artificial Sequence
  Description of Artificial Sequence: Synthetic peptide
  XENP021219 vhCDR2
MIWIDGSTDYNSKFQG

SEQ ID NO: 23260 - protein, 10 aa, Artificial Sequence
  Description of Artificial Sequence: Synthetic peptide
  XENP021219 vhCDR3
DRPDGRAMDY

SEQ ID NO: 23261 - protein, 480 aa, Artificial Sequence; identical to SEQ ID NO: 22809
  Description of Artificial Sequence: Synthetic polypeptide
  XENP021219 9C6_H1.11_L1-1G6_H1.280_L1.224 scFv-Fc Heavy Chain

SEQ ID NO: 23262 - protein, 122 aa, Artificial Sequence; identical to SEQ ID NO: 10917
  Description of Artificial Sequence: Synthetic polypeptide
  VH of XENP021219

SEQ ID NO: 23263 - protein, 107 aa, Artificial Sequence; identical to SEQ ID NO: 22811
  Description of Artificial Sequence: Synthetic polypeptide
  VL of XENP021219

SEQ ID NO: 23264 - protein, 231 aa, Artificial Sequence; identical to SEQ ID NO: 21532
  Description of Artificial Sequence: Synthetic polypeptide
  Fc chain of XENP021219

SEQ ID NO: 23265 - protein, 5 aa, Artificial Sequence
  Description of Artificial Sequence: Synthetic peptide
  XENP021219 vhCDR1
NYWMN

SEQ ID NO: 23266 - protein, 19 aa, Artificial Sequence
  Description of Artificial Sequence: Synthetic peptide
  XENP021219 vhCDR2
EIRLYSNNYATHYAESVKG

SEQ ID NO: 23267 - protein, 11 aa, Artificial Sequence
  Description of Artificial Sequence: Synthetic peptide
  XENP021219 vhCDR3
YYGNYGGYFDV

SEQ ID NO: 23268 - protein, 11 aa, Artificial Sequence
  Description of Artificial Sequence: Synthetic peptide
  XENP021219 vlCDR1
RASQSVGNDVA

SEQ ID NO: 23269 - protein, 7 aa, Artificial Sequence
  Description of Artificial Sequence: Synthetic peptide
  XENP021219 vlCDR2
YASHRYT

SEQ ID NO: 23270 - protein, 9 aa, Artificial Sequence
  Description of Artificial Sequence: Synthetic peptide
  XENP021219 vlCDR3
QQDWSSPRT

SEQ ID NO: 23271 - protein, 213 aa, Artificial Sequence; identical to SEQ ID NO: 21050
  Description of Artificial Sequence: Synthetic polypeptide
  XENP021219 9C6_H1.11_L1-1G6_H1.280_L1.224 Light Chain

SEQ ID NO: 23272 - protein, 106 aa, Artificial Sequence; identical to SEQ ID NO: 21051
  Description of Artificial Sequence: Synthetic polypeptide
  VL of XENP021219

SEQ ID NO: 23273 - protein, 11 aa, Artificial Sequence
  Description of Artificial Sequence: Synthetic peptide
  XENP021219 vlCDR1
KASQSVSNDVA

SEQ ID NO: 23274 - protein, 7 aa, Artificial Sequence
  Description of Artificial Sequence: Synthetic peptide
  XENP021219 vlCDR2
YASNRYT

SEQ ID NO: 23275 - protein, 8 aa, Artificial Sequence
  Description of Artificial Sequence: Synthetic peptide
  XENP021219 vlCDR3
QQDYSSPT

SEQ ID NO: 23276 - protein, 447 aa, Artificial Sequence; identical to SEQ ID NO: 23236
  Description of Artificial Sequence: Synthetic polypeptide
  XENP021220 9C6_H1.1_L1-1G6_L1.194_H1.279 Fab-Fc Heavy Chain

SEQ ID NO: 23277 - protein, 118 aa, Artificial Sequence; identical to SEQ ID NO: 21205
  Description of Artificial Sequence: Synthetic polypeptide
  VH of XENP021220

SEQ ID NO: 23278 - protein, 5 aa, Artificial Sequence
  Description of Artificial Sequence: Synthetic peptide
  XENP021220 vhCDR1
GYGVN

SEQ ID NO: 23279 - protein, 16 aa, Artificial Sequence
  Description of Artificial Sequence: Synthetic peptide
  XENP021220 vhCDR2
MIWIDGSTDYNSKFQG

SEQ ID NO: 23280 - protein, 10 aa, Artificial Sequence
  Description of Artificial Sequence: Synthetic peptide
  XENP021220 vhCDR3
DRPDGRAMDY

SEQ ID NO: 23281 - protein, 480 aa, Artificial Sequence; identical to SEQ ID NO: 23221
  Description of Artificial Sequence: Synthetic polypeptide
  XENP021220 9C6_H1.1_L1-1G6_L1.194_H1.279 scFv-Fc Heavy Chain

SEQ ID NO: 23282 - protein, 107 aa, Artificial Sequence; identical to SEQ ID NO: 10999
  Description of Artificial Sequence: Synthetic polypeptide
  VH of XENP021220

SEQ ID NO: 23283 - protein, 122 aa, Artificial Sequence; identical to SEQ ID NO: 10908
  Description of Artificial Sequence: Synthetic polypeptide
  VL of XENP021220

SEQ ID NO: 23284 - protein, 231 aa, Artificial Sequence; identical to SEQ ID NO: 21532
  Description of Artificial Sequence: Synthetic polypeptide
  Fc chain of XENP021220

SEQ ID NO: 23285 - protein, 11 aa, Artificial Sequence
  Description of Artificial Sequence: Synthetic peptide
  XENP021220 vhCDR1
RASQSVGNDVA

SEQ ID NO: 23286 - protein, 7 aa, Artificial Sequence
  Description of Artificial Sequence: Synthetic peptide
  XENP021220 vhCDR2
YASHRYT

SEQ ID NO: 23287 - protein, 9 aa, Artificial Sequence
  Description of Artificial Sequence: Synthetic peptide
  XENP021220 vhCDR3
QQDFSSPRT

SEQ ID NO: 23288 - protein, 5 aa, Artificial Sequence
  Description of Artificial Sequence: Synthetic peptide
  XENP021220 vlCDR1
NYWMN

SEQ ID NO: 23289 - protein, 19 aa, Artificial Sequence
  Description of Artificial Sequence: Synthetic peptide
  XENP021220 vlCDR2
EIRLYSNNYATHYAESVKG

SEQ ID NO: 23290 - protein, 11 aa, Artificial Sequence
  Description of Artificial Sequence: Synthetic peptide
  XENP021220 vlCDR3
YYGNYGGYFDV

SEQ ID NO: 23291 - protein, 213 aa, Artificial Sequence; identical to SEQ ID NO: 21050
  Description of Artificial Sequence: Synthetic polypeptide
  XENP021220 9C6_H1.1_L1-1G6_L1.194_H1.279 Light Chain

SEQ ID NO: 23292 - protein, 106 aa, Artificial Sequence; identical to SEQ ID NO: 21051
  Description of Artificial Sequence: Synthetic polypeptide
  VL of XENP021220

SEQ ID NO: 23293 - protein, 11 aa, Artificial Sequence
  Description of Artificial Sequence: Synthetic peptide
  XENP021220 vlCDR1
KASQSVSNDVA

SEQ ID NO: 23294 - protein, 7 aa, Artificial Sequence
  Description of Artificial Sequence: Synthetic peptide
  XENP021220 vlCDR2
YASNRYT

SEQ ID NO: 23295 - protein, 8 aa, Artificial Sequence
  Description of Artificial Sequence: Synthetic peptide
  XENP021220 vlCDR3
QQDYSSPT

SEQ ID NO: 23296 - protein, 447 aa, Artificial Sequence; identical to SEQ ID NO: 23256
  Description of Artificial Sequence: Synthetic polypeptide
  XENP021221 9C6_H1.11_L1-1G6_L1.194_H1.279 Fab-Fc Heavy Chain

SEQ ID NO: 23297 - protein, 118 aa, Artificial Sequence; identical to SEQ ID NO: 21305
  Description of Artificial Sequence: Synthetic polypeptide
  VH of XENP021221

SEQ ID NO: 23298 - protein, 5 aa, Artificial Sequence
  Description of Artificial Sequence: Synthetic peptide
  XENP021221 vhCDR1
GYGVN

SEQ ID NO: 23299 - protein, 16 aa, Artificial Sequence
  Description of Artificial Sequence: Synthetic peptide
  XENP021221 vhCDR2
MIWIDGSTDYNSKFQG

SEQ ID NO: 23300 - protein, 10 aa, Artificial Sequence
  Description of Artificial Sequence: Synthetic peptide
  XENP021221 vhCDR3
DRPDGRAMDY

SEQ ID NO: 23301 - protein, 480 aa, Artificial Sequence; identical to SEQ ID NO: 23221
  Description of Artificial Sequence: Synthetic polypeptide
  XENP021221 9C6_H1.11_L1-1G6_L1.194_H1.279 scFv-Fc Heavy Chain

SEQ ID NO: 23302 - protein, 107 aa, Artificial Sequence; identical to SEQ ID NO: 10999
  Description of Artificial Sequence: Synthetic polypeptide
  VH of XENP021221

SEQ ID NO: 23303 - protein, 122 aa, Artificial Sequence; identical to SEQ ID NO: 10908
  Description of Artificial Sequence: Synthetic polypeptide
  VL of XENP021221

SEQ ID NO: 23304 - protein, 231 aa, Artificial Sequence; identical to SEQ ID NO: 21532
  Description of Artificial Sequence: Synthetic polypeptide
  Fc chain of XENP021221

SEQ ID NO: 23305 - protein, 11 aa, Artificial Sequence
  Description of Artificial Sequence: Synthetic peptide
  XENP021221 vhCDR1
RASQSVGNDVA

SEQ ID NO: 23306 - protein, 7 aa, Artificial Sequence
  Description of Artificial Sequence: Synthetic peptide
  XENP021221 vhCDR2
YASHRYT

SEQ ID NO: 23307 - protein, 9 aa, Artificial Sequence
  Description of Artificial Sequence: Synthetic peptide
  XENP021221 vhCDR3
QQDFSSPRT

SEQ ID NO: 23308 - protein, 5 aa, Artificial Sequence
  Description of Artificial Sequence: Synthetic peptide
  XENP021221 vlCDR1
NYWMN

SEQ ID NO: 23309 - protein, 19 aa, Artificial Sequence
  Description of Artificial Sequence: Synthetic peptide
  XENP021221 vlCDR2
EIRLYSNNYATHYAESVKG

SEQ ID NO: 23310 - protein, 11 aa, Artificial Sequence
  Description of Artificial Sequence: Synthetic peptide
  XENP021221 vlCDR3
YYGNYGGYFDV

SEQ ID NO: 23311 - protein, 213 aa, Artificial Sequence; identical to SEQ ID NO: 21050
  Description of Artificial Sequence: Synthetic polypeptide
  XENP021221 9C6_H1.11_L1-1G6_L1.194_H1.279 Light Chain

SEQ ID NO: 23312 - protein, 106 aa, Artificial Sequence; identical to SEQ ID NO: 21051
  Description of Artificial Sequence: Synthetic polypeptide
  VL of XENP021221

SEQ ID NO: 23313 - protein, 11 aa, Artificial Sequence
  Description of Artificial Sequence: Synthetic peptide
  XENP021221 vlCDR1
KASQSVSNDVA

SEQ ID NO: 23314 - protein, 7 aa, Artificial Sequence
  Description of Artificial Sequence: Synthetic peptide
  XENP021221 vlCDR2
YASNRYT

SEQ ID NO: 23315 - protein, 8 aa, Artificial Sequence
  Description of Artificial Sequence: Synthetic peptide
  XENP021221 vlCDR3
QQDYSSPT

SEQ ID NO: 23316 - protein, 447 aa, Artificial Sequence
  Description of Artificial Sequence: Synthetic polypeptide
  XENP016004 ipilimumab_H0L0-nivolumab_H0.1_L0 Fab-Fc Heavy Chain
QVQLVESGGGVVQPGRSLRLSCAASGFTFSSYTMHWVRQAPGKGLEWVTFISYDGNNKYYADSVKGRFTISRDNSKNTLYLQMNSLRAEDTAIYYCARTGWLGPFDYWGQGTLVTVSSASTKGPSVFPLAPSSKSTSGGTAALGCLVKDYFPEPVTVSWNSGALTSGVHTFPAVLQSSGLYSLSSVVTVPSSSLGTQTYICNVNHKPSDTKVDKKVEPKSCDKTHTCPPCPAPPVAGPSVFLFPPKPKDTLMISRTPEVTCVVVDVKHEDPEVKFNWYVDGVEVHNAKTKPREEEYNSTYRVVSVLTVLHQDWLNGKEYKCKVSNKALPAPIEKTISKAKGQPREPQVYTLPPSREEMTKNQVSLTCDVSGFYPSDIAVEWESDGQPENNYKTTPPVLDSDGSFFLYSKLTVDKSRWEQGDVFSCSVMHEALHNHYTQKSLSLSPGK

SEQ ID NO: 23317 - protein, 118 aa, Artificial Sequence; identical to SEQ ID NO: 22
  Description of Artificial Sequence: Synthetic polypeptide
  VH of XENP016004

SEQ ID NO: 23318 - protein, 5 aa, Artificial Sequence
  Description of Artificial Sequence: Synthetic peptide
  XENP016004 vhCDR1
SYTMH

SEQ ID NO: 23319 - protein, 17 aa, Artificial Sequence
  Description of Artificial Sequence: Synthetic peptide
  XENP016004 vhCDR2
FISYDGNNKYYADSVKG

SEQ ID NO: 23320 - protein, 9 aa, Artificial Sequence
  Description of Artificial Sequence: Synthetic peptide
  XENP016004 vhCDR3
TGWLGPFDY

SEQ ID NO: 23321 - protein, 471 aa, Artificial Sequence; identical to SEQ ID NO: 22749
  Description of Artificial Sequence: Synthetic polypeptide
  XENP016004 ipilimumab_H0L0-nivolumab_H0.1_L0 scFv-Fc Heavy Chain

SEQ ID NO: 23322 - protein, 113 aa, Artificial Sequence; identical to SEQ ID NO: 6210
  Description of Artificial Sequence: Synthetic polypeptide
  VH of XENP016004

SEQ ID NO: 23323 - protein, 107 aa, Artificial Sequence [sequence omitted]

SEQ ID NO: 23324 - protein, 231 aa, Artificial Sequence; identical to SEQ ID NO: 21532
  Description of Artificial Sequence: Synthetic polypeptide
  Fc chain of XENP016004

SEQ ID NO: 23325 - protein, 5 aa, Artificial Sequence
  Description of Artificial Sequence: Synthetic peptide
  XENP016004 vhCDR1
NSGMH

SEQ ID NO: 23326 - protein, 17 aa, Artificial Sequence
  Description of Artificial Sequence: Synthetic peptide
  XENP016004 vhCDR2
VIWYDGSKRYYADSVKG

SEQ ID NO: 23327 - protein, 4 aa, Artificial Sequence
  Description of Artificial Sequence: Synthetic peptide
  XENP016004 vhCDR3
NDDY

SEQ ID NO: 23328 - protein, 11 aa, Artificial Sequence
  Description of Artificial Sequence: Synthetic peptide
  XENP016004 vlCDR1
RASQSVSSYLA

SEQ ID NO: 23329 - protein, 7 aa, Artificial Sequence
  Description of Artificial Sequence: Synthetic peptide
  XENP016004 vlCDR2
DASNRAT

SEQ ID NO: 23330 - protein, 9 aa, Artificial Sequence
  Description of Artificial Sequence: Synthetic peptide
  XENP016004 vlCDR3
QQSSNWPRT

SEQ ID NO: 23331 - protein, 215 aa, Artificial Sequence; identical to SEQ ID NO: 2924
  Description of Artificial Sequence: Synthetic polypeptide
  XENP016004 ipilimumab_H0L0-nivolumab_H0.1_L0 Light Chain

SEQ ID NO: 23332 - protein, 108 aa, Artificial Sequence; identical to SEQ ID NO: 23
  Description of Artificial Sequence: Synthetic polypeptide
  VL of XENP016004

SEQ ID NO: 23333 - protein, 12 aa, Artificial Sequence
  Description of Artificial Sequence: Synthetic peptide
  XENP016004 vlCDR1
RASQSVGSSYLA

SEQ ID NO: 23334 - protein, 7 aa, Artificial Sequence
  Description of Artificial Sequence: Synthetic peptide
  XENP016004 vlCDR2
GAFSRAT

SEQ ID NO: 23335 - protein, 9 aa, Artificial Sequence
  Description of Artificial Sequence: Synthetic peptide
  XENP016004 vlCDR3
QQYGSSPWT

SEQ ID NO: 23336 - protein, 447 aa, Artificial Sequence; identical to SEQ ID NO: 23316
  Description of Artificial Sequence: Synthetic polypeptide
  XENP018067 Ipilimumab_H0L0-1G6_H1L1 Fab-Fc Heavy Chain

SEQ ID NO: 23337 - protein, 118 aa, Artificial Sequence; identical to SEQ ID NO: 22
  Description of Artificial Sequence: Synthetic polypeptide
  VH of XENP018067

SEQ ID NO: 23338 - protein, 5 aa, Artificial Sequence
  Description of Artificial Sequence: Synthetic peptide
  XENP018067 vhCDR1
SYTMH

SEQ ID NO: 23339 - protein, 17 aa, Artificial Sequence
  Description of Artificial Sequence: Synthetic peptide
  XENP018067 vhCDR2
FISYDGNNKYYADSVKG

SEQ ID NO: 23340 - protein, 9 aa, Artificial Sequence
  Description of Artificial Sequence: Synthetic peptide
  XENP018067 vhCDR3
TGWLGPFDY

SEQ ID NO: 23341 - protein, 480 aa, Artificial Sequence
  Description of Artificial Sequence: Synthetic polypeptide
  XENP018067 Ipilimumab_H0L0-1G6_H1L1 scFv-Fc Heavy Chain
EVQLVESGGGLVKPGGSLRLSCAASGFTFSNYWMNWVRQAPGKGLEWVGEIRLKSNNYATHYAEPVKGRFTISRDDSKSTVYLQMNSLKTEDTAVYYCTRYYGNYGGYFDVWGAGTLVTVSSGKPGSGKPGSGKPGSGKPGSSIVMTQSPATLSVSPGERATLSCRASQSVSNDVAWYQQKPGQSPRLLINYASHRYTGVPDRFTGSGYGTEFTLTISSLQSEDFAVYFCQQDYSSPRTFGGGTKVEIKEPKSSDKTHTCPPCPAPPVAGPSVFLFPPKPKDTLMISRTPEVTCVVVDVKHEDPEVKFNWYVDGVEVHNAKTKPREEQYNSTYRVVSVLTVLHQDWLNGKEYKCKVSNKALPAPIEKTISKAKGQPREPQVYTLPPSREQMTKNQVKLTCLVKGFYPSDIAVEWESNGQPENNYKTTPPVLDSDGSFFLYSKLTVDKSRWQQGNVFSCSVMHEALHNHYTQKSLSLSPGK

SEQ ID NO: 23342 - protein, 122 aa, Artificial Sequence; identical to SEQ ID NO: 6246
  Description of Artificial Sequence: Synthetic polypeptide
  VH of XENP018067

SEQ ID NO: 23343 - protein, 107 aa, Artificial Sequence; identical to SEQ ID NO: 6247
  Description of Artificial Sequence: Synthetic polypeptide
  VL of XENP018067

SEQ ID NO: 23344 - protein, 231 aa, Artificial Sequence; identical to SEQ ID NO: 21532
  Description of Artificial Sequence: Synthetic polypeptide
  Fc chain of XENP018067

SEQ ID NO: 23345 - protein, 5 aa, Artificial Sequence
  Description of Artificial Sequence: Synthetic peptide
  XENP018067 vhCDR1
NYWMN

SEQ ID NO: 23346 - protein, 19 aa, Artificial Sequence
  Description of Artificial Sequence: Synthetic peptide
  XENP018067 vhCDR2
EIRLKSNNYATHYAEPVKG

SEQ ID NO: 23347 - protein, 11 aa, Artificial Sequence
  Description of Artificial Sequence: Synthetic peptide
  XENP018067 vhCDR3
YYGNYGGYFDV

SEQ ID NO: 23348 - protein, 11 aa, Artificial Sequence
  Description of Artificial Sequence: Synthetic peptide
  XENP018067 vlCDR1
RASQSVSNDVA

SEQ ID NO: 23349 - protein, 7 aa, Artificial Sequence
  Description of Artificial Sequence: Synthetic peptide
  XENP018067 vlCDR2
YASHRYT

SEQ ID NO: 23350 - protein, 9 aa, Artificial Sequence
  Description of Artificial Sequence: Synthetic peptide
  XENP018067 vlCDR3
QQDYSSPRT

SEQ ID NO: 23351 - protein, 215 aa, Artificial Sequence; identical to SEQ ID NO: 2924
  Description of Artificial Sequence: Synthetic polypeptide
  XENP018067 Ipilimumab_H0L0-1G6_H1L1 Light Chain

SEQ ID NO: 23352 - protein, 108 aa, Artificial Sequence; identical to SEQ ID NO: 23
  Description of Artificial Sequence: Synthetic polypeptide
  VL of XENP018067

SEQ ID NO: 23353 - protein, 12 aa, Artificial Sequence
  Description of Artificial Sequence: Synthetic peptide
  XENP018067 vlCDR1
RASQSVGSSYLA

SEQ ID NO: 23354 - protein, 7 aa, Artificial Sequence
  Description of Artificial Sequence: Synthetic peptide
  XENP018067 vlCDR2
GAFSRAT

SEQ ID NO: 23355 - protein, 9 aa, Artificial Sequence
  Description of Artificial Sequence: Synthetic peptide
  XENP018067 vlCDR3
QQYGSSPWT

SEQ ID NO: 23356 - protein, 447 aa, Artificial Sequence
  Description of Artificial Sequence: Synthetic polypeptide
  XENP019734 ipilimumab_H3L0-nivolumab_H0.1_L0 Fab-Fc Heavy Chain
EVQLVESGGGLVKPGGSLRLSCAASGFTFSSYTMHWVRQAPGKGLEWVSFISYDGNNKYYADSVKGRFTISRDNAKNSLYLQMNSLRAEDTAVYYCARTGWLGPFDYWGQGTLVTVSSASTKGPSVFPLAPSSKSTSGGTAALGCLVKDYFPEPVTVSWNSGALTSGVHTFPAVLQSSGLYSLSSVVTVPSSSLGTQTYICNVNHKPSDTKVDKKVEPKSCDKTHTCPPCPAPPVAGPSVFLFPPKPKDTLMISRTPEVTCVVVDVKHEDPEVKFNWYVDGVEVHNAKTKPREEEYNSTYRVVSVLTVLHQDWLNGKEYKCKVSNKALPAPIEKTISKAKGQPREPQVYTLPPSREEMTKNQVSLTCDVSGFYPSDIAVEWESDGQPENNYKTTPPVLDSDGSFFLYSKLTVDKSRWEQGDVFSCSVMHEALHNHYTQKSLSLSPGK

SEQ ID NO: 23357 - protein, 118 aa, Artificial Sequence; identical to SEQ ID NO: 139
  Description of Artificial Sequence: Synthetic polypeptide
  VH of XENP019734

SEQ ID NO: 23358 - protein, 5 aa, Artificial Sequence
  Description of Artificial Sequence: Synthetic peptide
  XENP019734 vhCDR1
SYTMH

SEQ ID NO: 23359 - protein, 17 aa, Artificial Sequence
  Description of Artificial Sequence: Synthetic peptide
  XENP019734 vhCDR2
FISYDGNNKYYADSVKG

SEQ ID NO: 23360 - protein, 9 aa, Artificial Sequence
  Description of Artificial Sequence: Synthetic peptide
  XENP019734 vhCDR3
TGWLGPFDY

SEQ ID NO: 23361 - protein, 471 aa, Artificial Sequence; identical to SEQ ID NO: 22749
  Description of Artificial Sequence: Synthetic polypeptide
  XENP019734 ipilimumab_H3L0-nivolumab_H0.1_L0 scFv-Fc Heavy Chain

SEQ ID NO: 23362 - protein, 113 aa, Artificial Sequence; identical to SEQ ID NO: 6210
  Description of Artificial Sequence: Synthetic polypeptide
  VH of XENP019734

SEQ ID NO: 23363 - protein, 107 aa, Artificial Sequence [sequence omitted]

SEQ ID NO: 23364 - protein, 231 aa, Artificial Sequence; identical to SEQ ID NO: 21532
  Description of Artificial Sequence: Synthetic polypeptide
  Fc chain of XENP019734

SEQ ID NO: 23365 - protein, 5 aa, Artificial Sequence
  Description of Artificial Sequence: Synthetic peptide
  XENP019734 vhCDR1
NSGMH

SEQ ID NO: 23366 - protein, 17 aa, Artificial Sequence
  Description of Artificial Sequence: Synthetic peptide
  XENP019734 vhCDR2
VIWYDGSKRYYADSVKG

SEQ ID NO: 23367 - protein, 4 aa, Artificial Sequence
  Description of Artificial Sequence: Synthetic peptide
  XENP019734 vhCDR3
NDDY

SEQ ID NO: 23368 - protein, 11 aa, Artificial Sequence
  Description of Artificial Sequence: Synthetic peptide
  XENP019734 vlCDR1
RASQSVSSYLA

SEQ ID NO: 23369 - protein, 7 aa, Artificial Sequence
  Description of Artificial Sequence: Synthetic peptide
  XENP019734 vlCDR2
DASNRAT

SEQ ID NO: 23370 - protein, 9 aa, Artificial Sequence
  Description of Artificial Sequence: Synthetic peptide
  XENP019734 vlCDR3
QQSSNWPRT

SEQ ID NO: 23371 - protein, 215 aa, Artificial Sequence; identical to SEQ ID NO: 2924
  Description of Artificial Sequence: Synthetic polypeptide
  XENP019734 ipilimumab_H3L0-nivolumab_H0.1_L0 Light Chain

SEQ ID NO: 23372 - protein, 108 aa, Artificial Sequence; identical to SEQ ID NO: 23
  Description of Artificial Sequence: Synthetic polypeptide
  VL of XENP019734

SEQ ID NO: 23373 - protein, 12 aa, Artificial Sequence
  Description of Artificial Sequence: Synthetic peptide
  XENP019734 vlCDR1
RASQSVGSSYLA

SEQ ID NO: 23374 - protein, 7 aa, Artificial Sequence
  Description of Artificial Sequence: Synthetic peptide
  XENP019734 vlCDR2
GAFSRAT

SEQ ID NO: 23375 - protein, 9 aa, Artificial Sequence
  Description of Artificial Sequence: Synthetic peptide
  XENP019734 vlCDR3
QQYGSSPWT

SEQ ID NO: 23376 - protein, 447 aa, Artificial Sequence; identical to SEQ ID NO: 23356
  Description of Artificial Sequence: Synthetic polypeptide
  XENP019738 ipilimumab_H3L0-1G6_L1.210_H1.288 Fab-Fc Heavy Chain

SEQ ID NO: 23377 - protein, 118 aa, Artificial Sequence; identical to SEQ ID NO: 139
  Description of Artificial Sequence: Synthetic polypeptide
  VH of XENP019738

SEQ ID NO: 23378 - protein, 5 aa, Artificial Sequence
  Description of Artificial Sequence: Synthetic peptide
  XENP019738 vhCDR1
SYTMH

SEQ ID NO: 23379 - protein, 17 aa, Artificial Sequence
  Description of Artificial Sequence: Synthetic peptide
  XENP019738 vhCDR2
FISYDGNNKYYADSVKG

SEQ ID NO: 23380 - protein, 9 aa, Artificial Sequence
  Description of Artificial Sequence: Synthetic peptide
  XENP019738 vhCDR3
TGWLGPFDY

SEQ ID NO: 23381 - protein, 480 aa, Artificial Sequence
  Description of Artificial Sequence: Synthetic polypeptide
  XENP019738 ipilimumab_H3L0-1G6_L1.210_H1.288 scFv-Fc Heavy Chain
EIVLTQSPATLSASPGERVTLTCRASQSVGNDVAWYQQKPGQAPRLLINYASHRYTGVPDRFTGSGYGTEFTLTISSVQSEDFGVYYCQQDFSSPRTFGCGTKVEIKGKPGSGKPGSGKPGSGKPGSEVQLVESGGGLVKPGGSLRLSCVASGFTFSNYWMNWVRQAPGKCLEWVAEIRLYSNNYATHYAESVKGRFTISRDDSKSTLYLQMNNLKTEDTGVYYCTRYYGNYGGYFDVWGRGTLVTVSSEPKSSDKTHTCPPCPAPPVAGPSVFLFPPKPKDTLMISRTPEVTCVVVDVKHEDPEVKFNWYVDGVEVHNAKTKPREEQYNSTYRVVSVLTVLHQDWLNGKEYKCKVSNKALPAPIEKTISKAKGQPREPQVYTLPPSREQMTKNQVKLTCLVKGFYPSDIAVEWESNGQPENNYKTTPPVLDSDGSFFLYSKLTVDKSRWQQGNVFSCSVMHEALHNHYTQKSLSLSPGK

SEQ ID NO: 23382 - protein, 107 aa, Artificial Sequence; identical to SEQ ID NO: 11359
  Description of Artificial Sequence: Synthetic polypeptide
  VH of XENP019738

SEQ ID NO: 23383 - protein, 122 aa, Artificial Sequence; identical to SEQ ID NO: 11358
  Description of Artificial Sequence: Synthetic polypeptide
  VL of XENP019738

SEQ ID NO: 23384 - protein, 231 aa, Artificial Sequence; identical to SEQ ID NO: 21532
  Description of Artificial Sequence: Synthetic polypeptide
  Fc chain of XENP019738

SEQ ID NO: 23385 - protein, 11 aa, Artificial Sequence
  Description of Artificial Sequence: Synthetic peptide
  XENP019738 vhCDR1
RASQSVGNDVA

SEQ ID NO: 23386 - protein, 7 aa, Artificial Sequence
  Description of Artificial Sequence: Synthetic peptide
  XENP019738 vhCDR2
YASHRYT

SEQ ID NO: 23387 - protein, 9 aa, Artificial Sequence
  Description of Artificial Sequence: Synthetic peptide
  XENP019738 vhCDR3
QQDFSSPRT

SEQ ID NO: 23388 - protein, 5 aa, Artificial Sequence
  Description of Artificial Sequence: Synthetic peptide
  XENP019738 vlCDR1
NYWMN

SEQ ID NO: 23389 - protein, 19 aa, Artificial Sequence
  Description of Artificial Sequence: Synthetic peptide
  XENP019738 vlCDR2
EIRLYSNNYATHYAESVKG

SEQ ID NO: 23390 - protein, 11 aa, Artificial Sequence
  Description of Artificial Sequence: Synthetic peptide
  XENP019738 vlCDR3
YYGNYGGYFDV

SEQ ID NO: 23391 - protein, 215 aa, Artificial Sequence; identical to SEQ ID NO: 2924
  Description of Artificial Sequence: Synthetic polypeptide
  XENP019738 ipilimumab_H3L0-1G6_L1.210_H1.288 Light Chain

SEQ ID NO: 23392 - protein, 108 aa, Artificial Sequence; identical to SEQ ID NO: 23
  Description of Artificial Sequence: Synthetic polypeptide
  VL of XENP019738

SEQ ID NO: 23393 - protein, 12 aa, Artificial Sequence
  Description of Artificial Sequence: Synthetic peptide
  XENP019738 vlCDR1
RASQSVGSSYLA

SEQ ID NO: 23394 - protein, 7 aa, Artificial Sequence
  Description of Artificial Sequence: Synthetic peptide
  XENP019738 vlCDR2
GAFSRAT

SEQ ID NO: 23395 - protein, 9 aa, Artificial Sequence
  Description of Artificial Sequence: Synthetic peptide
  XENP019738 vlCDR3
QQYGSSPWT

SEQ ID NO: 23396 - protein, 447 aa, Artificial Sequence; identical to SEQ ID NO: 23356
  Description of Artificial Sequence: Synthetic polypeptide
  XENP019739 ipilimumab_H3L0-1G6_H1.279_L1.194 Fab-Fc Heavy Chain

SEQ ID NO: 23397 - protein, 118 aa, Artificial Sequence; identical to SEQ ID NO: 139
  Description of Artificial Sequence: Synthetic polypeptide
  VH of XENP019739

SEQ ID NO: 23398 - protein, 5 aa, Artificial Sequence
  Description of Artificial Sequence: Synthetic peptide
  XENP019739 vhCDR1
SYTMH

SEQ ID NO: 23399 - protein, 17 aa, Artificial Sequence
  Description of Artificial Sequence: Synthetic peptide
  XENP019739 vhCDR2
FISYDGNNKYYADSVKG

SEQ ID NO: 23400 - protein, 9 aa, Artificial Sequence
  Description of Artificial Sequence: Synthetic peptide
  XENP019739 vhCDR3
TGWLGPFDY

SEQ ID NO: 23401 - protein, 480 aa, Artificial Sequence
  Description of Artificial Sequence: Synthetic polypeptide
  XENP019739 ipilimumab_H3L0-1G6_H1.279_L1.194 scFv-Fc Heavy Chain
EVQLVESGGGLVKPGGSLRLSCVASGFTFSNYWMNWVRQAPGKGLEWVAEIRLYSNNYATHYAESVKGRFTISRDDSKSTLYLQMNNLKTEDTGVYYCTRYYGNYGGYFDVWGRGTLVTVSSGKPGSGKPGSGKPGSGKPGSEIVLTQSPATLSASPGERVTLTCRASQSVGNDVAWYQQKPGQAPRLLINYASHRYTGVPDRFTGSGYGTEFTLTISSVQSEDFGVYYCQQDFSSPRTFGGGTKVEIKEPKSSDKTHTCPPCPAPPVAGPSVFLFPPKPKDTLMISRTPEVTCVVVDVKHEDPEVKFNWYVDGVEVHNAKTKPREEQYNSTYRVVSVLTVLHQDWLNGKEYKCKVSNKALPAPIEKTISKAKGQPREPQVYTLPPSREQMTKNQVKLTCLVKGFYPSDIAVEWESNGQPENNYKTTPPVLDSDGSFFLYSKLTVDKSRWQQGNVFSCSVMHEALHNHYTQKSLSLSPGK

SEQ ID NO: 23402 - protein, 122 aa, Artificial Sequence; identical to SEQ ID NO: 10908
  Description of Artificial Sequence: Synthetic polypeptide
  VH of XENP019739

SEQ ID NO: 23403 - protein, 107 aa, Artificial Sequence; identical to SEQ ID NO: 10999
  Description of Artificial Sequence: Synthetic polypeptide
  VL of XENP019739

SEQ ID NO: 23404 - protein, 231 aa, Artificial Sequence; identical to SEQ ID NO: 21532
  Description of Artificial Sequence: Synthetic polypeptide
  Fc chain of XENP019739

SEQ ID NO: 23405 - protein, 5 aa, Artificial Sequence
  Description of Artificial Sequence: Synthetic peptide
  XENP019739 vhCDR1
NYWMN

SEQ ID NO: 23406 - protein, 19 aa, Artificial Sequence
  Description of Artificial Sequence: Synthetic peptide
  XENP019739 vhCDR2
EIRLYSNNYATHYAESVKG

SEQ ID NO: 23407 - protein, 11 aa, Artificial Sequence
  Description of Artificial Sequence: Synthetic peptide
  XENP019739 vhCDR3
YYGNYGGYFDV

SEQ ID NO: 23408 - protein, 11 aa, Artificial Sequence
  Description of Artificial Sequence: Synthetic peptide
  XENP019739 vlCDR1
RASQSVGNDVA

SEQ ID NO: 23409 - protein, 7 aa, Artificial Sequence
  Description of Artificial Sequence: Synthetic peptide
  XENP019739 vlCDR2
YASHRYT

SEQ ID NO: 23410 - protein, 9 aa, Artificial Sequence
  Description of Artificial Sequence: Synthetic peptide
  XENP019739 vlCDR3
QQDFSSPRT

SEQ ID NO: 23411 - protein, 215 aa, Artificial Sequence; identical to SEQ ID NO: 2924
  Description of Artificial Sequence: Synthetic polypeptide
  XENP019739 ipilimumab_H3L0-1G6_H1.279_L1.194 Light Chain

SEQ ID NO: 23412 - protein, 108 aa, Artificial Sequence; identical to SEQ ID NO: 23
  Description of Artificial Sequence: Synthetic polypeptide
  VL of XENP019739

SEQ ID NO: 23413 - protein, 12 aa, Artificial Sequence
  Description of Artificial Sequence: Synthetic peptide
  XENP019739 vlCDR1
RASQSVGSSYLA

SEQ ID NO: 23414 - protein, 7 aa, Artificial Sequence
  Description of Artificial Sequence: Synthetic peptide
  XENP019739 vlCDR2
GAFSRAT

SEQ ID NO: 23415 - protein, 9 aa, Artificial Sequence
  Description of Artificial Sequence: Synthetic peptide
  XENP019739 vlCDR3
QQYGSSPWT

SEQ ID NO: 23416 - protein, 447 aa, Artificial Sequence; identical to SEQ ID NO: 23356
  Description of Artificial Sequence: Synthetic polypeptide
  XENP019741 ipilimumab_H3L0-1G6_L1.194_H1.279 Fab-Fc Heavy Chain

SEQ ID NO: 23417 - protein, 118 aa, Artificial Sequence; identical to SEQ ID NO: 139
  Description of Artificial Sequence: Synthetic polypeptide
  VH of XENP019741

SEQ ID NO: 23418 - protein, 5 aa, Artificial Sequence
  Description of Artificial Sequence: Synthetic peptide
  XENP019741 vhCDR1
SYTMH

SEQ ID NO: 23419 - protein, 17 aa, Artificial Sequence
  Description of Artificial Sequence: Synthetic peptide
  XENP019741 vhCDR2
FISYDGNNKYYADSVKG

SEQ ID NO: 23420 - protein, 9 aa, Artificial Sequence
  Description of Artificial Sequence: Synthetic peptide
  XENP019741 vhCDR3
TGWLGPFDY

SEQ ID NO: 23421 - protein, 480 aa, Artificial Sequence; identical to SEQ ID NO: 23221
  Description of Artificial Sequence: Synthetic polypeptide
  XENP019741 ipilimumab_H3L0-1G6_L1.194_H1.279 scFv-Fc Heavy Chain

SEQ ID NO: 23422 - protein, 107 aa, Artificial Sequence; identical to SEQ ID NO: 10999
  Description of Artificial Sequence: Synthetic polypeptide
  VH of XENP019741

SEQ ID NO: 23423 - protein, 122 aa, Artificial Sequence; identical to SEQ ID NO: 10908
  Description of Artificial Sequence: Synthetic polypeptide
  VL of XENP019741

SEQ ID NO: 23424 - protein, 231 aa, Artificial Sequence; identical to SEQ ID NO: 21532
  Description of Artificial Sequence: Synthetic polypeptide
  Fc chain of XENP019741

SEQ ID NO: 23425 - protein, 11 aa, Artificial Sequence
  Description of Artificial Sequence: Synthetic peptide
  XENP019741 vhCDR1
RASQSVGNDVA

SEQ ID NO: 23426 - protein, 7 aa, Artificial Sequence
  Description of Artificial Sequence: Synthetic peptide
  XENP019741 vhCDR2
YASHRYT

SEQ ID NO: 23427 - protein, 9 aa, Artificial Sequence
  Description of Artificial Sequence: Synthetic peptide
  XENP019741 vhCDR3
QQDFSSPRT

SEQ ID NO: 23428 - protein, 5 aa, Artificial Sequence
  Description of Artificial Sequence: Synthetic peptide
  XENP019741 vlCDR1
NYWMN

SEQ ID NO: 23429 - protein, 19 aa, Artificial Sequence
  Description of Artificial Sequence: Synthetic peptide
  XENP019741 vlCDR2
EIRLYSNNYATHYAESVKG

SEQ ID NO: 23430 - protein, 11 aa, Artificial Sequence
  Description of Artificial Sequence: Synthetic peptide
  XENP019741 vlCDR3
YYGNYGGYFDV

SEQ ID NO: 23431 - protein, 215 aa, Artificial Sequence; identical to SEQ ID NO: 2924
  Description of Artificial Sequence: Synthetic polypeptide
  XENP019741 ipilimumab_H3L0-1G6_L1.194_H1.279 Light Chain

SEQ ID NO: 23432 - protein, 108 aa, Artificial Sequence; identical to SEQ ID NO: 23
  Description of Artificial Sequence: Synthetic polypeptide
  VL of XENP019741

SEQ ID NO: 23433 - protein, 12 aa, Artificial Sequence
  Description of Artificial Sequence: Synthetic peptide
  XENP019741 vlCDR1
RASQSVGSSYLA

SEQ ID NO: 23434 - protein, 7 aa, Artificial Sequence
  Description of Artificial Sequence: Synthetic peptide
  XENP019741 vlCDR2
GAFSRAT

SEQ ID NO: 23435 - protein, 9 aa, Artificial Sequence
  Description of Artificial Sequence: Synthetic peptide
  XENP019741 vlCDR3
QQYGSSPWT

SEQ ID NO: 23436 - protein, 447 aa, Artificial Sequence; identical to SEQ ID NO: 23356
  Description of Artificial Sequence: Synthetic polypeptide
  XENP020053 ipilimumab_H3L0.22-1G6_L1.194_H1.279 Fab-Fc Heavy Chain

SEQ ID NO: 23437 - protein, 118 aa, Artificial Sequence; identical to SEQ ID NO: 139
  Description of Artificial Sequence: Synthetic polypeptide
  VH of XENP020053

SEQ ID NO: 23438 - protein, 5 aa, Artificial Sequence
  Description of Artificial Sequence: Synthetic peptide
  XENP020053 vhCDR1
SYTMH

SEQ ID NO: 23439 - protein, 17 aa, Artificial Sequence
  Description of Artificial Sequence: Synthetic peptide
  XENP020053 vhCDR2
FISYDGNNKYYADSVKG

SEQ ID NO: 23440 - protein, 9 aa, Artificial Sequence
  Description of Artificial Sequence: Synthetic peptide
  XENP020053 vhCDR3
TGWLGPFDY

SEQ ID NO: 23441 - protein, 480 aa, Artificial Sequence; identical to SEQ ID NO: 23221
  Description of Artificial Sequence: Synthetic polypeptide
  XENP020053 ipilimumab_H3L0.22-1G6_L1.194_H1.279 scFv-Fc Heavy Chain

SEQ ID NO: 23442 - protein, 107 aa, Artificial Sequence; identical to SEQ ID NO: 10999
  Description of Artificial Sequence: Synthetic polypeptide
  VH of XENP020053

SEQ ID NO: 23443 - protein, 122 aa, Artificial Sequence; identical to SEQ ID NO: 10908
  Description of Artificial Sequence: Synthetic polypeptide
  VL of XENP020053

SEQ ID NO: 23444 - protein, 231 aa, Artificial Sequence; identical to SEQ ID NO: 21532
  Description of Artificial Sequence: Synthetic polypeptide
  Fc chain of XENP020053

SEQ ID NO: 23445 - protein, 11 aa, Artificial Sequence
  Description of Artificial Sequence: Synthetic peptide
  XENP020053 vhCDR1
RASQSVGNDVA

SEQ ID NO: 23446 - protein, 7 aa, Artificial Sequence
  Description of Artificial Sequence: Synthetic peptide
  XENP020053 vhCDR2
YASHRYT

SEQ ID NO: 23447 - protein, 9 aa, Artificial Sequence
  Description of Artificial Sequence: Synthetic peptide
  XENP020053 vhCDR3
QQDFSSPRT

SEQ ID NO: 23448 - protein, 5 aa, Artificial Sequence
  Description of Artificial Sequence: Synthetic peptide
  XENP020053 vlCDR1
NYWMN

SEQ ID NO: 23449 - protein, 19 aa, Artificial Sequence
  Description of Artificial Sequence: Synthetic peptide
  XENP020053 vlCDR2
EIRLYSNNYATHYAESVKG

SEQ ID NO: 23450 - protein, 11 aa, Artificial Sequence
  Description of Artificial Sequence: Synthetic peptide
  XENP020053 vlCDR3
YYGNYGGYFDV

SEQ ID NO: 23451 - protein, 215 aa, Artificial Sequence; identical to SEQ ID NO: 4504
  Description of Artificial Sequence: Synthetic polypeptide
  XENP020053 ipilimumab_H3L0.22-1G6_L1.194_H1.279 Light Chain

SEQ ID NO: 23452 - protein, 108 aa, Artificial Sequence; identical to SEQ ID NO: 1607
  Description of Artificial Sequence: Synthetic polypeptide
  VL of XENP020053

SEQ ID NO: 23453 - protein, 12 aa, Artificial Sequence
  Description of Artificial Sequence: Synthetic peptide
  XENP020053 vlCDR1
RASQSVSSSYLA

SEQ ID NO: 23454 - protein, 7 aa, Artificial Sequence
  Description of Artificial Sequence: Synthetic peptide
  XENP020053 vlCDR2
GAFSRAT

SEQ ID NO: 23455 - protein, 9 aa, Artificial Sequence
  Description of Artificial Sequence: Synthetic peptide
  XENP020053 vlCDR3
QQYGSSPWT

SEQ ID NO: 23456 - protein, 447 aa, Artificial Sequence; identical to SEQ ID NO: 23356
  Description of Artificial Sequence: Synthetic polypeptide
  XENP020066 ipilimumab_H3_L0.22-1G6_H1.279_L1.194 Fab-Fc Heavy Chain

SEQ ID NO: 23457 - protein, 118 aa, Artificial Sequence; identical to SEQ ID NO: 139
  Description of Artificial Sequence: Synthetic polypeptide
  VH of XENP020066

SEQ ID NO: 23458 - protein, 5 aa, Artificial Sequence
  Description of Artificial Sequence: Synthetic peptide
  XENP020066 vhCDR1
SYTMH

SEQ ID NO: 23459 - protein, 17 aa, Artificial Sequence
  Description of Artificial Sequence: Synthetic peptide
  XENP020066 vhCDR2
FISYDGNNKYYADSVKG

SEQ ID NO: 23460 - protein, 9 aa, Artificial Sequence
  Description of Artificial Sequence: Synthetic peptide
  XENP020066 vhCDR3
TGWLGPFDY

SEQ ID NO: 23461 - protein, 480 aa, Artificial Sequence; identical to SEQ ID NO: 23401
  Description of Artificial Sequence: Synthetic polypeptide
  XENP020066 ipilimumab_H3_L0.22-1G6_H1.279_L1.194 scFv-Fc Heavy Chain

SEQ ID NO: 23462 - protein, 122 aa, Artificial Sequence; identical to SEQ ID NO: 10908
  Description of Artificial Sequence: Synthetic polypeptide
  VH of XENP020066

SEQ ID NO: 23463 - protein, 107 aa, Artificial Sequence; identical to SEQ ID NO: 10999
  Description of Artificial Sequence: Synthetic polypeptide
  VL of XENP020066

SEQ ID NO: 23464 - protein, 231 aa, Artificial Sequence; identical to SEQ ID NO: 21532
  Description of Artificial Sequence: Synthetic polypeptide
  Fc chain of XENP020066

SEQ ID NO: 23465 - protein, 5 aa, Artificial Sequence
  Description of Artificial Sequence: Synthetic peptide
  XENP020066 vhCDR1
NYWMN

SEQ ID NO: 23466 - protein, 19 aa, Artificial Sequence
  Description of Artificial Sequence: Synthetic peptide
  XENP020066 vhCDR2
EIRLYSNNYATHYAESVKG

SEQ ID NO: 23467 - protein, 11 aa, Artificial Sequence
  Description of Artificial Sequence: Synthetic peptide
  XENP020066 vhCDR3
YYGNYGGYFDV

SEQ ID NO: 23468 - protein, 11 aa, Artificial Sequence
  Description of Artificial Sequence: Synthetic peptide
  XENP020066 vlCDR1
RASQSVGNDVA

SEQ ID NO: 23469 - protein, 7 aa, Artificial Sequence
  Description of Artificial Sequence: Synthetic peptide
  XENP020066 vlCDR2
YASHRYT

SEQ ID NO: 23470 - protein, 9 aa, Artificial Sequence
  Description of Artificial Sequence: Synthetic peptide
  XENP020066 vlCDR3
QQDFSSPRT

SEQ ID NO: 23471 - protein, 215 aa, Artificial Sequence; identical to SEQ ID NO: 4504
  Description of Artificial Sequence: Synthetic polypeptide
  XENP020066 ipilimumab_H3_L0.22-1G6_H1.279_L1.194 Light Chain

SEQ ID NO: 23472 - protein, 108 aa, Artificial Sequence; identical to SEQ ID NO: 1607
  Description of Artificial Sequence: Synthetic polypeptide
  VL of XENP020066

SEQ ID NO: 23473 - protein, 12 aa, Artificial Sequence
  Description of Artificial Sequence: Synthetic peptide
  XENP020066 vlCDR1
RASQSVSSSYLA

SEQ ID NO: 23474 - protein, 7 aa, Artificial Sequence
  Description of Artificial Sequence: Synthetic peptide
  XENP020066 vlCDR2
GAFSRAT

SEQ ID NO: 23475 - protein, 9 aa, Artificial Sequence
  Description of Artificial Sequence: Synthetic peptide
  XENP020066 vlCDR3
QQYGSSPWT

SEQ ID NO: 23476 - protein, 447 aa, Artificial Sequence; identical to SEQ ID NO: 23356
  Description of Artificial Sequence: Synthetic polypeptide
  XENP020130 ipilimumab_H3_L0.22-1G6_L1.210_H1.288 Fab-Fc Heavy Chain

SEQ ID NO: 23477 - protein, 118 aa, Artificial Sequence; identical to SEQ ID NO: 139
  Description of Artificial Sequence: Synthetic polypeptide
  VH of XENP020130

SEQ ID NO: 23478 - protein, 5 aa, Artificial Sequence
  Description of Artificial Sequence: Synthetic peptide
  XENP020130 vhCDR1
SYTMH

SEQ ID NO: 23479 - protein, 17 aa, Artificial Sequence
  Description of Artificial Sequence: Synthetic peptide
  XENP020130 vhCDR2
FISYDGNNKYYADSVKG

SEQ ID NO: 23480 - protein, 9 aa, Artificial Sequence
  Description of Artificial Sequence: Synthetic peptide
  XENP020130 vhCDR3
TGWLGPFDY

SEQ ID NO: 23481 - protein, 480 aa, Artificial Sequence; identical to SEQ ID NO: 23381
  Description of Artificial Sequence: Synthetic polypeptide
  XENP020130 ipilimumab_H3_L0.22-1G6_L1.210_H1.288 scFv-Fc Heavy Chain

SEQ ID NO: 23482 - protein, 107 aa, Artificial Sequence; identical to SEQ ID NO: 11359
  Description of Artificial Sequence: Synthetic polypeptide
  VH of XENP020130

SEQ ID NO: 23483 - protein, 122 aa, Artificial Sequence; identical to SEQ ID NO: 11358
  Description of Artificial Sequence: Synthetic polypeptide
  VL of XENP020130

SEQ ID NO: 23484 - protein, 231 aa, Artificial Sequence; identical to SEQ ID NO: 21532
  Description of Artificial Sequence: Synthetic polypeptide
  Fc chain of XENP020130

SEQ ID NO: 23485 - protein, 11 aa, Artificial Sequence
  Description of Artificial Sequence: Synthetic peptide
  XENP020130 vhCDR1
RASQSVGNDVA

SEQ ID NO: 23486 - protein, 7 aa, Artificial Sequence
  Description of Artificial Sequence: Synthetic peptide
  XENP020130 vhCDR2
YASHRYT

SEQ ID NO: 23487 - protein, 9 aa, Artificial Sequence
  Description of Artificial Sequence: Synthetic peptide
  XENP020130 vhCDR3
QQDFSSPRT

SEQ ID NO: 23488 - protein, 5 aa, Artificial Sequence
  Description of Artificial Sequence: Synthetic peptide
  XENP020130 vlCDR1
NYWMN

SEQ ID NO: 23489 - protein, 19 aa, Artificial Sequence
  Description of Artificial Sequence: Synthetic peptide
  XENP020130 vlCDR2
EIRLYSNNYATHYAESVKG

SEQ ID NO: 23490 - protein, 11 aa, Artificial Sequence
  Description of Artificial Sequence: Synthetic peptide
  XENP020130 vlCDR3
YYGNYGGYFDV

SEQ ID NO: 23491 - protein, 215 aa, Artificial Sequence; identical to SEQ ID NO: 4504
  Description of Artificial Sequence: Synthetic polypeptide
  XENP020130 ipilimumab_H3_L0.22-1G6_L1.210_H1.288 Light Chain

SEQ ID NO: 23492 - protein, 108 aa, Artificial Sequence; identical to SEQ ID NO: 1607
  Description of Artificial Sequence: Synthetic polypeptide
  VL of XENP020130

SEQ ID NO: 23493 - protein, 12 aa, Artificial Sequence
  Description of Artificial Sequence: Synthetic peptide
  XENP020130 vlCDR1
RASQSVSSSYLA

SEQ ID NO: 23494 - protein, 7 aa, Artificial Sequence
  Description of Artificial Sequence: Synthetic peptide
  XENP020130 vlCDR2
GAFSRAT

SEQ ID NO: 23495 - protein, 9 aa, Artificial Sequence
  Description of Artificial Sequence: Synthetic peptide
  XENP020130 vlCDR3
QQYGSSPWT

SEQ ID NO: 23496 - protein, 447 aa, Artificial Sequence; identical to SEQ ID NO: 23356
  Description of Artificial Sequence: Synthetic polypeptide
  XENP020146 ipilimumab_H3_L0.22-1G6_H1.280_L1.224 Fab-Fc Heavy Chain

SEQ ID NO: 23497 - protein, 118 aa, Artificial Sequence; identical to SEQ ID NO: 139
  Description of Artificial Sequence: Synthetic polypeptide
  VH of XENP020146

SEQ ID NO: 23498 - protein, 5 aa, Artificial Sequence
  Description of Artificial Sequence: Synthetic peptide
  XENP020146 vhCDR1
SYTMH

SEQ ID NO: 23499 - protein, 17 aa, Artificial Sequence
  Description of Artificial Sequence: Synthetic peptide
  XENP020146 vhCDR2
FISYDGNNKYYADSVKG

SEQ ID NO: 23500 - protein, 9 aa, Artificial Sequence
  Description of Artificial Sequence: Synthetic peptide
  XENP020146 vhCDR3
TGWLGPFDY

SEQ ID NO: 23501 - protein, 480 aa, Artificial Sequence; identical to SEQ ID NO: 22809
  Description of Artificial Sequence: Synthetic polypeptide
  XENP020146 ipilimumab_H3_L0.22-1G6_H1.280_L1.224 scFv-Fc Heavy Chain

SEQ ID NO: 23502 - protein, 122 aa, Artificial Sequence; identical to SEQ ID NO: 10917
  Description of Artificial Sequence: Synthetic polypeptide
  VH of XENP020146

SEQ ID NO: 23503 - protein, 107 aa, Artificial Sequence; identical to SEQ ID NO: 22811
  Description of Artificial Sequence: Synthetic polypeptide
  VL of XENP020146

SEQ ID NO: 23504 - protein, 231 aa, Artificial Sequence; identical to SEQ ID NO: 21532
  Description of Artificial Sequence: Synthetic polypeptide
  Fc chain of XENP020146

SEQ ID NO: 23505 - protein, 5 aa, Artificial Sequence
  Description of Artificial Sequence: Synthetic peptide
  XENP020146 vhCDR1
NYWMN

SEQ ID NO: 23506 - protein, 19 aa, Artificial Sequence
  Description of Artificial Sequence: Synthetic peptide
  XENP020146 vhCDR2
EIRLYSNNYATHYAESVKG

SEQ ID NO: 23507 - protein, 11 aa, Artificial Sequence
  Description of Artificial Sequence: Synthetic peptide
  XENP020146 vhCDR3
YYGNYGGYFDV

SEQ ID NO: 23508 - protein, 11 aa, Artificial Sequence
  Description of Artificial Sequence: Synthetic peptide
  XENP020146 vlCDR1
RASQSVGNDVA

SEQ ID NO: 23509 - protein, 7 aa, Artificial Sequence
  Description of Artificial Sequence: Synthetic peptide
  XENP020146 vlCDR2
YASHRYT

SEQ ID NO: 23510 - protein, 9 aa, Artificial Sequence
  Description of Artificial Sequence: Synthetic peptide
  XENP020146 vlCDR3
QQDWSSPRT

SEQ ID NO: 23511 - protein, 215 aa, Artificial Sequence; identical to SEQ ID NO: 4504
  Description of Artificial Sequence: Synthetic polypeptide
  XENP020146 ipilimumab_H3_L0.22-1G6_H1.280_L1.224 Light Chain

SEQ ID NO: 23512 - protein, 108 aa, Artificial Sequence; identical to SEQ ID NO: 1607
  Description of Artificial Sequence: Synthetic polypeptide
  VL of XENP020146

SEQ ID NO: 23513 - protein, 12 aa, Artificial Sequence
  Description of Artificial Sequence: Synthetic peptide
  XENP020146 vlCDR1
RASQSVSSSYLA

SEQ ID NO: 23514 - protein, 7 aa, Artificial Sequence
  Description of Artificial Sequence: Synthetic peptide
  XENP020146 vlCDR2
GAFSRAT

SEQ ID NO: 23515 - protein, 9 aa, Artificial Sequence
  Description of Artificial Sequence: Synthetic peptide
  XENP020146 vlCDR3
QQYGSSPWT

SEQ ID NO: 23516 - protein, 451 aa, Artificial Sequence
  Description of Artificial Sequence: Synthetic polypeptide
  XENP020155 1G6_H1.278_L1.188-ipilimumab_H3.4_L0.12 Fab-Fc Heavy Chain
EVQLVESGGGLVKPGGSLRLSCVASGFTFSNYWMNWVRQAPGKGLEWVAEIRLYSNNYATHYAESVKGRFTISRDDSKSTLYLQMNNLKTEDTGVYYCTRYYGNYGGYFDVWGQGTLVTVSSASTKGPSVFPLAPSSKSTSGGTAALGCLVKDYFPEPVTVSWNSGALTSGVHTFPAVLQSSGLYSLSSVVTVPSSSLGTQTYICNVNHKPSDTKVDKKVEPKSCDKTHTCPPCPAPPVAGPSVFLFPPKPKDTLMISRTPEVTCVVVDVKHEDPEVKFNWYVDGVEVHNAKTKPREEEYNSTYRVVSVLTVLHQDWLNGKEYKCKVSNKALPAPIEKTISKAKGQPREPQVYTLPPSREEMTKNQVSLTCDVSGFYPSDIAVEWESDGQPENNYKTTPPVLDSDGSFFLYSKLTVDKSRWEQGDVFSCSVMHEALHNHYTQKSLSLSPGK

SEQ ID NO: 23517 - protein, 122 aa, Artificial Sequence; identical to SEQ ID NO: 10845
  Description of Artificial Sequence: Synthetic polypeptide
  VH of XENP020155

SEQ ID NO: 23518 - protein, 5 aa, Artificial Sequence
  Description of Artificial Sequence: Synthetic peptide
  XENP020155 vhCDR1
NYWMN

SEQ ID NO: 23519 - protein, 19 aa, Artificial Sequence
  Description of Artificial Sequence: Synthetic peptide
  XENP020155 vhCDR2
EIRLYSNNYATHYAESVKG

SEQ ID NO: 23520 - protein, 11 aa, Artificial Sequence
  Description of Artificial Sequence: Synthetic peptide
  XENP020155 vhCDR3
YYGNYGGYFDV

SEQ ID NO: 23521 - protein, 477 aa, Artificial Sequence; identical to SEQ ID NO: 21549
  Description of Artificial Sequence: Synthetic polypeptide
  XENP020155 1G6_H1.278_L1.188-ipilimumab_H3.4_L0.12 scFv-Fc Heavy Chain

SEQ ID NO: 23522 - protein, 118 aa, Artificial Sequence; identical to SEQ ID NO: 2461
  Description of Artificial Sequence: Synthetic polypeptide
  VH of XENP020155

SEQ ID NO: 23523 - protein, 108 aa, Artificial Sequence; identical to SEQ ID NO: 1517
  Description of Artificial Sequence: Synthetic polypeptide
  VL of XENP020155

SEQ ID NO: 23524 - protein, 231 aa, Artificial Sequence; identical to SEQ ID NO: 21532
  Description of Artificial Sequence: Synthetic polypeptide
  Fc chain of XENP020155

SEQ ID NO: 23525 - protein, 5 aa, Artificial Sequence
  Description of Artificial Sequence: Synthetic peptide
  XENP020155 vhCDR1
SYTMH

SEQ ID NO: 23526 - protein, 17 aa, Artificial Sequence
  Description of Artificial Sequence: Synthetic peptide
  XENP020155 vhCDR2
FISYDGNHKYYADSVKG

SEQ ID NO: 23527 - protein, 9 aa, Artificial Sequence
  Description of Artificial Sequence: Synthetic peptide
  XENP020155 vhCDR3
TGHLGPFDL

SEQ ID NO: 23528 - protein, 12 aa, Artificial Sequence
  Description of Artificial Sequence: Synthetic peptide
  XENP020155 vlCDR1
RASQSVGSSYLA

SEQ ID NO: 23529 - protein, 7 aa, Artificial Sequence
  Description of Artificial Sequence: Synthetic peptide
  XENP020155 vlCDR2
GAFSRAT

SEQ ID NO: 23530 - protein, 9 aa, Artificial Sequence
  Description of Artificial Sequence: Synthetic peptide
  XENP020155 vlCDR3
QQYGSSPWT

SEQ ID NO: 23531 - protein, 214 aa, Artificial Sequence; identical to SEQ ID NO: 16660
  Description of Artificial Sequence: Synthetic polypeptide
  XENP020155 1G6_H1.278_L1.188-ipilimumab_H3.4_L0.12 Light Chain

SEQ ID NO: 23532 - protein, 107 aa, Artificial Sequence; identical to SEQ ID NO: 10855
  Description of Artificial Sequence: Synthetic polypeptide
  VL of XENP020155

SEQ ID NO: 23533 - protein, 11 aa, Artificial Sequence
  Description of Artificial Sequence: Synthetic peptide
  XENP020155 vlCDR1
RASQSVGNDVA

SEQ ID NO: 23534 - protein, 7 aa, Artificial Sequence
  Description of Artificial Sequence: Synthetic peptide
  XENP020155 vlCDR2
YASHRYT

SEQ ID NO: 23535 - protein, 9 aa, Artificial Sequence
  Description of Artificial Sequence: Synthetic peptide
  XENP020155 vlCDR3
QQDFSSPRT

SEQ ID NO: 23536 - protein, 447 aa, Artificial Sequence; identical to SEQ ID NO: 23356
  Description of Artificial Sequence: Synthetic polypeptide
  XENP020264 ipilimumab_H3_L0-1G6_H1.280_L1.224 Fab-Fc Heavy Chain

SEQ ID NO: 23537 - protein, 118 aa, Artificial Sequence; identical to SEQ ID NO: 139
  Description of Artificial Sequence: Synthetic polypeptide
  VH of XENP020264

SEQ ID NO: 23538 - protein, 5 aa, Artificial Sequence
  Description of Artificial Sequence: Synthetic peptide
  XENP020264 vhCDR1
SYTMH

SEQ ID NO: 23539 - protein, 17 aa, Artificial Sequence
  Description of Artificial Sequence: Synthetic peptide
  XENP020264 vhCDR2
FISYDGNNKYYADSVKG

SEQ ID NO: 23540 - protein, 9 aa, Artificial Sequence
  Description of Artificial Sequence: Synthetic peptide
  XENP020264 vhCDR3
TGWLGPFDY

SEQ ID NO: 23541 - protein, 480 aa, Artificial Sequence; identical to SEQ ID NO: 22809
  Description of Artificial Sequence: Synthetic polypeptide
  XENP020264 ipilimumab_H3_L0-1G6_H1.280_L1.224 scFv-Fc Heavy Chain

SEQ ID NO: 23542 - protein, 122 aa, Artificial Sequence; identical to SEQ ID NO: 10917
  Description of Artificial Sequence: Synthetic polypeptide
  VH of XENP020264

SEQ ID NO: 23543 - protein, 107 aa, Artificial Sequence; identical to SEQ ID NO: 22811
  Description of Artificial Sequence: Synthetic polypeptide
  VL of XENP020264

SEQ ID NO: 23544 - protein, 231 aa, Artificial Sequence; identical to SEQ ID NO: 21532
  Description of Artificial Sequence: Synthetic polypeptide
  Fc chain of XENP020264

SEQ ID NO: 23545 - protein, 5 aa, Artificial Sequence
  Description of Artificial Sequence: Synthetic peptide
  XENP020264 vhCDR1
NYWMN

SEQ ID NO: 23546 - protein, 19 aa, Artificial Sequence
  Description of Artificial Sequence: Synthetic peptide
  XENP020264 vhCDR2
EIRLYSNNYATHYAESVKG

SEQ ID NO: 23547 - protein, 11 aa, Artificial Sequence
  Description of Artificial Sequence: Synthetic peptide
  XENP020264 vhCDR3
YYGNYGGYFDV

SEQ ID NO: 23548 - protein, 11 aa, Artificial Sequence
  Description of Artificial Sequence: Synthetic peptide
  XENP020264 vlCDR1
RASQSVGNDVA

SEQ ID NO: 23549 - protein, 7 aa, Artificial Sequence
  Description of Artificial Sequence: Synthetic peptide
  XENP020264 vlCDR2
YASHRYT

SEQ ID NO: 23550 - protein, 9 aa, Artificial Sequence
  Description of Artificial Sequence: Synthetic peptide
  XENP020264 vlCDR3
QQDWSSPRT

SEQ ID NO: 23551 - protein, 215 aa, Artificial Sequence; identical to SEQ ID NO: 2924
  Description of Artificial Sequence: Synthetic polypeptide
  XENP020264 ipilimumab_H3_L0-1G6_H1.280_L1.224 Light Chain

SEQ ID NO: 23552 - protein, 108 aa, Artificial Sequence; identical to SEQ ID NO: 23
  Description of Artificial Sequence: Synthetic polypeptide
  VL of XENP020264

SEQ ID NO: 23553 - protein, 12 aa, Artificial Sequence
  Description of Artificial Sequence: Synthetic peptide
  XENP020264 vlCDR1
RASQSVGSSYLA

SEQ ID NO: 23554 - protein, 7 aa, Artificial Sequence
  Description of Artificial Sequence: Synthetic peptide
  XENP020264 vlCDR2
GAFSRAT

SEQ ID NO: 23555 - protein, 9 aa, Artificial Sequence
  Description of Artificial Sequence: Synthetic peptide
  XENP020264 vlCDR3
QQYGSSPWT

SEQ ID NO: 23556 - protein, 447 aa, Artificial Sequence
  Description of Artificial Sequence: Synthetic polypeptide
  XENP020716 ipilimumab_H3_L0.22-1G6_L1.210_H1.288 M428L/N434S Fab-Fc Heavy Chain
EVQLVESGGGLVKPGGSLRLSCAASGFTFSSYTMHWVRQAPGKGLEWVSFISYDGNNKYYADSVKGRFTISRDNAKNSLYLQMNSLRAEDTAVYYCARTGWLGPFDYWGQGTLVTVSSASTKGPSVFPLAPSSKSTSGGTAALGCLVKDYFPEPVTVSWNSGALTSGVHTFPAVLQSSGLYSLSSVVTVPSSSLGTQTYICNVNHKPSDTKVDKKVEPKSCDKTHTCPPCPAPPVAGPSVFLFPPKPKDTLMISRTPEVTCVVVDVKHEDPEVKFNWYVDGVEVHNAKTKPREEEYNSTYRVVSVLTVLHQDWLNGKEYKCKVSNKALPAPIEKTISKAKGQPREPQVYTLPPSREEMTKNQVSLTCDVSGFYPSDIAVEWESDGQPENNYKTTPPVLDSDGSFFLYSKLTVDKSRWEQGDVFSCSVLHEALHSHYTQKSLSLSPGK

SEQ ID NO: 23557 - protein, 118 aa, Artificial Sequence; identical to SEQ ID NO: 139
  Description of Artificial Sequence: Synthetic polypeptide
  VH of XENP020716

SEQ ID NO: 23558 - protein, 5 aa, Artificial Sequence
  Description of Artificial Sequence: Synthetic peptide
  XENP020716 vhCDR1
SYTMH

SEQ ID NO: 23559 - protein, 17 aa, Artificial Sequence
  Description of Artificial Sequence: Synthetic peptide
  XENP020716 vhCDR2
FISYDGNNKYYADSVKG

SEQ ID NO: 23560 - protein, 9 aa, Artificial Sequence
  Description of Artificial Sequence: Synthetic peptide
  XENP020716 vhCDR3
TGWLGPFDY

SEQ ID NO: 23561 - protein, 480 aa, Artificial Sequence
  Description of Artificial Sequence: Synthetic polypeptide
  XENP020716 ipilimumab_H3_L0.22-1G6_L1.210_H1.288 M428L/N434S scFv-Fc Heavy Chain
EIVLTQSPATLSASPGERVTLTCRASQSVGNDVAWYQQKPGQAPRLLINYASHRYTGVPDRFTGSGYGTEFTLTISSVQSEDFGVYYCQQDFSSPRTFGCGTKVEIKGKPGSGKPGSGKPGSGKPGSEVQLVESGGGLVKPGGSLRLSCVASGFTFSNYWMNWVRQAPGKCLEWVAEIRLYSNNYATHYAESVKGRFTISRDDSKSTLYLQMNNLKTEDTGVYYCTRYYGNYGGYFDVWGRGTLVTVSSEPKSSDKTHTCPPCPAPPVAGPSVFLFPPKPKDTLMISRTPEVTCVVVDVKHEDPEVKFNWYVDGVEVHNAKTKPREEQYNSTYRVVSVLTVLHQDWLNGKEYKCKVSNKALPAPIEKTISKAKGQPREPQVYTLPPSREQMTKNQVKLTCLVKGFYPSDIAVEWESNGQPENNYKTTPPVLDSDGSFFLYSKLTVDKSRWQQGNVFSCSVLHEALHSHYTQKSLSLSPGK

SEQ ID NO: 23562 - protein, 107 aa, Artificial Sequence; identical to SEQ ID NO: 11359
  Description of Artificial Sequence: Synthetic polypeptide
  VH of XENP020716

SEQ ID NO: 23563 - protein, 122 aa, Artificial Sequence; identical to SEQ ID NO: 11358
  Description of Artificial Sequence: Synthetic polypeptide
  VL of XENP020716

SEQ ID NO: 23564 - protein, 231 aa, Artificial Sequence; identical to SEQ ID NO: 21572
  Description of Artificial Sequence: Synthetic polypeptide
  Fc chain of XENP020716

SEQ ID NO: 23565 - protein, 11 aa, Artificial Sequence
  Description of Artificial Sequence: Synthetic peptide
  XENP020716 vhCDR1
RASQSVGNDVA

SEQ ID NO: 23566 - protein, 7 aa, Artificial Sequence
  Description of Artificial Sequence: Synthetic peptide
  XENP020716 vhCDR2
YASHRYT

SEQ ID NO: 23567 - protein, 9 aa, Artificial Sequence
  Description of Artificial Sequence: Synthetic peptide
  XENP020716 vhCDR3
QQDFSSPRT

SEQ ID NO: 23568 - protein, 5 aa, Artificial Sequence
  Description of Artificial Sequence: Synthetic peptide
  XENP020716 vlCDR1
NYWMN

SEQ ID NO: 23569 - protein, 19 aa, Artificial Sequence
  Description of Artificial Sequence: Synthetic peptide
  XENP020716 vlCDR2
EIRLYSNNYATHYAESVKG

SEQ ID NO: 23570 - protein, 11 aa, Artificial Sequence
  Description of Artificial Sequence: Synthetic peptide
  XENP020716 vlCDR3
YYGNYGGYFDV

SEQ ID NO: 23571 - protein, 215 aa, Artificial Sequence; identical to SEQ ID NO: 4504
  Description of Artificial Sequence: Synthetic polypeptide
  XENP020716 ipilimumab_H3_L0.22-1G6_L1.210_H1.288 M428L/N434S Light Chain

SEQ ID NO: 23572 - protein, 108 aa, Artificial Sequence; identical to SEQ ID NO: 1607
  Description of Artificial Sequence: Synthetic polypeptide
  VL of XENP020716

SEQ ID NO: 23573 - protein, 12 aa, Artificial Sequence
  Description of Artificial Sequence: Synthetic peptide
  XENP020716 vlCDR1
RASQSVSSSYLA

SEQ ID NO: 23574 - protein, 7 aa, Artificial Sequence
  Description of Artificial Sequence: Synthetic peptide
  XENP020716 vlCDR2
GAFSRAT

SEQ ID NO: 23575 - protein, 9 aa, Artificial Sequence
  Description of Artificial Sequence: Synthetic peptide
  XENP020716 vlCDR3
QQYGSSPWT

SEQ ID NO: 23576 - protein, 447 aa, Artificial Sequence; identical to SEQ ID NO: 23556
  Description of Artificial Sequence: Synthetic polypeptide
  XENP020717 ipilimumab_H3_L0.22-1G6_L1.194_H1.279 M428L/N434S Fab-Fc Heavy Chain

SEQ ID NO: 23577 - protein, 118 aa, Artificial Sequence; identical to SEQ ID NO: 139
  Description of Artificial Sequence: Synthetic polypeptide
  VH of XENP020717

SEQ ID NO: 23578 - protein, 5 aa, Artificial Sequence
  Description of Artificial Sequence: Synthetic peptide
  XENP020717 vhCDR1
SYTMH

SEQ ID NO: 23579 - protein, 17 aa, Artificial Sequence
  Description of Artificial Sequence: Synthetic peptide
  XENP020717 vhCDR2
FISYDGNNKYYADSVKG

SEQ ID NO: 23580 - protein, 9 aa, Artificial Sequence
  Description of Artificial Sequence: Synthetic peptide
  XENP020717 vhCDR3
TGWLGPFDY

SEQ ID NO: 23581 - protein, 480 aa, Artificial Sequence
  Description of Artificial Sequence: Synthetic polypeptide
  XENP020717 ipilimumab_H3_L0.22-1G6_L1.194_H1.279 M428L/N434S scFv-Fc Heavy Chain
EIVLTQSPATLSASPGERVTLTCRASQSVGNDVAWYQQKPGQAPRLLINYASHRYTGVPDRFTGSGYGTEFTLTISSVQSEDFGVYYCQQDFSSPRTFGGGTKVEIKGKPGSGKPGSGKPGSGKPGSEVQLVESGGGLVKPGGSLRLSCVASGFTFSNYWMNWVRQAPGKGLEWVAEIRLYSNNYATHYAESVKGRFTISRDDSKSTLYLQMNNLKTEDTGVYYCTRYYGNYGGYFDVWGRGTLVTVSSEPKSSDKTHTCPPCPAPPVAGPSVFLFPPKPKDTLMISRTPEVTCVVVDVKHEDPEVKFNWYVDGVEVHNAKTKPREEQYNSTYRVVSVLTVLHQDWLNGKEYKCKVSNKALPAPIEKTISKAKGQPREPQVYTLPPSREQMTKNQVKLTCLVKGFYPSDIAVEWESNGQPENNYKTTPPVLDSDGSFFLYSKLTVDKSRWQQGNVFSCSVLHEALHSHYTQKSLSLSPGK

SEQ ID NO: 23582 - protein, 107 aa, Artificial Sequence; identical to SEQ ID NO: 10999
  Description of Artificial Sequence: Synthetic polypeptide
  VH of XENP020717

SEQ ID NO: 23583 - protein, 122 aa, Artificial Sequence; identical to SEQ ID NO: 10908
  Description of Artificial Sequence: Synthetic polypeptide
  VL of XENP020717

SEQ ID NO: 23584 - protein, 231 aa, Artificial Sequence; identical to SEQ ID NO: 21572
  Description of Artificial Sequence: Synthetic polypeptide
  Fc chain of XENP020717

SEQ ID NO: 23585 - protein, 11 aa, Artificial Sequence
  Description of Artificial Sequence: Synthetic peptide
  XENP020717 vhCDR1
RASQSVGNDVA

SEQ ID NO: 23586 - protein, 7 aa, Artificial Sequence
  Description of Artificial Sequence: Synthetic peptide
  XENP020717 vhCDR2
YASHRYT

SEQ ID NO: 23587 - protein, 9 aa, Artificial Sequence
  Description of Artificial Sequence: Synthetic peptide
  XENP020717 vhCDR3
QQDFSSPRT

SEQ ID NO: 23588 - protein, 5 aa, Artificial Sequence
  Description of Artificial Sequence: Synthetic peptide
  XENP020717 vlCDR1
NYWMN

SEQ ID NO: 23589 - protein, 19 aa, Artificial Sequence
  Description of Artificial Sequence: Synthetic peptide
  XENP020717 vlCDR2
EIRLYSNNYATHYAESVKG

SEQ ID NO: 23590 - protein, 11 aa, Artificial Sequence
  Description of Artificial Sequence: Synthetic peptide
  XENP020717 vlCDR3
YYGNYGGYFDV

SEQ ID NO: 23591 - protein, 215 aa, Artificial Sequence; identical to SEQ ID NO: 4504
  Description of Artificial Sequence: Synthetic polypeptide
  XENP020717 ipilimumab_H3_L0.22-1G6_L1.194_H1.279 M428L/N434S Light Chain

SEQ ID NO: 23592 - protein, 108 aa, Artificial Sequence; identical to SEQ ID NO: 1607
  Description of Artificial Sequence: Synthetic polypeptide
  VL of XENP020717

SEQ ID NO: 23593 - protein, 12 aa, Artificial Sequence
  Description of Artificial Sequence: Synthetic peptide
  XENP020717 vlCDR1
RASQSVSSSYLA

SEQ ID NO: 23594 - protein, 7 aa, Artificial Sequence
  Description of Artificial Sequence: Synthetic peptide
  XENP020717 vlCDR2
GAFSRAT

SEQ ID NO: 23595 - protein, 9 aa, Artificial Sequence
  Description of Artificial Sequence: Synthetic peptide
  XENP020717 vlCDR3
QQYGSSPWT

SEQ ID NO: 23596 - protein, 447 aa, Artificial Sequence; identical to SEQ ID NO: 23556
  Description of Artificial Sequence: Synthetic polypeptide
  XENP020718 ipilimumab_H3_L0.22-1G6_H1.279_L1.194 M428L/N434S Fab-Fc Heavy Chain

SEQ ID NO: 23597 - protein, 118 aa, Artificial Sequence; identical to SEQ ID NO: 139
  Description of Artificial Sequence: Synthetic polypeptide
  VH of XENP020718

SEQ ID NO: 23598 - protein, 5 aa, Artificial Sequence
  Description of Artificial Sequence: Synthetic peptide
  XENP020718 vhCDR1
SYTMH

SEQ ID NO: 23599 - protein, 17 aa, Artificial Sequence
  Description of Artificial Sequence: Synthetic peptide
  XENP020718 vhCDR2
FISYDGNNKYYADSVKG

SEQ ID NO: 23600 - protein, 9 aa, Artificial Sequence
  Description of Artificial Sequence: Synthetic peptide
  XENP020718 vhCDR3
TGWLGPFDY

SEQ ID NO: 23601 - protein, 480 aa, Artificial Sequence
  Description of Artificial Sequence: Synthetic polypeptide
  XENP020718 ipilimumab_H3_L0.22-1G6_H1.279_L1.194 M428L/N434S scFv-Fc Heavy Chain
EVQLVESGGGLVKPGGSLRLSCVASGFTFSNYWMNWVRQAPGKGLEWVAEIRLYSNNYATHYAESVKGRFTISRDDSKSTLYLQMNNLKTEDTGVYYCTRYYGNYGGYFDVWGRGTLVTVSSGKPGSGKPGSGKPGSGKPGSEIVLTQSPATLSASPGERVTLTCRASQSVGNDVAWYQQKPGQAPRLLINYASHRYTGVPDRFTGSGYGTEFTLTISSVQSEDFGVYYCQQDFSSPRTFGGGTKVEIKEPKSSDKTHTCPPCPAPPVAGPSVFLFPPKPKDTLMISRTPEVTCVVVDVKHEDPEVKFNWYVDGVEVHNAKTKPREEQYNSTYRVVSVLTVLHQDWLNGKEYKCKVSNKALPAPIEKTISKAKGQPREPQVYTLPPSREQMTKNQVKLTCLVKGFYPSDIAVEWESNGQPENNYKTTPPVLDSDGSFFLYSKLTVDKSRWQQGNVFSCSVLHEALHSHYTQKSLSLSPGK

SEQ ID NO: 23602 - protein, 122 aa, Artificial Sequence; identical to SEQ ID NO: 10908
  Description of Artificial Sequence: Synthetic polypeptide
  VH of XENP020718

SEQ ID NO: 23603 - protein, 107 aa, Artificial Sequence; identical to SEQ ID NO: 10999
  Description of Artificial Sequence: Synthetic polypeptide
  VL of XENP020718

SEQ ID NO: 23604 - protein, 231 aa, Artificial Sequence; identical to SEQ ID NO: 21572
  Description of Artificial Sequence: Synthetic polypeptide
  Fc chain of XENP020718

SEQ ID NO: 23605 - protein, 5 aa, Artificial Sequence
  Description of Artificial Sequence: Synthetic peptide
  XENP020718 vhCDR1
NYWMN

SEQ ID NO: 23606 - protein, 19 aa, Artificial Sequence
  Description of Artificial Sequence: Synthetic peptide
  XENP020718 vhCDR2
EIRLYSNNYATHYAESVKG

SEQ ID NO: 23607 - protein, 11 aa, Artificial Sequence
  Description of Artificial Sequence: Synthetic peptide
  XENP020718 vhCDR3
YYGNYGGYFDV

SEQ ID NO: 23608 - protein, 11 aa, Artificial Sequence
  Description of Artificial Sequence: Synthetic peptide
  XENP020718 vlCDR1
RASQSVGNDVA

SEQ ID NO: 23609 - protein, 7 aa, Artificial Sequence
  Description of Artificial Sequence: Synthetic peptide
  XENP020718 vlCDR2
YASHRYT

SEQ ID NO: 23610 - protein, 9 aa, Artificial Sequence
  Description of Artificial Sequence: Synthetic peptide
  XENP020718 vlCDR3
QQDFSSPRT

SEQ ID NO: 23611 - protein, 215 aa, Artificial Sequence; identical to SEQ ID NO: 4504
  Description of Artificial Sequence: Synthetic polypeptide
  XENP020718 ipilimumab_H3_L0.22-1G6_H1.279_L1.194 M428L/N434S Light Chain

SEQ ID NO: 23612 - protein, 108 aa, Artificial Sequence; identical to SEQ ID NO: 1607
  Description of Artificial Sequence: Synthetic polypeptide
  VL of XENP020718

SEQ ID NO: 23613 - protein, 12 aa, Artificial Sequence
  Description of Artificial Sequence: Synthetic peptide
  XENP020718 vlCDR1
RASQSVSSSYLA

SEQ ID NO: 23614 - protein, 7 aa, Artificial Sequence
  Description of Artificial Sequence: Synthetic peptide
  XENP020718 vlCDR2
GAFSRAT

SEQ ID NO: 23615 - protein, 9 aa, Artificial Sequence
  Description of Artificial Sequence: Synthetic peptide
  XENP020718 vlCDR3
QQYGSSPWT

SEQ ID NO: 23616 - protein, 447 aa, Artificial Sequence; identical to SEQ ID NO: 23556
  Description of Artificial Sequence: Synthetic polypeptide
  XENP020719 ipilimumab_H3_L0.22-1G6_H1.280_L1.224 M428L/N434S Fab-Fc Heavy Chain

SEQ ID NO: 23617 - protein, 118 aa, Artificial Sequence; identical to SEQ ID NO: 139
  Description of Artificial Sequence: Synthetic polypeptide
  VH of XENP020719

SEQ ID NO: 23618 - protein, 5 aa, Artificial Sequence
  Description of Artificial Sequence: Synthetic peptide
  XENP020719 vhCDR1
SYTMH

SEQ ID NO: 23619 - protein, 17 aa, Artificial Sequence
  Description of Artificial Sequence: Synthetic peptide
  XENP020719 vhCDR2
FISYDGNNKYYADSVKG

SEQ ID NO: 23620 - protein, 9 aa, Artificial Sequence
  Description of Artificial Sequence: Synthetic peptide
  XENP020719 vhCDR3
TGWLGPFDY

SEQ ID NO: 23621 - protein, 480 aa, Artificial Sequence
  Description of Artificial Sequence: Synthetic polypeptide
  XENP020719 ipilimumab_H3_L0.22-1G6_H1.280_L1.224 M428L/N434S scFv-Fc Heavy Chain
EVQLVESGGGLVKPGGSLRLTCVASGFTFSNYWMNWVRQAPGKGLEWVAEIRLYSNNYATHYAESVKGRFTISRDDSKSTLYLQMNNLKTEDTGVYYCTRYYGNYGGYFDVWGRGTLVTVSSGKPGSGKPGSGKPGSGKPGSEIVLTQSPATLSVSPGERVTLTCRASQSVGNDVAWYQQKPGQAPRLLINYASHRYTSVPDRFTGSGYGTEFTLTISSVQSEDFAVYYCQQDWSSPRTFGGGTKVEIKEPKSSDKTHTCPPCPAPPVAGPSVFLFPPKPKDTLMISRTPEVTCVVVDVKHEDPEVKFNWYVDGVEVHNAKTKPREEQYNSTYRVVSVLTVLHQDWLNGKEYKCKVSNKALPAPIEKTISKAKGQPREPQVYTLPPSREQMTKNQVKLTCLVKGFYPSDIAVEWESNGQPENNYKTTPPVLDSDGSFFLYSKLTVDKSRWQQGNVFSCSVLHEALHSHYTQKSLSLSPGK

SEQ ID NO: 23622 - protein, 122 aa, Artificial Sequence; identical to SEQ ID NO: 10917
  Description of Artificial Sequence: Synthetic polypeptide
  VH of XENP020719

SEQ ID NO: 23623 - protein, 107 aa, Artificial Sequence; identical to SEQ ID NO: 22811
  Description of Artificial Sequence: Synthetic polypeptide
  VL of XENP020719

SEQ ID NO: 23624 - protein, 231 aa, Artificial Sequence; identical to SEQ ID NO: 21572
  Description of Artificial Sequence: Synthetic polypeptide
  Fc chain of XENP020719

SEQ ID NO: 23625 - protein, 5 aa, Artificial Sequence
  Description of Artificial Sequence: Synthetic peptide
  XENP020719 vhCDR1
NYWMN

SEQ ID NO: 23626 - protein, 19 aa, Artificial Sequence
  Description of Artificial Sequence: Synthetic peptide
  XENP020719 vhCDR2
EIRLYSNNYATHYAESVKG

SEQ ID NO: 23627 - protein, 11 aa, Artificial Sequence
  Description of Artificial Sequence: Synthetic peptide
  XENP020719 vhCDR3
YYGNYGGYFDV

SEQ ID NO: 23628 - protein, 11 aa, Artificial Sequence
  Description of Artificial Sequence: Synthetic peptide
  XENP020719 vlCDR1
RASQSVGNDVA

SEQ ID NO: 23629 - protein, 7 aa, Artificial Sequence
  Description of Artificial Sequence: Synthetic peptide
  XENP020719 vlCDR2
YASHRYT

SEQ ID NO: 23630 - protein, 9 aa, Artificial Sequence
  Description of Artificial Sequence: Synthetic peptide
  XENP020719 vlCDR3
QQDWSSPRT

SEQ ID NO: 23631 - protein, 215 aa, Artificial Sequence; identical to SEQ ID NO: 4504
  Description of Artificial Sequence: Synthetic polypeptide
  XENP020719 ipilimumab_H3_L0.22-1G6_H1.280_L1.224 M428L/N434S Light Chain

SEQ ID NO: 23632 - protein, 108 aa, Artificial Sequence; identical to SEQ ID NO: 1607
  Description of Artificial Sequence: Synthetic polypeptide
  VL of XENP020719

SEQ ID NO: 23633 - protein, 12 aa, Artificial Sequence
  Description of Artificial Sequence: Synthetic peptide
  XENP020719 vlCDR1
RASQSVSSSYLA

SEQ ID NO: 23634 - protein, 7 aa, Artificial Sequence
  Description of Artificial Sequence: Synthetic peptide
  XENP020719 vlCDR2
GAFSRAT

SEQ ID NO: 23635 - protein, 9 aa, Artificial Sequence
  Description of Artificial Sequence: Synthetic peptide
  XENP020719 vlCDR3
QQYGSSPWT

SEQ ID NO: 23636 - protein, 451 aa, Artificial Sequence
  Description of Artificial Sequence: Synthetic polypeptide
  XENP020720 1G6_H1.278_L1.188-ipilimumab_H3.4_L0.12 M428L/N434S Fab-Fc Heavy Chain
EVQLVESGGGLVKPGGSLRLSCVASGFTFSNYWMNWVRQAPGKGLEWVAEIRLYSNNYATHYAESVKGRFTISRDDSKSTLYLQMNNLKTEDTGVYYCTRYYGNYGGYFDVWGQGTLVTVSSASTKGPSVFPLAPSSKSTSGGTAALGCLVKDYFPEPVTVSWNSGALTSGVHTFPAVLQSSGLYSLSSVVTVPSSSLGTQTYICNVNHKPSDTKVDKKVEPKSCDKTHTCPPCPAPPVAGPSVFLFPPKPKDTLMISRTPEVTCVVVDVKHEDPEVKFNWYVDGVEVHNAKTKPREEEYNSTYRVVSVLTVLHQDWLNGKEYKCKVSNKALPAPIEKTISKAKGQPREPQVYTLPPSREEMTKNQVSLTCDVSGFYPSDIAVEWESDGQPENNYKTTPPVLDSDGSFFLYSKLTVDKSRWEQGDVFSCSVLHEALHSHYTQKSLSLSPGK

SEQ ID NO: 23637 - protein, 122 aa, Artificial Sequence; identical to SEQ ID NO: 10845
  Description of Artificial Sequence: Synthetic polypeptide
  VH of XENP020720

SEQ ID NO: 23638 - protein, 5 aa, Artificial Sequence
  Description of Artificial Sequence: Synthetic peptide
  XENP020720 vhCDR1
NYWMN

SEQ ID NO: 23639 - protein, 19 aa, Artificial Sequence
  Description of Artificial Sequence: Synthetic peptide
  XENP020720 vhCDR2
EIRLYSNNYATHYAESVKG

SEQ ID NO: 23640 - protein, 11 aa, Artificial Sequence
  Description of Artificial Sequence: Synthetic peptide
  XENP020720 vhCDR3
YYGNYGGYFDV

SEQ ID NO: 23641 - protein, 477 aa, Artificial Sequence; identical to SEQ ID NO: 21569
  Description of Artificial Sequence: Synthetic polypeptide
  XENP020720 1G6_H1.278_L1.188-ipilimumab_H3.4_L0.12 M428L/N434S scFv-Fc Heavy Chain

SEQ ID NO: 23642 - protein, 118 aa, Artificial Sequence; identical to SEQ ID NO: 2461
  Description of Artificial Sequence: Synthetic polypeptide
  VH of XENP020720

SEQ ID NO: 23643 - protein, 108 aa, Artificial Sequence; identical to SEQ ID NO: 1517
  Description of Artificial Sequence: Synthetic polypeptide
  VL of XENP020720

SEQ ID NO: 23644 - protein, 231 aa, Artificial Sequence; identical to SEQ ID NO: 21572
  Description of Artificial Sequence: Synthetic polypeptide
  Fc chain of XENP020720

SEQ ID NO: 23645 - protein, 5 aa, Artificial Sequence
  Description of Artificial Sequence: Synthetic peptide
  XENP020720 vhCDR1
SYTMH

SEQ ID NO: 23646 - protein, 17 aa, Artificial Sequence
  Description of Artificial Sequence: Synthetic peptide
  XENP020720 vhCDR2
FISYDGNHKYYADSVKG

SEQ ID NO: 23647 - protein, 9 aa, Artificial Sequence
  Description of Artificial Sequence: Synthetic peptide
  XENP020720 vhCDR3
TGHLGPFDL

SEQ ID NO: 23648 - protein, 12 aa, Artificial Sequence
  Description of Artificial Sequence: Synthetic peptide
  XENP020720 vlCDR1
RASQSVGSSYLA

SEQ ID NO: 23649 - protein, 7 aa, Artificial Sequence
  Description of Artificial Sequence: Synthetic peptide
  XENP020720 vlCDR2
GAFSRAT

SEQ ID NO: 23650 - protein, 9 aa, Artificial Sequence
  Description of Artificial Sequence: Synthetic peptide
  XENP020720 vlCDR3
QQYGSSPWT

SEQ ID NO: 23651 - protein, 214 aa, Artificial Sequence; identical to SEQ ID NO: 16660
  Description of Artificial Sequence: Synthetic polypeptide
  XENP020720 1G6_H1.278_L1.188-ipilimumab_H3.4_L0.12 M428L/N434S Light Chain

SEQ ID NO: 23652 - protein, 107 aa, Artificial Sequence; identical to SEQ ID NO: 10855
  Description of Artificial Sequence: Synthetic polypeptide
  VL of XENP020720

SEQ ID NO: 23653 - protein, 11 aa, Artificial Sequence
  Description of Artificial Sequence: Synthetic peptide
  XENP020720 vlCDR1
RASQSVGNDVA

SEQ ID NO: 23654 - protein, 7 aa, Artificial Sequence
  Description of Artificial Sequence: Synthetic peptide
  XENP020720 vlCDR2
YASHRYT

SEQ ID NO: 23655 - protein, 9 aa, Artificial Sequence
  Description of Artificial Sequence: Synthetic peptide
  XENP020720 vlCDR3
QQDFSSPRT

SEQ ID NO: 23656 - protein, 447 aa, Artificial Sequence; identical to SEQ ID NO: 23356
  Description of Artificial Sequence: Synthetic polypeptide
  XENP020726 ipilimumab_H3_L0.22-1G6_L1.224_H1.280 Fab-Fc Heavy Chain

SEQ ID NO: 23657 - protein, 118 aa, Artificial Sequence; identical to SEQ ID NO: 139
  Description of Artificial Sequence: Synthetic polypeptide
  VH of XENP020726

SEQ ID NO: 23658 - protein, 5 aa, Artificial Sequence
  Description of Artificial Sequence: Synthetic peptide
  XENP020726 vhCDR1
SYTMH

SEQ ID NO: 23659 - protein, 17 aa, Artificial Sequence
  Description of Artificial Sequence: Synthetic peptide
  XENP020726 vhCDR2
FISYDGNNKYYADSVKG

SEQ ID NO: 23660 - protein, 9 aa, Artificial Sequence
  Description of Artificial Sequence: Synthetic peptide
  XENP020726 vhCDR3
TGWLGPFDY

SEQ ID NO: 23661 - protein, 480 aa, Artificial Sequence
  Description of Artificial Sequence: Synthetic polypeptide
  XENP020726 ipilimumab_H3_L0.22-1G6_L1.224_H1.280 scFv-Fc Heavy Chain
EIVLTQSPATLSVSPGERVTLTCRASQSVGNDVAWYQQKPGQAPRLLINYASHRYTSVPDRFTGSGYGTEFTLTISSVQSEDFAVYYCQQDWSSPRTFGGGTKVEIKGKPGSGKPGSGKPGSGKPGSEVQLVESGGGLVKPGGSLRLTCVASGFTFSNYWMNWVRQAPGKGLEWVAEIRLYSNNYATHYAESVKGRFTISRDDSKSTLYLQMNNLKTEDTGVYYCTRYYGNYGGYFDVWGRGTLVTVSSEPKSSDKTHTCPPCPAPPVAGPSVFLFPPKPKDTLMISRTPEVTCVVVDVKHEDPEVKFNWYVDGVEVHNAKTKPREEQYNSTYRVVSVLTVLHQDWLNGKEYKCKVSNKALPAPIEKTISKAKGQPREPQVYTLPPSREQMTKNQVKLTCLVKGFYPSDIAVEWESNGQPENNYKTTPPVLDSDGSFFLYSKLTVDKSRWQQGNVFSCSVMHEALHNHYTQKSLSLSPGK

SEQ ID NO: 23662 - protein, 107 aa, Artificial Sequence; identical to SEQ ID NO: 22811
  Description of Artificial Sequence: Synthetic polypeptide
  VH of XENP020726

SEQ ID NO: 23663 - protein, 122 aa, Artificial Sequence; identical to SEQ ID NO: 10917
  Description of Artificial Sequence: Synthetic polypeptide
  VL of XENP020726

SEQ ID NO: 23664 - protein, 231 aa, Artificial Sequence; identical to SEQ ID NO: 21532
  Description of Artificial Sequence: Synthetic polypeptide
  Fc chain of XENP020726

SEQ ID NO: 23665 - protein, 11 aa, Artificial Sequence
  Description of Artificial Sequence: Synthetic peptide
  XENP020726 vhCDR1
RASQSVGNDVA

SEQ ID NO: 23666 - protein, 7 aa, Artificial Sequence
  Description of Artificial Sequence: Synthetic peptide
  XENP020726 vhCDR2
YASHRYT

SEQ ID NO: 23667 - protein, 9 aa, Artificial Sequence
  Description of Artificial Sequence: Synthetic peptide
  XENP020726 vhCDR3
QQDWSSPRT

SEQ ID NO: 23668 - protein, 5 aa, Artificial Sequence
  Description of Artificial Sequence: Synthetic peptide
  XENP020726 vlCDR1
NYWMN

SEQ ID NO: 23669 - protein, 19 aa, Artificial Sequence
  Description of Artificial Sequence: Synthetic peptide
  XENP020726 vlCDR2
EIRLYSNNYATHYAESVKG

SEQ ID NO: 23670 - protein, 11 aa, Artificial Sequence
  Description of Artificial Sequence: Synthetic peptide
  XENP020726 vlCDR3
YYGNYGGYFDV

SEQ ID NO: 23671 - protein, 215 aa, Artificial Sequence; identical to SEQ ID NO: 4504
  Description of Artificial Sequence: Synthetic polypeptide
  XENP020726 ipilimumab_H3_L0.22-1G6_L1.224_H1.280 Light Chain

SEQ ID NO: 23672 - protein, 108 aa, Artificial Sequence; identical to SEQ ID NO: 1607
  Description of Artificial Sequence: Synthetic polypeptide
  VL of XENP020726

SEQ ID NO: 23673 - protein, 12 aa, Artificial Sequence
  Description of Artificial Sequence: Synthetic peptide
  XENP020726 vlCDR1
RASQSVSSSYLA

SEQ ID NO: 23674 - protein, 7 aa, Artificial Sequence
  Description of Artificial Sequence: Synthetic peptide
  XENP020726 vlCDR2
GAFSRAT

SEQ ID NO: 23675 - protein, 9 aa, Artificial Sequence
  Description of Artificial Sequence: Synthetic peptide
  XENP020726 vlCDR3
QQYGSSPWT

SEQ ID NO: 23676 - protein, 447 aa, Artificial Sequence; identical to SEQ ID NO: 23356
  Description of Artificial Sequence: Synthetic polypeptide
  XENP020727 ipilimumab_H3_L0.22-1G6_L1.226_H1.292 Fab-Fc Heavy Chain

SEQ ID NO: 23677 - protein, 118 aa, Artificial Sequence; identical to SEQ ID NO: 139
  Description of Artificial Sequence: Synthetic polypeptide
  VH of XENP020727

SEQ ID NO: 23678 - protein, 5 aa, Artificial Sequence
  Description of Artificial Sequence: Synthetic peptide
  XENP020727 vhCDR1
SYTMH

SEQ ID NO: 23679 - protein, 17 aa, Artificial Sequence
  Description of Artificial Sequence: Synthetic peptide
  XENP020727 vhCDR2
FISYDGNNKYYADSVKG

SEQ ID NO: 23680 - protein, 9 aa, Artificial Sequence
  Description of Artificial Sequence: Synthetic peptide
  XENP020727 vhCDR3
TGWLGPFDY

SEQ ID NO: 23681 - protein, 480 aa, Artificial Sequence
  Description of Artificial Sequence: Synthetic polypeptide
  XENP020727 ipilimumab_H3_L0.22-1G6_L1.226_H1.292 scFv-Fc Heavy Chain
EIVLTQSPATLSVSPGERVTLTCRASQSVGNDVAWYQQKPGQAPRLLINYASHRYTSVPDRFTGSGYGTEFTLTISSVQSEDFAVYYCQQDWSSPRTFGCGTKVEIKGKPGSGKPGSGKPGSGKPGSEVQLVESGGGLVKPGGSLRLTCVASGFTFSNYWMNWVRQAPGKCLEWVAEIRLYSNNYATHYAESVKGRFTISRDDSKSTLYLQMNNLKTEDTGVYYCTRYYGNYGGYFDVWGRGTLVTVSSEPKSSDKTHTCPPCPAPPVAGPSVFLFPPKPKDTLMISRTPEVTCVVVDVKHEDPEVKFNWYVDGVEVHNAKTKPREEQYNSTYRVVSVLTVLHQDWLNGKEYKCKVSNKALPAPIEKTISKAKGQPREPQVYTLPPSREQMTKNQVKLTCLVKGFYPSDIAVEWESNGQPENNYKTTPPVLDSDGSFFLYSKLTVDKSRWQQGNVFSCSVMHEALHNHYTQKSLSLSPGK

SEQ ID NO: 23682 - protein, 107 aa, Artificial Sequence
  Description of Artificial Sequence: Synthetic polypeptide
  VH of XENP020727
EIVLTQSPATLSVSPGERVTLTCRASQSVGNDVAWYQQKPGQAPRLLINYASHRYTSVPDRFTGSGYGTEFTLTISSVQSEDFAVYYCQQDWSSPRTFGCGTKVEIK

SEQ ID NO: 23683 - protein, 122 aa, Artificial Sequence
  Description of Artificial Sequence: Synthetic polypeptide
  VL of XENP020727
EVQLVESGGGLVKPGGSLRLTCVASGFTFSNYWMNWVRQAPGKCLEWVAEIRLYSNNYATHYAESVKGRFTISRDDSKSTLYLQMNNLKTEDTGVYYCTRYYGNYGGYFDVWGRGTLVTVSS

SEQ ID NO: 23684 - protein, 231 aa, Artificial Sequence; identical to SEQ ID NO: 21532
  Description of Artificial Sequence: Synthetic polypeptide
  Fc chain of XENP020727

SEQ ID NO: 23685 - protein, 11 aa, Artificial Sequence
  Description of Artificial Sequence: Synthetic peptide
  XENP020727 vhCDR1
RASQSVGNDVA

SEQ ID NO: 23686 - protein, 7 aa, Artificial Sequence
  Description of Artificial Sequence: Synthetic peptide
  XENP020727 vhCDR2
YASHRYT

SEQ ID NO: 23687 - protein, 9 aa, Artificial Sequence
  Description of Artificial Sequence: Synthetic peptide
  XENP020727 vhCDR3
QQDWSSPRT

SEQ ID NO: 23688 - protein, 5 aa, Artificial Sequence
  Description of Artificial Sequence: Synthetic peptide
  XENP020727 vlCDR1
NYWMN

SEQ ID NO: 23689 - protein, 19 aa, Artificial Sequence
  Description of Artificial Sequence: Synthetic peptide
  XENP020727 vlCDR2
EIRLYSNNYATHYAESVKG

SEQ ID NO: 23690 - protein, 11 aa, Artificial Sequence
  Description of Artificial Sequence: Synthetic peptide
  XENP020727 vlCDR3
YYGNYGGYFDV

SEQ ID NO: 23691 - protein, 215 aa, Artificial Sequence; identical to SEQ ID NO: 4504
  Description of Artificial Sequence: Synthetic polypeptide
  XENP020727 ipilimumab_H3_L0.22-1G6_L1.226_H1.292 Light Chain

SEQ ID NO: 23692 - protein, 108 aa, Artificial Sequence; identical to SEQ ID NO: 1607
  Description of Artificial Sequence: Synthetic polypeptide
  VL of XENP020727

SEQ ID NO: 23693 - protein, 12 aa, Artificial Sequence
  Description of Artificial Sequence: Synthetic peptide
  XENP020727 vlCDR1
RASQSVSSSYLA

SEQ ID NO: 23694 - protein, 7 aa, Artificial Sequence
  Description of Artificial Sequence: Synthetic peptide
  XENP020727 vlCDR2
GAFSRAT

SEQ ID NO: 23695 - protein, 9 aa, Artificial Sequence
  Description of Artificial Sequence: Synthetic peptide
  XENP020727 vlCDR3
QQYGSSPWT

SEQ ID NO: 23696 - protein, 447 aa, Artificial Sequence; identical to SEQ ID NO: 23556
  Description of Artificial Sequence: Synthetic polypeptide
  XENP020728 ipilimumab_H3_L0.22-1G6_L1.224_H1.280 M428L/N434S Fab-Fc Heavy Chain

SEQ ID NO: 23697 - protein, 118 aa, Artificial Sequence; identical to SEQ ID NO: 139
  Description of Artificial Sequence: Synthetic polypeptide
  VH of XENP020728

SEQ ID NO: 23698 - protein, 5 aa, Artificial Sequence
  Description of Artificial Sequence: Synthetic peptide
  XENP020728 vhCDR1
SYTMH

SEQ ID NO: 23699 - protein, 17 aa, Artificial Sequence
  Description of Artificial Sequence: Synthetic peptide
  XENP020728 vhCDR2
FISYDGNNKYYADSVKG

SEQ ID NO: 23700 - protein, 9 aa, Artificial Sequence
  Description of Artificial Sequence: Synthetic peptide
  XENP020728 vhCDR3
TGWLGPFDY

SEQ ID NO: 23701 - protein, 480 aa, Artificial Sequence
  Description of Artificial Sequence: Synthetic polypeptide
  XENP020728 ipilimumab_H3_L0.22-1G6_L1.224_H1.280 M428L/N434S scFv-Fc Heavy Chain
EIVLTQSPATLSVSPGERVTLTCRASQSVGNDVAWYQQKPGQAPRLLINYASHRYTSVPDRFTGSGYGTEFTLTISSVQSEDFAVYYCQQDWSSPRTFGGGTKVEIKGKPGSGKPGSGKPGSGKPGSEVQLVESGGGLVKPGGSLRLTCVASGFTFSNYWMNWVRQAPGKGLEWVAEIRLYSNNYATHYAESVKGRFTISRDDSKSTLYLQMNNLKTEDTGVYYCTRYYGNYGGYFDVWGRGTLVTVSSEPKSSDKTHTCPPCPAPPVAGPSVFLFPPKPKDTLMISRTPEVTCVVVDVKHEDPEVKFNWYVDGVEVHNAKTKPREEQYNSTYRVVSVLTVLHQDWLNGKEYKCKVSNKALPAPIEKTISKAKGQPREPQVYTLPPSREQMTKNQVKLTCLVKGFYPSDIAVEWESNGQPENNYKTTPPVLDSDGSFFLYSKLTVDKSRWQQGNVFSCSVLHEALHSHYTQKSLSLSPGK

SEQ ID NO: 23702 - protein, 107 aa, Artificial Sequence; identical to SEQ ID NO: 22811
  Description of Artificial Sequence: Synthetic polypeptide
  VH of XENP020728

SEQ ID NO: 23703 - protein, 122 aa, Artificial Sequence; identical to SEQ ID NO: 10917
  Description of Artificial Sequence: Synthetic polypeptide
  VL of XENP020728

SEQ ID NO: 23704 - protein, 231 aa, Artificial Sequence; identical to SEQ ID NO: 21572
  Description of Artificial Sequence: Synthetic polypeptide
  Fc chain of XENP020728

SEQ ID NO: 23705 - protein, 11 aa, Artificial Sequence
  Description of Artificial Sequence: Synthetic peptide
  XENP020728 vhCDR1
RASQSVGNDVA

SEQ ID NO: 23706 - protein, 7 aa, Artificial Sequence
  Description of Artificial Sequence: Synthetic peptide
  XENP020728 vhCDR2
YASHRYT

SEQ ID NO: 23707 - protein, 9 aa, Artificial Sequence
  Description of Artificial Sequence: Synthetic peptide
  XENP020728 vhCDR3
QQDWSSPRT

SEQ ID NO: 23708 - protein, 5 aa, Artificial Sequence
  Description of Artificial Sequence: Synthetic peptide
  XENP020728 vlCDR1
NYWMN

SEQ ID NO: 23709 - protein, 19 aa, Artificial Sequence
  Description of Artificial Sequence: Synthetic peptide
  XENP020728 vlCDR2
EIRLYSNNYATHYAESVKG

SEQ ID NO: 23710 - protein, 11 aa, Artificial Sequence
  Description of Artificial Sequence: Synthetic peptide
  XENP020728 vlCDR3
YYGNYGGYFDV

SEQ ID NO: 23711 - protein, 215 aa, Artificial Sequence; identical to SEQ ID NO: 4504
  Description of Artificial Sequence: Synthetic polypeptide
  XENP020728 ipilimumab_H3_L0.22-1G6_L1.224_H1.280 M428L/N434S Light Chain

SEQ ID NO: 23712 - protein, 108 aa, Artificial Sequence; identical to SEQ ID NO: 1607
  Description of Artificial Sequence: Synthetic polypeptide
  VL of XENP020728

SEQ ID NO: 23713 - protein, 12 aa, Artificial Sequence
  Description of Artificial Sequence: Synthetic peptide
  XENP020728 vlCDR1
RASQSVSSSYLA

SEQ ID NO: 23714 - protein, 7 aa, Artificial Sequence
  Description of Artificial Sequence: Synthetic peptide
  XENP020728 vlCDR2
GAFSRAT

SEQ ID NO: 23715 - protein, 9 aa, Artificial Sequence
  Description of Artificial Sequence: Synthetic peptide
  XENP020728 vlCDR3
QQYGSSPWT

SEQ ID NO: 23716 - protein, 447 aa, Artificial Sequence; identical to SEQ ID NO: 23556
  Description of Artificial Sequence: Synthetic polypeptide
  XENP020729 ipilimumab_H3_L0.22-1G6_L1.226_H1.292 M428L/N434S Fab-Fc Heavy Chain

SEQ ID NO: 23717 - protein, 118 aa, Artificial Sequence; identical to SEQ ID NO: 139
  Description of Artificial Sequence: Synthetic polypeptide
  VH of XENP020729

SEQ ID NO: 23718 - protein, 5 aa, Artificial Sequence
  Description of Artificial Sequence: Synthetic peptide
  XENP020729 vhCDR1
SYTMH

SEQ ID NO: 23719 - protein, 17 aa, Artificial Sequence
  Description of Artificial Sequence: Synthetic peptide
  XENP020729 vhCDR2
FISYDGNNKYYADSVKG

SEQ ID NO: 23720 - protein, 9 aa, Artificial Sequence
  Description of Artificial Sequence: Synthetic peptide
  XENP020729 vhCDR3
TGWLGPFDY

SEQ ID NO: 23721 - protein, 480 aa, Artificial Sequence
  Description of Artificial Sequence: Synthetic polypeptide
  XENP020729 ipilimumab_H3_L0.22-1G6_L1.226_H1.292 M428L/N434S scFv-Fc Heavy Chain
EIVLTQSPATLSVSPGERVTLTCRASQSVGNDVAWYQQKPGQAPRLLINYASHRYTSVPDRFTGSGYGTEFTLTISSVQSEDFAVYYCQQDWSSPRTFGCGTKVEIKGKPGSGKPGSGKPGSGKPGSEVQLVESGGGLVKPGGSLRLTCVASGFTFSNYWMNWVRQAPGKCLEWVAEIRLYSNNYATHYAESVKGRFTISRDDSKSTLYLQMNNLKTEDTGVYYCTRYYGNYGGYFDVWGRGTLVTVSSEPKSSDKTHTCPPCPAPPVAGPSVFLFPPKPKDTLMISRTPEVTCVVVDVKHEDPEVKFNWYVDGVEVHNAKTKPREEQYNSTYRVVSVLTVLHQDWLNGKEYKCKVSNKALPAPIEKTISKAKGQPREPQVYTLPPSREQMTKNQVKLTCLVKGFYPSDIAVEWESNGQPENNYKTTPPVLDSDGSFFLYSKLTVDKSRWQQGNVFSCSVLHEALHSHYTQKSLSLSPGK

SEQ ID NO: 23722 - protein, 107 aa, Artificial Sequence; identical to SEQ ID NO: 23682
  Description of Artificial Sequence: Synthetic polypeptide
  VH of XENP020729

SEQ ID NO: 23723 - protein, 122 aa, Artificial Sequence; identical to SEQ ID NO: 23683
  Description of Artificial Sequence: Synthetic polypeptide
  VL of XENP020729

SEQ ID NO: 23724 - protein, 231 aa, Artificial Sequence; identical to SEQ ID NO: 21572
  Description of Artificial Sequence: Synthetic polypeptide
  Fc chain of XENP020729

SEQ ID NO: 23725 - protein, 11 aa, Artificial Sequence
  Description of Artificial Sequence: Synthetic peptide
  XENP020729 vhCDR1
RASQSVGNDVA

SEQ ID NO: 23726 - protein, 7 aa, Artificial Sequence
  Description of Artificial Sequence: Synthetic peptide
  XENP020729 vhCDR2
YASHRYT

SEQ ID NO: 23727 - protein, 9 aa, Artificial Sequence
  Description of Artificial Sequence: Synthetic peptide
  XENP020729 vhCDR3
QQDWSSPRT

SEQ ID NO: 23728 - protein, 5 aa, Artificial Sequence
  Description of Artificial Sequence: Synthetic peptide
  XENP020729 vlCDR1
NYWMN

SEQ ID NO: 23729 - protein, 19 aa, Artificial Sequence
  Description of Artificial Sequence: Synthetic peptide
  XENP020729 vlCDR2
EIRLYSNNYATHYAESVKG

SEQ ID NO: 23730 - protein, 11 aa, Artificial Sequence
  Description of Artificial Sequence: Synthetic peptide
  XENP020729 vlCDR3
YYGNYGGYFDV

SEQ ID NO: 23731 - protein, 215 aa, Artificial Sequence; identical to SEQ ID NO: 4504
  Description of Artificial Sequence: Synthetic polypeptide
  XENP020729 ipilimumab_H3_L0.22-1G6_L1.226_H1.292 M428L/N434S Light Chain

SEQ ID NO: 23732 - protein, 108 aa, Artificial Sequence; identical to SEQ ID NO: 1607
  Description of Artificial Sequence: Synthetic polypeptide
  VL of XENP020729

SEQ ID NO: 23733 - protein, 12 aa, Artificial Sequence
  Description of Artificial Sequence: Synthetic peptide
  XENP020729 vlCDR1
RASQSVSSSYLA

SEQ ID NO: 23734 - protein, 7 aa, Artificial Sequence
  Description of Artificial Sequence: Synthetic peptide
  XENP020729 vlCDR2
GAFSRAT

SEQ ID NO: 23735 - protein, 9 aa, Artificial Sequence
  Description of Artificial Sequence: Synthetic peptide
  XENP020729 vlCDR3
QQYGSSPWT

SEQ ID NO: 23736 - protein, 449 aa, Artificial Sequence; identical to SEQ ID NO: 21524
  Description of Artificial Sequence: Synthetic polypeptide
  XENP016429 25F7_H0L0-nivolumab_H0.1_L0 Fab-Fc Heavy Chain

SEQ ID NO: 23737 - protein, 120 aa, Artificial Sequence; identical to SEQ ID NO: 17136
  Description of Artificial Sequence: Synthetic polypeptide
  VH of XENP016429

SEQ ID NO: 23738 - protein, 5 aa, Artificial Sequence
  Description of Artificial Sequence: Synthetic peptide
  XENP016429 vhCDR1
DYYWN

SEQ ID NO: 23739 - protein, 16 aa, Artificial Sequence
  Description of Artificial Sequence: Synthetic peptide
  XENP016429 vhCDR2
EINHNGNTNSNPSLKS

SEQ ID NO: 23740 - protein, 12 aa, Artificial Sequence
  Description of Artificial Sequence: Synthetic peptide
  XENP016429 vhCDR3
GYSDYEYNWFDP

SEQ ID NO: 23741 - protein, 471 aa, Artificial Sequence; identical to SEQ ID NO: 22749
  Description of Artificial Sequence: Synthetic polypeptide
  XENP016429 25F7_H0L0-nivolumab_H0.1_L0 scFv-Fc Heavy Chain

SEQ ID NO: 23742 - protein, 113 aa, Artificial Sequence; identical to SEQ ID NO: 6210
  Description of Artificial Sequence: Synthetic polypeptide
  VH of XENP016429

SEQ ID NO: 23743 - protein, 107 aa, Artificial Sequence [sequence omitted]

SEQ ID NO: 23744 - protein, 231 aa, Artificial Sequence; identical to SEQ ID NO: 21532
  Description of Artificial Sequence: Synthetic polypeptide
  Fc chain of XENP016429

SEQ ID NO: 23745 - protein, 5 aa, Artificial Sequence
  Description of Artificial Sequence: Synthetic peptide
  XENP016429 vhCDR1
NSGMH

SEQ ID NO: 23746 - protein, 17 aa, Artificial Sequence
  Description of Artificial Sequence: Synthetic peptide
  XENP016429 vhCDR2
VIWYDGSKRYYADSVKG

SEQ ID NO: 23747 - protein, 4 aa, Artificial Sequence
  Description of Artificial Sequence: Synthetic peptide
  XENP016429 vhCDR3
NDDY

SEQ ID NO: 23748 - protein, 11 aa, Artificial Sequence
  Description of Artificial Sequence: Synthetic peptide
  XENP016429 vlCDR1
RASQSVSSYLA

SEQ ID NO: 23749 - protein, 7 aa, Artificial Sequence
  Description of Artificial Sequence: Synthetic peptide
  XENP016429 vlCDR2
DASNRAT

SEQ ID NO: 23750 - protein, 9 aa, Artificial Sequence
  Description of Artificial Sequence: Synthetic peptide
  XENP016429 vlCDR3
QQSSNWPRT

SEQ ID NO: 23751 - protein, 214 aa, Artificial Sequence; identical to SEQ ID NO: 17140
  Description of Artificial Sequence: Synthetic polypeptide
  XENP016429 25F7_H0L0-nivolumab_H0.1_L0 Light Chain

SEQ ID NO: 23752 - protein, 11 aa, Artificial Sequence
  Description of Artificial Sequence: Synthetic peptide
  XENP016429 vlCDR1
RASQSISSYLA

SEQ ID NO: 23753 - protein, 7 aa, Artificial Sequence
  Description of Artificial Sequence: Synthetic peptide
  XENP016429 vlCDR2
DASNRAT

SEQ ID NO: 23754 - protein, 9 aa, Artificial Sequence
  Description of Artificial Sequence: Synthetic peptide
  XENP016429 vlCDR3
QQRSNWPLT

SEQ ID NO: 23755 - protein, 449 aa, Artificial Sequence; identical to SEQ ID NO: 21524
  Description of Artificial Sequence: Synthetic polypeptide
  XENP018069 25F7_H0L0-1G6_H1L1 Fab-Fc Heavy Chain

SEQ ID NO: 23756 - protein, 120 aa, Artificial Sequence; identical to SEQ ID NO: 17136
  Description of Artificial Sequence: Synthetic polypeptide
  VH of XENP018069

SEQ ID NO: 23757 - protein, 5 aa, Artificial Sequence
  Description of Artificial Sequence: Synthetic peptide
  XENP018069 vhCDR1
DYYWN

SEQ ID NO: 23758 - protein, 16 aa, Artificial Sequence
  Description of Artificial Sequence: Synthetic peptide
  XENP018069 vhCDR2
EINHNGNTNSNPSLKS

SEQ ID NO: 23759 - protein, 12 aa, Artificial Sequence
  Description of Artificial Sequence: Synthetic peptide
  XENP018069 vhCDR3
GYSDYEYNWFDP

SEQ ID NO: 23760 - protein, 480 aa, Artificial Sequence; identical to SEQ ID NO: 23341
  Description of Artificial Sequence: Synthetic polypeptide
  XENP018069 25F7_H0L0-1G6_H1L1 scFv-Fc Heavy Chain

SEQ ID NO: 23761 - protein, 122 aa, Artificial Sequence; identical to SEQ ID NO: 6246
  Description of Artificial Sequence: Synthetic polypeptide
  VH of XENP018069

SEQ ID NO: 23762 - protein, 107 aa, Artificial Sequence; identical to SEQ ID NO: 6247
  Description of Artificial Sequence: Synthetic polypeptide
  VL of XENP018069

SEQ ID NO: 23763 - protein, 231 aa, Artificial Sequence; identical to SEQ ID NO: 21532
  Description of Artificial Sequence: Synthetic polypeptide
  Fc chain of XENP018069

SEQ ID NO: 23764 - protein, 5 aa, Artificial Sequence
  Description of Artificial Sequence: Synthetic peptide
  XENP018069 vhCDR1
NYWMN

SEQ ID NO: 23765 - protein, 19 aa, Artificial Sequence
  Description of Artificial Sequence: Synthetic peptide
  XENP018069 vhCDR2
EIRLKSNNYATHYAEPVKG

SEQ ID NO: 23766 - protein, 11 aa, Artificial Sequence
  Description of Artificial Sequence: Synthetic peptide
  XENP018069 vhCDR3
YYGNYGGYFDV

SEQ ID NO: 23767 - protein, 11 aa, Artificial Sequence
  Description of Artificial Sequence: Synthetic peptide
  XENP018069 vlCDR1
RASQSVSNDVA

SEQ ID NO: 23768 - protein, 7 aa, Artificial Sequence
  Description of Artificial Sequence: Synthetic peptide
  XENP018069 vlCDR2
YASHRYT

SEQ ID NO: 23769 - protein, 9 aa, Artificial Sequence
  Description of Artificial Sequence: Synthetic peptide
  XENP018069 vlCDR3
QQDYSSPRT

SEQ ID NO: 23770 - protein, 214 aa, Artificial Sequence; identical to SEQ ID NO: 17140
  Description of Artificial Sequence: Synthetic polypeptide
  XENP018069 25F7_H0L0-1G6_H1L1 Light Chain

SEQ ID NO: 23771 - skipped

SEQ ID NO: 23772 - protein, 11 aa, Artificial Sequence
  Description of Artificial Sequence: Synthetic peptide
  XENP018069 vlCDR1
RASQSISSYLA

SEQ ID NO: 23773 - protein, 7 aa, Artificial Sequence
  Description of Artificial Sequence: Synthetic peptide
  XENP018069 vlCDR2
DASNRAT

SEQ ID NO: 23774 - protein, 9 aa, Artificial Sequence
  Description of Artificial Sequence: Synthetic peptide
  XENP018069 vlCDR3
QQRSNWPLT

SEQ ID NO: 23775 - protein, 449 aa, Artificial Sequence; identical to SEQ ID NO: 21524
  Description of Artificial Sequence: Synthetic polypeptide
  XENP019410 25F7_H0L0-1G6_H1.278_L1.189 Fab-Fc Heavy Chain

SEQ ID NO: 23776 - protein, 120 aa, Artificial Sequence; identical to SEQ ID NO: 17136
  Description of Artificial Sequence: Synthetic polypeptide
  VH of XENP019410

SEQ ID NO: 23777 - protein, 5 aa, Artificial Sequence
  Description of Artificial Sequence: Synthetic peptide
  XENP019410 vhCDR1
DYYWN

SEQ ID NO: 23778 - protein, 16 aa, Artificial Sequence
  Description of Artificial Sequence: Synthetic peptide
  XENP019410 vhCDR2
EINHNGNTNSNPSLKS

SEQ ID NO: 23779 - protein, 12 aa, Artificial Sequence
  Description of Artificial Sequence: Synthetic peptide
  XENP019410 vhCDR3
GYSDYEYNWFDP

SEQ ID NO: 23780 - protein, 480 aa, Artificial Sequence
  Description of Artificial Sequence: Synthetic polypeptide
  XENP019410 25F7_H0L0-1G6_H1.278_L1.189 scFv-Fc Heavy Chain
EVQLVESGGGLVKPGGSLRLSCVASGFTFSNYWMNWVRQAPGKGLEWVAEIRLYSNNYATHYAESVKGRFTISRDDSKSTLYLQMNNLKTEDTGVYYCTRYYGNYGGYFDVWGQGTLVTVSSGKPGSGKPGSGKPGSGKPGSEIVLTQSPATLSVSPGERVTLTCRASQSVGNDVAWYQQKPGQAPRLLINYASHRYTGVPDRFTGSGYGTEFTLTISSVQSEDFAVYYCQQDFSSPRTFGGGTKVEIKEPKSSDKTHTCPPCPAPPVAGPSVFLFPPKPKDTLMISRTPEVTCVVVDVKHEDPEVKFNWYVDGVEVHNAKTKPREEQYNSTYRVVSVLTVLHQDWLNGKEYKCKVSNKALPAPIEKTISKAKGQPREPQVYTLPPSREQMTKNQVKLTCLVKGFYPSDIAVEWESNGQPENNYKTTPPVLDSDGSFFLYSKLTVDKSRWQQGNVFSCSVMHEALHNHYTQKSLSLSPGK

SEQ ID NO: 23781 - protein, 122 aa, Artificial Sequence; identical to SEQ ID NO: 10845
  Description of Artificial Sequence: Synthetic polypeptide
  VH of XENP019410

SEQ ID NO: 23782 - protein, 107 aa, Artificial Sequence; identical to SEQ ID NO: 10864
  Description of Artificial Sequence: Synthetic polypeptide
  VL of XENP019410

SEQ ID NO: 23783 - protein, 231 aa, Artificial Sequence; identical to SEQ ID NO: 21532
  Description of Artificial Sequence: Synthetic polypeptide
  Fc chain of XENP019410

SEQ ID NO: 23784 - protein, 5 aa, Artificial Sequence
  Description of Artificial Sequence: Synthetic peptide
  XENP019410 vhCDR1
NYWMN

SEQ ID NO: 23785 - protein, 19 aa, Artificial Sequence
  Description of Artificial Sequence: Synthetic peptide
  XENP019410 vhCDR2
EIRLYSNNYATHYAESVKG

SEQ ID NO: 23786 - protein, 11 aa, Artificial Sequence
  Description of Artificial Sequence: Synthetic peptide
  XENP019410 vhCDR3
YYGNYGGYFDV

SEQ ID NO: 23787 - protein, 11 aa, Artificial Sequence
  Description of Artificial Sequence: Synthetic peptide
  XENP019410 vlCDR1
RASQSVGNDVA

SEQ ID NO: 23788 - protein, 7 aa, Artificial Sequence
  Description of Artificial Sequence: Synthetic peptide
  XENP019410 vlCDR2
YASHRYT

SEQ ID NO: 23789 - protein, 9 aa, Artificial Sequence
  Description of Artificial Sequence: Synthetic peptide
  XENP019410 vlCDR3
QQDFSSPRT

SEQ ID NO: 23790 - protein, 214 aa, Artificial Sequence; identical to SEQ ID NO: 17140
  Description of Artificial Sequence: Synthetic polypeptide
  XENP019410 25F7_H0L0-1G6_H1.278_L1.189 Light Chain

SEQ ID NO: 23791 - protein, 214 aa, Artificial Sequence; identical to SEQ ID NO: 17140
  Description of Artificial Sequence: Synthetic polypeptide
  VL of XENP019410

SEQ ID NO: 23792 - protein, 11 aa, Artificial Sequence
  Description of Artificial Sequence: Synthetic peptide
  XENP019410 vlCDR1
RASQSISSYLA

SEQ ID NO: 23793 - protein, 7 aa, Artificial Sequence
  Description of Artificial Sequence: Synthetic peptide
  XENP019410 vlCDR2
DASNRAT

SEQ ID NO: 23794 - protein, 9 aa, Artificial Sequence
  Description of Artificial Sequence: Synthetic peptide
  XENP019410 vlCDR3
QQRSNWPLT

SEQ ID NO: 23795 - protein, 449 aa, Artificial Sequence; identical to SEQ ID NO: 21524
  Description of Artificial Sequence: Synthetic polypeptide
  XENP019412 25F7_H0L0-1G6_L1.189_H1.278 Fab-Fc Heavy Chain

SEQ ID NO: 23796 - protein, 120 aa, Artificial Sequence; identical to SEQ ID NO: 17136
  Description of Artificial Sequence: Synthetic polypeptide
  VH of XENP019412

SEQ ID NO: 23797 - protein, 5 aa, Artificial Sequence
  Description of Artificial Sequence: Synthetic peptide
  XENP019412 vhCDR1
DYYWN

SEQ ID NO: 23798 - protein, 16 aa, Artificial Sequence
  Description of Artificial Sequence: Synthetic peptide
  XENP019412 vhCDR2
EINHNGNTNSNPSLKS

SEQ ID NO: 23799 - protein, 12 aa, Artificial Sequence
  Description of Artificial Sequence: Synthetic peptide
  XENP019412 vhCDR3
GYSDYEYNWFDP

SEQ ID NO: 23800 - protein, 480 aa, Artificial Sequence; identical to SEQ ID NO: 23780
  Description of Artificial Sequence: Synthetic polypeptide
  XENP019412 25F7_H0L0-1G6_L1.189_H1.278 scFv-Fc Heavy Chain

SEQ ID NO: 23801 - protein, 122 aa, Artificial Sequence; identical to SEQ ID NO: 10845
  Description of Artificial Sequence: Synthetic polypeptide
  VH of XENP019412

SEQ ID NO: 23802 - protein, 107 aa, Artificial Sequence; identical to SEQ ID NO: 10864
  Description of Artificial Sequence: Synthetic polypeptide
  VL of XENP019412

SEQ ID NO: 23803 - protein, 231 aa, Artificial Sequence; identical to SEQ ID NO: 21532
  Description of Artificial Sequence: Synthetic polypeptide
  Fc chain of XENP019412

SEQ ID NO: 23804 - protein, 5 aa, Artificial Sequence
  Description of Artificial Sequence: Synthetic peptide
  XENP019412 vhCDR1
NYWMN

SEQ ID NO: 23805 - protein, 19 aa, Artificial Sequence
  Description of Artificial Sequence: Synthetic peptide
  XENP019412 vhCDR2
EIRLYSNNYATHYAESVKG

SEQ ID NO: 23806 - protein, 11 aa, Artificial Sequence
  Description of Artificial Sequence: Synthetic peptide
  XENP019412 vhCDR3
YYGNYGGYFDV

SEQ ID NO: 23807 - protein, 11 aa, Artificial Sequence
  Description of Artificial Sequence: Synthetic peptide
  XENP019412 vlCDR1
RASQSVGNDVA

SEQ ID NO: 23808 - protein, 7 aa, Artificial Sequence
  Description of Artificial Sequence: Synthetic peptide
  XENP019412 vlCDR2
YASHRYT

SEQ ID NO: 23809 - protein, 9 aa, Artificial Sequence
  Description of Artificial Sequence: Synthetic peptide
  XENP019412 vlCDR3
QQDFSSPRT

SEQ ID NO: 23810 - protein, 214 aa, Artificial Sequence; identical to SEQ ID NO: 17140
  Description of Artificial Sequence: Synthetic polypeptide
  XENP019412 25F7_H0L0-1G6_L1.189_H1.278 Light Chain

SEQ ID NO: 23811 - protein, 214 aa, Artificial Sequence; identical to SEQ ID NO: 17140
  Description of Artificial Sequence: Synthetic polypeptide
  VL of XENP019412

SEQ ID NO: 23812 - protein, 11 aa, Artificial Sequence
  Description of Artificial Sequence: Synthetic peptide
  XENP019412 vlCDR1
RASQSISSYLA

SEQ ID NO: 23813 - protein, 7 aa, Artificial Sequence
  Description of Artificial Sequence: Synthetic peptide
  XENP019412 vlCDR2
DASNRAT

SEQ ID NO: 23814 - protein, 9 aa, Artificial Sequence
  Description of Artificial Sequence: Synthetic peptide
  XENP019412 vlCDR3
QQRSNWPLT

SEQ ID NO: 23815 - protein, 449 aa, Artificial Sequence; identical to SEQ ID NO: 21524
  Description of Artificial Sequence: Synthetic polypeptide
  XENP019670 25F7_H0L0-1G6_H1.284_L1.194 Fab-Fc Heavy Chain

SEQ ID NO: 23816 - protein, 120 aa, Artificial Sequence; identical to SEQ ID NO: 17136
  Description of Artificial Sequence: Synthetic polypeptide
  VH of XENP019670

SEQ ID NO: 23817 - protein, 5 aa, Artificial Sequence
  Description of Artificial Sequence: Synthetic peptide
  XENP019670 vhCDR1
DYYWN

SEQ ID NO: 23818 - protein, 16 aa, Artificial Sequence
  Description of Artificial Sequence: Synthetic peptide
  XENP019670 vhCDR2
EINHNGNTNSNPSLKS

SEQ ID NO: 23819 - protein, 12 aa, Artificial Sequence
  Description of Artificial Sequence: Synthetic peptide
  XENP019670 vhCDR3
GYSDYEYNWFDP

SEQ ID NO: 23820 - protein, 480 aa, Artificial Sequence
  Description of Artificial Sequence: Synthetic polypeptide
  XENP019670 25F7_H0L0-1G6_H1.284_L1.194 scFv-Fc Heavy Chain
EVQLVESGGGLVKPGGSLRLSCVASGFTFSNYWMNWVRQAPGKGLEWVCEIRLYSNNYATHYAESVKGRFTCSRDDSKSTLYLQMNNLKTEDTGVYYCTRYYGNYGGYFDVWGRGTLVTVSSGKPGSGKPGSGKPGSGKPGSEIVLTQSPATLSASPGERVTLTCRASQSVGNDVAWYQQKPGQAPRLLINYASHRYTGVPDRFTGSGYGTEFTLTISSVQSEDFGVYYCQQDFSSPRTFGGGTKVEIKEPKSSDKTHTCPPCPAPPVAGPSVFLFPPKPKDTLMISRTPEVTCVVVDVKHEDPEVKFNWYVDGVEVHNAKTKPREEQYNSTYRVVSVLTVLHQDWLNGKEYKCKVSNKALPAPIEKTISKAKGQPREPQVYTLPPSREQMTKNQVKLTCLVKGFYPSDIAVEWESNGQPENNYKTTPPVLDSDGSFFLYSKLTVDKSRWQQGNVFSCSVMHEALHNHYTQKSLSLSPGK

SEQ ID NO: 23821 - protein, 122 aa, Artificial Sequence; identical to SEQ ID NO: 10953
  Description of Artificial Sequence: Synthetic polypeptide
  VH of XENP019670

SEQ ID NO: 23822 - protein, 107 aa, Artificial Sequence; identical to SEQ ID NO: 10999
  Description of Artificial Sequence: Synthetic polypeptide
  VL of XENP019670

SEQ ID NO: 23823 - protein, 231 aa, Artificial Sequence; identical to SEQ ID NO: 21532
  Description of Artificial Sequence: Synthetic polypeptide
  Fc chain of XENP019670

SEQ ID NO: 23824 - protein, 5 aa, Artificial Sequence
  Description of Artificial Sequence: Synthetic peptide
  XENP019670 vhCDR1
NYWMN

SEQ ID NO: 23825 - protein, 19 aa, Artificial Sequence
  Description of Artificial Sequence: Synthetic peptide
  XENP019670 vhCDR2
EIRLYSNNYATHYAESVKG

SEQ ID NO: 23826 - protein, 11 aa, Artificial Sequence
  Description of Artificial Sequence: Synthetic peptide
  XENP019670 vhCDR3
YYGNYGGYFDV

SEQ ID NO: 23827 - protein, 11 aa, Artificial Sequence
  Description of Artificial Sequence: Synthetic peptide
  XENP019670 vlCDR1
RASQSVGNDVA

SEQ ID NO: 23828 - protein, 7 aa, Artificial Sequence
  Description of Artificial Sequence: Synthetic peptide
  XENP019670 vlCDR2
YASHRYT

SEQ ID NO: 23829 - protein, 9 aa, Artificial Sequence
  Description of Artificial Sequence: Synthetic peptide
  XENP019670 vlCDR3
QQDFSSPRT

SEQ ID NO: 23830 - protein, 214 aa, Artificial Sequence; identical to SEQ ID NO: 17140
  Description of Artificial Sequence: Synthetic polypeptide
  XENP019670 25F7_H0L0-1G6_H1.284_L1.194 Light Chain

SEQ ID NO: 23831 - protein, 214 aa, Artificial Sequence; identical to SEQ ID NO: 17140
  Description of Artificial Sequence: Synthetic polypeptide
  VL of XENP019670

SEQ ID NO: 23832 - protein, 11 aa, Artificial Sequence
  Description of Artificial Sequence: Synthetic peptide
  XENP019670 vlCDR1
RASQSISSYLA

SEQ ID NO: 23833 - protein, 7 aa, Artificial Sequence
  Description of Artificial Sequence: Synthetic peptide
  XENP019670 vlCDR2
DASNRAT

SEQ ID NO: 23834 - protein, 9 aa, Artificial Sequence
  Description of Artificial Sequence: Synthetic peptide
  XENP019670 vlCDR3
QQRSNWPLT

SEQ ID NO: 23835 - protein, 449 aa, Artificial Sequence; identical to SEQ ID NO: 21524
  Description of Artificial Sequence: Synthetic polypeptide
  XENP019671 25F7_H0L0-1G6_L1.194_H1.284 Fab-Fc Heavy Chain

SEQ ID NO: 23836 - protein, 120 aa, Artificial Sequence; identical to SEQ ID NO: 17136
  Description of Artificial Sequence: Synthetic polypeptide
  VH of XENP019671

SEQ ID NO: 23837 - protein, 5 aa, Artificial Sequence
  Description of Artificial Sequence: Synthetic peptide
  XENP019671 vhCDR1
DYYWN

SEQ ID NO: 23838 - protein, 16 aa, Artificial Sequence
  Description of Artificial Sequence: Synthetic peptide
  XENP019671 vhCDR2
EINHNGNTNSNPSLKS

SEQ ID NO: 23839 - protein, 12 aa, Artificial Sequence
  Description of Artificial Sequence: Synthetic peptide
  XENP019671 vhCDR3
GYSDYEYNWFDP

SEQ ID NO: 23840 - protein, 480 aa, Artificial Sequence
  Description of Artificial Sequence: Synthetic polypeptide
  XENP019671 25F7_H0L0-1G6_L1.194_H1.284 scFv-Fc Heavy Chain
EIVLTQSPATLSASPGERVTLTCRASQSVGNDVAWYQQKPGQAPRLLINYASHRYTGVPDRFTGSGYGTEFTLTISSVQSEDFGVYYCQQDFSSPRTFGGGTKVEIKGKPGSGKPGSGKPGSGKPGSEVQLVESGGGLVKPGGSLRLSCVASGFTFSNYWMNWVRQAPGKGLEWVCEIRLYSNNYATHYAESVKGRFTCSRDDSKSTLYLQMNNLKTEDTGVYYCTRYYGNYGGYFDVWGRGTLVTVSSEPKSSDKTHTCPPCPAPPVAGPSVFLFPPKPKDTLMISRTPEVTCVVVDVKHEDPEVKFNWYVDGVEVHNAKTKPREEQYNSTYRVVSVLTVLHQDWLNGKEYKCKVSNKALPAPIEKTISKAKGQPREPQVYTLPPSREQMTKNQVKLTCLVKGFYPSDIAVEWESNGQPENNYKTTPPVLDSDGSFFLYSKLTVDKSRWQQGNVFSCSVMHEALHNHYTQKSLSLSPGK

SEQ ID NO: 23841 - protein, 107 aa, Artificial Sequence; identical to SEQ ID NO: 10999
  Description of Artificial Sequence: Synthetic polypeptide
  VH of XENP019671

SEQ ID NO: 23842 - protein, 122 aa, Artificial Sequence; identical to SEQ ID NO: 10953
  Description of Artificial Sequence: Synthetic polypeptide
  VL of XENP019671

SEQ ID NO: 23843 - protein, 231 aa, Artificial Sequence; identical to SEQ ID NO: 21532
  Description of Artificial Sequence: Synthetic polypeptide
  Fc chain of XENP019671

SEQ ID NO: 23844 - protein, 11 aa, Artificial Sequence
  Description of Artificial Sequence: Synthetic peptide
  XENP019671 vhCDR1
RASQSVGNDVA

SEQ ID NO: 23845 - protein, 7 aa, Artificial Sequence
  Description of Artificial Sequence: Synthetic peptide
  XENP019671 vhCDR2
YASHRYT

SEQ ID NO: 23846 - protein, 9 aa, Artificial Sequence
  Description of Artificial Sequence: Synthetic peptide
  XENP019671 vhCDR3
QQDFSSPRT

SEQ ID NO: 23847 - protein, 5 aa, Artificial Sequence
  Description of Artificial Sequence: Synthetic peptide
  XENP019671 vlCDR1
NYWMN

SEQ ID NO: 23848 - protein, 19 aa, Artificial Sequence
  Description of Artificial Sequence: Synthetic peptide
  XENP019671 vlCDR2
EIRLYSNNYATHYAESVKG

SEQ ID NO: 23849 - protein, 11 aa, Artificial Sequence
  Description of Artificial Sequence: Synthetic peptide
  XENP019671 vlCDR3
YYGNYGGYFDV

SEQ ID NO: 23850 - protein, 214 aa, Artificial Sequence; identical to SEQ ID NO: 17140
  Description of Artificial Sequence: Synthetic polypeptide
  XENP019671 25F7_H0L0-1G6_L1.194_H1.284 Light Chain

SEQ ID NO: 23851 - protein, 214 aa, Artificial Sequence; identical to SEQ ID NO: 17140
  Description of Artificial Sequence: Synthetic polypeptide
  VL of XENP019671

SEQ ID NO: 23852 - protein, 11 aa, Artificial Sequence
  Description of Artificial Sequence: Synthetic peptide
  XENP019671 vlCDR1
RASQSISSYLA

SEQ ID NO: 23853 - protein, 7 aa, Artificial Sequence
  Description of Artificial Sequence: Synthetic peptide
  XENP019671 vlCDR2
DASNRAT

SEQ ID NO: 23854 - protein, 9 aa, Artificial Sequence
  Description of Artificial Sequence: Synthetic peptide
  XENP019671 vlCDR3
QQRSNWPLT

SEQ ID NO: 23855 - protein, 449 aa, Artificial Sequence; identical to SEQ ID NO: 21524
  Description of Artificial Sequence: Synthetic polypeptide
  XENP019672 25F7_H0L0-1G6_H1.288_L1.210 Fab-Fc Heavy Chain

SEQ ID NO: 23856 - protein, 120 aa, Artificial Sequence; identical to SEQ ID NO: 17136
  Description of Artificial Sequence: Synthetic polypeptide
  VH of XENP019672

SEQ ID NO: 23857 - protein, 5 aa, Artificial Sequence
  Description of Artificial Sequence: Synthetic peptide
  XENP019672 vhCDR1
DYYWN

SEQ ID NO: 23858 - protein, 16 aa, Artificial Sequence
  Description of Artificial Sequence: Synthetic peptide
  XENP019672 vhCDR2
EINHNGNTNSNPSLKS

SEQ ID NO: 23859 - protein, 12 aa, Artificial Sequence
  Description of Artificial Sequence: Synthetic peptide
  XENP019672 vhCDR3
GYSDYEYNWFDP

SEQ ID NO: 23860 - protein, 480 aa, Artificial Sequence
  Description of Artificial Sequence: Synthetic polypeptide
  XENP019672 25F7_H0L0-1G6_H1.288_L1.210 scFv-Fc Heavy Chain
EVQLVESGGGLVKPGGSLRLSCVASGFTFSNYWMNWVRQAPGKCLEWVAEIRLYSNNYATHYAESVKGRFTISRDDSKSTLYLQMNNLKTEDTGVYYCTRYYGNYGGYFDVWGRGTLVTVSSGKPGSGKPGSGKPGSGKPGSEIVLTQSPATLSASPGERVTLTCRASQSVGNDVAWYQQKPGQAPRLLINYASHRYTGVPDRFTGSGYGTEFTLTISSVQSEDFGVYYCQQDFSSPRTFGCGTKVEIKEPKSSDKTHTCPPCPAPPVAGPSVFLFPPKPKDTLMISRTPEVTCVVVDVKHEDPEVKFNWYVDGVEVHNAKTKPREEQYNSTYRVVSVLTVLHQDWLNGKEYKCKVSNKALPAPIEKTISKAKGQPREPQVYTLPPSREQMTKNQVKLTCLVKGFYPSDIAVEWESNGQPENNYKTTPPVLDSDGSFFLYSKLTVDKSRWQQGNVFSCSVMHEALHNHYTQKSLSLSPGK

SEQ ID NO: 23861 - protein, 122 aa, Artificial Sequence; identical to SEQ ID NO: 11358
  Description of Artificial Sequence: Synthetic polypeptide
  VH of XENP019672

SEQ ID NO: 23862 - protein, 107 aa, Artificial Sequence; identical to SEQ ID NO: 11359
  Description of Artificial Sequence: Synthetic polypeptide
  VL of XENP019672

SEQ ID NO: 23863 - protein, 231 aa, Artificial Sequence; identical to SEQ ID NO: 21532
  Description of Artificial Sequence: Synthetic polypeptide
  Fc chain of XENP019672

SEQ ID NO: 23864 - protein, 5 aa, Artificial Sequence
  Description of Artificial Sequence: Synthetic peptide
  XENP019672 vhCDR1
NYWMN

SEQ ID NO: 23865 - protein, 19 aa, Artificial Sequence
  Description of Artificial Sequence: Synthetic peptide
  XENP019672 vhCDR2
EIRLYSNNYATHYAESVKG

SEQ ID NO: 23866 - protein, 11 aa, Artificial Sequence
  Description of Artificial Sequence: Synthetic peptide
  XENP019672 vhCDR3
YYGNYGGYFDV

SEQ ID NO: 23867 - protein, 11 aa, Artificial Sequence
  Description of Artificial Sequence: Synthetic peptide
  XENP019672 vlCDR1
RASQSVGNDVA

SEQ ID NO: 23868 - protein, 7 aa, Artificial Sequence
  Description of Artificial Sequence: Synthetic peptide
  XENP019672 vlCDR2
YASHRYT

SEQ ID NO: 23869 - protein, 9 aa, Artificial Sequence
  Description of Artificial Sequence: Synthetic peptide
  XENP019672 vlCDR3
QQDFSSPRT

SEQ ID NO: 23870 - protein, 214 aa, Artificial Sequence; identical to SEQ ID NO: 17140
  Description of Artificial Sequence: Synthetic polypeptide
  XENP019672 25F7_H0L0-1G6_H1.288_L1.210 Light Chain

SEQ ID NO: 23871 - protein, 214 aa, Artificial Sequence; identical to SEQ ID NO: 17140
  Description of Artificial Sequence: Synthetic polypeptide
  VL of XENP019672

SEQ ID NO: 23872 - protein, 11 aa, Artificial Sequence
  Description of Artificial Sequence: Synthetic peptide
  XENP019672 vlCDR1
RASQSISSYLA

SEQ ID NO: 23873 - protein, 7 aa, Artificial Sequence
  Description of Artificial Sequence: Synthetic peptide
  XENP019672 vlCDR2
DASNRAT

SEQ ID NO: 23874 - protein, 9 aa, Artificial Sequence
  Description of Artificial Sequence: Synthetic peptide
  XENP019672 vlCDR3
QQRSNWPLT

SEQ ID NO: 23875 - protein, 449 aa, Artificial Sequence; identical to SEQ ID NO: 21524
  Description of Artificial Sequence: Synthetic polypeptide
  XENP019673 25F7_H0L0-1G6_L1.210_H1.288 Fab-Fc Heavy Chain

SEQ ID NO: 23876 - protein, 120 aa, Artificial Sequence; identical to SEQ ID NO: 17136
  Description of Artificial Sequence: Synthetic polypeptide
  VH of XENP019673

SEQ ID NO: 23877 - protein, 5 aa, Artificial Sequence
  Description of Artificial Sequence: Synthetic peptide
  XENP019673 vhCDR1
DYYWN

SEQ ID NO: 23878 - protein, 16 aa, Artificial Sequence
  Description of Artificial Sequence: Synthetic peptide
  XENP019673 vhCDR2
EINHNGNTNSNPSLKS

SEQ ID NO: 23879 - protein, 12 aa, Artificial Sequence
  Description of Artificial Sequence: Synthetic peptide
  XENP019673 vhCDR3
GYSDYEYNWFDP

SEQ ID NO: 23880 - protein, 480 aa, Artificial Sequence; identical to SEQ ID NO: 23381
  Description of Artificial Sequence: Synthetic polypeptide
  XENP019673 25F7_H0L0-1G6_L1.210_H1.288 scFv-Fc Heavy Chain

SEQ ID NO: 23881 - protein, 107 aa, Artificial Sequence; identical to SEQ ID NO: 11359
  Description of Artificial Sequence: Synthetic polypeptide
  VH of XENP019673

SEQ ID NO: 23882 - protein, 122 aa, Artificial Sequence; identical to SEQ ID NO: 11358
  Description of Artificial Sequence: Synthetic polypeptide
  VL of XENP019673

SEQ ID NO: 23883 - protein, 231 aa, Artificial Sequence; identical to SEQ ID NO: 21532
  Description of Artificial Sequence: Synthetic polypeptide
  Fc chain of XENP019673

SEQ ID NO: 23884 - protein, 11 aa, Artificial Sequence
  Description of Artificial Sequence: Synthetic peptide
  XENP019673 vhCDR1
RASQSVGNDVA

SEQ ID NO: 23885 - protein, 7 aa, Artificial Sequence
  Description of Artificial Sequence: Synthetic peptide
  XENP019673 vhCDR2
YASHRYT

SEQ ID NO: 23886 - protein, 9 aa, Artificial Sequence
  Description of Artificial Sequence: Synthetic peptide
  XENP019673 vhCDR3
QQDFSSPRT

SEQ ID NO: 23887 - protein, 5 aa, Artificial Sequence
  Description of Artificial Sequence: Synthetic peptide
  XENP019673 vlCDR1
NYWMN

SEQ ID NO: 23888 - protein, 19 aa, Artificial Sequence
  Description of Artificial Sequence: Synthetic peptide
  XENP019673 vlCDR2
EIRLYSNNYATHYAESVKG

SEQ ID NO: 23889 - protein, 11 aa, Artificial Sequence
  Description of Artificial Sequence: Synthetic peptide
  XENP019673 vlCDR3
YYGNYGGYFDV

SEQ ID NO: 23890 - protein, 214 aa, Artificial Sequence; identical to SEQ ID NO: 17140
  Description of Artificial Sequence: Synthetic polypeptide
  XENP019673 25F7_H0L0-1G6_L1.210_H1.288 Light Chain

SEQ ID NO: 23891 - protein, 214 aa, Artificial Sequence; identical to SEQ ID NO: 17140
  Description of Artificial Sequence: Synthetic polypeptide
  VL of XENP019673

SEQ ID NO: 23892 - protein, 11 aa, Artificial Sequence
  Description of Artificial Sequence: Synthetic peptide
  XENP019673 vlCDR1
RASQSISSYLA

SEQ ID NO: 23893 - protein, 7 aa, Artificial Sequence
  Description of Artificial Sequence: Synthetic peptide
  XENP019673 vlCDR2
DASNRAT

SEQ ID NO: 23894 - protein, 9 aa, Artificial Sequence
  Description of Artificial Sequence: Synthetic peptide
  XENP019673 vlCDR3
QQRSNWPLT

SEQ ID NO: 23895 - protein, 449 aa, Artificial Sequence; identical to SEQ ID NO: 21524
  Description of Artificial Sequence: Synthetic polypeptide
  XENP019674 25F7_H0L0-1G6_H1.279_L1.194 Fab-Fc Heavy Chain

SEQ ID NO: 23896 - protein, 120 aa, Artificial Sequence; identical to SEQ ID NO: 17136
  Description of Artificial Sequence: Synthetic polypeptide
  VH of XENP019674

SEQ ID NO: 23897 - protein, 5 aa, Artificial Sequence
  Description of Artificial Sequence: Synthetic peptide
  XENP019674 vhCDR1
DYYWN

SEQ ID NO: 23898 - protein, 16 aa, Artificial Sequence
  Description of Artificial Sequence: Synthetic peptide
  XENP019674 vhCDR2
EINHNGNTNSNPSLKS

SEQ ID NO: 23899 - protein, 12 aa, Artificial Sequence
  Description of Artificial Sequence: Synthetic peptide
  XENP019674 vhCDR3
GYSDYEYNWFDP

SEQ ID NO: 23900 - protein, 480 aa, Artificial Sequence; identical to SEQ ID NO: 23401
  Description of Artificial Sequence: Synthetic polypeptide
  XENP019674 25F7_H0L0-1G6_H1.279_L1.194 scFv-Fc Heavy Chain

SEQ ID NO: 23901 - protein, 122 aa, Artificial Sequence; identical to SEQ ID NO: 10908
  Description of Artificial Sequence: Synthetic polypeptide
  VH of XENP019674

SEQ ID NO: 23902 - protein, 107 aa, Artificial Sequence; identical to SEQ ID NO: 10999
  Description of Artificial Sequence: Synthetic polypeptide
  VL of XENP019674

SEQ ID NO: 23903 - protein, 231 aa, Artificial Sequence; identical to SEQ ID NO: 21532
  Description of Artificial Sequence: Synthetic polypeptide
  Fc chain of XENP019674

SEQ ID NO: 23904 - protein, 5 aa, Artificial Sequence
  Description of Artificial Sequence: Synthetic peptide
  XENP019674 vhCDR1
NYWMN

SEQ ID NO: 23905 - protein, 19 aa, Artificial Sequence
  Description of Artificial Sequence: Synthetic peptide
  XENP019674 vhCDR2
EIRLYSNNYATHYAESVKG

SEQ ID NO: 23906 - protein, 11 aa, Artificial Sequence
  Description of Artificial Sequence: Synthetic peptide
  XENP019674 vhCDR3
YYGNYGGYFDV

SEQ ID NO: 23907 - protein, 11 aa, Artificial Sequence
  Description of Artificial Sequence: Synthetic peptide
  XENP019674 vlCDR1
RASQSVGNDVA

SEQ ID NO: 23908 - protein, 7 aa, Artificial Sequence
  Description of Artificial Sequence: Synthetic peptide
  XENP019674 vlCDR2
YASHRYT

SEQ ID NO: 23909 - protein, 9 aa, Artificial Sequence
  Description of Artificial Sequence: Synthetic peptide
  XENP019674 vlCDR3
QQDFSSPRT

SEQ ID NO: 23910 - protein, 214 aa, Artificial Sequence; identical to SEQ ID NO: 17140
  Description of Artificial Sequence: Synthetic polypeptide
  XENP019674 25F7_H0L0-1G6_H1.279_L1.194 Light Chain

SEQ ID NO: 23911 - protein, 214 aa, Artificial Sequence; identical to SEQ ID NO: 17140
  Description of Artificial Sequence: Synthetic polypeptide
  VL of XENP019674

SEQ ID NO: 23912 - protein, 11 aa, Artificial Sequence
  Description of Artificial Sequence: Synthetic peptide
  XENP019674 vlCDR1
RASQSISSYLA

SEQ ID NO: 23913 - protein, 7 aa, Artificial Sequence
  Description of Artificial Sequence: Synthetic peptide
  XENP019674 vlCDR2
DASNRAT

SEQ ID NO: 23914 - protein, 9 aa, Artificial Sequence
  Description of Artificial Sequence: Synthetic peptide
  XENP019674 vlCDR3
QQRSNWPLT

SEQ ID NO: 23915 - protein, 449 aa, Artificial Sequence; identical to SEQ ID NO: 21524
  Description of Artificial Sequence: Synthetic polypeptide
  XENP019675 25F7_H0L0-1G6_H1.282_L1.194 Fab-Fc Heavy Chain

SEQ ID NO: 23916 - protein, 120 aa, Artificial Sequence; identical to SEQ ID NO: 17136
  Description of Artificial Sequence: Synthetic polypeptide
  VH of XENP019675

SEQ ID NO: 23917 - protein, 5 aa, Artificial Sequence
  Description of Artificial Sequence: Synthetic peptide
  XENP019675 vhCDR1
DYYWN

SEQ ID NO: 23918 - protein, 16 aa, Artificial Sequence
  Description of Artificial Sequence: Synthetic peptide
  XENP019675 vhCDR2
EINHNGNTNSNPSLKS

SEQ ID NO: 23919 - protein, 12 aa, Artificial Sequence
  Description of Artificial Sequence: Synthetic peptide
  XENP019675 vhCDR3
GYSDYEYNWFDP

SEQ ID NO: 23920 - protein, 480 aa, Artificial Sequence
  Description of Artificial Sequence: Synthetic polypeptide
  XENP019675 25F7_H0L0-1G6_H1.282_L1.194 scFv-Fc Heavy Chain
EVQLVESGGGLVKPGGSLRLTCVASGFTFSNYWMNWVRQAPGKGLEWVAEIRLYSNNYATHYAESVKGRFTISRDDSKSMLYLQMNNLKTEDTGVYYCTRYYGNYGGYFDVWGRGTLVTVSSGKPGSGKPGSGKPGSGKPGSEIVLTQSPATLSASPGERVTLTCRASQSVGNDVAWYQQKPGQAPRLLINYASHRYTGVPDRFTGSGYGTEFTLTISSVQSEDFGVYYCQQDFSSPRTFGGGTKVEIKEPKSSDKTHTCPPCPAPPVAGPSVFLFPPKPKDTLMISRTPEVTCVVVDVKHEDPEVKFNWYVDGVEVHNAKTKPREEQYNSTYRVVSVLTVLHQDWLNGKEYKCKVSNKALPAPIEKTISKAKGQPREPQVYTLPPSREQMTKNQVKLTCLVKGFYPSDIAVEWESNGQPENNYKTTPPVLDSDGSFFLYSKLTVDKSRWQQGNVFSCSVMHEALHNHYTQKSLSLSPGK

SEQ ID NO: 23921 - protein, 122 aa, Artificial Sequence; identical to SEQ ID NO: 10935
  Description of Artificial Sequence: Synthetic polypeptide
  VH of XENP019675

SEQ ID NO: 23922 - protein, 107 aa, Artificial Sequence; identical to SEQ ID NO: 10999
  Description of Artificial Sequence: Synthetic polypeptide
  VL of XENP019675

SEQ ID NO: 23923 - protein, 231 aa, Artificial Sequence; identical to SEQ ID NO: 21532
  Description of Artificial Sequence: Synthetic polypeptide
  Fc chain of XENP019675

SEQ ID NO: 23924 - protein, 5 aa, Artificial Sequence
  Description of Artificial Sequence: Synthetic peptide
  XENP019675 vhCDR1
NYWMN

SEQ ID NO: 23925 - protein, 19 aa, Artificial Sequence
  Description of Artificial Sequence: Synthetic peptide
  XENP019675 vhCDR2
EIRLYSNNYATHYAESVKG

SEQ ID NO: 23926 - protein, 11 aa, Artificial Sequence
  Description of Artificial Sequence: Synthetic peptide
  XENP019675 vhCDR3
YYGNYGGYFDV

SEQ ID NO: 23927 - protein, 11 aa, Artificial Sequence
  Description of Artificial Sequence: Synthetic peptide
  XENP019675 vlCDR1
RASQSVGNDVA

SEQ ID NO: 23928 - protein, 7 aa, Artificial Sequence
  Description of Artificial Sequence: Synthetic peptide
  XENP019675 vlCDR2
YASHRYT

SEQ ID NO: 23929 - protein, 9 aa, Artificial Sequence
  Description of Artificial Sequence: Synthetic peptide
  XENP019675 vlCDR3
QQDFSSPRT

SEQ ID NO: 23930 - protein, 214 aa, Artificial Sequence; identical to SEQ ID NO: 17140
  Description of Artificial Sequence: Synthetic polypeptide
  XENP019675 25F7_H0L0-1G6_H1.282_L1.194 Light Chain

SEQ ID NO: 23931 - protein, 214 aa, Artificial Sequence; identical to SEQ ID NO: 17140
  Description of Artificial Sequence: Synthetic polypeptide
  VL of XENP019675

SEQ ID NO: 23932 - protein, 11 aa, Artificial Sequence
  Description of Artificial Sequence: Synthetic peptide
  XENP019675 vlCDR1
RASQSISSYLA

SEQ ID NO: 23933 - protein, 7 aa, Artificial Sequence
  Description of Artificial Sequence: Synthetic peptide
  XENP019675 vlCDR2
DASNRAT

SEQ ID NO: 23934 - protein, 9 aa, Artificial Sequence
  Description of Artificial Sequence: Synthetic peptide
  XENP019675 vlCDR3
QQRSNWPLT

SEQ ID NO: 23935 - protein, 449 aa, Artificial Sequence; identical to SEQ ID NO: 21524
  Description of Artificial Sequence: Synthetic polypeptide
  XENP019676 25F7_H0L0-1G6_L1.194_H1.279 Fab-Fc Heavy Chain

SEQ ID NO: 23936 - protein, 120 aa, Artificial Sequence; identical to SEQ ID NO: 17136
  Description of Artificial Sequence: Synthetic polypeptide
  VH of XENP019676

SEQ ID NO: 23937 - protein, 5 aa, Artificial Sequence
  Description of Artificial Sequence: Synthetic peptide
  XENP019676 vhCDR1
DYYWN

SEQ ID NO: 23938 - protein, 16 aa, Artificial Sequence
  Description of Artificial Sequence: Synthetic peptide
  XENP019676 vhCDR2
EINHNGNTNSNPSLKS

SEQ ID NO: 23939 - protein, 12 aa, Artificial Sequence
  Description of Artificial Sequence: Synthetic peptide
  XENP019676 vhCDR3
GYSDYEYNWFDP

SEQ ID NO: 23940 - protein, 480 aa, Artificial Sequence; identical to SEQ ID NO: 23221
  Description of Artificial Sequence: Synthetic polypeptide
  XENP019676 25F7_H0L0-1G6_L1.194_H1.279 scFv-Fc Heavy Chain

SEQ ID NO: 23941 - protein, 107 aa, Artificial Sequence; identical to SEQ ID NO: 10999
  Description of Artificial Sequence: Synthetic polypeptide
  VH of XENP019676

SEQ ID NO: 23942 - protein, 122 aa, Artificial Sequence; identical to SEQ ID NO: 10908
  Description of Artificial Sequence: Synthetic polypeptide
  VL of XENP019676

SEQ ID NO: 23943 - protein, 231 aa, Artificial Sequence; identical to SEQ ID NO: 21532
  Description of Artificial Sequence: Synthetic polypeptide
  Fc chain of XENP019676

SEQ ID NO: 23944 - protein, 11 aa, Artificial Sequence
  Description of Artificial Sequence: Synthetic peptide
  XENP019676 vhCDR1
RASQSVGNDVA

SEQ ID NO: 23945 - protein, 7 aa, Artificial Sequence
  Description of Artificial Sequence: Synthetic peptide
  XENP019676 vhCDR2
YASHRYT

SEQ ID NO: 23946 - protein, 9 aa, Artificial Sequence
  Description of Artificial Sequence: Synthetic peptide
  XENP019676 vhCDR3
QQDFSSPRT

SEQ ID NO: 23947 - protein, 5 aa, Artificial Sequence
  Description of Artificial Sequence: Synthetic peptide
  XENP019676 vlCDR1
NYWMN

SEQ ID NO: 23948 - protein, 19 aa, Artificial Sequence
  Description of Artificial Sequence: Synthetic peptide
  XENP019676 vlCDR2
EIRLYSNNYATHYAESVKG

SEQ ID NO: 23949 - protein, 11 aa, Artificial Sequence
  Description of Artificial Sequence: Synthetic peptide
  XENP019676 vlCDR3
YYGNYGGYFDV

SEQ ID NO: 23950 - protein, 214 aa, Artificial Sequence; identical to SEQ ID NO: 17140
  Description of Artificial Sequence: Synthetic polypeptide
  XENP019676 25F7_H0L0-1G6_L1.194_H1.279 Light Chain

SEQ ID NO: 23951 - protein, 214 aa, Artificial Sequence; identical to SEQ ID NO: 17140
  Description of Artificial Sequence: Synthetic polypeptide
  VL of XENP019676

SEQ ID NO: 23952 - protein, 11 aa, Artificial Sequence
  Description of Artificial Sequence: Synthetic peptide
  XENP019676 vlCDR1
RASQSISSYLA

SEQ ID NO: 23953 - protein, 7 aa, Artificial Sequence
  Description of Artificial Sequence: Synthetic peptide
  XENP019676 vlCDR2
DASNRAT

SEQ ID NO: 23954 - protein, 9 aa, Artificial Sequence
  Description of Artificial Sequence: Synthetic peptide
  XENP019676 vlCDR3
QQRSNWPLT

SEQ ID NO: 23955 - protein, 449 aa, Artificial Sequence; identical to SEQ ID NO: 21524
  Description of Artificial Sequence: Synthetic polypeptide
  XENP019677 25F7_H0L0-1G6_L1.194_H1.282 Fab-Fc Heavy Chain

SEQ ID NO: 23956 - protein, 120 aa, Artificial Sequence; identical to SEQ ID NO: 17136
  Description of Artificial Sequence: Synthetic polypeptide
  VH of XENP019677

SEQ ID NO: 23957 - protein, 5 aa, Artificial Sequence
  Description of Artificial Sequence: Synthetic peptide
  XENP019677 vhCDR1
DYYWN

SEQ ID NO: 23958 - protein, 16 aa, Artificial Sequence
  Description of Artificial Sequence: Synthetic peptide
  XENP019677 vhCDR2
EINHNGNTNSNPSLKS

SEQ ID NO: 23959 - protein, 12 aa, Artificial Sequence
  Description of Artificial Sequence: Synthetic peptide
  XENP019677 vhCDR3
GYSDYEYNWFDP

SEQ ID NO: 23960 - protein, 480 aa, Artificial Sequence
  Description of Artificial Sequence: Synthetic polypeptide
  XENP019677 25F7_H0L0-1G6_L1.194_H1.282 scFv-Fc Heavy Chain
EIVLTQSPATLSASPGERVTLTCRASQSVGNDVAWYQQKPGQAPRLLINYASHRYTGVPDRFTGSGYGTEFTLTISSVQSEDFGVYYCQQDFSSPRTFGGGTKVEIKGKPGSGKPGSGKPGSGKPGSEVQLVESGGGLVKPGGSLRLTCVASGFTFSNYWMNWVRQAPGKGLEWVAEIRLYSNNYATHYAESVKGRFTISRDDSKSMLYLQMNNLKTEDTGVYYCTRYYGNYGGYFDVWGRGTLVTVSSEPKSSDKTHTCPPCPAPPVAGPSVFLFPPKPKDTLMISRTPEVTCVVVDVKHEDPEVKFNWYVDGVEVHNAKTKPREEQYNSTYRVVSVLTVLHQDWLNGKEYKCKVSNKALPAPIEKTISKAKGQPREPQVYTLPPSREQMTKNQVKLTCLVKGFYPSDIAVEWESNGQPENNYKTTPPVLDSDGSFFLYSKLTVDKSRWQQGNVFSCSVMHEALHNHYTQKSLSLSPGK

SEQ ID NO: 23961 - protein, 107 aa, Artificial Sequence; identical to SEQ ID NO: 10999
  Description of Artificial Sequence: Synthetic polypeptide
  VH of XENP019677

SEQ ID NO: 23962 - protein, 122 aa, Artificial Sequence; identical to SEQ ID NO: 10935
  Description of Artificial Sequence: Synthetic polypeptide
  VL of XENP019677

SEQ ID NO: 23963 - protein, 231 aa, Artificial Sequence; identical to SEQ ID NO: 21532
  Description of Artificial Sequence: Synthetic polypeptide
  Fc chain of XENP019677

SEQ ID NO: 23964 - protein, 11 aa, Artificial Sequence
  Description of Artificial Sequence: Synthetic peptide
  XENP019677 vhCDR1
RASQSVGNDVA

SEQ ID NO: 23965 - protein, 7 aa, Artificial Sequence
  Description of Artificial Sequence: Synthetic peptide
  XENP019677 vhCDR2
YASHRYT

SEQ ID NO: 23966 - protein, 9 aa, Artificial Sequence
  Description of Artificial Sequence: Synthetic peptide
  XENP019677 vhCDR3
QQDFSSPRT

SEQ ID NO: 23967 - protein, 5 aa, Artificial Sequence
  Description of Artificial Sequence: Synthetic peptide
  XENP019677 vlCDR1
NYWMN

SEQ ID NO: 23968 - protein, 19 aa, Artificial Sequence
  Description of Artificial Sequence: Synthetic peptide
  XENP019677 vlCDR2
EIRLYSNNYATHYAESVKG

SEQ ID NO: 23969 - protein, 11 aa, Artificial Sequence
  Description of Artificial Sequence: Synthetic peptide
  XENP019677 vlCDR3
YYGNYGGYFDV

SEQ ID NO: 23970 - protein, 214 aa, Artificial Sequence; identical to SEQ ID NO: 17140
  Description of Artificial Sequence: Synthetic polypeptide
  XENP019677 25F7_H0L0-1G6_L1.194_H1.282 Light Chain

SEQ ID NO: 23971 - protein, 214 aa, Artificial Sequence; identical to SEQ ID NO: 17140
  Description of Artificial Sequence: Synthetic polypeptide
  VL of XENP019677

SEQ ID NO: 23972 - protein, 11 aa, Artificial Sequence
  Description of Artificial Sequence: Synthetic peptide
  XENP019677 vlCDR1
RASQSISSYLA

SEQ ID NO: 23973 - protein, 7 aa, Artificial Sequence
  Description of Artificial Sequence: Synthetic peptide
  XENP019677 vlCDR2
DASNRAT

SEQ ID NO: 23974 - protein, 9 aa, Artificial Sequence
  Description of Artificial Sequence: Synthetic peptide
  XENP019677 vlCDR3
QQRSNWPLT

SEQ ID NO: 23975 - protein, 447 aa, Artificial Sequence; identical to SEQ ID NO: 17175
  Description of Artificial Sequence: Synthetic polypeptide
  XENP020032 1H11_H2L2-1G6_H1.279_L1.194 Fab-Fc Heavy Chain

SEQ ID NO: 23976 - protein, 118 aa, Artificial Sequence; identical to SEQ ID NO: 17176
  Description of Artificial Sequence: Synthetic polypeptide
  VH of XENP020032

SEQ ID NO: 23977 - protein, 5 aa, Artificial Sequence
  Description of Artificial Sequence: Synthetic peptide
  XENP020032 vhCDR1
NYGMN

SEQ ID NO: 23978 - protein, 17 aa, Artificial Sequence
  Description of Artificial Sequence: Synthetic peptide
  XENP020032 vhCDR2
WINTYTGEPTYADGFTG

SEQ ID NO: 23979 - protein, 9 aa, Artificial Sequence
  Description of Artificial Sequence: Synthetic peptide
  XENP020032 vhCDR3
GRGMGYFDY

SEQ ID NO: 23980 - protein, 480 aa, Artificial Sequence; identical to SEQ ID NO: 23401
  Description of Artificial Sequence: Synthetic polypeptide
  XENP020032 1H11_H2L2-1G6_H1.279_L1.194 scFv-Fc Heavy Chain

SEQ ID NO: 23981 - protein, 122 aa, Artificial Sequence; identical to SEQ ID NO: 10908
  Description of Artificial Sequence: Synthetic polypeptide
  VH of XENP020032

SEQ ID NO: 23982 - protein, 107 aa, Artificial Sequence; identical to SEQ ID NO: 10999
  Description of Artificial Sequence: Synthetic polypeptide
  VL of XENP020032

SEQ ID NO: 23983 - protein, 231 aa, Artificial Sequence; identical to SEQ ID NO: 21532
  Description of Artificial Sequence: Synthetic polypeptide
  Fc chain of XENP020032

SEQ ID NO: 23984 - protein, 5 aa, Artificial Sequence
  Description of Artificial Sequence: Synthetic peptide
  XENP020032 vhCDR1
NYWMN

SEQ ID NO: 23985 - protein, 19 aa, Artificial Sequence
  Description of Artificial Sequence: Synthetic peptide
  XENP020032 vhCDR2
EIRLYSNNYATHYAESVKG

SEQ ID NO: 23986 - protein, 11 aa, Artificial Sequence
  Description of Artificial Sequence: Synthetic peptide
  XENP020032 vhCDR3
YYGNYGGYFDV

SEQ ID NO: 23987 - protein, 11 aa, Artificial Sequence
  Description of Artificial Sequence: Synthetic peptide
  XENP020032 vlCDR1
RASQSVGNDVA

SEQ ID NO: 23988 - protein, 7 aa, Artificial Sequence
  Description of Artificial Sequence: Synthetic peptide
  XENP020032 vlCDR2
YASHRYT

SEQ ID NO: 23989 - protein, 9 aa, Artificial Sequence
  Description of Artificial Sequence: Synthetic peptide
  XENP020032 vlCDR3
QQDFSSPRT

SEQ ID NO: 23990 - protein, 214 aa, Artificial Sequence; identical to SEQ ID NO: 17170
  Description of Artificial Sequence: Synthetic polypeptide
  XENP020032 1H11_H2L2-1G6_H1.279_L1.194 Light Chain

SEQ ID NO: 23991 - protein, 214 aa, Artificial Sequence; identical to SEQ ID NO: 17170
  Description of Artificial Sequence: Synthetic polypeptide
  VL of XENP020032

SEQ ID NO: 23992 - protein, 11 aa, Artificial Sequence
  Description of Artificial Sequence: Synthetic peptide
  XENP020032 vlCDR1
RASENIYSNLA

SEQ ID NO: 23993 - protein, 7 aa, Artificial Sequence
  Description of Artificial Sequence: Synthetic peptide
  XENP020032 vlCDR2
AATNLAD

SEQ ID NO: 23994 - protein, 9 aa, Artificial Sequence
  Description of Artificial Sequence: Synthetic peptide
  XENP020032 vlCDR3
QHFWTTPRT

SEQ ID NO: 23995 - protein, 444 aa, Artificial Sequence; identical to SEQ ID NO: 17215
  Description of Artificial Sequence: Synthetic polypeptide
  XENP020033 8D7_H1L1-1G6_H1.279_L1.194 Fab-Fc Heavy Chain

SEQ ID NO: 23996 - protein, 115 aa, Artificial Sequence; identical to SEQ ID NO: 17216
  Description of Artificial Sequence: Synthetic polypeptide
  VH of XENP020033

SEQ ID NO: 23997 - protein, 5 aa, Artificial Sequence
  Description of Artificial Sequence: Synthetic peptide
  XENP020033 vhCDR1
SYGVH

SEQ ID NO: 23998 - protein, 15 aa, Artificial Sequence
  Description of Artificial Sequence: Synthetic peptide
  XENP020033 vhCDR2
VIWSGSTDYNPSLKS

SEQ ID NO: 23999 - protein, 8 aa, Artificial Sequence
  Description of Artificial Sequence: Synthetic peptide
  XENP020033 vhCDR3
TYYYAMDY

SEQ ID NO: 24000 - protein, 480 aa, Artificial Sequence; identical to SEQ ID NO: 23401
  Description of Artificial Sequence: Synthetic polypeptide
  XENP020033 8D7_H1L1-1G6_H1.279_L1.194 scFv-Fc Heavy Chain

SEQ ID NO: 24001 - protein, 122 aa, Artificial Sequence; identical to SEQ ID NO: 10908
  Description of Artificial Sequence: Synthetic polypeptide
  VH of XENP020033

SEQ ID NO: 24002 - protein, 107 aa, Artificial Sequence; identical to SEQ ID NO: 10999
  Description of Artificial Sequence: Synthetic polypeptide
  VL of XENP020033

SEQ ID NO: 24003 - protein, 231 aa, Artificial Sequence; identical to SEQ ID NO: 21532
  Description of Artificial Sequence: Synthetic polypeptide
  Fc chain of XENP020033

SEQ ID NO: 24004 - protein, 5 aa, Artificial Sequence
  Description of Artificial Sequence: Synthetic peptide
  XENP020033 vhCDR1
NYWMN

SEQ ID NO: 24005 - protein, 19 aa, Artificial Sequence
  Description of Artificial Sequence: Synthetic peptide
  XENP020033 vhCDR2
EIRLYSNNYATHYAESVKG

SEQ ID NO: 24006 - protein, 11 aa, Artificial Sequence
  Description of Artificial Sequence: Synthetic peptide
  XENP020033 vhCDR3
YYGNYGGYFDV

SEQ ID NO: 24007 - protein, 11 aa, Artificial Sequence
  Description of Artificial Sequence: Synthetic peptide
  XENP020033 vlCDR1
RASQSVGNDVA

SEQ ID NO: 24008 - protein, 7 aa, Artificial Sequence
  Description of Artificial Sequence: Synthetic peptide
  XENP020033 vlCDR2
YASHRYT

SEQ ID NO: 24009 - protein, 9 aa, Artificial Sequence
  Description of Artificial Sequence: Synthetic peptide
  XENP020033 vlCDR3
QQDFSSPRT

SEQ ID NO: 24010 - protein, 214 aa, Artificial Sequence; identical to SEQ ID NO: 17220
  Description of Artificial Sequence: Synthetic polypeptide
  XENP020033 8D7_H1L1-1G6_H1.279_L1.194 Light Chain

SEQ ID NO: 24011 - protein, 214 aa, Artificial Sequence; identical to SEQ ID NO: 17220
  Description of Artificial Sequence: Synthetic polypeptide
  VL of XENP020033

SEQ ID NO: 24012 - protein, 11 aa, Artificial Sequence
  Description of Artificial Sequence: Synthetic peptide
  XENP020033 vlCDR1
RASENIYSNLA

SEQ ID NO: 24013 - protein, 7 aa, Artificial Sequence
  Description of Artificial Sequence: Synthetic peptide
  XENP020033 vlCDR2
AATNLAD

SEQ ID NO: 24014 - protein, 9 aa, Artificial Sequence
  Description of Artificial Sequence: Synthetic peptide
  XENP020033 vlCDR3
QHFWGTPWT

SEQ ID NO: 24015 - protein, 447 aa, Artificial Sequence; identical to SEQ ID NO: 17235
  Description of Artificial Sequence: Synthetic polypeptide
  XENP020034 2A11_H1L2-1G6_H1.279_L1.194 Fab-Fc Heavy Chain

SEQ ID NO: 24016 - protein, 118 aa, Artificial Sequence; identical to SEQ ID NO: 17236
  Description of Artificial Sequence: Synthetic polypeptide
  VH of XENP020034

SEQ ID NO: 24017 - protein, 5 aa, Artificial Sequence
  Description of Artificial Sequence: Synthetic peptide
  XENP020034 vhCDR1
DYYMH

SEQ ID NO: 24018 - protein, 17 aa, Artificial Sequence
  Description of Artificial Sequence: Synthetic peptide
  XENP020034 vhCDR2
WIDPENGDTEYAPKFQG

SEQ ID NO: 24019 - protein, 9 aa, Artificial Sequence
  Description of Artificial Sequence: Synthetic peptide
  XENP020034 vhCDR3
RGVRQALDY

SEQ ID NO: 24020 - protein, 480 aa, Artificial Sequence; identical to SEQ ID NO: 23401
  Description of Artificial Sequence: Synthetic polypeptide
  XENP020034 2A11_H1L2-1G6_H1.279_L1.194 scFv-Fc Heavy Chain

SEQ ID NO: 24021 - protein, 122 aa, Artificial Sequence; identical to SEQ ID NO: 10908
  Description of Artificial Sequence: Synthetic polypeptide
  VH of XENP020034

SEQ ID NO: 24022 - protein, 107 aa, Artificial Sequence; identical to SEQ ID NO: 10999
  Description of Artificial Sequence: Synthetic polypeptide
  VL of XENP020034

SEQ ID NO: 24023 - protein, 231 aa, Artificial Sequence; identical to SEQ ID NO: 21532
  Description of Artificial Sequence: Synthetic polypeptide
  Fc chain of XENP020034

SEQ ID NO: 24024 - protein, 5 aa, Artificial Sequence
  Description of Artificial Sequence: Synthetic peptide
  XENP020034 vhCDR1
NYWMN

SEQ ID NO: 24025 - protein, 19 aa, Artificial Sequence
  Description of Artificial Sequence: Synthetic peptide
  XENP020034 vhCDR2
EIRLYSNNYATHYAESVKG

SEQ ID NO: 24026 - protein, 11 aa, Artificial Sequence
  Description of Artificial Sequence: Synthetic peptide
  XENP020034 vhCDR3
YYGNYGGYFDV

SEQ ID NO: 24027 - protein, 11 aa, Artificial Sequence
  Description of Artificial Sequence: Synthetic peptide
  XENP020034 vlCDR1
RASQSVGNDVA

SEQ ID NO: 24028 - protein, 7 aa, Artificial Sequence
  Description of Artificial Sequence: Synthetic peptide
  XENP020034 vlCDR2
YASHRYT

SEQ ID NO: 24029 - protein, 9 aa, Artificial Sequence
  Description of Artificial Sequence: Synthetic peptide
  XENP020034 vlCDR3
QQDFSSPRT

SEQ ID NO: 24030 - protein, 214 aa, Artificial Sequence; identical to SEQ ID NO: 17250
  Description of Artificial Sequence: Synthetic polypeptide
  XENP020034 2A11_H1L2-1G6_H1.279_L1.194 Light Chain

SEQ ID NO: 24031 - protein, 214 aa, Artificial Sequence; identical to SEQ ID NO: 17250
  Description of Artificial Sequence: Synthetic polypeptide
  VL of XENP020034

SEQ ID NO: 24032 - protein, 11 aa, Artificial Sequence
  Description of Artificial Sequence: Synthetic peptide
  XENP020034 vlCDR1
QASQDIGNYLN

SEQ ID NO: 24033 - protein, 7 aa, Artificial Sequence
  Description of Artificial Sequence: Synthetic peptide
  XENP020034 vlCDR2
YTSRLHS

SEQ ID NO: 24034 - protein, 9 aa, Artificial Sequence
  Description of Artificial Sequence: Synthetic peptide
  XENP020034 vlCDR3
QQGNTLPYT

SEQ ID NO: 24035 - protein, 444 aa, Artificial Sequence; identical to SEQ ID NO: 17405
  Description of Artificial Sequence: Synthetic polypeptide
  XENP020035 9E7_H4L1-1G6_H1.279_L1.194 Fab-Fc Heavy Chain

SEQ ID NO: 24036 - protein, 115 aa, Artificial Sequence; identical to SEQ ID NO: 17406
  Description of Artificial Sequence: Synthetic polypeptide
  VH of XENP020035

SEQ ID NO: 24037 - protein, 5 aa, Artificial Sequence
  Description of Artificial Sequence: Synthetic peptide
  XENP020035 vhCDR1
RYGIH

SEQ ID NO: 24038 - protein, 15 aa, Artificial Sequence
  Description of Artificial Sequence: Synthetic peptide
  XENP020035 vhCDR2
VIWSGVTDYNPSFQG

SEQ ID NO: 24039 - protein, 8 aa, Artificial Sequence
  Description of Artificial Sequence: Synthetic peptide
  XENP020035 vhCDR3
PYYYAMDY

SEQ ID NO: 24040 - protein, 480 aa, Artificial Sequence; identical to SEQ ID NO: 23401
  Description of Artificial Sequence: Synthetic polypeptide
  XENP020035 9E7_H4L1-1G6_H1.279_L1.194 scFv-Fc Heavy Chain

SEQ ID NO: 24041 - protein, 122 aa, Artificial Sequence; identical to SEQ ID NO: 10908
  Description of Artificial Sequence: Synthetic polypeptide
  VH of XENP020035

SEQ ID NO: 24042 - protein, 107 aa, Artificial Sequence; identical to SEQ ID NO: 10999
  Description of Artificial Sequence: Synthetic polypeptide
  VL of XENP020035

SEQ ID NO: 24043 - protein, 231 aa, Artificial Sequence; identical to SEQ ID NO: 21532
  Description of Artificial Sequence: Synthetic polypeptide
  Fc chain of XENP020035

SEQ ID NO: 24044 - protein, 5 aa, Artificial Sequence
  Description of Artificial Sequence: Synthetic peptide
  XENP020035 vhCDR1
NYWMN

SEQ ID NO: 24045 - protein, 19 aa, Artificial Sequence
  Description of Artificial Sequence: Synthetic peptide
  XENP020035 vhCDR2
EIRLYSNNYATHYAESVKG

SEQ ID NO: 24046 - protein, 11 aa, Artificial Sequence
  Description of Artificial Sequence: Synthetic peptide
  XENP020035 vhCDR3
YYGNYGGYFDV

SEQ ID NO: 24047 - protein, 11 aa, Artificial Sequence
  Description of Artificial Sequence: Synthetic peptide
  XENP020035 vlCDR1
RASQSVGNDVA

SEQ ID NO: 24048 - protein, 7 aa, Artificial Sequence
  Description of Artificial Sequence: Synthetic peptide
  XENP020035 vlCDR2
YASHRYT

SEQ ID NO: 24049 - protein, 9 aa, Artificial Sequence
  Description of Artificial Sequence: Synthetic peptide
  XENP020035 vlCDR3
QQDFSSPRT

SEQ ID NO: 24050 - protein, 214 aa, Artificial Sequence; identical to SEQ ID NO: 17350
  Description of Artificial Sequence: Synthetic polypeptide
  XENP020035 9E7_H4L1-1G6_H1.279_L1.194 Light Chain

SEQ ID NO: 24051 - protein, 214 aa, Artificial Sequence; identical to SEQ ID NO: 17350
  Description of Artificial Sequence: Synthetic polypeptide
  VL of XENP020035

SEQ ID NO: 24052 - protein, 11 aa, Artificial Sequence
  Description of Artificial Sequence: Synthetic peptide
  XENP020035 vlCDR1
RASENIYSNLA

SEQ ID NO: 24053 - protein, 7 aa, Artificial Sequence
  Description of Artificial Sequence: Synthetic peptide
  XENP020035 vlCDR2
AATTLAD

SEQ ID NO: 24054 - protein, 9 aa, Artificial Sequence
  Description of Artificial Sequence: Synthetic peptide
  XENP020035 vlCDR3
QHFWGTPWT

SEQ ID NO: 24055 - protein, 449 aa, Artificial Sequence; identical to SEQ ID NO: 17435
  Description of Artificial Sequence: Synthetic polypeptide
  XENP020036 4C8_H1L1-1G6_H1.279_L1.194 Fab-Fc Heavy Chain

SEQ ID NO: 24056 - protein, 120 aa, Artificial Sequence; identical to SEQ ID NO: 17436
  Description of Artificial Sequence: Synthetic polypeptide
  VH of XENP020036

SEQ ID NO: 24057 - protein, 5 aa, Artificial Sequence
  Description of Artificial Sequence: Synthetic peptide
  XENP020036 vhCDR1
DYNMH

SEQ ID NO: 24058 - protein, 17 aa, Artificial Sequence
  Description of Artificial Sequence: Synthetic peptide
  XENP020036 vhCDR2
YIYPYTGGTGYNQKFQG

SEQ ID NO: 24059 - protein, 11 aa, Artificial Sequence
  Description of Artificial Sequence: Synthetic peptide
  XENP020036 vhCDR3
SDDGYSYAMDY

SEQ ID NO: 24060 - protein, 480 aa, Artificial Sequence; identical to SEQ ID NO: 23401
  Description of Artificial Sequence: Synthetic polypeptide
  XENP020036 4C8_H1L1-1G6_H1.279_L1.194 scFv-Fc Heavy Chain

SEQ ID NO: 24061 - protein, 122 aa, Artificial Sequence; identical to SEQ ID NO: 10908
  Description of Artificial Sequence: Synthetic polypeptide
  VH of XENP020036

SEQ ID NO: 24062 - protein, 107 aa, Artificial Sequence; identical to SEQ ID NO: 10999
  Description of Artificial Sequence: Synthetic polypeptide
  VL of XENP020036

SEQ ID NO: 24063 - protein, 231 aa, Artificial Sequence; identical to SEQ ID NO: 21532
  Description of Artificial Sequence: Synthetic polypeptide
  Fc chain of XENP020036

SEQ ID NO: 24064 - protein, 5 aa, Artificial Sequence
  Description of Artificial Sequence: Synthetic peptide
  XENP020036 vhCDR1
NYWMN

SEQ ID NO: 24065 - protein, 19 aa, Artificial Sequence
  Description of Artificial Sequence: Synthetic peptide
  XENP020036 vhCDR2
EIRLYSNNYATHYAESVKG

SEQ ID NO: 24066 - protein, 11 aa, Artificial Sequence
  Description of Artificial Sequence: Synthetic peptide
  XENP020036 vhCDR3
YYGNYGGYFDV

SEQ ID NO: 24067 - protein, 11 aa, Artificial Sequence
  Description of Artificial Sequence: Synthetic peptide
  XENP020036 vlCDR1
RASQSVGNDVA

SEQ ID NO: 24068 - protein, 7 aa, Artificial Sequence
  Description of Artificial Sequence: Synthetic peptide
  XENP020036 vlCDR2
YASHRYT

SEQ ID NO: 24069 - protein, 9 aa, Artificial Sequence
  Description of Artificial Sequence: Synthetic peptide
  XENP020036 vlCDR3
QQDFSSPRT

SEQ ID NO: 24070 - protein, 213 aa, Artificial Sequence; identical to SEQ ID NO: 17440
  Description of Artificial Sequence: Synthetic polypeptide
  XENP020036 4C8_H1L1-1G6_H1.279_L1.194 Light Chain

SEQ ID NO: 24071 - protein, 213 aa, Artificial Sequence; identical to SEQ ID NO: 17440
  Description of Artificial Sequence: Synthetic polypeptide
  VL of XENP020036

SEQ ID NO: 24072 - protein, 11 aa, Artificial Sequence
  Description of Artificial Sequence: Synthetic peptide
  XENP020036 vlCDR1
QASQDISNYLN

SEQ ID NO: 24073 - protein, 7 aa, Artificial Sequence
  Description of Artificial Sequence: Synthetic peptide
  XENP020036 vlCDR2
YTSRLHS

SEQ ID NO: 24074 - protein, 8 aa, Artificial Sequence
  Description of Artificial Sequence: Synthetic peptide
  XENP020036 vlCDR3
QQGNTLWT

SEQ ID NO: 24075 - protein, 445 aa, Artificial Sequence; identical to SEQ ID NO: 17515
  Description of Artificial Sequence: Synthetic polypeptide
  XENP020037 7A6_H3L1-1G6_H1.279_L1.194 Fab-Fc Heavy Chain

SEQ ID NO: 24076 - protein, 116 aa, Artificial Sequence; identical to SEQ ID NO: 17516
  Description of Artificial Sequence: Synthetic polypeptide
  VH of XENP020037

SEQ ID NO: 24077 - protein, 6 aa, Artificial Sequence
  Description of Artificial Sequence: Synthetic peptide
  XENP020037 vhCDR1
SGYFWN

SEQ ID NO: 24078 - protein, 15 aa, Artificial Sequence
  Description of Artificial Sequence: Synthetic peptide
  XENP020037 vhCDR2
YISYDSNYYNPSVKS

SEQ ID NO: 24079 - protein, 8 aa, Artificial Sequence
  Description of Artificial Sequence: Synthetic peptide
  XENP020037 vhCDR3
GGITTFDY

SEQ ID NO: 24080 - protein, 480 aa, Artificial Sequence; identical to SEQ ID NO: 23401
  Description of Artificial Sequence: Synthetic polypeptide
  XENP020037 7A6_H3L1-1G6_H1.279_L1.194 scFv-Fc Heavy Chain

SEQ ID NO: 24081 - protein, 122 aa, Artificial Sequence; identical to SEQ ID NO: 10908
  Description of Artificial Sequence: Synthetic polypeptide
  VH of XENP020037

SEQ ID NO: 24082 - protein, 107 aa, Artificial Sequence; identical to SEQ ID NO: 10999
  Description of Artificial Sequence: Synthetic polypeptide
  VL of XENP020037

SEQ ID NO: 24083 - protein, 231 aa, Artificial Sequence; identical to SEQ ID NO: 21532
  Description of Artificial Sequence: Synthetic polypeptide
  Fc chain of XENP020037

SEQ ID NO: 24084 - protein, 5 aa, Artificial Sequence
  Description of Artificial Sequence: Synthetic peptide
  XENP020037 vhCDR1
NYWMN

SEQ ID NO: 24085 - protein, 19 aa, Artificial Sequence
  Description of Artificial Sequence: Synthetic peptide
  XENP020037 vhCDR2
EIRLYSNNYATHYAESVKG

SEQ ID NO: 24086 - protein, 11 aa, Artificial Sequence
  Description of Artificial Sequence: Synthetic peptide
  XENP020037 vhCDR3
YYGNYGGYFDV

SEQ ID NO: 24087 - protein, 11 aa, Artificial Sequence
  Description of Artificial Sequence: Synthetic peptide
  XENP020037 vlCDR1
RASQSVGNDVA

SEQ ID NO: 24088 - protein, 7 aa, Artificial Sequence
  Description of Artificial Sequence: Synthetic peptide
  XENP020037 vlCDR2
YASHRYT

SEQ ID NO: 24089 - protein, 9 aa, Artificial Sequence
  Description of Artificial Sequence: Synthetic peptide
  XENP020037 vlCDR3
QQDFSSPRT

SEQ ID NO: 24090 - protein, 218 aa, Artificial Sequence; identical to SEQ ID NO: 17460
  Description of Artificial Sequence: Synthetic polypeptide
  XENP020037 7A6_H3L1-1G6_H1.279_L1.194 Light Chain

SEQ ID NO: 24091 - protein, 218 aa, Artificial Sequence; identical to SEQ ID NO: 17460
  Description of Artificial Sequence: Synthetic polypeptide
  VL of XENP020037

SEQ ID NO: 24092 - protein, 15 aa, Artificial Sequence
  Description of Artificial Sequence: Synthetic peptide
  XENP020037 vlCDR1
RASQSVDYDGDSYMN

SEQ ID NO: 24093 - protein, 7 aa, Artificial Sequence
  Description of Artificial Sequence: Synthetic peptide
  XENP020037 vlCDR2
AASNLES

SEQ ID NO: 24094 - protein, 9 aa, Artificial Sequence
  Description of Artificial Sequence: Synthetic peptide
  XENP020037 vlCDR3
QQSNEDPRT

SEQ ID NO: 24095 - protein, 450 aa, Artificial Sequence; identical to SEQ ID NO: 17625
  Description of Artificial Sequence: Synthetic polypeptide
  XENP020038 7G8_H2L2-1G6_H1.279_L1.194 Fab-Fc Heavy Chain

SEQ ID NO: 24096 - protein, 121 aa, Artificial Sequence; identical to SEQ ID NO: 17626
  Description of Artificial Sequence: Synthetic polypeptide
  VH of XENP020038

SEQ ID NO: 24097 - protein, 5 aa, Artificial Sequence
  Description of Artificial Sequence: Synthetic peptide
  XENP020038 vhCDR1
DAWMD

SEQ ID NO: 24098 - protein, 19 aa, Artificial Sequence
  Description of Artificial Sequence: Synthetic peptide
  XENP020038 vhCDR2
EIRTKANNHATYYAESVKG

SEQ ID NO: 24099 - protein, 10 aa, Artificial Sequence
  Description of Artificial Sequence: Synthetic peptide
  XENP020038 vhCDR3
LANWDWYFDV

SEQ ID NO: 24100 - protein, 480 aa, Artificial Sequence; identical to SEQ ID NO: 23401
  Description of Artificial Sequence: Synthetic polypeptide
  XENP020038 7G8_H2L2-1G6_H1.279_L1.194 scFv-Fc Heavy Chain

SEQ ID NO: 24101 - protein, 122 aa, Artificial Sequence; identical to SEQ ID NO: 10908
  Description of Artificial Sequence: Synthetic polypeptide
  VH of XENP020038

SEQ ID NO: 24102 - protein, 107 aa, Artificial Sequence; identical to SEQ ID NO: 10999
  Description of Artificial Sequence: Synthetic polypeptide
  VL of XENP020038

SEQ ID NO: 24103 - protein, 231 aa, Artificial Sequence; identical to SEQ ID NO: 21532
  Description of Artificial Sequence: Synthetic polypeptide
  Fc chain of XENP020038

SEQ ID NO: 24104 - protein, 5 aa, Artificial Sequence
  Description of Artificial Sequence: Synthetic peptide
  XENP020038 vhCDR1
NYWMN

SEQ ID NO: 24105 - protein, 19 aa, Artificial Sequence
  Description of Artificial Sequence: Synthetic peptide
  XENP020038 vhCDR2
EIRLYSNNYATHYAESVKG

SEQ ID NO: 24106 - protein, 11 aa, Artificial Sequence
  Description of Artificial Sequence: Synthetic peptide
  XENP020038 vhCDR3
YYGNYGGYFDV

SEQ ID NO: 24107 - protein, 11 aa, Artificial Sequence
  Description of Artificial Sequence: Synthetic peptide
  XENP020038 vlCDR1
RASQSVGNDVA

SEQ ID NO: 24108 - protein, 7 aa, Artificial Sequence
  Description of Artificial Sequence: Synthetic peptide
  XENP020038 vlCDR2
YASHRYT

SEQ ID NO: 24109 - protein, 9 aa, Artificial Sequence
  Description of Artificial Sequence: Synthetic peptide
  XENP020038 vlCDR3
QQDFSSPRT

SEQ ID NO: 24110 - protein, 218 aa, Artificial Sequence; identical to SEQ ID NO: 17610
  Description of Artificial Sequence: Synthetic polypeptide
  XENP020038 7G8_H2L2-1G6_H1.279_L1.194 Light Chain

SEQ ID NO: 24111 - protein, 218 aa, Artificial Sequence; identical to SEQ ID NO: 17610
  Description of Artificial Sequence: Synthetic polypeptide
  VL of XENP020038

SEQ ID NO: 24112 - protein, 15 aa, Artificial Sequence
  Description of Artificial Sequence: Synthetic peptide
  XENP020038 vlCDR1
RASQSVDYDGDSYMN

SEQ ID NO: 24113 - protein, 7 aa, Artificial Sequence
  Description of Artificial Sequence: Synthetic peptide
  XENP020038 vlCDR2
AASNLES

SEQ ID NO: 24114 - protein, 9 aa, Artificial Sequence
  Description of Artificial Sequence: Synthetic peptide
  XENP020038 vlCDR3
QQSNEDPFT

SEQ ID NO: 24115 - protein, 447 aa, Artificial Sequence; identical to SEQ ID NO: 17235
  Description of Artificial Sequence: Synthetic polypeptide
  XENP020064 2A11_H1L2-1G6_H1.282_L1.194 Fab-Fc Heavy Chain

SEQ ID NO: 24116 - protein, 118 aa, Artificial Sequence; identical to SEQ ID NO: 17236
  Description of Artificial Sequence: Synthetic polypeptide
  VH of XENP020064

SEQ ID NO: 24117 - protein, 5 aa, Artificial Sequence
  Description of Artificial Sequence: Synthetic peptide
  XENP020064 vhCDR1
DYYMH

SEQ ID NO: 24118 - protein, 17 aa, Artificial Sequence
  Description of Artificial Sequence: Synthetic peptide
  XENP020064 vhCDR2
WIDPENGDTEYAPKFQG

SEQ ID NO: 24119 - protein, 9 aa, Artificial Sequence
  Description of Artificial Sequence: Synthetic peptide
  XENP020064 vhCDR3
RGVRQALDY

SEQ ID NO: 24120 - protein, 480 aa, Artificial Sequence; identical to SEQ ID NO: 23920
  Description of Artificial Sequence: Synthetic polypeptide
  XENP020064 2A11_H1L2-1G6_H1.282_L1.194 scFv-Fc Heavy Chain

SEQ ID NO: 24121 - protein, 122 aa, Artificial Sequence; identical to SEQ ID NO: 10935
  Description of Artificial Sequence: Synthetic polypeptide
  VH of XENP020064

SEQ ID NO: 24122 - protein, 107 aa, Artificial Sequence; identical to SEQ ID NO: 10999
  Description of Artificial Sequence: Synthetic polypeptide
  VL of XENP020064

SEQ ID NO: 24123 - protein, 231 aa, Artificial Sequence; identical to SEQ ID NO: 21532
  Description of Artificial Sequence: Synthetic polypeptide
  Fc chain of XENP020064

SEQ ID NO: 24124 - protein, 5 aa, Artificial Sequence
  Description of Artificial Sequence: Synthetic peptide
  XENP020064 vhCDR1
NYWMN

SEQ ID NO: 24125 - protein, 19 aa, Artificial Sequence
  Description of Artificial Sequence: Synthetic peptide
  XENP020064 vhCDR2
EIRLYSNNYATHYAESVKG

SEQ ID NO: 24126 - protein, 11 aa, Artificial Sequence
  Description of Artificial Sequence: Synthetic peptide
  XENP020064 vhCDR3
YYGNYGGYFDV

SEQ ID NO: 24127 - protein, 11 aa, Artificial Sequence
  Description of Artificial Sequence: Synthetic peptide
  XENP020064 vlCDR1
RASQSVGNDVA

SEQ ID NO: 24128 - protein, 7 aa, Artificial Sequence
  Description of Artificial Sequence: Synthetic peptide
  XENP020064 vlCDR2
YASHRYT

SEQ ID NO: 24129 - protein, 9 aa, Artificial Sequence
  Description of Artificial Sequence: Synthetic peptide
  XENP020064 vlCDR3
QQDFSSPRT

SEQ ID NO: 24130 - protein, 214 aa, Artificial Sequence; identical to SEQ ID NO: 17250
  Description of Artificial Sequence: Synthetic polypeptide
  XENP020064 2A11_H1L2-1G6_H1.282_L1.194 Light Chain

SEQ ID NO: 24131 - protein, 214 aa, Artificial Sequence; identical to SEQ ID NO: 17250
  Description of Artificial Sequence: Synthetic polypeptide
  VL of XENP020064

SEQ ID NO: 24132 - protein, 11 aa, Artificial Sequence
  Description of Artificial Sequence: Synthetic peptide
  XENP020064 vlCDR1
QASQDIGNYLN

SEQ ID NO: 24133 - protein, 7 aa, Artificial Sequence
  Description of Artificial Sequence: Synthetic peptide
  XENP020064 vlCDR2
YTSRLHS

SEQ ID NO: 24134 - protein, 9 aa, Artificial Sequence
  Description of Artificial Sequence: Synthetic peptide
  XENP020064 vlCDR3
QQGNTLPYT

SEQ ID NO: 24135 - protein, 444 aa, Artificial Sequence; identical to SEQ ID NO: 17405
  Description of Artificial Sequence: Synthetic polypeptide
  XENP020065 9E7_H4L1-1G6_H1.282_L1.194 Fab-Fc Heavy Chain

SEQ ID NO: 24136 - protein, 115 aa, Artificial Sequence; identical to SEQ ID NO: 17406
  Description of Artificial Sequence: Synthetic polypeptide
  VH of XENP020065

SEQ ID NO: 24137 - protein, 5 aa, Artificial Sequence
  Description of Artificial Sequence: Synthetic peptide
  XENP020065 vhCDR1
RYGIH

SEQ ID NO: 24138 - protein, 15 aa, Artificial Sequence
  Description of Artificial Sequence: Synthetic peptide
  XENP020065 vhCDR2
VIWSGVTDYNPSFQG

SEQ ID NO: 24139 - protein, 8 aa, Artificial Sequence
  Description of Artificial Sequence: Synthetic peptide
  XENP020065 vhCDR3
PYYYAMDY

SEQ ID NO: 24140 - protein, 480 aa, Artificial Sequence; identical to SEQ ID NO: 23920
  Description of Artificial Sequence: Synthetic polypeptide
  XENP020065 9E7_H4L1-1G6_H1.282_L1.194 scFv-Fc Heavy Chain

SEQ ID NO: 24141 - protein, 122 aa, Artificial Sequence; identical to SEQ ID NO: 10935
  Description of Artificial Sequence: Synthetic polypeptide
  VH of XENP020065

SEQ ID NO: 24142 - protein, 107 aa, Artificial Sequence; identical to SEQ ID NO: 10999
  Description of Artificial Sequence: Synthetic polypeptide
  VL of XENP020065

SEQ ID NO: 24143 - protein, 231 aa, Artificial Sequence; identical to SEQ ID NO: 21532
  Description of Artificial Sequence: Synthetic polypeptide
  Fc chain of XENP020065

SEQ ID NO: 24144 - protein, 5 aa, Artificial Sequence
  Description of Artificial Sequence: Synthetic peptide
  XENP020065 vhCDR1
NYWMN

SEQ ID NO: 24145 - protein, 19 aa, Artificial Sequence
  Description of Artificial Sequence: Synthetic peptide
  XENP020065 vhCDR2
EIRLYSNNYATHYAESVKG

SEQ ID NO: 24146 - protein, 11 aa, Artificial Sequence
  Description of Artificial Sequence: Synthetic peptide
  XENP020065 vhCDR3
YYGNYGGYFDV

SEQ ID NO: 24147 - protein, 11 aa, Artificial Sequence
  Description of Artificial Sequence: Synthetic peptide
  XENP020065 vlCDR1
RASQSVGNDVA

SEQ ID NO: 24148 - protein, 7 aa, Artificial Sequence
  Description of Artificial Sequence: Synthetic peptide
  XENP020065 vlCDR2
YASHRYT

SEQ ID NO: 24149 - protein, 9 aa, Artificial Sequence
  Description of Artificial Sequence: Synthetic peptide
  XENP020065 vlCDR3
QQDFSSPRT

SEQ ID NO: 24150 - protein, 214 aa, Artificial Sequence; identical to SEQ ID NO: 17350
  Description of Artificial Sequence: Synthetic polypeptide
  XENP020065 9E7_H4L1-1G6_H1.282_L1.194 Light Chain

SEQ ID NO: 24151 - protein, 214 aa, Artificial Sequence; identical to SEQ ID NO: 17350
  Description of Artificial Sequence: Synthetic polypeptide
  VL of XENP020065

SEQ ID NO: 24152 - protein, 11 aa, Artificial Sequence
  Description of Artificial Sequence: Synthetic peptide
  XENP020065 vlCDR1
RASENIYSNLA

SEQ ID NO: 24153 - protein, 7 aa, Artificial Sequence
  Description of Artificial Sequence: Synthetic peptide
  XENP020065 vlCDR2
AATTLAD

SEQ ID NO: 24154 - protein, 9 aa, Artificial Sequence
  Description of Artificial Sequence: Synthetic peptide
  XENP020065 vlCDR3
QHFWGTPWT

SEQ ID NO: 24155 - protein, 447 aa, Artificial Sequence; identical to SEQ ID NO: 17235
  Description of Artificial Sequence: Synthetic polypeptide
  XENP020203 2A11_H1L0-1G6_H1.279_L1.194 Fab-Fc Heavy Chain

SEQ ID NO: 24156 - protein, 118 aa, Artificial Sequence; identical to SEQ ID NO: 17236
  Description of Artificial Sequence: Synthetic polypeptide
  VH of XENP020203

SEQ ID NO: 24157 - protein, 5 aa, Artificial Sequence
  Description of Artificial Sequence: Synthetic peptide
  XENP020203 vhCDR1
DYYMH

SEQ ID NO: 24158 - protein, 17 aa, Artificial Sequence
  Description of Artificial Sequence: Synthetic peptide
  XENP020203 vhCDR2
WIDPENGDTEYAPKFQG

SEQ ID NO: 24159 - protein, 9 aa, Artificial Sequence
  Description of Artificial Sequence: Synthetic peptide
  XENP020203 vhCDR3
RGVRQALDY

SEQ ID NO: 24160 - protein, 480 aa, Artificial Sequence; identical to SEQ ID NO: 23401
  Description of Artificial Sequence: Synthetic polypeptide
  XENP020203 2A11_H1L0-1G6_H1.279_L1.194 scFv-Fc Heavy Chain

SEQ ID NO: 24161 - protein, 122 aa, Artificial Sequence; identical to SEQ ID NO: 10908
  Description of Artificial Sequence: Synthetic polypeptide
  VH of XENP020203

SEQ ID NO: 24162 - protein, 107 aa, Artificial Sequence; identical to SEQ ID NO: 10999
  Description of Artificial Sequence: Synthetic polypeptide
  VL of XENP020203

SEQ ID NO: 24163 - protein, 231 aa, Artificial Sequence; identical to SEQ ID NO: 21532
  Description of Artificial Sequence: Synthetic polypeptide
  Fc chain of XENP020203

SEQ ID NO: 24164 - protein, 5 aa, Artificial Sequence
  Description of Artificial Sequence: Synthetic peptide
  XENP020203 vhCDR1
NYWMN

SEQ ID NO: 24165 - protein, 19 aa, Artificial Sequence
  Description of Artificial Sequence: Synthetic peptide
  XENP020203 vhCDR2
EIRLYSNNYATHYAESVKG

SEQ ID NO: 24166 - protein, 11 aa, Artificial Sequence
  Description of Artificial Sequence: Synthetic peptide
  XENP020203 vhCDR3
YYGNYGGYFDV

SEQ ID NO: 24167 - protein, 11 aa, Artificial Sequence
  Description of Artificial Sequence: Synthetic peptide
  XENP020203 vlCDR1
RASQSVGNDVA

SEQ ID NO: 24168 - protein, 7 aa, Artificial Sequence
  Description of Artificial Sequence: Synthetic peptide
  XENP020203 vlCDR2
YASHRYT

SEQ ID NO: 24169 - protein, 9 aa, Artificial Sequence
  Description of Artificial Sequence: Synthetic peptide
  XENP020203 vlCDR3
QQDFSSPRT

SEQ ID NO: 24170 - protein, 214 aa, Artificial Sequence; identical to SEQ ID NO: 17230
  Description of Artificial Sequence: Synthetic polypeptide
  XENP020203 2A11_H1L0-1G6_H1.279_L1.194 Light Chain

SEQ ID NO: 24171 - protein, 214 aa, Artificial Sequence; identical to SEQ ID NO: 17230
  Description of Artificial Sequence: Synthetic polypeptide
  VL of XENP020203

SEQ ID NO: 24172 - protein, 11 aa, Artificial Sequence
  Description of Artificial Sequence: Synthetic peptide
  XENP020203 vlCDR1
RASQDIGNYLN

SEQ ID NO: 24173 - protein, 7 aa, Artificial Sequence
  Description of Artificial Sequence: Synthetic peptide
  XENP020203 vlCDR2
YTSRLHS

SEQ ID NO: 24174 - protein, 9 aa, Artificial Sequence
  Description of Artificial Sequence: Synthetic peptide
  XENP020203 vlCDR3
QQGNTLPYT

SEQ ID NO: 24175 - protein, 447 aa, Artificial Sequence; identical to SEQ ID NO: 17235
  Description of Artificial Sequence: Synthetic polypeptide
  XENP020204 2A11_H1L1-1G6_H1.279_L1.194 Fab-Fc Heavy Chain

SEQ ID NO: 24176 - protein, 118 aa, Artificial Sequence; identical to SEQ ID NO: 17236
  Description of Artificial Sequence: Synthetic polypeptide
  VH of XENP020204

SEQ ID NO: 24177 - protein, 5 aa, Artificial Sequence
  Description of Artificial Sequence: Synthetic peptide
  XENP020204 vhCDR1
DYYMH

SEQ ID NO: 24178 - protein, 17 aa, Artificial Sequence
  Description of Artificial Sequence: Synthetic peptide
  XENP020204 vhCDR2
WIDPENGDTEYAPKFQG

SEQ ID NO: 24179 - protein, 9 aa, Artificial Sequence
  Description of Artificial Sequence: Synthetic peptide
  XENP020204 vhCDR3
RGVRQALDY

SEQ ID NO: 24180 - protein, 480 aa, Artificial Sequence; identical to SEQ ID NO: 23401
  Description of Artificial Sequence: Synthetic polypeptide
  XENP020204 2A11_H1L1-1G6_H1.279_L1.194 scFv-Fc Heavy Chain

SEQ ID NO: 24181 - protein, 122 aa, Artificial Sequence; identical to SEQ ID NO: 10908
  Description of Artificial Sequence: Synthetic polypeptide
  VH of XENP020204

SEQ ID NO: 24182 - protein, 107 aa, Artificial Sequence; identical to SEQ ID NO: 10999
  Description of Artificial Sequence: Synthetic polypeptide
  VL of XENP020204

SEQ ID NO: 24183 - protein, 231 aa, Artificial Sequence; identical to SEQ ID NO: 21532
  Description of Artificial Sequence: Synthetic polypeptide
  Fc chain of XENP020204

SEQ ID NO: 24184 - protein, 5 aa, Artificial Sequence
  Description of Artificial Sequence: Synthetic peptide
  XENP020204 vhCDR1
NYWMN

SEQ ID NO: 24185 - protein, 19 aa, Artificial Sequence
  Description of Artificial Sequence: Synthetic peptide
  XENP020204 vhCDR2
EIRLYSNNYATHYAESVKG

SEQ ID NO: 24186 - protein, 11 aa, Artificial Sequence
  Description of Artificial Sequence: Synthetic peptide
  XENP020204 vhCDR3
YYGNYGGYFDV

SEQ ID NO: 24187 - protein, 11 aa, Artificial Sequence
  Description of Artificial Sequence: Synthetic peptide
  XENP020204 vlCDR1
RASQSVGNDVA

SEQ ID NO: 24188 - protein, 7 aa, Artificial Sequence
  Description of Artificial Sequence: Synthetic peptide
  XENP020204 vlCDR2
YASHRYT

SEQ ID NO: 24189 - protein, 9 aa, Artificial Sequence
  Description of Artificial Sequence: Synthetic peptide
  XENP020204 vlCDR3
QQDFSSPRT

SEQ ID NO: 24190 - protein, 214 aa, Artificial Sequence; identical to SEQ ID NO: 17240
  Description of Artificial Sequence: Synthetic polypeptide
  XENP020204 2A11_H1L1-1G6_H1.279_L1.194 Light Chain

SEQ ID NO: 24191 - protein, 214 aa, Artificial Sequence; identical to SEQ ID NO: 17240
  Description of Artificial Sequence: Synthetic polypeptide
  VL of XENP020204

SEQ ID NO: 24192 - protein, 11 aa, Artificial Sequence
  Description of Artificial Sequence: Synthetic peptide
  XENP020204 vlCDR1
RASQDIGNYLN

SEQ ID NO: 24193 - protein, 7 aa, Artificial Sequence
  Description of Artificial Sequence: Synthetic peptide
  XENP020204 vlCDR2
YTSRLHS

SEQ ID NO: 24194 - protein, 9 aa, Artificial Sequence
  Description of Artificial Sequence: Synthetic peptide
  XENP020204 vlCDR3
QQGNTLPYT

SEQ ID NO: 24195 - protein, 447 aa, Artificial Sequence; identical to SEQ ID NO: 17235
  Description of Artificial Sequence: Synthetic polypeptide
  XENP020205 2A11_H1_25F7_L0-1G6_H1.279_L1.194 Fab-Fc Heavy Chain

SEQ ID NO: 24196 - protein, 118 aa, Artificial Sequence; identical to SEQ ID NO: 17236
  Description of Artificial Sequence: Synthetic polypeptide
  VH of XENP020205

SEQ ID NO: 24197 - protein, 5 aa, Artificial Sequence
  Description of Artificial Sequence: Synthetic peptide
  XENP020205 vhCDR1
DYYMH

SEQ ID NO: 24198 - protein, 17 aa, Artificial Sequence
  Description of Artificial Sequence: Synthetic peptide
  XENP020205 vhCDR2
WIDPENGDTEYAPKFQG

SEQ ID NO: 24199 - protein, 9 aa, Artificial Sequence
  Description of Artificial Sequence: Synthetic peptide
  XENP020205 vhCDR3
RGVRQALDY

SEQ ID NO: 24200 - protein, 480 aa, Artificial Sequence; identical to SEQ ID NO: 23401
  Description of Artificial Sequence: Synthetic polypeptide
  XENP020205 2A11_H1_25F7_L0-1G6_H1.279_L1.194 scFv-Fc Heavy Chain

SEQ ID NO: 24201 - protein, 122 aa, Artificial Sequence; identical to SEQ ID NO: 10908
  Description of Artificial Sequence: Synthetic polypeptide
  VH of XENP020205

SEQ ID NO: 24202 - protein, 107 aa, Artificial Sequence; identical to SEQ ID NO: 10999
  Description of Artificial Sequence: Synthetic polypeptide
  VL of XENP020205

SEQ ID NO: 24203 - protein, 231 aa, Artificial Sequence; identical to SEQ ID NO: 21532
  Description of Artificial Sequence: Synthetic polypeptide
  Fc chain of XENP020205

SEQ ID NO: 24204 - protein, 5 aa, Artificial Sequence
  Description of Artificial Sequence: Synthetic peptide
  XENP020205 vhCDR1
NYWMN

SEQ ID NO: 24205 - protein, 19 aa, Artificial Sequence
  Description of Artificial Sequence: Synthetic peptide
  XENP020205 vhCDR2
EIRLYSNNYATHYAESVKG

SEQ ID NO: 24206 - protein, 11 aa, Artificial Sequence
  Description of Artificial Sequence: Synthetic peptide
  XENP020205 vhCDR3
YYGNYGGYFDV

SEQ ID NO: 24207 - protein, 11 aa, Artificial Sequence
  Description of Artificial Sequence: Synthetic peptide
  XENP020205 vlCDR1
RASQSVGNDVA

SEQ ID NO: 24208 - protein, 7 aa, Artificial Sequence
  Description of Artificial Sequence: Synthetic peptide
  XENP020205 vlCDR2
YASHRYT

SEQ ID NO: 24209 - protein, 9 aa, Artificial Sequence
  Description of Artificial Sequence: Synthetic peptide
  XENP020205 vlCDR3
QQDFSSPRT

SEQ ID NO: 24210 - protein, 214 aa, Artificial Sequence; identical to SEQ ID NO: 17140
  Description of Artificial Sequence: Synthetic polypeptide
  XENP020205 2A11_H1_25F7_L0-1G6_H1.279_L1.194 Light Chain

SEQ ID NO: 24211 - protein, 214 aa, Artificial Sequence; identical to SEQ ID NO: 17140
  Description of Artificial Sequence: Synthetic polypeptide
  VL of XENP020205

SEQ ID NO: 24212 - protein, 11 aa, Artificial Sequence
  Description of Artificial Sequence: Synthetic peptide
  XENP020205 vlCDR1
RASQSISSYLA

SEQ ID NO: 24213 - protein, 7 aa, Artificial Sequence
  Description of Artificial Sequence: Synthetic peptide
  XENP020205 vlCDR2
DASNRAT

SEQ ID NO: 24214 - protein, 9 aa, Artificial Sequence
  Description of Artificial Sequence: Synthetic peptide
  XENP020205 vlCDR3
QQRSNWPLT

SEQ ID NO: 24215 - protein, 447 aa, Artificial Sequence; identical to SEQ ID NO: 17235
  Description of Artificial Sequence: Synthetic polypeptide
  XENP020206 2A11_H1L2-1G6_L1.194_H1.279 Fab-Fc Heavy Chain

SEQ ID NO: 24216 - protein, 118 aa, Artificial Sequence; identical to SEQ ID NO: 17236
  Description of Artificial Sequence: Synthetic polypeptide
  VH of XENP020206

SEQ ID NO: 24217 - protein, 5 aa, Artificial Sequence
  Description of Artificial Sequence: Synthetic peptide
  XENP020206 vhCDR1
DYYMH

SEQ ID NO: 24218 - protein, 17 aa, Artificial Sequence
  Description of Artificial Sequence: Synthetic peptide
  XENP020206 vhCDR2
WIDPENGDTEYAPKFQG

SEQ ID NO: 24219 - protein, 9 aa, Artificial Sequence
  Description of Artificial Sequence: Synthetic peptide
  XENP020206 vhCDR3
RGVRQALDY

SEQ ID NO: 24220 - protein, 480 aa, Artificial Sequence; identical to SEQ ID NO: 23221
  Description of Artificial Sequence: Synthetic polypeptide
  XENP020206 2A11_H1L2-1G6_L1.194_H1.279 scFv-Fc Heavy Chain

SEQ ID NO: 24221 - protein, 107 aa, Artificial Sequence; identical to SEQ ID NO: 10999
  Description of Artificial Sequence: Synthetic polypeptide
  VH of XENP020206

SEQ ID NO: 24222 - protein, 122 aa, Artificial Sequence; identical to SEQ ID NO: 10908
  Description of Artificial Sequence: Synthetic polypeptide
  VL of XENP020206

SEQ ID NO: 24223 - protein, 231 aa, Artificial Sequence; identical to SEQ ID NO: 21532
  Description of Artificial Sequence: Synthetic polypeptide
  Fc chain of XENP020206

SEQ ID NO: 24224 - protein, 11 aa, Artificial Sequence
  Description of Artificial Sequence: Synthetic peptide
  XENP020206 vhCDR1
RASQSVGNDVA

SEQ ID NO: 24225 - protein, 7 aa, Artificial Sequence
  Description of Artificial Sequence: Synthetic peptide
  XENP020206 vhCDR2
YASHRYT

SEQ ID NO: 24226 - protein, 9 aa, Artificial Sequence
  Description of Artificial Sequence: Synthetic peptide
  XENP020206 vhCDR3
QQDFSSPRT

SEQ ID NO: 24227 - protein, 5 aa, Artificial Sequence
  Description of Artificial Sequence: Synthetic peptide
  XENP020206 vlCDR1
NYWMN

SEQ ID NO: 24228 - protein, 19 aa, Artificial Sequence
  Description of Artificial Sequence: Synthetic peptide
  XENP020206 vlCDR2
EIRLYSNNYATHYAESVKG

SEQ ID NO: 24229 - protein, 11 aa, Artificial Sequence
  Description of Artificial Sequence: Synthetic peptide
  XENP020206 vlCDR3
YYGNYGGYFDV

SEQ ID NO: 24230 - protein, 214 aa, Artificial Sequence; identical to SEQ ID NO: 17250
  Description of Artificial Sequence: Synthetic polypeptide
  XENP020206 2A11_H1L2-1G6_L1.194_H1.279 Light Chain

SEQ ID NO: 24231 - protein, 214 aa, Artificial Sequence; identical to SEQ ID NO: 17250
  Description of Artificial Sequence: Synthetic polypeptide
  VL of XENP020206

SEQ ID NO: 24232 - protein, 11 aa, Artificial Sequence
  Description of Artificial Sequence: Synthetic peptide
  XENP020206 vlCDR1
QASQDIGNYLN

SEQ ID NO: 24233 - protein, 7 aa, Artificial Sequence
  Description of Artificial Sequence: Synthetic peptide
  XENP020206 vlCDR2
YTSRLHS

SEQ ID NO: 24234 - protein, 9 aa, Artificial Sequence
  Description of Artificial Sequence: Synthetic peptide
  XENP020206 vlCDR3
QQGNTLPYT

SEQ ID NO: 24235 - protein, 447 aa, Artificial Sequence; identical to SEQ ID NO: 17235
  Description of Artificial Sequence: Synthetic polypeptide
  XENP020207 2A11_H1L2-1G6_L1.210_H1.288 Fab-Fc Heavy Chain

SEQ ID NO: 24236 - protein, 118 aa, Artificial Sequence; identical to SEQ ID NO: 17236
  Description of Artificial Sequence: Synthetic polypeptide
  VH of XENP020207

SEQ ID NO: 24237 - protein, 5 aa, Artificial Sequence
  Description of Artificial Sequence: Synthetic peptide
  XENP020207 vhCDR1
DYYMH

SEQ ID NO: 24238 - protein, 17 aa, Artificial Sequence
  Description of Artificial Sequence: Synthetic peptide
  XENP020207 vhCDR2
WIDPENGDTEYAPKFQG

SEQ ID NO: 24239 - protein, 9 aa, Artificial Sequence
  Description of Artificial Sequence: Synthetic peptide
  XENP020207 vhCDR3
RGVRQALDY

SEQ ID NO: 24240 - protein, 480 aa, Artificial Sequence; identical to SEQ ID NO: 23381
  Description of Artificial Sequence: Synthetic polypeptide
  XENP020207 2A11_H1L2-1G6_L1.210_H1.288 scFv-Fc Heavy Chain

SEQ ID NO: 24241 - protein, 107 aa, Artificial Sequence; identical to SEQ ID NO: 11359
  Description of Artificial Sequence: Synthetic polypeptide
  VH of XENP020207

SEQ ID NO: 24242 - protein, 122 aa, Artificial Sequence; identical to SEQ ID NO: 11358
  Description of Artificial Sequence: Synthetic polypeptide
  VL of XENP020207

SEQ ID NO: 24243 - protein, 231 aa, Artificial Sequence; identical to SEQ ID NO: 21532
  Description of Artificial Sequence: Synthetic polypeptide
  Fc chain of XENP020207

SEQ ID NO: 24244 - protein, 11 aa, Artificial Sequence
  Description of Artificial Sequence: Synthetic peptide
  XENP020207 vhCDR1
RASQSVGNDVA

SEQ ID NO: 24245 - protein, 7 aa, Artificial Sequence
  Description of Artificial Sequence: Synthetic peptide
  XENP020207 vhCDR2
YASHRYT

SEQ ID NO: 24246 - protein, 9 aa, Artificial Sequence
  Description of Artificial Sequence: Synthetic peptide
  XENP020207 vhCDR3
QQDFSSPRT

SEQ ID NO: 24247 - protein, 5 aa, Artificial Sequence
  Description of Artificial Sequence: Synthetic peptide
  XENP020207 vlCDR1
NYWMN

SEQ ID NO: 24248 - protein, 19 aa, Artificial Sequence
  Description of Artificial Sequence: Synthetic peptide
  XENP020207 vlCDR2
EIRLYSNNYATHYAESVKG

SEQ ID NO: 24249 - protein, 11 aa, Artificial Sequence
  Description of Artificial Sequence: Synthetic peptide
  XENP020207 vlCDR3
YYGNYGGYFDV

SEQ ID NO: 24250 - protein, 214 aa, Artificial Sequence; identical to SEQ ID NO: 17250
  Description of Artificial Sequence: Synthetic polypeptide
  XENP020207 2A11_H1L2-1G6_L1.210_H1.288 Light Chain

SEQ ID NO: 24251 - protein, 214 aa, Artificial Sequence; identical to SEQ ID NO: 17250
  Description of Artificial Sequence: Synthetic polypeptide
  VL of XENP020207

SEQ ID NO: 24252 - protein, 11 aa, Artificial Sequence
  Description of Artificial Sequence: Synthetic peptide
  XENP020207 vlCDR1
QASQDIGNYLN

SEQ ID NO: 24253 - protein, 7 aa, Artificial Sequence
  Description of Artificial Sequence: Synthetic peptide
  XENP020207 vlCDR2
YTSRLHS

SEQ ID NO: 24254 - protein, 9 aa, Artificial Sequence
  Description of Artificial Sequence: Synthetic peptide
  XENP020207 vlCDR3
QQGNTLPYT

SEQ ID NO: 24255 - protein, 447 aa, Artificial Sequence; identical to SEQ ID NO: 17235
  Description of Artificial Sequence: Synthetic polypeptide
  XENP020208 2A11_H1L2-1G6_H1.288_L1.210 Fab-Fc Heavy Chain

SEQ ID NO: 24256 - protein, 118 aa, Artificial Sequence; identical to SEQ ID NO: 17236
  Description of Artificial Sequence: Synthetic polypeptide
  VH of XENP020208

SEQ ID NO: 24257 - protein, 5 aa, Artificial Sequence
  Description of Artificial Sequence: Synthetic peptide
  XENP020208 vhCDR1
DYYMH

SEQ ID NO: 24258 - protein, 17 aa, Artificial Sequence
  Description of Artificial Sequence: Synthetic peptide
  XENP020208 vhCDR2
WIDPENGDTEYAPKFQG

SEQ ID NO: 24259 - protein, 9 aa, Artificial Sequence
  Description of Artificial Sequence: Synthetic peptide
  XENP020208 vhCDR3
RGVRQALDY

SEQ ID NO: 24260 - protein, 480 aa, Artificial Sequence; identical to SEQ ID NO: 23860
  Description of Artificial Sequence: Synthetic polypeptide
  XENP020208 2A11_H1L2-1G6_H1.288_L1.210 scFv-Fc Heavy Chain

SEQ ID NO: 24261 - protein, 122 aa, Artificial Sequence; identical to SEQ ID NO: 11358
  Description of Artificial Sequence: Synthetic polypeptide
  VH of XENP020208

SEQ ID NO: 24262 - protein, 107 aa, Artificial Sequence; identical to SEQ ID NO: 11359
  Description of Artificial Sequence: Synthetic polypeptide
  VL of XENP020208

SEQ ID NO: 24263 - protein, 231 aa, Artificial Sequence; identical to SEQ ID NO: 21532
  Description of Artificial Sequence: Synthetic polypeptide
  Fc chain of XENP020208

SEQ ID NO: 24264 - protein, 5 aa, Artificial Sequence
  Description of Artificial Sequence: Synthetic peptide
  XENP020208 vhCDR1
NYWMN

SEQ ID NO: 24265 - protein, 19 aa, Artificial Sequence
  Description of Artificial Sequence: Synthetic peptide
  XENP020208 vhCDR2
EIRLYSNNYATHYAESVKG

SEQ ID NO: 24266 - protein, 11 aa, Artificial Sequence
  Description of Artificial Sequence: Synthetic peptide
  XENP020208 vhCDR3
YYGNYGGYFDV

SEQ ID NO: 24267 - protein, 11 aa, Artificial Sequence
  Description of Artificial Sequence: Synthetic peptide
  XENP020208 vlCDR1
RASQSVGNDVA

SEQ ID NO: 24268 - protein, 7 aa, Artificial Sequence
  Description of Artificial Sequence: Synthetic peptide
  XENP020208 vlCDR2
YASHRYT

SEQ ID NO: 24269 - protein, 9 aa, Artificial Sequence
  Description of Artificial Sequence: Synthetic peptide
  XENP020208 vlCDR3
QQDFSSPRT

SEQ ID NO: 24270 - protein, 214 aa, Artificial Sequence; identical to SEQ ID NO: 17250
  Description of Artificial Sequence: Synthetic polypeptide
  XENP020208 2A11_H1L2-1G6_H1.288_L1.210 Light Chain

SEQ ID NO: 24271 - protein, 214 aa, Artificial Sequence; identical to SEQ ID NO: 17250
  Description of Artificial Sequence: Synthetic polypeptide
  VL of XENP020208

SEQ ID NO: 24272 - protein, 11 aa, Artificial Sequence
  Description of Artificial Sequence: Synthetic peptide
  XENP020208 vlCDR1
QASQDIGNYLN

SEQ ID NO: 24273 - protein, 7 aa, Artificial Sequence
  Description of Artificial Sequence: Synthetic peptide
  XENP020208 vlCDR2
YTSRLHS

SEQ ID NO: 24274 - protein, 9 aa, Artificial Sequence
  Description of Artificial Sequence: Synthetic peptide
  XENP020208 vlCDR3
QQGNTLPYT

SEQ ID NO: 24275 - protein, 447 aa, Artificial Sequence; identical to SEQ ID NO: 17235
  Description of Artificial Sequence: Synthetic polypeptide
  XENP020034 2A11_H1L2_Fab-1G6_H1.279_L1.194 Fab-Fc Heavy Chain

SEQ ID NO: 24276 - protein, 118 aa, Artificial Sequence; identical to SEQ ID NO: 17236
  Description of Artificial Sequence: Synthetic polypeptide
  VH of XENP020034

SEQ ID NO: 24277 - protein, 5 aa, Artificial Sequence
  Description of Artificial Sequence: Synthetic peptide
  XENP020034 vhCDR1
DYYMH

SEQ ID NO: 24278 - protein, 17 aa, Artificial Sequence
  Description of Artificial Sequence: Synthetic peptide
  XENP020034 vhCDR2
WIDPENGDTEYAPKFQG

SEQ ID NO: 24279 - protein, 9 aa, Artificial Sequence
  Description of Artificial Sequence: Synthetic peptide
  XENP020034 vhCDR3
RGVRQALDY

SEQ ID NO: 24280 - protein, 480 aa, Artificial Sequence; identical to SEQ ID NO: 23401
  Description of Artificial Sequence: Synthetic polypeptide
  XENP020034 2A11_H1L2_Fab-1G6_H1.279_L1.194 scFv-Fc Heavy Chain

SEQ ID NO: 24281 - protein, 122 aa, Artificial Sequence; identical to SEQ ID NO: 10908
  Description of Artificial Sequence: Synthetic polypeptide
  VH of XENP020034

SEQ ID NO: 24282 - protein, 107 aa, Artificial Sequence; identical to SEQ ID NO: 10999
  Description of Artificial Sequence: Synthetic polypeptide
  VL of XENP020034

SEQ ID NO: 24283 - protein, 231 aa, Artificial Sequence; identical to SEQ ID NO: 21532
  Description of Artificial Sequence: Synthetic polypeptide
  Fc chain of XENP020034

SEQ ID NO: 24284 - protein, 5 aa, Artificial Sequence
  Description of Artificial Sequence: Synthetic peptide
  XENP020034 vhCDR1
NYWMN

SEQ ID NO: 24285 - protein, 19 aa, Artificial Sequence
  Description of Artificial Sequence: Synthetic peptide
  XENP020034 vhCDR2
EIRLYSNNYATHYAESVKG

SEQ ID NO: 24286 - protein, 11 aa, Artificial Sequence
  Description of Artificial Sequence: Synthetic peptide
  XENP020034 vhCDR3
YYGNYGGYFDV

SEQ ID NO: 24287 - protein, 11 aa, Artificial Sequence
  Description of Artificial Sequence: Synthetic peptide
  XENP020034 vlCDR1
RASQSVGNDVA

SEQ ID NO: 24288 - protein, 7 aa, Artificial Sequence
  Description of Artificial Sequence: Synthetic peptide
  XENP020034 vlCDR2
YASHRYT

SEQ ID NO: 24289 - protein, 9 aa, Artificial Sequence
  Description of Artificial Sequence: Synthetic peptide
  XENP020034 vlCDR3
QQDFSSPRT

SEQ ID NO: 24290 - protein, 214 aa, Artificial Sequence; identical to SEQ ID NO: 17250
  Description of Artificial Sequence: Synthetic polypeptide
  XENP020034 2A11_H1L2_Fab-1G6_H1.279_L1.194 Light Chain

SEQ ID NO: 24291 - protein, 107 aa, Artificial Sequence; identical to SEQ ID NO: 17251
  Description of Artificial Sequence: Synthetic polypeptide
  VL of XENP020034

SEQ ID NO: 24292 - protein, 11 aa, Artificial Sequence
  Description of Artificial Sequence: Synthetic peptide
  XENP020034 vlCDR1
QASQDIGNYLN

SEQ ID NO: 24293 - protein, 7 aa, Artificial Sequence
  Description of Artificial Sequence: Synthetic peptide
  XENP020034 vlCDR2
YTSRLHS

SEQ ID NO: 24294 - protein, 9 aa, Artificial Sequence
  Description of Artificial Sequence: Synthetic peptide
  XENP020034 vlCDR3
QQGNTLPYT

SEQ ID NO: 24295 - protein, 447 aa, Artificial Sequence; identical to SEQ ID NO: 17235
  Description of Artificial Sequence: Synthetic polypeptide
  XENP020064 2A11_H1L2_Fab-1G6_H1.282_L1.194 Fab-Fc Heavy Chain

SEQ ID NO: 24296 - protein, 118 aa, Artificial Sequence; identical to SEQ ID NO: 17236
  Description of Artificial Sequence: Synthetic polypeptide
  VH of XENP020064

SEQ ID NO: 24297 - protein, 5 aa, Artificial Sequence
  Description of Artificial Sequence: Synthetic peptide
  XENP020064 vhCDR1
DYYMH

SEQ ID NO: 24298 - protein, 17 aa, Artificial Sequence
  Description of Artificial Sequence: Synthetic peptide
  XENP020064 vhCDR2
WIDPENGDTEYAPKFQG

SEQ ID NO: 24299 - protein, 9 aa, Artificial Sequence
  Description of Artificial Sequence: Synthetic peptide
  XENP020064 vhCDR3
RGVRQALDY

SEQ ID NO: 24300 - protein, 480 aa, Artificial Sequence; identical to SEQ ID NO: 23920
  Description of Artificial Sequence: Synthetic polypeptide
  XENP020064 2A11_H1L2_Fab-1G6_H1.282_L1.194 scFv-Fc Heavy Chain

SEQ ID NO: 24301 - protein, 122 aa, Artificial Sequence; identical to SEQ ID NO: 10935
  Description of Artificial Sequence: Synthetic polypeptide
  VH of XENP020064

SEQ ID NO: 24302 - protein, 107 aa, Artificial Sequence; identical to SEQ ID NO: 10999
  Description of Artificial Sequence: Synthetic polypeptide
  VL of XENP020064

SEQ ID NO: 24303 - protein, 231 aa, Artificial Sequence; identical to SEQ ID NO: 21532
  Description of Artificial Sequence: Synthetic polypeptide
  Fc chain of XENP020064

SEQ ID NO: 24304 - protein, 5 aa, Artificial Sequence
  Description of Artificial Sequence: Synthetic peptide
  XENP020064 vhCDR1
NYWMN

SEQ ID NO: 24305 - protein, 19 aa, Artificial Sequence
  Description of Artificial Sequence: Synthetic peptide
  XENP020064 vhCDR2
EIRLYSNNYATHYAESVKG

SEQ ID NO: 24306 - protein, 11 aa, Artificial Sequence
  Description of Artificial Sequence: Synthetic peptide
  XENP020064 vhCDR3
YYGNYGGYFDV

SEQ ID NO: 24307 - protein, 11 aa, Artificial Sequence
  Description of Artificial Sequence: Synthetic peptide
  XENP020064 vlCDR1
RASQSVGNDVA

SEQ ID NO: 24308 - protein, 7 aa, Artificial Sequence
  Description of Artificial Sequence: Synthetic peptide
  XENP020064 vlCDR2
YASHRYT

SEQ ID NO: 24309 - protein, 9 aa, Artificial Sequence
  Description of Artificial Sequence: Synthetic peptide
  XENP020064 vlCDR3
QQDFSSPRT

SEQ ID NO: 24310 - protein, 214 aa, Artificial Sequence; identical to SEQ ID NO: 17250
  Description of Artificial Sequence: Synthetic polypeptide
  XENP020064 2A11_H1L2_Fab-1G6_H1.282_L1.194 Light Chain

SEQ ID NO: 24311 - protein, 107 aa, Artificial Sequence; identical to SEQ ID NO: 17251
  Description of Artificial Sequence: Synthetic polypeptide
  VL of XENP020064

SEQ ID NO: 24312 - protein, 11 aa, Artificial Sequence
  Description of Artificial Sequence: Synthetic peptide
  XENP020064 vlCDR1
QASQDIGNYLN

SEQ ID NO: 24313 - protein, 7 aa, Artificial Sequence
  Description of Artificial Sequence: Synthetic peptide
  XENP020064 vlCDR2
YTSRLHS

SEQ ID NO: 24314 - protein, 9 aa, Artificial Sequence
  Description of Artificial Sequence: Synthetic peptide
  XENP020064 vlCDR3
QQGNTLPYT

SEQ ID NO: 24315 - protein, 447 aa, Artificial Sequence; identical to SEQ ID NO: 17235
  Description of Artificial Sequence: Synthetic polypeptide
  XENP020203 2A11_H1L0_Fab-1G6_H1.279_L1.194 Fab-Fc Heavy Chain

SEQ ID NO: 24316 - protein, 118 aa, Artificial Sequence; identical to SEQ ID NO: 17236
  Description of Artificial Sequence: Synthetic polypeptide
  VH of XENP020203

SEQ ID NO: 24317 - protein, 5 aa, Artificial Sequence
  Description of Artificial Sequence: Synthetic peptide
  XENP020203 vhCDR1
DYYMH

SEQ ID NO: 24318 - protein, 17 aa, Artificial Sequence
  Description of Artificial Sequence: Synthetic peptide
  XENP020203 vhCDR2
WIDPENGDTEYAPKFQG

SEQ ID NO: 24319 - protein, 9 aa, Artificial Sequence
  Description of Artificial Sequence: Synthetic peptide
  XENP020203 vhCDR3
RGVRQALDY

SEQ ID NO: 24320 - protein, 480 aa, Artificial Sequence; identical to SEQ ID NO: 23401
  Description of Artificial Sequence: Synthetic polypeptide
  XENP020203 2A11_H1L0_Fab-1G6_H1.279_L1.194 scFv-Fc Heavy Chain

SEQ ID NO: 24321 - protein, 122 aa, Artificial Sequence; identical to SEQ ID NO: 10908
  Description of Artificial Sequence: Synthetic polypeptide
  VH of XENP020203

SEQ ID NO: 24322 - protein, 107 aa, Artificial Sequence; identical to SEQ ID NO: 10999
  Description of Artificial Sequence: Synthetic polypeptide
  VL of XENP020203

SEQ ID NO: 24323 - protein, 231 aa, Artificial Sequence; identical to SEQ ID NO: 21532
  Description of Artificial Sequence: Synthetic polypeptide
  Fc chain of XENP020203

SEQ ID NO: 24324 - protein, 5 aa, Artificial Sequence
  Description of Artificial Sequence: Synthetic peptide
  XENP020203 vhCDR1
NYWMN

SEQ ID NO: 24325 - protein, 19 aa, Artificial Sequence
  Description of Artificial Sequence: Synthetic peptide
  XENP020203 vhCDR2
EIRLYSNNYATHYAESVKG

SEQ ID NO: 24326 - protein, 11 aa, Artificial Sequence
  Description of Artificial Sequence: Synthetic peptide
  XENP020203 vhCDR3
YYGNYGGYFDV

SEQ ID NO: 24327 - protein, 11 aa, Artificial Sequence
  Description of Artificial Sequence: Synthetic peptide
  XENP020203 vlCDR1
RASQSVGNDVA

SEQ ID NO: 24328 - protein, 7 aa, Artificial Sequence
  Description of Artificial Sequence: Synthetic peptide
  XENP020203 vlCDR2
YASHRYT

SEQ ID NO: 24329 - protein, 9 aa, Artificial Sequence
  Description of Artificial Sequence: Synthetic peptide
  XENP020203 vlCDR3
QQDFSSPRT

SEQ ID NO: 24330 - protein, 214 aa, Artificial Sequence; identical to SEQ ID NO: 17230
  Description of Artificial Sequence: Synthetic polypeptide
  XENP020203 2A11_H1L0_Fab-1G6_H1.279_L1.194 Light Chain

SEQ ID NO: 24331 - protein, 107 aa, Artificial Sequence; identical to SEQ ID NO: 17231
  Description of Artificial Sequence: Synthetic polypeptide
  VL of XENP020203

SEQ ID NO: 24332 - protein, 11 aa, Artificial Sequence
  Description of Artificial Sequence: Synthetic peptide
  XENP020203 vlCDR1
RASQDIGNYLN

SEQ ID NO: 24333 - protein, 7 aa, Artificial Sequence
  Description of Artificial Sequence: Synthetic peptide
  XENP020203 vlCDR2
YTSRLHS

SEQ ID NO: 24334 - protein, 9 aa, Artificial Sequence
  Description of Artificial Sequence: Synthetic peptide
  XENP020203 vlCDR3
QQGNTLPYT

SEQ ID NO: 24335 - protein, 447 aa, Artificial Sequence; identical to SEQ ID NO: 17235
  Description of Artificial Sequence: Synthetic polypeptide
  XENP020204 2A11_H1L1_Fab-1G6_H1.279_L1.194 Fab-Fc Heavy Chain

SEQ ID NO: 24336 - protein, 118 aa, Artificial Sequence; identical to SEQ ID NO: 17236
  Description of Artificial Sequence: Synthetic polypeptide
  VH of XENP020204

SEQ ID NO: 24337 - protein, 5 aa, Artificial Sequence
  Description of Artificial Sequence: Synthetic peptide
  XENP020204 vhCDR1
DYYMH

SEQ ID NO: 24338 - protein, 17 aa, Artificial Sequence
  Description of Artificial Sequence: Synthetic peptide
  XENP020204 vhCDR2
WIDPENGDTEYAPKFQG

SEQ ID NO: 24339 - protein, 9 aa, Artificial Sequence
  Description of Artificial Sequence: Synthetic peptide
  XENP020204 vhCDR3
RGVRQALDY

SEQ ID NO: 24340 - protein, 480 aa, Artificial Sequence; identical to SEQ ID NO: 23401
  Description of Artificial Sequence: Synthetic polypeptide
  XENP020204 2A11_H1L1_Fab-1G6_H1.279_L1.194 scFv-Fc Heavy Chain

SEQ ID NO: 24341 - protein, 122 aa, Artificial Sequence; identical to SEQ ID NO: 10908
  Description of Artificial Sequence: Synthetic polypeptide
  VH of XENP020204

SEQ ID NO: 24342 - protein, 107 aa, Artificial Sequence; identical to SEQ ID NO: 10999
  Description of Artificial Sequence: Synthetic polypeptide
  VL of XENP020204

SEQ ID NO: 24343 - protein, 231 aa, Artificial Sequence; identical to SEQ ID NO: 21532
  Description of Artificial Sequence: Synthetic polypeptide
  Fc chain of XENP020204

SEQ ID NO: 24344 - protein, 5 aa, Artificial Sequence
  Description of Artificial Sequence: Synthetic peptide
  XENP020204 vhCDR1
NYWMN

SEQ ID NO: 24345 - protein, 19 aa, Artificial Sequence
  Description of Artificial Sequence: Synthetic peptide
  XENP020204 vhCDR2
EIRLYSNNYATHYAESVKG

SEQ ID NO: 24346 - protein, 11 aa, Artificial Sequence
  Description of Artificial Sequence: Synthetic peptide
  XENP020204 vhCDR3
YYGNYGGYFDV

SEQ ID NO: 24347 - protein, 11 aa, Artificial Sequence
  Description of Artificial Sequence: Synthetic peptide
  XENP020204 vlCDR1
RASQSVGNDVA

SEQ ID NO: 24348 - protein, 7 aa, Artificial Sequence
  Description of Artificial Sequence: Synthetic peptide
  XENP020204 vlCDR2
YASHRYT

SEQ ID NO: 24349 - protein, 9 aa, Artificial Sequence
  Description of Artificial Sequence: Synthetic peptide
  XENP020204 vlCDR3
QQDFSSPRT

SEQ ID NO: 24350 - protein, 214 aa, Artificial Sequence; identical to SEQ ID NO: 17240
  Description of Artificial Sequence: Synthetic polypeptide
  XENP020204 2A11_H1L1_Fab-1G6_H1.279_L1.194 Light Chain

SEQ ID NO: 24351 - protein, 107 aa, Artificial Sequence; identical to SEQ ID NO: 17241
  Description of Artificial Sequence: Synthetic polypeptide
  VL of XENP020204

SEQ ID NO: 24352 - protein, 11 aa, Artificial Sequence
  Description of Artificial Sequence: Synthetic peptide
  XENP020204 vlCDR1
RASQDIGNYLN

SEQ ID NO: 24353 - protein, 7 aa, Artificial Sequence
  Description of Artificial Sequence: Synthetic peptide
  XENP020204 vlCDR2
YTSRLHS

SEQ ID NO: 24354 - protein, 9 aa, Artificial Sequence
  Description of Artificial Sequence: Synthetic peptide
  XENP020204 vlCDR3
QQGNTLPYT

SEQ ID NO: 24355 - protein, 447 aa, Artificial Sequence; identical to SEQ ID NO: 17235
  Description of Artificial Sequence: Synthetic polypeptide
  XENP020206 2A11_H1L2_Fab-1G6_L1.194_H1.279 Fab-Fc Heavy Chain

SEQ ID NO: 24356 - protein, 118 aa, Artificial Sequence; identical to SEQ ID NO: 17236
  Description of Artificial Sequence: Synthetic polypeptide
  VH of XENP020206

SEQ ID NO: 24357 - protein, 5 aa, Artificial Sequence
  Description of Artificial Sequence: Synthetic peptide
  XENP020206 vhCDR1
DYYMH

SEQ ID NO: 24358 - protein, 17 aa, Artificial Sequence
  Description of Artificial Sequence: Synthetic peptide
  XENP020206 vhCDR2
WIDPENGDTEYAPKFQG

SEQ ID NO: 24359 - protein, 9 aa, Artificial Sequence
  Description of Artificial Sequence: Synthetic peptide
  XENP020206 vhCDR3
RGVRQALDY

SEQ ID NO: 24360 - protein, 480 aa, Artificial Sequence; identical to SEQ ID NO: 23221
  Description of Artificial Sequence: Synthetic polypeptide
  XENP020206 2A11_H1L2_Fab-1G6_L1.194_H1.279 scFv-Fc Heavy Chain

SEQ ID NO: 24361 - protein, 107 aa, Artificial Sequence; identical to SEQ ID NO: 10999
  Description of Artificial Sequence: Synthetic polypeptide
  VH of XENP020206

SEQ ID NO: 24362 - protein, 122 aa, Artificial Sequence; identical to SEQ ID NO: 10908
  Description of Artificial Sequence: Synthetic polypeptide
  VL of XENP020206

SEQ ID NO: 24363 - protein, 231 aa, Artificial Sequence; identical to SEQ ID NO: 21532
  Description of Artificial Sequence: Synthetic polypeptide
  Fc chain of XENP020206

SEQ ID NO: 24364 - protein, 11 aa, Artificial Sequence
  Description of Artificial Sequence: Synthetic peptide
  XENP020206 vhCDR1
RASQSVGNDVA

SEQ ID NO: 24365 - protein, 7 aa, Artificial Sequence
  Description of Artificial Sequence: Synthetic peptide
  XENP020206 vhCDR2
YASHRYT

SEQ ID NO: 24366 - protein, 9 aa, Artificial Sequence
  Description of Artificial Sequence: Synthetic peptide
  XENP020206 vhCDR3
QQDFSSPRT

SEQ ID NO: 24367 - protein, 5 aa, Artificial Sequence
  Description of Artificial Sequence: Synthetic peptide
  XENP020206 vlCDR1
NYWMN

SEQ ID NO: 24368 - protein, 19 aa, Artificial Sequence
  Description of Artificial Sequence: Synthetic peptide
  XENP020206 vlCDR2
EIRLYSNNYATHYAESVKG

SEQ ID NO: 24369 - protein, 11 aa, Artificial Sequence
  Description of Artificial Sequence: Synthetic peptide
  XENP020206 vlCDR3
YYGNYGGYFDV

SEQ ID NO: 24370 - protein, 214 aa, Artificial Sequence; identical to SEQ ID NO: 17250
  Description of Artificial Sequence: Synthetic polypeptide
  XENP020206 2A11_H1L2_Fab-1G6_L1.194_H1.279 Light Chain

SEQ ID NO: 24371 - protein, 107 aa, Artificial Sequence; identical to SEQ ID NO: 17251
  Description of Artificial Sequence: Synthetic polypeptide
  VL of XENP020206

SEQ ID NO: 24372 - protein, 11 aa, Artificial Sequence
  Description of Artificial Sequence: Synthetic peptide
  XENP020206 vlCDR1
QASQDIGNYLN

SEQ ID NO: 24373 - protein, 7 aa, Artificial Sequence
  Description of Artificial Sequence: Synthetic peptide
  XENP020206 vlCDR2
YTSRLHS

SEQ ID NO: 24374 - protein, 9 aa, Artificial Sequence
  Description of Artificial Sequence: Synthetic peptide
  XENP020206 vlCDR3
QQGNTLPYT

SEQ ID NO: 24375 - protein, 447 aa, Artificial Sequence; identical to SEQ ID NO: 17235
  Description of Artificial Sequence: Synthetic polypeptide
  XENP020207 2A11_H1L2_Fab-1G6_L1.210_H1.288 Fab-Fc Heavy Chain

SEQ ID NO: 24376 - protein, 118 aa, Artificial Sequence; identical to SEQ ID NO: 17236
  Description of Artificial Sequence: Synthetic polypeptide
  VH of XENP020207

SEQ ID NO: 24377 - protein, 5 aa, Artificial Sequence
  Description of Artificial Sequence: Synthetic peptide
  XENP020207 vhCDR1
DYYMH

SEQ ID NO: 24378 - protein, 17 aa, Artificial Sequence
  Description of Artificial Sequence: Synthetic peptide
  XENP020207 vhCDR2
WIDPENGDTEYAPKFQG

SEQ ID NO: 24379 - protein, 9 aa, Artificial Sequence
  Description of Artificial Sequence: Synthetic peptide
  XENP020207 vhCDR3
RGVRQALDY

SEQ ID NO: 24380 - protein, 480 aa, Artificial Sequence; identical to SEQ ID NO: 23381
  Description of Artificial Sequence: Synthetic polypeptide
  XENP020207 2A11_H1L2_Fab-1G6_L1.210_H1.288 scFv-Fc Heavy Chain

SEQ ID NO: 24381 - protein, 107 aa, Artificial Sequence; identical to SEQ ID NO: 11359
  Description of Artificial Sequence: Synthetic polypeptide
  VH of XENP020207

SEQ ID NO: 24382 - protein, 122 aa, Artificial Sequence; identical to SEQ ID NO: 11358
  Description of Artificial Sequence: Synthetic polypeptide
  VL of XENP020207

SEQ ID NO: 24383 - protein, 231 aa, Artificial Sequence; identical to SEQ ID NO: 21532
  Description of Artificial Sequence: Synthetic polypeptide
  Fc chain of XENP020207

SEQ ID NO: 24384 - protein, 11 aa, Artificial Sequence
  Description of Artificial Sequence: Synthetic peptide
  XENP020207 vhCDR1
RASQSVGNDVA

SEQ ID NO: 24385 - protein, 7 aa, Artificial Sequence
  Description of Artificial Sequence: Synthetic peptide
  XENP020207 vhCDR2
YASHRYT

SEQ ID NO: 24386 - protein, 9 aa, Artificial Sequence
  Description of Artificial Sequence: Synthetic peptide
  XENP020207 vhCDR3
QQDFSSPRT

SEQ ID NO: 24387 - protein, 5 aa, Artificial Sequence
  Description of Artificial Sequence: Synthetic peptide
  XENP020207 vlCDR1
NYWMN

SEQ ID NO: 24388 - protein, 19 aa, Artificial Sequence
  Description of Artificial Sequence: Synthetic peptide
  XENP020207 vlCDR2
EIRLYSNNYATHYAESVKG

SEQ ID NO: 24389 - protein, 11 aa, Artificial Sequence
  Description of Artificial Sequence: Synthetic peptide
  XENP020207 vlCDR3
YYGNYGGYFDV

SEQ ID NO: 24390 - protein, 214 aa, Artificial Sequence; identical to SEQ ID NO: 17250
  Description of Artificial Sequence: Synthetic polypeptide
  XENP020207 2A11_H1L2_Fab-1G6_L1.210_H1.288 Light Chain

SEQ ID NO: 24391 - protein, 107 aa, Artificial Sequence; identical to SEQ ID NO: 17251
  Description of Artificial Sequence: Synthetic polypeptide
  VL of XENP020207

SEQ ID NO: 24392 - protein, 11 aa, Artificial Sequence
  Description of Artificial Sequence: Synthetic peptide
  XENP020207 vlCDR1
QASQDIGNYLN

SEQ ID NO: 24393 - protein, 7 aa, Artificial Sequence
  Description of Artificial Sequence: Synthetic peptide
  XENP020207 vlCDR2
YTSRLHS

SEQ ID NO: 24394 - protein, 9 aa, Artificial Sequence
  Description of Artificial Sequence: Synthetic peptide
  XENP020207 vlCDR3
QQGNTLPYT

SEQ ID NO: 24395 - protein, 447 aa, Artificial Sequence; identical to SEQ ID NO: 17235
  Description of Artificial Sequence: Synthetic polypeptide
  XENP020208 2A11_H1L2_Fab-1G6_H1.288_L1.210 Fab-Fc Heavy Chain

SEQ ID NO: 24396 - protein, 118 aa, Artificial Sequence; identical to SEQ ID NO: 17236
  Description of Artificial Sequence: Synthetic polypeptide
  VH of XENP020208

SEQ ID NO: 24397 - protein, 5 aa, Artificial Sequence
  Description of Artificial Sequence: Synthetic peptide
  XENP020208 vhCDR1
DYYMH

SEQ ID NO: 24398 - protein, 17 aa, Artificial Sequence
  Description of Artificial Sequence: Synthetic peptide
  XENP020208 vhCDR2
WIDPENGDTEYAPKFQG

SEQ ID NO: 24399 - protein, 9 aa, Artificial Sequence
  Description of Artificial Sequence: Synthetic peptide
  XENP020208 vhCDR3
RGVRQALDY

SEQ ID NO: 24400 - protein, 480 aa, Artificial Sequence; identical to SEQ ID NO: 23860
  Description of Artificial Sequence: Synthetic polypeptide
  XENP020208 2A11_H1L2_Fab-1G6_H1.288_L1.210 scFv-Fc Heavy Chain

SEQ ID NO: 24401 - protein, 122 aa, Artificial Sequence; identical to SEQ ID NO: 11358
  Description of Artificial Sequence: Synthetic polypeptide
  VH of XENP020208

SEQ ID NO: 24402 - protein, 107 aa, Artificial Sequence; identical to SEQ ID NO: 11359
  Description of Artificial Sequence: Synthetic polypeptide
  VL of XENP020208

SEQ ID NO: 24403 - protein, 231 aa, Artificial Sequence; identical to SEQ ID NO: 21532
  Description of Artificial Sequence: Synthetic polypeptide
  Fc chain of XENP020208

SEQ ID NO: 24404 - protein, 5 aa, Artificial Sequence
  Description of Artificial Sequence: Synthetic peptide
  XENP020208 vhCDR1
NYWMN

SEQ ID NO: 24405 - protein, 19 aa, Artificial Sequence
  Description of Artificial Sequence: Synthetic peptide
  XENP020208 vhCDR2
EIRLYSNNYATHYAESVKG

SEQ ID NO: 24406 - protein, 11 aa, Artificial Sequence
  Description of Artificial Sequence: Synthetic peptide
  XENP020208 vhCDR3
YYGNYGGYFDV

SEQ ID NO: 24407 - protein, 11 aa, Artificial Sequence
  Description of Artificial Sequence: Synthetic peptide
  XENP020208 vlCDR1
RASQSVGNDVA

SEQ ID NO: 24408 - protein, 7 aa, Artificial Sequence
  Description of Artificial Sequence: Synthetic peptide
  XENP020208 vlCDR2
YASHRYT

SEQ ID NO: 24409 - protein, 9 aa, Artificial Sequence
  Description of Artificial Sequence: Synthetic peptide
  XENP020208 vlCDR3
QQDFSSPRT

SEQ ID NO: 24410 - protein, 214 aa, Artificial Sequence; identical to SEQ ID NO: 17250
  Description of Artificial Sequence: Synthetic polypeptide
  XENP020208 2A11_H1L2_Fab-1G6_H1.288_L1.210 Light Chain

SEQ ID NO: 24411 - protein, 107 aa, Artificial Sequence; identical to SEQ ID NO: 17251
  Description of Artificial Sequence: Synthetic polypeptide
  VL of XENP020208

SEQ ID NO: 24412 - protein, 11 aa, Artificial Sequence
  Description of Artificial Sequence: Synthetic peptide
  XENP020208 vlCDR1
QASQDIGNYLN

SEQ ID NO: 24413 - protein, 7 aa, Artificial Sequence
  Description of Artificial Sequence: Synthetic peptide
  XENP020208 vlCDR2
YTSRLHS

SEQ ID NO: 24414 - protein, 9 aa, Artificial Sequence
  Description of Artificial Sequence: Synthetic peptide
  XENP020208 vlCDR3
QQGNTLPYT

SEQ ID NO: 24415 - protein, 447 aa, Artificial Sequence; identical to SEQ ID NO: 17235
  Description of Artificial Sequence: Synthetic polypeptide
  XENP021580 2A11_H1_25F7_L0_Fab-1G6_L1.194_H1.279 Fab-Fc Heavy Chain

SEQ ID NO: 24416 - protein, 118 aa, Artificial Sequence; identical to SEQ ID NO: 17236
  Description of Artificial Sequence: Synthetic polypeptide
  VH of XENP021580

SEQ ID NO: 24417 - protein, 5 aa, Artificial Sequence
  Description of Artificial Sequence: Synthetic peptide
  XENP021580 vhCDR1
DYYMH

SEQ ID NO: 24418 - protein, 17 aa, Artificial Sequence
  Description of Artificial Sequence: Synthetic peptide
  XENP021580 vhCDR2
WIDPENGDTEYAPKFQG

SEQ ID NO: 24419 - protein, 9 aa, Artificial Sequence
  Description of Artificial Sequence: Synthetic peptide
  XENP021580 vhCDR3
RGVRQALDY

SEQ ID NO: 24420 - protein, 480 aa, Artificial Sequence; identical to SEQ ID NO: 23221
  Description of Artificial Sequence: Synthetic polypeptide
  XENP021580 2A11_H1_25F7_L0_Fab-1G6_L1.194_H1.279 scFv-Fc Heavy Chain

SEQ ID NO: 24421 - protein, 107 aa, Artificial Sequence; identical to SEQ ID NO: 10999
  Description of Artificial Sequence: Synthetic polypeptide
  VH of XENP021580

SEQ ID NO: 24422 - protein, 122 aa, Artificial Sequence; identical to SEQ ID NO: 10908
  Description of Artificial Sequence: Synthetic polypeptide
  VL of XENP021580

SEQ ID NO: 24423 - protein, 231 aa, Artificial Sequence; identical to SEQ ID NO: 21532
  Description of Artificial Sequence: Synthetic polypeptide
  Fc chain of XENP021580

SEQ ID NO: 24424 - protein, 11 aa, Artificial Sequence
  Description of Artificial Sequence: Synthetic peptide
  XENP021580 vhCDR1
RASQSVGNDVA

SEQ ID NO: 24425 - protein, 7 aa, Artificial Sequence
  Description of Artificial Sequence: Synthetic peptide
  XENP021580 vhCDR2
YASHRYT

SEQ ID NO: 24426 - protein, 9 aa, Artificial Sequence
  Description of Artificial Sequence: Synthetic peptide
  XENP021580 vhCDR3
QQDFSSPRT

SEQ ID NO: 24427 - protein, 5 aa, Artificial Sequence
  Description of Artificial Sequence: Synthetic peptide
  XENP021580 vlCDR1
NYWMN

SEQ ID NO: 24428 - protein, 19 aa, Artificial Sequence
  Description of Artificial Sequence: Synthetic peptide
  XENP021580 vlCDR2
EIRLYSNNYATHYAESVKG

SEQ ID NO: 24429 - protein, 11 aa, Artificial Sequence
  Description of Artificial Sequence: Synthetic peptide
  XENP021580 vlCDR3
YYGNYGGYFDV

SEQ ID NO: 24430 - protein, 214 aa, Artificial Sequence; identical to SEQ ID NO: 17140
  Description of Artificial Sequence: Synthetic polypeptide
  XENP021580 2A11_H1_25F7_L0_Fab-1G6_L1.194_H1.279 Light Chain

SEQ ID NO: 24431 - protein, 107 aa, Artificial Sequence; identical to SEQ ID NO: 17141
  Description of Artificial Sequence: Synthetic polypeptide
  VL of XENP021580

SEQ ID NO: 24432 - protein, 11 aa, Artificial Sequence
  Description of Artificial Sequence: Synthetic peptide
  XENP021580 vlCDR1
RASQSISSYLA

SEQ ID NO: 24433 - protein, 7 aa, Artificial Sequence
  Description of Artificial Sequence: Synthetic peptide
  XENP021580 vlCDR2
DASNRAT

SEQ ID NO: 24434 - protein, 9 aa, Artificial Sequence
  Description of Artificial Sequence: Synthetic peptide
  XENP021580 vlCDR3
QQRSNWPLT

SEQ ID NO: 24435 - protein, 447 aa, Artificial Sequence; identical to SEQ ID NO: 17235
  Description of Artificial Sequence: Synthetic polypeptide
  XENP021581 2A11_H1_L2.90_Fab-1G6_L1.194_H1.279 Fab-Fc Heavy Chain

SEQ ID NO: 24436 - protein, 118 aa, Artificial Sequence; identical to SEQ ID NO: 17236
  Description of Artificial Sequence: Synthetic polypeptide
  VH of XENP021581

SEQ ID NO: 24437 - protein, 5 aa, Artificial Sequence
  Description of Artificial Sequence: Synthetic peptide
  XENP021581 vhCDR1
DYYMH

SEQ ID NO: 24438 - protein, 17 aa, Artificial Sequence
  Description of Artificial Sequence: Synthetic peptide
  XENP021581 vhCDR2
WIDPENGDTEYAPKFQG

SEQ ID NO: 24439 - protein, 9 aa, Artificial Sequence
  Description of Artificial Sequence: Synthetic peptide
  XENP021581 vhCDR3
RGVRQALDY

SEQ ID NO: 24440 - protein, 480 aa, Artificial Sequence; identical to SEQ ID NO: 23221
  Description of Artificial Sequence: Synthetic polypeptide
  XENP021581 2A11_H1_L2.90_Fab-1G6_L1.194_H1.279 scFv-Fc Heavy Chain

SEQ ID NO: 24441 - protein, 107 aa, Artificial Sequence; identical to SEQ ID NO: 10999
  Description of Artificial Sequence: Synthetic polypeptide
  VH of XENP021581

SEQ ID NO: 24442 - protein, 122 aa, Artificial Sequence; identical to SEQ ID NO: 10908
  Description of Artificial Sequence: Synthetic polypeptide
  VL of XENP021581

SEQ ID NO: 24443 - protein, 231 aa, Artificial Sequence; identical to SEQ ID NO: 21532
  Description of Artificial Sequence: Synthetic polypeptide
  Fc chain of XENP021581

SEQ ID NO: 24444 - protein, 11 aa, Artificial Sequence
  Description of Artificial Sequence: Synthetic peptide
  XENP021581 vhCDR1
RASQSVGNDVA

SEQ ID NO: 24445 - protein, 7 aa, Artificial Sequence
  Description of Artificial Sequence: Synthetic peptide
  XENP021581 vhCDR2
YASHRYT

SEQ ID NO: 24446 - protein, 9 aa, Artificial Sequence
  Description of Artificial Sequence: Synthetic peptide
  XENP021581 vhCDR3
QQDFSSPRT

SEQ ID NO: 24447 - protein, 5 aa, Artificial Sequence
  Description of Artificial Sequence: Synthetic peptide
  XENP021581 vlCDR1
NYWMN

SEQ ID NO: 24448 - protein, 19 aa, Artificial Sequence
  Description of Artificial Sequence: Synthetic peptide
  XENP021581 vlCDR2
EIRLYSNNYATHYAESVKG

SEQ ID NO: 24449 - protein, 11 aa, Artificial Sequence
  Description of Artificial Sequence: Synthetic peptide
  XENP021581 vlCDR3
YYGNYGGYFDV

SEQ ID NO: 24450 - protein, 214 aa, Artificial Sequence
  Description of Artificial Sequence: Synthetic polypeptide
  XENP021581 2A11_H1_L2.90_Fab-1G6_L1.194_H1.279 Light Chain
DIQMTQSPAFLSVTPGEKVTITCQASQDIGNYLNWYQQKPDQTVKLLIYYTSRLHSGVPSRFSGSGSGTDYTFTISSLEAEDAATYFCQQGNTLPYTFGGGTKVEIKRTVAAPSVFIFPPSDEQLKSGTASVVCLLNNFYPREAKVQWKVDNALQSGNSQESVTEQDSKDSTYSLSSTLTLSKADYEKHKVYACEVTHQGLSSPVTKSFNRGEC

SEQ ID NO: 24451 - protein, 107 aa, Artificial Sequence
  Description of Artificial Sequence: Synthetic polypeptide
  VL of XENP021581
DIQMTQSPAFLSVTPGEKVTITCQASQDIGNYLNWYQQKPDQTVKLLIYYTSRLHSGVPSRFSGSGSGTDYTFTISSLEAEDAATYFCQQGNTLPYTFGGGTKVEIK

SEQ ID NO: 24452 - protein, 11 aa, Artificial Sequence
  Description of Artificial Sequence: Synthetic peptide
  XENP021581 vlCDR1
QASQDIGNYLN

SEQ ID NO: 24453 - protein, 7 aa, Artificial Sequence
  Description of Artificial Sequence: Synthetic peptide
  XENP021581 vlCDR2
YTSRLHS

SEQ ID NO: 24454 - protein, 9 aa, Artificial Sequence
  Description of Artificial Sequence: Synthetic peptide
  XENP021581 vlCDR3
QQGNTLPYT

SEQ ID NO: 24455 - protein, 447 aa, Artificial Sequence; identical to SEQ ID NO: 17235
  Description of Artificial Sequence: Synthetic polypeptide
  XENP021582 2A11_H1_L2.91_Fab-1G6_L1.194_H1.279 Fab-Fc Heavy Chain

SEQ ID NO: 24456 - protein, 118 aa, Artificial Sequence; identical to SEQ ID NO: 17236
  Description of Artificial Sequence: Synthetic polypeptide
  VH of XENP021582

SEQ ID NO: 24457 - protein, 5 aa, Artificial Sequence
  Description of Artificial Sequence: Synthetic peptide
  XENP021582 vhCDR1
DYYMH

SEQ ID NO: 24458 - protein, 17 aa, Artificial Sequence
  Description of Artificial Sequence: Synthetic peptide
  XENP021582 vhCDR2
WIDPENGDTEYAPKFQG

SEQ ID NO: 24459 - protein, 9 aa, Artificial Sequence
  Description of Artificial Sequence: Synthetic peptide
  XENP021582 vhCDR3
RGVRQALDY

SEQ ID NO: 24460 - protein, 480 aa, Artificial Sequence; identical to SEQ ID NO: 23221
  Description of Artificial Sequence: Synthetic polypeptide
  XENP021582 2A11_H1_L2.91_Fab-1G6_L1.194_H1.279 scFv-Fc Heavy Chain

SEQ ID NO: 24461 - protein, 107 aa, Artificial Sequence; identical to SEQ ID NO: 10999
  Description of Artificial Sequence: Synthetic polypeptide
  VH of XENP021582

SEQ ID NO: 24462 - protein, 122 aa, Artificial Sequence; identical to SEQ ID NO: 10908
  Description of Artificial Sequence: Synthetic polypeptide
  VL of XENP021582

SEQ ID NO: 24463 - protein, 231 aa, Artificial Sequence; identical to SEQ ID NO: 21532
  Description of Artificial Sequence: Synthetic polypeptide
  Fc chain of XENP021582

SEQ ID NO: 24464 - protein, 11 aa, Artificial Sequence
  Description of Artificial Sequence: Synthetic peptide
  XENP021582 vhCDR1
RASQSVGNDVA

SEQ ID NO: 24465 - protein, 7 aa, Artificial Sequence
  Description of Artificial Sequence: Synthetic peptide
  XENP021582 vhCDR2
YASHRYT

SEQ ID NO: 24466 - protein, 9 aa, Artificial Sequence
  Description of Artificial Sequence: Synthetic peptide
  XENP021582 vhCDR3
QQDFSSPRT

SEQ ID NO: 24467 - protein, 5 aa, Artificial Sequence
  Description of Artificial Sequence: Synthetic peptide
  XENP021582 vlCDR1
NYWMN

SEQ ID NO: 24468 - protein, 19 aa, Artificial Sequence
  Description of Artificial Sequence: Synthetic peptide
  XENP021582 vlCDR2
EIRLYSNNYATHYAESVKG

SEQ ID NO: 24469 - protein, 11 aa, Artificial Sequence
  Description of Artificial Sequence: Synthetic peptide
  XENP021582 vlCDR3
YYGNYGGYFDV

SEQ ID NO: 24470 - protein, 214 aa, Artificial Sequence
  Description of Artificial Sequence: Synthetic polypeptide
  XENP021582 2A11_H1_L2.91_Fab-1G6_L1.194_H1.279 Light Chain
DIQMTQSPAFLSVTPGEKVTITCQASQDIGNYLNWFQQKPGQTVKLLIYYTSRLHSGVPSRFSGSGSGTDYTFTISSLEAEDAATYFCQQGNTLPYTFGGGTKVEIKRTVAAPSVFIFPPSDEQLKSGTASVVCLLNNFYPREAKVQWKVDNALQSGNSQESVTEQDSKDSTYSLSSTLTLSKADYEKHKVYACEVTHQGLSSPVTKSFNRGEC

SEQ ID NO: 24471 - protein, 107 aa, Artificial Sequence
  Description of Artificial Sequence: Synthetic polypeptide
  VL of XENP021582
DIQMTQSPAFLSVTPGEKVTITCQASQDIGNYLNWFQQKPGQTVKLLIYYTSRLHSGVPSRFSGSGSGTDYTFTISSLEAEDAATYFCQQGNTLPYTFGGGTKVEIK

SEQ ID NO: 24472 - protein, 11 aa, Artificial Sequence
  Description of Artificial Sequence: Synthetic peptide
  XENP021582 vlCDR1
QASQDIGNYLN

SEQ ID NO: 24473 - protein, 7 aa, Artificial Sequence
  Description of Artificial Sequence: Synthetic peptide
  XENP021582 vlCDR2
YTSRLHS

SEQ ID NO: 24474 - protein, 9 aa, Artificial Sequence
  Description of Artificial Sequence: Synthetic peptide
  XENP021582 vlCDR3
QQGNTLPYT

SEQ ID NO: 24475 - protein, 447 aa, Artificial Sequence; identical to SEQ ID NO: 17235
  Description of Artificial Sequence: Synthetic polypeptide
  XENP021583 2A11_H1_L2.92_Fab-1G6_L1.194_H1.279 Fab-Fc Heavy Chain

SEQ ID NO: 24476 - protein, 118 aa, Artificial Sequence; identical to SEQ ID NO: 17236
  Description of Artificial Sequence: Synthetic polypeptide
  VH of XENP021583

SEQ ID NO: 24477 - protein, 5 aa, Artificial Sequence
  Description of Artificial Sequence: Synthetic peptide
  XENP021583 vhCDR1
DYYMH

SEQ ID NO: 24478 - protein, 17 aa, Artificial Sequence
  Description of Artificial Sequence: Synthetic peptide
  XENP021583 vhCDR2
WIDPENGDTEYAPKFQG

SEQ ID NO: 24479 - protein, 9 aa, Artificial Sequence
  Description of Artificial Sequence: Synthetic peptide
  XENP021583 vhCDR3
RGVRQALDY

SEQ ID NO: 24480 - protein, 480 aa, Artificial Sequence; identical to SEQ ID NO: 23221
  Description of Artificial Sequence: Synthetic polypeptide
  XENP021583 2A11_H1_L2.92_Fab-1G6_L1.194_H1.279 scFv-Fc Heavy Chain

SEQ ID NO: 24481 - protein, 107 aa, Artificial Sequence; identical to SEQ ID NO: 10999
  Description of Artificial Sequence: Synthetic polypeptide
  VH of XENP021583

SEQ ID NO: 24482 - protein, 122 aa, Artificial Sequence; identical to SEQ ID NO: 10908
  Description of Artificial Sequence: Synthetic polypeptide
  VL of XENP021583

SEQ ID NO: 24483 - protein, 231 aa, Artificial Sequence; identical to SEQ ID NO: 21532
  Description of Artificial Sequence: Synthetic polypeptide
  Fc chain of XENP021583

SEQ ID NO: 24484 - protein, 11 aa, Artificial Sequence
  Description of Artificial Sequence: Synthetic peptide
  XENP021583 vhCDR1
RASQSVGNDVA

SEQ ID NO: 24485 - protein, 7 aa, Artificial Sequence
  Description of Artificial Sequence: Synthetic peptide
  XENP021583 vhCDR2
YASHRYT

SEQ ID NO: 24486 - protein, 9 aa, Artificial Sequence
  Description of Artificial Sequence: Synthetic peptide
  XENP021583 vhCDR3
QQDFSSPRT

SEQ ID NO: 24487 - protein, 5 aa, Artificial Sequence
  Description of Artificial Sequence: Synthetic peptide
  XENP021583 vlCDR1
NYWMN

SEQ ID NO: 24488 - protein, 19 aa, Artificial Sequence
  Description of Artificial Sequence: Synthetic peptide
  XENP021583 vlCDR2
EIRLYSNNYATHYAESVKG

SEQ ID NO: 24489 - protein, 11 aa, Artificial Sequence
  Description of Artificial Sequence: Synthetic peptide
  XENP021583 vlCDR3
YYGNYGGYFDV

SEQ ID NO: 24490 - protein, 214 aa, Artificial Sequence
  Description of Artificial Sequence: Synthetic polypeptide
  XENP021583 2A11_H1_L2.92_Fab-1G6_L1.194_H1.279 Light Chain
DIQMTQSPAFLSVTPGEKVTITCQASQDIGNYLNWFQQKPDQSVKLLIYYTSRLHSGVPSRFSGSGSGTDYTFTISSLEAEDAATYFCQQGNTLPYTFGGGTKVEIKRTVAAPSVFIFPPSDEQLKSGTASVVCLLNNFYPREAKVQWKVDNALQSGNSQESVTEQDSKDSTYSLSSTLTLSKADYEKHKVYACEVTHQGLSSPVTKSFNRGEC

SEQ ID NO: 24491 - protein, 107 aa, Artificial Sequence
  Description of Artificial Sequence: Synthetic polypeptide
  VL of XENP021583
DIQMTQSPAFLSVTPGEKVTITCQASQDIGNYLNWFQQKPDQSVKLLIYYTSRLHSGVPSRFSGSGSGTDYTFTISSLEAEDAATYFCQQGNTLPYTFGGGTKVEIK

SEQ ID NO: 24492 - protein, 11 aa, Artificial Sequence
  Description of Artificial Sequence: Synthetic peptide
  XENP021583 vlCDR1
QASQDIGNYLN

SEQ ID NO: 24493 - protein, 7 aa, Artificial Sequence
  Description of Artificial Sequence: Synthetic peptide
  XENP021583 vlCDR2
YTSRLHS

SEQ ID NO: 24494 - protein, 9 aa, Artificial Sequence
  Description of Artificial Sequence: Synthetic peptide
  XENP021583 vlCDR3
QQGNTLPYT

SEQ ID NO: 24495 - protein, 447 aa, Artificial Sequence; identical to SEQ ID NO: 17235
  Description of Artificial Sequence: Synthetic polypeptide
  XENP021584 2A11_H1_L2.93_Fab-1G6_L1.194_H1.279 Fab-Fc Heavy Chain

SEQ ID NO: 24496 - protein, 118 aa, Artificial Sequence; identical to SEQ ID NO: 17236
  Description of Artificial Sequence: Synthetic polypeptide
  VH of XENP021584

SEQ ID NO: 24497 - protein, 5 aa, Artificial Sequence
  Description of Artificial Sequence: Synthetic peptide
  XENP021584 vhCDR1
DYYMH

SEQ ID NO: 24498 - protein, 17 aa, Artificial Sequence
  Description of Artificial Sequence: Synthetic peptide
  XENP021584 vhCDR2
WIDPENGDTEYAPKFQG

SEQ ID NO: 24499 - protein, 9 aa, Artificial Sequence
  Description of Artificial Sequence: Synthetic peptide
  XENP021584 vhCDR3
RGVRQALDY

SEQ ID NO: 24500 - protein, 480 aa, Artificial Sequence; identical to SEQ ID NO: 23221
  Description of Artificial Sequence: Synthetic polypeptide
  XENP021584 2A11_H1_L2.93_Fab-1G6_L1.194_H1.279 scFv-Fc Heavy Chain

SEQ ID NO: 24501 - protein, 107 aa, Artificial Sequence; identical to SEQ ID NO: 10999
  Description of Artificial Sequence: Synthetic polypeptide
  VH of XENP021584

SEQ ID NO: 24502 - protein, 122 aa, Artificial Sequence; identical to SEQ ID NO: 10908
  Description of Artificial Sequence: Synthetic polypeptide
  VL of XENP021584

SEQ ID NO: 24503 - protein, 231 aa, Artificial Sequence; identical to SEQ ID NO: 21532
  Description of Artificial Sequence: Synthetic polypeptide
  Fc chain of XENP021584

SEQ ID NO: 24504 - protein, 11 aa, Artificial Sequence
  Description of Artificial Sequence: Synthetic peptide
  XENP021584 vhCDR1
RASQSVGNDVA

SEQ ID NO: 24505 - protein, 7 aa, Artificial Sequence
  Description of Artificial Sequence: Synthetic peptide
  XENP021584 vhCDR2
YASHRYT

SEQ ID NO: 24506 - protein, 9 aa, Artificial Sequence
  Description of Artificial Sequence: Synthetic peptide
  XENP021584 vhCDR3
QQDFSSPRT

SEQ ID NO: 24507 - protein, 5 aa, Artificial Sequence
  Description of Artificial Sequence: Synthetic peptide
  XENP021584 vlCDR1
NYWMN

SEQ ID NO: 24508 - protein, 19 aa, Artificial Sequence
  Description of Artificial Sequence: Synthetic peptide
  XENP021584 vlCDR2
EIRLYSNNYATHYAESVKG

SEQ ID NO: 24509 - protein, 11 aa, Artificial Sequence
  Description of Artificial Sequence: Synthetic peptide
  XENP021584 vlCDR3
YYGNYGGYFDV

SEQ ID NO: 24510 - protein, 214 aa, Artificial Sequence
  Description of Artificial Sequence: Synthetic polypeptide
  XENP021584 2A11_H1_L2.93_Fab-1G6_L1.194_H1.279 Light Chain
DIQMTQSPAFLSVTPGEKVTITCQASQDIGNYLNWFQQKPDQTPKLLIYYTSRLHSGVPSRFSGSGSGTDYTFTISSLEAEDAATYFCQQGNTLPYTFGGGTKVEIKRTVAAPSVFIFPPSDEQLKSGTASVVCLLNNFYPREAKVQWKVDNALQSGNSQESVTEQDSKDSTYSLSSTLTLSKADYEKHKVYACEVTHQGLSSPVTKSFNRGEC

SEQ ID NO: 24511 - protein, 107 aa, Artificial Sequence
  Description of Artificial Sequence: Synthetic polypeptide
  VL of XENP021584
DIQMTQSPAFLSVTPGEKVTITCQASQDIGNYLNWFQQKPDQTPKLLIYYTSRLHSGVPSRFSGSGSGTDYTFTISSLEAEDAATYFCQQGNTLPYTFGGGTKVEIK

SEQ ID NO: 24512 - protein, 11 aa, Artificial Sequence
  Description of Artificial Sequence: Synthetic peptide
  XENP021584 vlCDR1
QASQDIGNYLN

SEQ ID NO: 24513 - protein, 7 aa, Artificial Sequence
  Description of Artificial Sequence: Synthetic peptide
  XENP021584 vlCDR2
YTSRLHS

SEQ ID NO: 24514 - protein, 9 aa, Artificial Sequence
  Description of Artificial Sequence: Synthetic peptide
  XENP021584 vlCDR3
QQGNTLPYT

SEQ ID NO: 24515 - protein, 447 aa, Artificial Sequence; identical to SEQ ID NO: 17235
  Description of Artificial Sequence: Synthetic polypeptide
  XENP021585 2A11_H1_L2.94_Fab-1G6_L1.194_H1.279 Fab-Fc Heavy Chain

SEQ ID NO: 24516 - protein, 118 aa, Artificial Sequence; identical to SEQ ID NO: 17236
  Description of Artificial Sequence: Synthetic polypeptide
  VH of XENP021585

SEQ ID NO: 24517 - protein, 5 aa, Artificial Sequence
  Description of Artificial Sequence: Synthetic peptide
  XENP021585 vhCDR1
DYYMH

SEQ ID NO: 24518 - protein, 17 aa, Artificial Sequence
  Description of Artificial Sequence: Synthetic peptide
  XENP021585 vhCDR2
WIDPENGDTEYAPKFQG

SEQ ID NO: 24519 - protein, 9 aa, Artificial Sequence
  Description of Artificial Sequence: Synthetic peptide
  XENP021585 vhCDR3
RGVRQALDY

SEQ ID NO: 24520 - protein, 480 aa, Artificial Sequence; identical to SEQ ID NO: 23221
  Description of Artificial Sequence: Synthetic polypeptide
  XENP021585 2A11_H1_L2.94_Fab-1G6_L1.194_H1.279 scFv-Fc Heavy Chain

SEQ ID NO: 24521 - protein, 107 aa, Artificial Sequence; identical to SEQ ID NO: 10999
  Description of Artificial Sequence: Synthetic polypeptide
  VH of XENP021585

SEQ ID NO: 24522 - protein, 122 aa, Artificial Sequence; identical to SEQ ID NO: 10908
  Description of Artificial Sequence: Synthetic polypeptide
  VL of XENP021585

SEQ ID NO: 24523 - protein, 231 aa, Artificial Sequence; identical to SEQ ID NO: 21532
  Description of Artificial Sequence: Synthetic polypeptide
  Fc chain of XENP021585

SEQ ID NO: 24524 - protein, 11 aa, Artificial Sequence
  Description of Artificial Sequence: Synthetic peptide
  XENP021585 vhCDR1
RASQSVGNDVA

SEQ ID NO: 24525 - protein, 7 aa, Artificial Sequence
  Description of Artificial Sequence: Synthetic peptide
  XENP021585 vhCDR2
YASHRYT

SEQ ID NO: 24526 - protein, 9 aa, Artificial Sequence
  Description of Artificial Sequence: Synthetic peptide
  XENP021585 vhCDR3
QQDFSSPRT

SEQ ID NO: 24527 - protein, 5 aa, Artificial Sequence
  Description of Artificial Sequence: Synthetic peptide
  XENP021585 vlCDR1
NYWMN

SEQ ID NO: 24528 - protein, 19 aa, Artificial Sequence
  Description of Artificial Sequence: Synthetic peptide
  XENP021585 vlCDR2
EIRLYSNNYATHYAESVKG

SEQ ID NO: 24529 - protein, 11 aa, Artificial Sequence
  Description of Artificial Sequence: Synthetic peptide
  XENP021585 vlCDR3
YYGNYGGYFDV

SEQ ID NO: 24530 - protein, 214 aa, Artificial Sequence
  Description of Artificial Sequence: Synthetic polypeptide
  XENP021585 2A11_H1_L2.94_Fab-1G6_L1.194_H1.279 Light Chain
DIQMTQSPAFLSVTPGEKVTITCQASQDIGNYLNWFQQKPDQTVKLLIYYTSRLHSGVPSRFSGSGSGTDYTFTISSLEAEDAATYYCQQGNTLPYTFGGGTKVEIKRTVAAPSVFIFPPSDEQLKSGTASVVCLLNNFYPREAKVQWKVDNALQSGNSQESVTEQDSKDSTYSLSSTLTLSKADYEKHKVYACEVTHQGLSSPVTKSFNRGEC

SEQ ID NO: 24531 - protein, 107 aa, Artificial Sequence
  Description of Artificial Sequence: Synthetic polypeptide
  VL of XENP021585
DIQMTQSPAFLSVTPGEKVTITCQASQDIGNYLNWFQQKPDQTVKLLIYYTSRLHSGVPSRFSGSGSGTDYTFTISSLEAEDAATYYCQQGNTLPYTFGGGTKVEIK

SEQ ID NO: 24532 - protein, 11 aa, Artificial Sequence
  Description of Artificial Sequence: Synthetic peptide
  XENP021585 vlCDR1
QASQDIGNYLN

SEQ ID NO: 24533 - protein, 7 aa, Artificial Sequence
  Description of Artificial Sequence: Synthetic peptide
  XENP021585 vlCDR2
YTSRLHS

SEQ ID NO: 24534 - protein, 9 aa, Artificial Sequence
  Description of Artificial Sequence: Synthetic peptide
  XENP021585 vlCDR3
QQGNTLPYT

SEQ ID NO: 24535 - protein, 447 aa, Artificial Sequence; identical to SEQ ID NO: 17235
  Description of Artificial Sequence: Synthetic polypeptide
  XENP021586 2A11_H1_L2.95_Fab-1G6_L1.194_H1.279 Fab-Fc Heavy Chain

SEQ ID NO: 24536 - protein, 118 aa, Artificial Sequence; identical to SEQ ID NO: 17236
  Description of Artificial Sequence: Synthetic polypeptide
  VH of XENP021586

SEQ ID NO: 24537 - protein, 5 aa, Artificial Sequence
  Description of Artificial Sequence: Synthetic peptide
  XENP021586 vhCDR1
DYYMH

SEQ ID NO: 24538 - protein, 17 aa, Artificial Sequence
  Description of Artificial Sequence: Synthetic peptide
  XENP021586 vhCDR2
WIDPENGDTEYAPKFQG

SEQ ID NO: 24539 - protein, 9 aa, Artificial Sequence
  Description of Artificial Sequence: Synthetic peptide
  XENP021586 vhCDR3
RGVRQALDY

SEQ ID NO: 24540 - protein, 480 aa, Artificial Sequence; identical to SEQ ID NO: 23221
  Description of Artificial Sequence: Synthetic polypeptide
  XENP021586 2A11_H1_L2.95_Fab-1G6_L1.194_H1.279 scFv-Fc Heavy Chain

SEQ ID NO: 24541 - protein, 107 aa, Artificial Sequence; identical to SEQ ID NO: 10999
  Description of Artificial Sequence: Synthetic polypeptide
  VH of XENP021586

SEQ ID NO: 24542 - protein, 122 aa, Artificial Sequence; identical to SEQ ID NO: 10908
  Description of Artificial Sequence: Synthetic polypeptide
  VL of XENP021586

SEQ ID NO: 24543 - protein, 231 aa, Artificial Sequence; identical to SEQ ID NO: 21532
  Description of Artificial Sequence: Synthetic polypeptide
  Fc chain of XENP021586

SEQ ID NO: 24544 - protein, 11 aa, Artificial Sequence
  Description of Artificial Sequence: Synthetic peptide
  XENP021586 vhCDR1
RASQSVGNDVA

SEQ ID NO: 24545 - protein, 7 aa, Artificial Sequence
  Description of Artificial Sequence: Synthetic peptide
  XENP021586 vhCDR2
YASHRYT

SEQ ID NO: 24546 - protein, 9 aa, Artificial Sequence
  Description of Artificial Sequence: Synthetic peptide
  XENP021586 vhCDR3
QQDFSSPRT

SEQ ID NO: 24547 - protein, 5 aa, Artificial Sequence
  Description of Artificial Sequence: Synthetic peptide
  XENP021586 vlCDR1
NYWMN

SEQ ID NO: 24548 - protein, 19 aa, Artificial Sequence
  Description of Artificial Sequence: Synthetic peptide
  XENP021586 vlCDR2
EIRLYSNNYATHYAESVKG

SEQ ID NO: 24549 - protein, 11 aa, Artificial Sequence
  Description of Artificial Sequence: Synthetic peptide
  XENP021586 vlCDR3
YYGNYGGYFDV

SEQ ID NO: 24550 - protein, 214 aa, Artificial Sequence
  Description of Artificial Sequence: Synthetic polypeptide
  XENP021586 2A11_H1_L2.95_Fab-1G6_L1.194_H1.279 Light Chain
DIQMTQSPAFLSVTPGEKVTITCQASQDIGNYLNWYQQKPDQTPKLLIYYTSRLHSGVPSRFSGSGSGTDYTFTISSLEAEDAATYFCQQGNTLPYTFGGGTKVEIKRTVAAPSVFIFPPSDEQLKSGTASVVCLLNNFYPREAKVQWKVDNALQSGNSQESVTEQDSKDSTYSLSSTLTLSKADYEKHKVYACEVTHQGLSSPVTKSFNRGEC

SEQ ID NO: 24551 - protein, 107 aa, Artificial Sequence
  Description of Artificial Sequence: Synthetic polypeptide
  VL of XENP021586
DIQMTQSPAFLSVTPGEKVTITCQASQDIGNYLNWYQQKPDQTPKLLIYYTSRLHSGVPSRFSGSGSGTDYTFTISSLEAEDAATYFCQQGNTLPYTFGGGTKVEIK

SEQ ID NO: 24552 - protein, 11 aa, Artificial Sequence
  Description of Artificial Sequence: Synthetic peptide
  XENP021586 vlCDR1
QASQDIGNYLN

SEQ ID NO: 24553 - protein, 7 aa, Artificial Sequence
  Description of Artificial Sequence: Synthetic peptide
  XENP021586 vlCDR2
YTSRLHS

SEQ ID NO: 24554 - protein, 9 aa, Artificial Sequence
  Description of Artificial Sequence: Synthetic peptide
  XENP021586 vlCDR3
QQGNTLPYT

SEQ ID NO: 24555 - protein, 447 aa, Artificial Sequence; identical to SEQ ID NO: 17235
  Description of Artificial Sequence: Synthetic polypeptide
  XENP021587 2A11_H1_L2.96_Fab-1G6_L1.194_H1.279 Fab-Fc Heavy Chain

SEQ ID NO: 24556 - protein, 118 aa, Artificial Sequence; identical to SEQ ID NO: 17236
  Description of Artificial Sequence: Synthetic polypeptide
  VH of XENP021587

SEQ ID NO: 24557 - protein, 5 aa, Artificial Sequence
  Description of Artificial Sequence: Synthetic peptide
  XENP021587 vhCDR1
DYYMH

SEQ ID NO: 24558 - protein, 17 aa, Artificial Sequence
  Description of Artificial Sequence: Synthetic peptide
  XENP021587 vhCDR2
WIDPENGDTEYAPKFQG

SEQ ID NO: 24559 - protein, 9 aa, Artificial Sequence
  Description of Artificial Sequence: Synthetic peptide
  XENP021587 vhCDR3
RGVRQALDY

SEQ ID NO: 24560 - protein, 480 aa, Artificial Sequence; identical to SEQ ID NO: 23221
  Description of Artificial Sequence: Synthetic polypeptide
  XENP021587 2A11_H1_L2.96_Fab-1G6_L1.194_H1.279 scFv-Fc Heavy Chain

SEQ ID NO: 24561 - protein, 107 aa, Artificial Sequence; identical to SEQ ID NO: 10999
  Description of Artificial Sequence: Synthetic polypeptide
  VH of XENP021587

SEQ ID NO: 24562 - protein, 122 aa, Artificial Sequence; identical to SEQ ID NO: 10908
  Description of Artificial Sequence: Synthetic polypeptide
  VL of XENP021587

SEQ ID NO: 24563 - protein, 231 aa, Artificial Sequence; identical to SEQ ID NO: 21532
  Description of Artificial Sequence: Synthetic polypeptide
  Fc chain of XENP021587

SEQ ID NO: 24564 - protein, 11 aa, Artificial Sequence
  Description of Artificial Sequence: Synthetic peptide
  XENP021587 vhCDR1
RASQSVGNDVA

SEQ ID NO: 24565 - protein, 7 aa, Artificial Sequence
  Description of Artificial Sequence: Synthetic peptide
  XENP021587 vhCDR2
YASHRYT

SEQ ID NO: 24566 - protein, 9 aa, Artificial Sequence
  Description of Artificial Sequence: Synthetic peptide
  XENP021587 vhCDR3
QQDFSSPRT

SEQ ID NO: 24567 - protein, 5 aa, Artificial Sequence
  Description of Artificial Sequence: Synthetic peptide
  XENP021587 vlCDR1
NYWMN

SEQ ID NO: 24568 - protein, 19 aa, Artificial Sequence
  Description of Artificial Sequence: Synthetic peptide
  XENP021587 vlCDR2
EIRLYSNNYATHYAESVKG

SEQ ID NO: 24569 - protein, 11 aa, Artificial Sequence
  Description of Artificial Sequence: Synthetic peptide
  XENP021587 vlCDR3
YYGNYGGYFDV

SEQ ID NO: 24570 - protein, 214 aa, Artificial Sequence
  Description of Artificial Sequence: Synthetic polypeptide
  XENP021587 2A11_H1_L2.96_Fab-1G6_L1.194_H1.279 Light Chain
DIQMTQSPAFLSVTPGEKVTITCQASQDIGNYLNWYQQKPDQTPKLLIYYTSRLHSGVPSRFSGSGSGTDYTFTISSLEAEDAATYYCQQGNTLPYTFGGGTKVEIKRTVAAPSVFIFPPSDEQLKSGTASVVCLLNNFYPREAKVQWKVDNALQSGNSQESVTEQDSKDSTYSLSSTLTLSKADYEKHKVYACEVTHQGLSSPVTKSFNRGEC

SEQ ID NO: 24571 - protein, 107 aa, Artificial Sequence
  Description of Artificial Sequence: Synthetic polypeptide
  VL of XENP021587
DIQMTQSPAFLSVTPGEKVTITCQASQDIGNYLNWYQQKPDQTPKLLIYYTSRLHSGVPSRFSGSGSGTDYTFTISSLEAEDAATYYCQQGNTLPYTFGGGTKVEIK

SEQ ID NO: 24572 - protein, 11 aa, Artificial Sequence
  Description of Artificial Sequence: Synthetic peptide
  XENP021587 vlCDR1
QASQDIGNYLN

SEQ ID NO: 24573 - protein, 7 aa, Artificial Sequence
  Description of Artificial Sequence: Synthetic peptide
  XENP021587 vlCDR2
YTSRLHS

SEQ ID NO: 24574 - protein, 9 aa, Artificial Sequence
  Description of Artificial Sequence: Synthetic peptide
  XENP021587 vlCDR3
QQGNTLPYT

SEQ ID NO: 24575 - protein, 447 aa, Artificial Sequence; identical to SEQ ID NO: 17235
  Description of Artificial Sequence: Synthetic polypeptide
  XENP021588 2A11_H1_L2.97_Fab-1G6_L1.194_H1.279 Fab-Fc Heavy Chain

SEQ ID NO: 24576 - protein, 118 aa, Artificial Sequence; identical to SEQ ID NO: 17236
  Description of Artificial Sequence: Synthetic polypeptide
  VH of XENP021588

SEQ ID NO: 24577 - protein, 5 aa, Artificial Sequence
  Description of Artificial Sequence: Synthetic peptide
  XENP021588 vhCDR1
DYYMH

SEQ ID NO: 24578 - protein, 17 aa, Artificial Sequence
  Description of Artificial Sequence: Synthetic peptide
  XENP021588 vhCDR2
WIDPENGDTEYAPKFQG

SEQ ID NO: 24579 - protein, 9 aa, Artificial Sequence
  Description of Artificial Sequence: Synthetic peptide
  XENP021588 vhCDR3
RGVRQALDY

SEQ ID NO: 24580 - protein, 480 aa, Artificial Sequence; identical to SEQ ID NO: 23221
  Description of Artificial Sequence: Synthetic polypeptide
  XENP021588 2A11_H1_L2.97_Fab-1G6_L1.194_H1.279 scFv-Fc Heavy Chain

SEQ ID NO: 24581 - protein, 107 aa, Artificial Sequence; identical to SEQ ID NO: 10999
  Description of Artificial Sequence: Synthetic polypeptide
  VH of XENP021588

SEQ ID NO: 24582 - protein, 122 aa, Artificial Sequence; identical to SEQ ID NO: 10908
  Description of Artificial Sequence: Synthetic polypeptide
  VL of XENP021588

SEQ ID NO: 24583 - protein, 231 aa, Artificial Sequence; identical to SEQ ID NO: 21532
  Description of Artificial Sequence: Synthetic polypeptide
  Fc chain of XENP021588

SEQ ID NO: 24584 - protein, 11 aa, Artificial Sequence
  Description of Artificial Sequence: Synthetic peptide
  XENP021588 vhCDR1
RASQSVGNDVA

SEQ ID NO: 24585 - protein, 7 aa, Artificial Sequence
  Description of Artificial Sequence: Synthetic peptide
  XENP021588 vhCDR2
YASHRYT

SEQ ID NO: 24586 - protein, 9 aa, Artificial Sequence
  Description of Artificial Sequence: Synthetic peptide
  XENP021588 vhCDR3
QQDFSSPRT

SEQ ID NO: 24587 - protein, 5 aa, Artificial Sequence
  Description of Artificial Sequence: Synthetic peptide
  XENP021588 vlCDR1
NYWMN

SEQ ID NO: 24588 - protein, 19 aa, Artificial Sequence
  Description of Artificial Sequence: Synthetic peptide
  XENP021588 vlCDR2
EIRLYSNNYATHYAESVKG

SEQ ID NO: 24589 - protein, 11 aa, Artificial Sequence
  Description of Artificial Sequence: Synthetic peptide
  XENP021588 vlCDR3
YYGNYGGYFDV

SEQ ID NO: 24590 - protein, 214 aa, Artificial Sequence
  Description of Artificial Sequence: Synthetic polypeptide
  XENP021588 2A11_H1_L2.97_Fab-1G6_L1.194_H1.279 Light Chain
DIQMTQSPAFLSVTPGEKVTITCQASQDIGNYLNWFQQKPDQTPKLLIYYTSRLHSGVPSRFSGSGSGTDYTFTISSLEAEDAATYYCQQGNTLPYTFGGGTKVEIKRTVAAPSVFIFPPSDEQLKSGTASVVCLLNNFYPREAKVQWKVDNALQSGNSQESVTEQDSKDSTYSLSSTLTLSKADYEKHKVYACEVTHQGLSSPVTKSFNRGEC

SEQ ID NO: 24591 - protein, 107 aa, Artificial Sequence
  Description of Artificial Sequence: Synthetic polypeptide
  VL of XENP021588
DIQMTQSPAFLSVTPGEKVTITCQASQDIGNYLNWFQQKPDQTPKLLIYYTSRLHSGVPSRFSGSGSGTDYTFTISSLEAEDAATYYCQQGNTLPYTFGGGTKVEIK

SEQ ID NO: 24592 - protein, 11 aa, Artificial Sequence
  Description of Artificial Sequence: Synthetic peptide
  XENP021588 vlCDR1
QASQDIGNYLN

SEQ ID NO: 24593 - protein, 7 aa, Artificial Sequence
  Description of Artificial Sequence: Synthetic peptide
  XENP021588 vlCDR2
YTSRLHS

SEQ ID NO: 24594 - protein, 9 aa, Artificial Sequence
  Description of Artificial Sequence: Synthetic peptide
  XENP021588 vlCDR3
QQGNTLPYT

SEQ ID NO: 24595 - protein, 447 aa, Artificial Sequence; identical to SEQ ID NO: 17235
  Description of Artificial Sequence: Synthetic polypeptide
  XENP021589 2A11_H1_L2.98_Fab-1G6_L1.194_H1.279 Fab-Fc Heavy Chain

SEQ ID NO: 24596 - protein, 118 aa, Artificial Sequence; identical to SEQ ID NO: 17236
  Description of Artificial Sequence: Synthetic polypeptide
  VH of XENP021589

SEQ ID NO: 24597 - protein, 5 aa, Artificial Sequence
  Description of Artificial Sequence: Synthetic peptide
  XENP021589 vhCDR1
DYYMH

SEQ ID NO: 24598 - protein, 17 aa, Artificial Sequence
  Description of Artificial Sequence: Synthetic peptide
  XENP021589 vhCDR2
WIDPENGDTEYAPKFQG

SEQ ID NO: 24599 - protein, 9 aa, Artificial Sequence
  Description of Artificial Sequence: Synthetic peptide
  XENP021589 vhCDR3
RGVRQALDY

SEQ ID NO: 24600 - protein, 480 aa, Artificial Sequence; identical to SEQ ID NO: 23221
  Description of Artificial Sequence: Synthetic polypeptide
  XENP021589 2A11_H1_L2.98_Fab-1G6_L1.194_H1.279 scFv-Fc Heavy Chain

SEQ ID NO: 24601 - protein, 107 aa, Artificial Sequence; identical to SEQ ID NO: 10999
  Description of Artificial Sequence: Synthetic polypeptide
  VH of XENP021589

SEQ ID NO: 24602 - protein, 122 aa, Artificial Sequence; identical to SEQ ID NO: 10908
  Description of Artificial Sequence: Synthetic polypeptide
  VL of XENP021589

SEQ ID NO: 24603 - protein, 231 aa, Artificial Sequence; identical to SEQ ID NO: 21532
  Description of Artificial Sequence: Synthetic polypeptide
  Fc chain of XENP021589

SEQ ID NO: 24604 - protein, 11 aa, Artificial Sequence
  Description of Artificial Sequence: Synthetic peptide
  XENP021589 vhCDR1
RASQSVGNDVA

SEQ ID NO: 24605 - protein, 7 aa, Artificial Sequence
  Description of Artificial Sequence: Synthetic peptide
  XENP021589 vhCDR2
YASHRYT

SEQ ID NO: 24606 - protein, 9 aa, Artificial Sequence
  Description of Artificial Sequence: Synthetic peptide
  XENP021589 vhCDR3
QQDFSSPRT

SEQ ID NO: 24607 - protein, 5 aa, Artificial Sequence
  Description of Artificial Sequence: Synthetic peptide
  XENP021589 vlCDR1
NYWMN

SEQ ID NO: 24608 - protein, 19 aa, Artificial Sequence
  Description of Artificial Sequence: Synthetic peptide
  XENP021589 vlCDR2
EIRLYSNNYATHYAESVKG

SEQ ID NO: 24609 - protein, 11 aa, Artificial Sequence
  Description of Artificial Sequence: Synthetic peptide
  XENP021589 vlCDR3
YYGNYGGYFDV

SEQ ID NO: 24610 - protein, 214 aa, Artificial Sequence
  Description of Artificial Sequence: Synthetic polypeptide
  XENP021589 2A11_H1_L2.98_Fab-1G6_L1.194_H1.279 Light Chain
DIQMTQSPAFLSVTPGEKVTITCQASQDIGNYLNWYQQKPGQTPKLLIYYTSRLHSGVPSRFSGSGSGTDYTFTISSLEAEDAATYFCQQGNTLPYTFGGGTKVEIKRTVAAPSVFIFPPSDEQLKSGTASVVCLLNNFYPREAKVQWKVDNALQSGNSQESVTEQDSKDSTYSLSSTLTLSKADYEKHKVYACEVTHQGLSSPVTKSFNRGEC

SEQ ID NO: 24611 - protein, 107 aa, Artificial Sequence
  Description of Artificial Sequence: Synthetic polypeptide
  VL of XENP021589
DIQMTQSPAFLSVTPGEKVTITCQASQDIGNYLNWYQQKPGQTPKLLIYYTSRLHSGVPSRFSGSGSGTDYTFTISSLEAEDAATYFCQQGNTLPYTFGGGTKVEIK

SEQ ID NO: 24612 - protein, 11 aa, Artificial Sequence
  Description of Artificial Sequence: Synthetic peptide
  XENP021589 vlCDR1
QASQDIGNYLN

SEQ ID NO: 24613 - protein, 7 aa, Artificial Sequence
  Description of Artificial Sequence: Synthetic peptide
  XENP021589 vlCDR2
YTSRLHS

SEQ ID NO: 24614 - protein, 9 aa, Artificial Sequence
  Description of Artificial Sequence: Synthetic peptide
  XENP021589 vlCDR3
QQGNTLPYT

SEQ ID NO: 24615 - protein, 447 aa, Artificial Sequence; identical to SEQ ID NO: 17235
  Description of Artificial Sequence: Synthetic polypeptide
  XENP021590 2A11_H1_L2.99_Fab-1G6_L1.194_H1.279 Fab-Fc Heavy Chain

SEQ ID NO: 24616 - protein, 118 aa, Artificial Sequence; identical to SEQ ID NO: 17236
  Description of Artificial Sequence: Synthetic polypeptide
  VH of XENP021590

SEQ ID NO: 24617 - protein, 5 aa, Artificial Sequence
  Description of Artificial Sequence: Synthetic peptide
  XENP021590 vhCDR1
DYYMH

SEQ ID NO: 24618 - protein, 17 aa, Artificial Sequence
  Description of Artificial Sequence: Synthetic peptide
  XENP021590 vhCDR2
WIDPENGDTEYAPKFQG

SEQ ID NO: 24619 - protein, 9 aa, Artificial Sequence
  Description of Artificial Sequence: Synthetic peptide
  XENP021590 vhCDR3
RGVRQALDY

SEQ ID NO: 24620 - protein, 480 aa, Artificial Sequence; identical to SEQ ID NO: 23221
  Description of Artificial Sequence: Synthetic polypeptide
  XENP021590 2A11_H1_L2.99_Fab-1G6_L1.194_H1.279 scFv-Fc Heavy Chain

SEQ ID NO: 24621 - protein, 107 aa, Artificial Sequence; identical to SEQ ID NO: 10999
  Description of Artificial Sequence: Synthetic polypeptide
  VH of XENP021590

SEQ ID NO: 24622 - protein, 122 aa, Artificial Sequence; identical to SEQ ID NO: 10908
  Description of Artificial Sequence: Synthetic polypeptide
  VL of XENP021590

SEQ ID NO: 24623 - protein, 231 aa, Artificial Sequence; identical to SEQ ID NO: 21532
  Description of Artificial Sequence: Synthetic polypeptide
  Fc chain of XENP021590

SEQ ID NO: 24624 - protein, 11 aa, Artificial Sequence
  Description of Artificial Sequence: Synthetic peptide
  XENP021590 vhCDR1
RASQSVGNDVA

SEQ ID NO: 24625 - protein, 7 aa, Artificial Sequence
  Description of Artificial Sequence: Synthetic peptide
  XENP021590 vhCDR2
YASHRYT

SEQ ID NO: 24626 - protein, 9 aa, Artificial Sequence
  Description of Artificial Sequence: Synthetic peptide
  XENP021590 vhCDR3
QQDFSSPRT

SEQ ID NO: 24627 - protein, 5 aa, Artificial Sequence
  Description of Artificial Sequence: Synthetic peptide
  XENP021590 vlCDR1
NYWMN

SEQ ID NO: 24628 - protein, 19 aa, Artificial Sequence
  Description of Artificial Sequence: Synthetic peptide
  XENP021590 vlCDR2
EIRLYSNNYATHYAESVKG

SEQ ID NO: 24629 - protein, 11 aa, Artificial Sequence
  Description of Artificial Sequence: Synthetic peptide
  XENP021590 vlCDR3
YYGNYGGYFDV

SEQ ID NO: 24630 - protein, 214 aa, Artificial Sequence
  Description of Artificial Sequence: Synthetic polypeptide
  XENP021590 2A11_H1_L2.99_Fab-1G6_L1.194_H1.279 Light Chain
DIQMTQSPAFLSVTPGEKVTITCQASQDIGNYLNWYQQKPGQTPKLLIYYTSRLHSGVPSRFSGSGSGTDYTFTISSLEAEDAATYYCQQGNTLPYTFGGGTKVEIKRTVAAPSVFIFPPSDEQLKSGTASVVCLLNNFYPREAKVQWKVDNALQSGNSQESVTEQDSKDSTYSLSSTLTLSKADYEKHKVYACEVTHQGLSSPVTKSFNRGEC

SEQ ID NO: 24631 - protein, 107 aa, Artificial Sequence
  Description of Artificial Sequence: Synthetic polypeptide
  VL of XENP021590
DIQMTQSPAFLSVTPGEKVTITCQASQDIGNYLNWYQQKPGQTPKLLIYYTSRLHSGVPSRFSGSGSGTDYTFTISSLEAEDAATYYCQQGNTLPYTFGGGTKVEIK

SEQ ID NO: 24632 - protein, 11 aa, Artificial Sequence
  Description of Artificial Sequence: Synthetic peptide
  XENP021590 vlCDR1
QASQDIGNYLN

SEQ ID NO: 24633 - protein, 7 aa, Artificial Sequence
  Description of Artificial Sequence: Synthetic peptide
  XENP021590 vlCDR2
YTSRLHS

SEQ ID NO: 24634 - protein, 9 aa, Artificial Sequence
  Description of Artificial Sequence: Synthetic peptide
  XENP021590 vlCDR3
QQGNTLPYT

SEQ ID NO: 24635 - protein, 447 aa, Artificial Sequence; identical to SEQ ID NO: 17235
  Description of Artificial Sequence: Synthetic polypeptide
  XENP021591 2A11_H1_L2.100_Fab-1G6_L1.194_H1.279 Fab-Fc Heavy Chain

SEQ ID NO: 24636 - protein, 118 aa, Artificial Sequence; identical to SEQ ID NO: 17236
  Description of Artificial Sequence: Synthetic polypeptide
  VH of XENP021591

SEQ ID NO: 24637 - protein, 5 aa, Artificial Sequence
  Description of Artificial Sequence: Synthetic peptide
  XENP021591 vhCDR1
DYYMH

SEQ ID NO: 24638 - protein, 17 aa, Artificial Sequence
  Description of Artificial Sequence: Synthetic peptide
  XENP021591 vhCDR2
WIDPENGDTEYAPKFQG

SEQ ID NO: 24639 - protein, 9 aa, Artificial Sequence
  Description of Artificial Sequence: Synthetic peptide
  XENP021591 vhCDR3
RGVRQALDY

SEQ ID NO: 24640 - protein, 480 aa, Artificial Sequence; identical to SEQ ID NO: 23221
  Description of Artificial Sequence: Synthetic polypeptide
  XENP021591 2A11_H1_L2.100_Fab-1G6_L1.194_H1.279 scFv-Fc Heavy Chain

SEQ ID NO: 24641 - protein, 107 aa, Artificial Sequence; identical to SEQ ID NO: 10999
  Description of Artificial Sequence: Synthetic polypeptide
  VH of XENP021591

SEQ ID NO: 24642 - protein, 122 aa, Artificial Sequence; identical to SEQ ID NO: 10908
  Description of Artificial Sequence: Synthetic polypeptide
  VL of XENP021591

SEQ ID NO: 24643 - protein, 231 aa, Artificial Sequence; identical to SEQ ID NO: 21532
  Description of Artificial Sequence: Synthetic polypeptide
  Fc chain of XENP021591

SEQ ID NO: 24644 - protein, 11 aa, Artificial Sequence
  Description of Artificial Sequence: Synthetic peptide
  XENP021591 vhCDR1
RASQSVGNDVA

SEQ ID NO: 24645 - protein, 7 aa, Artificial Sequence
  Description of Artificial Sequence: Synthetic peptide
  XENP021591 vhCDR2
YASHRYT

SEQ ID NO: 24646 - protein, 9 aa, Artificial Sequence
  Description of Artificial Sequence: Synthetic peptide
  XENP021591 vhCDR3
QQDFSSPRT

SEQ ID NO: 24647 - protein, 5 aa, Artificial Sequence
  Description of Artificial Sequence: Synthetic peptide
  XENP021591 vlCDR1
NYWMN

SEQ ID NO: 24648 - protein, 19 aa, Artificial Sequence
  Description of Artificial Sequence: Synthetic peptide
  XENP021591 vlCDR2
EIRLYSNNYATHYAESVKG

SEQ ID NO: 24649 - protein, 11 aa, Artificial Sequence
  Description of Artificial Sequence: Synthetic peptide
  XENP021591 vlCDR3
YYGNYGGYFDV

SEQ ID NO: 24650 - protein, 214 aa, Artificial Sequence
  Description of Artificial Sequence: Synthetic polypeptide
  XENP021591 2A11_H1_L2.100_Fab-1G6_L1.194_H1.279 Light Chain
DIQMTQSPAFLSVTPGEKVTITCQASQDIGNYLNWFQQKPGQTPKLLIYYTSRLHSGVPSRFSGSGSGTDYTFTISSLEAEDAATYYCQQGNTLPYTFGGGTKVEIKRTVAAPSVFIFPPSDEQLKSGTASVVCLLNNFYPREAKVQWKVDNALQSGNSQESVTEQDSKDSTYSLSSTLTLSKADYEKHKVYACEVTHQGLSSPVTKSFNRGEC

SEQ ID NO: 24651 - protein, 107 aa, Artificial Sequence
  Description of Artificial Sequence: Synthetic polypeptide
  VL of XENP021591
DIQMTQSPAFLSVTPGEKVTITCQASQDIGNYLNWFQQKPGQTPKLLIYYTSRLHSGVPSRFSGSGSGTDYTFTISSLEAEDAATYYCQQGNTLPYTFGGGTKVEIK

SEQ ID NO: 24652 - protein, 11 aa, Artificial Sequence
  Description of Artificial Sequence: Synthetic peptide
  XENP021591 vlCDR1
QASQDIGNYLN

SEQ ID NO: 24653 - protein, 7 aa, Artificial Sequence
  Description of Artificial Sequence: Synthetic peptide
  XENP021591 vlCDR2
YTSRLHS

SEQ ID NO: 24654 - protein, 9 aa, Artificial Sequence
  Description of Artificial Sequence: Synthetic peptide
  XENP021591 vlCDR3
QQGNTLPYT

SEQ ID NO: 24655 - protein, 447 aa, Artificial Sequence; identical to SEQ ID NO: 17235
  Description of Artificial Sequence: Synthetic polypeptide
  XENP021592 2A11_H1_L2.101_Fab-1G6_L1.194_H1.279 Fab-Fc Heavy Chain

SEQ ID NO: 24656 - protein, 118 aa, Artificial Sequence; identical to SEQ ID NO: 17236
  Description of Artificial Sequence: Synthetic polypeptide
  VH of XENP021592

SEQ ID NO: 24657 - protein, 5 aa, Artificial Sequence
  Description of Artificial Sequence: Synthetic peptide
  XENP021592 vhCDR1
DYYMH

SEQ ID NO: 24658 - protein, 17 aa, Artificial Sequence
  Description of Artificial Sequence: Synthetic peptide
  XENP021592 vhCDR2
WIDPENGDTEYAPKFQG

SEQ ID NO: 24659 - protein, 9 aa, Artificial Sequence
  Description of Artificial Sequence: Synthetic peptide
  XENP021592 vhCDR3
RGVRQALDY

SEQ ID NO: 24660 - protein, 480 aa, Artificial Sequence; identical to SEQ ID NO: 23221
  Description of Artificial Sequence: Synthetic polypeptide
  XENP021592 2A11_H1_L2.101_Fab-1G6_L1.194_H1.279 scFv-Fc Heavy Chain

SEQ ID NO: 24661 - protein, 107 aa, Artificial Sequence; identical to SEQ ID NO: 10999
  Description of Artificial Sequence: Synthetic polypeptide
  VH of XENP021592

SEQ ID NO: 24662 - protein, 122 aa, Artificial Sequence; identical to SEQ ID NO: 10908
  Description of Artificial Sequence: Synthetic polypeptide
  VL of XENP021592

SEQ ID NO: 24663 - protein, 231 aa, Artificial Sequence; identical to SEQ ID NO: 21532
  Description of Artificial Sequence: Synthetic polypeptide
  Fc chain of XENP021592

SEQ ID NO: 24664 - protein, 11 aa, Artificial Sequence
  Description of Artificial Sequence: Synthetic peptide
  XENP021592 vhCDR1
RASQSVGNDVA

SEQ ID NO: 24665 - protein, 7 aa, Artificial Sequence
  Description of Artificial Sequence: Synthetic peptide
  XENP021592 vhCDR2
YASHRYT

SEQ ID NO: 24666 - protein, 9 aa, Artificial Sequence
  Description of Artificial Sequence: Synthetic peptide
  XENP021592 vhCDR3
QQDFSSPRT

SEQ ID NO: 24667 - protein, 5 aa, Artificial Sequence
  Description of Artificial Sequence: Synthetic peptide
  XENP021592 vlCDR1
NYWMN

SEQ ID NO: 24668 - protein, 19 aa, Artificial Sequence
  Description of Artificial Sequence: Synthetic peptide
  XENP021592 vlCDR2
EIRLYSNNYATHYAESVKG

SEQ ID NO: 24669 - protein, 11 aa, Artificial Sequence
  Description of Artificial Sequence: Synthetic peptide
  XENP021592 vlCDR3
YYGNYGGYFDV

SEQ ID NO: 24670 - protein, 214 aa, Artificial Sequence
  Description of Artificial Sequence: Synthetic polypeptide
  XENP021592 2A11_H1_L2.101_Fab-1G6_L1.194_H1.279 Light Chain
DIQMTQSPAFLSVTPGEKVTITCQASQDIGNYLNWYQQKPDQTVKLLIYYTSRLHSGVPSRFSGSGSGTDYTFTISSLEAEDAATYYCQQGNTLPYTFGGGTKVEIKRTVAAPSVFIFPPSDEQLKSGTASVVCLLNNFYPREAKVQWKVDNALQSGNSQESVTEQDSKDSTYSLSSTLTLSKADYEKHKVYACEVTHQGLSSPVTKSFNRGEC

SEQ ID NO: 24671 - protein, 107 aa, Artificial Sequence
  Description of Artificial Sequence: Synthetic polypeptide
  VL of XENP021592
DIQMTQSPAFLSVTPGEKVTITCQASQDIGNYLNWYQQKPDQTVKLLIYYTSRLHSGVPSRFSGSGSGTDYTFTISSLEAEDAATYYCQQGNTLPYTFGGGTKVEIK

SEQ ID NO: 24672 - protein, 11 aa, Artificial Sequence
  Description of Artificial Sequence: Synthetic peptide
  XENP021592 vlCDR1
QASQDIGNYLN

SEQ ID NO: 24673 - protein, 7 aa, Artificial Sequence
  Description of Artificial Sequence: Synthetic peptide
  XENP021592 vlCDR2
YTSRLHS

SEQ ID NO: 24674 - protein, 9 aa, Artificial Sequence
  Description of Artificial Sequence: Synthetic peptide
  XENP021592 vlCDR3
QQGNTLPYT

SEQ ID NO: 24675 - protein, 447 aa, Artificial Sequence; identical to SEQ ID NO: 17235
  Description of Artificial Sequence: Synthetic polypeptide
  XENP022123 2A11_H1_L2.122_Fab-1G6_L1.194_H1.279 Fab-Fc Heavy Chain

SEQ ID NO: 24676 - protein, 118 aa, Artificial Sequence; identical to SEQ ID NO: 17236
  Description of Artificial Sequence: Synthetic polypeptide
  VH of XENP022123

SEQ ID NO: 24677 - protein, 5 aa, Artificial Sequence
  Description of Artificial Sequence: Synthetic peptide
  XENP022123 vhCDR1
DYYMH

SEQ ID NO: 24678 - protein, 17 aa, Artificial Sequence
  Description of Artificial Sequence: Synthetic peptide
  XENP022123 vhCDR2
WIDPENGDTEYAPKFQG

SEQ ID NO: 24679 - protein, 9 aa, Artificial Sequence
  Description of Artificial Sequence: Synthetic peptide
  XENP022123 vhCDR3
RGVRQALDY

SEQ ID NO: 24680 - protein, 480 aa, Artificial Sequence; identical to SEQ ID NO: 23221
  Description of Artificial Sequence: Synthetic polypeptide
  XENP022123 2A11_H1_L2.122_Fab-1G6_L1.194_H1.279 scFv-Fc Heavy Chain

SEQ ID NO: 24681 - protein, 107 aa, Artificial Sequence; identical to SEQ ID NO: 10999
  Description of Artificial Sequence: Synthetic polypeptide
  VH of XENP022123

SEQ ID NO: 24682 - protein, 122 aa, Artificial Sequence; identical to SEQ ID NO: 10908
  Description of Artificial Sequence: Synthetic polypeptide
  VL of XENP022123

SEQ ID NO: 24683 - protein, 231 aa, Artificial Sequence; identical to SEQ ID NO: 21532
  Description of Artificial Sequence: Synthetic polypeptide
  Fc chain of XENP022123

SEQ ID NO: 24684 - protein, 11 aa, Artificial Sequence
  Description of Artificial Sequence: Synthetic peptide
  XENP022123 vhCDR1
RASQSVGNDVA

SEQ ID NO: 24685 - protein, 7 aa, Artificial Sequence
  Description of Artificial Sequence: Synthetic peptide
  XENP022123 vhCDR2
YASHRYT

SEQ ID NO: 24686 - protein, 9 aa, Artificial Sequence
  Description of Artificial Sequence: Synthetic peptide
  XENP022123 vhCDR3
QQDFSSPRT

SEQ ID NO: 24687 - protein, 5 aa, Artificial Sequence
  Description of Artificial Sequence: Synthetic peptide
  XENP022123 vlCDR1
NYWMN

SEQ ID NO: 24688 - protein, 19 aa, Artificial Sequence
  Description of Artificial Sequence: Synthetic peptide
  XENP022123 vlCDR2
EIRLYSNNYATHYAESVKG

SEQ ID NO: 24689 - protein, 11 aa, Artificial Sequence
  Description of Artificial Sequence: Synthetic peptide
  XENP022123 vlCDR3
YYGNYGGYFDV

SEQ ID NO: 24690 - protein, 214 aa, Artificial Sequence
  Description of Artificial Sequence: Synthetic polypeptide
  XENP022123 2A11_H1_L2.122_Fab-1G6_L1.194_H1.279 Light Chain
DIQMTQSPAFLSVTPGEKVTITCQASQDIGNYLNWFQQKPGQTPKLLIYYTSRLHSGVPSRFSGSGSGTDYTFTISSLEAEDAATYFCQQGNTLPYTFGGGTKVEIKRTVAAPSVFIFPPSDEQLKSGTASVVCLLNNFYPREAKVQWKVDNALQSGNSQESVTEQDSKDSTYSLSSTLTLSKADYEKHKVYACEVTHQGLSSPVTKSFNRGEC

SEQ ID NO: 24691 - protein, 107 aa, Artificial Sequence
  Description of Artificial Sequence: Synthetic polypeptide
  VL of XENP022123
DIQMTQSPAFLSVTPGEKVTITCQASQDIGNYLNWFQQKPGQTPKLLIYYTSRLHSGVPSRFSGSGSGTDYTFTISSLEAEDAATYFCQQGNTLPYTFGGGTKVEIK

SEQ ID NO: 24692 - protein, 11 aa, Artificial Sequence
  Description of Artificial Sequence: Synthetic peptide
  XENP022123 vlCDR1
QASQDIGNYLN

SEQ ID NO: 24693 - protein, 7 aa, Artificial Sequence
  Description of Artificial Sequence: Synthetic peptide
  XENP022123 vlCDR2
YTSRLHS

SEQ ID NO: 24694 - protein, 9 aa, Artificial Sequence
  Description of Artificial Sequence: Synthetic peptide
  XENP022123 vlCDR3
QQGNTLPYT

SEQ ID NO: 24695 - protein, 447 aa, Artificial Sequence; identical to SEQ ID NO: 17235
  Description of Artificial Sequence: Synthetic polypeptide
  XENP022124 2A11_H1_L2.123_Fab-1G6_L1.194_H1.279 Fab-Fc Heavy Chain

SEQ ID NO: 24696 - protein, 118 aa, Artificial Sequence; identical to SEQ ID NO: 17236
  Description of Artificial Sequence: Synthetic polypeptide
  VH of XENP022124

SEQ ID NO: 24697 - protein, 5 aa, Artificial Sequence
  Description of Artificial Sequence: Synthetic peptide
  XENP022124 vhCDR1
DYYMH

SEQ ID NO: 24698 - protein, 17 aa, Artificial Sequence
  Description of Artificial Sequence: Synthetic peptide
  XENP022124 vhCDR2
WIDPENGDTEYAPKFQG

SEQ ID NO: 24699 - protein, 9 aa, Artificial Sequence
  Description of Artificial Sequence: Synthetic peptide
  XENP022124 vhCDR3
RGVRQALDY

SEQ ID NO: 24700 - protein, 480 aa, Artificial Sequence; identical to SEQ ID NO: 23221
  Description of Artificial Sequence: Synthetic polypeptide
  XENP022124 2A11_H1_L2.123_Fab-1G6_L1.194_H1.279 scFv-Fc Heavy Chain

SEQ ID NO: 24701 - protein, 107 aa, Artificial Sequence; identical to SEQ ID NO: 10999
  Description of Artificial Sequence: Synthetic polypeptide
  VH of XENP022124

SEQ ID NO: 24702 - protein, 122 aa, Artificial Sequence; identical to SEQ ID NO: 10908
  Description of Artificial Sequence: Synthetic polypeptide
  VL of XENP022124

SEQ ID NO: 24703 - protein, 231 aa, Artificial Sequence; identical to SEQ ID NO: 21532
  Description of Artificial Sequence: Synthetic polypeptide
  Fc chain of XENP022124

SEQ ID NO: 24704 - protein, 11 aa, Artificial Sequence
  Description of Artificial Sequence: Synthetic peptide
  XENP022124 vhCDR1
RASQSVGNDVA

SEQ ID NO: 24705 - protein, 7 aa, Artificial Sequence
  Description of Artificial Sequence: Synthetic peptide
  XENP022124 vhCDR2
YASHRYT

SEQ ID NO: 24706 - protein, 9 aa, Artificial Sequence
  Description of Artificial Sequence: Synthetic peptide
  XENP022124 vhCDR3
QQDFSSPRT

SEQ ID NO: 24707 - protein, 5 aa, Artificial Sequence
  Description of Artificial Sequence: Synthetic peptide
  XENP022124 vlCDR1
NYWMN

SEQ ID NO: 24708 - protein, 19 aa, Artificial Sequence
  Description of Artificial Sequence: Synthetic peptide
  XENP022124 vlCDR2
EIRLYSNNYATHYAESVKG

SEQ ID NO: 24709 - protein, 11 aa, Artificial Sequence
  Description of Artificial Sequence: Synthetic peptide
  XENP022124 vlCDR3
YYGNYGGYFDV

SEQ ID NO: 24710 - protein, 214 aa, Artificial Sequence
  Description of Artificial Sequence: Synthetic polypeptide
  XENP022124 2A11_H1_L2.123_Fab-1G6_L1.194_H1.279 Light Chain
DIQMTQSPAFLSVTPGEKVTITCQASQDIGNYLNWFQQKPGQSPKLLIYYTSRLHSGVPSRFSGSGSGTDYTFTISSLEAEDAATYFCQQGNTLPYTFGGGTKVEIKRTVAAPSVFIFPPSDEQLKSGTASVVCLLNNFYPREAKVQWKVDNALQSGNSQESVTEQDSKDSTYSLSSTLTLSKADYEKHKVYACEVTHQGLSSPVTKSFNRGEC

SEQ ID NO: 24711 - protein, 107 aa, Artificial Sequence
  Description of Artificial Sequence: Synthetic polypeptide
  VL of XENP022124
DIQMTQSPAFLSVTPGEKVTITCQASQDIGNYLNWFQQKPGQSPKLLIYYTSRLHSGVPSRFSGSGSGTDYTFTISSLEAEDAATYFCQQGNTLPYTFGGGTKVEIK

SEQ ID NO: 24712 - protein, 11 aa, Artificial Sequence
  Description of Artificial Sequence: Synthetic peptide
  XENP022124 vlCDR1
QASQDIGNYLN

SEQ ID NO: 24713 - protein, 7 aa, Artificial Sequence
  Description of Artificial Sequence: Synthetic peptide
  XENP022124 vlCDR2
YTSRLHS

SEQ ID NO: 24714 - protein, 9 aa, Artificial Sequence
  Description of Artificial Sequence: Synthetic peptide
  XENP022124 vlCDR3
QQGNTLPYT

SEQ ID NO: 24715 - protein, 447 aa, Artificial Sequence; identical to SEQ ID NO: 17235
  Description of Artificial Sequence: Synthetic polypeptide
  XENP022125 2A11_H1_L2.124_Fab-1G6_L1.194_H1.279 Fab-Fc Heavy Chain

SEQ ID NO: 24716 - protein, 118 aa, Artificial Sequence; identical to SEQ ID NO: 17236
  Description of Artificial Sequence: Synthetic polypeptide
  VH of XENP022125

SEQ ID NO: 24717 - protein, 5 aa, Artificial Sequence
  Description of Artificial Sequence: Synthetic peptide
  XENP022125 vhCDR1
DYYMH

SEQ ID NO: 24718 - protein, 17 aa, Artificial Sequence
  Description of Artificial Sequence: Synthetic peptide
  XENP022125 vhCDR2
WIDPENGDTEYAPKFQG

SEQ ID NO: 24719 - protein, 9 aa, Artificial Sequence
  Description of Artificial Sequence: Synthetic peptide
  XENP022125 vhCDR3
RGVRQALDY

SEQ ID NO: 24720 - protein, 480 aa, Artificial Sequence; identical to SEQ ID NO: 23221
  Description of Artificial Sequence: Synthetic polypeptide
  XENP022125 2A11_H1_L2.124_Fab-1G6_L1.194_H1.279 scFv-Fc Heavy Chain

SEQ ID NO: 24721 - protein, 107 aa, Artificial Sequence; identical to SEQ ID NO: 10999
  Description of Artificial Sequence: Synthetic polypeptide
  VH of XENP022125

SEQ ID NO: 24722 - protein, 122 aa, Artificial Sequence; identical to SEQ ID NO: 10908
  Description of Artificial Sequence: Synthetic polypeptide
  VL of XENP022125

SEQ ID NO: 24723 - protein, 231 aa, Artificial Sequence; identical to SEQ ID NO: 21532
  Description of Artificial Sequence: Synthetic polypeptide
  Fc chain of XENP022125

SEQ ID NO: 24724 - protein, 11 aa, Artificial Sequence
  Description of Artificial Sequence: Synthetic peptide
  XENP022125 vhCDR1
RASQSVGNDVA

SEQ ID NO: 24725 - protein, 7 aa, Artificial Sequence
  Description of Artificial Sequence: Synthetic peptide
  XENP022125 vhCDR2
YASHRYT

SEQ ID NO: 24726 - protein, 9 aa, Artificial Sequence
  Description of Artificial Sequence: Synthetic peptide
  XENP022125 vhCDR3
QQDFSSPRT

SEQ ID NO: 24727 - protein, 5 aa, Artificial Sequence
  Description of Artificial Sequence: Synthetic peptide
  XENP022125 vlCDR1
NYWMN

SEQ ID NO: 24728 - protein, 19 aa, Artificial Sequence
  Description of Artificial Sequence: Synthetic peptide
  XENP022125 vlCDR2
EIRLYSNNYATHYAESVKG

SEQ ID NO: 24729 - protein, 11 aa, Artificial Sequence
  Description of Artificial Sequence: Synthetic peptide
  XENP022125 vlCDR3
YYGNYGGYFDV

SEQ ID NO: 24730 - protein, 214 aa, Artificial Sequence
  Description of Artificial Sequence: Synthetic polypeptide
  XENP022125 2A11_H1_L2.124_Fab-1G6_L1.194_H1.279 Light Chain
DIQMTQSPAFLSVTPGEKVTITCQASQDIGNYLNWFQQKPGKVPKLLIYYTSRLHSGVPSRFSGSGSGTDYTFTISSLEAEDAATYFCQQGNTLPYTFGGGTKVEIKRTVAAPSVFIFPPSDEQLKSGTASVVCLLNNFYPREAKVQWKVDNALQSGNSQESVTEQDSKDSTYSLSSTLTLSKADYEKHKVYACEVTHQGLSSPVTKSFNRGEC

SEQ ID NO: 24731 - protein, 107 aa, Artificial Sequence
  Description of Artificial Sequence: Synthetic polypeptide
  VL of XENP022125
DIQMTQSPAFLSVTPGEKVTITCQASQDIGNYLNWFQQKPGKVPKLLIYYTSRLHSGVPSRFSGSGSGTDYTFTISSLEAEDAATYFCQQGNTLPYTFGGGTKVEIK

SEQ ID NO: 24732 - protein, 11 aa, Artificial Sequence
  Description of Artificial Sequence: Synthetic peptide
  XENP022125 vlCDR1
QASQDIGNYLN

SEQ ID NO: 24733 - protein, 7 aa, Artificial Sequence
  Description of Artificial Sequence: Synthetic peptide
  XENP022125 vlCDR2
YTSRLHS

SEQ ID NO: 24734 - protein, 9 aa, Artificial Sequence
  Description of Artificial Sequence: Synthetic peptide
  XENP022125 vlCDR3
QQGNTLPYT

SEQ ID NO: 24735 - protein, 447 aa, Artificial Sequence; identical to SEQ ID NO: 22064
  Description of Artificial Sequence: Synthetic polypeptide
  XENP022626 2A11_H1.125_L2.132_Fab-1G6_L1.194_H1.279 Fab-Fc Heavy Chain

SEQ ID NO: 24736 - protein, 118 aa, Artificial Sequence; identical to SEQ ID NO: 22065
  Description of Artificial Sequence: Synthetic polypeptide
  VH of XENP022626

SEQ ID NO: 24737 - protein, 5 aa, Artificial Sequence
  Description of Artificial Sequence: Synthetic peptide
  XENP022626 vhCDR1
HYFMH

SEQ ID NO: 24738 - protein, 17 aa, Artificial Sequence
  Description of Artificial Sequence: Synthetic peptide
  XENP022626 vhCDR2
WIDPYLGDTEYAPKFQG

SEQ ID NO: 24739 - protein, 9 aa, Artificial Sequence
  Description of Artificial Sequence: Synthetic peptide
  XENP022626 vhCDR3
RGVYQALDY

SEQ ID NO: 24740 - protein, 480 aa, Artificial Sequence; identical to SEQ ID NO: 23221
  Description of Artificial Sequence: Synthetic polypeptide
  XENP022626 2A11_H1.125_L2.132_Fab-1G6_L1.194_H1.279 scFv-Fc Heavy Chain

SEQ ID NO: 24741 - protein, 107 aa, Artificial Sequence; identical to SEQ ID NO: 10999
  Description of Artificial Sequence: Synthetic polypeptide
  VH of XENP022626

SEQ ID NO: 24742 - protein, 122 aa, Artificial Sequence; identical to SEQ ID NO: 10908
  Description of Artificial Sequence: Synthetic polypeptide
  VL of XENP022626

SEQ ID NO: 24743 - protein, 231 aa, Artificial Sequence; identical to SEQ ID NO: 21532
  Description of Artificial Sequence: Synthetic polypeptide
  Fc chain of XENP022626

SEQ ID NO: 24744 - protein, 11 aa, Artificial Sequence
  Description of Artificial Sequence: Synthetic peptide
  XENP022626 vhCDR1
RASQSVGNDVA

SEQ ID NO: 24745 - protein, 7 aa, Artificial Sequence
  Description of Artificial Sequence: Synthetic peptide
  XENP022626 vhCDR2
YASHRYT

SEQ ID NO: 24746 - protein, 9 aa, Artificial Sequence
  Description of Artificial Sequence: Synthetic peptide
  XENP022626 vhCDR3
QQDFSSPRT

SEQ ID NO: 24747 - protein, 5 aa, Artificial Sequence
  Description of Artificial Sequence: Synthetic peptide
  XENP022626 vlCDR1
NYWMN

SEQ ID NO: 24748 - protein, 19 aa, Artificial Sequence
  Description of Artificial Sequence: Synthetic peptide
  XENP022626 vlCDR2
EIRLYSNNYATHYAESVKG

SEQ ID NO: 24749 - protein, 11 aa, Artificial Sequence
  Description of Artificial Sequence: Synthetic peptide
  XENP022626 vlCDR3
YYGNYGGYFDV

SEQ ID NO: 24750 - protein, 214 aa, Artificial Sequence; identical to SEQ ID NO: 22219
  Description of Artificial Sequence: Synthetic polypeptide
  XENP022626 2A11_H1.125_L2.132_Fab-1G6_L1.194_H1.279 Light Chain

SEQ ID NO: 24751 - protein, 107 aa, Artificial Sequence; identical to SEQ ID NO: 22220
  Description of Artificial Sequence: Synthetic polypeptide
  VL of XENP022626

SEQ ID NO: 24752 - protein, 11 aa, Artificial Sequence
  Description of Artificial Sequence: Synthetic peptide
  XENP022626 vlCDR1
QASQDIGNYLN

SEQ ID NO: 24753 - protein, 7 aa, Artificial Sequence
  Description of Artificial Sequence: Synthetic peptide
  XENP022626 vlCDR2
FTSYLHS

SEQ ID NO: 24754 - protein, 9 aa, Artificial Sequence
  Description of Artificial Sequence: Synthetic peptide
  XENP022626 vlCDR3
QEGNTLPYT

SEQ ID NO: 24755 - protein, 447 aa, Artificial Sequence; identical to SEQ ID NO: 22084
  Description of Artificial Sequence: Synthetic polypeptide
  XENP022627 2A11_H1.144_L2.133_Fab-1G6_L1.194_H1.279 Fab-Fc Heavy Chain

SEQ ID NO: 24756 - protein, 118 aa, Artificial Sequence; identical to SEQ ID NO: 22085
  Description of Artificial Sequence: Synthetic polypeptide
  VH of XENP022627

SEQ ID NO: 24757 - protein, 5 aa, Artificial Sequence
  Description of Artificial Sequence: Synthetic peptide
  XENP022627 vhCDR1
DYFMH

SEQ ID NO: 24758 - protein, 17 aa, Artificial Sequence
  Description of Artificial Sequence: Synthetic peptide
  XENP022627 vhCDR2
WIDPELGDTEYAPKFQG

SEQ ID NO: 24759 - protein, 9 aa, Artificial Sequence
  Description of Artificial Sequence: Synthetic peptide
  XENP022627 vhCDR3
RGVYQALDY

SEQ ID NO: 24760 - protein, 480 aa, Artificial Sequence; identical to SEQ ID NO: 23221
  Description of Artificial Sequence: Synthetic polypeptide
  XENP022627 2A11_H1.144_L2.133_Fab-1G6_L1.194_H1.279 scFv-Fc Heavy Chain

SEQ ID NO: 24761 - protein, 107 aa, Artificial Sequence; identical to SEQ ID NO: 10999
  Description of Artificial Sequence: Synthetic polypeptide
  VH of XENP022627

SEQ ID NO: 24762 - protein, 122 aa, Artificial Sequence; identical to SEQ ID NO: 10908
  Description of Artificial Sequence: Synthetic polypeptide
  VL of XENP022627

SEQ ID NO: 24763 - protein, 231 aa, Artificial Sequence; identical to SEQ ID NO: 21532
  Description of Artificial Sequence: Synthetic polypeptide
  Fc chain of XENP022627

SEQ ID NO: 24764 - protein, 11 aa, Artificial Sequence
  Description of Artificial Sequence: Synthetic peptide
  XENP022627 vhCDR1
RASQSVGNDVA

SEQ ID NO: 24765 - protein, 7 aa, Artificial Sequence
  Description of Artificial Sequence: Synthetic peptide
  XENP022627 vhCDR2
YASHRYT

SEQ ID NO: 24766 - protein, 9 aa, Artificial Sequence
  Description of Artificial Sequence: Synthetic peptide
  XENP022627 vhCDR3
QQDFSSPRT

SEQ ID NO: 24767 - protein, 5 aa, Artificial Sequence
  Description of Artificial Sequence: Synthetic peptide
  XENP022627 vlCDR1
NYWMN

SEQ ID NO: 24768 - protein, 19 aa, Artificial Sequence
  Description of Artificial Sequence: Synthetic peptide
  XENP022627 vlCDR2
EIRLYSNNYATHYAESVKG

SEQ ID NO: 24769 - protein, 11 aa, Artificial Sequence
  Description of Artificial Sequence: Synthetic peptide
  XENP022627 vlCDR3
YYGNYGGYFDV

SEQ ID NO: 24770 - protein, 214 aa, Artificial Sequence; identical to SEQ ID NO: 22199
  Description of Artificial Sequence: Synthetic polypeptide
  XENP022627 2A11_H1.144_L2.133_Fab-1G6_L1.194_H1.279 Light Chain

SEQ ID NO: 24771 - protein, 107 aa, Artificial Sequence; identical to SEQ ID NO: 22200
  Description of Artificial Sequence: Synthetic polypeptide
  VL of XENP022627

SEQ ID NO: 24772 - protein, 11 aa, Artificial Sequence
  Description of Artificial Sequence: Synthetic peptide
  XENP022627 vlCDR1
QASQDIGNYLN

SEQ ID NO: 24773 - protein, 7 aa, Artificial Sequence
  Description of Artificial Sequence: Synthetic peptide
  XENP022627 vlCDR2
FTSYLHS

SEQ ID NO: 24774 - protein, 9 aa, Artificial Sequence
  Description of Artificial Sequence: Synthetic peptide
  XENP022627 vlCDR3
QEGNTLPYT

SEQ ID NO: 24775 - protein, 447 aa, Artificial Sequence; identical to SEQ ID NO: 22064
  Description of Artificial Sequence: Synthetic polypeptide
  XENP022628 2A11_H1.125_L2.113_Fab-1G6_L1.194_H1.279 Fab-Fc Heavy Chain

SEQ ID NO: 24776 - protein, 118 aa, Artificial Sequence; identical to SEQ ID NO: 22065
  Description of Artificial Sequence: Synthetic polypeptide
  VH of XENP022628

SEQ ID NO: 24777 - protein, 5 aa, Artificial Sequence
  Description of Artificial Sequence: Synthetic peptide
  XENP022628 vhCDR1
HYFMH

SEQ ID NO: 24778 - protein, 17 aa, Artificial Sequence
  Description of Artificial Sequence: Synthetic peptide
  XENP022628 vhCDR2
WIDPYLGDTEYAPKFQG

SEQ ID NO: 24779 - protein, 9 aa, Artificial Sequence
  Description of Artificial Sequence: Synthetic peptide
  XENP022628 vhCDR3
RGVYQALDY

SEQ ID NO: 24780 - protein, 480 aa, Artificial Sequence; identical to SEQ ID NO: 23221
  Description of Artificial Sequence: Synthetic polypeptide
  XENP022628 2A11_H1.125_L2.113_Fab-1G6_L1.194_H1.279 scFv-Fc Heavy Chain

SEQ ID NO: 24781 - protein, 107 aa, Artificial Sequence; identical to SEQ ID NO: 10999
  Description of Artificial Sequence: Synthetic polypeptide
  VH of XENP022628

SEQ ID NO: 24782 - protein, 122 aa, Artificial Sequence; identical to SEQ ID NO: 10908
  Description of Artificial Sequence: Synthetic polypeptide
  VL of XENP022628

SEQ ID NO: 24783 - protein, 231 aa, Artificial Sequence; identical to SEQ ID NO: 21532
  Description of Artificial Sequence: Synthetic polypeptide
  Fc chain of XENP022628

SEQ ID NO: 24784 - protein, 11 aa, Artificial Sequence
  Description of Artificial Sequence: Synthetic peptide
  XENP022628 vhCDR1
RASQSVGNDVA

SEQ ID NO: 24785 - protein, 7 aa, Artificial Sequence
  Description of Artificial Sequence: Synthetic peptide
  XENP022628 vhCDR2
YASHRYT

SEQ ID NO: 24786 - protein, 9 aa, Artificial Sequence
  Description of Artificial Sequence: Synthetic peptide
  XENP022628 vhCDR3
QQDFSSPRT

SEQ ID NO: 24787 - protein, 5 aa, Artificial Sequence
  Description of Artificial Sequence: Synthetic peptide
  XENP022628 vlCDR1
NYWMN

SEQ ID NO: 24788 - protein, 19 aa, Artificial Sequence
  Description of Artificial Sequence: Synthetic peptide
  XENP022628 vlCDR2
EIRLYSNNYATHYAESVKG

SEQ ID NO: 24789 - protein, 11 aa, Artificial Sequence
  Description of Artificial Sequence: Synthetic peptide
  XENP022628 vlCDR3
YYGNYGGYFDV

SEQ ID NO: 24790 - protein, 214 aa, Artificial Sequence; identical to SEQ ID NO: 22079
  Description of Artificial Sequence: Synthetic polypeptide
  XENP022628 2A11_H1.125_L2.113_Fab-1G6_L1.194_H1.279 Light Chain

SEQ ID NO: 24791 - protein, 107 aa, Artificial Sequence; identical to SEQ ID NO: 22080
  Description of Artificial Sequence: Synthetic polypeptide
  VL of XENP022628

SEQ ID NO: 24792 - protein, 11 aa, Artificial Sequence
  Description of Artificial Sequence: Synthetic peptide
  XENP022628 vlCDR1
QASQDIGNYLN

SEQ ID NO: 24793 - protein, 7 aa, Artificial Sequence
  Description of Artificial Sequence: Synthetic peptide
  XENP022628 vlCDR2
FTSYLHS

SEQ ID NO: 24794 - protein, 9 aa, Artificial Sequence
  Description of Artificial Sequence: Synthetic peptide
  XENP022628 vlCDR3
QQGNTLPYT

SEQ ID NO: 24795 - protein, 447 aa, Artificial Sequence; identical to SEQ ID NO: 22084
  Description of Artificial Sequence: Synthetic polypeptide
  XENP022629 2A11_H1.144_L2.113_Fab-1G6_L1.194_H1.279 Fab-Fc Heavy Chain

SEQ ID NO: 24796 - protein, 118 aa, Artificial Sequence; identical to SEQ ID NO: 22085
  Description of Artificial Sequence: Synthetic polypeptide
  VH of XENP022629

SEQ ID NO: 24797 - protein, 5 aa, Artificial Sequence
  Description of Artificial Sequence: Synthetic peptide
  XENP022629 vhCDR1
DYFMH

SEQ ID NO: 24798 - protein, 17 aa, Artificial Sequence
  Description of Artificial Sequence: Synthetic peptide
  XENP022629 vhCDR2
WIDPELGDTEYAPKFQG

SEQ ID NO: 24799 - protein, 9 aa, Artificial Sequence
  Description of Artificial Sequence: Synthetic peptide
  XENP022629 vhCDR3
RGVYQALDY

SEQ ID NO: 24800 - protein, 480 aa, Artificial Sequence; identical to SEQ ID NO: 23221
  Description of Artificial Sequence: Synthetic polypeptide
  XENP022629 2A11_H1.144_L2.113_Fab-1G6_L1.194_H1.279 scFv-Fc Heavy Chain

SEQ ID NO: 24801 - protein, 107 aa, Artificial Sequence; identical to SEQ ID NO: 10999
  Description of Artificial Sequence: Synthetic polypeptide
  VH of XENP022629

SEQ ID NO: 24802 - protein, 122 aa, Artificial Sequence; identical to SEQ ID NO: 10908
  Description of Artificial Sequence: Synthetic polypeptide
  VL of XENP022629

SEQ ID NO: 24803 - protein, 231 aa, Artificial Sequence; identical to SEQ ID NO: 21532
  Description of Artificial Sequence: Synthetic polypeptide
  Fc chain of XENP022629

SEQ ID NO: 24804 - protein, 11 aa, Artificial Sequence
  Description of Artificial Sequence: Synthetic peptide
  XENP022629 vhCDR1
RASQSVGNDVA

SEQ ID NO: 24805 - protein, 7 aa, Artificial Sequence
  Description of Artificial Sequence: Synthetic peptide
  XENP022629 vhCDR2
YASHRYT

SEQ ID NO: 24806 - protein, 9 aa, Artificial Sequence
  Description of Artificial Sequence: Synthetic peptide
  XENP022629 vhCDR3
QQDFSSPRT

SEQ ID NO: 24807 - protein, 5 aa, Artificial Sequence
  Description of Artificial Sequence: Synthetic peptide
  XENP022629 vlCDR1
NYWMN

SEQ ID NO: 24808 - protein, 19 aa, Artificial Sequence
  Description of Artificial Sequence: Synthetic peptide
  XENP022629 vlCDR2
EIRLYSNNYATHYAESVKG

SEQ ID NO: 24809 - protein, 11 aa, Artificial Sequence
  Description of Artificial Sequence: Synthetic peptide
  XENP022629 vlCDR3
YYGNYGGYFDV

SEQ ID NO: 24810 - protein, 214 aa, Artificial Sequence; identical to SEQ ID NO: 22079
  Description of Artificial Sequence: Synthetic polypeptide
  XENP022629 2A11_H1.144_L2.113_Fab-1G6_L1.194_H1.279 Light Chain

SEQ ID NO: 24811 - protein, 107 aa, Artificial Sequence; identical to SEQ ID NO: 22080
  Description of Artificial Sequence: Synthetic polypeptide
  VL of XENP022629

SEQ ID NO: 24812 - protein, 11 aa, Artificial Sequence
  Description of Artificial Sequence: Synthetic peptide
  XENP022629 vlCDR1
QASQDIGNYLN

SEQ ID NO: 24813 - protein, 7 aa, Artificial Sequence
  Description of Artificial Sequence: Synthetic peptide
  XENP022629 vlCDR2
FTSYLHS

SEQ ID NO: 24814 - protein, 9 aa, Artificial Sequence
  Description of Artificial Sequence: Synthetic peptide
  XENP022629 vlCDR3
QQGNTLPYT

SEQ ID NO: 24815 - protein, 447 aa, Artificial Sequence; identical to SEQ ID NO: 22084
  Description of Artificial Sequence: Synthetic polypeptide
  XENP022631 2A11_H1.144_L2.137_Fab-1G6_L1.194_H1.279 Fab-Fc Heavy Chain

SEQ ID NO: 24816 - protein, 118 aa, Artificial Sequence; identical to SEQ ID NO: 22085
  Description of Artificial Sequence: Synthetic polypeptide
  VH of XENP022631

SEQ ID NO: 24817 - protein, 5 aa, Artificial Sequence
  Description of Artificial Sequence: Synthetic peptide
  XENP022631 vhCDR1
DYFMH

SEQ ID NO: 24818 - protein, 17 aa, Artificial Sequence
  Description of Artificial Sequence: Synthetic peptide
  XENP022631 vhCDR2
WIDPELGDTEYAPKFQG

SEQ ID NO: 24819 - protein, 9 aa, Artificial Sequence
  Description of Artificial Sequence: Synthetic peptide
  XENP022631 vhCDR3
RGVYQALDY

SEQ ID NO: 24820 - protein, 480 aa, Artificial Sequence; identical to SEQ ID NO: 23221
  Description of Artificial Sequence: Synthetic polypeptide
  XENP022631 2A11_H1.144_L2.137_Fab-1G6_L1.194_H1.279 scFv-Fc Heavy Chain

SEQ ID NO: 24821 - protein, 107 aa, Artificial Sequence; identical to SEQ ID NO: 10999
  Description of Artificial Sequence: Synthetic polypeptide
  VH of XENP022631

SEQ ID NO: 24822 - protein, 122 aa, Artificial Sequence; identical to SEQ ID NO: 10908
  Description of Artificial Sequence: Synthetic polypeptide
  VL of XENP022631

SEQ ID NO: 24823 - protein, 231 aa, Artificial Sequence; identical to SEQ ID NO: 21532
  Description of Artificial Sequence: Synthetic polypeptide
  Fc chain of XENP022631

SEQ ID NO: 24824 - protein, 11 aa, Artificial Sequence
  Description of Artificial Sequence: Synthetic peptide
  XENP022631 vhCDR1
RASQSVGNDVA

SEQ ID NO: 24825 - protein, 7 aa, Artificial Sequence
  Description of Artificial Sequence: Synthetic peptide
  XENP022631 vhCDR2
YASHRYT

SEQ ID NO: 24826 - protein, 9 aa, Artificial Sequence
  Description of Artificial Sequence: Synthetic peptide
  XENP022631 vhCDR3
QQDFSSPRT

SEQ ID NO: 24827 - protein, 5 aa, Artificial Sequence
  Description of Artificial Sequence: Synthetic peptide
  XENP022631 vlCDR1
NYWMN

SEQ ID NO: 24828 - protein, 19 aa, Artificial Sequence
  Description of Artificial Sequence: Synthetic peptide
  XENP022631 vlCDR2
EIRLYSNNYATHYAESVKG

SEQ ID NO: 24829 - protein, 11 aa, Artificial Sequence
  Description of Artificial Sequence: Synthetic peptide
  XENP022631 vlCDR3
YYGNYGGYFDV

SEQ ID NO: 24830 - protein, 214 aa, Artificial Sequence; identical to SEQ ID NO: 22239
  Description of Artificial Sequence: Synthetic polypeptide
  XENP022631 2A11_H1.144_L2.137_Fab-1G6_L1.194_H1.279 Light Chain

SEQ ID NO: 24831 - protein, 107 aa, Artificial Sequence; identical to SEQ ID NO: 22240
  Description of Artificial Sequence: Synthetic polypeptide
  VL of XENP022631

SEQ ID NO: 24832 - protein, 11 aa, Artificial Sequence
  Description of Artificial Sequence: Synthetic peptide
  XENP022631 vlCDR1
QASQDIGNYLN

SEQ ID NO: 24833 - protein, 7 aa, Artificial Sequence
  Description of Artificial Sequence: Synthetic peptide
  XENP022631 vlCDR2
FTSYLHS

SEQ ID NO: 24834 - protein, 9 aa, Artificial Sequence
  Description of Artificial Sequence: Synthetic peptide
  XENP022631 vlCDR3
QEGNTLPYT

SEQ ID NO: 24835 - protein, 447 aa, Artificial Sequence; identical to SEQ ID NO: 22064
  Description of Artificial Sequence: Synthetic polypeptide
  XENP022668 2A11_H1.125_L2.126_Fab-1G6_L1.194_H1.279 Fab-Fc Heavy Chain

SEQ ID NO: 24836 - protein, 118 aa, Artificial Sequence; identical to SEQ ID NO: 22065
  Description of Artificial Sequence: Synthetic polypeptide
  VH of XENP022668

SEQ ID NO: 24837 - protein, 5 aa, Artificial Sequence
  Description of Artificial Sequence: Synthetic peptide
  XENP022668 vhCDR1
HYFMH

SEQ ID NO: 24838 - protein, 17 aa, Artificial Sequence
  Description of Artificial Sequence: Synthetic peptide
  XENP022668 vhCDR2
WIDPYLGDTEYAPKFQG

SEQ ID NO: 24839 - protein, 9 aa, Artificial Sequence
  Description of Artificial Sequence: Synthetic peptide
  XENP022668 vhCDR3
RGVYQALDY

SEQ ID NO: 24840 - protein, 480 aa, Artificial Sequence; identical to SEQ ID NO: 23221
  Description of Artificial Sequence: Synthetic polypeptide
  XENP022668 2A11_H1.125_L2.126_Fab-1G6_L1.194_H1.279 scFv-Fc Heavy Chain

SEQ ID NO: 24841 - protein, 107 aa, Artificial Sequence; identical to SEQ ID NO: 10999
  Description of Artificial Sequence: Synthetic polypeptide
  VH of XENP022668

SEQ ID NO: 24842 - protein, 122 aa, Artificial Sequence; identical to SEQ ID NO: 10908
  Description of Artificial Sequence: Synthetic polypeptide
  VL of XENP022668

SEQ ID NO: 24843 - protein, 231 aa, Artificial Sequence; identical to SEQ ID NO: 21532
  Description of Artificial Sequence: Synthetic polypeptide
  Fc chain of XENP022668

SEQ ID NO: 24844 - protein, 11 aa, Artificial Sequence
  Description of Artificial Sequence: Synthetic peptide
  XENP022668 vhCDR1
RASQSVGNDVA

SEQ ID NO: 24845 - protein, 7 aa, Artificial Sequence
  Description of Artificial Sequence: Synthetic peptide
  XENP022668 vhCDR2
YASHRYT

SEQ ID NO: 24846 - protein, 9 aa, Artificial Sequence
  Description of Artificial Sequence: Synthetic peptide
  XENP022668 vhCDR3
QQDFSSPRT

SEQ ID NO: 24847 - protein, 5 aa, Artificial Sequence
  Description of Artificial Sequence: Synthetic peptide
  XENP022668 vlCDR1
NYWMN

SEQ ID NO: 24848 - protein, 19 aa, Artificial Sequence
  Description of Artificial Sequence: Synthetic peptide
  XENP022668 vlCDR2
EIRLYSNNYATHYAESVKG

SEQ ID NO: 24849 - protein, 11 aa, Artificial Sequence
  Description of Artificial Sequence: Synthetic peptide
  XENP022668 vlCDR3
YYGNYGGYFDV

SEQ ID NO: 24850 - protein, 214 aa, Artificial Sequence; identical to SEQ ID NO: 22259
  Description of Artificial Sequence: Synthetic polypeptide
  XENP022668 2A11_H1.125_L2.126_Fab-1G6_L1.194_H1.279 Light Chain

SEQ ID NO: 24851 - protein, 107 aa, Artificial Sequence; identical to SEQ ID NO: 22260
  Description of Artificial Sequence: Synthetic polypeptide
  VL of XENP022668

SEQ ID NO: 24852 - protein, 11 aa, Artificial Sequence
  Description of Artificial Sequence: Synthetic peptide
  XENP022668 vlCDR1
QASQDIGNYLN

SEQ ID NO: 24853 - protein, 7 aa, Artificial Sequence
  Description of Artificial Sequence: Synthetic peptide
  XENP022668 vlCDR2
FTSYLHS

SEQ ID NO: 24854 - protein, 9 aa, Artificial Sequence
  Description of Artificial Sequence: Synthetic peptide
  XENP022668 vlCDR3
QEGNTLPYT

SEQ ID NO: 24855 - protein, 447 aa, Artificial Sequence; identical to SEQ ID NO: 22064
  Description of Artificial Sequence: Synthetic polypeptide
  XENP022669 2A11_H1.125_L2.142_Fab-1G6_L1.194_H1.279 Fab-Fc Heavy Chain

SEQ ID NO: 24856 - protein, 118 aa, Artificial Sequence; identical to SEQ ID NO: 22065
  Description of Artificial Sequence: Synthetic polypeptide
  VH of XENP022669

SEQ ID NO: 24857 - protein, 5 aa, Artificial Sequence
  Description of Artificial Sequence: Synthetic peptide
  XENP022669 vhCDR1
HYFMH

SEQ ID NO: 24858 - protein, 17 aa, Artificial Sequence
  Description of Artificial Sequence: Synthetic peptide
  XENP022669 vhCDR2
WIDPYLGDTEYAPKFQG

SEQ ID NO: 24859 - protein, 9 aa, Artificial Sequence
  Description of Artificial Sequence: Synthetic peptide
  XENP022669 vhCDR3
RGVYQALDY

SEQ ID NO: 24860 - protein, 480 aa, Artificial Sequence; identical to SEQ ID NO: 23221
  Description of Artificial Sequence: Synthetic polypeptide
  XENP022669 2A11_H1.125_L2.142_Fab-1G6_L1.194_H1.279 scFv-Fc Heavy Chain

SEQ ID NO: 24861 - protein, 107 aa, Artificial Sequence; identical to SEQ ID NO: 10999
  Description of Artificial Sequence: Synthetic polypeptide
  VH of XENP022669

SEQ ID NO: 24862 - protein, 122 aa, Artificial Sequence; identical to SEQ ID NO: 10908
  Description of Artificial Sequence: Synthetic polypeptide
  VL of XENP022669

SEQ ID NO: 24863 - protein, 231 aa, Artificial Sequence; identical to SEQ ID NO: 21532
  Description of Artificial Sequence: Synthetic polypeptide
  Fc chain of XENP022669

SEQ ID NO: 24864 - protein, 11 aa, Artificial Sequence
  Description of Artificial Sequence: Synthetic peptide
  XENP022669 vhCDR1
RASQSVGNDVA

SEQ ID NO: 24865 - protein, 7 aa, Artificial Sequence
  Description of Artificial Sequence: Synthetic peptide
  XENP022669 vhCDR2
YASHRYT

SEQ ID NO: 24866 - protein, 9 aa, Artificial Sequence
  Description of Artificial Sequence: Synthetic peptide
  XENP022669 vhCDR3
QQDFSSPRT

SEQ ID NO: 24867 - protein, 5 aa, Artificial Sequence
  Description of Artificial Sequence: Synthetic peptide
  XENP022669 vlCDR1
NYWMN

SEQ ID NO: 24868 - protein, 19 aa, Artificial Sequence
  Description of Artificial Sequence: Synthetic peptide
  XENP022669 vlCDR2
EIRLYSNNYATHYAESVKG

SEQ ID NO: 24869 - protein, 11 aa, Artificial Sequence
  Description of Artificial Sequence: Synthetic peptide
  XENP022669 vlCDR3
YYGNYGGYFDV

SEQ ID NO: 24870 - protein, 214 aa, Artificial Sequence; identical to SEQ ID NO: 22279
  Description of Artificial Sequence: Synthetic polypeptide
  XENP022669 2A11_H1.125_L2.142_Fab-1G6_L1.194_H1.279 Light Chain

SEQ ID NO: 24871 - protein, 107 aa, Artificial Sequence; identical to SEQ ID NO: 22280
  Description of Artificial Sequence: Synthetic polypeptide
  VL of XENP022669

SEQ ID NO: 24872 - protein, 11 aa, Artificial Sequence
  Description of Artificial Sequence: Synthetic peptide
  XENP022669 vlCDR1
QASQDIGNYLN

SEQ ID NO: 24873 - protein, 7 aa, Artificial Sequence
  Description of Artificial Sequence: Synthetic peptide
  XENP022669 vlCDR2
FTSYLHS

SEQ ID NO: 24874 - protein, 9 aa, Artificial Sequence
  Description of Artificial Sequence: Synthetic peptide
  XENP022669 vlCDR3
QQGNTLPYT

SEQ ID NO: 24875 - protein, 447 aa, Artificial Sequence; identical to SEQ ID NO: 22084
  Description of Artificial Sequence: Synthetic polypeptide
  XENP022670 2A11_H1.144_L2.132_Fab-1G6_L1.194_H1.279 Fab-Fc Heavy Chain

SEQ ID NO: 24876 - protein, 118 aa, Artificial Sequence; identical to SEQ ID NO: 22085
  Description of Artificial Sequence: Synthetic polypeptide
  VH of XENP022670

SEQ ID NO: 24877 - protein, 5 aa, Artificial Sequence
  Description of Artificial Sequence: Synthetic peptide
  XENP022670 vhCDR1
DYFMH

SEQ ID NO: 24878 - protein, 17 aa, Artificial Sequence
  Description of Artificial Sequence: Synthetic peptide
  XENP022670 vhCDR2
WIDPELGDTEYAPKFQG

SEQ ID NO: 24879 - protein, 9 aa, Artificial Sequence
  Description of Artificial Sequence: Synthetic peptide
  XENP022670 vhCDR3
RGVYQALDY

SEQ ID NO: 24880 - protein, 480 aa, Artificial Sequence; identical to SEQ ID NO: 23221
  Description of Artificial Sequence: Synthetic polypeptide
  XENP022670 2A11_H1.144_L2.132_Fab-1G6_L1.194_H1.279 scFv-Fc Heavy Chain

SEQ ID NO: 24881 - protein, 107 aa, Artificial Sequence; identical to SEQ ID NO: 10999
  Description of Artificial Sequence: Synthetic polypeptide
  VH of XENP022670

SEQ ID NO: 24882 - protein, 122 aa, Artificial Sequence; identical to SEQ ID NO: 10908
  Description of Artificial Sequence: Synthetic polypeptide
  VL of XENP022670

SEQ ID NO: 24883 - protein, 231 aa, Artificial Sequence; identical to SEQ ID NO: 21532
  Description of Artificial Sequence: Synthetic polypeptide
  Fc chain of XENP022670

SEQ ID NO: 24884 - protein, 11 aa, Artificial Sequence
  Description of Artificial Sequence: Synthetic peptide
  XENP022670 vhCDR1
RASQSVGNDVA

SEQ ID NO: 24885 - protein, 7 aa, Artificial Sequence
  Description of Artificial Sequence: Synthetic peptide
  XENP022670 vhCDR2
YASHRYT

SEQ ID NO: 24886 - protein, 9 aa, Artificial Sequence
  Description of Artificial Sequence: Synthetic peptide
  XENP022670 vhCDR3
QQDFSSPRT

SEQ ID NO: 24887 - protein, 5 aa, Artificial Sequence
  Description of Artificial Sequence: Synthetic peptide
  XENP022670 vlCDR1
NYWMN

SEQ ID NO: 24888 - protein, 19 aa, Artificial Sequence
  Description of Artificial Sequence: Synthetic peptide
  XENP022670 vlCDR2
EIRLYSNNYATHYAESVKG

SEQ ID NO: 24889 - protein, 11 aa, Artificial Sequence
  Description of Artificial Sequence: Synthetic peptide
  XENP022670 vlCDR3
YYGNYGGYFDV

SEQ ID NO: 24890 - protein, 214 aa, Artificial Sequence; identical to SEQ ID NO: 22219
  Description of Artificial Sequence: Synthetic polypeptide
  XENP022670 2A11_H1.144_L2.132_Fab-1G6_L1.194_H1.279 Light Chain

SEQ ID NO: 24891 - protein, 107 aa, Artificial Sequence; identical to SEQ ID NO: 22220
  Description of Artificial Sequence: Synthetic polypeptide
  VL of XENP022670

SEQ ID NO: 24892 - protein, 11 aa, Artificial Sequence
  Description of Artificial Sequence: Synthetic peptide
  XENP022670 vlCDR1
QASQDIGNYLN

SEQ ID NO: 24893 - protein, 7 aa, Artificial Sequence
  Description of Artificial Sequence: Synthetic peptide
  XENP022670 vlCDR2
FTSYLHS

SEQ ID NO: 24894 - protein, 9 aa, Artificial Sequence
  Description of Artificial Sequence: Synthetic peptide
  XENP022670 vlCDR3
QEGNTLPYT

SEQ ID NO: 24895 - protein, 447 aa, Artificial Sequence; identical to SEQ ID NO: 22084
  Description of Artificial Sequence: Synthetic polypeptide
  XENP022671 2A11_H1.144_L2.126_Fab-1G6_L1.194_H1.279 Fab-Fc Heavy Chain

SEQ ID NO: 24896 - protein, 118 aa, Artificial Sequence; identical to SEQ ID NO: 22085
  Description of Artificial Sequence: Synthetic polypeptide
  VH of XENP022671

SEQ ID NO: 24897 - protein, 5 aa, Artificial Sequence
  Description of Artificial Sequence: Synthetic peptide
  XENP022671 vhCDR1
DYFMH

SEQ ID NO: 24898 - protein, 17 aa, Artificial Sequence
  Description of Artificial Sequence: Synthetic peptide
  XENP022671 vhCDR2
WIDPELGDTEYAPKFQG

SEQ ID NO: 24899 - protein, 9 aa, Artificial Sequence
  Description of Artificial Sequence: Synthetic peptide
  XENP022671 vhCDR3
RGVYQALDY

SEQ ID NO: 24900 - protein, 480 aa, Artificial Sequence; identical to SEQ ID NO: 23221
  Description of Artificial Sequence: Synthetic polypeptide
  XENP022671 2A11_H1.144_L2.126_Fab-1G6_L1.194_H1.279 scFv-Fc Heavy Chain

SEQ ID NO: 24901 - protein, 107 aa, Artificial Sequence; identical to SEQ ID NO: 10999
  Description of Artificial Sequence: Synthetic polypeptide
  VH of XENP022671

SEQ ID NO: 24902 - protein, 122 aa, Artificial Sequence; identical to SEQ ID NO: 10908
  Description of Artificial Sequence: Synthetic polypeptide
  VL of XENP022671

SEQ ID NO: 24903 - protein, 231 aa, Artificial Sequence; identical to SEQ ID NO: 21532
  Description of Artificial Sequence: Synthetic polypeptide
  Fc chain of XENP022671

SEQ ID NO: 24904 - protein, 11 aa, Artificial Sequence
  Description of Artificial Sequence: Synthetic peptide
  XENP022671 vhCDR1
RASQSVGNDVA

SEQ ID NO: 24905 - protein, 7 aa, Artificial Sequence
  Description of Artificial Sequence: Synthetic peptide
  XENP022671 vhCDR2
YASHRYT

SEQ ID NO: 24906 - protein, 9 aa, Artificial Sequence
  Description of Artificial Sequence: Synthetic peptide
  XENP022671 vhCDR3
QQDFSSPRT

SEQ ID NO: 24907 - protein, 5 aa, Artificial Sequence
  Description of Artificial Sequence: Synthetic peptide
  XENP022671 vlCDR1
NYWMN

SEQ ID NO: 24908 - protein, 19 aa, Artificial Sequence
  Description of Artificial Sequence: Synthetic peptide
  XENP022671 vlCDR2
EIRLYSNNYATHYAESVKG

SEQ ID NO: 24909 - protein, 11 aa, Artificial Sequence
  Description of Artificial Sequence: Synthetic peptide
  XENP022671 vlCDR3
YYGNYGGYFDV

SEQ ID NO: 24910 - protein, 214 aa, Artificial Sequence; identical to SEQ ID NO: 22259
  Description of Artificial Sequence: Synthetic polypeptide
  XENP022671 2A11_H1.144_L2.126_Fab-1G6_L1.194_H1.279 Light Chain

SEQ ID NO: 24911 - protein, 107 aa, Artificial Sequence; identical to SEQ ID NO: 22260
  Description of Artificial Sequence: Synthetic polypeptide
  VL of XENP022671

SEQ ID NO: 24912 - protein, 11 aa, Artificial Sequence
  Description of Artificial Sequence: Synthetic peptide
  XENP022671 vlCDR1
QASQDIGNYLN

SEQ ID NO: 24913 - protein, 7 aa, Artificial Sequence
  Description of Artificial Sequence: Synthetic peptide
  XENP022671 vlCDR2
FTSYLHS

SEQ ID NO: 24914 - protein, 9 aa, Artificial Sequence
  Description of Artificial Sequence: Synthetic peptide
  XENP022671 vlCDR3
QEGNTLPYT

SEQ ID NO: 24915 - protein, 447 aa, Artificial Sequence; identical to SEQ ID NO: 22084
  Description of Artificial Sequence: Synthetic polypeptide
  XENP022672 2A11_H1.144_L2.142_Fab-1G6_L1.194_H1.279 Fab-Fc Heavy Chain

SEQ ID NO: 24916 - protein, 118 aa, Artificial Sequence; identical to SEQ ID NO: 22085
  Description of Artificial Sequence: Synthetic polypeptide
  VH of XENP022672

SEQ ID NO: 24917 - protein, 5 aa, Artificial Sequence
  Description of Artificial Sequence: Synthetic peptide
  XENP022672 vhCDR1
DYFMH

SEQ ID NO: 24918 - protein, 17 aa, Artificial Sequence
  Description of Artificial Sequence: Synthetic peptide
  XENP022672 vhCDR2
WIDPELGDTEYAPKFQG

SEQ ID NO: 24919 - protein, 9 aa, Artificial Sequence
  Description of Artificial Sequence: Synthetic peptide
  XENP022672 vhCDR3
RGVYQALDY

SEQ ID NO: 24920 - protein, 480 aa, Artificial Sequence; identical to SEQ ID NO: 23221
  Description of Artificial Sequence: Synthetic polypeptide
  XENP022672 2A11_H1.144_L2.142_Fab-1G6_L1.194_H1.279 scFv-Fc Heavy Chain

SEQ ID NO: 24921 - protein, 107 aa, Artificial Sequence; identical to SEQ ID NO: 10999
  Description of Artificial Sequence: Synthetic polypeptide
  VH of XENP022672

SEQ ID NO: 24922 - protein, 122 aa, Artificial Sequence; identical to SEQ ID NO: 10908
  Description of Artificial Sequence: Synthetic polypeptide
  VL of XENP022672

SEQ ID NO: 24923 - protein, 231 aa, Artificial Sequence; identical to SEQ ID NO: 21532
  Description of Artificial Sequence: Synthetic polypeptide
  Fc chain of XENP022672

SEQ ID NO: 24924 - protein, 11 aa, Artificial Sequence
  Description of Artificial Sequence: Synthetic peptide
  XENP022672 vhCDR1
RASQSVGNDVA

SEQ ID NO: 24925 - protein, 7 aa, Artificial Sequence
  Description of Artificial Sequence: Synthetic peptide
  XENP022672 vhCDR2
YASHRYT

SEQ ID NO: 24926 - protein, 9 aa, Artificial Sequence
  Description of Artificial Sequence: Synthetic peptide
  XENP022672 vhCDR3
QQDFSSPRT

SEQ ID NO: 24927 - protein, 5 aa, Artificial Sequence
  Description of Artificial Sequence: Synthetic peptide
  XENP022672 vlCDR1
NYWMN

SEQ ID NO: 24928 - protein, 19 aa, Artificial Sequence
  Description of Artificial Sequence: Synthetic peptide
  XENP022672 vlCDR2
EIRLYSNNYATHYAESVKG

SEQ ID NO: 24929 - protein, 11 aa, Artificial Sequence
  Description of Artificial Sequence: Synthetic peptide
  XENP022672 vlCDR3
YYGNYGGYFDV

SEQ ID NO: 24930 - protein, 214 aa, Artificial Sequence; identical to SEQ ID NO: 22279
  Description of Artificial Sequence: Synthetic polypeptide
  XENP022672 2A11_H1.144_L2.142_Fab-1G6_L1.194_H1.279 Light Chain

SEQ ID NO: 24931 - protein, 107 aa, Artificial Sequence; identical to SEQ ID NO: 22280
  Description of Artificial Sequence: Synthetic polypeptide
  VL of XENP022672

SEQ ID NO: 24932 - protein, 11 aa, Artificial Sequence
  Description of Artificial Sequence: Synthetic peptide
  XENP022672 vlCDR1
QASQDIGNYLN

SEQ ID NO: 24933 - protein, 7 aa, Artificial Sequence
  Description of Artificial Sequence: Synthetic peptide
  XENP022672 vlCDR2
FTSYLHS

SEQ ID NO: 24934 - protein, 9 aa, Artificial Sequence
  Description of Artificial Sequence: Synthetic peptide
  XENP022672 vlCDR3
QQGNTLPYT

SEQ ID NO: 24935 - protein, 450 aa, Artificial Sequence; identical to SEQ ID NO: 17625
  Description of Artificial Sequence: Synthetic polypeptide
  XENP020038 7G8_H2L2_Fab-1G6_H1.279_L1.194 Fab-Fc Heavy Chain

SEQ ID NO: 24936 - protein, 121 aa, Artificial Sequence; identical to SEQ ID NO: 17626
  Description of Artificial Sequence: Synthetic polypeptide
  VH of XENP020038

SEQ ID NO: 24937 - protein, 5 aa, Artificial Sequence
  Description of Artificial Sequence: Synthetic peptide
  XENP020038 vhCDR1
DAWMD

SEQ ID NO: 24938 - protein, 19 aa, Artificial Sequence
  Description of Artificial Sequence: Synthetic peptide
  XENP020038 vhCDR2
EIRTKANNHATYYAESVKG

SEQ ID NO: 24939 - protein, 10 aa, Artificial Sequence
  Description of Artificial Sequence: Synthetic peptide
  XENP020038 vhCDR3
LANWDWYFDV

SEQ ID NO: 24940 - protein, 480 aa, Artificial Sequence; identical to SEQ ID NO: 23401
  Description of Artificial Sequence: Synthetic polypeptide
  XENP020038 7G8_H2L2_Fab-1G6_H1.279_L1.194 scFv-Fc Heavy Chain

SEQ ID NO: 24941 - protein, 122 aa, Artificial Sequence; identical to SEQ ID NO: 10908
  Description of Artificial Sequence: Synthetic polypeptide
  VH of XENP020038

SEQ ID NO: 24942 - protein, 338 aa, Artificial Sequence
  Description of Artificial Sequence: Synthetic polypeptide
  VL of XENP020038
EIVLTQSPATLSASPGERVTLTCRASQSVGNDVAWYQQKPGQAPRLLINYASHRYTGVPDRFTGSGYGTEFTLTISSVQSEDFGVYYCQQDFSSPRTFGGGTKVEIKEPKSSDKTHTCPPCPAPPVAGPSVFLFPPKPKDTLMISRTPEVTCVVVDVKHEDPEVKFNWYVDGVEVHNAKTKPREEQYNSTYRVVSVLTVLHQDWLNGKEYKCKVSNKALPAPIEKTISKAKGQPREPQVYTLPPSREQMTKNQVKLTCLVKGFYPSDIAVEWESNGQPENNYKTTPPVLDSDGSFFLYSKLTVDKSRWQQGNVFSCSVMHEALHNHYTQKSLSLSPGK

SEQ ID NO: 24943 - protein, 5 aa, Artificial Sequence
  Description of Artificial Sequence: Synthetic peptide
  XENP020038 vhCDR1
NYWMN

SEQ ID NO: 24944 - protein, 19 aa, Artificial Sequence
  Description of Artificial Sequence: Synthetic peptide
  XENP020038 vhCDR2
EIRLYSNNYATHYAESVKG

SEQ ID NO: 24945 - protein, 11 aa, Artificial Sequence
  Description of Artificial Sequence: Synthetic peptide
  XENP020038 vhCDR3
YYGNYGGYFDV

SEQ ID NO: 24946 - protein, 11 aa, Artificial Sequence
  Description of Artificial Sequence: Synthetic peptide
  XENP020038 vlCDR1
RASQSVGNDVA

SEQ ID NO: 24947 - protein, 7 aa, Artificial Sequence
  Description of Artificial Sequence: Synthetic peptide
  XENP020038 vlCDR2
YASHRYT

SEQ ID NO: 24948 - protein, 9 aa, Artificial Sequence
  Description of Artificial Sequence: Synthetic peptide
  XENP020038 vlCDR3
QQDFSSPRT

SEQ ID NO: 24949 - protein, 218 aa, Artificial Sequence; identical to SEQ ID NO: 17610
  Description of Artificial Sequence: Synthetic polypeptide
  XENP020038 7G8_H2L2_Fab-1G6_H1.279_L1.194 Light Chain

SEQ ID NO: 24950 - protein, 111 aa, Artificial Sequence; identical to SEQ ID NO: 17611
  Description of Artificial Sequence: Synthetic polypeptide
  VL of XENP020038

SEQ ID NO: 24951 - protein, 15 aa, Artificial Sequence
  Description of Artificial Sequence: Synthetic peptide
  XENP020038 vlCDR1
RASQSVDYDGDSYMN

SEQ ID NO: 24952 - protein, 7 aa, Artificial Sequence
  Description of Artificial Sequence: Synthetic peptide
  XENP020038 vlCDR2
AASNLES

SEQ ID NO: 24953 - protein, 9 aa, Artificial Sequence
  Description of Artificial Sequence: Synthetic peptide
  XENP020038 vlCDR3
QQSNEDPFT

SEQ ID NO: 24954 - protein, 450 aa, Artificial Sequence; identical to SEQ ID NO: 22324
  Description of Artificial Sequence: Synthetic polypeptide
  XENP022521 7G8_H3.18_L1.11-1G6_L1.194_H1.279 Fab-Fc Heavy Chain

SEQ ID NO: 24955 - protein, 121 aa, Artificial Sequence; identical to SEQ ID NO: 22325
  Description of Artificial Sequence: Synthetic polypeptide
  VH of XENP022521

SEQ ID NO: 24956 - protein, 5 aa, Artificial Sequence
  Description of Artificial Sequence: Synthetic peptide
  XENP022521 vhCDR1
DAWMD

SEQ ID NO: 24957 - protein, 19 aa, Artificial Sequence
  Description of Artificial Sequence: Synthetic peptide
  XENP022521 vhCDR2
EISTKANNHATYYAESVKG

SEQ ID NO: 24958 - protein, 10 aa, Artificial Sequence
  Description of Artificial Sequence: Synthetic peptide
  XENP022521 vhCDR3
LATWDWYFDV

SEQ ID NO: 24959 - protein, 480 aa, Artificial Sequence; identical to SEQ ID NO: 23221
  Description of Artificial Sequence: Synthetic polypeptide
  XENP022521 7G8_H3.18_L1.11-1G6_L1.194_H1.279 scFv-Fc Heavy Chain

SEQ ID NO: 24960 - protein, 107 aa, Artificial Sequence; identical to SEQ ID NO: 10999
  Description of Artificial Sequence: Synthetic polypeptide
  VH of XENP022521

SEQ ID NO: 24961 - protein, 122 aa, Artificial Sequence; identical to SEQ ID NO: 10908
  Description of Artificial Sequence: Synthetic polypeptide
  VL of XENP022521

SEQ ID NO: 24962 - protein, 231 aa, Artificial Sequence; identical to SEQ ID NO: 21532
  Description of Artificial Sequence: Synthetic polypeptide
  Fc chain of XENP022521

SEQ ID NO: 24963 - protein, 11 aa, Artificial Sequence
  Description of Artificial Sequence: Synthetic peptide
  XENP022521 vhCDR1
RASQSVGNDVA

SEQ ID NO: 24964 - protein, 7 aa, Artificial Sequence
  Description of Artificial Sequence: Synthetic peptide
  XENP022521 vhCDR2
YASHRYT

SEQ ID NO: 24965 - protein, 9 aa, Artificial Sequence
  Description of Artificial Sequence: Synthetic peptide
  XENP022521 vhCDR3
QQDFSSPRT

SEQ ID NO: 24966 - protein, 5 aa, Artificial Sequence
  Description of Artificial Sequence: Synthetic peptide
  XENP022521 vlCDR1
NYWMN

SEQ ID NO: 24967 - protein, 19 aa, Artificial Sequence
  Description of Artificial Sequence: Synthetic peptide
  XENP022521 vlCDR2
EIRLYSNNYATHYAESVKG

SEQ ID NO: 24968 - protein, 11 aa, Artificial Sequence
  Description of Artificial Sequence: Synthetic peptide
  XENP022521 vlCDR3
YYGNYGGYFDV

SEQ ID NO: 24969 - protein, 218 aa, Artificial Sequence; identical to SEQ ID NO: 22359
  Description of Artificial Sequence: Synthetic polypeptide
  XENP022521 7G8_H3.18_L1.11-1G6_L1.194_H1.279 Light Chain

SEQ ID NO: 24970 - protein, 111 aa, Artificial Sequence; identical to SEQ ID NO: 22360
  Description of Artificial Sequence: Synthetic polypeptide
  VL of XENP022521

SEQ ID NO: 24971 - protein, 15 aa, Artificial Sequence
  Description of Artificial Sequence: Synthetic peptide
  XENP022521 vlCDR1
RASQSVDYDGDSYMN

SEQ ID NO: 24972 - protein, 7 aa, Artificial Sequence
  Description of Artificial Sequence: Synthetic peptide
  XENP022521 vlCDR2
AASELES

SEQ ID NO: 24973 - protein, 9 aa, Artificial Sequence
  Description of Artificial Sequence: Synthetic peptide
  XENP022521 vlCDR3
QQSNEDPFT

SEQ ID NO: 24974 - protein, 450 aa, Artificial Sequence; identical to SEQ ID NO: 22424
  Description of Artificial Sequence: Synthetic polypeptide
  XENP022522 7G8_H3.28_L1.13-1G6_L1.194_H1.279 Fab-Fc Heavy Chain

SEQ ID NO: 24975 - protein, 121 aa, Artificial Sequence; identical to SEQ ID NO: 22425
  Description of Artificial Sequence: Synthetic polypeptide
  VH of XENP022522

SEQ ID NO: 24976 - protein, 5 aa, Artificial Sequence
  Description of Artificial Sequence: Synthetic peptide
  XENP022522 vhCDR1
DAWMD

SEQ ID NO: 24977 - protein, 19 aa, Artificial Sequence
  Description of Artificial Sequence: Synthetic peptide
  XENP022522 vhCDR2
EISTKAYNHATYYAESVKG

SEQ ID NO: 24978 - protein, 10 aa, Artificial Sequence
  Description of Artificial Sequence: Synthetic peptide
  XENP022522 vhCDR3
LATWDWYFDV

SEQ ID NO: 24979 - protein, 480 aa, Artificial Sequence; identical to SEQ ID NO: 23221
  Description of Artificial Sequence: Synthetic polypeptide
  XENP022522 7G8_H3.28_L1.13-1G6_L1.194_H1.279 scFv-Fc Heavy Chain

SEQ ID NO: 24980 - protein, 107 aa, Artificial Sequence; identical to SEQ ID NO: 10999
  Description of Artificial Sequence: Synthetic polypeptide
  VH of XENP022522

SEQ ID NO: 24981 - protein, 122 aa, Artificial Sequence; identical to SEQ ID NO: 10908
  Description of Artificial Sequence: Synthetic polypeptide
  VL of XENP022522

SEQ ID NO: 24982 - protein, 231 aa, Artificial Sequence; identical to SEQ ID NO: 21532
  Description of Artificial Sequence: Synthetic polypeptide
  Fc chain of XENP022522

SEQ ID NO: 24983 - protein, 11 aa, Artificial Sequence
  Description of Artificial Sequence: Synthetic peptide
  XENP022522 vhCDR1
RASQSVGNDVA

SEQ ID NO: 24984 - protein, 7 aa, Artificial Sequence
  Description of Artificial Sequence: Synthetic peptide
  XENP022522 vhCDR2
YASHRYT

SEQ ID NO: 24985 - protein, 9 aa, Artificial Sequence
  Description of Artificial Sequence: Synthetic peptide
  XENP022522 vhCDR3
QQDFSSPRT

SEQ ID NO: 24986 - protein, 5 aa, Artificial Sequence
  Description of Artificial Sequence: Synthetic peptide
  XENP022522 vlCDR1
NYWMN

SEQ ID NO: 24987 - protein, 19 aa, Artificial Sequence
  Description of Artificial Sequence: Synthetic peptide
  XENP022522 vlCDR2
EIRLYSNNYATHYAESVKG

SEQ ID NO: 24988 - protein, 11 aa, Artificial Sequence
  Description of Artificial Sequence: Synthetic peptide
  XENP022522 vlCDR3
YYGNYGGYFDV

SEQ ID NO: 24989 - protein, 218 aa, Artificial Sequence; identical to SEQ ID NO: 22419
  Description of Artificial Sequence: Synthetic polypeptide
  XENP022522 7G8_H3.28_L1.13-1G6_L1.194_H1.279 Light Chain

SEQ ID NO: 24990 - protein, 111 aa, Artificial Sequence; identical to SEQ ID NO: 22420
  Description of Artificial Sequence: Synthetic polypeptide
  VL of XENP022522

SEQ ID NO: 24991 - protein, 15 aa, Artificial Sequence
  Description of Artificial Sequence: Synthetic peptide
  XENP022522 vlCDR1
RASQSVDHDGDSYMN

SEQ ID NO: 24992 - protein, 7 aa, Artificial Sequence
  Description of Artificial Sequence: Synthetic peptide
  XENP022522 vlCDR2
AASELES

SEQ ID NO: 24993 - protein, 9 aa, Artificial Sequence
  Description of Artificial Sequence: Synthetic peptide
  XENP022522 vlCDR3
QQSNEDPFT

SEQ ID NO: 24994 - protein, 450 aa, Artificial Sequence; identical to SEQ ID NO: 22484
  Description of Artificial Sequence: Synthetic polypeptide
  XENP022565 7G8_H3.30_L1.11-1G6_L1.194_H1.279 Fab-Fc Heavy Chain

SEQ ID NO: 24995 - protein, 121 aa, Artificial Sequence; identical to SEQ ID NO: 22485
  Description of Artificial Sequence: Synthetic polypeptide
  VH of XENP022565

SEQ ID NO: 24996 - protein, 5 aa, Artificial Sequence
  Description of Artificial Sequence: Synthetic peptide
  XENP022565 vhCDR1
DAWMS

SEQ ID NO: 24997 - protein, 19 aa, Artificial Sequence
  Description of Artificial Sequence: Synthetic peptide
  XENP022565 vhCDR2
EISTKANNHATYYAESVKG

SEQ ID NO: 24998 - protein, 10 aa, Artificial Sequence
  Description of Artificial Sequence: Synthetic peptide
  XENP022565 vhCDR3
LATWDWYFDV

SEQ ID NO: 24999 - protein, 480 aa, Artificial Sequence; identical to SEQ ID NO: 23221
  Description of Artificial Sequence: Synthetic polypeptide
  XENP022565 7G8_H3.30_L1.11-1G6_L1.194_H1.279 scFv-Fc Heavy Chain

SEQ ID NO: 25000 - protein, 107 aa, Artificial Sequence; identical to SEQ ID NO: 10999
  Description of Artificial Sequence: Synthetic polypeptide
  VH of XENP022565

SEQ ID NO: 25001 - protein, 122 aa, Artificial Sequence; identical to SEQ ID NO: 10908
  Description of Artificial Sequence: Synthetic polypeptide
  VL of XENP022565

SEQ ID NO: 25002 - protein, 231 aa, Artificial Sequence; identical to SEQ ID NO: 21532
  Description of Artificial Sequence: Synthetic polypeptide
  Fc chain of XENP022565

SEQ ID NO: 25003 - protein, 11 aa, Artificial Sequence
  Description of Artificial Sequence: Synthetic peptide
  XENP022565 vhCDR1
RASQSVGNDVA

SEQ ID NO: 25004 - protein, 7 aa, Artificial Sequence
  Description of Artificial Sequence: Synthetic peptide
  XENP022565 vhCDR2
YASHRYT

SEQ ID NO: 25005 - protein, 9 aa, Artificial Sequence
  Description of Artificial Sequence: Synthetic peptide
  XENP022565 vhCDR3
QQDFSSPRT

SEQ ID NO: 25006 - protein, 5 aa, Artificial Sequence
  Description of Artificial Sequence: Synthetic peptide
  XENP022565 vlCDR1
NYWMN

SEQ ID NO: 25007 - protein, 19 aa, Artificial Sequence
  Description of Artificial Sequence: Synthetic peptide
  XENP022565 vlCDR2
EIRLYSNNYATHYAESVKG

SEQ ID NO: 25008 - protein, 11 aa, Artificial Sequence
  Description of Artificial Sequence: Synthetic peptide
  XENP022565 vlCDR3
YYGNYGGYFDV

SEQ ID NO: 25009 - protein, 218 aa, Artificial Sequence; identical to SEQ ID NO: 22359
  Description of Artificial Sequence: Synthetic polypeptide
  XENP022565 7G8_H3.30_L1.11-1G6_L1.194_H1.279 Light Chain

SEQ ID NO: 25010 - protein, 111 aa, Artificial Sequence; identical to SEQ ID NO: 22360
  Description of Artificial Sequence: Synthetic polypeptide
  VL of XENP022565

SEQ ID NO: 25011 - protein, 15 aa, Artificial Sequence
  Description of Artificial Sequence: Synthetic peptide
  XENP022565 vlCDR1
RASQSVDYDGDSYMN

SEQ ID NO: 25012 - protein, 7 aa, Artificial Sequence
  Description of Artificial Sequence: Synthetic peptide
  XENP022565 vlCDR2
AASELES

SEQ ID NO: 25013 - protein, 9 aa, Artificial Sequence
  Description of Artificial Sequence: Synthetic peptide
  XENP022565 vlCDR3
QQSNEDPFT

SEQ ID NO: 25014 - protein, 450 aa, Artificial Sequence; identical to SEQ ID NO: 22504
  Description of Artificial Sequence: Synthetic polypeptide
  XENP022566 7G8_H3.33_L1.11-1G6_L1.194_H1.279 Fab-Fc Heavy Chain

SEQ ID NO: 25015 - protein, 121 aa, Artificial Sequence; identical to SEQ ID NO: 22505
  Description of Artificial Sequence: Synthetic polypeptide
  VH of XENP022566

SEQ ID NO: 25016 - protein, 5 aa, Artificial Sequence
  Description of Artificial Sequence: Synthetic peptide
  XENP022566 vhCDR1
DAWMG

SEQ ID NO: 25017 - protein, 19 aa, Artificial Sequence
  Description of Artificial Sequence: Synthetic peptide
  XENP022566 vhCDR2
EISTKANNHATYYAESVKG

SEQ ID NO: 25018 - protein, 10 aa, Artificial Sequence
  Description of Artificial Sequence: Synthetic peptide
  XENP022566 vhCDR3
LATWDWYFDV

SEQ ID NO: 25019 - protein, 480 aa, Artificial Sequence; identical to SEQ ID NO: 23221
  Description of Artificial Sequence: Synthetic polypeptide
  XENP022566 7G8_H3.33_L1.11-1G6_L1.194_H1.279 scFv-Fc Heavy Chain

SEQ ID NO: 25020 - protein, 107 aa, Artificial Sequence; identical to SEQ ID NO: 10999
  Description of Artificial Sequence: Synthetic polypeptide
  VH of XENP022566

SEQ ID NO: 25021 - protein, 122 aa, Artificial Sequence; identical to SEQ ID NO: 10908
  Description of Artificial Sequence: Synthetic polypeptide
  VL of XENP022566

SEQ ID NO: 25022 - protein, 231 aa, Artificial Sequence; identical to SEQ ID NO: 21532
  Description of Artificial Sequence: Synthetic polypeptide
  Fc chain of XENP022566

SEQ ID NO: 25023 - protein, 11 aa, Artificial Sequence
  Description of Artificial Sequence: Synthetic peptide
  XENP022566 vhCDR1
RASQSVGNDVA

SEQ ID NO: 25024 - protein, 7 aa, Artificial Sequence
  Description of Artificial Sequence: Synthetic peptide
  XENP022566 vhCDR2
YASHRYT

SEQ ID NO: 25025 - protein, 9 aa, Artificial Sequence
  Description of Artificial Sequence: Synthetic peptide
  XENP022566 vhCDR3
QQDFSSPRT

SEQ ID NO: 25026 - protein, 5 aa, Artificial Sequence
  Description of Artificial Sequence: Synthetic peptide
  XENP022566 vlCDR1
NYWMN

SEQ ID NO: 25027 - protein, 19 aa, Artificial Sequence
  Description of Artificial Sequence: Synthetic peptide
  XENP022566 vlCDR2
EIRLYSNNYATHYAESVKG

SEQ ID NO: 25028 - protein, 11 aa, Artificial Sequence
  Description of Artificial Sequence: Synthetic peptide
  XENP022566 vlCDR3
YYGNYGGYFDV

SEQ ID NO: 25029 - protein, 218 aa, Artificial Sequence; identical to SEQ ID NO: 22359
  Description of Artificial Sequence: Synthetic polypeptide
  XENP022566 7G8_H3.33_L1.11-1G6_L1.194_H1.279 Light Chain

SEQ ID NO: 25030 - protein, 111 aa, Artificial Sequence; identical to SEQ ID NO: 22360
  Description of Artificial Sequence: Synthetic polypeptide
  VL of XENP022566

SEQ ID NO: 25031 - protein, 15 aa, Artificial Sequence
  Description of Artificial Sequence: Synthetic peptide
  XENP022566 vlCDR1
RASQSVDYDGDSYMN

SEQ ID NO: 25032 - protein, 7 aa, Artificial Sequence
  Description of Artificial Sequence: Synthetic peptide
  XENP022566 vlCDR2
AASELES

SEQ ID NO: 25033 - protein, 9 aa, Artificial Sequence
  Description of Artificial Sequence: Synthetic peptide
  XENP022566 vlCDR3
QQSNEDPFT

SEQ ID NO: 25034 - protein, 450 aa, Artificial Sequence; identical to SEQ ID NO: 22324
  Description of Artificial Sequence: Synthetic polypeptide
  XENP022567 7G8_H3.18_L1.30-1G6_L1.194_H1.279 Fab-Fc Heavy Chain

SEQ ID NO: 25035 - protein, 121 aa, Artificial Sequence; identical to SEQ ID NO: 22325
  Description of Artificial Sequence: Synthetic polypeptide
  VH of XENP022567

SEQ ID NO: 25036 - protein, 5 aa, Artificial Sequence
  Description of Artificial Sequence: Synthetic peptide
  XENP022567 vhCDR1
DAWMD

SEQ ID NO: 25037 - protein, 19 aa, Artificial Sequence
  Description of Artificial Sequence: Synthetic peptide
  XENP022567 vhCDR2
EISTKANNHATYYAESVKG

SEQ ID NO: 25038 - protein, 10 aa, Artificial Sequence
  Description of Artificial Sequence: Synthetic peptide
  XENP022567 vhCDR3
LATWDWYFDV

SEQ ID NO: 25039 - protein, 480 aa, Artificial Sequence; identical to SEQ ID NO: 23221
  Description of Artificial Sequence: Synthetic polypeptide
  XENP022567 7G8_H3.18_L1.30-1G6_L1.194_H1.279 scFv-Fc Heavy Chain

SEQ ID NO: 25040 - protein, 107 aa, Artificial Sequence; identical to SEQ ID NO: 10999
  Description of Artificial Sequence: Synthetic polypeptide
  VH of XENP022567

SEQ ID NO: 25041 - protein, 122 aa, Artificial Sequence; identical to SEQ ID NO: 10908
  Description of Artificial Sequence: Synthetic polypeptide
  VL of XENP022567

SEQ ID NO: 25042 - protein, 231 aa, Artificial Sequence; identical to SEQ ID NO: 21532
  Description of Artificial Sequence: Synthetic polypeptide
  Fc chain of XENP022567

SEQ ID NO: 25043 - protein, 11 aa, Artificial Sequence
  Description of Artificial Sequence: Synthetic peptide
  XENP022567 vhCDR1
RASQSVGNDVA

SEQ ID NO: 25044 - protein, 7 aa, Artificial Sequence
  Description of Artificial Sequence: Synthetic peptide
  XENP022567 vhCDR2
YASHRYT

SEQ ID NO: 25045 - protein, 9 aa, Artificial Sequence
  Description of Artificial Sequence: Synthetic peptide
  XENP022567 vhCDR3
QQDFSSPRT

SEQ ID NO: 25046 - protein, 5 aa, Artificial Sequence
  Description of Artificial Sequence: Synthetic peptide
  XENP022567 vlCDR1
NYWMN

SEQ ID NO: 25047 - protein, 19 aa, Artificial Sequence
  Description of Artificial Sequence: Synthetic peptide
  XENP022567 vlCDR2
EIRLYSNNYATHYAESVKG

SEQ ID NO: 25048 - protein, 11 aa, Artificial Sequence
  Description of Artificial Sequence: Synthetic peptide
  XENP022567 vlCDR3
YYGNYGGYFDV

SEQ ID NO: 25049 - protein, 218 aa, Artificial Sequence; identical to SEQ ID NO: 22539
  Description of Artificial Sequence: Synthetic polypeptide
  XENP022567 7G8_H3.18_L1.30-1G6_L1.194_H1.279 Light Chain

SEQ ID NO: 25050 - protein, 111 aa, Artificial Sequence; identical to SEQ ID NO: 22540
  Description of Artificial Sequence: Synthetic polypeptide
  VL of XENP022567

SEQ ID NO: 25051 - protein, 15 aa, Artificial Sequence
  Description of Artificial Sequence: Synthetic peptide
  XENP022567 vlCDR1
RASQSVDYDGDSYMN

SEQ ID NO: 25052 - protein, 7 aa, Artificial Sequence
  Description of Artificial Sequence: Synthetic peptide
  XENP022567 vlCDR2
AASELES

SEQ ID NO: 25053 - protein, 9 aa, Artificial Sequence
  Description of Artificial Sequence: Synthetic peptide
  XENP022567 vlCDR3
QQSNEDPFT

SEQ ID NO: 25054 - protein, 450 aa, Artificial Sequence; identical to SEQ ID NO: 22484
  Description of Artificial Sequence: Synthetic polypeptide
  XENP022568 7G8_H3.30_L1.30-1G6_L1.194_H1.279 Fab-Fc Heavy Chain

SEQ ID NO: 25055 - protein, 121 aa, Artificial Sequence; identical to SEQ ID NO: 22485
  Description of Artificial Sequence: Synthetic polypeptide
  VH of XENP022568

SEQ ID NO: 25056 - protein, 5 aa, Artificial Sequence
  Description of Artificial Sequence: Synthetic peptide
  XENP022568 vhCDR1
DAWMS

SEQ ID NO: 25057 - protein, 19 aa, Artificial Sequence
  Description of Artificial Sequence: Synthetic peptide
  XENP022568 vhCDR2
EISTKANNHATYYAESVKG

SEQ ID NO: 25058 - protein, 10 aa, Artificial Sequence
  Description of Artificial Sequence: Synthetic peptide
  XENP022568 vhCDR3
LATWDWYFDV

SEQ ID NO: 25059 - protein, 480 aa, Artificial Sequence; identical to SEQ ID NO: 23221
  Description of Artificial Sequence: Synthetic polypeptide
  XENP022568 7G8_H3.30_L1.30-1G6_L1.194_H1.279 scFv-Fc Heavy Chain

SEQ ID NO: 25060 - protein, 107 aa, Artificial Sequence; identical to SEQ ID NO: 10999
  Description of Artificial Sequence: Synthetic polypeptide
  VH of XENP022568

SEQ ID NO: 25061 - protein, 122 aa, Artificial Sequence; identical to SEQ ID NO: 10908
  Description of Artificial Sequence: Synthetic polypeptide
  VL of XENP022568

SEQ ID NO: 25062 - protein, 231 aa, Artificial Sequence; identical to SEQ ID NO: 21532
  Description of Artificial Sequence: Synthetic polypeptide
  Fc chain of XENP022568

SEQ ID NO: 25063 - protein, 11 aa, Artificial Sequence
  Description of Artificial Sequence: Synthetic peptide
  XENP022568 vhCDR1
RASQSVGNDVA

SEQ ID NO: 25064 - protein, 7 aa, Artificial Sequence
  Description of Artificial Sequence: Synthetic peptide
  XENP022568 vhCDR2
YASHRYT

SEQ ID NO: 25065 - protein, 9 aa, Artificial Sequence
  Description of Artificial Sequence: Synthetic peptide
  XENP022568 vhCDR3
QQDFSSPRT

SEQ ID NO: 25066 - protein, 5 aa, Artificial Sequence
  Description of Artificial Sequence: Synthetic peptide
  XENP022568 vlCDR1
NYWMN

SEQ ID NO: 25067 - protein, 19 aa, Artificial Sequence
  Description of Artificial Sequence: Synthetic peptide
  XENP022568 vlCDR2
EIRLYSNNYATHYAESVKG

SEQ ID NO: 25068 - protein, 11 aa, Artificial Sequence
  Description of Artificial Sequence: Synthetic peptide
  XENP022568 vlCDR3
YYGNYGGYFDV

SEQ ID NO: 25069 - protein, 218 aa, Artificial Sequence; identical to SEQ ID NO: 22539
  Description of Artificial Sequence: Synthetic polypeptide
  XENP022568 7G8_H3.30_L1.30-1G6_L1.194_H1.279 Light Chain

SEQ ID NO: 25070 - protein, 111 aa, Artificial Sequence; identical to SEQ ID NO: 22540
  Description of Artificial Sequence: Synthetic polypeptide
  VL of XENP022568

SEQ ID NO: 25071 - protein, 15 aa, Artificial Sequence
  Description of Artificial Sequence: Synthetic peptide
  XENP022568 vlCDR1
RASQSVDYDGDSYMN

SEQ ID NO: 25072 - protein, 7 aa, Artificial Sequence
  Description of Artificial Sequence: Synthetic peptide
  XENP022568 vlCDR2
AASELES

SEQ ID NO: 25073 - protein, 9 aa, Artificial Sequence
  Description of Artificial Sequence: Synthetic peptide
  XENP022568 vlCDR3
QQSNEDPFT

SEQ ID NO: 25074 - protein, 450 aa, Artificial Sequence; identical to SEQ ID NO: 22504
  Description of Artificial Sequence: Synthetic polypeptide
  XENP022569 7G8_H3.33_L1.30-1G6_L1.194_H1.279 Fab-Fc Heavy Chain

SEQ ID NO: 25075 - protein, 121 aa, Artificial Sequence; identical to SEQ ID NO: 22505
  Description of Artificial Sequence: Synthetic polypeptide
  VH of XENP022569

SEQ ID NO: 25076 - protein, 5 aa, Artificial Sequence
  Description of Artificial Sequence: Synthetic peptide
  XENP022569 vhCDR1
DAWMG

SEQ ID NO: 25077 - protein, 19 aa, Artificial Sequence
  Description of Artificial Sequence: Synthetic peptide
  XENP022569 vhCDR2
EISTKANNHATYYAESVKG

SEQ ID NO: 25078 - protein, 10 aa, Artificial Sequence
  Description of Artificial Sequence: Synthetic peptide
  XENP022569 vhCDR3
LATWDWYFDV

SEQ ID NO: 25079 - protein, 480 aa, Artificial Sequence; identical to SEQ ID NO: 23221
  Description of Artificial Sequence: Synthetic polypeptide
  XENP022569 7G8_H3.33_L1.30-1G6_L1.194_H1.279 scFv-Fc Heavy Chain

SEQ ID NO: 25080 - protein, 107 aa, Artificial Sequence; identical to SEQ ID NO: 10999
  Description of Artificial Sequence: Synthetic polypeptide
  VH of XENP022569

SEQ ID NO: 25081 - protein, 122 aa, Artificial Sequence; identical to SEQ ID NO: 10908
  Description of Artificial Sequence: Synthetic polypeptide
  VL of XENP022569

SEQ ID NO: 25082 - protein, 231 aa, Artificial Sequence; identical to SEQ ID NO: 21532
  Description of Artificial Sequence: Synthetic polypeptide
  Fc chain of XENP022569

SEQ ID NO: 25083 - protein, 11 aa, Artificial Sequence
  Description of Artificial Sequence: Synthetic peptide
  XENP022569 vhCDR1
RASQSVGNDVA

SEQ ID NO: 25084 - protein, 7 aa, Artificial Sequence
  Description of Artificial Sequence: Synthetic peptide
  XENP022569 vhCDR2
YASHRYT

SEQ ID NO: 25085 - protein, 9 aa, Artificial Sequence
  Description of Artificial Sequence: Synthetic peptide
  XENP022569 vhCDR3
QQDFSSPRT

SEQ ID NO: 25086 - protein, 5 aa, Artificial Sequence
  Description of Artificial Sequence: Synthetic peptide
  XENP022569 vlCDR1
NYWMN

SEQ ID NO: 25087 - protein, 19 aa, Artificial Sequence
  Description of Artificial Sequence: Synthetic peptide
  XENP022569 vlCDR2
EIRLYSNNYATHYAESVKG

SEQ ID NO: 25088 - protein, 11 aa, Artificial Sequence
  Description of Artificial Sequence: Synthetic peptide
  XENP022569 vlCDR3
YYGNYGGYFDV

SEQ ID NO: 25089 - protein, 218 aa, Artificial Sequence; identical to SEQ ID NO: 22539
  Description of Artificial Sequence: Synthetic polypeptide
  XENP022569 7G8_H3.33_L1.30-1G6_L1.194_H1.279 Light Chain

SEQ ID NO: 25090 - protein, 111 aa, Artificial Sequence; identical to SEQ ID NO: 22540
  Description of Artificial Sequence: Synthetic polypeptide
  VL of XENP022569

SEQ ID NO: 25091 - protein, 15 aa, Artificial Sequence
  Description of Artificial Sequence: Synthetic peptide
  XENP022569 vlCDR1
RASQSVDYDGDSYMN

SEQ ID NO: 25092 - protein, 7 aa, Artificial Sequence
  Description of Artificial Sequence: Synthetic peptide
  XENP022569 vlCDR2
AASELES

SEQ ID NO: 25093 - protein, 9 aa, Artificial Sequence
  Description of Artificial Sequence: Synthetic peptide
  XENP022569 vlCDR3
QQSNEDPFT

SEQ ID NO: 25094 - protein, 450 aa, Artificial Sequence; identical to SEQ ID NO: 22484
  Description of Artificial Sequence: Synthetic polypeptide
  XENP022604 7G8_H3.30_L1.34-1G6_L1.194_H1.279 Fab-Fc Heavy Chain

SEQ ID NO: 25095 - protein, 121 aa, Artificial Sequence; identical to SEQ ID NO: 22485
  Description of Artificial Sequence: Synthetic polypeptide
  VH of XENP022604

SEQ ID NO: 25096 - protein, 5 aa, Artificial Sequence
  Description of Artificial Sequence: Synthetic peptide
  XENP022604 vhCDR1
DAWMS

SEQ ID NO: 25097 - protein, 19 aa, Artificial Sequence
  Description of Artificial Sequence: Synthetic peptide
  XENP022604 vhCDR2
EISTKANNHATYYAESVKG

SEQ ID NO: 25098 - protein, 10 aa, Artificial Sequence
  Description of Artificial Sequence: Synthetic peptide
  XENP022604 vhCDR3
LATWDWYFDV

SEQ ID NO: 25099 - protein, 480 aa, Artificial Sequence; identical to SEQ ID NO: 23221
  Description of Artificial Sequence: Synthetic polypeptide
  XENP022604 7G8_H3.30_L1.34-1G6_L1.194_H1.279 scFv-Fc Heavy Chain

SEQ ID NO: 25100 - protein, 107 aa, Artificial Sequence; identical to SEQ ID NO: 10999
  Description of Artificial Sequence: Synthetic polypeptide
  VH of XENP022604

SEQ ID NO: 25101 - protein, 122 aa, Artificial Sequence; identical to SEQ ID NO: 10908
  Description of Artificial Sequence: Synthetic polypeptide
  VL of XENP022604

SEQ ID NO: 25102 - protein, 231 aa, Artificial Sequence; identical to SEQ ID NO: 21532
  Description of Artificial Sequence: Synthetic polypeptide
  Fc chain of XENP022604

SEQ ID NO: 25103 - protein, 11 aa, Artificial Sequence
  Description of Artificial Sequence: Synthetic peptide
  XENP022604 vhCDR1
RASQSVGNDVA

SEQ ID NO: 25104 - protein, 7 aa, Artificial Sequence
  Description of Artificial Sequence: Synthetic peptide
  XENP022604 vhCDR2
YASHRYT

SEQ ID NO: 25105 - protein, 9 aa, Artificial Sequence
  Description of Artificial Sequence: Synthetic peptide
  XENP022604 vhCDR3
QQDFSSPRT

SEQ ID NO: 25106 - protein, 5 aa, Artificial Sequence
  Description of Artificial Sequence: Synthetic peptide
  XENP022604 vlCDR1
NYWMN

SEQ ID NO: 25107 - protein, 19 aa, Artificial Sequence
  Description of Artificial Sequence: Synthetic peptide
  XENP022604 vlCDR2
EIRLYSNNYATHYAESVKG

SEQ ID NO: 25108 - protein, 11 aa, Artificial Sequence
  Description of Artificial Sequence: Synthetic peptide
  XENP022604 vlCDR3
YYGNYGGYFDV

SEQ ID NO: 25109 - protein, 218 aa, Artificial Sequence; identical to SEQ ID NO: 22599
  Description of Artificial Sequence: Synthetic polypeptide
  XENP022604 7G8_H3.30_L1.34-1G6_L1.194_H1.279 Light Chain

SEQ ID NO: 25110 - protein, 111 aa, Artificial Sequence; identical to SEQ ID NO: 22600
  Description of Artificial Sequence: Synthetic polypeptide
  VL of XENP022604

SEQ ID NO: 25111 - protein, 15 aa, Artificial Sequence
  Description of Artificial Sequence: Synthetic peptide
  XENP022604 vlCDR1
RASQSVDYDGDSYMN

SEQ ID NO: 25112 - protein, 7 aa, Artificial Sequence
  Description of Artificial Sequence: Synthetic peptide
  XENP022604 vlCDR2
AASELES

SEQ ID NO: 25113 - protein, 9 aa, Artificial Sequence
  Description of Artificial Sequence: Synthetic peptide
  XENP022604 vlCDR3
QQSNEDPFT

SEQ ID NO: 25114 - protein, 450 aa, Artificial Sequence; identical to SEQ ID NO: 22484
  Description of Artificial Sequence: Synthetic polypeptide
  XENP022605 7G8_H3.30_L1.36-1G6_L1.194_H1.279 Fab-Fc Heavy Chain

SEQ ID NO: 25115 - protein, 121 aa, Artificial Sequence; identical to SEQ ID NO: 22485
  Description of Artificial Sequence: Synthetic polypeptide
  VH of XENP022605

SEQ ID NO: 25116 - protein, 5 aa, Artificial Sequence
  Description of Artificial Sequence: Synthetic peptide
  XENP022605 vhCDR1
DAWMS

SEQ ID NO: 25117 - protein, 19 aa, Artificial Sequence
  Description of Artificial Sequence: Synthetic peptide
  XENP022605 vhCDR2
EISTKANNHATYYAESVKG

SEQ ID NO: 25118 - protein, 10 aa, Artificial Sequence
  Description of Artificial Sequence: Synthetic peptide
  XENP022605 vhCDR3
LATWDWYFDV

SEQ ID NO: 25119 - protein, 480 aa, Artificial Sequence; identical to SEQ ID NO: 23221
  Description of Artificial Sequence: Synthetic polypeptide
  XENP022605 7G8_H3.30_L1.36-1G6_L1.194_H1.279 scFv-Fc Heavy Chain

SEQ ID NO: 25120 - protein, 107 aa, Artificial Sequence; identical to SEQ ID NO: 10999
  Description of Artificial Sequence: Synthetic polypeptide
  VH of XENP022605

SEQ ID NO: 25121 - protein, 122 aa, Artificial Sequence; identical to SEQ ID NO: 10908
  Description of Artificial Sequence: Synthetic polypeptide
  VL of XENP022605

SEQ ID NO: 25122 - protein, 231 aa, Artificial Sequence; identical to SEQ ID NO: 21532
  Description of Artificial Sequence: Synthetic polypeptide
  Fc chain of XENP022605

SEQ ID NO: 25123 - protein, 11 aa, Artificial Sequence
  Description of Artificial Sequence: Synthetic peptide
  XENP022605 vhCDR1
RASQSVGNDVA

SEQ ID NO: 25124 - protein, 7 aa, Artificial Sequence
  Description of Artificial Sequence: Synthetic peptide
  XENP022605 vhCDR2
YASHRYT

SEQ ID NO: 25125 - protein, 9 aa, Artificial Sequence
  Description of Artificial Sequence: Synthetic peptide
  XENP022605 vhCDR3
QQDFSSPRT

SEQ ID NO: 25126 - protein, 5 aa, Artificial Sequence
  Description of Artificial Sequence: Synthetic peptide
  XENP022605 vlCDR1
NYWMN

SEQ ID NO: 25127 - protein, 19 aa, Artificial Sequence
  Description of Artificial Sequence: Synthetic peptide
  XENP022605 vlCDR2
EIRLYSNNYATHYAESVKG

SEQ ID NO: 25128 - protein, 11 aa, Artificial Sequence
  Description of Artificial Sequence: Synthetic peptide
  XENP022605 vlCDR3
YYGNYGGYFDV

SEQ ID NO: 25129 - protein, 218 aa, Artificial Sequence; identical to SEQ ID NO: 22619
  Description of Artificial Sequence: Synthetic polypeptide
  XENP022605 7G8_H3.30_L1.36-1G6_L1.194_H1.279 Light Chain

SEQ ID NO: 25130 - protein, 111 aa, Artificial Sequence; identical to SEQ ID NO: 22620
  Description of Artificial Sequence: Synthetic polypeptide
  VL of XENP022605

SEQ ID NO: 25131 - protein, 15 aa, Artificial Sequence
  Description of Artificial Sequence: Synthetic peptide
  XENP022605 vlCDR1
RASQSVDHDGDSYMN

SEQ ID NO: 25132 - protein, 7 aa, Artificial Sequence
  Description of Artificial Sequence: Synthetic peptide
  XENP022605 vlCDR2
AASELES

SEQ ID NO: 25133 - protein, 9 aa, Artificial Sequence
  Description of Artificial Sequence: Synthetic peptide
  XENP022605 vlCDR3
QQSNEDPFT

SEQ ID NO: 25134 - protein, 448 aa, Artificial Sequence
  Description of Artificial Sequence: Synthetic polypeptide
  XENP019184 10A7_H0L0-nivolumab_H0.1_L0 Fab-Fc Heavy Chain
EVQLVESGGGLTQPGKSLKLSCEASGFTFSSFTMHWVRQSPGKGLEWVAFIRSGSGIVFYADAVRGRFTISRDNAKNLLFLQMNDLKSEDTAMYYCARRPLGHNTFDSWGQGTLVTVSSASTKGPSVFPLAPSSKSTSGGTAALGCLVKDYFPEPVTVSWNSGALTSGVHTFPAVLQSSGLYSLSSVVTVPSSSLGTQTYICNVNHKPSDTKVDKKVEPKSCDKTHTCPPCPAPPVAGPSVFLFPPKPKDTLMISRTPEVTCVVVDVKHEDPEVKFNWYVDGVEVHNAKTKPREEEYNSTYRVVSVLTVLHQDWLNGKEYKCKVSNKALPAPIEKTISKAKGQPREPQVYTLPPSREEMTKNQVSLTCDVSGFYPSDIAVEWESDGQPENNYKTTPPVLDSDGSFFLYSKLTVDKSRWEQGDVFSCSVMHEALHNHYTQKSLSLSPGK

SEQ ID NO: 25135 - protein, 119 aa, Artificial Sequence; identical to SEQ ID NO: 21505
  Description of Artificial Sequence: Synthetic polypeptide
  VH of XENP019184

SEQ ID NO: 25136 - protein, 5 aa, Artificial Sequence
  Description of Artificial Sequence: Synthetic peptide
  XENP019184 vhCDR1
SFTMH

SEQ ID NO: 25137 - protein, 17 aa, Artificial Sequence
  Description of Artificial Sequence: Synthetic peptide
  XENP019184 vhCDR2
FIRSGSGIVFYADAVRG

SEQ ID NO: 25138 - protein, 10 aa, Artificial Sequence
  Description of Artificial Sequence: Synthetic peptide
  XENP019184 vhCDR3
RPLGHNTFDS

SEQ ID NO: 25139 - protein, 471 aa, Artificial Sequence; identical to SEQ ID NO: 22749
  Description of Artificial Sequence: Synthetic polypeptide
  XENP019184 10A7_H0L0-nivolumab_H0.1_L0 scFv-Fc Heavy Chain

SEQ ID NO: 25140 - protein, 113 aa, Artificial Sequence; identical to SEQ ID NO: 6210
  Description of Artificial Sequence: Synthetic polypeptide
  VH of XENP019184

SEQ ID NO: 25141 - protein, 107 aa, Artificial Sequence [sequence omitted]

SEQ ID NO: 25142 - protein, 231 aa, Artificial Sequence; identical to SEQ ID NO: 21532
  Description of Artificial Sequence: Synthetic polypeptide
  Fc chain of XENP019184

SEQ ID NO: 25143 - protein, 5 aa, Artificial Sequence
  Description of Artificial Sequence: Synthetic peptide
  XENP019184 vhCDR1
NSGMH

SEQ ID NO: 25144 - protein, 17 aa, Artificial Sequence
  Description of Artificial Sequence: Synthetic peptide
  XENP019184 vhCDR2
VIWYDGSKRYYADSVKG

SEQ ID NO: 25145 - protein, 4 aa, Artificial Sequence
  Description of Artificial Sequence: Synthetic peptide
  XENP019184 vhCDR3
NDDY

SEQ ID NO: 25146 - protein, 11 aa, Artificial Sequence
  Description of Artificial Sequence: Synthetic peptide
  XENP019184 vlCDR1
RASQSVSSYLA

SEQ ID NO: 25147 - protein, 7 aa, Artificial Sequence
  Description of Artificial Sequence: Synthetic peptide
  XENP019184 vlCDR2
DASNRAT

SEQ ID NO: 25148 - protein, 9 aa, Artificial Sequence
  Description of Artificial Sequence: Synthetic peptide
  XENP019184 vlCDR3
QQSSNWPRT

SEQ ID NO: 25149 - protein, 220 aa, Artificial Sequence; identical to SEQ ID NO: 21509
  Description of Artificial Sequence: Synthetic polypeptide
  XENP019184 10A7_H0L0-nivolumab_H0.1_L0 Light Chain

SEQ ID NO: 25150 - protein, 113 aa, Artificial Sequence; identical to SEQ ID NO: 21510
  Description of Artificial Sequence: Synthetic polypeptide
  VL of XENP019184

SEQ ID NO: 25151 - protein, 17 aa, Artificial Sequence
  Description of Artificial Sequence: Synthetic peptide
  XENP019184 vlCDR1
KSSQSLYYSGVKENLLA

SEQ ID NO: 25152 - protein, 7 aa, Artificial Sequence
  Description of Artificial Sequence: Synthetic peptide
  XENP019184 vlCDR2
YASIRFT

SEQ ID NO: 25153 - protein, 9 aa, Artificial Sequence
  Description of Artificial Sequence: Synthetic peptide
  XENP019184 vlCDR3
QQGINNPLT

SEQ ID NO: 25154 - protein, 448 aa, Artificial Sequence
  Description of Artificial Sequence: Synthetic polypeptide
  XENP019185 1F4_H0L0-nivolumab_H0.1_L0 Fab-Fc Heavy Chain
EVQLQQSGPELVKPGTSMKISCKASGYSFTGHLMNWVKQSHGKNLEWIGLIIPYNGGTSYNQKFKGKATLTVDKSSSTAYMELLSLTSDDSAVYFCSRGLRGFYAMDYWGQGTSVTVSSASTKGPSVFPLAPSSKSTSGGTAALGCLVKDYFPEPVTVSWNSGALTSGVHTFPAVLQSSGLYSLSSVVTVPSSSLGTQTYICNVNHKPSDTKVDKKVEPKSCDKTHTCPPCPAPPVAGPSVFLFPPKPKDTLMISRTPEVTCVVVDVKHEDPEVKFNWYVDGVEVHNAKTKPREEEYNSTYRVVSVLTVLHQDWLNGKEYKCKVSNKALPAPIEKTISKAKGQPREPQVYTLPPSREEMTKNQVSLTCDVSGFYPSDIAVEWESDGQPENNYKTTPPVLDSDGSFFLYSKLTVDKSRWEQGDVFSCSVMHEALHNHYTQKSLSLSPGK

SEQ ID NO: 25155 - protein, 119 aa, Artificial Sequence; identical to SEQ ID NO: 21515
  Description of Artificial Sequence: Synthetic polypeptide
  VH of XENP019185

SEQ ID NO: 25156 - protein, 5 aa, Artificial Sequence
  Description of Artificial Sequence: Synthetic peptide
  XENP019185 vhCDR1
GHLMN

SEQ ID NO: 25157 - protein, 17 aa, Artificial Sequence
  Description of Artificial Sequence: Synthetic peptide
  XENP019185 vhCDR2
LIIPYNGGTSYNQKFKG

SEQ ID NO: 25158 - protein, 10 aa, Artificial Sequence
  Description of Artificial Sequence: Synthetic peptide
  XENP019185 vhCDR3
GLRGFYAMDY

SEQ ID NO: 25159 - protein, 471 aa, Artificial Sequence; identical to SEQ ID NO: 22749
  Description of Artificial Sequence: Synthetic polypeptide
  XENP019185 1F4_H0L0-nivolumab_H0.1_L0 scFv-Fc Heavy Chain

SEQ ID NO: 25160 - protein, 113 aa, Artificial Sequence; identical to SEQ ID NO: 6210
  Description of Artificial Sequence: Synthetic polypeptide
  VH of XENP019185

SEQ ID NO: 25161 - protein, 107 aa, Artificial Sequence [sequence omitted]

SEQ ID NO: 25162 - protein, 231 aa, Artificial Sequence; identical to SEQ ID NO: 21532
  Description of Artificial Sequence: Synthetic polypeptide
  Fc chain of XENP019185

SEQ ID NO: 25163 - protein, 5 aa, Artificial Sequence
  Description of Artificial Sequence: Synthetic peptide
  XENP019185 vhCDR1
NSGMH

SEQ ID NO: 25164 - protein, 17 aa, Artificial Sequence
  Description of Artificial Sequence: Synthetic peptide
  XENP019185 vhCDR2
VIWYDGSKRYYADSVKG

SEQ ID NO: 25165 - protein, 4 aa, Artificial Sequence
  Description of Artificial Sequence: Synthetic peptide
  XENP019185 vhCDR3
NDDY

SEQ ID NO: 25166 - protein, 11 aa, Artificial Sequence
  Description of Artificial Sequence: Synthetic peptide
  XENP019185 vlCDR1
RASQSVSSYLA

SEQ ID NO: 25167 - protein, 7 aa, Artificial Sequence
  Description of Artificial Sequence: Synthetic peptide
  XENP019185 vlCDR2
DASNRAT

SEQ ID NO: 25168 - protein, 9 aa, Artificial Sequence
  Description of Artificial Sequence: Synthetic peptide
  XENP019185 vlCDR3
QQSSNWPRT

SEQ ID NO: 25169 - protein, 219 aa, Artificial Sequence; identical to SEQ ID NO: 21519
  Description of Artificial Sequence: Synthetic polypeptide
  XENP019185 1F4_H0L0-nivolumab_H0.1_L0 Light Chain

SEQ ID NO: 25170 - protein, 112 aa, Artificial Sequence; identical to SEQ ID NO: 21520
  Description of Artificial Sequence: Synthetic polypeptide
  VL of XENP019185

SEQ ID NO: 25171 - protein, 16 aa, Artificial Sequence
  Description of Artificial Sequence: Synthetic peptide
  XENP019185 vlCDR1
RSSQSLVNSYGNTFLS

SEQ ID NO: 25172 - protein, 7 aa, Artificial Sequence
  Description of Artificial Sequence: Synthetic peptide
  XENP019185 vlCDR2
GISNRFS

SEQ ID NO: 25173 - protein, 9 aa, Artificial Sequence
  Description of Artificial Sequence: Synthetic peptide
  XENP019185 vlCDR3
LQGTHQPPT

SEQ ID NO: 25174 - protein, 446 aa, Artificial Sequence
  Description of Artificial Sequence: Synthetic polypeptide
  XENP016340 mAb8213_H0L0-nivolumab_H0.1_L0 Fab-Fc Heavy Chain
QVQLVQSGAEVKKPGASVKVSCKASGYTFTSYWMHWVRQAPGQGLEWMGEINPSNGRTNYNEKFKTRVTITADTSTSTAYMELSSLRSEDTAVYYCARGYYLYFDYWGQGTLVTVSSASTKGPSVFPLAPSSKSTSGGTAALGCLVKDYFPEPVTVSWNSGALTSGVHTFPAVLQSSGLYSLSSVVTVPSSSLGTQTYICNVNHKPSDTKVDKKVEPKSCDKTHTCPPCPAPPVAGPSVFLFPPKPKDTLMISRTPEVTCVVVDVKHEDPEVKFNWYVDGVEVHNAKTKPREEEYNSTYRVVSVLTVLHQDWLNGKEYKCKVSNKALPAPIEKTISKAKGQPREPQVYTLPPSREEMTKNQVSLTCDVSGFYPSDIAVEWESDGQPENNYKTTPPVLDSDGSFFLYSKLTVDKSRWEQGDVFSCSVMHEALHNHYTQKSLSLSPGK

SEQ ID NO: 25175 - protein, 117 aa, Artificial Sequence; identical to SEQ ID NO: 20766
  Description of Artificial Sequence: Synthetic polypeptide
  VH of XENP016340

SEQ ID NO: 25176 - protein, 5 aa, Artificial Sequence
  Description of Artificial Sequence: Synthetic peptide
  XENP016340 vhCDR1
SYWMH

SEQ ID NO: 25177 - protein, 17 aa, Artificial Sequence
  Description of Artificial Sequence: Synthetic peptide
  XENP016340 vhCDR2
EINPSNGRTNYNEKFKT

SEQ ID NO: 25178 - protein, 8 aa, Artificial Sequence
  Description of Artificial Sequence: Synthetic peptide
  XENP016340 vhCDR3
GYYLYFDY

SEQ ID NO: 25179 - protein, 471 aa, Artificial Sequence; identical to SEQ ID NO: 22749
  Description of Artificial Sequence: Synthetic polypeptide
  XENP016340 mAb8213_H0L0-nivolumab_H0.1_L0 scFv-Fc Heavy Chain

SEQ ID NO: 25180 - protein, 113 aa, Artificial Sequence; identical to SEQ ID NO: 6210
  Description of Artificial Sequence: Synthetic polypeptide
  VH of XENP016340

SEQ ID NO: 25181 - protein, 107 aa, Artificial Sequence [sequence omitted]

SEQ ID NO: 25182 - protein, 231 aa, Artificial Sequence; identical to SEQ ID NO: 21532
  Description of Artificial Sequence: Synthetic polypeptide
  Fc chain of XENP016340

SEQ ID NO: 25183 - protein, 5 aa, Artificial Sequence
  Description of Artificial Sequence: Synthetic peptide
  XENP016340 vhCDR1
NSGMH

SEQ ID NO: 25184 - protein, 17 aa, Artificial Sequence
  Description of Artificial Sequence: Synthetic peptide
  XENP016340 vhCDR2
VIWYDGSKRYYADSVKG

SEQ ID NO: 25185 - protein, 4 aa, Artificial Sequence
  Description of Artificial Sequence: Synthetic peptide
  XENP016340 vhCDR3
NDDY

SEQ ID NO: 25186 - protein, 11 aa, Artificial Sequence
  Description of Artificial Sequence: Synthetic peptide
  XENP016340 vlCDR1
RASQSVSSYLA

SEQ ID NO: 25187 - protein, 7 aa, Artificial Sequence
  Description of Artificial Sequence: Synthetic peptide
  XENP016340 vlCDR2
DASNRAT

SEQ ID NO: 25188 - protein, 9 aa, Artificial Sequence
  Description of Artificial Sequence: Synthetic peptide
  XENP016340 vlCDR3
QQSSNWPRT

SEQ ID NO: 25189 - protein, 214 aa, Artificial Sequence; identical to SEQ ID NO: 20770
  Description of Artificial Sequence: Synthetic polypeptide
  XENP016340 mAb8213_H0L0-nivolumab_H0.1_L0 Light Chain

SEQ ID NO: 25190 - protein, 107 aa, Artificial Sequence; identical to SEQ ID NO: 20771
  Description of Artificial Sequence: Synthetic polypeptide
  VL of XENP016340

SEQ ID NO: 25191 - protein, 11 aa, Artificial Sequence
  Description of Artificial Sequence: Synthetic peptide
  XENP016340 vlCDR1
HASQGIRINIG

SEQ ID NO: 25192 - protein, 7 aa, Artificial Sequence
  Description of Artificial Sequence: Synthetic peptide
  XENP016340 vlCDR2
HGTNLED

SEQ ID NO: 25193 - protein, 9 aa, Artificial Sequence
  Description of Artificial Sequence: Synthetic peptide
  XENP016340 vlCDR3
VQYGQFPWT

SEQ ID NO: 25194 - protein, 223 aa, Artificial Sequence
  Description of Artificial Sequence: Synthetic polypeptide
  XENP020847 2A11_H1L2_Fab Heavy Chain
EVQLVQSGAEVKKPGATVKISCKASGFNIKDYYMHWVQQAPGKGLEWMGWIDPENGDTEYAPKFQGRVTITADTSTNTAYMELSSLRSEDTAVYYCYARGVRQALDYWGQGTLVTVSSASTKGPSVFPLAPSSKSTSGGTAALGCLVKDYFPEPVTVSWNSGALTSGVHTFPAVLQSSGLYSLSSVVTVPSSSLGTQTYICNVNHKPSNTKVDKKVEPKSCGS

SEQ ID NO: 25195 - protein, 118 aa, Artificial Sequence; identical to SEQ ID NO: 17236
  Description of Artificial Sequence: Synthetic polypeptide
  VH of XENP020847

SEQ ID NO: 25196 - protein, 5 aa, Artificial Sequence
  Description of Artificial Sequence: Synthetic peptide
  XENP020847 vhCDR1
DYYMH

SEQ ID NO: 25197 - protein, 17 aa, Artificial Sequence
  Description of Artificial Sequence: Synthetic peptide
  XENP020847 vhCDR2
WIDPENGDTEYAPKFQG

SEQ ID NO: 25198 - protein, 9 aa, Artificial Sequence
  Description of Artificial Sequence: Synthetic peptide
  XENP020847 vhCDR3
RGVRQALDY

SEQ ID NO: 25199 - protein, 214 aa, Artificial Sequence; identical to SEQ ID NO: 17250
  Description of Artificial Sequence: Synthetic polypeptide
  XENP020847 2A11_H1L2_Fab Light Chain

SEQ ID NO: 25200 - protein, 107 aa, Artificial Sequence; identical to SEQ ID NO: 17251
  Description of Artificial Sequence: Synthetic polypeptide
  VL of XENP020847

SEQ ID NO: 25201 - protein, 11 aa, Artificial Sequence
  Description of Artificial Sequence: Synthetic peptide
  XENP020847 vlCDR1
QASQDIGNYLN

SEQ ID NO: 25202 - protein, 7 aa, Artificial Sequence
  Description of Artificial Sequence: Synthetic peptide
  XENP020847 vlCDR2
YTSRLHS

SEQ ID NO: 25203 - protein, 9 aa, Artificial Sequence
  Description of Artificial Sequence: Synthetic peptide
  XENP020847 vlCDR3
QQGNTLPYT

SEQ ID NO: 25204 - protein, 223 aa, Artificial Sequence
  Description of Artificial Sequence: Synthetic polypeptide
  XENP021073 2A11_H0L0_Fab Heavy Chain
EVQLQQSGAELVRSGASVKLSCTASGFNIKDYYMHWVKQRPEQGLEWIGWIDPENGDTEYAPKFQGKATMTADTSSNTAYLQLSSLTSEDTAVYYCYARGVRQALDYWGQGTSVTVSSASTKGPSVFPLAPSSKSTSGGTAALGCLVKDYFPEPVTVSWNSGALTSGVHTFPAVLQSSGLYSLSSVVTVPSSSLGTQTYICNVNHKPSNTKVDKKVEPKSCGS

SEQ ID NO: 25205 - protein, 118 aa, Artificial Sequence; identical to SEQ ID NO: 17226
  Description of Artificial Sequence: Synthetic polypeptide
  VH of XENP021073

SEQ ID NO: 25206 - protein, 5 aa, Artificial Sequence
  Description of Artificial Sequence: Synthetic peptide
  XENP021073 vhCDR1
DYYMH

SEQ ID NO: 25207 - protein, 17 aa, Artificial Sequence
  Description of Artificial Sequence: Synthetic peptide
  XENP021073 vhCDR2
WIDPENGDTEYAPKFQG

SEQ ID NO: 25208 - protein, 9 aa, Artificial Sequence
  Description of Artificial Sequence: Synthetic peptide
  XENP021073 vhCDR3
RGVRQALDY

SEQ ID NO: 25209 - protein, 214 aa, Artificial Sequence; identical to SEQ ID NO: 17230
  Description of Artificial Sequence: Synthetic polypeptide
  XENP021073 2A11_H0L0_Fab Light Chain

SEQ ID NO: 25210 - protein, 107 aa, Artificial Sequence; identical to SEQ ID NO: 17231
  Description of Artificial Sequence: Synthetic polypeptide
  VL of XENP021073

SEQ ID NO: 25211 - protein, 11 aa, Artificial Sequence
  Description of Artificial Sequence: Synthetic peptide
  XENP021073 vlCDR1
RASQDIGNYLN

SEQ ID NO: 25212 - protein, 7 aa, Artificial Sequence
  Description of Artificial Sequence: Synthetic peptide
  XENP021073 vlCDR2
YTSRLHS

SEQ ID NO: 25213 - protein, 9 aa, Artificial Sequence
  Description of Artificial Sequence: Synthetic peptide
  XENP021073 vlCDR3
QQGNTLPYT

SEQ ID NO: 25214 - protein, 223 aa, Artificial Sequence
  Description of Artificial Sequence: Synthetic polypeptide
  XENP021228 2A11_H1.1_L2_Fab Heavy Chain
EVQLVQSGAEVKKPGATVKISCKASGYNIKDYYMHWVQQAPGKGLEWMGWIDPENGDTEYAPKFQGRVTITADTSTNTAYMELSSLRSEDTAVYYCYARGVRQALDYWGQGTLVTVSSASTKGPSVFPLAPSSKSTSGGTAALGCLVKDYFPEPVTVSWNSGALTSGVHTFPAVLQSSGLYSLSSVVTVPSSSLGTQTYICNVNHKPSNTKVDKKVEPKSCGS

SEQ ID NO: 25215 - protein, 118 aa, Artificial Sequence
  Description of Artificial Sequence: Synthetic polypeptide
  VH of XENP021228
EVQLVQSGAEVKKPGATVKISCKASGYNIKDYYMHWVQQAPGKGLEWMGWIDPENGDTEYAPKFQGRVTITADTSTNTAYMELSSLRSEDTAVYYCYARGVRQALDYWGQGTLVTVSS

SEQ ID NO: 25216 - protein, 5 aa, Artificial Sequence
  Description of Artificial Sequence: Synthetic peptide
  XENP021228 vhCDR1
DYYMH

SEQ ID NO: 25217 - protein, 17 aa, Artificial Sequence
  Description of Artificial Sequence: Synthetic peptide
  XENP021228 vhCDR2
WIDPENGDTEYAPKFQG

SEQ ID NO: 25218 - protein, 9 aa, Artificial Sequence
  Description of Artificial Sequence: Synthetic peptide
  XENP021228 vhCDR3
RGVRQALDY

SEQ ID NO: 25219 - protein, 214 aa, Artificial Sequence; identical to SEQ ID NO: 17250
  Description of Artificial Sequence: Synthetic polypeptide
  XENP021228 2A11_H1.1_L2_Fab Light Chain

SEQ ID NO: 25220 - protein, 107 aa, Artificial Sequence; identical to SEQ ID NO: 17251
  Description of Artificial Sequence: Synthetic polypeptide
  VL of XENP021228

SEQ ID NO: 25221 - protein, 11 aa, Artificial Sequence
  Description of Artificial Sequence: Synthetic peptide
  XENP021228 vlCDR1
QASQDIGNYLN

SEQ ID NO: 25222 - protein, 7 aa, Artificial Sequence
  Description of Artificial Sequence: Synthetic peptide
  XENP021228 vlCDR2
YTSRLHS

SEQ ID NO: 25223 - protein, 9 aa, Artificial Sequence
  Description of Artificial Sequence: Synthetic peptide
  XENP021228 vlCDR3
QQGNTLPYT

SEQ ID NO: 25224 - protein, 223 aa, Artificial Sequence
  Description of Artificial Sequence: Synthetic polypeptide
  XENP021229 2A11_H1.2_L2_Fab Heavy Chain
EVQLVQSGAEVKKPGATVKISCKASGFDIKDYYMHWVQQAPGKGLEWMGWIDPENGDTEYAPKFQGRVTITADTSTNTAYMELSSLRSEDTAVYYCYARGVRQALDYWGQGTLVTVSSASTKGPSVFPLAPSSKSTSGGTAALGCLVKDYFPEPVTVSWNSGALTSGVHTFPAVLQSSGLYSLSSVVTVPSSSLGTQTYICNVNHKPSNTKVDKKVEPKSCGS

SEQ ID NO: 25225 - protein, 118 aa, Artificial Sequence
  Description of Artificial Sequence: Synthetic polypeptide
  VH of XENP021229
EVQLVQSGAEVKKPGATVKISCKASGFDIKDYYMHWVQQAPGKGLEWMGWIDPENGDTEYAPKFQGRVTITADTSTNTAYMELSSLRSEDTAVYYCYARGVRQALDYWGQGTLVTVSS

SEQ ID NO: 25226 - protein, 5 aa, Artificial Sequence
  Description of Artificial Sequence: Synthetic peptide
  XENP021229 vhCDR1
DYYMH

SEQ ID NO: 25227 - protein, 17 aa, Artificial Sequence
  Description of Artificial Sequence: Synthetic peptide
  XENP021229 vhCDR2
WIDPENGDTEYAPKFQG

SEQ ID NO: 25228 - protein, 9 aa, Artificial Sequence
  Description of Artificial Sequence: Synthetic peptide
  XENP021229 vhCDR3
RGVRQALDY

SEQ ID NO: 25229 - protein, 214 aa, Artificial Sequence; identical to SEQ ID NO: 17250
  Description of Artificial Sequence: Synthetic polypeptide
  XENP021229 2A11_H1.2_L2_Fab Light Chain

SEQ ID NO: 25230 - protein, 107 aa, Artificial Sequence; identical to SEQ ID NO: 17251
  Description of Artificial Sequence: Synthetic polypeptide
  VL of XENP021229

SEQ ID NO: 25231 - protein, 11 aa, Artificial Sequence
  Description of Artificial Sequence: Synthetic peptide
  XENP021229 vlCDR1
QASQDIGNYLN

SEQ ID NO: 25232 - protein, 7 aa, Artificial Sequence
  Description of Artificial Sequence: Synthetic peptide
  XENP021229 vlCDR2
YTSRLHS

SEQ ID NO: 25233 - protein, 9 aa, Artificial Sequence
  Description of Artificial Sequence: Synthetic peptide
  XENP021229 vlCDR3
QQGNTLPYT

SEQ ID NO: 25234 - protein, 223 aa, Artificial Sequence
  Description of Artificial Sequence: Synthetic polypeptide
  XENP021230 2A11_H1.3_L2_Fab Heavy Chain
EVQLVQSGAEVKKPGATVKISCKASGFHIKDYYMHWVQQAPGKGLEWMGWIDPENGDTEYAPKFQGRVTITADTSTNTAYMELSSLRSEDTAVYYCYARGVRQALDYWGQGTLVTVSSASTKGPSVFPLAPSSKSTSGGTAALGCLVKDYFPEPVTVSWNSGALTSGVHTFPAVLQSSGLYSLSSVVTVPSSSLGTQTYICNVNHKPSNTKVDKKVEPKSCGS

SEQ ID NO: 25235 - protein, 118 aa, Artificial Sequence
  Description of Artificial Sequence: Synthetic polypeptide
  VH of XENP021230
EVQLVQSGAEVKKPGATVKISCKASGFHIKDYYMHWVQQAPGKGLEWMGWIDPENGDTEYAPKFQGRVTITADTSTNTAYMELSSLRSEDTAVYYCYARGVRQALDYWGQGTLVTVSS

SEQ ID NO: 25236 - protein, 5 aa, Artificial Sequence
  Description of Artificial Sequence: Synthetic peptide
  XENP021230 vhCDR1
DYYMH

SEQ ID NO: 25237 - protein, 17 aa, Artificial Sequence
  Description of Artificial Sequence: Synthetic peptide
  XENP021230 vhCDR2
WIDPENGDTEYAPKFQG

SEQ ID NO: 25238 - protein, 9 aa, Artificial Sequence
  Description of Artificial Sequence: Synthetic peptide
  XENP021230 vhCDR3
RGVRQALDY

SEQ ID NO: 25239 - protein, 214 aa, Artificial Sequence; identical to SEQ ID NO: 17250
  Description of Artificial Sequence: Synthetic polypeptide
  XENP021230 2A11_H1.3_L2_Fab Light Chain

SEQ ID NO: 25240 - protein, 107 aa, Artificial Sequence; identical to SEQ ID NO: 17251
  Description of Artificial Sequence: Synthetic polypeptide
  VL of XENP021230

SEQ ID NO: 25241 - protein, 11 aa, Artificial Sequence
  Description of Artificial Sequence: Synthetic peptide
  XENP021230 vlCDR1
QASQDIGNYLN

SEQ ID NO: 25242 - protein, 7 aa, Artificial Sequence
  Description of Artificial Sequence: Synthetic peptide
  XENP021230 vlCDR2
YTSRLHS

SEQ ID NO: 25243 - protein, 9 aa, Artificial Sequence
  Description of Artificial Sequence: Synthetic peptide
  XENP021230 vlCDR3
QQGNTLPYT

SEQ ID NO: 25244 - protein, 223 aa, Artificial Sequence
  Description of Artificial Sequence: Synthetic polypeptide
  XENP021231 2A11_H1.4_L2_Fab Heavy Chain
EVQLVQSGAEVKKPGATVKISCKASGFEIKDYYMHWVQQAPGKGLEWMGWIDPENGDTEYAPKFQGRVTITADTSTNTAYMELSSLRSEDTAVYYCYARGVRQALDYWGQGTLVTVSSASTKGPSVFPLAPSSKSTSGGTAALGCLVKDYFPEPVTVSWNSGALTSGVHTFPAVLQSSGLYSLSSVVTVPSSSLGTQTYICNVNHKPSNTKVDKKVEPKSCGS

SEQ ID NO: 25245 - protein, 118 aa, Artificial Sequence
  Description of Artificial Sequence: Synthetic polypeptide
  VH of XENP021231
EVQLVQSGAEVKKPGATVKISCKASGFEIKDYYMHWVQQAPGKGLEWMGWIDPENGDTEYAPKFQGRVTITADTSTNTAYMELSSLRSEDTAVYYCYARGVRQALDYWGQGTLVTVSS

SEQ ID NO: 25246 - protein, 5 aa, Artificial Sequence
  Description of Artificial Sequence: Synthetic peptide
  XENP021231 vhCDR1
DYYMH

SEQ ID NO: 25247 - protein, 17 aa, Artificial Sequence
  Description of Artificial Sequence: Synthetic peptide
  XENP021231 vhCDR2
WIDPENGDTEYAPKFQG

SEQ ID NO: 25248 - protein, 9 aa, Artificial Sequence
  Description of Artificial Sequence: Synthetic peptide
  XENP021231 vhCDR3
RGVRQALDY

SEQ ID NO: 25249 - protein, 214 aa, Artificial Sequence; identical to SEQ ID NO: 17250
  Description of Artificial Sequence: Synthetic polypeptide
  XENP021231 2A11_H1.4_L2_Fab Light Chain

SEQ ID NO: 25250 - protein, 107 aa, Artificial Sequence; identical to SEQ ID NO: 17251
  Description of Artificial Sequence: Synthetic polypeptide
  VL of XENP021231

SEQ ID NO: 25251 - protein, 11 aa, Artificial Sequence
  Description of Artificial Sequence: Synthetic peptide
  XENP021231 vlCDR1
QASQDIGNYLN

SEQ ID NO: 25252 - protein, 7 aa, Artificial Sequence
  Description of Artificial Sequence: Synthetic peptide
  XENP021231 vlCDR2
YTSRLHS

SEQ ID NO: 25253 - protein, 9 aa, Artificial Sequence
  Description of Artificial Sequence: Synthetic peptide
  XENP021231 vlCDR3
QQGNTLPYT

SEQ ID NO: 25254 - protein, 223 aa, Artificial Sequence
  Description of Artificial Sequence: Synthetic polypeptide
  XENP021232 2A11_H1.5_L2_Fab Heavy Chain
EVQLVQSGAEVKKPGATVKISCKASGFQIKDYYMHWVQQAPGKGLEWMGWIDPENGDTEYAPKFQGRVTITADTSTNTAYMELSSLRSEDTAVYYCYARGVRQALDYWGQGTLVTVSSASTKGPSVFPLAPSSKSTSGGTAALGCLVKDYFPEPVTVSWNSGALTSGVHTFPAVLQSSGLYSLSSVVTVPSSSLGTQTYICNVNHKPSNTKVDKKVEPKSCGS

SEQ ID NO: 25255 - protein, 118 aa, Artificial Sequence
  Description of Artificial Sequence: Synthetic polypeptide
  VH of XENP021232
EVQLVQSGAEVKKPGATVKISCKASGFQIKDYYMHWVQQAPGKGLEWMGWIDPENGDTEYAPKFQGRVTITADTSTNTAYMELSSLRSEDTAVYYCYARGVRQALDYWGQGTLVTVSS

SEQ ID NO: 25256 - protein, 5 aa, Artificial Sequence
  Description of Artificial Sequence: Synthetic peptide
  XENP021232 vhCDR1
DYYMH

SEQ ID NO: 25257 - protein, 17 aa, Artificial Sequence
  Description of Artificial Sequence: Synthetic peptide
  XENP021232 vhCDR2
WIDPENGDTEYAPKFQG

SEQ ID NO: 25258 - protein, 9 aa, Artificial Sequence
  Description of Artificial Sequence: Synthetic peptide
  XENP021232 vhCDR3
RGVRQALDY

SEQ ID NO: 25259 - protein, 214 aa, Artificial Sequence; identical to SEQ ID NO: 17250
  Description of Artificial Sequence: Synthetic polypeptide
  XENP021232 2A11_H1.5_L2_Fab Light Chain

SEQ ID NO: 25260 - protein, 107 aa, Artificial Sequence; identical to SEQ ID NO: 17251
  Description of Artificial Sequence: Synthetic polypeptide
  VL of XENP021232

SEQ ID NO: 25261 - protein, 11 aa, Artificial Sequence
  Description of Artificial Sequence: Synthetic peptide
  XENP021232 vlCDR1
QASQDIGNYLN

SEQ ID NO: 25262 - protein, 7 aa, Artificial Sequence
  Description of Artificial Sequence: Synthetic peptide
  XENP021232 vlCDR2
YTSRLHS

SEQ ID NO: 25263 - protein, 9 aa, Artificial Sequence
  Description of Artificial Sequence: Synthetic peptide
  XENP021232 vlCDR3
QQGNTLPYT

SEQ ID NO: 25264 - protein, 223 aa, Artificial Sequence
  Description of Artificial Sequence: Synthetic polypeptide
  XENP021233 2A11_H1.6_L2_Fab Heavy Chain
EVQLVQSGAEVKKPGATVKISCKASGFAIKDYYMHWVQQAPGKGLEWMGWIDPENGDTEYAPKFQGRVTITADTSTNTAYMELSSLRSEDTAVYYCYARGVRQALDYWGQGTLVTVSSASTKGPSVFPLAPSSKSTSGGTAALGCLVKDYFPEPVTVSWNSGALTSGVHTFPAVLQSSGLYSLSSVVTVPSSSLGTQTYICNVNHKPSNTKVDKKVEPKSCGS

SEQ ID NO: 25265 - protein, 118 aa, Artificial Sequence
  Description of Artificial Sequence: Synthetic polypeptide
  VH of XENP021233
EVQLVQSGAEVKKPGATVKISCKASGFAIKDYYMHWVQQAPGKGLEWMGWIDPENGDTEYAPKFQGRVTITADTSTNTAYMELSSLRSEDTAVYYCYARGVRQALDYWGQGTLVTVSS

SEQ ID NO: 25266 - protein, 5 aa, Artificial Sequence
  Description of Artificial Sequence: Synthetic peptide
  XENP021233 vhCDR1
DYYMH

SEQ ID NO: 25267 - protein, 17 aa, Artificial Sequence
  Description of Artificial Sequence: Synthetic peptide
  XENP021233 vhCDR2
WIDPENGDTEYAPKFQG

SEQ ID NO: 25268 - protein, 9 aa, Artificial Sequence
  Description of Artificial Sequence: Synthetic peptide
  XENP021233 vhCDR3
RGVRQALDY

SEQ ID NO: 25269 - protein, 214 aa, Artificial Sequence; identical to SEQ ID NO: 17250
  Description of Artificial Sequence: Synthetic polypeptide
  XENP021233 2A11_H1.6_L2_Fab Light Chain

SEQ ID NO: 25270 - protein, 107 aa, Artificial Sequence; identical to SEQ ID NO: 17251
  Description of Artificial Sequence: Synthetic polypeptide
  VL of XENP021233

SEQ ID NO: 25271 - protein, 11 aa, Artificial Sequence
  Description of Artificial Sequence: Synthetic peptide
  XENP021233 vlCDR1
QASQDIGNYLN

SEQ ID NO: 25272 - protein, 7 aa, Artificial Sequence
  Description of Artificial Sequence: Synthetic peptide
  XENP021233 vlCDR2
YTSRLHS

SEQ ID NO: 25273 - protein, 9 aa, Artificial Sequence
  Description of Artificial Sequence: Synthetic peptide
  XENP021233 vlCDR3
QQGNTLPYT

SEQ ID NO: 25274 - protein, 223 aa, Artificial Sequence
  Description of Artificial Sequence: Synthetic polypeptide
  XENP021234 2A11_H1.7_L2_Fab Heavy Chain
EVQLVQSGAEVKKPGATVKISCKASGFLIKDYYMHWVQQAPGKGLEWMGWIDPENGDTEYAPKFQGRVTITADTSTNTAYMELSSLRSEDTAVYYCYARGVRQALDYWGQGTLVTVSSASTKGPSVFPLAPSSKSTSGGTAALGCLVKDYFPEPVTVSWNSGALTSGVHTFPAVLQSSGLYSLSSVVTVPSSSLGTQTYICNVNHKPSNTKVDKKVEPKSCGS

SEQ ID NO: 25275 - protein, 118 aa, Artificial Sequence
  Description of Artificial Sequence: Synthetic polypeptide
  VH of XENP021234
EVQLVQSGAEVKKPGATVKISCKASGFLIKDYYMHWVQQAPGKGLEWMGWIDPENGDTEYAPKFQGRVTITADTSTNTAYMELSSLRSEDTAVYYCYARGVRQALDYWGQGTLVTVSS

SEQ ID NO: 25276 - protein, 5 aa, Artificial Sequence
  Description of Artificial Sequence: Synthetic peptide
  XENP021234 vhCDR1
DYYMH

SEQ ID NO: 25277 - protein, 17 aa, Artificial Sequence
  Description of Artificial Sequence: Synthetic peptide
  XENP021234 vhCDR2
WIDPENGDTEYAPKFQG

SEQ ID NO: 25278 - protein, 9 aa, Artificial Sequence
  Description of Artificial Sequence: Synthetic peptide
  XENP021234 vhCDR3
RGVRQALDY

SEQ ID NO: 25279 - protein, 214 aa, Artificial Sequence; identical to SEQ ID NO: 17250
  Description of Artificial Sequence: Synthetic polypeptide
  XENP021234 2A11_H1.7_L2_Fab Light Chain

SEQ ID NO: 25280 - protein, 107 aa, Artificial Sequence; identical to SEQ ID NO: 17251
  Description of Artificial Sequence: Synthetic polypeptide
  VL of XENP021234

SEQ ID NO: 25281 - protein, 11 aa, Artificial Sequence
  Description of Artificial Sequence: Synthetic peptide
  XENP021234 vlCDR1
QASQDIGNYLN

SEQ ID NO: 25282 - protein, 7 aa, Artificial Sequence
  Description of Artificial Sequence: Synthetic peptide
  XENP021234 vlCDR2
YTSRLHS

SEQ ID NO: 25283 - protein, 9 aa, Artificial Sequence
  Description of Artificial Sequence: Synthetic peptide
  XENP021234 vlCDR3
QQGNTLPYT

SEQ ID NO: 25284 - protein, 223 aa, Artificial Sequence
  Description of Artificial Sequence: Synthetic polypeptide
  XENP021235 2A11_H1.8_L2_Fab Heavy Chain
EVQLVQSGAEVKKPGATVKISCKASGFTIKDYYMHWVQQAPGKGLEWMGWIDPENGDTEYAPKFQGRVTITADTSTNTAYMELSSLRSEDTAVYYCYARGVRQALDYWGQGTLVTVSSASTKGPSVFPLAPSSKSTSGGTAALGCLVKDYFPEPVTVSWNSGALTSGVHTFPAVLQSSGLYSLSSVVTVPSSSLGTQTYICNVNHKPSNTKVDKKVEPKSCGS

SEQ ID NO: 25285 - protein, 118 aa, Artificial Sequence
  Description of Artificial Sequence: Synthetic polypeptide
  VH of XENP021235
EVQLVQSGAEVKKPGATVKISCKASGFTIKDYYMHWVQQAPGKGLEWMGWIDPENGDTEYAPKFQGRVTITADTSTNTAYMELSSLRSEDTAVYYCYARGVRQALDYWGQGTLVTVSS

SEQ ID NO: 25286 - protein, 5 aa, Artificial Sequence
  Description of Artificial Sequence: Synthetic peptide
  XENP021235 vhCDR1
DYYMH

SEQ ID NO: 25287 - protein, 17 aa, Artificial Sequence
  Description of Artificial Sequence: Synthetic peptide
  XENP021235 vhCDR2
WIDPENGDTEYAPKFQG

SEQ ID NO: 25288 - protein, 9 aa, Artificial Sequence
  Description of Artificial Sequence: Synthetic peptide
  XENP021235 vhCDR3
RGVRQALDY

SEQ ID NO: 25289 - protein, 214 aa, Artificial Sequence; identical to SEQ ID NO: 17250
  Description of Artificial Sequence: Synthetic polypeptide
  XENP021235 2A11_H1.8_L2_Fab Light Chain

SEQ ID NO: 25290 - protein, 107 aa, Artificial Sequence; identical to SEQ ID NO: 17251
  Description of Artificial Sequence: Synthetic polypeptide
  VL of XENP021235

SEQ ID NO: 25291 - protein, 11 aa, Artificial Sequence
  Description of Artificial Sequence: Synthetic peptide
  XENP021235 vlCDR1
QASQDIGNYLN

SEQ ID NO: 25292 - protein, 7 aa, Artificial Sequence
  Description of Artificial Sequence: Synthetic peptide
  XENP021235 vlCDR2
YTSRLHS

SEQ ID NO: 25293 - protein, 9 aa, Artificial Sequence
  Description of Artificial Sequence: Synthetic peptide
  XENP021235 vlCDR3
QQGNTLPYT

SEQ ID NO: 25294 - protein, 223 aa, Artificial Sequence
  Description of Artificial Sequence: Synthetic polypeptide
  XENP021236 2A11_H1.9_L2_Fab Heavy Chain
EVQLVQSGAEVKKPGATVKISCKASGFKIKDYYMHWVQQAPGKGLEWMGWIDPENGDTEYAPKFQGRVTITADTSTNTAYMELSSLRSEDTAVYYCYARGVRQALDYWGQGTLVTVSSASTKGPSVFPLAPSSKSTSGGTAALGCLVKDYFPEPVTVSWNSGALTSGVHTFPAVLQSSGLYSLSSVVTVPSSSLGTQTYICNVNHKPSNTKVDKKVEPKSCGS

SEQ ID NO: 25295 - protein, 118 aa, Artificial Sequence
  Description of Artificial Sequence: Synthetic polypeptide
  VH of XENP021236
EVQLVQSGAEVKKPGATVKISCKASGFKIKDYYMHWVQQAPGKGLEWMGWIDPENGDTEYAPKFQGRVTITADTSTNTAYMELSSLRSEDTAVYYCYARGVRQALDYWGQGTLVTVSS

SEQ ID NO: 25296 - protein, 5 aa, Artificial Sequence
  Description of Artificial Sequence: Synthetic peptide
  XENP021236 vhCDR1
DYYMH

SEQ ID NO: 25297 - protein, 17 aa, Artificial Sequence
  Description of Artificial Sequence: Synthetic peptide
  XENP021236 vhCDR2
WIDPENGDTEYAPKFQG

SEQ ID NO: 25298 - protein, 9 aa, Artificial Sequence
  Description of Artificial Sequence: Synthetic peptide
  XENP021236 vhCDR3
RGVRQALDY

SEQ ID NO: 25299 - protein, 214 aa, Artificial Sequence; identical to SEQ ID NO: 17250
  Description of Artificial Sequence: Synthetic polypeptide
  XENP021236 2A11_H1.9_L2_Fab Light Chain

SEQ ID NO: 25300 - protein, 107 aa, Artificial Sequence; identical to SEQ ID NO: 17251
  Description of Artificial Sequence: Synthetic polypeptide
  VL of XENP021236

SEQ ID NO: 25301 - protein, 11 aa, Artificial Sequence
  Description of Artificial Sequence: Synthetic peptide
  XENP021236 vlCDR1
QASQDIGNYLN

SEQ ID NO: 25302 - protein, 7 aa, Artificial Sequence
  Description of Artificial Sequence: Synthetic peptide
  XENP021236 vlCDR2
YTSRLHS

SEQ ID NO: 25303 - protein, 9 aa, Artificial Sequence
  Description of Artificial Sequence: Synthetic peptide
  XENP021236 vlCDR3
QQGNTLPYT

SEQ ID NO: 25304 - protein, 223 aa, Artificial Sequence
  Description of Artificial Sequence: Synthetic polypeptide
  XENP021237 2A11_H1.10_L2_Fab Heavy Chain
EVQLVQSGAEVKKPGATVKISCKASGFNVKDYYMHWVQQAPGKGLEWMGWIDPENGDTEYAPKFQGRVTITADTSTNTAYMELSSLRSEDTAVYYCYARGVRQALDYWGQGTLVTVSSASTKGPSVFPLAPSSKSTSGGTAALGCLVKDYFPEPVTVSWNSGALTSGVHTFPAVLQSSGLYSLSSVVTVPSSSLGTQTYICNVNHKPSNTKVDKKVEPKSCGS

SEQ ID NO: 25305 - protein, 118 aa, Artificial Sequence
  Description of Artificial Sequence: Synthetic polypeptide
  VH of XENP021237
EVQLVQSGAEVKKPGATVKISCKASGFNVKDYYMHWVQQAPGKGLEWMGWIDPENGDTEYAPKFQGRVTITADTSTNTAYMELSSLRSEDTAVYYCYARGVRQALDYWGQGTLVTVSS

SEQ ID NO: 25306 - protein, 5 aa, Artificial Sequence
  Description of Artificial Sequence: Synthetic peptide
  XENP021237 vhCDR1
DYYMH

SEQ ID NO: 25307 - protein, 17 aa, Artificial Sequence
  Description of Artificial Sequence: Synthetic peptide
  XENP021237 vhCDR2
WIDPENGDTEYAPKFQG

SEQ ID NO: 25308 - protein, 9 aa, Artificial Sequence
  Description of Artificial Sequence: Synthetic peptide
  XENP021237 vhCDR3
RGVRQALDY

SEQ ID NO: 25309 - protein, 214 aa, Artificial Sequence; identical to SEQ ID NO: 17250
  Description of Artificial Sequence: Synthetic polypeptide
  XENP021237 2A11_H1.10_L2_Fab Light Chain

SEQ ID NO: 25310 - protein, 107 aa, Artificial Sequence; identical to SEQ ID NO: 17251
  Description of Artificial Sequence: Synthetic polypeptide
  VL of XENP021237

SEQ ID NO: 25311 - protein, 11 aa, Artificial Sequence
  Description of Artificial Sequence: Synthetic peptide
  XENP021237 vlCDR1
QASQDIGNYLN

SEQ ID NO: 25312 - protein, 7 aa, Artificial Sequence
  Description of Artificial Sequence: Synthetic peptide
  XENP021237 vlCDR2
YTSRLHS

SEQ ID NO: 25313 - protein, 9 aa, Artificial Sequence
  Description of Artificial Sequence: Synthetic peptide
  XENP021237 vlCDR3
QQGNTLPYT

SEQ ID NO: 25314 - protein, 223 aa, Artificial Sequence
  Description of Artificial Sequence: Synthetic polypeptide
  XENP021238 2A11_H1.11_L2_Fab Heavy Chain
EVQLVQSGAEVKKPGATVKISCKASGFNIRDYYMHWVQQAPGKGLEWMGWIDPENGDTEYAPKFQGRVTITADTSTNTAYMELSSLRSEDTAVYYCYARGVRQALDYWGQGTLVTVSSASTKGPSVFPLAPSSKSTSGGTAALGCLVKDYFPEPVTVSWNSGALTSGVHTFPAVLQSSGLYSLSSVVTVPSSSLGTQTYICNVNHKPSNTKVDKKVEPKSCGS

SEQ ID NO: 25315 - protein, 118 aa, Artificial Sequence
  Description of Artificial Sequence: Synthetic polypeptide
  VH of XENP021238
EVQLVQSGAEVKKPGATVKISCKASGFNIRDYYMHWVQQAPGKGLEWMGWIDPENGDTEYAPKFQGRVTITADTSTNTAYMELSSLRSEDTAVYYCYARGVRQALDYWGQGTLVTVSS

SEQ ID NO: 25316 - protein, 5 aa, Artificial Sequence
  Description of Artificial Sequence: Synthetic peptide
  XENP021238 vhCDR1
DYYMH

SEQ ID NO: 25317 - protein, 17 aa, Artificial Sequence
  Description of Artificial Sequence: Synthetic peptide
  XENP021238 vhCDR2
WIDPENGDTEYAPKFQG

SEQ ID NO: 25318 - protein, 9 aa, Artificial Sequence
  Description of Artificial Sequence: Synthetic peptide
  XENP021238 vhCDR3
RGVRQALDY

SEQ ID NO: 25319 - protein, 214 aa, Artificial Sequence; identical to SEQ ID NO: 17250
  Description of Artificial Sequence: Synthetic polypeptide
  XENP021238 2A11_H1.11_L2_Fab Light Chain

SEQ ID NO: 25320 - protein, 107 aa, Artificial Sequence; identical to SEQ ID NO: 17251
  Description of Artificial Sequence: Synthetic polypeptide
  VL of XENP021238

SEQ ID NO: 25321 - protein, 11 aa, Artificial Sequence
  Description of Artificial Sequence: Synthetic peptide
  XENP021238 vlCDR1
QASQDIGNYLN

SEQ ID NO: 25322 - protein, 7 aa, Artificial Sequence
  Description of Artificial Sequence: Synthetic peptide
  XENP021238 vlCDR2
YTSRLHS

SEQ ID NO: 25323 - protein, 9 aa, Artificial Sequence
  Description of Artificial Sequence: Synthetic peptide
  XENP021238 vlCDR3
QQGNTLPYT

SEQ ID NO: 25324 - protein, 223 aa, Artificial Sequence
  Description of Artificial Sequence: Synthetic polypeptide
  XENP021239 2A11_H1.12_L2_Fab Heavy Chain
EVQLVQSGAEVKKPGATVKISCKASGFNIEDYYMHWVQQAPGKGLEWMGWIDPENGDTEYAPKFQGRVTITADTSTNTAYMELSSLRSEDTAVYYCYARGVRQALDYWGQGTLVTVSSASTKGPSVFPLAPSSKSTSGGTAALGCLVKDYFPEPVTVSWNSGALTSGVHTFPAVLQSSGLYSLSSVVTVPSSSLGTQTYICNVNHKPSNTKVDKKVEPKSCGS

SEQ ID NO: 25325 - protein, 118 aa, Artificial Sequence
  Description of Artificial Sequence: Synthetic polypeptide
  VH of XENP021239
EVQLVQSGAEVKKPGATVKISCKASGFNIEDYYMHWVQQAPGKGLEWMGWIDPENGDTEYAPKFQGRVTITADTSTNTAYMELSSLRSEDTAVYYCYARGVRQALDYWGQGTLVTVSS

SEQ ID NO: 25326 - protein, 5 aa, Artificial Sequence
  Description of Artificial Sequence: Synthetic peptide
  XENP021239 vhCDR1
DYYMH

SEQ ID NO: 25327 - protein, 17 aa, Artificial Sequence
  Description of Artificial Sequence: Synthetic peptide
  XENP021239 vhCDR2
WIDPENGDTEYAPKFQG

SEQ ID NO: 25328 - protein, 9 aa, Artificial Sequence
  Description of Artificial Sequence: Synthetic peptide
  XENP021239 vhCDR3
RGVRQALDY

SEQ ID NO: 25329 - protein, 214 aa, Artificial Sequence; identical to SEQ ID NO: 17250
  Description of Artificial Sequence: Synthetic polypeptide
  XENP021239 2A11_H1.12_L2_Fab Light Chain

SEQ ID NO: 25330 - protein, 107 aa, Artificial Sequence; identical to SEQ ID NO: 17251
  Description of Artificial Sequence: Synthetic polypeptide
  VL of XENP021239

SEQ ID NO: 25331 - protein, 11 aa, Artificial Sequence
  Description of Artificial Sequence: Synthetic peptide
  XENP021239 vlCDR1
QASQDIGNYLN

SEQ ID NO: 25332 - protein, 7 aa, Artificial Sequence
  Description of Artificial Sequence: Synthetic peptide
  XENP021239 vlCDR2
YTSRLHS

SEQ ID NO: 25333 - protein, 9 aa, Artificial Sequence
  Description of Artificial Sequence: Synthetic peptide
  XENP021239 vlCDR3
QQGNTLPYT

SEQ ID NO: 25334 - protein, 223 aa, Artificial Sequence
  Description of Artificial Sequence: Synthetic polypeptide
  XENP021240 2A11_H1.13_L2_Fab Heavy Chain
EVQLVQSGAEVKKPGATVKISCKASGFNIHDYYMHWVQQAPGKGLEWMGWIDPENGDTEYAPKFQGRVTITADTSTNTAYMELSSLRSEDTAVYYCYARGVRQALDYWGQGTLVTVSSASTKGPSVFPLAPSSKSTSGGTAALGCLVKDYFPEPVTVSWNSGALTSGVHTFPAVLQSSGLYSLSSVVTVPSSSLGTQTYICNVNHKPSNTKVDKKVEPKSCGS

SEQ ID NO: 25335 - protein, 118 aa, Artificial Sequence
  Description of Artificial Sequence: Synthetic polypeptide
  VH of XENP021240
EVQLVQSGAEVKKPGATVKISCKASGFNIHDYYMHWVQQAPGKGLEWMGWIDPENGDTEYAPKFQGRVTITADTSTNTAYMELSSLRSEDTAVYYCYARGVRQALDYWGQGTLVTVSS

SEQ ID NO: 25336 - protein, 5 aa, Artificial Sequence
  Description of Artificial Sequence: Synthetic peptide
  XENP021240 vhCDR1
DYYMH

SEQ ID NO: 25337 - protein, 17 aa, Artificial Sequence
  Description of Artificial Sequence: Synthetic peptide
  XENP021240 vhCDR2
WIDPENGDTEYAPKFQG

SEQ ID NO: 25338 - protein, 9 aa, Artificial Sequence
  Description of Artificial Sequence: Synthetic peptide
  XENP021240 vhCDR3
RGVRQALDY

SEQ ID NO: 25339 - protein, 214 aa, Artificial Sequence; identical to SEQ ID NO: 17250
  Description of Artificial Sequence: Synthetic polypeptide
  XENP021240 2A11_H1.13_L2_Fab Light Chain

SEQ ID NO: 25340 - protein, 107 aa, Artificial Sequence; identical to SEQ ID NO: 17251
  Description of Artificial Sequence: Synthetic polypeptide
  VL of XENP021240

SEQ ID NO: 25341 - protein, 11 aa, Artificial Sequence
  Description of Artificial Sequence: Synthetic peptide
  XENP021240 vlCDR1
QASQDIGNYLN

SEQ ID NO: 25342 - protein, 7 aa, Artificial Sequence
  Description of Artificial Sequence: Synthetic peptide
  XENP021240 vlCDR2
YTSRLHS

SEQ ID NO: 25343 - protein, 9 aa, Artificial Sequence
  Description of Artificial Sequence: Synthetic peptide
  XENP021240 vlCDR3
QQGNTLPYT

SEQ ID NO: 25344 - protein, 223 aa, Artificial Sequence
  Description of Artificial Sequence: Synthetic polypeptide
  XENP021241 2A11_H1.14_L2_Fab Heavy Chain
EVQLVQSGAEVKKPGATVKISCKASGFNILDYYMHWVQQAPGKGLEWMGWIDPENGDTEYAPKFQGRVTITADTSTNTAYMELSSLRSEDTAVYYCYARGVRQALDYWGQGTLVTVSSASTKGPSVFPLAPSSKSTSGGTAALGCLVKDYFPEPVTVSWNSGALTSGVHTFPAVLQSSGLYSLSSVVTVPSSSLGTQTYICNVNHKPSNTKVDKKVEPKSCGS

SEQ ID NO: 25345 - protein, 118 aa, Artificial Sequence
  Description of Artificial Sequence: Synthetic polypeptide
  VH of XENP021241
EVQLVQSGAEVKKPGATVKISCKASGFNILDYYMHWVQQAPGKGLEWMGWIDPENGDTEYAPKFQGRVTITADTSTNTAYMELSSLRSEDTAVYYCYARGVRQALDYWGQGTLVTVSS

SEQ ID NO: 25346 - protein, 5 aa, Artificial Sequence
  Description of Artificial Sequence: Synthetic peptide
  XENP021241 vhCDR1
DYYMH

SEQ ID NO: 25347 - protein, 17 aa, Artificial Sequence
  Description of Artificial Sequence: Synthetic peptide
  XENP021241 vhCDR2
WIDPENGDTEYAPKFQG

SEQ ID NO: 25348 - protein, 9 aa, Artificial Sequence
  Description of Artificial Sequence: Synthetic peptide
  XENP021241 vhCDR3
RGVRQALDY

SEQ ID NO: 25349 - protein, 214 aa, Artificial Sequence; identical to SEQ ID NO: 17250
  Description of Artificial Sequence: Synthetic polypeptide
  XENP021241 2A11_H1.14_L2_Fab Light Chain

SEQ ID NO: 25350 - protein, 107 aa, Artificial Sequence; identical to SEQ ID NO: 17251
  Description of Artificial Sequence: Synthetic polypeptide
  VL of XENP021241

SEQ ID NO: 25351 - protein, 11 aa, Artificial Sequence
  Description of Artificial Sequence: Synthetic peptide
  XENP021241 vlCDR1
QASQDIGNYLN

SEQ ID NO: 25352 - protein, 7 aa, Artificial Sequence
  Description of Artificial Sequence: Synthetic peptide
  XENP021241 vlCDR2
YTSRLHS

SEQ ID NO: 25353 - protein, 9 aa, Artificial Sequence
  Description of Artificial Sequence: Synthetic peptide
  XENP021241 vlCDR3
QQGNTLPYT

SEQ ID NO: 25354 - protein, 223 aa, Artificial Sequence
  Description of Artificial Sequence: Synthetic polypeptide
  XENP021242 2A11_H1.15_L2_Fab Heavy Chain
EVQLVQSGAEVKKPGATVKISCKASGFNIDDYYMHWVQQAPGKGLEWMGWIDPENGDTEYAPKFQGRVTITADTSTNTAYMELSSLRSEDTAVYYCYARGVRQALDYWGQGTLVTVSSASTKGPSVFPLAPSSKSTSGGTAALGCLVKDYFPEPVTVSWNSGALTSGVHTFPAVLQSSGLYSLSSVVTVPSSSLGTQTYICNVNHKPSNTKVDKKVEPKSCGS

SEQ ID NO: 25355 - protein, 118 aa, Artificial Sequence
  Description of Artificial Sequence: Synthetic polypeptide
  VH of XENP021242
EVQLVQSGAEVKKPGATVKISCKASGFNIDDYYMHWVQQAPGKGLEWMGWIDPENGDTEYAPKFQGRVTITADTSTNTAYMELSSLRSEDTAVYYCYARGVRQALDYWGQGTLVTVSS

SEQ ID NO: 25356 - protein, 5 aa, Artificial Sequence
  Description of Artificial Sequence: Synthetic peptide
  XENP021242 vhCDR1
DYYMH

SEQ ID NO: 25357 - protein, 17 aa, Artificial Sequence
  Description of Artificial Sequence: Synthetic peptide
  XENP021242 vhCDR2
WIDPENGDTEYAPKFQG

SEQ ID NO: 25358 - protein, 9 aa, Artificial Sequence
  Description of Artificial Sequence: Synthetic peptide
  XENP021242 vhCDR3
RGVRQALDY

SEQ ID NO: 25359 - protein, 214 aa, Artificial Sequence; identical to SEQ ID NO: 17250
  Description of Artificial Sequence: Synthetic polypeptide
  XENP021242 2A11_H1.15_L2_Fab Light Chain

SEQ ID NO: 25360 - protein, 107 aa, Artificial Sequence; identical to SEQ ID NO: 17251
  Description of Artificial Sequence: Synthetic polypeptide
  VL of XENP021242

SEQ ID NO: 25361 - protein, 11 aa, Artificial Sequence
  Description of Artificial Sequence: Synthetic peptide
  XENP021242 vlCDR1
QASQDIGNYLN

SEQ ID NO: 25362 - protein, 7 aa, Artificial Sequence
  Description of Artificial Sequence: Synthetic peptide
  XENP021242 vlCDR2
YTSRLHS

SEQ ID NO: 25363 - protein, 9 aa, Artificial Sequence
  Description of Artificial Sequence: Synthetic peptide
  XENP021242 vlCDR3
QQGNTLPYT

SEQ ID NO: 25364 - protein, 223 aa, Artificial Sequence
  Description of Artificial Sequence: Synthetic polypeptide
  XENP021243 2A11_H1.16_L2_Fab Heavy Chain
EVQLVQSGAEVKKPGATVKISCKASGFNIADYYMHWVQQAPGKGLEWMGWIDPENGDTEYAPKFQGRVTITADTSTNTAYMELSSLRSEDTAVYYCYARGVRQALDYWGQGTLVTVSSASTKGPSVFPLAPSSKSTSGGTAALGCLVKDYFPEPVTVSWNSGALTSGVHTFPAVLQSSGLYSLSSVVTVPSSSLGTQTYICNVNHKPSNTKVDKKVEPKSCGS

SEQ ID NO: 25365 - protein, 118 aa, Artificial Sequence
  Description of Artificial Sequence: Synthetic polypeptide
  VH of XENP021243
EVQLVQSGAEVKKPGATVKISCKASGFNIADYYMHWVQQAPGKGLEWMGWIDPENGDTEYAPKFQGRVTITADTSTNTAYMELSSLRSEDTAVYYCYARGVRQALDYWGQGTLVTVSS

SEQ ID NO: 25366 - protein, 5 aa, Artificial Sequence
  Description of Artificial Sequence: Synthetic peptide
  XENP021243 vhCDR1
DYYMH

SEQ ID NO: 25367 - protein, 17 aa, Artificial Sequence
  Description of Artificial Sequence: Synthetic peptide
  XENP021243 vhCDR2
WIDPENGDTEYAPKFQG

SEQ ID NO: 25368 - protein, 9 aa, Artificial Sequence
  Description of Artificial Sequence: Synthetic peptide
  XENP021243 vhCDR3
RGVRQALDY

SEQ ID NO: 25369 - protein, 214 aa, Artificial Sequence; identical to SEQ ID NO: 17250
  Description of Artificial Sequence: Synthetic polypeptide
  XENP021243 2A11_H1.16_L2_Fab Light Chain

SEQ ID NO: 25370 - protein, 107 aa, Artificial Sequence; identical to SEQ ID NO: 17251
  Description of Artificial Sequence: Synthetic polypeptide
  VL of XENP021243

SEQ ID NO: 25371 - protein, 11 aa, Artificial Sequence
  Description of Artificial Sequence: Synthetic peptide
  XENP021243 vlCDR1
QASQDIGNYLN

SEQ ID NO: 25372 - protein, 7 aa, Artificial Sequence
  Description of Artificial Sequence: Synthetic peptide
  XENP021243 vlCDR2
YTSRLHS

SEQ ID NO: 25373 - protein, 9 aa, Artificial Sequence
  Description of Artificial Sequence: Synthetic peptide
  XENP021243 vlCDR3
QQGNTLPYT

SEQ ID NO: 25374 - protein, 223 aa, Artificial Sequence
  Description of Artificial Sequence: Synthetic polypeptide
  XENP021244 2A11_H1.17_L2_Fab Heavy Chain
EVQLVQSGAEVKKPGATVKISCKASGFNIGDYYMHWVQQAPGKGLEWMGWIDPENGDTEYAPKFQGRVTITADTSTNTAYMELSSLRSEDTAVYYCYARGVRQALDYWGQGTLVTVSSASTKGPSVFPLAPSSKSTSGGTAALGCLVKDYFPEPVTVSWNSGALTSGVHTFPAVLQSSGLYSLSSVVTVPSSSLGTQTYICNVNHKPSNTKVDKKVEPKSCGS

SEQ ID NO: 25375 - protein, 118 aa, Artificial Sequence
  Description of Artificial Sequence: Synthetic polypeptide
  VH of XENP021244
EVQLVQSGAEVKKPGATVKISCKASGFNIGDYYMHWVQQAPGKGLEWMGWIDPENGDTEYAPKFQGRVTITADTSTNTAYMELSSLRSEDTAVYYCYARGVRQALDYWGQGTLVTVSS

SEQ ID NO: 25376 - protein, 5 aa, Artificial Sequence
  Description of Artificial Sequence: Synthetic peptide
  XENP021244 vhCDR1
DYYMH

SEQ ID NO: 25377 - protein, 17 aa, Artificial Sequence
  Description of Artificial Sequence: Synthetic peptide
  XENP021244 vhCDR2
WIDPENGDTEYAPKFQG

SEQ ID NO: 25378 - protein, 9 aa, Artificial Sequence
  Description of Artificial Sequence: Synthetic peptide
  XENP021244 vhCDR3
RGVRQALDY

SEQ ID NO: 25379 - protein, 214 aa, Artificial Sequence; identical to SEQ ID NO: 17250
  Description of Artificial Sequence: Synthetic polypeptide
  XENP021244 2A11_H1.17_L2_Fab Light Chain

SEQ ID NO: 25380 - protein, 107 aa, Artificial Sequence; identical to SEQ ID NO: 17251
  Description of Artificial Sequence: Synthetic polypeptide
  VL of XENP021244

SEQ ID NO: 25381 - protein, 11 aa, Artificial Sequence
  Description of Artificial Sequence: Synthetic peptide
  XENP021244 vlCDR1
QASQDIGNYLN

SEQ ID NO: 25382 - protein, 7 aa, Artificial Sequence
  Description of Artificial Sequence: Synthetic peptide
  XENP021244 vlCDR2
YTSRLHS

SEQ ID NO: 25383 - protein, 9 aa, Artificial Sequence
  Description of Artificial Sequence: Synthetic peptide
  XENP021244 vlCDR3
QQGNTLPYT

SEQ ID NO: 25384 - protein, 223 aa, Artificial Sequence
  Description of Artificial Sequence: Synthetic polypeptide
  XENP021245 2A11_H1.18_L2_Fab Heavy Chain
EVQLVQSGAEVKKPGATVKISCKASGFNIYDYYMHWVQQAPGKGLEWMGWIDPENGDTEYAPKFQGRVTITADTSTNTAYMELSSLRSEDTAVYYCYARGVRQALDYWGQGTLVTVSSASTKGPSVFPLAPSSKSTSGGTAALGCLVKDYFPEPVTVSWNSGALTSGVHTFPAVLQSSGLYSLSSVVTVPSSSLGTQTYICNVNHKPSNTKVDKKVEPKSCGS

SEQ ID NO: 25385 - protein, 118 aa, Artificial Sequence
  Description of Artificial Sequence: Synthetic polypeptide
  VH of XENP021245
EVQLVQSGAEVKKPGATVKISCKASGFNIYDYYMHWVQQAPGKGLEWMGWIDPENGDTEYAPKFQGRVTITADTSTNTAYMELSSLRSEDTAVYYCYARGVRQALDYWGQGTLVTVSS

SEQ ID NO: 25386 - protein, 5 aa, Artificial Sequence
  Description of Artificial Sequence: Synthetic peptide
  XENP021245 vhCDR1
DYYMH

SEQ ID NO: 25387 - protein, 17 aa, Artificial Sequence
  Description of Artificial Sequence: Synthetic peptide
  XENP021245 vhCDR2
WIDPENGDTEYAPKFQG

SEQ ID NO: 25388 - protein, 9 aa, Artificial Sequence
  Description of Artificial Sequence: Synthetic peptide
  XENP021245 vhCDR3
RGVRQALDY

SEQ ID NO: 25389 - protein, 214 aa, Artificial Sequence; identical to SEQ ID NO: 17250
  Description of Artificial Sequence: Synthetic polypeptide
  XENP021245 2A11_H1.18_L2_Fab Light Chain

SEQ ID NO: 25390 - protein, 107 aa, Artificial Sequence; identical to SEQ ID NO: 17251
  Description of Artificial Sequence: Synthetic polypeptide
  VL of XENP021245

SEQ ID NO: 25391 - protein, 11 aa, Artificial Sequence
  Description of Artificial Sequence: Synthetic peptide
  XENP021245 vlCDR1
QASQDIGNYLN

SEQ ID NO: 25392 - protein, 7 aa, Artificial Sequence
  Description of Artificial Sequence: Synthetic peptide
  XENP021245 vlCDR2
YTSRLHS

SEQ ID NO: 25393 - protein, 9 aa, Artificial Sequence
  Description of Artificial Sequence: Synthetic peptide
  XENP021245 vlCDR3
QQGNTLPYT

SEQ ID NO: 25394 - protein, 223 aa, Artificial Sequence
  Description of Artificial Sequence: Synthetic polypeptide
  XENP021246 2A11_H1.19_L2_Fab Heavy Chain
EVQLVQSGAEVKKPGATVKISCKASGFNIIDYYMHWVQQAPGKGLEWMGWIDPENGDTEYAPKFQGRVTITADTSTNTAYMELSSLRSEDTAVYYCYARGVRQALDYWGQGTLVTVSSASTKGPSVFPLAPSSKSTSGGTAALGCLVKDYFPEPVTVSWNSGALTSGVHTFPAVLQSSGLYSLSSVVTVPSSSLGTQTYICNVNHKPSNTKVDKKVEPKSCGS

SEQ ID NO: 25395 - protein, 118 aa, Artificial Sequence
  Description of Artificial Sequence: Synthetic polypeptide
  VH of XENP021246
EVQLVQSGAEVKKPGATVKISCKASGFNIIDYYMHWVQQAPGKGLEWMGWIDPENGDTEYAPKFQGRVTITADTSTNTAYMELSSLRSEDTAVYYCYARGVRQALDYWGQGTLVTVSS

SEQ ID NO: 25396 - protein, 5 aa, Artificial Sequence
  Description of Artificial Sequence: Synthetic peptide
  XENP021246 vhCDR1
DYYMH

SEQ ID NO: 25397 - protein, 17 aa, Artificial Sequence
  Description of Artificial Sequence: Synthetic peptide
  XENP021246 vhCDR2
WIDPENGDTEYAPKFQG

SEQ ID NO: 25398 - protein, 9 aa, Artificial Sequence
  Description of Artificial Sequence: Synthetic peptide
  XENP021246 vhCDR3
RGVRQALDY

SEQ ID NO: 25399 - protein, 214 aa, Artificial Sequence; identical to SEQ ID NO: 17250
  Description of Artificial Sequence: Synthetic polypeptide
  XENP021246 2A11_H1.19_L2_Fab Light Chain

SEQ ID NO: 25400 - protein, 107 aa, Artificial Sequence; identical to SEQ ID NO: 17251
  Description of Artificial Sequence: Synthetic polypeptide
  VL of XENP021246

SEQ ID NO: 25401 - protein, 11 aa, Artificial Sequence
  Description of Artificial Sequence: Synthetic peptide
  XENP021246 vlCDR1
QASQDIGNYLN

SEQ ID NO: 25402 - protein, 7 aa, Artificial Sequence
  Description of Artificial Sequence: Synthetic peptide
  XENP021246 vlCDR2
YTSRLHS

SEQ ID NO: 25403 - protein, 9 aa, Artificial Sequence
  Description of Artificial Sequence: Synthetic peptide
  XENP021246 vlCDR3
QQGNTLPYT

SEQ ID NO: 25404 - protein, 223 aa, Artificial Sequence
  Description of Artificial Sequence: Synthetic polypeptide
  XENP021247 2A11_H1.20_L2_Fab Heavy Chain
EVQLVQSGAEVKKPGATVKISCKASGFNIKNYYMHWVQQAPGKGLEWMGWIDPENGDTEYAPKFQGRVTITADTSTNTAYMELSSLRSEDTAVYYCYARGVRQALDYWGQGTLVTVSSASTKGPSVFPLAPSSKSTSGGTAALGCLVKDYFPEPVTVSWNSGALTSGVHTFPAVLQSSGLYSLSSVVTVPSSSLGTQTYICNVNHKPSNTKVDKKVEPKSCGS

SEQ ID NO: 25405 - protein, 118 aa, Artificial Sequence
  Description of Artificial Sequence: Synthetic polypeptide
  VH of XENP021247
EVQLVQSGAEVKKPGATVKISCKASGFNIKNYYMHWVQQAPGKGLEWMGWIDPENGDTEYAPKFQGRVTITADTSTNTAYMELSSLRSEDTAVYYCYARGVRQALDYWGQGTLVTVSS

SEQ ID NO: 25406 - protein, 5 aa, Artificial Sequence
  Description of Artificial Sequence: Synthetic peptide
  XENP021247 vhCDR1
NYYMH

SEQ ID NO: 25407 - protein, 17 aa, Artificial Sequence
  Description of Artificial Sequence: Synthetic peptide
  XENP021247 vhCDR2
WIDPENGDTEYAPKFQG

SEQ ID NO: 25408 - protein, 9 aa, Artificial Sequence
  Description of Artificial Sequence: Synthetic peptide
  XENP021247 vhCDR3
RGVRQALDY

SEQ ID NO: 25409 - protein, 214 aa, Artificial Sequence; identical to SEQ ID NO: 17250
  Description of Artificial Sequence: Synthetic polypeptide
  XENP021247 2A11_H1.20_L2_Fab Light Chain

SEQ ID NO: 25410 - protein, 107 aa, Artificial Sequence; identical to SEQ ID NO: 17251
  Description of Artificial Sequence: Synthetic polypeptide
  VL of XENP021247

SEQ ID NO: 25411 - protein, 11 aa, Artificial Sequence
  Description of Artificial Sequence: Synthetic peptide
  XENP021247 vlCDR1
QASQDIGNYLN

SEQ ID NO: 25412 - protein, 7 aa, Artificial Sequence
  Description of Artificial Sequence: Synthetic peptide
  XENP021247 vlCDR2
YTSRLHS

SEQ ID NO: 25413 - protein, 9 aa, Artificial Sequence
  Description of Artificial Sequence: Synthetic peptide
  XENP021247 vlCDR3
QQGNTLPYT

SEQ ID NO: 25414 - protein, 223 aa, Artificial Sequence
  Description of Artificial Sequence: Synthetic polypeptide
  XENP021248 2A11_H1.21_L2_Fab Heavy Chain
EVQLVQSGAEVKKPGATVKISCKASGFNIKEYYMHWVQQAPGKGLEWMGWIDPENGDTEYAPKFQGRVTITADTSTNTAYMELSSLRSEDTAVYYCYARGVRQALDYWGQGTLVTVSSASTKGPSVFPLAPSSKSTSGGTAALGCLVKDYFPEPVTVSWNSGALTSGVHTFPAVLQSSGLYSLSSVVTVPSSSLGTQTYICNVNHKPSNTKVDKKVEPKSCGS

SEQ ID NO: 25415 - protein, 118 aa, Artificial Sequence
  Description of Artificial Sequence: Synthetic polypeptide
  VH of XENP021248
EVQLVQSGAEVKKPGATVKISCKASGFNIKEYYMHWVQQAPGKGLEWMGWIDPENGDTEYAPKFQGRVTITADTSTNTAYMELSSLRSEDTAVYYCYARGVRQALDYWGQGTLVTVSS

SEQ ID NO: 25416 - protein, 5 aa, Artificial Sequence
  Description of Artificial Sequence: Synthetic peptide
  XENP021248 vhCDR1
EYYMH

SEQ ID NO: 25417 - protein, 17 aa, Artificial Sequence
  Description of Artificial Sequence: Synthetic peptide
  XENP021248 vhCDR2
WIDPENGDTEYAPKFQG

SEQ ID NO: 25418 - protein, 9 aa, Artificial Sequence
  Description of Artificial Sequence: Synthetic peptide
  XENP021248 vhCDR3
RGVRQALDY

SEQ ID NO: 25419 - protein, 214 aa, Artificial Sequence; identical to SEQ ID NO: 17250
  Description of Artificial Sequence: Synthetic polypeptide
  XENP021248 2A11_H1.21_L2_Fab Light Chain

SEQ ID NO: 25420 - protein, 107 aa, Artificial Sequence; identical to SEQ ID NO: 17251
  Description of Artificial Sequence: Synthetic polypeptide
  VL of XENP021248

SEQ ID NO: 25421 - protein, 11 aa, Artificial Sequence
  Description of Artificial Sequence: Synthetic peptide
  XENP021248 vlCDR1
QASQDIGNYLN

SEQ ID NO: 25422 - protein, 7 aa, Artificial Sequence
  Description of Artificial Sequence: Synthetic peptide
  XENP021248 vlCDR2
YTSRLHS

SEQ ID NO: 25423 - protein, 9 aa, Artificial Sequence
  Description of Artificial Sequence: Synthetic peptide
  XENP021248 vlCDR3
QQGNTLPYT

SEQ ID NO: 25424 - protein, 223 aa, Artificial Sequence
  Description of Artificial Sequence: Synthetic polypeptide
  XENP021249 2A11_H1.22_L2_Fab Heavy Chain
EVQLVQSGAEVKKPGATVKISCKASGFNIKHYYMHWVQQAPGKGLEWMGWIDPENGDTEYAPKFQGRVTITADTSTNTAYMELSSLRSEDTAVYYCYARGVRQALDYWGQGTLVTVSSASTKGPSVFPLAPSSKSTSGGTAALGCLVKDYFPEPVTVSWNSGALTSGVHTFPAVLQSSGLYSLSSVVTVPSSSLGTQTYICNVNHKPSNTKVDKKVEPKSCGS

SEQ ID NO: 25425 - protein, 118 aa, Artificial Sequence
  Description of Artificial Sequence: Synthetic polypeptide
  VH of XENP021249
EVQLVQSGAEVKKPGATVKISCKASGFNIKHYYMHWVQQAPGKGLEWMGWIDPENGDTEYAPKFQGRVTITADTSTNTAYMELSSLRSEDTAVYYCYARGVRQALDYWGQGTLVTVSS

SEQ ID NO: 25426 - protein, 5 aa, Artificial Sequence
  Description of Artificial Sequence: Synthetic peptide
  XENP021249 vhCDR1
HYYMH

SEQ ID NO: 25427 - protein, 17 aa, Artificial Sequence
  Description of Artificial Sequence: Synthetic peptide
  XENP021249 vhCDR2
WIDPENGDTEYAPKFQG

SEQ ID NO: 25428 - protein, 9 aa, Artificial Sequence
  Description of Artificial Sequence: Synthetic peptide
  XENP021249 vhCDR3
RGVRQALDY

SEQ ID NO: 25429 - protein, 214 aa, Artificial Sequence; identical to SEQ ID NO: 17250
  Description of Artificial Sequence: Synthetic polypeptide
  XENP021249 2A11_H1.22_L2_Fab Light Chain

SEQ ID NO: 25430 - protein, 107 aa, Artificial Sequence; identical to SEQ ID NO: 17251
  Description of Artificial Sequence: Synthetic polypeptide
  VL of XENP021249

SEQ ID NO: 25431 - protein, 11 aa, Artificial Sequence
  Description of Artificial Sequence: Synthetic peptide
  XENP021249 vlCDR1
QASQDIGNYLN

SEQ ID NO: 25432 - protein, 7 aa, Artificial Sequence
  Description of Artificial Sequence: Synthetic peptide
  XENP021249 vlCDR2
YTSRLHS

SEQ ID NO: 25433 - protein, 9 aa, Artificial Sequence
  Description of Artificial Sequence: Synthetic peptide
  XENP021249 vlCDR3
QQGNTLPYT

SEQ ID NO: 25434 - protein, 223 aa, Artificial Sequence
  Description of Artificial Sequence: Synthetic polypeptide
  XENP021250 2A11_H1.23_L2_Fab Heavy Chain
EVQLVQSGAEVKKPGATVKISCKASGFNIKSYYMHWVQQAPGKGLEWMGWIDPENGDTEYAPKFQGRVTITADTSTNTAYMELSSLRSEDTAVYYCYARGVRQALDYWGQGTLVTVSSASTKGPSVFPLAPSSKSTSGGTAALGCLVKDYFPEPVTVSWNSGALTSGVHTFPAVLQSSGLYSLSSVVTVPSSSLGTQTYICNVNHKPSNTKVDKKVEPKSCGS

SEQ ID NO: 25435 - protein, 118 aa, Artificial Sequence
  Description of Artificial Sequence: Synthetic polypeptide
  VH of XENP021250
EVQLVQSGAEVKKPGATVKISCKASGFNIKSYYMHWVQQAPGKGLEWMGWIDPENGDTEYAPKFQGRVTITADTSTNTAYMELSSLRSEDTAVYYCYARGVRQALDYWGQGTLVTVSS

SEQ ID NO: 25436 - protein, 5 aa, Artificial Sequence
  Description of Artificial Sequence: Synthetic peptide
  XENP021250 vhCDR1
SYYMH

SEQ ID NO: 25437 - protein, 17 aa, Artificial Sequence
  Description of Artificial Sequence: Synthetic peptide
  XENP021250 vhCDR2
WIDPENGDTEYAPKFQG

SEQ ID NO: 25438 - protein, 9 aa, Artificial Sequence
  Description of Artificial Sequence: Synthetic peptide
  XENP021250 vhCDR3
RGVRQALDY

SEQ ID NO: 25439 - protein, 214 aa, Artificial Sequence; identical to SEQ ID NO: 17250
  Description of Artificial Sequence: Synthetic polypeptide
  XENP021250 2A11_H1.23_L2_Fab Light Chain

SEQ ID NO: 25440 - protein, 107 aa, Artificial Sequence; identical to SEQ ID NO: 17251
  Description of Artificial Sequence: Synthetic polypeptide
  VL of XENP021250

SEQ ID NO: 25441 - protein, 11 aa, Artificial Sequence
  Description of Artificial Sequence: Synthetic peptide
  XENP021250 vlCDR1
QASQDIGNYLN

SEQ ID NO: 25442 - protein, 7 aa, Artificial Sequence
  Description of Artificial Sequence: Synthetic peptide
  XENP021250 vlCDR2
YTSRLHS

SEQ ID NO: 25443 - protein, 9 aa, Artificial Sequence
  Description of Artificial Sequence: Synthetic peptide
  XENP021250 vlCDR3
QQGNTLPYT

SEQ ID NO: 25444 - protein, 223 aa, Artificial Sequence
  Description of Artificial Sequence: Synthetic polypeptide
  XENP021251 2A11_H1.24_L2_Fab Heavy Chain
EVQLVQSGAEVKKPGATVKISCKASGFNIKKYYMHWVQQAPGKGLEWMGWIDPENGDTEYAPKFQGRVTITADTSTNTAYMELSSLRSEDTAVYYCYARGVRQALDYWGQGTLVTVSSASTKGPSVFPLAPSSKSTSGGTAALGCLVKDYFPEPVTVSWNSGALTSGVHTFPAVLQSSGLYSLSSVVTVPSSSLGTQTYICNVNHKPSNTKVDKKVEPKSCGS

SEQ ID NO: 25445 - protein, 118 aa, Artificial Sequence
  Description of Artificial Sequence: Synthetic polypeptide
  VH of XENP021251
EVQLVQSGAEVKKPGATVKISCKASGFNIKKYYMHWVQQAPGKGLEWMGWIDPENGDTEYAPKFQGRVTITADTSTNTAYMELSSLRSEDTAVYYCYARGVRQALDYWGQGTLVTVSS

SEQ ID NO: 25446 - protein, 5 aa, Artificial Sequence
  Description of Artificial Sequence: Synthetic peptide
  XENP021251 vhCDR1
KYYMH

SEQ ID NO: 25447 - protein, 17 aa, Artificial Sequence
  Description of Artificial Sequence: Synthetic peptide
  XENP021251 vhCDR2
WIDPENGDTEYAPKFQG

SEQ ID NO: 25448 - protein, 9 aa, Artificial Sequence
  Description of Artificial Sequence: Synthetic peptide
  XENP021251 vhCDR3
RGVRQALDY

SEQ ID NO: 25449 - protein, 214 aa, Artificial Sequence; identical to SEQ ID NO: 17250
  Description of Artificial Sequence: Synthetic polypeptide
  XENP021251 2A11_H1.24_L2_Fab Light Chain

SEQ ID NO: 25450 - protein, 107 aa, Artificial Sequence; identical to SEQ ID NO: 17251
  Description of Artificial Sequence: Synthetic polypeptide
  VL of XENP021251

SEQ ID NO: 25451 - protein, 11 aa, Artificial Sequence
  Description of Artificial Sequence: Synthetic peptide
  XENP021251 vlCDR1
QASQDIGNYLN

SEQ ID NO: 25452 - protein, 7 aa, Artificial Sequence
  Description of Artificial Sequence: Synthetic peptide
  XENP021251 vlCDR2
YTSRLHS

SEQ ID NO: 25453 - protein, 9 aa, Artificial Sequence
  Description of Artificial Sequence: Synthetic peptide
  XENP021251 vlCDR3
QQGNTLPYT

SEQ ID NO: 25454 - protein, 223 aa, Artificial Sequence
  Description of Artificial Sequence: Synthetic polypeptide
  XENP021252 2A11_H1.25_L2_Fab Heavy Chain
EVQLVQSGAEVKKPGATVKISCKASGFNIKLYYMHWVQQAPGKGLEWMGWIDPENGDTEYAPKFQGRVTITADTSTNTAYMELSSLRSEDTAVYYCYARGVRQALDYWGQGTLVTVSSASTKGPSVFPLAPSSKSTSGGTAALGCLVKDYFPEPVTVSWNSGALTSGVHTFPAVLQSSGLYSLSSVVTVPSSSLGTQTYICNVNHKPSNTKVDKKVEPKSCGS

SEQ ID NO: 25455 - protein, 118 aa, Artificial Sequence
  Description of Artificial Sequence: Synthetic polypeptide
  VH of XENP021252
EVQLVQSGAEVKKPGATVKISCKASGFNIKLYYMHWVQQAPGKGLEWMGWIDPENGDTEYAPKFQGRVTITADTSTNTAYMELSSLRSEDTAVYYCYARGVRQALDYWGQGTLVTVSS

SEQ ID NO: 25456 - protein, 5 aa, Artificial Sequence
  Description of Artificial Sequence: Synthetic peptide
  XENP021252 vhCDR1
LYYMH

SEQ ID NO: 25457 - protein, 17 aa, Artificial Sequence
  Description of Artificial Sequence: Synthetic peptide
  XENP021252 vhCDR2
WIDPENGDTEYAPKFQG

SEQ ID NO: 25458 - protein, 9 aa, Artificial Sequence
  Description of Artificial Sequence: Synthetic peptide
  XENP021252 vhCDR3
RGVRQALDY

SEQ ID NO: 25459 - protein, 214 aa, Artificial Sequence; identical to SEQ ID NO: 17250
  Description of Artificial Sequence: Synthetic polypeptide
  XENP021252 2A11_H1.25_L2_Fab Light Chain

SEQ ID NO: 25460 - protein, 107 aa, Artificial Sequence; identical to SEQ ID NO: 17251
  Description of Artificial Sequence: Synthetic polypeptide
  VL of XENP021252

SEQ ID NO: 25461 - protein, 11 aa, Artificial Sequence
  Description of Artificial Sequence: Synthetic peptide
  XENP021252 vlCDR1
QASQDIGNYLN

SEQ ID NO: 25462 - protein, 7 aa, Artificial Sequence
  Description of Artificial Sequence: Synthetic peptide
  XENP021252 vlCDR2
YTSRLHS

SEQ ID NO: 25463 - protein, 9 aa, Artificial Sequence
  Description of Artificial Sequence: Synthetic peptide
  XENP021252 vlCDR3
QQGNTLPYT

SEQ ID NO: 25464 - protein, 223 aa, Artificial Sequence
  Description of Artificial Sequence: Synthetic polypeptide
  XENP021253 2A11_H1.26_L2_Fab Heavy Chain
EVQLVQSGAEVKKPGATVKISCKASGFNIKTYYMHWVQQAPGKGLEWMGWIDPENGDTEYAPKFQGRVTITADTSTNTAYMELSSLRSEDTAVYYCYARGVRQALDYWGQGTLVTVSSASTKGPSVFPLAPSSKSTSGGTAALGCLVKDYFPEPVTVSWNSGALTSGVHTFPAVLQSSGLYSLSSVVTVPSSSLGTQTYICNVNHKPSNTKVDKKVEPKSCGS

SEQ ID NO: 25465 - protein, 118 aa, Artificial Sequence
  Description of Artificial Sequence: Synthetic polypeptide
  VH of XENP021253
EVQLVQSGAEVKKPGATVKISCKASGFNIKTYYMHWVQQAPGKGLEWMGWIDPENGDTEYAPKFQGRVTITADTSTNTAYMELSSLRSEDTAVYYCYARGVRQALDYWGQGTLVTVSS

SEQ ID NO: 25466 - protein, 5 aa, Artificial Sequence
  Description of Artificial Sequence: Synthetic peptide
  XENP021253 vhCDR1
TYYMH

SEQ ID NO: 25467 - protein, 17 aa, Artificial Sequence
  Description of Artificial Sequence: Synthetic peptide
  XENP021253 vhCDR2
WIDPENGDTEYAPKFQG

SEQ ID NO: 25468 - protein, 9 aa, Artificial Sequence
  Description of Artificial Sequence: Synthetic peptide
  XENP021253 vhCDR3
RGVRQALDY

SEQ ID NO: 25469 - protein, 214 aa, Artificial Sequence; identical to SEQ ID NO: 17250
  Description of Artificial Sequence: Synthetic polypeptide
  XENP021253 2A11_H1.26_L2_Fab Light Chain

SEQ ID NO: 25470 - protein, 107 aa, Artificial Sequence; identical to SEQ ID NO: 17251
  Description of Artificial Sequence: Synthetic polypeptide
  VL of XENP021253

SEQ ID NO: 25471 - protein, 11 aa, Artificial Sequence
  Description of Artificial Sequence: Synthetic peptide
  XENP021253 vlCDR1
QASQDIGNYLN

SEQ ID NO: 25472 - protein, 7 aa, Artificial Sequence
  Description of Artificial Sequence: Synthetic peptide
  XENP021253 vlCDR2
YTSRLHS

SEQ ID NO: 25473 - protein, 9 aa, Artificial Sequence
  Description of Artificial Sequence: Synthetic peptide
  XENP021253 vlCDR3
QQGNTLPYT

SEQ ID NO: 25474 - protein, 223 aa, Artificial Sequence
  Description of Artificial Sequence: Synthetic polypeptide
  XENP021254 2A11_H1.27_L2_Fab Heavy Chain
EVQLVQSGAEVKKPGATVKISCKASGFNIKQYYMHWVQQAPGKGLEWMGWIDPENGDTEYAPKFQGRVTITADTSTNTAYMELSSLRSEDTAVYYCYARGVRQALDYWGQGTLVTVSSASTKGPSVFPLAPSSKSTSGGTAALGCLVKDYFPEPVTVSWNSGALTSGVHTFPAVLQSSGLYSLSSVVTVPSSSLGTQTYICNVNHKPSNTKVDKKVEPKSCGS

SEQ ID NO: 25475 - protein, 118 aa, Artificial Sequence
  Description of Artificial Sequence: Synthetic polypeptide
  VH of XENP021254
EVQLVQSGAEVKKPGATVKISCKASGFNIKQYYMHWVQQAPGKGLEWMGWIDPENGDTEYAPKFQGRVTITADTSTNTAYMELSSLRSEDTAVYYCYARGVRQALDYWGQGTLVTVSS

SEQ ID NO: 25476 - protein, 5 aa, Artificial Sequence
  Description of Artificial Sequence: Synthetic peptide
  XENP021254 vhCDR1
QYYMH

SEQ ID NO: 25477 - protein, 17 aa, Artificial Sequence
  Description of Artificial Sequence: Synthetic peptide
  XENP021254 vhCDR2
WIDPENGDTEYAPKFQG

SEQ ID NO: 25478 - protein, 9 aa, Artificial Sequence
  Description of Artificial Sequence: Synthetic peptide
  XENP021254 vhCDR3
RGVRQALDY

SEQ ID NO: 25479 - protein, 214 aa, Artificial Sequence; identical to SEQ ID NO: 17250
  Description of Artificial Sequence: Synthetic polypeptide
  XENP021254 2A11_H1.27_L2_Fab Light Chain

SEQ ID NO: 25480 - protein, 107 aa, Artificial Sequence; identical to SEQ ID NO: 17251
  Description of Artificial Sequence: Synthetic polypeptide
  VL of XENP021254

SEQ ID NO: 25481 - protein, 11 aa, Artificial Sequence
  Description of Artificial Sequence: Synthetic peptide
  XENP021254 vlCDR1
QASQDIGNYLN

SEQ ID NO: 25482 - protein, 7 aa, Artificial Sequence
  Description of Artificial Sequence: Synthetic peptide
  XENP021254 vlCDR2
YTSRLHS

SEQ ID NO: 25483 - protein, 9 aa, Artificial Sequence
  Description of Artificial Sequence: Synthetic peptide
  XENP021254 vlCDR3
QQGNTLPYT

SEQ ID NO: 25484 - protein, 223 aa, Artificial Sequence
  Description of Artificial Sequence: Synthetic polypeptide
  XENP021255 2A11_H1.28_L2_Fab Heavy Chain
EVQLVQSGAEVKKPGATVKISCKASGFNIKFYYMHWVQQAPGKGLEWMGWIDPENGDTEYAPKFQGRVTITADTSTNTAYMELSSLRSEDTAVYYCYARGVRQALDYWGQGTLVTVSSASTKGPSVFPLAPSSKSTSGGTAALGCLVKDYFPEPVTVSWNSGALTSGVHTFPAVLQSSGLYSLSSVVTVPSSSLGTQTYICNVNHKPSNTKVDKKVEPKSCGS

SEQ ID NO: 25485 - protein, 118 aa, Artificial Sequence
  Description of Artificial Sequence: Synthetic polypeptide
  VH of XENP021255
EVQLVQSGAEVKKPGATVKISCKASGFNIKFYYMHWVQQAPGKGLEWMGWIDPENGDTEYAPKFQGRVTITADTSTNTAYMELSSLRSEDTAVYYCYARGVRQALDYWGQGTLVTVSS

SEQ ID NO: 25486 - protein, 5 aa, Artificial Sequence
  Description of Artificial Sequence: Synthetic peptide
  XENP021255 vhCDR1
FYYMH

SEQ ID NO: 25487 - protein, 17 aa, Artificial Sequence
  Description of Artificial Sequence: Synthetic peptide
  XENP021255 vhCDR2
WIDPENGDTEYAPKFQG

SEQ ID NO: 25488 - protein, 9 aa, Artificial Sequence
  Description of Artificial Sequence: Synthetic peptide
  XENP021255 vhCDR3
RGVRQALDY

SEQ ID NO: 25489 - protein, 214 aa, Artificial Sequence; identical to SEQ ID NO: 17250
  Description of Artificial Sequence: Synthetic polypeptide
  XENP021255 2A11_H1.28_L2_Fab Light Chain

SEQ ID NO: 25490 - protein, 107 aa, Artificial Sequence; identical to SEQ ID NO: 17251
  Description of Artificial Sequence: Synthetic polypeptide
  VL of XENP021255

SEQ ID NO: 25491 - protein, 11 aa, Artificial Sequence
  Description of Artificial Sequence: Synthetic peptide
  XENP021255 vlCDR1
QASQDIGNYLN

SEQ ID NO: 25492 - protein, 7 aa, Artificial Sequence
  Description of Artificial Sequence: Synthetic peptide
  XENP021255 vlCDR2
YTSRLHS

SEQ ID NO: 25493 - protein, 9 aa, Artificial Sequence
  Description of Artificial Sequence: Synthetic peptide
  XENP021255 vlCDR3
QQGNTLPYT

SEQ ID NO: 25494 - protein, 223 aa, Artificial Sequence
  Description of Artificial Sequence: Synthetic polypeptide
  XENP021256 2A11_H1.29_L2_Fab Heavy Chain
EVQLVQSGAEVKKPGATVKISCKASGFNIKDFYMHWVQQAPGKGLEWMGWIDPENGDTEYAPKFQGRVTITADTSTNTAYMELSSLRSEDTAVYYCYARGVRQALDYWGQGTLVTVSSASTKGPSVFPLAPSSKSTSGGTAALGCLVKDYFPEPVTVSWNSGALTSGVHTFPAVLQSSGLYSLSSVVTVPSSSLGTQTYICNVNHKPSNTKVDKKVEPKSCGS

SEQ ID NO: 25495 - protein, 118 aa, Artificial Sequence
  Description of Artificial Sequence: Synthetic polypeptide
  VH of XENP021256
EVQLVQSGAEVKKPGATVKISCKASGFNIKDFYMHWVQQAPGKGLEWMGWIDPENGDTEYAPKFQGRVTITADTSTNTAYMELSSLRSEDTAVYYCYARGVRQALDYWGQGTLVTVSS

SEQ ID NO: 25496 - protein, 5 aa, Artificial Sequence
  Description of Artificial Sequence: Synthetic peptide
  XENP021256 vhCDR1
DFYMH

SEQ ID NO: 25497 - protein, 17 aa, Artificial Sequence
  Description of Artificial Sequence: Synthetic peptide
  XENP021256 vhCDR2
WIDPENGDTEYAPKFQG

SEQ ID NO: 25498 - protein, 9 aa, Artificial Sequence
  Description of Artificial Sequence: Synthetic peptide
  XENP021256 vhCDR3
RGVRQALDY

SEQ ID NO: 25499 - protein, 214 aa, Artificial Sequence; identical to SEQ ID NO: 17250
  Description of Artificial Sequence: Synthetic polypeptide
  XENP021256 2A11_H1.29_L2_Fab Light Chain

SEQ ID NO: 25500 - protein, 107 aa, Artificial Sequence; identical to SEQ ID NO: 17251
  Description of Artificial Sequence: Synthetic polypeptide
  VL of XENP021256

SEQ ID NO: 25501 - protein, 11 aa, Artificial Sequence
  Description of Artificial Sequence: Synthetic peptide
  XENP021256 vlCDR1
QASQDIGNYLN

SEQ ID NO: 25502 - protein, 7 aa, Artificial Sequence
  Description of Artificial Sequence: Synthetic peptide
  XENP021256 vlCDR2
YTSRLHS

SEQ ID NO: 25503 - protein, 9 aa, Artificial Sequence
  Description of Artificial Sequence: Synthetic peptide
  XENP021256 vlCDR3
QQGNTLPYT

SEQ ID NO: 25504 - protein, 223 aa, Artificial Sequence
  Description of Artificial Sequence: Synthetic polypeptide
  XENP021257 2A11_H1.30_L2_Fab Heavy Chain
EVQLVQSGAEVKKPGATVKISCKASGFNIKDHYMHWVQQAPGKGLEWMGWIDPENGDTEYAPKFQGRVTITADTSTNTAYMELSSLRSEDTAVYYCYARGVRQALDYWGQGTLVTVSSASTKGPSVFPLAPSSKSTSGGTAALGCLVKDYFPEPVTVSWNSGALTSGVHTFPAVLQSSGLYSLSSVVTVPSSSLGTQTYICNVNHKPSNTKVDKKVEPKSCGS

SEQ ID NO: 25505 - protein, 118 aa, Artificial Sequence
  Description of Artificial Sequence: Synthetic polypeptide
  VH of XENP021257
EVQLVQSGAEVKKPGATVKISCKASGFNIKDHYMHWVQQAPGKGLEWMGWIDPENGDTEYAPKFQGRVTITADTSTNTAYMELSSLRSEDTAVYYCYARGVRQALDYWGQGTLVTVSS

SEQ ID NO: 25506 - protein, 5 aa, Artificial Sequence
  Description of Artificial Sequence: Synthetic peptide
  XENP021257 vhCDR1
DHYMH

SEQ ID NO: 25507 - protein, 17 aa, Artificial Sequence
  Description of Artificial Sequence: Synthetic peptide
  XENP021257 vhCDR2
WIDPENGDTEYAPKFQG

SEQ ID NO: 25508 - protein, 9 aa, Artificial Sequence
  Description of Artificial Sequence: Synthetic peptide
  XENP021257 vhCDR3
RGVRQALDY

SEQ ID NO: 25509 - protein, 214 aa, Artificial Sequence; identical to SEQ ID NO: 17250
  Description of Artificial Sequence: Synthetic polypeptide
  XENP021257 2A11_H1.30_L2_Fab Light Chain

SEQ ID NO: 25510 - protein, 107 aa, Artificial Sequence; identical to SEQ ID NO: 17251
  Description of Artificial Sequence: Synthetic polypeptide
  VL of XENP021257

SEQ ID NO: 25511 - protein, 11 aa, Artificial Sequence
  Description of Artificial Sequence: Synthetic peptide
  XENP021257 vlCDR1
QASQDIGNYLN

SEQ ID NO: 25512 - protein, 7 aa, Artificial Sequence
  Description of Artificial Sequence: Synthetic peptide
  XENP021257 vlCDR2
YTSRLHS

SEQ ID NO: 25513 - protein, 9 aa, Artificial Sequence
  Description of Artificial Sequence: Synthetic peptide
  XENP021257 vlCDR3
QQGNTLPYT

SEQ ID NO: 25514 - protein, 223 aa, Artificial Sequence
  Description of Artificial Sequence: Synthetic polypeptide
  XENP021258 2A11_H1.31_L2_Fab Heavy Chain
EVQLVQSGAEVKKPGATVKISCKASGFNIKDLYMHWVQQAPGKGLEWMGWIDPENGDTEYAPKFQGRVTITADTSTNTAYMELSSLRSEDTAVYYCYARGVRQALDYWGQGTLVTVSSASTKGPSVFPLAPSSKSTSGGTAALGCLVKDYFPEPVTVSWNSGALTSGVHTFPAVLQSSGLYSLSSVVTVPSSSLGTQTYICNVNHKPSNTKVDKKVEPKSCGS

SEQ ID NO: 25515 - protein, 118 aa, Artificial Sequence
  Description of Artificial Sequence: Synthetic polypeptide
  VH of XENP021258
EVQLVQSGAEVKKPGATVKISCKASGFNIKDLYMHWVQQAPGKGLEWMGWIDPENGDTEYAPKFQGRVTITADTSTNTAYMELSSLRSEDTAVYYCYARGVRQALDYWGQGTLVTVSS

SEQ ID NO: 25516 - protein, 5 aa, Artificial Sequence
  Description of Artificial Sequence: Synthetic peptide
  XENP021258 vhCDR1
DLYMH

SEQ ID NO: 25517 - protein, 17 aa, Artificial Sequence
  Description of Artificial Sequence: Synthetic peptide
  XENP021258 vhCDR2
WIDPENGDTEYAPKFQG

SEQ ID NO: 25518 - protein, 9 aa, Artificial Sequence
  Description of Artificial Sequence: Synthetic peptide
  XENP021258 vhCDR3
RGVRQALDY

SEQ ID NO: 25519 - protein, 214 aa, Artificial Sequence; identical to SEQ ID NO: 17250
  Description of Artificial Sequence: Synthetic polypeptide
  XENP021258 2A11_H1.31_L2_Fab Light Chain

SEQ ID NO: 25520 - protein, 107 aa, Artificial Sequence; identical to SEQ ID NO: 17251
  Description of Artificial Sequence: Synthetic polypeptide
  VL of XENP021258

SEQ ID NO: 25521 - protein, 11 aa, Artificial Sequence
  Description of Artificial Sequence: Synthetic peptide
  XENP021258 vlCDR1
QASQDIGNYLN

SEQ ID NO: 25522 - protein, 7 aa, Artificial Sequence
  Description of Artificial Sequence: Synthetic peptide
  XENP021258 vlCDR2
YTSRLHS

SEQ ID NO: 25523 - protein, 9 aa, Artificial Sequence
  Description of Artificial Sequence: Synthetic peptide
  XENP021258 vlCDR3
QQGNTLPYT

SEQ ID NO: 25524 - protein, 223 aa, Artificial Sequence
  Description of Artificial Sequence: Synthetic polypeptide
  XENP021259 2A11_H1.32_L2_Fab Heavy Chain
EVQLVQSGAEVKKPGATVKISCKASGFNIKDVYMHWVQQAPGKGLEWMGWIDPENGDTEYAPKFQGRVTITADTSTNTAYMELSSLRSEDTAVYYCYARGVRQALDYWGQGTLVTVSSASTKGPSVFPLAPSSKSTSGGTAALGCLVKDYFPEPVTVSWNSGALTSGVHTFPAVLQSSGLYSLSSVVTVPSSSLGTQTYICNVNHKPSNTKVDKKVEPKSCGS

SEQ ID NO: 25525 - protein, 118 aa, Artificial Sequence
  Description of Artificial Sequence: Synthetic polypeptide
  VH of XENP021259
EVQLVQSGAEVKKPGATVKISCKASGFNIKDVYMHWVQQAPGKGLEWMGWIDPENGDTEYAPKFQGRVTITADTSTNTAYMELSSLRSEDTAVYYCYARGVRQALDYWGQGTLVTVSS

SEQ ID NO: 25526 - protein, 5 aa, Artificial Sequence
  Description of Artificial Sequence: Synthetic peptide
  XENP021259 vhCDR1
DVYMH

SEQ ID NO: 25527 - protein, 17 aa, Artificial Sequence
  Description of Artificial Sequence: Synthetic peptide
  XENP021259 vhCDR2
WIDPENGDTEYAPKFQG

SEQ ID NO: 25528 - protein, 9 aa, Artificial Sequence
  Description of Artificial Sequence: Synthetic peptide
  XENP021259 vhCDR3
RGVRQALDY

SEQ ID NO: 25529 - protein, 214 aa, Artificial Sequence; identical to SEQ ID NO: 17250
  Description of Artificial Sequence: Synthetic polypeptide
  XENP021259 2A11_H1.32_L2_Fab Light Chain

SEQ ID NO: 25530 - protein, 107 aa, Artificial Sequence; identical to SEQ ID NO: 17251
  Description of Artificial Sequence: Synthetic polypeptide
  VL of XENP021259

SEQ ID NO: 25531 - protein, 11 aa, Artificial Sequence
  Description of Artificial Sequence: Synthetic peptide
  XENP021259 vlCDR1
QASQDIGNYLN

SEQ ID NO: 25532 - protein, 7 aa, Artificial Sequence
  Description of Artificial Sequence: Synthetic peptide
  XENP021259 vlCDR2
YTSRLHS

SEQ ID NO: 25533 - protein, 9 aa, Artificial Sequence
  Description of Artificial Sequence: Synthetic peptide
  XENP021259 vlCDR3
QQGNTLPYT

SEQ ID NO: 25534 - protein, 223 aa, Artificial Sequence
  Description of Artificial Sequence: Synthetic polypeptide
  XENP021260 2A11_H1.33_L2_Fab Heavy Chain
EVQLVQSGAEVKKPGATVKISCKASGFNIKDAYMHWVQQAPGKGLEWMGWIDPENGDTEYAPKFQGRVTITADTSTNTAYMELSSLRSEDTAVYYCYARGVRQALDYWGQGTLVTVSSASTKGPSVFPLAPSSKSTSGGTAALGCLVKDYFPEPVTVSWNSGALTSGVHTFPAVLQSSGLYSLSSVVTVPSSSLGTQTYICNVNHKPSNTKVDKKVEPKSCGS

SEQ ID NO: 25535 - protein, 118 aa, Artificial Sequence
  Description of Artificial Sequence: Synthetic polypeptide
  VH of XENP021260
EVQLVQSGAEVKKPGATVKISCKASGFNIKDAYMHWVQQAPGKGLEWMGWIDPENGDTEYAPKFQGRVTITADTSTNTAYMELSSLRSEDTAVYYCYARGVRQALDYWGQGTLVTVSS

SEQ ID NO: 25536 - protein, 5 aa, Artificial Sequence
  Description of Artificial Sequence: Synthetic peptide
  XENP021260 vhCDR1
DAYMH

SEQ ID NO: 25537 - protein, 17 aa, Artificial Sequence
  Description of Artificial Sequence: Synthetic peptide
  XENP021260 vhCDR2
WIDPENGDTEYAPKFQG

SEQ ID NO: 25538 - protein, 9 aa, Artificial Sequence
  Description of Artificial Sequence: Synthetic peptide
  XENP021260 vhCDR3
RGVRQALDY

SEQ ID NO: 25539 - protein, 214 aa, Artificial Sequence; identical to SEQ ID NO: 17250
  Description of Artificial Sequence: Synthetic polypeptide
  XENP021260 2A11_H1.33_L2_Fab Light Chain

SEQ ID NO: 25540 - protein, 107 aa, Artificial Sequence; identical to SEQ ID NO: 17251
  Description of Artificial Sequence: Synthetic polypeptide
  VL of XENP021260

SEQ ID NO: 25541 - protein, 11 aa, Artificial Sequence
  Description of Artificial Sequence: Synthetic peptide
  XENP021260 vlCDR1
QASQDIGNYLN

SEQ ID NO: 25542 - protein, 7 aa, Artificial Sequence
  Description of Artificial Sequence: Synthetic peptide
  XENP021260 vlCDR2
YTSRLHS

SEQ ID NO: 25543 - protein, 9 aa, Artificial Sequence
  Description of Artificial Sequence: Synthetic peptide
  XENP021260 vlCDR3
QQGNTLPYT

SEQ ID NO: 25544 - protein, 223 aa, Artificial Sequence
  Description of Artificial Sequence: Synthetic polypeptide
  XENP021261 2A11_H1.34_L2_Fab Heavy Chain
EVQLVQSGAEVKKPGATVKISCKASGFNIKDQYMHWVQQAPGKGLEWMGWIDPENGDTEYAPKFQGRVTITADTSTNTAYMELSSLRSEDTAVYYCYARGVRQALDYWGQGTLVTVSSASTKGPSVFPLAPSSKSTSGGTAALGCLVKDYFPEPVTVSWNSGALTSGVHTFPAVLQSSGLYSLSSVVTVPSSSLGTQTYICNVNHKPSNTKVDKKVEPKSCGS

SEQ ID NO: 25545 - protein, 118 aa, Artificial Sequence
  Description of Artificial Sequence: Synthetic polypeptide
  VH of XENP021261
EVQLVQSGAEVKKPGATVKISCKASGFNIKDQYMHWVQQAPGKGLEWMGWIDPENGDTEYAPKFQGRVTITADTSTNTAYMELSSLRSEDTAVYYCYARGVRQALDYWGQGTLVTVSS

SEQ ID NO: 25546 - protein, 5 aa, Artificial Sequence
  Description of Artificial Sequence: Synthetic peptide
  XENP021261 vhCDR1
DQYMH

SEQ ID NO: 25547 - protein, 17 aa, Artificial Sequence
  Description of Artificial Sequence: Synthetic peptide
  XENP021261 vhCDR2
WIDPENGDTEYAPKFQG

SEQ ID NO: 25548 - protein, 9 aa, Artificial Sequence
  Description of Artificial Sequence: Synthetic peptide
  XENP021261 vhCDR3
RGVRQALDY

SEQ ID NO: 25549 - protein, 214 aa, Artificial Sequence; identical to SEQ ID NO: 17250
  Description of Artificial Sequence: Synthetic polypeptide
  XENP021261 2A11_H1.34_L2_Fab Light Chain

SEQ ID NO: 25550 - protein, 107 aa, Artificial Sequence; identical to SEQ ID NO: 17251
  Description of Artificial Sequence: Synthetic polypeptide
  VL of XENP021261

SEQ ID NO: 25551 - protein, 11 aa, Artificial Sequence
  Description of Artificial Sequence: Synthetic peptide
  XENP021261 vlCDR1
QASQDIGNYLN

SEQ ID NO: 25552 - protein, 7 aa, Artificial Sequence
  Description of Artificial Sequence: Synthetic peptide
  XENP021261 vlCDR2
YTSRLHS

SEQ ID NO: 25553 - protein, 9 aa, Artificial Sequence
  Description of Artificial Sequence: Synthetic peptide
  XENP021261 vlCDR3
QQGNTLPYT

SEQ ID NO: 25554 - protein, 223 aa, Artificial Sequence
  Description of Artificial Sequence: Synthetic polypeptide
  XENP021262 2A11_H1.35_L2_Fab Heavy Chain
EVQLVQSGAEVKKPGATVKISCKASGFNIKDEYMHWVQQAPGKGLEWMGWIDPENGDTEYAPKFQGRVTITADTSTNTAYMELSSLRSEDTAVYYCYARGVRQALDYWGQGTLVTVSSASTKGPSVFPLAPSSKSTSGGTAALGCLVKDYFPEPVTVSWNSGALTSGVHTFPAVLQSSGLYSLSSVVTVPSSSLGTQTYICNVNHKPSNTKVDKKVEPKSCGS

SEQ ID NO: 25555 - protein, 118 aa, Artificial Sequence
  Description of Artificial Sequence: Synthetic polypeptide
  VH of XENP021262
EVQLVQSGAEVKKPGATVKISCKASGFNIKDEYMHWVQQAPGKGLEWMGWIDPENGDTEYAPKFQGRVTITADTSTNTAYMELSSLRSEDTAVYYCYARGVRQALDYWGQGTLVTVSS

SEQ ID NO: 25556 - protein, 5 aa, Artificial Sequence
  Description of Artificial Sequence: Synthetic peptide
  XENP021262 vhCDR1
DEYMH

SEQ ID NO: 25557 - protein, 17 aa, Artificial Sequence
  Description of Artificial Sequence: Synthetic peptide
  XENP021262 vhCDR2
WIDPENGDTEYAPKFQG

SEQ ID NO: 25558 - protein, 9 aa, Artificial Sequence
  Description of Artificial Sequence: Synthetic peptide
  XENP021262 vhCDR3
RGVRQALDY

SEQ ID NO: 25559 - protein, 214 aa, Artificial Sequence; identical to SEQ ID NO: 17250
  Description of Artificial Sequence: Synthetic polypeptide
  XENP021262 2A11_H1.35_L2_Fab Light Chain

SEQ ID NO: 25560 - protein, 107 aa, Artificial Sequence; identical to SEQ ID NO: 17251
  Description of Artificial Sequence: Synthetic polypeptide
  VL of XENP021262

SEQ ID NO: 25561 - protein, 11 aa, Artificial Sequence
  Description of Artificial Sequence: Synthetic peptide
  XENP021262 vlCDR1
QASQDIGNYLN

SEQ ID NO: 25562 - protein, 7 aa, Artificial Sequence
  Description of Artificial Sequence: Synthetic peptide
  XENP021262 vlCDR2
YTSRLHS

SEQ ID NO: 25563 - protein, 9 aa, Artificial Sequence
  Description of Artificial Sequence: Synthetic peptide
  XENP021262 vlCDR3
QQGNTLPYT

SEQ ID NO: 25564 - protein, 223 aa, Artificial Sequence
  Description of Artificial Sequence: Synthetic polypeptide
  XENP021263 2A11_H1.36_L2_Fab Heavy Chain
EVQLVQSGAEVKKPGATVKISCKASGFNIKDKYMHWVQQAPGKGLEWMGWIDPENGDTEYAPKFQGRVTITADTSTNTAYMELSSLRSEDTAVYYCYARGVRQALDYWGQGTLVTVSSASTKGPSVFPLAPSSKSTSGGTAALGCLVKDYFPEPVTVSWNSGALTSGVHTFPAVLQSSGLYSLSSVVTVPSSSLGTQTYICNVNHKPSNTKVDKKVEPKSCGS

SEQ ID NO: 25565 - protein, 118 aa, Artificial Sequence
  Description of Artificial Sequence: Synthetic polypeptide
  VH of XENP021263
EVQLVQSGAEVKKPGATVKISCKASGFNIKDKYMHWVQQAPGKGLEWMGWIDPENGDTEYAPKFQGRVTITADTSTNTAYMELSSLRSEDTAVYYCYARGVRQALDYWGQGTLVTVSS

SEQ ID NO: 25566 - protein, 5 aa, Artificial Sequence
  Description of Artificial Sequence: Synthetic peptide
  XENP021263 vhCDR1
DKYMH

SEQ ID NO: 25567 - protein, 17 aa, Artificial Sequence
  Description of Artificial Sequence: Synthetic peptide
  XENP021263 vhCDR2
WIDPENGDTEYAPKFQG

SEQ ID NO: 25568 - protein, 9 aa, Artificial Sequence
  Description of Artificial Sequence: Synthetic peptide
  XENP021263 vhCDR3
RGVRQALDY

SEQ ID NO: 25569 - protein, 214 aa, Artificial Sequence; identical to SEQ ID NO: 17250
  Description of Artificial Sequence: Synthetic polypeptide
  XENP021263 2A11_H1.36_L2_Fab Light Chain

SEQ ID NO: 25570 - protein, 107 aa, Artificial Sequence; identical to SEQ ID NO: 17251
  Description of Artificial Sequence: Synthetic polypeptide
  VL of XENP021263

SEQ ID NO: 25571 - protein, 11 aa, Artificial Sequence
  Description of Artificial Sequence: Synthetic peptide
  XENP021263 vlCDR1
QASQDIGNYLN

SEQ ID NO: 25572 - protein, 7 aa, Artificial Sequence
  Description of Artificial Sequence: Synthetic peptide
  XENP021263 vlCDR2
YTSRLHS

SEQ ID NO: 25573 - protein, 9 aa, Artificial Sequence
  Description of Artificial Sequence: Synthetic peptide
  XENP021263 vlCDR3
QQGNTLPYT

SEQ ID NO: 25574 - protein, 223 aa, Artificial Sequence
  Description of Artificial Sequence: Synthetic polypeptide
  XENP021264 2A11_H1.37_L2_Fab Heavy Chain
EVQLVQSGAEVKKPGATVKISCKASGFNIKDYFMHWVQQAPGKGLEWMGWIDPENGDTEYAPKFQGRVTITADTSTNTAYMELSSLRSEDTAVYYCYARGVRQALDYWGQGTLVTVSSASTKGPSVFPLAPSSKSTSGGTAALGCLVKDYFPEPVTVSWNSGALTSGVHTFPAVLQSSGLYSLSSVVTVPSSSLGTQTYICNVNHKPSNTKVDKKVEPKSCGS

SEQ ID NO: 25575 - protein, 118 aa, Artificial Sequence
  Description of Artificial Sequence: Synthetic polypeptide
  VH of XENP021264
EVQLVQSGAEVKKPGATVKISCKASGFNIKDYFMHWVQQAPGKGLEWMGWIDPENGDTEYAPKFQGRVTITADTSTNTAYMELSSLRSEDTAVYYCYARGVRQALDYWGQGTLVTVSS

SEQ ID NO: 25576 - protein, 5 aa, Artificial Sequence
  Description of Artificial Sequence: Synthetic peptide
  XENP021264 vhCDR1
DYFMH

SEQ ID NO: 25577 - protein, 17 aa, Artificial Sequence
  Description of Artificial Sequence: Synthetic peptide
  XENP021264 vhCDR2
WIDPENGDTEYAPKFQG

SEQ ID NO: 25578 - protein, 9 aa, Artificial Sequence
  Description of Artificial Sequence: Synthetic peptide
  XENP021264 vhCDR3
RGVRQALDY

SEQ ID NO: 25579 - protein, 214 aa, Artificial Sequence; identical to SEQ ID NO: 17250
  Description of Artificial Sequence: Synthetic polypeptide
  XENP021264 2A11_H1.37_L2_Fab Light Chain

SEQ ID NO: 25580 - protein, 107 aa, Artificial Sequence; identical to SEQ ID NO: 17251
  Description of Artificial Sequence: Synthetic polypeptide
  VL of XENP021264

SEQ ID NO: 25581 - protein, 11 aa, Artificial Sequence
  Description of Artificial Sequence: Synthetic peptide
  XENP021264 vlCDR1
QASQDIGNYLN

SEQ ID NO: 25582 - protein, 7 aa, Artificial Sequence
  Description of Artificial Sequence: Synthetic peptide
  XENP021264 vlCDR2
YTSRLHS

SEQ ID NO: 25583 - protein, 9 aa, Artificial Sequence
  Description of Artificial Sequence: Synthetic peptide
  XENP021264 vlCDR3
QQGNTLPYT

SEQ ID NO: 25584 - protein, 223 aa, Artificial Sequence
  Description of Artificial Sequence: Synthetic polypeptide
  XENP021265 2A11_H1.38_L2_Fab Heavy Chain
EVQLVQSGAEVKKPGATVKISCKASGFNIKDYHMHWVQQAPGKGLEWMGWIDPENGDTEYAPKFQGRVTITADTSTNTAYMELSSLRSEDTAVYYCYARGVRQALDYWGQGTLVTVSSASTKGPSVFPLAPSSKSTSGGTAALGCLVKDYFPEPVTVSWNSGALTSGVHTFPAVLQSSGLYSLSSVVTVPSSSLGTQTYICNVNHKPSNTKVDKKVEPKSCGS

SEQ ID NO: 25585 - protein, 118 aa, Artificial Sequence
  Description of Artificial Sequence: Synthetic polypeptide
  VH of XENP021265
EVQLVQSGAEVKKPGATVKISCKASGFNIKDYHMHWVQQAPGKGLEWMGWIDPENGDTEYAPKFQGRVTITADTSTNTAYMELSSLRSEDTAVYYCYARGVRQALDYWGQGTLVTVSS

SEQ ID NO: 25586 - protein, 5 aa, Artificial Sequence
  Description of Artificial Sequence: Synthetic peptide
  XENP021265 vhCDR1
DYHMH

SEQ ID NO: 25587 - protein, 17 aa, Artificial Sequence
  Description of Artificial Sequence: Synthetic peptide
  XENP021265 vhCDR2
WIDPENGDTEYAPKFQG

SEQ ID NO: 25588 - protein, 9 aa, Artificial Sequence
  Description of Artificial Sequence: Synthetic peptide
  XENP021265 vhCDR3
RGVRQALDY

SEQ ID NO: 25589 - protein, 214 aa, Artificial Sequence; identical to SEQ ID NO: 17250
  Description of Artificial Sequence: Synthetic polypeptide
  XENP021265 2A11_H1.38_L2_Fab Light Chain

SEQ ID NO: 25590 - protein, 107 aa, Artificial Sequence; identical to SEQ ID NO: 17251
  Description of Artificial Sequence: Synthetic polypeptide
  VL of XENP021265

SEQ ID NO: 25591 - protein, 11 aa, Artificial Sequence
  Description of Artificial Sequence: Synthetic peptide
  XENP021265 vlCDR1
QASQDIGNYLN

SEQ ID NO: 25592 - protein, 7 aa, Artificial Sequence
  Description of Artificial Sequence: Synthetic peptide
  XENP021265 vlCDR2
YTSRLHS

SEQ ID NO: 25593 - protein, 9 aa, Artificial Sequence
  Description of Artificial Sequence: Synthetic peptide
  XENP021265 vlCDR3
QQGNTLPYT

SEQ ID NO: 25594 - protein, 223 aa, Artificial Sequence
  Description of Artificial Sequence: Synthetic polypeptide
  XENP021266 2A11_H1.39_L2_Fab Heavy Chain
EVQLVQSGAEVKKPGATVKISCKASGFNIKDYLMHWVQQAPGKGLEWMGWIDPENGDTEYAPKFQGRVTITADTSTNTAYMELSSLRSEDTAVYYCYARGVRQALDYWGQGTLVTVSSASTKGPSVFPLAPSSKSTSGGTAALGCLVKDYFPEPVTVSWNSGALTSGVHTFPAVLQSSGLYSLSSVVTVPSSSLGTQTYICNVNHKPSNTKVDKKVEPKSCGS

SEQ ID NO: 25595 - protein, 118 aa, Artificial Sequence
  Description of Artificial Sequence: Synthetic polypeptide
  VH of XENP021266
EVQLVQSGAEVKKPGATVKISCKASGFNIKDYLMHWVQQAPGKGLEWMGWIDPENGDTEYAPKFQGRVTITADTSTNTAYMELSSLRSEDTAVYYCYARGVRQALDYWGQGTLVTVSS

SEQ ID NO: 25596 - protein, 5 aa, Artificial Sequence
  Description of Artificial Sequence: Synthetic peptide
  XENP021266 vhCDR1
DYLMH

SEQ ID NO: 25597 - protein, 17 aa, Artificial Sequence
  Description of Artificial Sequence: Synthetic peptide
  XENP021266 vhCDR2
WIDPENGDTEYAPKFQG

SEQ ID NO: 25598 - protein, 9 aa, Artificial Sequence
  Description of Artificial Sequence: Synthetic peptide
  XENP021266 vhCDR3
RGVRQALDY

SEQ ID NO: 25599 - protein, 214 aa, Artificial Sequence; identical to SEQ ID NO: 17250
  Description of Artificial Sequence: Synthetic polypeptide
  XENP021266 2A11_H1.39_L2_Fab Light Chain

SEQ ID NO: 25600 - protein, 107 aa, Artificial Sequence; identical to SEQ ID NO: 17251
  Description of Artificial Sequence: Synthetic polypeptide
  VL of XENP021266

SEQ ID NO: 25601 - protein, 11 aa, Artificial Sequence
  Description of Artificial Sequence: Synthetic peptide
  XENP021266 vlCDR1
QASQDIGNYLN

SEQ ID NO: 25602 - protein, 7 aa, Artificial Sequence
  Description of Artificial Sequence: Synthetic peptide
  XENP021266 vlCDR2
YTSRLHS

SEQ ID NO: 25603 - protein, 9 aa, Artificial Sequence
  Description of Artificial Sequence: Synthetic peptide
  XENP021266 vlCDR3
QQGNTLPYT

SEQ ID NO: 25604 - protein, 223 aa, Artificial Sequence
  Description of Artificial Sequence: Synthetic polypeptide
  XENP021267 2A11_H1.40_L2_Fab Heavy Chain
EVQLVQSGAEVKKPGATVKISCKASGFNIKDYWMHWVQQAPGKGLEWMGWIDPENGDTEYAPKFQGRVTITADTSTNTAYMELSSLRSEDTAVYYCYARGVRQALDYWGQGTLVTVSSASTKGPSVFPLAPSSKSTSGGTAALGCLVKDYFPEPVTVSWNSGALTSGVHTFPAVLQSSGLYSLSSVVTVPSSSLGTQTYICNVNHKPSNTKVDKKVEPKSCGS

SEQ ID NO: 25605 - protein, 118 aa, Artificial Sequence
  Description of Artificial Sequence: Synthetic polypeptide
  VH of XENP021267
EVQLVQSGAEVKKPGATVKISCKASGFNIKDYWMHWVQQAPGKGLEWMGWIDPENGDTEYAPKFQGRVTITADTSTNTAYMELSSLRSEDTAVYYCYARGVRQALDYWGQGTLVTVSS

SEQ ID NO: 25606 - protein, 5 aa, Artificial Sequence
  Description of Artificial Sequence: Synthetic peptide
  XENP021267 vhCDR1
DYWMH

SEQ ID NO: 25607 - protein, 17 aa, Artificial Sequence
  Description of Artificial Sequence: Synthetic peptide
  XENP021267 vhCDR2
WIDPENGDTEYAPKFQG

SEQ ID NO: 25608 - protein, 9 aa, Artificial Sequence
  Description of Artificial Sequence: Synthetic peptide
  XENP021267 vhCDR3
RGVRQALDY

SEQ ID NO: 25609 - protein, 214 aa, Artificial Sequence; identical to SEQ ID NO: 17250
  Description of Artificial Sequence: Synthetic polypeptide
  XENP021267 2A11_H1.40_L2_Fab Light Chain

SEQ ID NO: 25610 - protein, 107 aa, Artificial Sequence; identical to SEQ ID NO: 17251
  Description of Artificial Sequence: Synthetic polypeptide
  VL of XENP021267

SEQ ID NO: 25611 - protein, 11 aa, Artificial Sequence
  Description of Artificial Sequence: Synthetic peptide
  XENP021267 vlCDR1
QASQDIGNYLN

SEQ ID NO: 25612 - protein, 7 aa, Artificial Sequence
  Description of Artificial Sequence: Synthetic peptide
  XENP021267 vlCDR2
YTSRLHS

SEQ ID NO: 25613 - protein, 9 aa, Artificial Sequence
  Description of Artificial Sequence: Synthetic peptide
  XENP021267 vlCDR3
QQGNTLPYT

SEQ ID NO: 25614 - protein, 223 aa, Artificial Sequence
  Description of Artificial Sequence: Synthetic polypeptide
  XENP021268 2A11_H1.41_L2_Fab Heavy Chain
EVQLVQSGAEVKKPGATVKISCKASGFNIKDYVMHWVQQAPGKGLEWMGWIDPENGDTEYAPKFQGRVTITADTSTNTAYMELSSLRSEDTAVYYCYARGVRQALDYWGQGTLVTVSSASTKGPSVFPLAPSSKSTSGGTAALGCLVKDYFPEPVTVSWNSGALTSGVHTFPAVLQSSGLYSLSSVVTVPSSSLGTQTYICNVNHKPSNTKVDKKVEPKSCGS

SEQ ID NO: 25615 - protein, 118 aa, Artificial Sequence
  Description of Artificial Sequence: Synthetic polypeptide
  VH of XENP021268
EVQLVQSGAEVKKPGATVKISCKASGFNIKDYVMHWVQQAPGKGLEWMGWIDPENGDTEYAPKFQGRVTITADTSTNTAYMELSSLRSEDTAVYYCYARGVRQALDYWGQGTLVTVSS

SEQ ID NO: 25616 - protein, 5 aa, Artificial Sequence
  Description of Artificial Sequence: Synthetic peptide
  XENP021268 vhCDR1
DYVMH

SEQ ID NO: 25617 - protein, 17 aa, Artificial Sequence
  Description of Artificial Sequence: Synthetic peptide
  XENP021268 vhCDR2
WIDPENGDTEYAPKFQG

SEQ ID NO: 25618 - protein, 9 aa, Artificial Sequence
  Description of Artificial Sequence: Synthetic peptide
  XENP021268 vhCDR3
RGVRQALDY

SEQ ID NO: 25619 - protein, 214 aa, Artificial Sequence; identical to SEQ ID NO: 17250
  Description of Artificial Sequence: Synthetic polypeptide
  XENP021268 2A11_H1.41_L2_Fab Light Chain

SEQ ID NO: 25620 - protein, 107 aa, Artificial Sequence; identical to SEQ ID NO: 17251
  Description of Artificial Sequence: Synthetic polypeptide
  VL of XENP021268

SEQ ID NO: 25621 - protein, 11 aa, Artificial Sequence
  Description of Artificial Sequence: Synthetic peptide
  XENP021268 vlCDR1
QASQDIGNYLN

SEQ ID NO: 25622 - protein, 7 aa, Artificial Sequence
  Description of Artificial Sequence: Synthetic peptide
  XENP021268 vlCDR2
YTSRLHS

SEQ ID NO: 25623 - protein, 9 aa, Artificial Sequence
  Description of Artificial Sequence: Synthetic peptide
  XENP021268 vlCDR3
QQGNTLPYT

SEQ ID NO: 25624 - protein, 223 aa, Artificial Sequence
  Description of Artificial Sequence: Synthetic polypeptide
  XENP021269 2A11_H1.42_L2_Fab Heavy Chain
EVQLVQSGAEVKKPGATVKISCKASGFNIKDYTMHWVQQAPGKGLEWMGWIDPENGDTEYAPKFQGRVTITADTSTNTAYMELSSLRSEDTAVYYCYARGVRQALDYWGQGTLVTVSSASTKGPSVFPLAPSSKSTSGGTAALGCLVKDYFPEPVTVSWNSGALTSGVHTFPAVLQSSGLYSLSSVVTVPSSSLGTQTYICNVNHKPSNTKVDKKVEPKSCGS

SEQ ID NO: 25625 - protein, 118 aa, Artificial Sequence
  Description of Artificial Sequence: Synthetic polypeptide
  VH of XENP021269
EVQLVQSGAEVKKPGATVKISCKASGFNIKDYTMHWVQQAPGKGLEWMGWIDPENGDTEYAPKFQGRVTITADTSTNTAYMELSSLRSEDTAVYYCYARGVRQALDYWGQGTLVTVSS

SEQ ID NO: 25626 - protein, 5 aa, Artificial Sequence
  Description of Artificial Sequence: Synthetic peptide
  XENP021269 vhCDR1
DYTMH

SEQ ID NO: 25627 - protein, 17 aa, Artificial Sequence
  Description of Artificial Sequence: Synthetic peptide
  XENP021269 vhCDR2
WIDPENGDTEYAPKFQG

SEQ ID NO: 25628 - protein, 9 aa, Artificial Sequence
  Description of Artificial Sequence: Synthetic peptide
  XENP021269 vhCDR3
RGVRQALDY

SEQ ID NO: 25629 - protein, 214 aa, Artificial Sequence; identical to SEQ ID NO: 17250
  Description of Artificial Sequence: Synthetic polypeptide
  XENP021269 2A11_H1.42_L2_Fab Light Chain

SEQ ID NO: 25630 - protein, 107 aa, Artificial Sequence; identical to SEQ ID NO: 17251
  Description of Artificial Sequence: Synthetic polypeptide
  VL of XENP021269

SEQ ID NO: 25631 - protein, 11 aa, Artificial Sequence
  Description of Artificial Sequence: Synthetic peptide
  XENP021269 vlCDR1
QASQDIGNYLN

SEQ ID NO: 25632 - protein, 7 aa, Artificial Sequence
  Description of Artificial Sequence: Synthetic peptide
  XENP021269 vlCDR2
YTSRLHS

SEQ ID NO: 25633 - protein, 9 aa, Artificial Sequence
  Description of Artificial Sequence: Synthetic peptide
  XENP021269 vlCDR3
QQGNTLPYT

SEQ ID NO: 25634 - protein, 223 aa, Artificial Sequence
  Description of Artificial Sequence: Synthetic polypeptide
  XENP021270 2A11_H1.43_L2_Fab Heavy Chain
EVQLVQSGAEVKKPGATVKISCKASGFNIKDYQMHWVQQAPGKGLEWMGWIDPENGDTEYAPKFQGRVTITADTSTNTAYMELSSLRSEDTAVYYCYARGVRQALDYWGQGTLVTVSSASTKGPSVFPLAPSSKSTSGGTAALGCLVKDYFPEPVTVSWNSGALTSGVHTFPAVLQSSGLYSLSSVVTVPSSSLGTQTYICNVNHKPSNTKVDKKVEPKSCGS

SEQ ID NO: 25635 - protein, 118 aa, Artificial Sequence
  Description of Artificial Sequence: Synthetic polypeptide
  VH of XENP021270
EVQLVQSGAEVKKPGATVKISCKASGFNIKDYQMHWVQQAPGKGLEWMGWIDPENGDTEYAPKFQGRVTITADTSTNTAYMELSSLRSEDTAVYYCYARGVRQALDYWGQGTLVTVSS

SEQ ID NO: 25636 - protein, 5 aa, Artificial Sequence
  Description of Artificial Sequence: Synthetic peptide
  XENP021270 vhCDR1
DYQMH

SEQ ID NO: 25637 - protein, 17 aa, Artificial Sequence
  Description of Artificial Sequence: Synthetic peptide
  XENP021270 vhCDR2
WIDPENGDTEYAPKFQG

SEQ ID NO: 25638 - protein, 9 aa, Artificial Sequence
  Description of Artificial Sequence: Synthetic peptide
  XENP021270 vhCDR3
RGVRQALDY

SEQ ID NO: 25639 - protein, 214 aa, Artificial Sequence; identical to SEQ ID NO: 17250
  Description of Artificial Sequence: Synthetic polypeptide
  XENP021270 2A11_H1.43_L2_Fab Light Chain

SEQ ID NO: 25640 - protein, 107 aa, Artificial Sequence; identical to SEQ ID NO: 17251
  Description of Artificial Sequence: Synthetic polypeptide
  VL of XENP021270

SEQ ID NO: 25641 - protein, 11 aa, Artificial Sequence
  Description of Artificial Sequence: Synthetic peptide
  XENP021270 vlCDR1
QASQDIGNYLN

SEQ ID NO: 25642 - protein, 7 aa, Artificial Sequence
  Description of Artificial Sequence: Synthetic peptide
  XENP021270 vlCDR2
YTSRLHS

SEQ ID NO: 25643 - protein, 9 aa, Artificial Sequence
  Description of Artificial Sequence: Synthetic peptide
  XENP021270 vlCDR3
QQGNTLPYT

SEQ ID NO: 25644 - protein, 223 aa, Artificial Sequence
  Description of Artificial Sequence: Synthetic polypeptide
  XENP021271 2A11_H1.44_L2_Fab Heavy Chain
EVQLVQSGAEVKKPGATVKISCKASGFNIKDYRMHWVQQAPGKGLEWMGWIDPENGDTEYAPKFQGRVTITADTSTNTAYMELSSLRSEDTAVYYCYARGVRQALDYWGQGTLVTVSSASTKGPSVFPLAPSSKSTSGGTAALGCLVKDYFPEPVTVSWNSGALTSGVHTFPAVLQSSGLYSLSSVVTVPSSSLGTQTYICNVNHKPSNTKVDKKVEPKSCGS

SEQ ID NO: 25645 - protein, 118 aa, Artificial Sequence
  Description of Artificial Sequence: Synthetic polypeptide
  VH of XENP021271
EVQLVQSGAEVKKPGATVKISCKASGFNIKDYRMHWVQQAPGKGLEWMGWIDPENGDTEYAPKFQGRVTITADTSTNTAYMELSSLRSEDTAVYYCYARGVRQALDYWGQGTLVTVSS

SEQ ID NO: 25646 - protein, 5 aa, Artificial Sequence
  Description of Artificial Sequence: Synthetic peptide
  XENP021271 vhCDR1
DYRMH

SEQ ID NO: 25647 - protein, 17 aa, Artificial Sequence
  Description of Artificial Sequence: Synthetic peptide
  XENP021271 vhCDR2
WIDPENGDTEYAPKFQG

SEQ ID NO: 25648 - protein, 9 aa, Artificial Sequence
  Description of Artificial Sequence: Synthetic peptide
  XENP021271 vhCDR3
RGVRQALDY

SEQ ID NO: 25649 - protein, 214 aa, Artificial Sequence; identical to SEQ ID NO: 17250
  Description of Artificial Sequence: Synthetic polypeptide
  XENP021271 2A11_H1.44_L2_Fab Light Chain

SEQ ID NO: 25650 - protein, 107 aa, Artificial Sequence; identical to SEQ ID NO: 17251
  Description of Artificial Sequence: Synthetic polypeptide
  VL of XENP021271

SEQ ID NO: 25651 - protein, 11 aa, Artificial Sequence
  Description of Artificial Sequence: Synthetic peptide
  XENP021271 vlCDR1
QASQDIGNYLN

SEQ ID NO: 25652 - protein, 7 aa, Artificial Sequence
  Description of Artificial Sequence: Synthetic peptide
  XENP021271 vlCDR2
YTSRLHS

SEQ ID NO: 25653 - protein, 9 aa, Artificial Sequence
  Description of Artificial Sequence: Synthetic peptide
  XENP021271 vlCDR3
QQGNTLPYT

SEQ ID NO: 25654 - protein, 223 aa, Artificial Sequence
  Description of Artificial Sequence: Synthetic polypeptide
  XENP021272 2A11_H1.45_L2_Fab Heavy Chain
EVQLVQSGAEVKKPGATVKISCKASGFNIKDYKMHWVQQAPGKGLEWMGWIDPENGDTEYAPKFQGRVTITADTSTNTAYMELSSLRSEDTAVYYCYARGVRQALDYWGQGTLVTVSSASTKGPSVFPLAPSSKSTSGGTAALGCLVKDYFPEPVTVSWNSGALTSGVHTFPAVLQSSGLYSLSSVVTVPSSSLGTQTYICNVNHKPSNTKVDKKVEPKSCGS

SEQ ID NO: 25655 - protein, 118 aa, Artificial Sequence
  Description of Artificial Sequence: Synthetic polypeptide
  VH of XENP021272
EVQLVQSGAEVKKPGATVKISCKASGFNIKDYKMHWVQQAPGKGLEWMGWIDPENGDTEYAPKFQGRVTITADTSTNTAYMELSSLRSEDTAVYYCYARGVRQALDYWGQGTLVTVSS

SEQ ID NO: 25656 - protein, 5 aa, Artificial Sequence
  Description of Artificial Sequence: Synthetic peptide
  XENP021272 vhCDR1
DYKMH

SEQ ID NO: 25657 - protein, 17 aa, Artificial Sequence
  Description of Artificial Sequence: Synthetic peptide
  XENP021272 vhCDR2
WIDPENGDTEYAPKFQG

SEQ ID NO: 25658 - protein, 9 aa, Artificial Sequence
  Description of Artificial Sequence: Synthetic peptide
  XENP021272 vhCDR3
RGVRQALDY

SEQ ID NO: 25659 - protein, 214 aa, Artificial Sequence; identical to SEQ ID NO: 17250
  Description of Artificial Sequence: Synthetic polypeptide
  XENP021272 2A11_H1.45_L2_Fab Light Chain

SEQ ID NO: 25660 - protein, 107 aa, Artificial Sequence; identical to SEQ ID NO: 17251
  Description of Artificial Sequence: Synthetic polypeptide
  VL of XENP021272

SEQ ID NO: 25661 - protein, 11 aa, Artificial Sequence
  Description of Artificial Sequence: Synthetic peptide
  XENP021272 vlCDR1
QASQDIGNYLN

SEQ ID NO: 25662 - protein, 7 aa, Artificial Sequence
  Description of Artificial Sequence: Synthetic peptide
  XENP021272 vlCDR2
YTSRLHS

SEQ ID NO: 25663 - protein, 9 aa, Artificial Sequence
  Description of Artificial Sequence: Synthetic peptide
  XENP021272 vlCDR3
QQGNTLPYT

SEQ ID NO: 25664 - protein, 223 aa, Artificial Sequence
  Description of Artificial Sequence: Synthetic polypeptide
  XENP021273 2A11_H1.46_L2_Fab Heavy Chain
EVQLVQSGAEVKKPGATVKISCKASGFNIKDYYMNWVQQAPGKGLEWMGWIDPENGDTEYAPKFQGRVTITADTSTNTAYMELSSLRSEDTAVYYCYARGVRQALDYWGQGTLVTVSSASTKGPSVFPLAPSSKSTSGGTAALGCLVKDYFPEPVTVSWNSGALTSGVHTFPAVLQSSGLYSLSSVVTVPSSSLGTQTYICNVNHKPSNTKVDKKVEPKSCGS

SEQ ID NO: 25665 - protein, 118 aa, Artificial Sequence
  Description of Artificial Sequence: Synthetic polypeptide
  VH of XENP021273
EVQLVQSGAEVKKPGATVKISCKASGFNIKDYYMNWVQQAPGKGLEWMGWIDPENGDTEYAPKFQGRVTITADTSTNTAYMELSSLRSEDTAVYYCYARGVRQALDYWGQGTLVTVSS

SEQ ID NO: 25666 - protein, 5 aa, Artificial Sequence
  Description of Artificial Sequence: Synthetic peptide
  XENP021273 vhCDR1
DYYMN

SEQ ID NO: 25667 - protein, 17 aa, Artificial Sequence
  Description of Artificial Sequence: Synthetic peptide
  XENP021273 vhCDR2
WIDPENGDTEYAPKFQG

SEQ ID NO: 25668 - protein, 9 aa, Artificial Sequence
  Description of Artificial Sequence: Synthetic peptide
  XENP021273 vhCDR3
RGVRQALDY

SEQ ID NO: 25669 - protein, 214 aa, Artificial Sequence; identical to SEQ ID NO: 17250
  Description of Artificial Sequence: Synthetic polypeptide
  XENP021273 2A11_H1.46_L2_Fab Light Chain

SEQ ID NO: 25670 - protein, 107 aa, Artificial Sequence; identical to SEQ ID NO: 17251
  Description of Artificial Sequence: Synthetic polypeptide
  VL of XENP021273

SEQ ID NO: 25671 - protein, 11 aa, Artificial Sequence
  Description of Artificial Sequence: Synthetic peptide
  XENP021273 vlCDR1
QASQDIGNYLN

SEQ ID NO: 25672 - protein, 7 aa, Artificial Sequence
  Description of Artificial Sequence: Synthetic peptide
  XENP021273 vlCDR2
YTSRLHS

SEQ ID NO: 25673 - protein, 9 aa, Artificial Sequence
  Description of Artificial Sequence: Synthetic peptide
  XENP021273 vlCDR3
QQGNTLPYT

SEQ ID NO: 25674 - protein, 223 aa, Artificial Sequence
  Description of Artificial Sequence: Synthetic polypeptide
  XENP021274 2A11_H1.47_L2_Fab Heavy Chain
EVQLVQSGAEVKKPGATVKISCKASGFNIKDYYMSWVQQAPGKGLEWMGWIDPENGDTEYAPKFQGRVTITADTSTNTAYMELSSLRSEDTAVYYCYARGVRQALDYWGQGTLVTVSSASTKGPSVFPLAPSSKSTSGGTAALGCLVKDYFPEPVTVSWNSGALTSGVHTFPAVLQSSGLYSLSSVVTVPSSSLGTQTYICNVNHKPSNTKVDKKVEPKSCGS

SEQ ID NO: 25675 - protein, 118 aa, Artificial Sequence
  Description of Artificial Sequence: Synthetic polypeptide
  VH of XENP021274
EVQLVQSGAEVKKPGATVKISCKASGFNIKDYYMSWVQQAPGKGLEWMGWIDPENGDTEYAPKFQGRVTITADTSTNTAYMELSSLRSEDTAVYYCYARGVRQALDYWGQGTLVTVSS

SEQ ID NO: 25676 - protein, 5 aa, Artificial Sequence
  Description of Artificial Sequence: Synthetic peptide
  XENP021274 vhCDR1
DYYMS

SEQ ID NO: 25677 - protein, 17 aa, Artificial Sequence
  Description of Artificial Sequence: Synthetic peptide
  XENP021274 vhCDR2
WIDPENGDTEYAPKFQG

SEQ ID NO: 25678 - protein, 9 aa, Artificial Sequence
  Description of Artificial Sequence: Synthetic peptide
  XENP021274 vhCDR3
RGVRQALDY

SEQ ID NO: 25679 - protein, 214 aa, Artificial Sequence; identical to SEQ ID NO: 17250
  Description of Artificial Sequence: Synthetic polypeptide
  XENP021274 2A11_H1.47_L2_Fab Light Chain

SEQ ID NO: 25680 - protein, 107 aa, Artificial Sequence; identical to SEQ ID NO: 17251
  Description of Artificial Sequence: Synthetic polypeptide
  VL of XENP021274

SEQ ID NO: 25681 - protein, 11 aa, Artificial Sequence
  Description of Artificial Sequence: Synthetic peptide
  XENP021274 vlCDR1
QASQDIGNYLN

SEQ ID NO: 25682 - protein, 7 aa, Artificial Sequence
  Description of Artificial Sequence: Synthetic peptide
  XENP021274 vlCDR2
YTSRLHS

SEQ ID NO: 25683 - protein, 9 aa, Artificial Sequence
  Description of Artificial Sequence: Synthetic peptide
  XENP021274 vlCDR3
QQGNTLPYT

SEQ ID NO: 25684 - protein, 223 aa, Artificial Sequence
  Description of Artificial Sequence: Synthetic polypeptide
  XENP021275 2A11_H1.48_L2_Fab Heavy Chain
EVQLVQSGAEVKKPGATVKISCKASGFNIKDYYMEWVQQAPGKGLEWMGWIDPENGDTEYAPKFQGRVTITADTSTNTAYMELSSLRSEDTAVYYCYARGVRQALDYWGQGTLVTVSSASTKGPSVFPLAPSSKSTSGGTAALGCLVKDYFPEPVTVSWNSGALTSGVHTFPAVLQSSGLYSLSSVVTVPSSSLGTQTYICNVNHKPSNTKVDKKVEPKSCGS

SEQ ID NO: 25685 - protein, 118 aa, Artificial Sequence
  Description of Artificial Sequence: Synthetic polypeptide
  VH of XENP021275
EVQLVQSGAEVKKPGATVKISCKASGFNIKDYYMEWVQQAPGKGLEWMGWIDPENGDTEYAPKFQGRVTITADTSTNTAYMELSSLRSEDTAVYYCYARGVRQALDYWGQGTLVTVSS

SEQ ID NO: 25686 - protein, 5 aa, Artificial Sequence
  Description of Artificial Sequence: Synthetic peptide
  XENP021275 vhCDR1
DYYME

SEQ ID NO: 25687 - protein, 17 aa, Artificial Sequence
  Description of Artificial Sequence: Synthetic peptide
  XENP021275 vhCDR2
WIDPENGDTEYAPKFQG

SEQ ID NO: 25688 - protein, 9 aa, Artificial Sequence
  Description of Artificial Sequence: Synthetic peptide
  XENP021275 vhCDR3
RGVRQALDY

SEQ ID NO: 25689 - protein, 214 aa, Artificial Sequence; identical to SEQ ID NO: 17250
  Description of Artificial Sequence: Synthetic polypeptide
  XENP021275 2A11_H1.48_L2_Fab Light Chain

SEQ ID NO: 25690 - protein, 107 aa, Artificial Sequence; identical to SEQ ID NO: 17251
  Description of Artificial Sequence: Synthetic polypeptide
  VL of XENP021275

SEQ ID NO: 25691 - protein, 11 aa, Artificial Sequence
  Description of Artificial Sequence: Synthetic peptide
  XENP021275 vlCDR1
QASQDIGNYLN

SEQ ID NO: 25692 - protein, 7 aa, Artificial Sequence
  Description of Artificial Sequence: Synthetic peptide
  XENP021275 vlCDR2
YTSRLHS

SEQ ID NO: 25693 - protein, 9 aa, Artificial Sequence
  Description of Artificial Sequence: Synthetic peptide
  XENP021275 vlCDR3
QQGNTLPYT

SEQ ID NO: 25694 - protein, 223 aa, Artificial Sequence
  Description of Artificial Sequence: Synthetic polypeptide
  XENP021276 2A11_H1.49_L2_Fab Heavy Chain
EVQLVQSGAEVKKPGATVKISCKASGFNIKDYYMHWVQQAPGKGLEWMGWINPENGDTEYAPKFQGRVTITADTSTNTAYMELSSLRSEDTAVYYCYARGVRQALDYWGQGTLVTVSSASTKGPSVFPLAPSSKSTSGGTAALGCLVKDYFPEPVTVSWNSGALTSGVHTFPAVLQSSGLYSLSSVVTVPSSSLGTQTYICNVNHKPSNTKVDKKVEPKSCGS

SEQ ID NO: 25695 - protein, 118 aa, Artificial Sequence
  Description of Artificial Sequence: Synthetic polypeptide
  VH of XENP021276
EVQLVQSGAEVKKPGATVKISCKASGFNIKDYYMHWVQQAPGKGLEWMGWINPENGDTEYAPKFQGRVTITADTSTNTAYMELSSLRSEDTAVYYCYARGVRQALDYWGQGTLVTVSS

SEQ ID NO: 25696 - protein, 5 aa, Artificial Sequence
  Description of Artificial Sequence: Synthetic peptide
  XENP021276 vhCDR1
DYYMH

SEQ ID NO: 25697 - protein, 17 aa, Artificial Sequence
  Description of Artificial Sequence: Synthetic peptide
  XENP021276 vhCDR2
WINPENGDTEYAPKFQG

SEQ ID NO: 25698 - protein, 9 aa, Artificial Sequence
  Description of Artificial Sequence: Synthetic peptide
  XENP021276 vhCDR3
RGVRQALDY

SEQ ID NO: 25699 - protein, 214 aa, Artificial Sequence; identical to SEQ ID NO: 17250
  Description of Artificial Sequence: Synthetic polypeptide
  XENP021276 2A11_H1.49_L2_Fab Light Chain

SEQ ID NO: 25700 - protein, 107 aa, Artificial Sequence; identical to SEQ ID NO: 17251
  Description of Artificial Sequence: Synthetic polypeptide
  VL of XENP021276

SEQ ID NO: 25701 - protein, 11 aa, Artificial Sequence
  Description of Artificial Sequence: Synthetic peptide
  XENP021276 vlCDR1
QASQDIGNYLN

SEQ ID NO: 25702 - protein, 7 aa, Artificial Sequence
  Description of Artificial Sequence: Synthetic peptide
  XENP021276 vlCDR2
YTSRLHS

SEQ ID NO: 25703 - protein, 9 aa, Artificial Sequence
  Description of Artificial Sequence: Synthetic peptide
  XENP021276 vlCDR3
QQGNTLPYT

SEQ ID NO: 25704 - protein, 223 aa, Artificial Sequence
  Description of Artificial Sequence: Synthetic polypeptide
  XENP021277 2A11_H1.50_L2_Fab Heavy Chain
EVQLVQSGAEVKKPGATVKISCKASGFNIKDYYMHWVQQAPGKGLEWMGWIEPENGDTEYAPKFQGRVTITADTSTNTAYMELSSLRSEDTAVYYCYARGVRQALDYWGQGTLVTVSSASTKGPSVFPLAPSSKSTSGGTAALGCLVKDYFPEPVTVSWNSGALTSGVHTFPAVLQSSGLYSLSSVVTVPSSSLGTQTYICNVNHKPSNTKVDKKVEPKSCGS

SEQ ID NO: 25705 - protein, 118 aa, Artificial Sequence
  Description of Artificial Sequence: Synthetic polypeptide
  VH of XENP021277
EVQLVQSGAEVKKPGATVKISCKASGFNIKDYYMHWVQQAPGKGLEWMGWIEPENGDTEYAPKFQGRVTITADTSTNTAYMELSSLRSEDTAVYYCYARGVRQALDYWGQGTLVTVSS

SEQ ID NO: 25706 - protein, 5 aa, Artificial Sequence
  Description of Artificial Sequence: Synthetic peptide
  XENP021277 vhCDR1
DYYMH

SEQ ID NO: 25707 - protein, 17 aa, Artificial Sequence
  Description of Artificial Sequence: Synthetic peptide
  XENP021277 vhCDR2
WIEPENGDTEYAPKFQG

SEQ ID NO: 25708 - protein, 9 aa, Artificial Sequence
  Description of Artificial Sequence: Synthetic peptide
  XENP021277 vhCDR3
RGVRQALDY

SEQ ID NO: 25709 - protein, 214 aa, Artificial Sequence; identical to SEQ ID NO: 17250
  Description of Artificial Sequence: Synthetic polypeptide
  XENP021277 2A11_H1.50_L2_Fab Light Chain

SEQ ID NO: 25710 - protein, 107 aa, Artificial Sequence; identical to SEQ ID NO: 17251
  Description of Artificial Sequence: Synthetic polypeptide
  VL of XENP021277

SEQ ID NO: 25711 - protein, 11 aa, Artificial Sequence
  Description of Artificial Sequence: Synthetic peptide
  XENP021277 vlCDR1
QASQDIGNYLN

SEQ ID NO: 25712 - protein, 7 aa, Artificial Sequence
  Description of Artificial Sequence: Synthetic peptide
  XENP021277 vlCDR2
YTSRLHS

SEQ ID NO: 25713 - protein, 9 aa, Artificial Sequence
  Description of Artificial Sequence: Synthetic peptide
  XENP021277 vlCDR3
QQGNTLPYT

SEQ ID NO: 25714 - protein, 223 aa, Artificial Sequence
  Description of Artificial Sequence: Synthetic polypeptide
  XENP021278 2A11_H1.51_L2_Fab Heavy Chain
EVQLVQSGAEVKKPGATVKISCKASGFNIKDYYMHWVQQAPGKGLEWMGWIHPENGDTEYAPKFQGRVTITADTSTNTAYMELSSLRSEDTAVYYCYARGVRQALDYWGQGTLVTVSSASTKGPSVFPLAPSSKSTSGGTAALGCLVKDYFPEPVTVSWNSGALTSGVHTFPAVLQSSGLYSLSSVVTVPSSSLGTQTYICNVNHKPSNTKVDKKVEPKSCGS

SEQ ID NO: 25715 - protein, 118 aa, Artificial Sequence
  Description of Artificial Sequence: Synthetic polypeptide
  VH of XENP021278
EVQLVQSGAEVKKPGATVKISCKASGFNIKDYYMHWVQQAPGKGLEWMGWIHPENGDTEYAPKFQGRVTITADTSTNTAYMELSSLRSEDTAVYYCYARGVRQALDYWGQGTLVTVSS

SEQ ID NO: 25716 - protein, 5 aa, Artificial Sequence
  Description of Artificial Sequence: Synthetic peptide
  XENP021278 vhCDR1
DYYMH

SEQ ID NO: 25717 - protein, 17 aa, Artificial Sequence
  Description of Artificial Sequence: Synthetic peptide
  XENP021278 vhCDR2
WIHPENGDTEYAPKFQG

SEQ ID NO: 25718 - protein, 9 aa, Artificial Sequence
  Description of Artificial Sequence: Synthetic peptide
  XENP021278 vhCDR3
RGVRQALDY

SEQ ID NO: 25719 - protein, 214 aa, Artificial Sequence; identical to SEQ ID NO: 17250
  Description of Artificial Sequence: Synthetic polypeptide
  XENP021278 2A11_H1.51_L2_Fab Light Chain

SEQ ID NO: 25720 - protein, 107 aa, Artificial Sequence; identical to SEQ ID NO: 17251
  Description of Artificial Sequence: Synthetic polypeptide
  VL of XENP021278

SEQ ID NO: 25721 - protein, 11 aa, Artificial Sequence
  Description of Artificial Sequence: Synthetic peptide
  XENP021278 vlCDR1
QASQDIGNYLN

SEQ ID NO: 25722 - protein, 7 aa, Artificial Sequence
  Description of Artificial Sequence: Synthetic peptide
  XENP021278 vlCDR2
YTSRLHS

SEQ ID NO: 25723 - protein, 9 aa, Artificial Sequence
  Description of Artificial Sequence: Synthetic peptide
  XENP021278 vlCDR3
QQGNTLPYT

SEQ ID NO: 25724 - protein, 223 aa, Artificial Sequence
  Description of Artificial Sequence: Synthetic polypeptide
  XENP021279 2A11_H1.52_L2_Fab Heavy Chain
EVQLVQSGAEVKKPGATVKISCKASGFNIKDYYMHWVQQAPGKGLEWMGWISPENGDTEYAPKFQGRVTITADTSTNTAYMELSSLRSEDTAVYYCYARGVRQALDYWGQGTLVTVSSASTKGPSVFPLAPSSKSTSGGTAALGCLVKDYFPEPVTVSWNSGALTSGVHTFPAVLQSSGLYSLSSVVTVPSSSLGTQTYICNVNHKPSNTKVDKKVEPKSCGS

SEQ ID NO: 25725 - protein, 118 aa, Artificial Sequence
  Description of Artificial Sequence: Synthetic polypeptide
  VH of XENP021279
EVQLVQSGAEVKKPGATVKISCKASGFNIKDYYMHWVQQAPGKGLEWMGWISPENGDTEYAPKFQGRVTITADTSTNTAYMELSSLRSEDTAVYYCYARGVRQALDYWGQGTLVTVSS

SEQ ID NO: 25726 - protein, 5 aa, Artificial Sequence
  Description of Artificial Sequence: Synthetic peptide
  XENP021279 vhCDR1
DYYMH

SEQ ID NO: 25727 - protein, 17 aa, Artificial Sequence
  Description of Artificial Sequence: Synthetic peptide
  XENP021279 vhCDR2
WISPENGDTEYAPKFQG

SEQ ID NO: 25728 - protein, 9 aa, Artificial Sequence
  Description of Artificial Sequence: Synthetic peptide
  XENP021279 vhCDR3
RGVRQALDY

SEQ ID NO: 25729 - protein, 214 aa, Artificial Sequence; identical to SEQ ID NO: 17250
  Description of Artificial Sequence: Synthetic polypeptide
  XENP021279 2A11_H1.52_L2_Fab Light Chain

SEQ ID NO: 25730 - protein, 107 aa, Artificial Sequence; identical to SEQ ID NO: 17251
  Description of Artificial Sequence: Synthetic polypeptide
  VL of XENP021279

SEQ ID NO: 25731 - protein, 11 aa, Artificial Sequence
  Description of Artificial Sequence: Synthetic peptide
  XENP021279 vlCDR1
QASQDIGNYLN

SEQ ID NO: 25732 - protein, 7 aa, Artificial Sequence
  Description of Artificial Sequence: Synthetic peptide
  XENP021279 vlCDR2
YTSRLHS

SEQ ID NO: 25733 - protein, 9 aa, Artificial Sequence
  Description of Artificial Sequence: Synthetic peptide
  XENP021279 vlCDR3
QQGNTLPYT

SEQ ID NO: 25734 - protein, 223 aa, Artificial Sequence
  Description of Artificial Sequence: Synthetic polypeptide
  XENP021280 2A11_H1.53_L2_Fab Heavy Chain
EVQLVQSGAEVKKPGATVKISCKASGFNIKDYYMHWVQQAPGKGLEWMGWIQPENGDTEYAPKFQGRVTITADTSTNTAYMELSSLRSEDTAVYYCYARGVRQALDYWGQGTLVTVSSASTKGPSVFPLAPSSKSTSGGTAALGCLVKDYFPEPVTVSWNSGALTSGVHTFPAVLQSSGLYSLSSVVTVPSSSLGTQTYICNVNHKPSNTKVDKKVEPKSCGS

SEQ ID NO: 25735 - protein, 118 aa, Artificial Sequence
  Description of Artificial Sequence: Synthetic polypeptide
  VH of XENP021280
EVQLVQSGAEVKKPGATVKISCKASGFNIKDYYMHWVQQAPGKGLEWMGWIQPENGDTEYAPKFQGRVTITADTSTNTAYMELSSLRSEDTAVYYCYARGVRQALDYWGQGTLVTVSS

SEQ ID NO: 25736 - protein, 5 aa, Artificial Sequence
  Description of Artificial Sequence: Synthetic peptide
  XENP021280 vhCDR1
DYYMH

SEQ ID NO: 25737 - protein, 17 aa, Artificial Sequence
  Description of Artificial Sequence: Synthetic peptide
  XENP021280 vhCDR2
WIQPENGDTEYAPKFQG

SEQ ID NO: 25738 - protein, 9 aa, Artificial Sequence
  Description of Artificial Sequence: Synthetic peptide
  XENP021280 vhCDR3
RGVRQALDY

SEQ ID NO: 25739 - protein, 214 aa, Artificial Sequence; identical to SEQ ID NO: 17250
  Description of Artificial Sequence: Synthetic polypeptide
  XENP021280 2A11_H1.53_L2_Fab Light Chain

SEQ ID NO: 25740 - protein, 107 aa, Artificial Sequence; identical to SEQ ID NO: 17251
  Description of Artificial Sequence: Synthetic polypeptide
  VL of XENP021280

SEQ ID NO: 25741 - protein, 11 aa, Artificial Sequence
  Description of Artificial Sequence: Synthetic peptide
  XENP021280 vlCDR1
QASQDIGNYLN

SEQ ID NO: 25742 - protein, 7 aa, Artificial Sequence
  Description of Artificial Sequence: Synthetic peptide
  XENP021280 vlCDR2
YTSRLHS

SEQ ID NO: 25743 - protein, 9 aa, Artificial Sequence
  Description of Artificial Sequence: Synthetic peptide
  XENP021280 vlCDR3
QQGNTLPYT

SEQ ID NO: 25744 - protein, 223 aa, Artificial Sequence
  Description of Artificial Sequence: Synthetic polypeptide
  XENP021281 2A11_H1.54_L2_Fab Heavy Chain
EVQLVQSGAEVKKPGATVKISCKASGFNIKDYYMHWVQQAPGKGLEWMGWILPENGDTEYAPKFQGRVTITADTSTNTAYMELSSLRSEDTAVYYCYARGVRQALDYWGQGTLVTVSSASTKGPSVFPLAPSSKSTSGGTAALGCLVKDYFPEPVTVSWNSGALTSGVHTFPAVLQSSGLYSLSSVVTVPSSSLGTQTYICNVNHKPSNTKVDKKVEPKSCGS

SEQ ID NO: 25745 - protein, 118 aa, Artificial Sequence
  Description of Artificial Sequence: Synthetic polypeptide
  VH of XENP021281
EVQLVQSGAEVKKPGATVKISCKASGFNIKDYYMHWVQQAPGKGLEWMGWILPENGDTEYAPKFQGRVTITADTSTNTAYMELSSLRSEDTAVYYCYARGVRQALDYWGQGTLVTVSS

SEQ ID NO: 25746 - protein, 5 aa, Artificial Sequence
  Description of Artificial Sequence: Synthetic peptide
  XENP021281 vhCDR1
DYYMH

SEQ ID NO: 25747 - protein, 17 aa, Artificial Sequence
  Description of Artificial Sequence: Synthetic peptide
  XENP021281 vhCDR2
WILPENGDTEYAPKFQG

SEQ ID NO: 25748 - protein, 9 aa, Artificial Sequence
  Description of Artificial Sequence: Synthetic peptide
  XENP021281 vhCDR3
RGVRQALDY

SEQ ID NO: 25749 - protein, 214 aa, Artificial Sequence; identical to SEQ ID NO: 17250
  Description of Artificial Sequence: Synthetic polypeptide
  XENP021281 2A11_H1.54_L2_Fab Light Chain

SEQ ID NO: 25750 - protein, 107 aa, Artificial Sequence; identical to SEQ ID NO: 17251
  Description of Artificial Sequence: Synthetic polypeptide
  VL of XENP021281

SEQ ID NO: 25751 - protein, 11 aa, Artificial Sequence
  Description of Artificial Sequence: Synthetic peptide
  XENP021281 vlCDR1
QASQDIGNYLN

SEQ ID NO: 25752 - protein, 7 aa, Artificial Sequence
  Description of Artificial Sequence: Synthetic peptide
  XENP021281 vlCDR2
YTSRLHS

SEQ ID NO: 25753 - protein, 9 aa, Artificial Sequence
  Description of Artificial Sequence: Synthetic peptide
  XENP021281 vlCDR3
QQGNTLPYT

SEQ ID NO: 25754 - protein, 223 aa, Artificial Sequence
  Description of Artificial Sequence: Synthetic polypeptide
  XENP021282 2A11_H1.55_L2_Fab Heavy Chain
EVQLVQSGAEVKKPGATVKISCKASGFNIKDYYMHWVQQAPGKGLEWMGWITPENGDTEYAPKFQGRVTITADTSTNTAYMELSSLRSEDTAVYYCYARGVRQALDYWGQGTLVTVSSASTKGPSVFPLAPSSKSTSGGTAALGCLVKDYFPEPVTVSWNSGALTSGVHTFPAVLQSSGLYSLSSVVTVPSSSLGTQTYICNVNHKPSNTKVDKKVEPKSCGS

SEQ ID NO: 25755 - protein, 118 aa, Artificial Sequence
  Description of Artificial Sequence: Synthetic polypeptide
  VH of XENP021282
EVQLVQSGAEVKKPGATVKISCKASGFNIKDYYMHWVQQAPGKGLEWMGWITPENGDTEYAPKFQGRVTITADTSTNTAYMELSSLRSEDTAVYYCYARGVRQALDYWGQGTLVTVSS

SEQ ID NO: 25756 - protein, 5 aa, Artificial Sequence
  Description of Artificial Sequence: Synthetic peptide
  XENP021282 vhCDR1
DYYMH

SEQ ID NO: 25757 - protein, 17 aa, Artificial Sequence
  Description of Artificial Sequence: Synthetic peptide
  XENP021282 vhCDR2
WITPENGDTEYAPKFQG

SEQ ID NO: 25758 - protein, 9 aa, Artificial Sequence
  Description of Artificial Sequence: Synthetic peptide
  XENP021282 vhCDR3
RGVRQALDY

SEQ ID NO: 25759 - protein, 214 aa, Artificial Sequence; identical to SEQ ID NO: 17250
  Description of Artificial Sequence: Synthetic polypeptide
  XENP021282 2A11_H1.55_L2_Fab Light Chain

SEQ ID NO: 25760 - protein, 107 aa, Artificial Sequence; identical to SEQ ID NO: 17251
  Description of Artificial Sequence: Synthetic polypeptide
  VL of XENP021282

SEQ ID NO: 25761 - protein, 11 aa, Artificial Sequence
  Description of Artificial Sequence: Synthetic peptide
  XENP021282 vlCDR1
QASQDIGNYLN

SEQ ID NO: 25762 - protein, 7 aa, Artificial Sequence
  Description of Artificial Sequence: Synthetic peptide
  XENP021282 vlCDR2
YTSRLHS

SEQ ID NO: 25763 - protein, 9 aa, Artificial Sequence
  Description of Artificial Sequence: Synthetic peptide
  XENP021282 vlCDR3
QQGNTLPYT

SEQ ID NO: 25764 - protein, 223 aa, Artificial Sequence
  Description of Artificial Sequence: Synthetic polypeptide
  XENP021283 2A11_H1.56_L2_Fab Heavy Chain
EVQLVQSGAEVKKPGATVKISCKASGFNIKDYYMHWVQQAPGKGLEWMGWIRPENGDTEYAPKFQGRVTITADTSTNTAYMELSSLRSEDTAVYYCYARGVRQALDYWGQGTLVTVSSASTKGPSVFPLAPSSKSTSGGTAALGCLVKDYFPEPVTVSWNSGALTSGVHTFPAVLQSSGLYSLSSVVTVPSSSLGTQTYICNVNHKPSNTKVDKKVEPKSCGS

SEQ ID NO: 25765 - protein, 118 aa, Artificial Sequence
  Description of Artificial Sequence: Synthetic polypeptide
  VH of XENP021283
EVQLVQSGAEVKKPGATVKISCKASGFNIKDYYMHWVQQAPGKGLEWMGWIRPENGDTEYAPKFQGRVTITADTSTNTAYMELSSLRSEDTAVYYCYARGVRQALDYWGQGTLVTVSS

SEQ ID NO: 25766 - protein, 5 aa, Artificial Sequence
  Description of Artificial Sequence: Synthetic peptide
  XENP021283 vhCDR1
DYYMH

SEQ ID NO: 25767 - protein, 17 aa, Artificial Sequence
  Description of Artificial Sequence: Synthetic peptide
  XENP021283 vhCDR2
WIRPENGDTEYAPKFQG

SEQ ID NO: 25768 - protein, 9 aa, Artificial Sequence
  Description of Artificial Sequence: Synthetic peptide
  XENP021283 vhCDR3
RGVRQALDY

SEQ ID NO: 25769 - protein, 214 aa, Artificial Sequence; identical to SEQ ID NO: 17250
  Description of Artificial Sequence: Synthetic polypeptide
  XENP021283 2A11_H1.56_L2_Fab Light Chain

SEQ ID NO: 25770 - protein, 107 aa, Artificial Sequence; identical to SEQ ID NO: 17251
  Description of Artificial Sequence: Synthetic polypeptide
  VL of XENP021283

SEQ ID NO: 25771 - protein, 11 aa, Artificial Sequence
  Description of Artificial Sequence: Synthetic peptide
  XENP021283 vlCDR1
QASQDIGNYLN

SEQ ID NO: 25772 - protein, 7 aa, Artificial Sequence
  Description of Artificial Sequence: Synthetic peptide
  XENP021283 vlCDR2
YTSRLHS

SEQ ID NO: 25773 - protein, 9 aa, Artificial Sequence
  Description of Artificial Sequence: Synthetic peptide
  XENP021283 vlCDR3
QQGNTLPYT

SEQ ID NO: 25774 - protein, 223 aa, Artificial Sequence
  Description of Artificial Sequence: Synthetic polypeptide
  XENP021284 2A11_H1.57_L2_Fab Heavy Chain
EVQLVQSGAEVKKPGATVKISCKASGFNIKDYYMHWVQQAPGKGLEWMGWIDPQNGDTEYAPKFQGRVTITADTSTNTAYMELSSLRSEDTAVYYCYARGVRQALDYWGQGTLVTVSSASTKGPSVFPLAPSSKSTSGGTAALGCLVKDYFPEPVTVSWNSGALTSGVHTFPAVLQSSGLYSLSSVVTVPSSSLGTQTYICNVNHKPSNTKVDKKVEPKSCGS

SEQ ID NO: 25775 - protein, 118 aa, Artificial Sequence
  Description of Artificial Sequence: Synthetic polypeptide
  VH of XENP021284
EVQLVQSGAEVKKPGATVKISCKASGFNIKDYYMHWVQQAPGKGLEWMGWIDPQNGDTEYAPKFQGRVTITADTSTNTAYMELSSLRSEDTAVYYCYARGVRQALDYWGQGTLVTVSS

SEQ ID NO: 25776 - protein, 5 aa, Artificial Sequence
  Description of Artificial Sequence: Synthetic peptide
  XENP021284 vhCDR1
DYYMH

SEQ ID NO: 25777 - protein, 17 aa, Artificial Sequence
  Description of Artificial Sequence: Synthetic peptide
  XENP021284 vhCDR2
WIDPQNGDTEYAPKFQG

SEQ ID NO: 25778 - protein, 9 aa, Artificial Sequence
  Description of Artificial Sequence: Synthetic peptide
  XENP021284 vhCDR3
RGVRQALDY

SEQ ID NO: 25779 - protein, 214 aa, Artificial Sequence; identical to SEQ ID NO: 17250
  Description of Artificial Sequence: Synthetic polypeptide
  XENP021284 2A11_H1.57_L2_Fab Light Chain

SEQ ID NO: 25780 - protein, 107 aa, Artificial Sequence; identical to SEQ ID NO: 17251
  Description of Artificial Sequence: Synthetic polypeptide
  VL of XENP021284

SEQ ID NO: 25781 - protein, 11 aa, Artificial Sequence
  Description of Artificial Sequence: Synthetic peptide
  XENP021284 vlCDR1
QASQDIGNYLN

SEQ ID NO: 25782 - protein, 7 aa, Artificial Sequence
  Description of Artificial Sequence: Synthetic peptide
  XENP021284 vlCDR2
YTSRLHS

SEQ ID NO: 25783 - protein, 9 aa, Artificial Sequence
  Description of Artificial Sequence: Synthetic peptide
  XENP021284 vlCDR3
QQGNTLPYT

SEQ ID NO: 25784 - protein, 223 aa, Artificial Sequence
  Description of Artificial Sequence: Synthetic polypeptide
  XENP021285 2A11_H1.58_L2_Fab Heavy Chain
EVQLVQSGAEVKKPGATVKISCKASGFNIKDYYMHWVQQAPGKGLEWMGWIDPDNGDTEYAPKFQGRVTITADTSTNTAYMELSSLRSEDTAVYYCYARGVRQALDYWGQGTLVTVSSASTKGPSVFPLAPSSKSTSGGTAALGCLVKDYFPEPVTVSWNSGALTSGVHTFPAVLQSSGLYSLSSVVTVPSSSLGTQTYICNVNHKPSNTKVDKKVEPKSCGS

SEQ ID NO: 25785 - protein, 118 aa, Artificial Sequence
  Description of Artificial Sequence: Synthetic polypeptide
  VH of XENP021285
EVQLVQSGAEVKKPGATVKISCKASGFNIKDYYMHWVQQAPGKGLEWMGWIDPDNGDTEYAPKFQGRVTITADTSTNTAYMELSSLRSEDTAVYYCYARGVRQALDYWGQGTLVTVSS

SEQ ID NO: 25786 - protein, 5 aa, Artificial Sequence
  Description of Artificial Sequence: Synthetic peptide
  XENP021285 vhCDR1
DYYMH

SEQ ID NO: 25787 - protein, 17 aa, Artificial Sequence
  Description of Artificial Sequence: Synthetic peptide
  XENP021285 vhCDR2
WIDPDNGDTEYAPKFQG

SEQ ID NO: 25788 - protein, 9 aa, Artificial Sequence
  Description of Artificial Sequence: Synthetic peptide
  XENP021285 vhCDR3
RGVRQALDY

SEQ ID NO: 25789 - protein, 214 aa, Artificial Sequence; identical to SEQ ID NO: 17250
  Description of Artificial Sequence: Synthetic polypeptide
  XENP021285 2A11_H1.58_L2_Fab Light Chain

SEQ ID NO: 25790 - protein, 107 aa, Artificial Sequence; identical to SEQ ID NO: 17251
  Description of Artificial Sequence: Synthetic polypeptide
  VL of XENP021285

SEQ ID NO: 25791 - protein, 11 aa, Artificial Sequence
  Description of Artificial Sequence: Synthetic peptide
  XENP021285 vlCDR1
QASQDIGNYLN

SEQ ID NO: 25792 - protein, 7 aa, Artificial Sequence
  Description of Artificial Sequence: Synthetic peptide
  XENP021285 vlCDR2
YTSRLHS

SEQ ID NO: 25793 - protein, 9 aa, Artificial Sequence
  Description of Artificial Sequence: Synthetic peptide
  XENP021285 vlCDR3
QQGNTLPYT

SEQ ID NO: 25794 - protein, 223 aa, Artificial Sequence
  Description of Artificial Sequence: Synthetic polypeptide
  XENP021286 2A11_H1.59_L2_Fab Heavy Chain
EVQLVQSGAEVKKPGATVKISCKASGFNIKDYYMHWVQQAPGKGLEWMGWIDPKNGDTEYAPKFQGRVTITADTSTNTAYMELSSLRSEDTAVYYCYARGVRQALDYWGQGTLVTVSSASTKGPSVFPLAPSSKSTSGGTAALGCLVKDYFPEPVTVSWNSGALTSGVHTFPAVLQSSGLYSLSSVVTVPSSSLGTQTYICNVNHKPSNTKVDKKVEPKSCGS

SEQ ID NO: 25795 - protein, 118 aa, Artificial Sequence
  Description of Artificial Sequence: Synthetic polypeptide
  VH of XENP021286
EVQLVQSGAEVKKPGATVKISCKASGFNIKDYYMHWVQQAPGKGLEWMGWIDPKNGDTEYAPKFQGRVTITADTSTNTAYMELSSLRSEDTAVYYCYARGVRQALDYWGQGTLVTVSS

SEQ ID NO: 25796 - protein, 5 aa, Artificial Sequence
  Description of Artificial Sequence: Synthetic peptide
  XENP021286 vhCDR1
DYYMH

SEQ ID NO: 25797 - protein, 17 aa, Artificial Sequence
  Description of Artificial Sequence: Synthetic peptide
  XENP021286 vhCDR2
WIDPKNGDTEYAPKFQG

SEQ ID NO: 25798 - protein, 9 aa, Artificial Sequence
  Description of Artificial Sequence: Synthetic peptide
  XENP021286 vhCDR3
RGVRQALDY

SEQ ID NO: 25799 - protein, 214 aa, Artificial Sequence; identical to SEQ ID NO: 17250
  Description of Artificial Sequence: Synthetic polypeptide
  XENP021286 2A11_H1.59_L2_Fab Light Chain

SEQ ID NO: 25800 - protein, 107 aa, Artificial Sequence; identical to SEQ ID NO: 17251
  Description of Artificial Sequence: Synthetic polypeptide
  VL of XENP021286

SEQ ID NO: 25801 - protein, 11 aa, Artificial Sequence
  Description of Artificial Sequence: Synthetic peptide
  XENP021286 vlCDR1
QASQDIGNYLN

SEQ ID NO: 25802 - protein, 7 aa, Artificial Sequence
  Description of Artificial Sequence: Synthetic peptide
  XENP021286 vlCDR2
YTSRLHS

SEQ ID NO: 25803 - protein, 9 aa, Artificial Sequence
  Description of Artificial Sequence: Synthetic peptide
  XENP021286 vlCDR3
QQGNTLPYT

SEQ ID NO: 25804 - protein, 223 aa, Artificial Sequence
  Description of Artificial Sequence: Synthetic polypeptide
  XENP021287 2A11_H1.60_L2_Fab Heavy Chain
EVQLVQSGAEVKKPGATVKISCKASGFNIKDYYMHWVQQAPGKGLEWMGWIDPSNGDTEYAPKFQGRVTITADTSTNTAYMELSSLRSEDTAVYYCYARGVRQALDYWGQGTLVTVSSASTKGPSVFPLAPSSKSTSGGTAALGCLVKDYFPEPVTVSWNSGALTSGVHTFPAVLQSSGLYSLSSVVTVPSSSLGTQTYICNVNHKPSNTKVDKKVEPKSCGS

SEQ ID NO: 25805 - protein, 118 aa, Artificial Sequence
  Description of Artificial Sequence: Synthetic polypeptide
  VH of XENP021287
EVQLVQSGAEVKKPGATVKISCKASGFNIKDYYMHWVQQAPGKGLEWMGWIDPSNGDTEYAPKFQGRVTITADTSTNTAYMELSSLRSEDTAVYYCYARGVRQALDYWGQGTLVTVSS

SEQ ID NO: 25806 - protein, 5 aa, Artificial Sequence
  Description of Artificial Sequence: Synthetic peptide
  XENP021287 vhCDR1
DYYMH

SEQ ID NO: 25807 - protein, 17 aa, Artificial Sequence
  Description of Artificial Sequence: Synthetic peptide
  XENP021287 vhCDR2
WIDPSNGDTEYAPKFQG

SEQ ID NO: 25808 - protein, 9 aa, Artificial Sequence
  Description of Artificial Sequence: Synthetic peptide
  XENP021287 vhCDR3
RGVRQALDY

SEQ ID NO: 25809 - protein, 214 aa, Artificial Sequence; identical to SEQ ID NO: 17250
  Description of Artificial Sequence: Synthetic polypeptide
  XENP021287 2A11_H1.60_L2_Fab Light Chain

SEQ ID NO: 25810 - protein, 107 aa, Artificial Sequence; identical to SEQ ID NO: 17251
  Description of Artificial Sequence: Synthetic polypeptide
  VL of XENP021287

SEQ ID NO: 25811 - protein, 11 aa, Artificial Sequence
  Description of Artificial Sequence: Synthetic peptide
  XENP021287 vlCDR1
QASQDIGNYLN

SEQ ID NO: 25812 - protein, 7 aa, Artificial Sequence
  Description of Artificial Sequence: Synthetic peptide
  XENP021287 vlCDR2
YTSRLHS

SEQ ID NO: 25813 - protein, 9 aa, Artificial Sequence
  Description of Artificial Sequence: Synthetic peptide
  XENP021287 vlCDR3
QQGNTLPYT

SEQ ID NO: 25814 - protein, 223 aa, Artificial Sequence
  Description of Artificial Sequence: Synthetic polypeptide
  XENP021288 2A11_H1.61_L2_Fab Heavy Chain
EVQLVQSGAEVKKPGATVKISCKASGFNIKDYYMHWVQQAPGKGLEWMGWIDPNNGDTEYAPKFQGRVTITADTSTNTAYMELSSLRSEDTAVYYCYARGVRQALDYWGQGTLVTVSSASTKGPSVFPLAPSSKSTSGGTAALGCLVKDYFPEPVTVSWNSGALTSGVHTFPAVLQSSGLYSLSSVVTVPSSSLGTQTYICNVNHKPSNTKVDKKVEPKSCGS

SEQ ID NO: 25815 - protein, 118 aa, Artificial Sequence
  Description of Artificial Sequence: Synthetic polypeptide
  VH of XENP021288
EVQLVQSGAEVKKPGATVKISCKASGFNIKDYYMHWVQQAPGKGLEWMGWIDPNNGDTEYAPKFQGRVTITADTSTNTAYMELSSLRSEDTAVYYCYARGVRQALDYWGQGTLVTVSS

SEQ ID NO: 25816 - protein, 5 aa, Artificial Sequence
  Description of Artificial Sequence: Synthetic peptide
  XENP021288 vhCDR1
DYYMH

SEQ ID NO: 25817 - protein, 17 aa, Artificial Sequence
  Description of Artificial Sequence: Synthetic peptide
  XENP021288 vhCDR2
WIDPNNGDTEYAPKFQG

SEQ ID NO: 25818 - protein, 9 aa, Artificial Sequence
  Description of Artificial Sequence: Synthetic peptide
  XENP021288 vhCDR3
RGVRQALDY

SEQ ID NO: 25819 - protein, 214 aa, Artificial Sequence; identical to SEQ ID NO: 17250
  Description of Artificial Sequence: Synthetic polypeptide
  XENP021288 2A11_H1.61_L2_Fab Light Chain

SEQ ID NO: 25820 - protein, 107 aa, Artificial Sequence; identical to SEQ ID NO: 17251
  Description of Artificial Sequence: Synthetic polypeptide
  VL of XENP021288

SEQ ID NO: 25821 - protein, 11 aa, Artificial Sequence
  Description of Artificial Sequence: Synthetic peptide
  XENP021288 vlCDR1
QASQDIGNYLN

SEQ ID NO: 25822 - protein, 7 aa, Artificial Sequence
  Description of Artificial Sequence: Synthetic peptide
  XENP021288 vlCDR2
YTSRLHS

SEQ ID NO: 25823 - protein, 9 aa, Artificial Sequence
  Description of Artificial Sequence: Synthetic peptide
  XENP021288 vlCDR3
QQGNTLPYT

SEQ ID NO: 25824 - protein, 223 aa, Artificial Sequence
  Description of Artificial Sequence: Synthetic polypeptide
  XENP021289 2A11_H1.62_L2_Fab Heavy Chain
EVQLVQSGAEVKKPGATVKISCKASGFNIKDYYMHWVQQAPGKGLEWMGWIDPANGDTEYAPKFQGRVTITADTSTNTAYMELSSLRSEDTAVYYCYARGVRQALDYWGQGTLVTVSSASTKGPSVFPLAPSSKSTSGGTAALGCLVKDYFPEPVTVSWNSGALTSGVHTFPAVLQSSGLYSLSSVVTVPSSSLGTQTYICNVNHKPSNTKVDKKVEPKSCGS

SEQ ID NO: 25825 - protein, 118 aa, Artificial Sequence
  Description of Artificial Sequence: Synthetic polypeptide
  VH of XENP021289
EVQLVQSGAEVKKPGATVKISCKASGFNIKDYYMHWVQQAPGKGLEWMGWIDPANGDTEYAPKFQGRVTITADTSTNTAYMELSSLRSEDTAVYYCYARGVRQALDYWGQGTLVTVSS

SEQ ID NO: 25826 - protein, 5 aa, Artificial Sequence
  Description of Artificial Sequence: Synthetic peptide
  XENP021289 vhCDR1
DYYMH

SEQ ID NO: 25827 - protein, 17 aa, Artificial Sequence
  Description of Artificial Sequence: Synthetic peptide
  XENP021289 vhCDR2
WIDPANGDTEYAPKFQG

SEQ ID NO: 25828 - protein, 9 aa, Artificial Sequence
  Description of Artificial Sequence: Synthetic peptide
  XENP021289 vhCDR3
RGVRQALDY

SEQ ID NO: 25829 - protein, 214 aa, Artificial Sequence; identical to SEQ ID NO: 17250
  Description of Artificial Sequence: Synthetic polypeptide
  XENP021289 2A11_H1.62_L2_Fab Light Chain

SEQ ID NO: 25830 - protein, 107 aa, Artificial Sequence; identical to SEQ ID NO: 17251
  Description of Artificial Sequence: Synthetic polypeptide
  VL of XENP021289

SEQ ID NO: 25831 - protein, 11 aa, Artificial Sequence
  Description of Artificial Sequence: Synthetic peptide
  XENP021289 vlCDR1
QASQDIGNYLN

SEQ ID NO: 25832 - protein, 7 aa, Artificial Sequence
  Description of Artificial Sequence: Synthetic peptide
  XENP021289 vlCDR2
YTSRLHS

SEQ ID NO: 25833 - protein, 9 aa, Artificial Sequence
  Description of Artificial Sequence: Synthetic peptide
  XENP021289 vlCDR3
QQGNTLPYT

SEQ ID NO: 25834 - protein, 223 aa, Artificial Sequence
  Description of Artificial Sequence: Synthetic polypeptide
  XENP021290 2A11_H1.63_L2_Fab Heavy Chain
EVQLVQSGAEVKKPGATVKISCKASGFNIKDYYMHWVQQAPGKGLEWMGWIDPTNGDTEYAPKFQGRVTITADTSTNTAYMELSSLRSEDTAVYYCYARGVRQALDYWGQGTLVTVSSASTKGPSVFPLAPSSKSTSGGTAALGCLVKDYFPEPVTVSWNSGALTSGVHTFPAVLQSSGLYSLSSVVTVPSSSLGTQTYICNVNHKPSNTKVDKKVEPKSCGS

SEQ ID NO: 25835 - protein, 118 aa, Artificial Sequence
  Description of Artificial Sequence: Synthetic polypeptide
  VH of XENP021290
EVQLVQSGAEVKKPGATVKISCKASGFNIKDYYMHWVQQAPGKGLEWMGWIDPTNGDTEYAPKFQGRVTITADTSTNTAYMELSSLRSEDTAVYYCYARGVRQALDYWGQGTLVTVSS

SEQ ID NO: 25836 - protein, 5 aa, Artificial Sequence
  Description of Artificial Sequence: Synthetic peptide
  XENP021290 vhCDR1
DYYMH

SEQ ID NO: 25837 - protein, 17 aa, Artificial Sequence
  Description of Artificial Sequence: Synthetic peptide
  XENP021290 vhCDR2
WIDPTNGDTEYAPKFQG

SEQ ID NO: 25838 - protein, 9 aa, Artificial Sequence
  Description of Artificial Sequence: Synthetic peptide
  XENP021290 vhCDR3
RGVRQALDY

SEQ ID NO: 25839 - protein, 214 aa, Artificial Sequence; identical to SEQ ID NO: 17250
  Description of Artificial Sequence: Synthetic polypeptide
  XENP021290 2A11_H1.63_L2_Fab Light Chain

SEQ ID NO: 25840 - protein, 107 aa, Artificial Sequence; identical to SEQ ID NO: 17251
  Description of Artificial Sequence: Synthetic polypeptide
  VL of XENP021290

SEQ ID NO: 25841 - protein, 11 aa, Artificial Sequence
  Description of Artificial Sequence: Synthetic peptide
  XENP021290 vlCDR1
QASQDIGNYLN

SEQ ID NO: 25842 - protein, 7 aa, Artificial Sequence
  Description of Artificial Sequence: Synthetic peptide
  XENP021290 vlCDR2
YTSRLHS

SEQ ID NO: 25843 - protein, 9 aa, Artificial Sequence
  Description of Artificial Sequence: Synthetic peptide
  XENP021290 vlCDR3
QQGNTLPYT

SEQ ID NO: 25844 - protein, 223 aa, Artificial Sequence
  Description of Artificial Sequence: Synthetic polypeptide
  XENP021291 2A11_H1.64_L2_Fab Heavy Chain
EVQLVQSGAEVKKPGATVKISCKASGFNIKDYYMHWVQQAPGKGLEWMGWIDPYNGDTEYAPKFQGRVTITADTSTNTAYMELSSLRSEDTAVYYCYARGVRQALDYWGQGTLVTVSSASTKGPSVFPLAPSSKSTSGGTAALGCLVKDYFPEPVTVSWNSGALTSGVHTFPAVLQSSGLYSLSSVVTVPSSSLGTQTYICNVNHKPSNTKVDKKVEPKSCGS

SEQ ID NO: 25845 - protein, 118 aa, Artificial Sequence
  Description of Artificial Sequence: Synthetic polypeptide
  VH of XENP021291
EVQLVQSGAEVKKPGATVKISCKASGFNIKDYYMHWVQQAPGKGLEWMGWIDPYNGDTEYAPKFQGRVTITADTSTNTAYMELSSLRSEDTAVYYCYARGVRQALDYWGQGTLVTVSS

SEQ ID NO: 25846 - protein, 5 aa, Artificial Sequence
  Description of Artificial Sequence: Synthetic peptide
  XENP021291 vhCDR1
DYYMH

SEQ ID NO: 25847 - protein, 17 aa, Artificial Sequence
  Description of Artificial Sequence: Synthetic peptide
  XENP021291 vhCDR2
WIDPYNGDTEYAPKFQG

SEQ ID NO: 25848 - protein, 9 aa, Artificial Sequence
  Description of Artificial Sequence: Synthetic peptide
  XENP021291 vhCDR3
RGVRQALDY

SEQ ID NO: 25849 - protein, 214 aa, Artificial Sequence; identical to SEQ ID NO: 17250
  Description of Artificial Sequence: Synthetic polypeptide
  XENP021291 2A11_H1.64_L2_Fab Light Chain

SEQ ID NO: 25850 - protein, 107 aa, Artificial Sequence; identical to SEQ ID NO: 17251
  Description of Artificial Sequence: Synthetic polypeptide
  VL of XENP021291

SEQ ID NO: 25851 - protein, 11 aa, Artificial Sequence
  Description of Artificial Sequence: Synthetic peptide
  XENP021291 vlCDR1
QASQDIGNYLN

SEQ ID NO: 25852 - protein, 7 aa, Artificial Sequence
  Description of Artificial Sequence: Synthetic peptide
  XENP021291 vlCDR2
YTSRLHS

SEQ ID NO: 25853 - protein, 9 aa, Artificial Sequence
  Description of Artificial Sequence: Synthetic peptide
  XENP021291 vlCDR3
QQGNTLPYT

SEQ ID NO: 25854 - protein, 223 aa, Artificial Sequence
  Description of Artificial Sequence: Synthetic polypeptide
  XENP021292 2A11_H1.65_L2_Fab Heavy Chain
EVQLVQSGAEVKKPGATVKISCKASGFNIKDYYMHWVQQAPGKGLEWMGWIDPEDGDTEYAPKFQGRVTITADTSTNTAYMELSSLRSEDTAVYYCYARGVRQALDYWGQGTLVTVSSASTKGPSVFPLAPSSKSTSGGTAALGCLVKDYFPEPVTVSWNSGALTSGVHTFPAVLQSSGLYSLSSVVTVPSSSLGTQTYICNVNHKPSNTKVDKKVEPKSCGS

SEQ ID NO: 25855 - protein, 118 aa, Artificial Sequence
  Description of Artificial Sequence: Synthetic polypeptide
  VH of XENP021292
EVQLVQSGAEVKKPGATVKISCKASGFNIKDYYMHWVQQAPGKGLEWMGWIDPEDGDTEYAPKFQGRVTITADTSTNTAYMELSSLRSEDTAVYYCYARGVRQALDYWGQGTLVTVSS

SEQ ID NO: 25856 - protein, 5 aa, Artificial Sequence
  Description of Artificial Sequence: Synthetic peptide
  XENP021292 vhCDR1
DYYMH

SEQ ID NO: 25857 - protein, 17 aa, Artificial Sequence
  Description of Artificial Sequence: Synthetic peptide
  XENP021292 vhCDR2
WIDPEDGDTEYAPKFQG

SEQ ID NO: 25858 - protein, 9 aa, Artificial Sequence
  Description of Artificial Sequence: Synthetic peptide
  XENP021292 vhCDR3
RGVRQALDY

SEQ ID NO: 25859 - protein, 214 aa, Artificial Sequence; identical to SEQ ID NO: 17250
  Description of Artificial Sequence: Synthetic polypeptide
  XENP021292 2A11_H1.65_L2_Fab Light Chain

SEQ ID NO: 25860 - protein, 107 aa, Artificial Sequence; identical to SEQ ID NO: 17251
  Description of Artificial Sequence: Synthetic polypeptide
  VL of XENP021292

SEQ ID NO: 25861 - protein, 11 aa, Artificial Sequence
  Description of Artificial Sequence: Synthetic peptide
  XENP021292 vlCDR1
QASQDIGNYLN

SEQ ID NO: 25862 - protein, 7 aa, Artificial Sequence
  Description of Artificial Sequence: Synthetic peptide
  XENP021292 vlCDR2
YTSRLHS

SEQ ID NO: 25863 - protein, 9 aa, Artificial Sequence
  Description of Artificial Sequence: Synthetic peptide
  XENP021292 vlCDR3
QQGNTLPYT

SEQ ID NO: 25864 - protein, 223 aa, Artificial Sequence
  Description of Artificial Sequence: Synthetic polypeptide
  XENP021293 2A11_H1.66_L2_Fab Heavy Chain
EVQLVQSGAEVKKPGATVKISCKASGFNIKDYYMHWVQQAPGKGLEWMGWIDPEHGDTEYAPKFQGRVTITADTSTNTAYMELSSLRSEDTAVYYCYARGVRQALDYWGQGTLVTVSSASTKGPSVFPLAPSSKSTSGGTAALGCLVKDYFPEPVTVSWNSGALTSGVHTFPAVLQSSGLYSLSSVVTVPSSSLGTQTYICNVNHKPSNTKVDKKVEPKSCGS

SEQ ID NO: 25865 - protein, 118 aa, Artificial Sequence
  Description of Artificial Sequence: Synthetic polypeptide
  VH of XENP021293
EVQLVQSGAEVKKPGATVKISCKASGFNIKDYYMHWVQQAPGKGLEWMGWIDPEHGDTEYAPKFQGRVTITADTSTNTAYMELSSLRSEDTAVYYCYARGVRQALDYWGQGTLVTVSS

SEQ ID NO: 25866 - protein, 5 aa, Artificial Sequence
  Description of Artificial Sequence: Synthetic peptide
  XENP021293 vhCDR1
DYYMH

SEQ ID NO: 25867 - protein, 17 aa, Artificial Sequence
  Description of Artificial Sequence: Synthetic peptide
  XENP021293 vhCDR2
WIDPEHGDTEYAPKFQG

SEQ ID NO: 25868 - protein, 9 aa, Artificial Sequence
  Description of Artificial Sequence: Synthetic peptide
  XENP021293 vhCDR3
RGVRQALDY

SEQ ID NO: 25869 - protein, 214 aa, Artificial Sequence; identical to SEQ ID NO: 17250
  Description of Artificial Sequence: Synthetic polypeptide
  XENP021293 2A11_H1.66_L2_Fab Light Chain

SEQ ID NO: 25870 - protein, 107 aa, Artificial Sequence; identical to SEQ ID NO: 17251
  Description of Artificial Sequence: Synthetic polypeptide
  VL of XENP021293

SEQ ID NO: 25871 - protein, 11 aa, Artificial Sequence
  Description of Artificial Sequence: Synthetic peptide
  XENP021293 vlCDR1
QASQDIGNYLN

SEQ ID NO: 25872 - protein, 7 aa, Artificial Sequence
  Description of Artificial Sequence: Synthetic peptide
  XENP021293 vlCDR2
YTSRLHS

SEQ ID NO: 25873 - protein, 9 aa, Artificial Sequence
  Description of Artificial Sequence: Synthetic peptide
  XENP021293 vlCDR3
QQGNTLPYT

SEQ ID NO: 25874 - protein, 223 aa, Artificial Sequence
  Description of Artificial Sequence: Synthetic polypeptide
  XENP021294 2A11_H1.67_L2_Fab Heavy Chain
EVQLVQSGAEVKKPGATVKISCKASGFNIKDYYMHWVQQAPGKGLEWMGWIDPEEGDTEYAPKFQGRVTITADTSTNTAYMELSSLRSEDTAVYYCYARGVRQALDYWGQGTLVTVSSASTKGPSVFPLAPSSKSTSGGTAALGCLVKDYFPEPVTVSWNSGALTSGVHTFPAVLQSSGLYSLSSVVTVPSSSLGTQTYICNVNHKPSNTKVDKKVEPKSCGS

SEQ ID NO: 25875 - protein, 118 aa, Artificial Sequence
  Description of Artificial Sequence: Synthetic polypeptide
  VH of XENP021294
EVQLVQSGAEVKKPGATVKISCKASGFNIKDYYMHWVQQAPGKGLEWMGWIDPEEGDTEYAPKFQGRVTITADTSTNTAYMELSSLRSEDTAVYYCYARGVRQALDYWGQGTLVTVSS

SEQ ID NO: 25876 - protein, 5 aa, Artificial Sequence
  Description of Artificial Sequence: Synthetic peptide
  XENP021294 vhCDR1
DYYMH

SEQ ID NO: 25877 - protein, 17 aa, Artificial Sequence
  Description of Artificial Sequence: Synthetic peptide
  XENP021294 vhCDR2
WIDPEEGDTEYAPKFQG

SEQ ID NO: 25878 - protein, 9 aa, Artificial Sequence
  Description of Artificial Sequence: Synthetic peptide
  XENP021294 vhCDR3
RGVRQALDY

SEQ ID NO: 25879 - protein, 214 aa, Artificial Sequence; identical to SEQ ID NO: 17250
  Description of Artificial Sequence: Synthetic polypeptide
  XENP021294 2A11_H1.67_L2_Fab Light Chain

SEQ ID NO: 25880 - protein, 107 aa, Artificial Sequence; identical to SEQ ID NO: 17251
  Description of Artificial Sequence: Synthetic polypeptide
  VL of XENP021294

SEQ ID NO: 25881 - protein, 11 aa, Artificial Sequence
  Description of Artificial Sequence: Synthetic peptide
  XENP021294 vlCDR1
QASQDIGNYLN

SEQ ID NO: 25882 - protein, 7 aa, Artificial Sequence
  Description of Artificial Sequence: Synthetic peptide
  XENP021294 vlCDR2
YTSRLHS

SEQ ID NO: 25883 - protein, 9 aa, Artificial Sequence
  Description of Artificial Sequence: Synthetic peptide
  XENP021294 vlCDR3
QQGNTLPYT

SEQ ID NO: 25884 - protein, 223 aa, Artificial Sequence
  Description of Artificial Sequence: Synthetic polypeptide
  XENP021295 2A11_H1.68_L2_Fab Heavy Chain
EVQLVQSGAEVKKPGATVKISCKASGFNIKDYYMHWVQQAPGKGLEWMGWIDPEQGDTEYAPKFQGRVTITADTSTNTAYMELSSLRSEDTAVYYCYARGVRQALDYWGQGTLVTVSSASTKGPSVFPLAPSSKSTSGGTAALGCLVKDYFPEPVTVSWNSGALTSGVHTFPAVLQSSGLYSLSSVVTVPSSSLGTQTYICNVNHKPSNTKVDKKVEPKSCGS

SEQ ID NO: 25885 - protein, 118 aa, Artificial Sequence
  Description of Artificial Sequence: Synthetic polypeptide
  VH of XENP021295
EVQLVQSGAEVKKPGATVKISCKASGFNIKDYYMHWVQQAPGKGLEWMGWIDPEQGDTEYAPKFQGRVTITADTSTNTAYMELSSLRSEDTAVYYCYARGVRQALDYWGQGTLVTVSS

SEQ ID NO: 25886 - protein, 5 aa, Artificial Sequence
  Description of Artificial Sequence: Synthetic peptide
  XENP021295 vhCDR1
DYYMH

SEQ ID NO: 25887 - protein, 17 aa, Artificial Sequence
  Description of Artificial Sequence: Synthetic peptide
  XENP021295 vhCDR2
WIDPEQGDTEYAPKFQG

SEQ ID NO: 25888 - protein, 9 aa, Artificial Sequence
  Description of Artificial Sequence: Synthetic peptide
  XENP021295 vhCDR3
RGVRQALDY

SEQ ID NO: 25889 - protein, 214 aa, Artificial Sequence; identical to SEQ ID NO: 17250
  Description of Artificial Sequence: Synthetic polypeptide
  XENP021295 2A11_H1.68_L2_Fab Light Chain

SEQ ID NO: 25890 - protein, 107 aa, Artificial Sequence; identical to SEQ ID NO: 17251
  Description of Artificial Sequence: Synthetic polypeptide
  VL of XENP021295

SEQ ID NO: 25891 - protein, 11 aa, Artificial Sequence
  Description of Artificial Sequence: Synthetic peptide
  XENP021295 vlCDR1
QASQDIGNYLN

SEQ ID NO: 25892 - protein, 7 aa, Artificial Sequence
  Description of Artificial Sequence: Synthetic peptide
  XENP021295 vlCDR2
YTSRLHS

SEQ ID NO: 25893 - protein, 9 aa, Artificial Sequence
  Description of Artificial Sequence: Synthetic peptide
  XENP021295 vlCDR3
QQGNTLPYT

SEQ ID NO: 25894 - protein, 223 aa, Artificial Sequence
  Description of Artificial Sequence: Synthetic polypeptide
  XENP021296 2A11_H1.69_L2_Fab Heavy Chain
EVQLVQSGAEVKKPGATVKISCKASGFNIKDYYMHWVQQAPGKGLEWMGWIDPERGDTEYAPKFQGRVTITADTSTNTAYMELSSLRSEDTAVYYCYARGVRQALDYWGQGTLVTVSSASTKGPSVFPLAPSSKSTSGGTAALGCLVKDYFPEPVTVSWNSGALTSGVHTFPAVLQSSGLYSLSSVVTVPSSSLGTQTYICNVNHKPSNTKVDKKVEPKSCGS

SEQ ID NO: 25895 - protein, 118 aa, Artificial Sequence
  Description of Artificial Sequence: Synthetic polypeptide
  VH of XENP021296
EVQLVQSGAEVKKPGATVKISCKASGFNIKDYYMHWVQQAPGKGLEWMGWIDPERGDTEYAPKFQGRVTITADTSTNTAYMELSSLRSEDTAVYYCYARGVRQALDYWGQGTLVTVSS

SEQ ID NO: 25896 - protein, 5 aa, Artificial Sequence
  Description of Artificial Sequence: Synthetic peptide
  XENP021296 vhCDR1
DYYMH

SEQ ID NO: 25897 - protein, 17 aa, Artificial Sequence
  Description of Artificial Sequence: Synthetic peptide
  XENP021296 vhCDR2
WIDPERGDTEYAPKFQG

SEQ ID NO: 25898 - protein, 9 aa, Artificial Sequence
  Description of Artificial Sequence: Synthetic peptide
  XENP021296 vhCDR3
RGVRQALDY

SEQ ID NO: 25899 - protein, 214 aa, Artificial Sequence; identical to SEQ ID NO: 17250
  Description of Artificial Sequence: Synthetic polypeptide
  XENP021296 2A11_H1.69_L2_Fab Light Chain

SEQ ID NO: 25900 - protein, 107 aa, Artificial Sequence; identical to SEQ ID NO: 17251
  Description of Artificial Sequence: Synthetic polypeptide
  VL of XENP021296

SEQ ID NO: 25901 - protein, 11 aa, Artificial Sequence
  Description of Artificial Sequence: Synthetic peptide
  XENP021296 vlCDR1
QASQDIGNYLN

SEQ ID NO: 25902 - protein, 7 aa, Artificial Sequence
  Description of Artificial Sequence: Synthetic peptide
  XENP021296 vlCDR2
YTSRLHS

SEQ ID NO: 25903 - protein, 9 aa, Artificial Sequence
  Description of Artificial Sequence: Synthetic peptide
  XENP021296 vlCDR3
QQGNTLPYT

SEQ ID NO: 25904 - protein, 223 aa, Artificial Sequence
  Description of Artificial Sequence: Synthetic polypeptide
  XENP021301 2A11_H1.70_L2_Fab Heavy Chain
EVQLVQSGAEVKKPGATVKISCKASGFNIKDYYMHWVQQAPGKGLEWMGWIDPELGDTEYAPKFQGRVTITADTSTNTAYMELSSLRSEDTAVYYCYARGVRQALDYWGQGTLVTVSSASTKGPSVFPLAPSSKSTSGGTAALGCLVKDYFPEPVTVSWNSGALTSGVHTFPAVLQSSGLYSLSSVVTVPSSSLGTQTYICNVNHKPSNTKVDKKVEPKSCGS

SEQ ID NO: 25905 - protein, 118 aa, Artificial Sequence
  Description of Artificial Sequence: Synthetic polypeptide
  VH of XENP021301
EVQLVQSGAEVKKPGATVKISCKASGFNIKDYYMHWVQQAPGKGLEWMGWIDPELGDTEYAPKFQGRVTITADTSTNTAYMELSSLRSEDTAVYYCYARGVRQALDYWGQGTLVTVSS

SEQ ID NO: 25906 - protein, 5 aa, Artificial Sequence
  Description of Artificial Sequence: Synthetic peptide
  XENP021301 vhCDR1
DYYMH

SEQ ID NO: 25907 - protein, 17 aa, Artificial Sequence
  Description of Artificial Sequence: Synthetic peptide
  XENP021301 vhCDR2
WIDPELGDTEYAPKFQG

SEQ ID NO: 25908 - protein, 9 aa, Artificial Sequence
  Description of Artificial Sequence: Synthetic peptide
  XENP021301 vhCDR3
RGVRQALDY

SEQ ID NO: 25909 - protein, 214 aa, Artificial Sequence; identical to SEQ ID NO: 17250
  Description of Artificial Sequence: Synthetic polypeptide
  XENP021301 2A11_H1.70_L2_Fab Light Chain

SEQ ID NO: 25910 - protein, 107 aa, Artificial Sequence; identical to SEQ ID NO: 17251
  Description of Artificial Sequence: Synthetic polypeptide
  VL of XENP021301

SEQ ID NO: 25911 - protein, 11 aa, Artificial Sequence
  Description of Artificial Sequence: Synthetic peptide
  XENP021301 vlCDR1
QASQDIGNYLN

SEQ ID NO: 25912 - protein, 7 aa, Artificial Sequence
  Description of Artificial Sequence: Synthetic peptide
  XENP021301 vlCDR2
YTSRLHS

SEQ ID NO: 25913 - protein, 9 aa, Artificial Sequence
  Description of Artificial Sequence: Synthetic peptide
  XENP021301 vlCDR3
QQGNTLPYT

SEQ ID NO: 25914 - protein, 223 aa, Artificial Sequence
  Description of Artificial Sequence: Synthetic polypeptide
  XENP021302 2A11_H1.71_L2_Fab Heavy Chain
EVQLVQSGAEVKKPGATVKISCKASGFNIKDYYMHWVQQAPGKGLEWMGWIDPETGDTEYAPKFQGRVTITADTSTNTAYMELSSLRSEDTAVYYCYARGVRQALDYWGQGTLVTVSSASTKGPSVFPLAPSSKSTSGGTAALGCLVKDYFPEPVTVSWNSGALTSGVHTFPAVLQSSGLYSLSSVVTVPSSSLGTQTYICNVNHKPSNTKVDKKVEPKSCGS

SEQ ID NO: 25915 - protein, 118 aa, Artificial Sequence
  Description of Artificial Sequence: Synthetic polypeptide
  VH of XENP021302
EVQLVQSGAEVKKPGATVKISCKASGFNIKDYYMHWVQQAPGKGLEWMGWIDPETGDTEYAPKFQGRVTITADTSTNTAYMELSSLRSEDTAVYYCYARGVRQALDYWGQGTLVTVSS

SEQ ID NO: 25916 - protein, 5 aa, Artificial Sequence
  Description of Artificial Sequence: Synthetic peptide
  XENP021302 vhCDR1
DYYMH

SEQ ID NO: 25917 - protein, 17 aa, Artificial Sequence
  Description of Artificial Sequence: Synthetic peptide
  XENP021302 vhCDR2
WIDPETGDTEYAPKFQG

SEQ ID NO: 25918 - protein, 9 aa, Artificial Sequence
  Description of Artificial Sequence: Synthetic peptide
  XENP021302 vhCDR3
RGVRQALDY

SEQ ID NO: 25919 - protein, 214 aa, Artificial Sequence; identical to SEQ ID NO: 17250
  Description of Artificial Sequence: Synthetic polypeptide
  XENP021302 2A11_H1.71_L2_Fab Light Chain

SEQ ID NO: 25920 - protein, 107 aa, Artificial Sequence; identical to SEQ ID NO: 17251
  Description of Artificial Sequence: Synthetic polypeptide
  VL of XENP021302

SEQ ID NO: 25921 - protein, 11 aa, Artificial Sequence
  Description of Artificial Sequence: Synthetic peptide
  XENP021302 vlCDR1
QASQDIGNYLN

SEQ ID NO: 25922 - protein, 7 aa, Artificial Sequence
  Description of Artificial Sequence: Synthetic peptide
  XENP021302 vlCDR2
YTSRLHS

SEQ ID NO: 25923 - protein, 9 aa, Artificial Sequence
  Description of Artificial Sequence: Synthetic peptide
  XENP021302 vlCDR3
QQGNTLPYT

SEQ ID NO: 25924 - protein, 223 aa, Artificial Sequence
  Description of Artificial Sequence: Synthetic polypeptide
  XENP021303 2A11_H1.72_L2_Fab Heavy Chain
EVQLVQSGAEVKKPGATVKISCKASGFNIKDYYMHWVQQAPGKGLEWMGWIDPENGNTEYAPKFQGRVTITADTSTNTAYMELSSLRSEDTAVYYCYARGVRQALDYWGQGTLVTVSSASTKGPSVFPLAPSSKSTSGGTAALGCLVKDYFPEPVTVSWNSGALTSGVHTFPAVLQSSGLYSLSSVVTVPSSSLGTQTYICNVNHKPSNTKVDKKVEPKSCGS

SEQ ID NO: 25925 - protein, 118 aa, Artificial Sequence
  Description of Artificial Sequence: Synthetic polypeptide
  VH of XENP021303
EVQLVQSGAEVKKPGATVKISCKASGFNIKDYYMHWVQQAPGKGLEWMGWIDPENGNTEYAPKFQGRVTITADTSTNTAYMELSSLRSEDTAVYYCYARGVRQALDYWGQGTLVTVSS

SEQ ID NO: 25926 - protein, 5 aa, Artificial Sequence
  Description of Artificial Sequence: Synthetic peptide
  XENP021303 vhCDR1
DYYMH

SEQ ID NO: 25927 - protein, 17 aa, Artificial Sequence
  Description of Artificial Sequence: Synthetic peptide
  XENP021303 vhCDR2
WIDPENGNTEYAPKFQG

SEQ ID NO: 25928 - protein, 9 aa, Artificial Sequence
  Description of Artificial Sequence: Synthetic peptide
  XENP021303 vhCDR3
RGVRQALDY

SEQ ID NO: 25929 - protein, 214 aa, Artificial Sequence; identical to SEQ ID NO: 17250
  Description of Artificial Sequence: Synthetic polypeptide
  XENP021303 2A11_H1.72_L2_Fab Light Chain

SEQ ID NO: 25930 - protein, 107 aa, Artificial Sequence; identical to SEQ ID NO: 17251
  Description of Artificial Sequence: Synthetic polypeptide
  VL of XENP021303

SEQ ID NO: 25931 - protein, 11 aa, Artificial Sequence
  Description of Artificial Sequence: Synthetic peptide
  XENP021303 vlCDR1
QASQDIGNYLN

SEQ ID NO: 25932 - protein, 7 aa, Artificial Sequence
  Description of Artificial Sequence: Synthetic peptide
  XENP021303 vlCDR2
YTSRLHS

SEQ ID NO: 25933 - protein, 9 aa, Artificial Sequence
  Description of Artificial Sequence: Synthetic peptide
  XENP021303 vlCDR3
QQGNTLPYT

SEQ ID NO: 25934 - protein, 223 aa, Artificial Sequence
  Description of Artificial Sequence: Synthetic polypeptide
  XENP021304 2A11_H1.73_L2_Fab Heavy Chain
EVQLVQSGAEVKKPGATVKISCKASGFNIKDYYMHWVQQAPGKGLEWMGWIDPENGETEYAPKFQGRVTITADTSTNTAYMELSSLRSEDTAVYYCYARGVRQALDYWGQGTLVTVSSASTKGPSVFPLAPSSKSTSGGTAALGCLVKDYFPEPVTVSWNSGALTSGVHTFPAVLQSSGLYSLSSVVTVPSSSLGTQTYICNVNHKPSNTKVDKKVEPKSCGS

SEQ ID NO: 25935 - protein, 118 aa, Artificial Sequence
  Description of Artificial Sequence: Synthetic polypeptide
  VH of XENP021304
EVQLVQSGAEVKKPGATVKISCKASGFNIKDYYMHWVQQAPGKGLEWMGWIDPENGETEYAPKFQGRVTITADTSTNTAYMELSSLRSEDTAVYYCYARGVRQALDYWGQGTLVTVSS

SEQ ID NO: 25936 - protein, 5 aa, Artificial Sequence
  Description of Artificial Sequence: Synthetic peptide
  XENP021304 vhCDR1
DYYMH

SEQ ID NO: 25937 - protein, 17 aa, Artificial Sequence
  Description of Artificial Sequence: Synthetic peptide
  XENP021304 vhCDR2
WIDPENGETEYAPKFQG

SEQ ID NO: 25938 - protein, 9 aa, Artificial Sequence
  Description of Artificial Sequence: Synthetic peptide
  XENP021304 vhCDR3
RGVRQALDY

SEQ ID NO: 25939 - protein, 214 aa, Artificial Sequence; identical to SEQ ID NO: 17250
  Description of Artificial Sequence: Synthetic polypeptide
  XENP021304 2A11_H1.73_L2_Fab Light Chain

SEQ ID NO: 25940 - protein, 107 aa, Artificial Sequence; identical to SEQ ID NO: 17251
  Description of Artificial Sequence: Synthetic polypeptide
  VL of XENP021304

SEQ ID NO: 25941 - protein, 11 aa, Artificial Sequence
  Description of Artificial Sequence: Synthetic peptide
  XENP021304 vlCDR1
QASQDIGNYLN

SEQ ID NO: 25942 - protein, 7 aa, Artificial Sequence
  Description of Artificial Sequence: Synthetic peptide
  XENP021304 vlCDR2
YTSRLHS

SEQ ID NO: 25943 - protein, 9 aa, Artificial Sequence
  Description of Artificial Sequence: Synthetic peptide
  XENP021304 vlCDR3
QQGNTLPYT

SEQ ID NO: 25944 - protein, 223 aa, Artificial Sequence
  Description of Artificial Sequence: Synthetic polypeptide
  XENP021305 2A11_H1.74_L2_Fab Heavy Chain
EVQLVQSGAEVKKPGATVKISCKASGFNIKDYYMHWVQQAPGKGLEWMGWIDPENGHTEYAPKFQGRVTITADTSTNTAYMELSSLRSEDTAVYYCYARGVRQALDYWGQGTLVTVSSASTKGPSVFPLAPSSKSTSGGTAALGCLVKDYFPEPVTVSWNSGALTSGVHTFPAVLQSSGLYSLSSVVTVPSSSLGTQTYICNVNHKPSNTKVDKKVEPKSCGS

SEQ ID NO: 25945 - protein, 118 aa, Artificial Sequence
  Description of Artificial Sequence: Synthetic polypeptide
  VH of XENP021305
EVQLVQSGAEVKKPGATVKISCKASGFNIKDYYMHWVQQAPGKGLEWMGWIDPENGHTEYAPKFQGRVTITADTSTNTAYMELSSLRSEDTAVYYCYARGVRQALDYWGQGTLVTVSS

SEQ ID NO: 25946 - protein, 5 aa, Artificial Sequence
  Description of Artificial Sequence: Synthetic peptide
  XENP021305 vhCDR1
DYYMH

SEQ ID NO: 25947 - protein, 17 aa, Artificial Sequence
  Description of Artificial Sequence: Synthetic peptide
  XENP021305 vhCDR2
WIDPENGHTEYAPKFQG

SEQ ID NO: 25948 - protein, 9 aa, Artificial Sequence
  Description of Artificial Sequence: Synthetic peptide
  XENP021305 vhCDR3
RGVRQALDY

SEQ ID NO: 25949 - protein, 214 aa, Artificial Sequence; identical to SEQ ID NO: 17250
  Description of Artificial Sequence: Synthetic polypeptide
  XENP021305 2A11_H1.74_L2_Fab Light Chain

SEQ ID NO: 25950 - protein, 107 aa, Artificial Sequence; identical to SEQ ID NO: 17251
  Description of Artificial Sequence: Synthetic polypeptide
  VL of XENP021305

SEQ ID NO: 25951 - protein, 11 aa, Artificial Sequence
  Description of Artificial Sequence: Synthetic peptide
  XENP021305 vlCDR1
QASQDIGNYLN

SEQ ID NO: 25952 - protein, 7 aa, Artificial Sequence
  Description of Artificial Sequence: Synthetic peptide
  XENP021305 vlCDR2
YTSRLHS

SEQ ID NO: 25953 - protein, 9 aa, Artificial Sequence
  Description of Artificial Sequence: Synthetic peptide
  XENP021305 vlCDR3
QQGNTLPYT

SEQ ID NO: 25954 - protein, 223 aa, Artificial Sequence
  Description of Artificial Sequence: Synthetic polypeptide
  XENP021306 2A11_H1.75_L2_Fab Heavy Chain
EVQLVQSGAEVKKPGATVKISCKASGFNIKDYYMHWVQQAPGKGLEWMGWIDPENGQTEYAPKFQGRVTITADTSTNTAYMELSSLRSEDTAVYYCYARGVRQALDYWGQGTLVTVSSASTKGPSVFPLAPSSKSTSGGTAALGCLVKDYFPEPVTVSWNSGALTSGVHTFPAVLQSSGLYSLSSVVTVPSSSLGTQTYICNVNHKPSNTKVDKKVEPKSCGS

SEQ ID NO: 25955 - protein, 118 aa, Artificial Sequence
  Description of Artificial Sequence: Synthetic polypeptide
  VH of XENP021306
EVQLVQSGAEVKKPGATVKISCKASGFNIKDYYMHWVQQAPGKGLEWMGWIDPENGQTEYAPKFQGRVTITADTSTNTAYMELSSLRSEDTAVYYCYARGVRQALDYWGQGTLVTVSS

SEQ ID NO: 25956 - protein, 5 aa, Artificial Sequence
  Description of Artificial Sequence: Synthetic peptide
  XENP021306 vhCDR1
DYYMH

SEQ ID NO: 25957 - protein, 17 aa, Artificial Sequence
  Description of Artificial Sequence: Synthetic peptide
  XENP021306 vhCDR2
WIDPENGQTEYAPKFQG

SEQ ID NO: 25958 - protein, 9 aa, Artificial Sequence
  Description of Artificial Sequence: Synthetic peptide
  XENP021306 vhCDR3
RGVRQALDY

SEQ ID NO: 25959 - protein, 214 aa, Artificial Sequence; identical to SEQ ID NO: 17250
  Description of Artificial Sequence: Synthetic polypeptide
  XENP021306 2A11_H1.75_L2_Fab Light Chain

SEQ ID NO: 25960 - protein, 107 aa, Artificial Sequence; identical to SEQ ID NO: 17251
  Description of Artificial Sequence: Synthetic polypeptide
  VL of XENP021306

SEQ ID NO: 25961 - protein, 11 aa, Artificial Sequence
  Description of Artificial Sequence: Synthetic peptide
  XENP021306 vlCDR1
QASQDIGNYLN

SEQ ID NO: 25962 - protein, 7 aa, Artificial Sequence
  Description of Artificial Sequence: Synthetic peptide
  XENP021306 vlCDR2
YTSRLHS

SEQ ID NO: 25963 - protein, 9 aa, Artificial Sequence
  Description of Artificial Sequence: Synthetic peptide
  XENP021306 vlCDR3
QQGNTLPYT

SEQ ID NO: 25964 - protein, 223 aa, Artificial Sequence
  Description of Artificial Sequence: Synthetic polypeptide
  XENP021307 2A11_H1.76_L2_Fab Heavy Chain
EVQLVQSGAEVKKPGATVKISCKASGFNIKDYYMHWVQQAPGKGLEWMGWIDPENGLTEYAPKFQGRVTITADTSTNTAYMELSSLRSEDTAVYYCYARGVRQALDYWGQGTLVTVSSASTKGPSVFPLAPSSKSTSGGTAALGCLVKDYFPEPVTVSWNSGALTSGVHTFPAVLQSSGLYSLSSVVTVPSSSLGTQTYICNVNHKPSNTKVDKKVEPKSCGS

SEQ ID NO: 25965 - protein, 118 aa, Artificial Sequence
  Description of Artificial Sequence: Synthetic polypeptide
  VH of XENP021307
EVQLVQSGAEVKKPGATVKISCKASGFNIKDYYMHWVQQAPGKGLEWMGWIDPENGLTEYAPKFQGRVTITADTSTNTAYMELSSLRSEDTAVYYCYARGVRQALDYWGQGTLVTVSS

SEQ ID NO: 25966 - protein, 5 aa, Artificial Sequence
  Description of Artificial Sequence: Synthetic peptide
  XENP021307 vhCDR1
DYYMH

SEQ ID NO: 25967 - protein, 17 aa, Artificial Sequence
  Description of Artificial Sequence: Synthetic peptide
  XENP021307 vhCDR2
WIDPENGLTEYAPKFQG

SEQ ID NO: 25968 - protein, 9 aa, Artificial Sequence
  Description of Artificial Sequence: Synthetic peptide
  XENP021307 vhCDR3
RGVRQALDY

SEQ ID NO: 25969 - protein, 214 aa, Artificial Sequence; identical to SEQ ID NO: 17250
  Description of Artificial Sequence: Synthetic polypeptide
  XENP021307 2A11_H1.76_L2_Fab Light Chain

SEQ ID NO: 25970 - protein, 107 aa, Artificial Sequence; identical to SEQ ID NO: 17251
  Description of Artificial Sequence: Synthetic polypeptide
  VL of XENP021307

SEQ ID NO: 25971 - protein, 11 aa, Artificial Sequence
  Description of Artificial Sequence: Synthetic peptide
  XENP021307 vlCDR1
QASQDIGNYLN

SEQ ID NO: 25972 - protein, 7 aa, Artificial Sequence
  Description of Artificial Sequence: Synthetic peptide
  XENP021307 vlCDR2
YTSRLHS

SEQ ID NO: 25973 - protein, 9 aa, Artificial Sequence
  Description of Artificial Sequence: Synthetic peptide
  XENP021307 vlCDR3
QQGNTLPYT

SEQ ID NO: 25974 - protein, 223 aa, Artificial Sequence
  Description of Artificial Sequence: Synthetic polypeptide
  XENP021308 2A11_H1.77_L2_Fab Heavy Chain
EVQLVQSGAEVKKPGATVKISCKASGFNIKDYYMHWVQQAPGKGLEWMGWIDPENGDTEYAPKFQGRVTITADTSTNTAYMELSSLRSEDTAVYYCNARGVRQALDYWGQGTLVTVSSASTKGPSVFPLAPSSKSTSGGTAALGCLVKDYFPEPVTVSWNSGALTSGVHTFPAVLQSSGLYSLSSVVTVPSSSLGTQTYICNVNHKPSNTKVDKKVEPKSCGS

SEQ ID NO: 25975 - protein, 118 aa, Artificial Sequence
  Description of Artificial Sequence: Synthetic polypeptide
  VH of XENP021308
EVQLVQSGAEVKKPGATVKISCKASGFNIKDYYMHWVQQAPGKGLEWMGWIDPENGDTEYAPKFQGRVTITADTSTNTAYMELSSLRSEDTAVYYCNARGVRQALDYWGQGTLVTVSS

SEQ ID NO: 25976 - protein, 5 aa, Artificial Sequence
  Description of Artificial Sequence: Synthetic peptide
  XENP021308 vhCDR1
DYYMH

SEQ ID NO: 25977 - protein, 17 aa, Artificial Sequence
  Description of Artificial Sequence: Synthetic peptide
  XENP021308 vhCDR2
WIDPENGDTEYAPKFQG

SEQ ID NO: 25978 - protein, 9 aa, Artificial Sequence
  Description of Artificial Sequence: Synthetic peptide
  XENP021308 vhCDR3
RGVRQALDY

SEQ ID NO: 25979 - protein, 214 aa, Artificial Sequence; identical to SEQ ID NO: 17250
  Description of Artificial Sequence: Synthetic polypeptide
  XENP021308 2A11_H1.77_L2_Fab Light Chain

SEQ ID NO: 25980 - protein, 107 aa, Artificial Sequence; identical to SEQ ID NO: 17251
  Description of Artificial Sequence: Synthetic polypeptide
  VL of XENP021308

SEQ ID NO: 25981 - protein, 11 aa, Artificial Sequence
  Description of Artificial Sequence: Synthetic peptide
  XENP021308 vlCDR1
QASQDIGNYLN

SEQ ID NO: 25982 - protein, 7 aa, Artificial Sequence
  Description of Artificial Sequence: Synthetic peptide
  XENP021308 vlCDR2
YTSRLHS

SEQ ID NO: 25983 - protein, 9 aa, Artificial Sequence
  Description of Artificial Sequence: Synthetic peptide
  XENP021308 vlCDR3
QQGNTLPYT

SEQ ID NO: 25984 - protein, 223 aa, Artificial Sequence
  Description of Artificial Sequence: Synthetic polypeptide
  XENP021309 2A11_H1.78_L2_Fab Heavy Chain
EVQLVQSGAEVKKPGATVKISCKASGFNIKDYYMHWVQQAPGKGLEWMGWIDPENGDTEYAPKFQGRVTITADTSTNTAYMELSSLRSEDTAVYYCQARGVRQALDYWGQGTLVTVSSASTKGPSVFPLAPSSKSTSGGTAALGCLVKDYFPEPVTVSWNSGALTSGVHTFPAVLQSSGLYSLSSVVTVPSSSLGTQTYICNVNHKPSNTKVDKKVEPKSCGS

SEQ ID NO: 25985 - protein, 118 aa, Artificial Sequence
  Description of Artificial Sequence: Synthetic polypeptide
  VH of XENP021309
EVQLVQSGAEVKKPGATVKISCKASGFNIKDYYMHWVQQAPGKGLEWMGWIDPENGDTEYAPKFQGRVTITADTSTNTAYMELSSLRSEDTAVYYCQARGVRQALDYWGQGTLVTVSS

SEQ ID NO: 25986 - protein, 5 aa, Artificial Sequence
  Description of Artificial Sequence: Synthetic peptide
  XENP021309 vhCDR1
DYYMH

SEQ ID NO: 25987 - protein, 17 aa, Artificial Sequence
  Description of Artificial Sequence: Synthetic peptide
  XENP021309 vhCDR2
WIDPENGDTEYAPKFQG

SEQ ID NO: 25988 - protein, 9 aa, Artificial Sequence
  Description of Artificial Sequence: Synthetic peptide
  XENP021309 vhCDR3
RGVRQALDY

SEQ ID NO: 25989 - protein, 214 aa, Artificial Sequence; identical to SEQ ID NO: 17250
  Description of Artificial Sequence: Synthetic polypeptide
  XENP021309 2A11_H1.78_L2_Fab Light Chain

SEQ ID NO: 25990 - protein, 107 aa, Artificial Sequence; identical to SEQ ID NO: 17251
  Description of Artificial Sequence: Synthetic polypeptide
  VL of XENP021309

SEQ ID NO: 25991 - protein, 11 aa, Artificial Sequence
  Description of Artificial Sequence: Synthetic peptide
  XENP021309 vlCDR1
QASQDIGNYLN

SEQ ID NO: 25992 - protein, 7 aa, Artificial Sequence
  Description of Artificial Sequence: Synthetic peptide
  XENP021309 vlCDR2
YTSRLHS

SEQ ID NO: 25993 - protein, 9 aa, Artificial Sequence
  Description of Artificial Sequence: Synthetic peptide
  XENP021309 vlCDR3
QQGNTLPYT

SEQ ID NO: 25994 - protein, 223 aa, Artificial Sequence
  Description of Artificial Sequence: Synthetic polypeptide
  XENP021310 2A11_H1.79_L2_Fab Heavy Chain
EVQLVQSGAEVKKPGATVKISCKASGFNIKDYYMHWVQQAPGKGLEWMGWIDPENGDTEYAPKFQGRVTITADTSTNTAYMELSSLRSEDTAVYYCYIRGVRQALDYWGQGTLVTVSSASTKGPSVFPLAPSSKSTSGGTAALGCLVKDYFPEPVTVSWNSGALTSGVHTFPAVLQSSGLYSLSSVVTVPSSSLGTQTYICNVNHKPSNTKVDKKVEPKSCGS

SEQ ID NO: 25995 - protein, 118 aa, Artificial Sequence
  Description of Artificial Sequence: Synthetic polypeptide
  VH of XENP021310
EVQLVQSGAEVKKPGATVKISCKASGFNIKDYYMHWVQQAPGKGLEWMGWIDPENGDTEYAPKFQGRVTITADTSTNTAYMELSSLRSEDTAVYYCYIRGVRQALDYWGQGTLVTVSS

SEQ ID NO: 25996 - protein, 5 aa, Artificial Sequence
  Description of Artificial Sequence: Synthetic peptide
  XENP021310 vhCDR1
DYYMH

SEQ ID NO: 25997 - protein, 17 aa, Artificial Sequence
  Description of Artificial Sequence: Synthetic peptide
  XENP021310 vhCDR2
WIDPENGDTEYAPKFQG

SEQ ID NO: 25998 - protein, 9 aa, Artificial Sequence
  Description of Artificial Sequence: Synthetic peptide
  XENP021310 vhCDR3
RGVRQALDY

SEQ ID NO: 25999 - protein, 214 aa, Artificial Sequence; identical to SEQ ID NO: 17250
  Description of Artificial Sequence: Synthetic polypeptide
  XENP021310 2A11_H1.79_L2_Fab Light Chain

SEQ ID NO: 26000 - protein, 107 aa, Artificial Sequence; identical to SEQ ID NO: 17251
  Description of Artificial Sequence: Synthetic polypeptide
  VL of XENP021310

SEQ ID NO: 26001 - protein, 11 aa, Artificial Sequence
  Description of Artificial Sequence: Synthetic peptide
  XENP021310 vlCDR1
QASQDIGNYLN

SEQ ID NO: 26002 - protein, 7 aa, Artificial Sequence
  Description of Artificial Sequence: Synthetic peptide
  XENP021310 vlCDR2
YTSRLHS

SEQ ID NO: 26003 - protein, 9 aa, Artificial Sequence
  Description of Artificial Sequence: Synthetic peptide
  XENP021310 vlCDR3
QQGNTLPYT

SEQ ID NO: 26004 - protein, 223 aa, Artificial Sequence
  Description of Artificial Sequence: Synthetic polypeptide
  XENP021311 2A11_H1.80_L2_Fab Heavy Chain
EVQLVQSGAEVKKPGATVKISCKASGFNIKDYYMHWVQQAPGKGLEWMGWIDPENGDTEYAPKFQGRVTITADTSTNTAYMELSSLRSEDTAVYYCYLRGVRQALDYWGQGTLVTVSSASTKGPSVFPLAPSSKSTSGGTAALGCLVKDYFPEPVTVSWNSGALTSGVHTFPAVLQSSGLYSLSSVVTVPSSSLGTQTYICNVNHKPSNTKVDKKVEPKSCGS

SEQ ID NO: 26005 - protein, 118 aa, Artificial Sequence
  Description of Artificial Sequence: Synthetic polypeptide
  VH of XENP021311
EVQLVQSGAEVKKPGATVKISCKASGFNIKDYYMHWVQQAPGKGLEWMGWIDPENGDTEYAPKFQGRVTITADTSTNTAYMELSSLRSEDTAVYYCYLRGVRQALDYWGQGTLVTVSS

SEQ ID NO: 26006 - protein, 5 aa, Artificial Sequence
  Description of Artificial Sequence: Synthetic peptide
  XENP021311 vhCDR1
DYYMH

SEQ ID NO: 26007 - protein, 17 aa, Artificial Sequence
  Description of Artificial Sequence: Synthetic peptide
  XENP021311 vhCDR2
WIDPENGDTEYAPKFQG

SEQ ID NO: 26008 - protein, 9 aa, Artificial Sequence
  Description of Artificial Sequence: Synthetic peptide
  XENP021311 vhCDR3
RGVRQALDY

SEQ ID NO: 26009 - protein, 214 aa, Artificial Sequence; identical to SEQ ID NO: 17250
  Description of Artificial Sequence: Synthetic polypeptide
  XENP021311 2A11_H1.80_L2_Fab Light Chain

SEQ ID NO: 26010 - protein, 107 aa, Artificial Sequence; identical to SEQ ID NO: 17251
  Description of Artificial Sequence: Synthetic polypeptide
  VL of XENP021311

SEQ ID NO: 26011 - protein, 11 aa, Artificial Sequence
  Description of Artificial Sequence: Synthetic peptide
  XENP021311 vlCDR1
QASQDIGNYLN

SEQ ID NO: 26012 - protein, 7 aa, Artificial Sequence
  Description of Artificial Sequence: Synthetic peptide
  XENP021311 vlCDR2
YTSRLHS

SEQ ID NO: 26013 - protein, 9 aa, Artificial Sequence
  Description of Artificial Sequence: Synthetic peptide
  XENP021311 vlCDR3
QQGNTLPYT

SEQ ID NO: 26014 - protein, 223 aa, Artificial Sequence
  Description of Artificial Sequence: Synthetic polypeptide
  XENP021312 2A11_H1.81_L2_Fab Heavy Chain
EVQLVQSGAEVKKPGATVKISCKASGFNIKDYYMHWVQQAPGKGLEWMGWIDPENGDTEYAPKFQGRVTITADTSTNTAYMELSSLRSEDTAVYYCYVRGVRQALDYWGQGTLVTVSSASTKGPSVFPLAPSSKSTSGGTAALGCLVKDYFPEPVTVSWNSGALTSGVHTFPAVLQSSGLYSLSSVVTVPSSSLGTQTYICNVNHKPSNTKVDKKVEPKSCGS

SEQ ID NO: 26015 - protein, 118 aa, Artificial Sequence
  Description of Artificial Sequence: Synthetic polypeptide
  VH of XENP021312
EVQLVQSGAEVKKPGATVKISCKASGFNIKDYYMHWVQQAPGKGLEWMGWIDPENGDTEYAPKFQGRVTITADTSTNTAYMELSSLRSEDTAVYYCYVRGVRQALDYWGQGTLVTVSS

SEQ ID NO: 26016 - protein, 5 aa, Artificial Sequence
  Description of Artificial Sequence: Synthetic peptide
  XENP021312 vhCDR1
DYYMH

SEQ ID NO: 26017 - protein, 17 aa, Artificial Sequence
  Description of Artificial Sequence: Synthetic peptide
  XENP021312 vhCDR2
WIDPENGDTEYAPKFQG

SEQ ID NO: 26018 - protein, 9 aa, Artificial Sequence
  Description of Artificial Sequence: Synthetic peptide
  XENP021312 vhCDR3
RGVRQALDY

SEQ ID NO: 26019 - protein, 214 aa, Artificial Sequence; identical to SEQ ID NO: 17250
  Description of Artificial Sequence: Synthetic polypeptide
  XENP021312 2A11_H1.81_L2_Fab Light Chain

SEQ ID NO: 26020 - protein, 107 aa, Artificial Sequence; identical to SEQ ID NO: 17251
  Description of Artificial Sequence: Synthetic polypeptide
  VL of XENP021312

SEQ ID NO: 26021 - protein, 11 aa, Artificial Sequence
  Description of Artificial Sequence: Synthetic peptide
  XENP021312 vlCDR1
QASQDIGNYLN

SEQ ID NO: 26022 - protein, 7 aa, Artificial Sequence
  Description of Artificial Sequence: Synthetic peptide
  XENP021312 vlCDR2
YTSRLHS

SEQ ID NO: 26023 - protein, 9 aa, Artificial Sequence
  Description of Artificial Sequence: Synthetic peptide
  XENP021312 vlCDR3
QQGNTLPYT

SEQ ID NO: 26024 - protein, 223 aa, Artificial Sequence
  Description of Artificial Sequence: Synthetic polypeptide
  XENP021313 2A11_H1.82_L2_Fab Heavy Chain
EVQLVQSGAEVKKPGATVKISCKASGFNIKDYYMHWVQQAPGKGLEWMGWIDPENGDTEYAPKFQGRVTITADTSTNTAYMELSSLRSEDTAVYYCYAKGVRQALDYWGQGTLVTVSSASTKGPSVFPLAPSSKSTSGGTAALGCLVKDYFPEPVTVSWNSGALTSGVHTFPAVLQSSGLYSLSSVVTVPSSSLGTQTYICNVNHKPSNTKVDKKVEPKSCGS

SEQ ID NO: 26025 - protein, 118 aa, Artificial Sequence
  Description of Artificial Sequence: Synthetic polypeptide
  VH of XENP021313
EVQLVQSGAEVKKPGATVKISCKASGFNIKDYYMHWVQQAPGKGLEWMGWIDPENGDTEYAPKFQGRVTITADTSTNTAYMELSSLRSEDTAVYYCYAKGVRQALDYWGQGTLVTVSS

SEQ ID NO: 26026 - protein, 5 aa, Artificial Sequence
  Description of Artificial Sequence: Synthetic peptide
  XENP021313 vhCDR1
DYYMH

SEQ ID NO: 26027 - protein, 17 aa, Artificial Sequence
  Description of Artificial Sequence: Synthetic peptide
  XENP021313 vhCDR2
WIDPENGDTEYAPKFQG

SEQ ID NO: 26028 - protein, 9 aa, Artificial Sequence
  Description of Artificial Sequence: Synthetic peptide
  XENP021313 vhCDR3
KGVRQALDY

SEQ ID NO: 26029 - protein, 214 aa, Artificial Sequence; identical to SEQ ID NO: 17250
  Description of Artificial Sequence: Synthetic polypeptide
  XENP021313 2A11_H1.82_L2_Fab Light Chain

SEQ ID NO: 26030 - protein, 107 aa, Artificial Sequence; identical to SEQ ID NO: 17251
  Description of Artificial Sequence: Synthetic polypeptide
  VL of XENP021313

SEQ ID NO: 26031 - protein, 11 aa, Artificial Sequence
  Description of Artificial Sequence: Synthetic peptide
  XENP021313 vlCDR1
QASQDIGNYLN

SEQ ID NO: 26032 - protein, 7 aa, Artificial Sequence
  Description of Artificial Sequence: Synthetic peptide
  XENP021313 vlCDR2
YTSRLHS

SEQ ID NO: 26033 - protein, 9 aa, Artificial Sequence
  Description of Artificial Sequence: Synthetic peptide
  XENP021313 vlCDR3
QQGNTLPYT

SEQ ID NO: 26034 - protein, 223 aa, Artificial Sequence
  Description of Artificial Sequence: Synthetic polypeptide
  XENP021314 2A11_H1.83_L2_Fab Heavy Chain
EVQLVQSGAEVKKPGATVKISCKASGFNIKDYYMHWVQQAPGKGLEWMGWIDPENGDTEYAPKFQGRVTITADTSTNTAYMELSSLRSEDTAVYYCYAEGVRQALDYWGQGTLVTVSSASTKGPSVFPLAPSSKSTSGGTAALGCLVKDYFPEPVTVSWNSGALTSGVHTFPAVLQSSGLYSLSSVVTVPSSSLGTQTYICNVNHKPSNTKVDKKVEPKSCGS

SEQ ID NO: 26035 - protein, 118 aa, Artificial Sequence
  Description of Artificial Sequence: Synthetic polypeptide
  VH of XENP021314
EVQLVQSGAEVKKPGATVKISCKASGFNIKDYYMHWVQQAPGKGLEWMGWIDPENGDTEYAPKFQGRVTITADTSTNTAYMELSSLRSEDTAVYYCYAEGVRQALDYWGQGTLVTVSS

SEQ ID NO: 26036 - protein, 5 aa, Artificial Sequence
  Description of Artificial Sequence: Synthetic peptide
  XENP021314 vhCDR1
DYYMH

SEQ ID NO: 26037 - protein, 17 aa, Artificial Sequence
  Description of Artificial Sequence: Synthetic peptide
  XENP021314 vhCDR2
WIDPENGDTEYAPKFQG

SEQ ID NO: 26038 - protein, 9 aa, Artificial Sequence
  Description of Artificial Sequence: Synthetic peptide
  XENP021314 vhCDR3
EGVRQALDY

SEQ ID NO: 26039 - protein, 214 aa, Artificial Sequence; identical to SEQ ID NO: 17250
  Description of Artificial Sequence: Synthetic polypeptide
  XENP021314 2A11_H1.83_L2_Fab Light Chain

SEQ ID NO: 26040 - protein, 107 aa, Artificial Sequence; identical to SEQ ID NO: 17251
  Description of Artificial Sequence: Synthetic polypeptide
  VL of XENP021314

SEQ ID NO: 26041 - protein, 11 aa, Artificial Sequence
  Description of Artificial Sequence: Synthetic peptide
  XENP021314 vlCDR1
QASQDIGNYLN

SEQ ID NO: 26042 - protein, 7 aa, Artificial Sequence
  Description of Artificial Sequence: Synthetic peptide
  XENP021314 vlCDR2
YTSRLHS

SEQ ID NO: 26043 - protein, 9 aa, Artificial Sequence
  Description of Artificial Sequence: Synthetic peptide
  XENP021314 vlCDR3
QQGNTLPYT

SEQ ID NO: 26044 - protein, 223 aa, Artificial Sequence
  Description of Artificial Sequence: Synthetic polypeptide
  XENP021315 2A11_H1.84_L2_Fab Heavy Chain
EVQLVQSGAEVKKPGATVKISCKASGFNIKDYYMHWVQQAPGKGLEWMGWIDPENGDTEYAPKFQGRVTITADTSTNTAYMELSSLRSEDTAVYYCYAYGVRQALDYWGQGTLVTVSSASTKGPSVFPLAPSSKSTSGGTAALGCLVKDYFPEPVTVSWNSGALTSGVHTFPAVLQSSGLYSLSSVVTVPSSSLGTQTYICNVNHKPSNTKVDKKVEPKSCGS

SEQ ID NO: 26045 - protein, 118 aa, Artificial Sequence
  Description of Artificial Sequence: Synthetic polypeptide
  VH of XENP021315
EVQLVQSGAEVKKPGATVKISCKASGFNIKDYYMHWVQQAPGKGLEWMGWIDPENGDTEYAPKFQGRVTITADTSTNTAYMELSSLRSEDTAVYYCYAYGVRQALDYWGQGTLVTVSS

SEQ ID NO: 26046 - protein, 5 aa, Artificial Sequence
  Description of Artificial Sequence: Synthetic peptide
  XENP021315 vhCDR1
DYYMH

SEQ ID NO: 26047 - protein, 17 aa, Artificial Sequence
  Description of Artificial Sequence: Synthetic peptide
  XENP021315 vhCDR2
WIDPENGDTEYAPKFQG

SEQ ID NO: 26048 - protein, 9 aa, Artificial Sequence
  Description of Artificial Sequence: Synthetic peptide
  XENP021315 vhCDR3
YGVRQALDY

SEQ ID NO: 26049 - protein, 214 aa, Artificial Sequence; identical to SEQ ID NO: 17250
  Description of Artificial Sequence: Synthetic polypeptide
  XENP021315 2A11_H1.84_L2_Fab Light Chain

SEQ ID NO: 26050 - protein, 107 aa, Artificial Sequence; identical to SEQ ID NO: 17251
  Description of Artificial Sequence: Synthetic polypeptide
  VL of XENP021315

SEQ ID NO: 26051 - protein, 11 aa, Artificial Sequence
  Description of Artificial Sequence: Synthetic peptide
  XENP021315 vlCDR1
QASQDIGNYLN

SEQ ID NO: 26052 - protein, 7 aa, Artificial Sequence
  Description of Artificial Sequence: Synthetic peptide
  XENP021315 vlCDR2
YTSRLHS

SEQ ID NO: 26053 - protein, 9 aa, Artificial Sequence
  Description of Artificial Sequence: Synthetic peptide
  XENP021315 vlCDR3
QQGNTLPYT

SEQ ID NO: 26054 - protein, 223 aa, Artificial Sequence
  Description of Artificial Sequence: Synthetic polypeptide
  XENP021316 2A11_H1.85_L2_Fab Heavy Chain
EVQLVQSGAEVKKPGATVKISCKASGFNIKDYYMHWVQQAPGKGLEWMGWIDPENGDTEYAPKFQGRVTITADTSTNTAYMELSSLRSEDTAVYYCYAQGVRQALDYWGQGTLVTVSSASTKGPSVFPLAPSSKSTSGGTAALGCLVKDYFPEPVTVSWNSGALTSGVHTFPAVLQSSGLYSLSSVVTVPSSSLGTQTYICNVNHKPSNTKVDKKVEPKSCGS

SEQ ID NO: 26055 - protein, 118 aa, Artificial Sequence
  Description of Artificial Sequence: Synthetic polypeptide
  VH of XENP021316
EVQLVQSGAEVKKPGATVKISCKASGFNIKDYYMHWVQQAPGKGLEWMGWIDPENGDTEYAPKFQGRVTITADTSTNTAYMELSSLRSEDTAVYYCYAQGVRQALDYWGQGTLVTVSS

SEQ ID NO: 26056 - protein, 5 aa, Artificial Sequence
  Description of Artificial Sequence: Synthetic peptide
  XENP021316 vhCDR1
DYYMH

SEQ ID NO: 26057 - protein, 17 aa, Artificial Sequence
  Description of Artificial Sequence: Synthetic peptide
  XENP021316 vhCDR2
WIDPENGDTEYAPKFQG

SEQ ID NO: 26058 - protein, 9 aa, Artificial Sequence
  Description of Artificial Sequence: Synthetic peptide
  XENP021316 vhCDR3
QGVRQALDY

SEQ ID NO: 26059 - protein, 214 aa, Artificial Sequence; identical to SEQ ID NO: 17250
  Description of Artificial Sequence: Synthetic polypeptide
  XENP021316 2A11_H1.85_L2_Fab Light Chain

SEQ ID NO: 26060 - protein, 107 aa, Artificial Sequence; identical to SEQ ID NO: 17251
  Description of Artificial Sequence: Synthetic polypeptide
  VL of XENP021316

SEQ ID NO: 26061 - protein, 11 aa, Artificial Sequence
  Description of Artificial Sequence: Synthetic peptide
  XENP021316 vlCDR1
QASQDIGNYLN

SEQ ID NO: 26062 - protein, 7 aa, Artificial Sequence
  Description of Artificial Sequence: Synthetic peptide
  XENP021316 vlCDR2
YTSRLHS

SEQ ID NO: 26063 - protein, 9 aa, Artificial Sequence
  Description of Artificial Sequence: Synthetic peptide
  XENP021316 vlCDR3
QQGNTLPYT

SEQ ID NO: 26064 - protein, 223 aa, Artificial Sequence
  Description of Artificial Sequence: Synthetic polypeptide
  XENP021317 2A11_H1.86_L2_Fab Heavy Chain
EVQLVQSGAEVKKPGATVKISCKASGFNIKDYYMHWVQQAPGKGLEWMGWIDPENGDTEYAPKFQGRVTITADTSTNTAYMELSSLRSEDTAVYYCYATGVRQALDYWGQGTLVTVSSASTKGPSVFPLAPSSKSTSGGTAALGCLVKDYFPEPVTVSWNSGALTSGVHTFPAVLQSSGLYSLSSVVTVPSSSLGTQTYICNVNHKPSNTKVDKKVEPKSCGS

SEQ ID NO: 26065 - protein, 118 aa, Artificial Sequence
  Description of Artificial Sequence: Synthetic polypeptide
  VH of XENP021317
EVQLVQSGAEVKKPGATVKISCKASGFNIKDYYMHWVQQAPGKGLEWMGWIDPENGDTEYAPKFQGRVTITADTSTNTAYMELSSLRSEDTAVYYCYATGVRQALDYWGQGTLVTVSS

SEQ ID NO: 26066 - protein, 5 aa, Artificial Sequence
  Description of Artificial Sequence: Synthetic peptide
  XENP021317 vhCDR1
DYYMH

SEQ ID NO: 26067 - protein, 17 aa, Artificial Sequence
  Description of Artificial Sequence: Synthetic peptide
  XENP021317 vhCDR2
WIDPENGDTEYAPKFQG

SEQ ID NO: 26068 - protein, 9 aa, Artificial Sequence
  Description of Artificial Sequence: Synthetic peptide
  XENP021317 vhCDR3
TGVRQALDY

SEQ ID NO: 26069 - protein, 214 aa, Artificial Sequence; identical to SEQ ID NO: 17250
  Description of Artificial Sequence: Synthetic polypeptide
  XENP021317 2A11_H1.86_L2_Fab Light Chain

SEQ ID NO: 26070 - protein, 107 aa, Artificial Sequence; identical to SEQ ID NO: 17251
  Description of Artificial Sequence: Synthetic polypeptide
  VL of XENP021317

SEQ ID NO: 26071 - protein, 11 aa, Artificial Sequence
  Description of Artificial Sequence: Synthetic peptide
  XENP021317 vlCDR1
QASQDIGNYLN

SEQ ID NO: 26072 - protein, 7 aa, Artificial Sequence
  Description of Artificial Sequence: Synthetic peptide
  XENP021317 vlCDR2
YTSRLHS

SEQ ID NO: 26073 - protein, 9 aa, Artificial Sequence
  Description of Artificial Sequence: Synthetic peptide
  XENP021317 vlCDR3
QQGNTLPYT

SEQ ID NO: 26074 - protein, 223 aa, Artificial Sequence
  Description of Artificial Sequence: Synthetic polypeptide
  XENP021318 2A11_H1.87_L2_Fab Heavy Chain
EVQLVQSGAEVKKPGATVKISCKASGFNIKDYYMHWVQQAPGKGLEWMGWIDPENGDTEYAPKFQGRVTITADTSTNTAYMELSSLRSEDTAVYYCYAAGVRQALDYWGQGTLVTVSSASTKGPSVFPLAPSSKSTSGGTAALGCLVKDYFPEPVTVSWNSGALTSGVHTFPAVLQSSGLYSLSSVVTVPSSSLGTQTYICNVNHKPSNTKVDKKVEPKSCGS

SEQ ID NO: 26075 - protein, 118 aa, Artificial Sequence
  Description of Artificial Sequence: Synthetic polypeptide
  VH of XENP021318
EVQLVQSGAEVKKPGATVKISCKASGFNIKDYYMHWVQQAPGKGLEWMGWIDPENGDTEYAPKFQGRVTITADTSTNTAYMELSSLRSEDTAVYYCYAAGVRQALDYWGQGTLVTVSS

SEQ ID NO: 26076 - protein, 5 aa, Artificial Sequence
  Description of Artificial Sequence: Synthetic peptide
  XENP021318 vhCDR1
DYYMH

SEQ ID NO: 26077 - protein, 17 aa, Artificial Sequence
  Description of Artificial Sequence: Synthetic peptide
  XENP021318 vhCDR2
WIDPENGDTEYAPKFQG

SEQ ID NO: 26078 - protein, 9 aa, Artificial Sequence
  Description of Artificial Sequence: Synthetic peptide
  XENP021318 vhCDR3
AGVRQALDY

SEQ ID NO: 26079 - protein, 214 aa, Artificial Sequence; identical to SEQ ID NO: 17250
  Description of Artificial Sequence: Synthetic polypeptide
  XENP021318 2A11_H1.87_L2_Fab Light Chain

SEQ ID NO: 26080 - protein, 107 aa, Artificial Sequence; identical to SEQ ID NO: 17251
  Description of Artificial Sequence: Synthetic polypeptide
  VL of XENP021318

SEQ ID NO: 26081 - protein, 11 aa, Artificial Sequence
  Description of Artificial Sequence: Synthetic peptide
  XENP021318 vlCDR1
QASQDIGNYLN

SEQ ID NO: 26082 - protein, 7 aa, Artificial Sequence
  Description of Artificial Sequence: Synthetic peptide
  XENP021318 vlCDR2
YTSRLHS

SEQ ID NO: 26083 - protein, 9 aa, Artificial Sequence
  Description of Artificial Sequence: Synthetic peptide
  XENP021318 vlCDR3
QQGNTLPYT

SEQ ID NO: 26084 - protein, 223 aa, Artificial Sequence
  Description of Artificial Sequence: Synthetic polypeptide
  XENP021319 2A11_H1.88_L2_Fab Heavy Chain
EVQLVQSGAEVKKPGATVKISCKASGFNIKDYYMHWVQQAPGKGLEWMGWIDPENGDTEYAPKFQGRVTITADTSTNTAYMELSSLRSEDTAVYYCYARPVRQALDYWGQGTLVTVSSASTKGPSVFPLAPSSKSTSGGTAALGCLVKDYFPEPVTVSWNSGALTSGVHTFPAVLQSSGLYSLSSVVTVPSSSLGTQTYICNVNHKPSNTKVDKKVEPKSCGS

SEQ ID NO: 26085 - protein, 118 aa, Artificial Sequence
  Description of Artificial Sequence: Synthetic polypeptide
  VH of XENP021319
EVQLVQSGAEVKKPGATVKISCKASGFNIKDYYMHWVQQAPGKGLEWMGWIDPENGDTEYAPKFQGRVTITADTSTNTAYMELSSLRSEDTAVYYCYARPVRQALDYWGQGTLVTVSS

SEQ ID NO: 26086 - protein, 5 aa, Artificial Sequence
  Description of Artificial Sequence: Synthetic peptide
  XENP021319 vhCDR1
DYYMH

SEQ ID NO: 26087 - protein, 17 aa, Artificial Sequence
  Description of Artificial Sequence: Synthetic peptide
  XENP021319 vhCDR2
WIDPENGDTEYAPKFQG

SEQ ID NO: 26088 - protein, 9 aa, Artificial Sequence
  Description of Artificial Sequence: Synthetic peptide
  XENP021319 vhCDR3
RPVRQALDY

SEQ ID NO: 26089 - protein, 214 aa, Artificial Sequence; identical to SEQ ID NO: 17250
  Description of Artificial Sequence: Synthetic polypeptide
  XENP021319 2A11_H1.88_L2_Fab Light Chain

SEQ ID NO: 26090 - protein, 107 aa, Artificial Sequence; identical to SEQ ID NO: 17251
  Description of Artificial Sequence: Synthetic polypeptide
  VL of XENP021319

SEQ ID NO: 26091 - protein, 11 aa, Artificial Sequence
  Description of Artificial Sequence: Synthetic peptide
  XENP021319 vlCDR1
QASQDIGNYLN

SEQ ID NO: 26092 - protein, 7 aa, Artificial Sequence
  Description of Artificial Sequence: Synthetic peptide
  XENP021319 vlCDR2
YTSRLHS

SEQ ID NO: 26093 - protein, 9 aa, Artificial Sequence
  Description of Artificial Sequence: Synthetic peptide
  XENP021319 vlCDR3
QQGNTLPYT

SEQ ID NO: 26094 - protein, 223 aa, Artificial Sequence
  Description of Artificial Sequence: Synthetic polypeptide
  XENP021320 2A11_H1.89_L2_Fab Heavy Chain
EVQLVQSGAEVKKPGATVKISCKASGFNIKDYYMHWVQQAPGKGLEWMGWIDPENGDTEYAPKFQGRVTITADTSTNTAYMELSSLRSEDTAVYYCYARAVRQALDYWGQGTLVTVSSASTKGPSVFPLAPSSKSTSGGTAALGCLVKDYFPEPVTVSWNSGALTSGVHTFPAVLQSSGLYSLSSVVTVPSSSLGTQTYICNVNHKPSNTKVDKKVEPKSCGS

SEQ ID NO: 26095 - protein, 118 aa, Artificial Sequence
  Description of Artificial Sequence: Synthetic polypeptide
  VH of XENP021320
EVQLVQSGAEVKKPGATVKISCKASGFNIKDYYMHWVQQAPGKGLEWMGWIDPENGDTEYAPKFQGRVTITADTSTNTAYMELSSLRSEDTAVYYCYARAVRQALDYWGQGTLVTVSS

SEQ ID NO: 26096 - protein, 5 aa, Artificial Sequence
  Description of Artificial Sequence: Synthetic peptide
  XENP021320 vhCDR1
DYYMH

SEQ ID NO: 26097 - protein, 17 aa, Artificial Sequence
  Description of Artificial Sequence: Synthetic peptide
  XENP021320 vhCDR2
WIDPENGDTEYAPKFQG

SEQ ID NO: 26098 - protein, 9 aa, Artificial Sequence
  Description of Artificial Sequence: Synthetic peptide
  XENP021320 vhCDR3
RAVRQALDY

SEQ ID NO: 26099 - protein, 214 aa, Artificial Sequence; identical to SEQ ID NO: 17250
  Description of Artificial Sequence: Synthetic polypeptide
  XENP021320 2A11_H1.89_L2_Fab Light Chain

SEQ ID NO: 26100 - protein, 107 aa, Artificial Sequence; identical to SEQ ID NO: 17251
  Description of Artificial Sequence: Synthetic polypeptide
  VL of XENP021320

SEQ ID NO: 26101 - protein, 11 aa, Artificial Sequence
  Description of Artificial Sequence: Synthetic peptide
  XENP021320 vlCDR1
QASQDIGNYLN

SEQ ID NO: 26102 - protein, 7 aa, Artificial Sequence
  Description of Artificial Sequence: Synthetic peptide
  XENP021320 vlCDR2
YTSRLHS

SEQ ID NO: 26103 - protein, 9 aa, Artificial Sequence
  Description of Artificial Sequence: Synthetic peptide
  XENP021320 vlCDR3
QQGNTLPYT

SEQ ID NO: 26104 - protein, 223 aa, Artificial Sequence
  Description of Artificial Sequence: Synthetic polypeptide
  XENP021321 2A11_H1.90_L2_Fab Heavy Chain
EVQLVQSGAEVKKPGATVKISCKASGFNIKDYYMHWVQQAPGKGLEWMGWIDPENGDTEYAPKFQGRVTITADTSTNTAYMELSSLRSEDTAVYYCYARSVRQALDYWGQGTLVTVSSASTKGPSVFPLAPSSKSTSGGTAALGCLVKDYFPEPVTVSWNSGALTSGVHTFPAVLQSSGLYSLSSVVTVPSSSLGTQTYICNVNHKPSNTKVDKKVEPKSCGS

SEQ ID NO: 26105 - protein, 118 aa, Artificial Sequence
  Description of Artificial Sequence: Synthetic polypeptide
  VH of XENP021321
EVQLVQSGAEVKKPGATVKISCKASGFNIKDYYMHWVQQAPGKGLEWMGWIDPENGDTEYAPKFQGRVTITADTSTNTAYMELSSLRSEDTAVYYCYARSVRQALDYWGQGTLVTVSS

SEQ ID NO: 26106 - protein, 5 aa, Artificial Sequence
  Description of Artificial Sequence: Synthetic peptide
  XENP021321 vhCDR1
DYYMH

SEQ ID NO: 26107 - protein, 17 aa, Artificial Sequence
  Description of Artificial Sequence: Synthetic peptide
  XENP021321 vhCDR2
WIDPENGDTEYAPKFQG

SEQ ID NO: 26108 - protein, 9 aa, Artificial Sequence
  Description of Artificial Sequence: Synthetic peptide
  XENP021321 vhCDR3
RSVRQALDY

SEQ ID NO: 26109 - protein, 214 aa, Artificial Sequence; identical to SEQ ID NO: 17250
  Description of Artificial Sequence: Synthetic polypeptide
  XENP021321 2A11_H1.90_L2_Fab Light Chain

SEQ ID NO: 26110 - protein, 107 aa, Artificial Sequence; identical to SEQ ID NO: 17251
  Description of Artificial Sequence: Synthetic polypeptide
  VL of XENP021321

SEQ ID NO: 26111 - protein, 11 aa, Artificial Sequence
  Description of Artificial Sequence: Synthetic peptide
  XENP021321 vlCDR1
QASQDIGNYLN

SEQ ID NO: 26112 - protein, 7 aa, Artificial Sequence
  Description of Artificial Sequence: Synthetic peptide
  XENP021321 vlCDR2
YTSRLHS

SEQ ID NO: 26113 - protein, 9 aa, Artificial Sequence
  Description of Artificial Sequence: Synthetic peptide
  XENP021321 vlCDR3
QQGNTLPYT

SEQ ID NO: 26114 - protein, 223 aa, Artificial Sequence
  Description of Artificial Sequence: Synthetic polypeptide
  XENP021322 2A11_H1.91_L2_Fab Heavy Chain
EVQLVQSGAEVKKPGATVKISCKASGFNIKDYYMHWVQQAPGKGLEWMGWIDPENGDTEYAPKFQGRVTITADTSTNTAYMELSSLRSEDTAVYYCYARGTRQALDYWGQGTLVTVSSASTKGPSVFPLAPSSKSTSGGTAALGCLVKDYFPEPVTVSWNSGALTSGVHTFPAVLQSSGLYSLSSVVTVPSSSLGTQTYICNVNHKPSNTKVDKKVEPKSCGS

SEQ ID NO: 26115 - protein, 118 aa, Artificial Sequence
  Description of Artificial Sequence: Synthetic polypeptide
  VH of XENP021322
EVQLVQSGAEVKKPGATVKISCKASGFNIKDYYMHWVQQAPGKGLEWMGWIDPENGDTEYAPKFQGRVTITADTSTNTAYMELSSLRSEDTAVYYCYARGTRQALDYWGQGTLVTVSS

SEQ ID NO: 26116 - protein, 5 aa, Artificial Sequence
  Description of Artificial Sequence: Synthetic peptide
  XENP021322 vhCDR1
DYYMH

SEQ ID NO: 26117 - protein, 17 aa, Artificial Sequence
  Description of Artificial Sequence: Synthetic peptide
  XENP021322 vhCDR2
WIDPENGDTEYAPKFQG

SEQ ID NO: 26118 - protein, 9 aa, Artificial Sequence
  Description of Artificial Sequence: Synthetic peptide
  XENP021322 vhCDR3
RGTRQALDY

SEQ ID NO: 26119 - protein, 214 aa, Artificial Sequence; identical to SEQ ID NO: 17250
  Description of Artificial Sequence: Synthetic polypeptide
  XENP021322 2A11_H1.91_L2_Fab Light Chain

SEQ ID NO: 26120 - protein, 107 aa, Artificial Sequence; identical to SEQ ID NO: 17251
  Description of Artificial Sequence: Synthetic polypeptide
  VL of XENP021322

SEQ ID NO: 26121 - protein, 11 aa, Artificial Sequence
  Description of Artificial Sequence: Synthetic peptide
  XENP021322 vlCDR1
QASQDIGNYLN

SEQ ID NO: 26122 - protein, 7 aa, Artificial Sequence
  Description of Artificial Sequence: Synthetic peptide
  XENP021322 vlCDR2
YTSRLHS

SEQ ID NO: 26123 - protein, 9 aa, Artificial Sequence
  Description of Artificial Sequence: Synthetic peptide
  XENP021322 vlCDR3
QQGNTLPYT

SEQ ID NO: 26124 - protein, 223 aa, Artificial Sequence
  Description of Artificial Sequence: Synthetic polypeptide
  XENP021323 2A11_H1.92_L2_Fab Heavy Chain
EVQLVQSGAEVKKPGATVKISCKASGFNIKDYYMHWVQQAPGKGLEWMGWIDPENGDTEYAPKFQGRVTITADTSTNTAYMELSSLRSEDTAVYYCYARGIRQALDYWGQGTLVTVSSASTKGPSVFPLAPSSKSTSGGTAALGCLVKDYFPEPVTVSWNSGALTSGVHTFPAVLQSSGLYSLSSVVTVPSSSLGTQTYICNVNHKPSNTKVDKKVEPKSCGS

SEQ ID NO: 26125 - protein, 118 aa, Artificial Sequence
  Description of Artificial Sequence: Synthetic polypeptide
  VH of XENP021323
EVQLVQSGAEVKKPGATVKISCKASGFNIKDYYMHWVQQAPGKGLEWMGWIDPENGDTEYAPKFQGRVTITADTSTNTAYMELSSLRSEDTAVYYCYARGIRQALDYWGQGTLVTVSS

SEQ ID NO: 26126 - protein, 5 aa, Artificial Sequence
  Description of Artificial Sequence: Synthetic peptide
  XENP021323 vhCDR1
DYYMH

SEQ ID NO: 26127 - protein, 17 aa, Artificial Sequence
  Description of Artificial Sequence: Synthetic peptide
  XENP021323 vhCDR2
WIDPENGDTEYAPKFQG

SEQ ID NO: 26128 - protein, 9 aa, Artificial Sequence
  Description of Artificial Sequence: Synthetic peptide
  XENP021323 vhCDR3
RGIRQALDY

SEQ ID NO: 26129 - protein, 214 aa, Artificial Sequence; identical to SEQ ID NO: 17250
  Description of Artificial Sequence: Synthetic polypeptide
  XENP021323 2A11_H1.92_L2_Fab Light Chain

SEQ ID NO: 26130 - protein, 107 aa, Artificial Sequence; identical to SEQ ID NO: 17251
  Description of Artificial Sequence: Synthetic polypeptide
  VL of XENP021323

SEQ ID NO: 26131 - protein, 11 aa, Artificial Sequence
  Description of Artificial Sequence: Synthetic peptide
  XENP021323 vlCDR1
QASQDIGNYLN

SEQ ID NO: 26132 - protein, 7 aa, Artificial Sequence
  Description of Artificial Sequence: Synthetic peptide
  XENP021323 vlCDR2
YTSRLHS

SEQ ID NO: 26133 - protein, 9 aa, Artificial Sequence
  Description of Artificial Sequence: Synthetic peptide
  XENP021323 vlCDR3
QQGNTLPYT

SEQ ID NO: 26134 - protein, 223 aa, Artificial Sequence
  Description of Artificial Sequence: Synthetic polypeptide
  XENP021324 2A11_H1.93_L2_Fab Heavy Chain
EVQLVQSGAEVKKPGATVKISCKASGFNIKDYYMHWVQQAPGKGLEWMGWIDPENGDTEYAPKFQGRVTITADTSTNTAYMELSSLRSEDTAVYYCYARGLRQALDYWGQGTLVTVSSASTKGPSVFPLAPSSKSTSGGTAALGCLVKDYFPEPVTVSWNSGALTSGVHTFPAVLQSSGLYSLSSVVTVPSSSLGTQTYICNVNHKPSNTKVDKKVEPKSCGS

SEQ ID NO: 26135 - protein, 118 aa, Artificial Sequence
  Description of Artificial Sequence: Synthetic polypeptide
  VH of XENP021324
EVQLVQSGAEVKKPGATVKISCKASGFNIKDYYMHWVQQAPGKGLEWMGWIDPENGDTEYAPKFQGRVTITADTSTNTAYMELSSLRSEDTAVYYCYARGLRQALDYWGQGTLVTVSS

SEQ ID NO: 26136 - protein, 5 aa, Artificial Sequence
  Description of Artificial Sequence: Synthetic peptide
  XENP021324 vhCDR1
DYYMH

SEQ ID NO: 26137 - protein, 17 aa, Artificial Sequence
  Description of Artificial Sequence: Synthetic peptide
  XENP021324 vhCDR2
WIDPENGDTEYAPKFQG

SEQ ID NO: 26138 - protein, 9 aa, Artificial Sequence
  Description of Artificial Sequence: Synthetic peptide
  XENP021324 vhCDR3
RGLRQALDY

SEQ ID NO: 26139 - protein, 214 aa, Artificial Sequence; identical to SEQ ID NO: 17250
  Description of Artificial Sequence: Synthetic polypeptide
  XENP021324 2A11_H1.93_L2_Fab Light Chain

SEQ ID NO: 26140 - protein, 107 aa, Artificial Sequence; identical to SEQ ID NO: 17251
  Description of Artificial Sequence: Synthetic polypeptide
  VL of XENP021324

SEQ ID NO: 26141 - protein, 11 aa, Artificial Sequence
  Description of Artificial Sequence: Synthetic peptide
  XENP021324 vlCDR1
QASQDIGNYLN

SEQ ID NO: 26142 - protein, 7 aa, Artificial Sequence
  Description of Artificial Sequence: Synthetic peptide
  XENP021324 vlCDR2
YTSRLHS

SEQ ID NO: 26143 - protein, 9 aa, Artificial Sequence
  Description of Artificial Sequence: Synthetic peptide
  XENP021324 vlCDR3
QQGNTLPYT

SEQ ID NO: 26144 - protein, 223 aa, Artificial Sequence
  Description of Artificial Sequence: Synthetic polypeptide
  XENP021325 2A11_H1.94_L2_Fab Heavy Chain
EVQLVQSGAEVKKPGATVKISCKASGFNIKDYYMHWVQQAPGKGLEWMGWIDPENGDTEYAPKFQGRVTITADTSTNTAYMELSSLRSEDTAVYYCYARGARQALDYWGQGTLVTVSSASTKGPSVFPLAPSSKSTSGGTAALGCLVKDYFPEPVTVSWNSGALTSGVHTFPAVLQSSGLYSLSSVVTVPSSSLGTQTYICNVNHKPSNTKVDKKVEPKSCGS

SEQ ID NO: 26145 - protein, 118 aa, Artificial Sequence
  Description of Artificial Sequence: Synthetic polypeptide
  VH of XENP021325
EVQLVQSGAEVKKPGATVKISCKASGFNIKDYYMHWVQQAPGKGLEWMGWIDPENGDTEYAPKFQGRVTITADTSTNTAYMELSSLRSEDTAVYYCYARGARQALDYWGQGTLVTVSS

SEQ ID NO: 26146 - protein, 5 aa, Artificial Sequence
  Description of Artificial Sequence: Synthetic peptide
  XENP021325 vhCDR1
DYYMH

SEQ ID NO: 26147 - protein, 17 aa, Artificial Sequence
  Description of Artificial Sequence: Synthetic peptide
  XENP021325 vhCDR2
WIDPENGDTEYAPKFQG

SEQ ID NO: 26148 - protein, 9 aa, Artificial Sequence
  Description of Artificial Sequence: Synthetic peptide
  XENP021325 vhCDR3
RGARQALDY

SEQ ID NO: 26149 - protein, 214 aa, Artificial Sequence; identical to SEQ ID NO: 17250
  Description of Artificial Sequence: Synthetic polypeptide
  XENP021325 2A11_H1.94_L2_Fab Light Chain

SEQ ID NO: 26150 - protein, 107 aa, Artificial Sequence; identical to SEQ ID NO: 17251
  Description of Artificial Sequence: Synthetic polypeptide
  VL of XENP021325

SEQ ID NO: 26151 - protein, 11 aa, Artificial Sequence
  Description of Artificial Sequence: Synthetic peptide
  XENP021325 vlCDR1
QASQDIGNYLN

SEQ ID NO: 26152 - protein, 7 aa, Artificial Sequence
  Description of Artificial Sequence: Synthetic peptide
  XENP021325 vlCDR2
YTSRLHS

SEQ ID NO: 26153 - protein, 9 aa, Artificial Sequence
  Description of Artificial Sequence: Synthetic peptide
  XENP021325 vlCDR3
QQGNTLPYT

SEQ ID NO: 26154 - protein, 223 aa, Artificial Sequence
  Description of Artificial Sequence: Synthetic polypeptide
  XENP021326 2A11_H1.95_L2_Fab Heavy Chain
EVQLVQSGAEVKKPGATVKISCKASGFNIKDYYMHWVQQAPGKGLEWMGWIDPENGDTEYAPKFQGRVTITADTSTNTAYMELSSLRSEDTAVYYCYARGYRQALDYWGQGTLVTVSSASTKGPSVFPLAPSSKSTSGGTAALGCLVKDYFPEPVTVSWNSGALTSGVHTFPAVLQSSGLYSLSSVVTVPSSSLGTQTYICNVNHKPSNTKVDKKVEPKSCGS

SEQ ID NO: 26155 - protein, 118 aa, Artificial Sequence
  Description of Artificial Sequence: Synthetic polypeptide
  VH of XENP021326
EVQLVQSGAEVKKPGATVKISCKASGFNIKDYYMHWVQQAPGKGLEWMGWIDPENGDTEYAPKFQGRVTITADTSTNTAYMELSSLRSEDTAVYYCYARGYRQALDYWGQGTLVTVSS

SEQ ID NO: 26156 - protein, 5 aa, Artificial Sequence
  Description of Artificial Sequence: Synthetic peptide
  XENP021326 vhCDR1
DYYMH

SEQ ID NO: 26157 - protein, 17 aa, Artificial Sequence
  Description of Artificial Sequence: Synthetic peptide
  XENP021326 vhCDR2
WIDPENGDTEYAPKFQG

SEQ ID NO: 26158 - protein, 9 aa, Artificial Sequence
  Description of Artificial Sequence: Synthetic peptide
  XENP021326 vhCDR3
RGYRQALDY

SEQ ID NO: 26159 - protein, 214 aa, Artificial Sequence; identical to SEQ ID NO: 17250
  Description of Artificial Sequence: Synthetic polypeptide
  XENP021326 2A11_H1.95_L2_Fab Light Chain

SEQ ID NO: 26160 - protein, 107 aa, Artificial Sequence; identical to SEQ ID NO: 17251
  Description of Artificial Sequence: Synthetic polypeptide
  VL of XENP021326

SEQ ID NO: 26161 - protein, 11 aa, Artificial Sequence
  Description of Artificial Sequence: Synthetic peptide
  XENP021326 vlCDR1
QASQDIGNYLN

SEQ ID NO: 26162 - protein, 7 aa, Artificial Sequence
  Description of Artificial Sequence: Synthetic peptide
  XENP021326 vlCDR2
YTSRLHS

SEQ ID NO: 26163 - protein, 9 aa, Artificial Sequence
  Description of Artificial Sequence: Synthetic peptide
  XENP021326 vlCDR3
QQGNTLPYT

SEQ ID NO: 26164 - protein, 223 aa, Artificial Sequence
  Description of Artificial Sequence: Synthetic polypeptide
  XENP021327 2A11_H1.96_L2_Fab Heavy Chain
EVQLVQSGAEVKKPGATVKISCKASGFNIKDYYMHWVQQAPGKGLEWMGWIDPENGDTEYAPKFQGRVTITADTSTNTAYMELSSLRSEDTAVYYCYARGQRQALDYWGQGTLVTVSSASTKGPSVFPLAPSSKSTSGGTAALGCLVKDYFPEPVTVSWNSGALTSGVHTFPAVLQSSGLYSLSSVVTVPSSSLGTQTYICNVNHKPSNTKVDKKVEPKSCGS

SEQ ID NO: 26165 - protein, 118 aa, Artificial Sequence
  Description of Artificial Sequence: Synthetic polypeptide
  VH of XENP021327
EVQLVQSGAEVKKPGATVKISCKASGFNIKDYYMHWVQQAPGKGLEWMGWIDPENGDTEYAPKFQGRVTITADTSTNTAYMELSSLRSEDTAVYYCYARGQRQALDYWGQGTLVTVSS

SEQ ID NO: 26166 - protein, 5 aa, Artificial Sequence
  Description of Artificial Sequence: Synthetic peptide
  XENP021327 vhCDR1
DYYMH

SEQ ID NO: 26167 - protein, 17 aa, Artificial Sequence
  Description of Artificial Sequence: Synthetic peptide
  XENP021327 vhCDR2
WIDPENGDTEYAPKFQG

SEQ ID NO: 26168 - protein, 9 aa, Artificial Sequence
  Description of Artificial Sequence: Synthetic peptide
  XENP021327 vhCDR3
RGQRQALDY

SEQ ID NO: 26169 - protein, 214 aa, Artificial Sequence; identical to SEQ ID NO: 17250
  Description of Artificial Sequence: Synthetic polypeptide
  XENP021327 2A11_H1.96_L2_Fab Light Chain

SEQ ID NO: 26170 - protein, 107 aa, Artificial Sequence; identical to SEQ ID NO: 17251
  Description of Artificial Sequence: Synthetic polypeptide
  VL of XENP021327

SEQ ID NO: 26171 - protein, 11 aa, Artificial Sequence
  Description of Artificial Sequence: Synthetic peptide
  XENP021327 vlCDR1
QASQDIGNYLN

SEQ ID NO: 26172 - protein, 7 aa, Artificial Sequence
  Description of Artificial Sequence: Synthetic peptide
  XENP021327 vlCDR2
YTSRLHS

SEQ ID NO: 26173 - protein, 9 aa, Artificial Sequence
  Description of Artificial Sequence: Synthetic peptide
  XENP021327 vlCDR3
QQGNTLPYT

SEQ ID NO: 26174 - protein, 223 aa, Artificial Sequence
  Description of Artificial Sequence: Synthetic polypeptide
  XENP021328 2A11_H1.97_L2_Fab Heavy Chain
EVQLVQSGAEVKKPGATVKISCKASGFNIKDYYMHWVQQAPGKGLEWMGWIDPENGDTEYAPKFQGRVTITADTSTNTAYMELSSLRSEDTAVYYCYARGSRQALDYWGQGTLVTVSSASTKGPSVFPLAPSSKSTSGGTAALGCLVKDYFPEPVTVSWNSGALTSGVHTFPAVLQSSGLYSLSSVVTVPSSSLGTQTYICNVNHKPSNTKVDKKVEPKSCGS

SEQ ID NO: 26175 - protein, 118 aa, Artificial Sequence
  Description of Artificial Sequence: Synthetic polypeptide
  VH of XENP021328
EVQLVQSGAEVKKPGATVKISCKASGFNIKDYYMHWVQQAPGKGLEWMGWIDPENGDTEYAPKFQGRVTITADTSTNTAYMELSSLRSEDTAVYYCYARGSRQALDYWGQGTLVTVSS

SEQ ID NO: 26176 - protein, 5 aa, Artificial Sequence
  Description of Artificial Sequence: Synthetic peptide
  XENP021328 vhCDR1
DYYMH

SEQ ID NO: 26177 - protein, 17 aa, Artificial Sequence
  Description of Artificial Sequence: Synthetic peptide
  XENP021328 vhCDR2
WIDPENGDTEYAPKFQG

SEQ ID NO: 26178 - protein, 9 aa, Artificial Sequence
  Description of Artificial Sequence: Synthetic peptide
  XENP021328 vhCDR3
RGSRQALDY

SEQ ID NO: 26179 - protein, 214 aa, Artificial Sequence; identical to SEQ ID NO: 17250
  Description of Artificial Sequence: Synthetic polypeptide
  XENP021328 2A11_H1.97_L2_Fab Light Chain

SEQ ID NO: 26180 - protein, 107 aa, Artificial Sequence; identical to SEQ ID NO: 17251
  Description of Artificial Sequence: Synthetic polypeptide
  VL of XENP021328

SEQ ID NO: 26181 - protein, 11 aa, Artificial Sequence
  Description of Artificial Sequence: Synthetic peptide
  XENP021328 vlCDR1
QASQDIGNYLN

SEQ ID NO: 26182 - protein, 7 aa, Artificial Sequence
  Description of Artificial Sequence: Synthetic peptide
  XENP021328 vlCDR2
YTSRLHS

SEQ ID NO: 26183 - protein, 9 aa, Artificial Sequence
  Description of Artificial Sequence: Synthetic peptide
  XENP021328 vlCDR3
QQGNTLPYT

SEQ ID NO: 26184 - protein, 223 aa, Artificial Sequence
  Description of Artificial Sequence: Synthetic polypeptide
  XENP021329 2A11_H1.98_L2_Fab Heavy Chain
EVQLVQSGAEVKKPGATVKISCKASGFNIKDYYMHWVQQAPGKGLEWMGWIDPENGDTEYAPKFQGRVTITADTSTNTAYMELSSLRSEDTAVYYCYARGVKQALDYWGQGTLVTVSSASTKGPSVFPLAPSSKSTSGGTAALGCLVKDYFPEPVTVSWNSGALTSGVHTFPAVLQSSGLYSLSSVVTVPSSSLGTQTYICNVNHKPSNTKVDKKVEPKSCGS

SEQ ID NO: 26185 - protein, 118 aa, Artificial Sequence
  Description of Artificial Sequence: Synthetic polypeptide
  VH of XENP021329
EVQLVQSGAEVKKPGATVKISCKASGFNIKDYYMHWVQQAPGKGLEWMGWIDPENGDTEYAPKFQGRVTITADTSTNTAYMELSSLRSEDTAVYYCYARGVKQALDYWGQGTLVTVSS

SEQ ID NO: 26186 - protein, 5 aa, Artificial Sequence
  Description of Artificial Sequence: Synthetic peptide
  XENP021329 vhCDR1
DYYMH

SEQ ID NO: 26187 - protein, 17 aa, Artificial Sequence
  Description of Artificial Sequence: Synthetic peptide
  XENP021329 vhCDR2
WIDPENGDTEYAPKFQG

SEQ ID NO: 26188 - protein, 9 aa, Artificial Sequence
  Description of Artificial Sequence: Synthetic peptide
  XENP021329 vhCDR3
RGVKQALDY

SEQ ID NO: 26189 - protein, 214 aa, Artificial Sequence; identical to SEQ ID NO: 17250
  Description of Artificial Sequence: Synthetic polypeptide
  XENP021329 2A11_H1.98_L2_Fab Light Chain

SEQ ID NO: 26190 - protein, 107 aa, Artificial Sequence; identical to SEQ ID NO: 17251
  Description of Artificial Sequence: Synthetic polypeptide
  VL of XENP021329

SEQ ID NO: 26191 - protein, 11 aa, Artificial Sequence
  Description of Artificial Sequence: Synthetic peptide
  XENP021329 vlCDR1
QASQDIGNYLN

SEQ ID NO: 26192 - protein, 7 aa, Artificial Sequence
  Description of Artificial Sequence: Synthetic peptide
  XENP021329 vlCDR2
YTSRLHS

SEQ ID NO: 26193 - protein, 9 aa, Artificial Sequence
  Description of Artificial Sequence: Synthetic peptide
  XENP021329 vlCDR3
QQGNTLPYT

SEQ ID NO: 26194 - protein, 223 aa, Artificial Sequence
  Description of Artificial Sequence: Synthetic polypeptide
  XENP021330 2A11_H1.99_L2_Fab Heavy Chain
EVQLVQSGAEVKKPGATVKISCKASGFNIKDYYMHWVQQAPGKGLEWMGWIDPENGDTEYAPKFQGRVTITADTSTNTAYMELSSLRSEDTAVYYCYARGVEQALDYWGQGTLVTVSSASTKGPSVFPLAPSSKSTSGGTAALGCLVKDYFPEPVTVSWNSGALTSGVHTFPAVLQSSGLYSLSSVVTVPSSSLGTQTYICNVNHKPSNTKVDKKVEPKSCGS

SEQ ID NO: 26195 - protein, 118 aa, Artificial Sequence
  Description of Artificial Sequence: Synthetic polypeptide
  VH of XENP021330
EVQLVQSGAEVKKPGATVKISCKASGFNIKDYYMHWVQQAPGKGLEWMGWIDPENGDTEYAPKFQGRVTITADTSTNTAYMELSSLRSEDTAVYYCYARGVEQALDYWGQGTLVTVSS

SEQ ID NO: 26196 - protein, 5 aa, Artificial Sequence
  Description of Artificial Sequence: Synthetic peptide
  XENP021330 vhCDR1
DYYMH

SEQ ID NO: 26197 - protein, 17 aa, Artificial Sequence
  Description of Artificial Sequence: Synthetic peptide
  XENP021330 vhCDR2
WIDPENGDTEYAPKFQG

SEQ ID NO: 26198 - protein, 9 aa, Artificial Sequence
  Description of Artificial Sequence: Synthetic peptide
  XENP021330 vhCDR3
RGVEQALDY

SEQ ID NO: 26199 - protein, 214 aa, Artificial Sequence; identical to SEQ ID NO: 17250
  Description of Artificial Sequence: Synthetic polypeptide
  XENP021330 2A11_H1.99_L2_Fab Light Chain

SEQ ID NO: 26200 - protein, 107 aa, Artificial Sequence; identical to SEQ ID NO: 17251
  Description of Artificial Sequence: Synthetic polypeptide
  VL of XENP021330

SEQ ID NO: 26201 - protein, 11 aa, Artificial Sequence
  Description of Artificial Sequence: Synthetic peptide
  XENP021330 vlCDR1
QASQDIGNYLN

SEQ ID NO: 26202 - protein, 7 aa, Artificial Sequence
  Description of Artificial Sequence: Synthetic peptide
  XENP021330 vlCDR2
YTSRLHS

SEQ ID NO: 26203 - protein, 9 aa, Artificial Sequence
  Description of Artificial Sequence: Synthetic peptide
  XENP021330 vlCDR3
QQGNTLPYT

SEQ ID NO: 26204 - protein, 223 aa, Artificial Sequence
  Description of Artificial Sequence: Synthetic polypeptide
  XENP021331 2A11_H1.100_L2_Fab Heavy Chain
EVQLVQSGAEVKKPGATVKISCKASGFNIKDYYMHWVQQAPGKGLEWMGWIDPENGDTEYAPKFQGRVTITADTSTNTAYMELSSLRSEDTAVYYCYARGVDQALDYWGQGTLVTVSSASTKGPSVFPLAPSSKSTSGGTAALGCLVKDYFPEPVTVSWNSGALTSGVHTFPAVLQSSGLYSLSSVVTVPSSSLGTQTYICNVNHKPSNTKVDKKVEPKSCGS

SEQ ID NO: 26205 - protein, 118 aa, Artificial Sequence
  Description of Artificial Sequence: Synthetic polypeptide
  VH of XENP021331
EVQLVQSGAEVKKPGATVKISCKASGFNIKDYYMHWVQQAPGKGLEWMGWIDPENGDTEYAPKFQGRVTITADTSTNTAYMELSSLRSEDTAVYYCYARGVDQALDYWGQGTLVTVSS

SEQ ID NO: 26206 - protein, 5 aa, Artificial Sequence
  Description of Artificial Sequence: Synthetic peptide
  XENP021331 vhCDR1
DYYMH

SEQ ID NO: 26207 - protein, 17 aa, Artificial Sequence
  Description of Artificial Sequence: Synthetic peptide
  XENP021331 vhCDR2
WIDPENGDTEYAPKFQG

SEQ ID NO: 26208 - protein, 9 aa, Artificial Sequence
  Description of Artificial Sequence: Synthetic peptide
  XENP021331 vhCDR3
RGVDQALDY

SEQ ID NO: 26209 - protein, 214 aa, Artificial Sequence; identical to SEQ ID NO: 17250
  Description of Artificial Sequence: Synthetic polypeptide
  XENP021331 2A11_H1.100_L2_Fab Light Chain

SEQ ID NO: 26210 - protein, 107 aa, Artificial Sequence; identical to SEQ ID NO: 17251
  Description of Artificial Sequence: Synthetic polypeptide
  VL of XENP021331

SEQ ID NO: 26211 - protein, 11 aa, Artificial Sequence
  Description of Artificial Sequence: Synthetic peptide
  XENP021331 vlCDR1
QASQDIGNYLN

SEQ ID NO: 26212 - protein, 7 aa, Artificial Sequence
  Description of Artificial Sequence: Synthetic peptide
  XENP021331 vlCDR2
YTSRLHS

SEQ ID NO: 26213 - protein, 9 aa, Artificial Sequence
  Description of Artificial Sequence: Synthetic peptide
  XENP021331 vlCDR3
QQGNTLPYT

SEQ ID NO: 26214 - protein, 223 aa, Artificial Sequence
  Description of Artificial Sequence: Synthetic polypeptide
  XENP021332 2A11_H1.101_L2_Fab Heavy Chain
EVQLVQSGAEVKKPGATVKISCKASGFNIKDYYMHWVQQAPGKGLEWMGWIDPENGDTEYAPKFQGRVTITADTSTNTAYMELSSLRSEDTAVYYCYARGVHQALDYWGQGTLVTVSSASTKGPSVFPLAPSSKSTSGGTAALGCLVKDYFPEPVTVSWNSGALTSGVHTFPAVLQSSGLYSLSSVVTVPSSSLGTQTYICNVNHKPSNTKVDKKVEPKSCGS

SEQ ID NO: 26215 - protein, 118 aa, Artificial Sequence
  Description of Artificial Sequence: Synthetic polypeptide
  VH of XENP021332
EVQLVQSGAEVKKPGATVKISCKASGFNIKDYYMHWVQQAPGKGLEWMGWIDPENGDTEYAPKFQGRVTITADTSTNTAYMELSSLRSEDTAVYYCYARGVHQALDYWGQGTLVTVSS

SEQ ID NO: 26216 - protein, 5 aa, Artificial Sequence
  Description of Artificial Sequence: Synthetic peptide
  XENP021332 vhCDR1
DYYMH

SEQ ID NO: 26217 - protein, 17 aa, Artificial Sequence
  Description of Artificial Sequence: Synthetic peptide
  XENP021332 vhCDR2
WIDPENGDTEYAPKFQG

SEQ ID NO: 26218 - protein, 9 aa, Artificial Sequence
  Description of Artificial Sequence: Synthetic peptide
  XENP021332 vhCDR3
RGVHQALDY

SEQ ID NO: 26219 - protein, 214 aa, Artificial Sequence; identical to SEQ ID NO: 17250
  Description of Artificial Sequence: Synthetic polypeptide
  XENP021332 2A11_H1.101_L2_Fab Light Chain

SEQ ID NO: 26220 - protein, 107 aa, Artificial Sequence; identical to SEQ ID NO: 17251
  Description of Artificial Sequence: Synthetic polypeptide
  VL of XENP021332

SEQ ID NO: 26221 - protein, 11 aa, Artificial Sequence
  Description of Artificial Sequence: Synthetic peptide
  XENP021332 vlCDR1
QASQDIGNYLN

SEQ ID NO: 26222 - protein, 7 aa, Artificial Sequence
  Description of Artificial Sequence: Synthetic peptide
  XENP021332 vlCDR2
YTSRLHS

SEQ ID NO: 26223 - protein, 9 aa, Artificial Sequence
  Description of Artificial Sequence: Synthetic peptide
  XENP021332 vlCDR3
QQGNTLPYT

SEQ ID NO: 26224 - protein, 223 aa, Artificial Sequence
  Description of Artificial Sequence: Synthetic polypeptide
  XENP021333 2A11_H1.102_L2_Fab Heavy Chain
EVQLVQSGAEVKKPGATVKISCKASGFNIKDYYMHWVQQAPGKGLEWMGWIDPENGDTEYAPKFQGRVTITADTSTNTAYMELSSLRSEDTAVYYCYARGVTQALDYWGQGTLVTVSSASTKGPSVFPLAPSSKSTSGGTAALGCLVKDYFPEPVTVSWNSGALTSGVHTFPAVLQSSGLYSLSSVVTVPSSSLGTQTYICNVNHKPSNTKVDKKVEPKSCGS

SEQ ID NO: 26225 - protein, 118 aa, Artificial Sequence
  Description of Artificial Sequence: Synthetic polypeptide
  VH of XENP021333
EVQLVQSGAEVKKPGATVKISCKASGFNIKDYYMHWVQQAPGKGLEWMGWIDPENGDTEYAPKFQGRVTITADTSTNTAYMELSSLRSEDTAVYYCYARGVTQALDYWGQGTLVTVSS

SEQ ID NO: 26226 - protein, 5 aa, Artificial Sequence
  Description of Artificial Sequence: Synthetic peptide
  XENP021333 vhCDR1
DYYMH

SEQ ID NO: 26227 - protein, 17 aa, Artificial Sequence
  Description of Artificial Sequence: Synthetic peptide
  XENP021333 vhCDR2
WIDPENGDTEYAPKFQG

SEQ ID NO: 26228 - protein, 9 aa, Artificial Sequence
  Description of Artificial Sequence: Synthetic peptide
  XENP021333 vhCDR3
RGVTQALDY

SEQ ID NO: 26229 - protein, 214 aa, Artificial Sequence; identical to SEQ ID NO: 17250
  Description of Artificial Sequence: Synthetic polypeptide
  XENP021333 2A11_H1.102_L2_Fab Light Chain

SEQ ID NO: 26230 - protein, 107 aa, Artificial Sequence; identical to SEQ ID NO: 17251
  Description of Artificial Sequence: Synthetic polypeptide
  VL of XENP021333

SEQ ID NO: 26231 - protein, 11 aa, Artificial Sequence
  Description of Artificial Sequence: Synthetic peptide
  XENP021333 vlCDR1
QASQDIGNYLN

SEQ ID NO: 26232 - protein, 7 aa, Artificial Sequence
  Description of Artificial Sequence: Synthetic peptide
  XENP021333 vlCDR2
YTSRLHS

SEQ ID NO: 26233 - protein, 9 aa, Artificial Sequence
  Description of Artificial Sequence: Synthetic peptide
  XENP021333 vlCDR3
QQGNTLPYT

SEQ ID NO: 26234 - protein, 223 aa, Artificial Sequence
  Description of Artificial Sequence: Synthetic polypeptide
  XENP021334 2A11_H1.103_L2_Fab Heavy Chain
EVQLVQSGAEVKKPGATVKISCKASGFNIKDYYMHWVQQAPGKGLEWMGWIDPENGDTEYAPKFQGRVTITADTSTNTAYMELSSLRSEDTAVYYCYARGVAQALDYWGQGTLVTVSSASTKGPSVFPLAPSSKSTSGGTAALGCLVKDYFPEPVTVSWNSGALTSGVHTFPAVLQSSGLYSLSSVVTVPSSSLGTQTYICNVNHKPSNTKVDKKVEPKSCGS

SEQ ID NO: 26235 - protein, 118 aa, Artificial Sequence
  Description of Artificial Sequence: Synthetic polypeptide
  VH of XENP021334
EVQLVQSGAEVKKPGATVKISCKASGFNIKDYYMHWVQQAPGKGLEWMGWIDPENGDTEYAPKFQGRVTITADTSTNTAYMELSSLRSEDTAVYYCYARGVAQALDYWGQGTLVTVSS

SEQ ID NO: 26236 - protein, 5 aa, Artificial Sequence
  Description of Artificial Sequence: Synthetic peptide
  XENP021334 vhCDR1
DYYMH

SEQ ID NO: 26237 - protein, 17 aa, Artificial Sequence
  Description of Artificial Sequence: Synthetic peptide
  XENP021334 vhCDR2
WIDPENGDTEYAPKFQG

SEQ ID NO: 26238 - protein, 9 aa, Artificial Sequence
  Description of Artificial Sequence: Synthetic peptide
  XENP021334 vhCDR3
RGVAQALDY

SEQ ID NO: 26239 - protein, 214 aa, Artificial Sequence; identical to SEQ ID NO: 17250
  Description of Artificial Sequence: Synthetic polypeptide
  XENP021334 2A11_H1.103_L2_Fab Light Chain

SEQ ID NO: 26240 - protein, 107 aa, Artificial Sequence; identical to SEQ ID NO: 17251
  Description of Artificial Sequence: Synthetic polypeptide
  VL of XENP021334

SEQ ID NO: 26241 - protein, 11 aa, Artificial Sequence
  Description of Artificial Sequence: Synthetic peptide
  XENP021334 vlCDR1
QASQDIGNYLN

SEQ ID NO: 26242 - protein, 7 aa, Artificial Sequence
  Description of Artificial Sequence: Synthetic peptide
  XENP021334 vlCDR2
YTSRLHS

SEQ ID NO: 26243 - protein, 9 aa, Artificial Sequence
  Description of Artificial Sequence: Synthetic peptide
  XENP021334 vlCDR3
QQGNTLPYT

SEQ ID NO: 26244 - protein, 223 aa, Artificial Sequence
  Description of Artificial Sequence: Synthetic polypeptide
  XENP021335 2A11_H1.104_L2_Fab Heavy Chain
EVQLVQSGAEVKKPGATVKISCKASGFNIKDYYMHWVQQAPGKGLEWMGWIDPENGDTEYAPKFQGRVTITADTSTNTAYMELSSLRSEDTAVYYCYARGVGQALDYWGQGTLVTVSSASTKGPSVFPLAPSSKSTSGGTAALGCLVKDYFPEPVTVSWNSGALTSGVHTFPAVLQSSGLYSLSSVVTVPSSSLGTQTYICNVNHKPSNTKVDKKVEPKSCGS

SEQ ID NO: 26245 - protein, 118 aa, Artificial Sequence
  Description of Artificial Sequence: Synthetic polypeptide
  VH of XENP021335
EVQLVQSGAEVKKPGATVKISCKASGFNIKDYYMHWVQQAPGKGLEWMGWIDPENGDTEYAPKFQGRVTITADTSTNTAYMELSSLRSEDTAVYYCYARGVGQALDYWGQGTLVTVSS

SEQ ID NO: 26246 - protein, 5 aa, Artificial Sequence
  Description of Artificial Sequence: Synthetic peptide
  XENP021335 vhCDR1
DYYMH

SEQ ID NO: 26247 - protein, 17 aa, Artificial Sequence
  Description of Artificial Sequence: Synthetic peptide
  XENP021335 vhCDR2
WIDPENGDTEYAPKFQG

SEQ ID NO: 26248 - protein, 9 aa, Artificial Sequence
  Description of Artificial Sequence: Synthetic peptide
  XENP021335 vhCDR3
RGVGQALDY

SEQ ID NO: 26249 - protein, 214 aa, Artificial Sequence; identical to SEQ ID NO: 17250
  Description of Artificial Sequence: Synthetic polypeptide
  XENP021335 2A11_H1.104_L2_Fab Light Chain

SEQ ID NO: 26250 - protein, 107 aa, Artificial Sequence; identical to SEQ ID NO: 17251
  Description of Artificial Sequence: Synthetic polypeptide
  VL of XENP021335

SEQ ID NO: 26251 - protein, 11 aa, Artificial Sequence
  Description of Artificial Sequence: Synthetic peptide
  XENP021335 vlCDR1
QASQDIGNYLN

SEQ ID NO: 26252 - protein, 7 aa, Artificial Sequence
  Description of Artificial Sequence: Synthetic peptide
  XENP021335 vlCDR2
YTSRLHS

SEQ ID NO: 26253 - protein, 9 aa, Artificial Sequence
  Description of Artificial Sequence: Synthetic peptide
  XENP021335 vlCDR3
QQGNTLPYT

SEQ ID NO: 26254 - protein, 223 aa, Artificial Sequence
  Description of Artificial Sequence: Synthetic polypeptide
  XENP021336 2A11_H1.105_L2_Fab Heavy Chain
EVQLVQSGAEVKKPGATVKISCKASGFNIKDYYMHWVQQAPGKGLEWMGWIDPENGDTEYAPKFQGRVTITADTSTNTAYMELSSLRSEDTAVYYCYARGVYQALDYWGQGTLVTVSSASTKGPSVFPLAPSSKSTSGGTAALGCLVKDYFPEPVTVSWNSGALTSGVHTFPAVLQSSGLYSLSSVVTVPSSSLGTQTYICNVNHKPSNTKVDKKVEPKSCGS

SEQ ID NO: 26255 - protein, 118 aa, Artificial Sequence
  Description of Artificial Sequence: Synthetic polypeptide
  VH of XENP021336
EVQLVQSGAEVKKPGATVKISCKASGFNIKDYYMHWVQQAPGKGLEWMGWIDPENGDTEYAPKFQGRVTITADTSTNTAYMELSSLRSEDTAVYYCYARGVYQALDYWGQGTLVTVSS

SEQ ID NO: 26256 - protein, 5 aa, Artificial Sequence
  Description of Artificial Sequence: Synthetic peptide
  XENP021336 vhCDR1
DYYMH

SEQ ID NO: 26257 - protein, 17 aa, Artificial Sequence
  Description of Artificial Sequence: Synthetic peptide
  XENP021336 vhCDR2
WIDPENGDTEYAPKFQG

SEQ ID NO: 26258 - protein, 9 aa, Artificial Sequence
  Description of Artificial Sequence: Synthetic peptide
  XENP021336 vhCDR3
RGVYQALDY

SEQ ID NO: 26259 - protein, 214 aa, Artificial Sequence; identical to SEQ ID NO: 17250
  Description of Artificial Sequence: Synthetic polypeptide
  XENP021336 2A11_H1.105_L2_Fab Light Chain

SEQ ID NO: 26260 - protein, 107 aa, Artificial Sequence; identical to SEQ ID NO: 17251
  Description of Artificial Sequence: Synthetic polypeptide
  VL of XENP021336

SEQ ID NO: 26261 - protein, 11 aa, Artificial Sequence
  Description of Artificial Sequence: Synthetic peptide
  XENP021336 vlCDR1
QASQDIGNYLN

SEQ ID NO: 26262 - protein, 7 aa, Artificial Sequence
  Description of Artificial Sequence: Synthetic peptide
  XENP021336 vlCDR2
YTSRLHS

SEQ ID NO: 26263 - protein, 9 aa, Artificial Sequence
  Description of Artificial Sequence: Synthetic peptide
  XENP021336 vlCDR3
QQGNTLPYT

SEQ ID NO: 26264 - protein, 223 aa, Artificial Sequence
  Description of Artificial Sequence: Synthetic polypeptide
  XENP021337 2A11_H1.106_L2_Fab Heavy Chain
EVQLVQSGAEVKKPGATVKISCKASGFNIKDYYMHWVQQAPGKGLEWMGWIDPENGDTEYAPKFQGRVTITADTSTNTAYMELSSLRSEDTAVYYCYARGVRAALDYWGQGTLVTVSSASTKGPSVFPLAPSSKSTSGGTAALGCLVKDYFPEPVTVSWNSGALTSGVHTFPAVLQSSGLYSLSSVVTVPSSSLGTQTYICNVNHKPSNTKVDKKVEPKSCGS

SEQ ID NO: 26265 - protein, 118 aa, Artificial Sequence
  Description of Artificial Sequence: Synthetic polypeptide
  VH of XENP021337
EVQLVQSGAEVKKPGATVKISCKASGFNIKDYYMHWVQQAPGKGLEWMGWIDPENGDTEYAPKFQGRVTITADTSTNTAYMELSSLRSEDTAVYYCYARGVRAALDYWGQGTLVTVSS

SEQ ID NO: 26266 - protein, 5 aa, Artificial Sequence
  Description of Artificial Sequence: Synthetic peptide
  XENP021337 vhCDR1
DYYMH

SEQ ID NO: 26267 - protein, 17 aa, Artificial Sequence
  Description of Artificial Sequence: Synthetic peptide
  XENP021337 vhCDR2
WIDPENGDTEYAPKFQG

SEQ ID NO: 26268 - protein, 9 aa, Artificial Sequence
  Description of Artificial Sequence: Synthetic peptide
  XENP021337 vhCDR3
RGVRAALDY

SEQ ID NO: 26269 - protein, 214 aa, Artificial Sequence; identical to SEQ ID NO: 17250
  Description of Artificial Sequence: Synthetic polypeptide
  XENP021337 2A11_H1.106_L2_Fab Light Chain

SEQ ID NO: 26270 - protein, 107 aa, Artificial Sequence; identical to SEQ ID NO: 17251
  Description of Artificial Sequence: Synthetic polypeptide
  VL of XENP021337

SEQ ID NO: 26271 - protein, 11 aa, Artificial Sequence
  Description of Artificial Sequence: Synthetic peptide
  XENP021337 vlCDR1
QASQDIGNYLN

SEQ ID NO: 26272 - protein, 7 aa, Artificial Sequence
  Description of Artificial Sequence: Synthetic peptide
  XENP021337 vlCDR2
YTSRLHS

SEQ ID NO: 26273 - protein, 9 aa, Artificial Sequence
  Description of Artificial Sequence: Synthetic peptide
  XENP021337 vlCDR3
QQGNTLPYT

SEQ ID NO: 26274 - protein, 223 aa, Artificial Sequence
  Description of Artificial Sequence: Synthetic polypeptide
  XENP021338 2A11_H1.107_L2_Fab Heavy Chain
EVQLVQSGAEVKKPGATVKISCKASGFNIKDYYMHWVQQAPGKGLEWMGWIDPENGDTEYAPKFQGRVTITADTSTNTAYMELSSLRSEDTAVYYCYARGVRSALDYWGQGTLVTVSSASTKGPSVFPLAPSSKSTSGGTAALGCLVKDYFPEPVTVSWNSGALTSGVHTFPAVLQSSGLYSLSSVVTVPSSSLGTQTYICNVNHKPSNTKVDKKVEPKSCGS

SEQ ID NO: 26275 - protein, 118 aa, Artificial Sequence
  Description of Artificial Sequence: Synthetic polypeptide
  VH of XENP021338
EVQLVQSGAEVKKPGATVKISCKASGFNIKDYYMHWVQQAPGKGLEWMGWIDPENGDTEYAPKFQGRVTITADTSTNTAYMELSSLRSEDTAVYYCYARGVRSALDYWGQGTLVTVSS

SEQ ID NO: 26276 - protein, 5 aa, Artificial Sequence
  Description of Artificial Sequence: Synthetic peptide
  XENP021338 vhCDR1
DYYMH

SEQ ID NO: 26277 - protein, 17 aa, Artificial Sequence
  Description of Artificial Sequence: Synthetic peptide
  XENP021338 vhCDR2
WIDPENGDTEYAPKFQG

SEQ ID NO: 26278 - protein, 9 aa, Artificial Sequence
  Description of Artificial Sequence: Synthetic peptide
  XENP021338 vhCDR3
RGVRSALDY

SEQ ID NO: 26279 - protein, 214 aa, Artificial Sequence; identical to SEQ ID NO: 17250
  Description of Artificial Sequence: Synthetic polypeptide
  XENP021338 2A11_H1.107_L2_Fab Light Chain

SEQ ID NO: 26280 - protein, 107 aa, Artificial Sequence; identical to SEQ ID NO: 17251
  Description of Artificial Sequence: Synthetic polypeptide
  VL of XENP021338

SEQ ID NO: 26281 - protein, 11 aa, Artificial Sequence
  Description of Artificial Sequence: Synthetic peptide
  XENP021338 vlCDR1
QASQDIGNYLN

SEQ ID NO: 26282 - protein, 7 aa, Artificial Sequence
  Description of Artificial Sequence: Synthetic peptide
  XENP021338 vlCDR2
YTSRLHS

SEQ ID NO: 26283 - protein, 9 aa, Artificial Sequence
  Description of Artificial Sequence: Synthetic peptide
  XENP021338 vlCDR3
QQGNTLPYT

SEQ ID NO: 26284 - protein, 223 aa, Artificial Sequence
  Description of Artificial Sequence: Synthetic polypeptide
  XENP021339 2A11_H1.108_L2_Fab Heavy Chain
EVQLVQSGAEVKKPGATVKISCKASGFNIKDYYMHWVQQAPGKGLEWMGWIDPENGDTEYAPKFQGRVTITADTSTNTAYMELSSLRSEDTAVYYCYARGVRHALDYWGQGTLVTVSSASTKGPSVFPLAPSSKSTSGGTAALGCLVKDYFPEPVTVSWNSGALTSGVHTFPAVLQSSGLYSLSSVVTVPSSSLGTQTYICNVNHKPSNTKVDKKVEPKSCGS

SEQ ID NO: 26285 - protein, 118 aa, Artificial Sequence
  Description of Artificial Sequence: Synthetic polypeptide
  VH of XENP021339
EVQLVQSGAEVKKPGATVKISCKASGFNIKDYYMHWVQQAPGKGLEWMGWIDPENGDTEYAPKFQGRVTITADTSTNTAYMELSSLRSEDTAVYYCYARGVRHALDYWGQGTLVTVSS

SEQ ID NO: 26286 - protein, 5 aa, Artificial Sequence
  Description of Artificial Sequence: Synthetic peptide
  XENP021339 vhCDR1
DYYMH

SEQ ID NO: 26287 - protein, 17 aa, Artificial Sequence
  Description of Artificial Sequence: Synthetic peptide
  XENP021339 vhCDR2
WIDPENGDTEYAPKFQG

SEQ ID NO: 26288 - protein, 9 aa, Artificial Sequence
  Description of Artificial Sequence: Synthetic peptide
  XENP021339 vhCDR3
RGVRHALDY

SEQ ID NO: 26289 - protein, 214 aa, Artificial Sequence; identical to SEQ ID NO: 17250
  Description of Artificial Sequence: Synthetic polypeptide
  XENP021339 2A11_H1.108_L2_Fab Light Chain

SEQ ID NO: 26290 - protein, 107 aa, Artificial Sequence; identical to SEQ ID NO: 17251
  Description of Artificial Sequence: Synthetic polypeptide
  VL of XENP021339

SEQ ID NO: 26291 - protein, 11 aa, Artificial Sequence
  Description of Artificial Sequence: Synthetic peptide
  XENP021339 vlCDR1
QASQDIGNYLN

SEQ ID NO: 26292 - protein, 7 aa, Artificial Sequence
  Description of Artificial Sequence: Synthetic peptide
  XENP021339 vlCDR2
YTSRLHS

SEQ ID NO: 26293 - protein, 9 aa, Artificial Sequence
  Description of Artificial Sequence: Synthetic peptide
  XENP021339 vlCDR3
QQGNTLPYT

SEQ ID NO: 26294 - protein, 223 aa, Artificial Sequence
  Description of Artificial Sequence: Synthetic polypeptide
  XENP021340 2A11_H1.109_L2_Fab Heavy Chain
EVQLVQSGAEVKKPGATVKISCKASGFNIKDYYMHWVQQAPGKGLEWMGWIDPENGDTEYAPKFQGRVTITADTSTNTAYMELSSLRSEDTAVYYCYARGVRLALDYWGQGTLVTVSSASTKGPSVFPLAPSSKSTSGGTAALGCLVKDYFPEPVTVSWNSGALTSGVHTFPAVLQSSGLYSLSSVVTVPSSSLGTQTYICNVNHKPSNTKVDKKVEPKSCGS

SEQ ID NO: 26295 - protein, 118 aa, Artificial Sequence
  Description of Artificial Sequence: Synthetic polypeptide
  VH of XENP021340
EVQLVQSGAEVKKPGATVKISCKASGFNIKDYYMHWVQQAPGKGLEWMGWIDPENGDTEYAPKFQGRVTITADTSTNTAYMELSSLRSEDTAVYYCYARGVRLALDYWGQGTLVTVSS

SEQ ID NO: 26296 - protein, 5 aa, Artificial Sequence
  Description of Artificial Sequence: Synthetic peptide
  XENP021340 vhCDR1
DYYMH

SEQ ID NO: 26297 - protein, 17 aa, Artificial Sequence
  Description of Artificial Sequence: Synthetic peptide
  XENP021340 vhCDR2
WIDPENGDTEYAPKFQG

SEQ ID NO: 26298 - protein, 9 aa, Artificial Sequence
  Description of Artificial Sequence: Synthetic peptide
  XENP021340 vhCDR3
RGVRLALDY

SEQ ID NO: 26299 - protein, 214 aa, Artificial Sequence; identical to SEQ ID NO: 17250
  Description of Artificial Sequence: Synthetic polypeptide
  XENP021340 2A11_H1.109_L2_Fab Light Chain

SEQ ID NO: 26300 - protein, 107 aa, Artificial Sequence; identical to SEQ ID NO: 17251
  Description of Artificial Sequence: Synthetic polypeptide
  VL of XENP021340

SEQ ID NO: 26301 - protein, 11 aa, Artificial Sequence
  Description of Artificial Sequence: Synthetic peptide
  XENP021340 vlCDR1
QASQDIGNYLN

SEQ ID NO: 26302 - protein, 7 aa, Artificial Sequence
  Description of Artificial Sequence: Synthetic peptide
  XENP021340 vlCDR2
YTSRLHS

SEQ ID NO: 26303 - protein, 9 aa, Artificial Sequence
  Description of Artificial Sequence: Synthetic peptide
  XENP021340 vlCDR3
QQGNTLPYT

SEQ ID NO: 26304 - protein, 223 aa, Artificial Sequence
  Description of Artificial Sequence: Synthetic polypeptide
  XENP021341 2A11_H1.110_L2_Fab Heavy Chain
EVQLVQSGAEVKKPGATVKISCKASGFNIKDYYMHWVQQAPGKGLEWMGWIDPENGDTEYAPKFQGRVTITADTSTNTAYMELSSLRSEDTAVYYCYARGVRPALDYWGQGTLVTVSSASTKGPSVFPLAPSSKSTSGGTAALGCLVKDYFPEPVTVSWNSGALTSGVHTFPAVLQSSGLYSLSSVVTVPSSSLGTQTYICNVNHKPSNTKVDKKVEPKSCGS

SEQ ID NO: 26305 - protein, 118 aa, Artificial Sequence
  Description of Artificial Sequence: Synthetic polypeptide
  VH of XENP021341
EVQLVQSGAEVKKPGATVKISCKASGFNIKDYYMHWVQQAPGKGLEWMGWIDPENGDTEYAPKFQGRVTITADTSTNTAYMELSSLRSEDTAVYYCYARGVRPALDYWGQGTLVTVSS

SEQ ID NO: 26306 - protein, 5 aa, Artificial Sequence
  Description of Artificial Sequence: Synthetic peptide
  XENP021341 vhCDR1
DYYMH

SEQ ID NO: 26307 - protein, 17 aa, Artificial Sequence
  Description of Artificial Sequence: Synthetic peptide
  XENP021341 vhCDR2
WIDPENGDTEYAPKFQG

SEQ ID NO: 26308 - protein, 9 aa, Artificial Sequence
  Description of Artificial Sequence: Synthetic peptide
  XENP021341 vhCDR3
RGVRPALDY

SEQ ID NO: 26309 - protein, 214 aa, Artificial Sequence; identical to SEQ ID NO: 17250
  Description of Artificial Sequence: Synthetic polypeptide
  XENP021341 2A11_H1.110_L2_Fab Light Chain

SEQ ID NO: 26310 - protein, 107 aa, Artificial Sequence; identical to SEQ ID NO: 17251
  Description of Artificial Sequence: Synthetic polypeptide
  VL of XENP021341

SEQ ID NO: 26311 - protein, 11 aa, Artificial Sequence
  Description of Artificial Sequence: Synthetic peptide
  XENP021341 vlCDR1
QASQDIGNYLN

SEQ ID NO: 26312 - protein, 7 aa, Artificial Sequence
  Description of Artificial Sequence: Synthetic peptide
  XENP021341 vlCDR2
YTSRLHS

SEQ ID NO: 26313 - protein, 9 aa, Artificial Sequence
  Description of Artificial Sequence: Synthetic peptide
  XENP021341 vlCDR3
QQGNTLPYT

SEQ ID NO: 26314 - protein, 223 aa, Artificial Sequence
  Description of Artificial Sequence: Synthetic polypeptide
  XENP021342 2A11_H1.111_L2_Fab Heavy Chain
EVQLVQSGAEVKKPGATVKISCKASGFNIKDYYMHWVQQAPGKGLEWMGWIDPENGDTEYAPKFQGRVTITADTSTNTAYMELSSLRSEDTAVYYCYARGVREALDYWGQGTLVTVSSASTKGPSVFPLAPSSKSTSGGTAALGCLVKDYFPEPVTVSWNSGALTSGVHTFPAVLQSSGLYSLSSVVTVPSSSLGTQTYICNVNHKPSNTKVDKKVEPKSCGS

SEQ ID NO: 26315 - protein, 118 aa, Artificial Sequence
  Description of Artificial Sequence: Synthetic polypeptide
  VH of XENP021342
EVQLVQSGAEVKKPGATVKISCKASGFNIKDYYMHWVQQAPGKGLEWMGWIDPENGDTEYAPKFQGRVTITADTSTNTAYMELSSLRSEDTAVYYCYARGVREALDYWGQGTLVTVSS

SEQ ID NO: 26316 - protein, 5 aa, Artificial Sequence
  Description of Artificial Sequence: Synthetic peptide
  XENP021342 vhCDR1
DYYMH

SEQ ID NO: 26317 - protein, 17 aa, Artificial Sequence
  Description of Artificial Sequence: Synthetic peptide
  XENP021342 vhCDR2
WIDPENGDTEYAPKFQG

SEQ ID NO: 26318 - protein, 9 aa, Artificial Sequence
  Description of Artificial Sequence: Synthetic peptide
  XENP021342 vhCDR3
RGVREALDY

SEQ ID NO: 26319 - protein, 214 aa, Artificial Sequence; identical to SEQ ID NO: 17250
  Description of Artificial Sequence: Synthetic polypeptide
  XENP021342 2A11_H1.111_L2_Fab Light Chain

SEQ ID NO: 26320 - protein, 107 aa, Artificial Sequence; identical to SEQ ID NO: 17251
  Description of Artificial Sequence: Synthetic polypeptide
  VL of XENP021342

SEQ ID NO: 26321 - protein, 11 aa, Artificial Sequence
  Description of Artificial Sequence: Synthetic peptide
  XENP021342 vlCDR1
QASQDIGNYLN

SEQ ID NO: 26322 - protein, 7 aa, Artificial Sequence
  Description of Artificial Sequence: Synthetic peptide
  XENP021342 vlCDR2
YTSRLHS

SEQ ID NO: 26323 - protein, 9 aa, Artificial Sequence
  Description of Artificial Sequence: Synthetic peptide
  XENP021342 vlCDR3
QQGNTLPYT

SEQ ID NO: 26324 - protein, 223 aa, Artificial Sequence
  Description of Artificial Sequence: Synthetic polypeptide
  XENP021343 2A11_H1.112_L2_Fab Heavy Chain
EVQLVQSGAEVKKPGATVKISCKASGFNIKDYYMHWVQQAPGKGLEWMGWIDPENGDTEYAPKFQGRVTITADTSTNTAYMELSSLRSEDTAVYYCYARGVRGALDYWGQGTLVTVSSASTKGPSVFPLAPSSKSTSGGTAALGCLVKDYFPEPVTVSWNSGALTSGVHTFPAVLQSSGLYSLSSVVTVPSSSLGTQTYICNVNHKPSNTKVDKKVEPKSCGS

SEQ ID NO: 26325 - protein, 118 aa, Artificial Sequence
  Description of Artificial Sequence: Synthetic polypeptide
  VH of XENP021343
EVQLVQSGAEVKKPGATVKISCKASGFNIKDYYMHWVQQAPGKGLEWMGWIDPENGDTEYAPKFQGRVTITADTSTNTAYMELSSLRSEDTAVYYCYARGVRGALDYWGQGTLVTVSS

SEQ ID NO: 26326 - protein, 5 aa, Artificial Sequence
  Description of Artificial Sequence: Synthetic peptide
  XENP021343 vhCDR1
DYYMH

SEQ ID NO: 26327 - protein, 17 aa, Artificial Sequence
  Description of Artificial Sequence: Synthetic peptide
  XENP021343 vhCDR2
WIDPENGDTEYAPKFQG

SEQ ID NO: 26328 - protein, 9 aa, Artificial Sequence
  Description of Artificial Sequence: Synthetic peptide
  XENP021343 vhCDR3
RGVRGALDY

SEQ ID NO: 26329 - protein, 214 aa, Artificial Sequence; identical to SEQ ID NO: 17250
  Description of Artificial Sequence: Synthetic polypeptide
  XENP021343 2A11_H1.112_L2_Fab Light Chain

SEQ ID NO: 26330 - protein, 107 aa, Artificial Sequence; identical to SEQ ID NO: 17251
  Description of Artificial Sequence: Synthetic polypeptide
  VL of XENP021343

SEQ ID NO: 26331 - protein, 11 aa, Artificial Sequence
  Description of Artificial Sequence: Synthetic peptide
  XENP021343 vlCDR1
QASQDIGNYLN

SEQ ID NO: 26332 - protein, 7 aa, Artificial Sequence
  Description of Artificial Sequence: Synthetic peptide
  XENP021343 vlCDR2
YTSRLHS

SEQ ID NO: 26333 - protein, 9 aa, Artificial Sequence
  Description of Artificial Sequence: Synthetic peptide
  XENP021343 vlCDR3
QQGNTLPYT

SEQ ID NO: 26334 - protein, 223 aa, Artificial Sequence
  Description of Artificial Sequence: Synthetic polypeptide
  XENP021344 2A11_H1.113_L2_Fab Heavy Chain
EVQLVQSGAEVKKPGATVKISCKASGFNIKDYYMHWVQQAPGKGLEWMGWIDPENGDTEYAPKFQGRVTITADTSTNTAYMELSSLRSEDTAVYYCYARGVRKALDYWGQGTLVTVSSASTKGPSVFPLAPSSKSTSGGTAALGCLVKDYFPEPVTVSWNSGALTSGVHTFPAVLQSSGLYSLSSVVTVPSSSLGTQTYICNVNHKPSNTKVDKKVEPKSCGS

SEQ ID NO: 26335 - protein, 118 aa, Artificial Sequence
  Description of Artificial Sequence: Synthetic polypeptide
  VH of XENP021344
EVQLVQSGAEVKKPGATVKISCKASGFNIKDYYMHWVQQAPGKGLEWMGWIDPENGDTEYAPKFQGRVTITADTSTNTAYMELSSLRSEDTAVYYCYARGVRKALDYWGQGTLVTVSS

SEQ ID NO: 26336 - protein, 5 aa, Artificial Sequence
  Description of Artificial Sequence: Synthetic peptide
  XENP021344 vhCDR1
DYYMH

SEQ ID NO: 26337 - protein, 17 aa, Artificial Sequence
  Description of Artificial Sequence: Synthetic peptide
  XENP021344 vhCDR2
WIDPENGDTEYAPKFQG

SEQ ID NO: 26338 - protein, 9 aa, Artificial Sequence
  Description of Artificial Sequence: Synthetic peptide
  XENP021344 vhCDR3
RGVRKALDY

SEQ ID NO: 26339 - protein, 214 aa, Artificial Sequence; identical to SEQ ID NO: 17250
  Description of Artificial Sequence: Synthetic polypeptide
  XENP021344 2A11_H1.113_L2_Fab Light Chain

SEQ ID NO: 26340 - protein, 107 aa, Artificial Sequence; identical to SEQ ID NO: 17251
  Description of Artificial Sequence: Synthetic polypeptide
  VL of XENP021344

SEQ ID NO: 26341 - protein, 11 aa, Artificial Sequence
  Description of Artificial Sequence: Synthetic peptide
  XENP021344 vlCDR1
QASQDIGNYLN

SEQ ID NO: 26342 - protein, 7 aa, Artificial Sequence
  Description of Artificial Sequence: Synthetic peptide
  XENP021344 vlCDR2
YTSRLHS

SEQ ID NO: 26343 - protein, 9 aa, Artificial Sequence
  Description of Artificial Sequence: Synthetic peptide
  XENP021344 vlCDR3
QQGNTLPYT

SEQ ID NO: 26344 - protein, 223 aa, Artificial Sequence
  Description of Artificial Sequence: Synthetic polypeptide
  XENP021345 2A11_H1.114_L2_Fab Heavy Chain
EVQLVQSGAEVKKPGATVKISCKASGFNIKDYYMHWVQQAPGKGLEWMGWIDPENGDTEYAPKFQGRVTITADTSTNTAYMELSSLRSEDTAVYYCYARGVRQSLDYWGQGTLVTVSSASTKGPSVFPLAPSSKSTSGGTAALGCLVKDYFPEPVTVSWNSGALTSGVHTFPAVLQSSGLYSLSSVVTVPSSSLGTQTYICNVNHKPSNTKVDKKVEPKSCGS

SEQ ID NO: 26345 - protein, 118 aa, Artificial Sequence
  Description of Artificial Sequence: Synthetic polypeptide
  VH of XENP021345
EVQLVQSGAEVKKPGATVKISCKASGFNIKDYYMHWVQQAPGKGLEWMGWIDPENGDTEYAPKFQGRVTITADTSTNTAYMELSSLRSEDTAVYYCYARGVRQSLDYWGQGTLVTVSS

SEQ ID NO: 26346 - protein, 5 aa, Artificial Sequence
  Description of Artificial Sequence: Synthetic peptide
  XENP021345 vhCDR1
DYYMH

SEQ ID NO: 26347 - protein, 17 aa, Artificial Sequence
  Description of Artificial Sequence: Synthetic peptide
  XENP021345 vhCDR2
WIDPENGDTEYAPKFQG

SEQ ID NO: 26348 - protein, 9 aa, Artificial Sequence
  Description of Artificial Sequence: Synthetic peptide
  XENP021345 vhCDR3
RGVRQSLDY

SEQ ID NO: 26349 - protein, 214 aa, Artificial Sequence; identical to SEQ ID NO: 17250
  Description of Artificial Sequence: Synthetic polypeptide
  XENP021345 2A11_H1.114_L2_Fab Light Chain

SEQ ID NO: 26350 - protein, 107 aa, Artificial Sequence; identical to SEQ ID NO: 17251
  Description of Artificial Sequence: Synthetic polypeptide
  VL of XENP021345

SEQ ID NO: 26351 - protein, 11 aa, Artificial Sequence
  Description of Artificial Sequence: Synthetic peptide
  XENP021345 vlCDR1
QASQDIGNYLN

SEQ ID NO: 26352 - protein, 7 aa, Artificial Sequence
  Description of Artificial Sequence: Synthetic peptide
  XENP021345 vlCDR2
YTSRLHS

SEQ ID NO: 26353 - protein, 9 aa, Artificial Sequence
  Description of Artificial Sequence: Synthetic peptide
  XENP021345 vlCDR3
QQGNTLPYT

SEQ ID NO: 26354 - protein, 223 aa, Artificial Sequence
  Description of Artificial Sequence: Synthetic polypeptide
  XENP021346 2A11_H1.115_L2_Fab Heavy Chain
EVQLVQSGAEVKKPGATVKISCKASGFNIKDYYMHWVQQAPGKGLEWMGWIDPENGDTEYAPKFQGRVTITADTSTNTAYMELSSLRSEDTAVYYCYARGVRQTLDYWGQGTLVTVSSASTKGPSVFPLAPSSKSTSGGTAALGCLVKDYFPEPVTVSWNSGALTSGVHTFPAVLQSSGLYSLSSVVTVPSSSLGTQTYICNVNHKPSNTKVDKKVEPKSCGS

SEQ ID NO: 26355 - protein, 118 aa, Artificial Sequence
  Description of Artificial Sequence: Synthetic polypeptide
  VH of XENP021346
EVQLVQSGAEVKKPGATVKISCKASGFNIKDYYMHWVQQAPGKGLEWMGWIDPENGDTEYAPKFQGRVTITADTSTNTAYMELSSLRSEDTAVYYCYARGVRQTLDYWGQGTLVTVSS

SEQ ID NO: 26356 - protein, 5 aa, Artificial Sequence
  Description of Artificial Sequence: Synthetic peptide
  XENP021346 vhCDR1
DYYMH

SEQ ID NO: 26357 - protein, 17 aa, Artificial Sequence
  Description of Artificial Sequence: Synthetic peptide
  XENP021346 vhCDR2
WIDPENGDTEYAPKFQG

SEQ ID NO: 26358 - protein, 9 aa, Artificial Sequence
  Description of Artificial Sequence: Synthetic peptide
  XENP021346 vhCDR3
RGVRQTLDY

SEQ ID NO: 26359 - protein, 214 aa, Artificial Sequence; identical to SEQ ID NO: 17250
  Description of Artificial Sequence: Synthetic polypeptide
  XENP021346 2A11_H1.115_L2_Fab Light Chain

SEQ ID NO: 26360 - protein, 107 aa, Artificial Sequence; identical to SEQ ID NO: 17251
  Description of Artificial Sequence: Synthetic polypeptide
  VL of XENP021346

SEQ ID NO: 26361 - protein, 11 aa, Artificial Sequence
  Description of Artificial Sequence: Synthetic peptide
  XENP021346 vlCDR1
QASQDIGNYLN

SEQ ID NO: 26362 - protein, 7 aa, Artificial Sequence
  Description of Artificial Sequence: Synthetic peptide
  XENP021346 vlCDR2
YTSRLHS

SEQ ID NO: 26363 - protein, 9 aa, Artificial Sequence
  Description of Artificial Sequence: Synthetic peptide
  XENP021346 vlCDR3
QQGNTLPYT

SEQ ID NO: 26364 - protein, 223 aa, Artificial Sequence
  Description of Artificial Sequence: Synthetic polypeptide
  XENP021347 2A11_H1.116_L2_Fab Heavy Chain
EVQLVQSGAEVKKPGATVKISCKASGFNIKDYYMHWVQQAPGKGLEWMGWIDPENGDTEYAPKFQGRVTITADTSTNTAYMELSSLRSEDTAVYYCYARGVRQGLDYWGQGTLVTVSSASTKGPSVFPLAPSSKSTSGGTAALGCLVKDYFPEPVTVSWNSGALTSGVHTFPAVLQSSGLYSLSSVVTVPSSSLGTQTYICNVNHKPSNTKVDKKVEPKSCGS

SEQ ID NO: 26365 - protein, 118 aa, Artificial Sequence
  Description of Artificial Sequence: Synthetic polypeptide
  VH of XENP021347
EVQLVQSGAEVKKPGATVKISCKASGFNIKDYYMHWVQQAPGKGLEWMGWIDPENGDTEYAPKFQGRVTITADTSTNTAYMELSSLRSEDTAVYYCYARGVRQGLDYWGQGTLVTVSS

SEQ ID NO: 26366 - protein, 5 aa, Artificial Sequence
  Description of Artificial Sequence: Synthetic peptide
  XENP021347 vhCDR1
DYYMH

SEQ ID NO: 26367 - protein, 17 aa, Artificial Sequence
  Description of Artificial Sequence: Synthetic peptide
  XENP021347 vhCDR2
WIDPENGDTEYAPKFQG

SEQ ID NO: 26368 - protein, 9 aa, Artificial Sequence
  Description of Artificial Sequence: Synthetic peptide
  XENP021347 vhCDR3
RGVRQGLDY

SEQ ID NO: 26369 - protein, 214 aa, Artificial Sequence; identical to SEQ ID NO: 17250
  Description of Artificial Sequence: Synthetic polypeptide
  XENP021347 2A11_H1.116_L2_Fab Light Chain

SEQ ID NO: 26370 - protein, 107 aa, Artificial Sequence; identical to SEQ ID NO: 17251
  Description of Artificial Sequence: Synthetic polypeptide
  VL of XENP021347

SEQ ID NO: 26371 - protein, 11 aa, Artificial Sequence
  Description of Artificial Sequence: Synthetic peptide
  XENP021347 vlCDR1
QASQDIGNYLN

SEQ ID NO: 26372 - protein, 7 aa, Artificial Sequence
  Description of Artificial Sequence: Synthetic peptide
  XENP021347 vlCDR2
YTSRLHS

SEQ ID NO: 26373 - protein, 9 aa, Artificial Sequence
  Description of Artificial Sequence: Synthetic peptide
  XENP021347 vlCDR3
QQGNTLPYT

SEQ ID NO: 26374 - protein, 223 aa, Artificial Sequence; identical to SEQ ID NO: 25194
  Description of Artificial Sequence: Synthetic polypeptide
  XENP021348 2A11_H1_L2.1_Fab Heavy Chain

SEQ ID NO: 26375 - protein, 118 aa, Artificial Sequence; identical to SEQ ID NO: 17236
  Description of Artificial Sequence: Synthetic polypeptide
  VH of XENP021348

SEQ ID NO: 26376 - protein, 5 aa, Artificial Sequence
  Description of Artificial Sequence: Synthetic peptide
  XENP021348 vhCDR1
DYYMH

SEQ ID NO: 26377 - protein, 17 aa, Artificial Sequence
  Description of Artificial Sequence: Synthetic peptide
  XENP021348 vhCDR2
WIDPENGDTEYAPKFQG

SEQ ID NO: 26378 - protein, 9 aa, Artificial Sequence
  Description of Artificial Sequence: Synthetic peptide
  XENP021348 vhCDR3
RGVRQALDY

SEQ ID NO: 26379 - protein, 214 aa, Artificial Sequence
  Description of Artificial Sequence: Synthetic polypeptide
  XENP021348 2A11_H1_L2.1_Fab Light Chain
DIQMTQSPAFLSVTPGEKVTITCQASEDIGNYLNWFQQKPDQTVKLLIYYTSRLHSGVPSRFSGSGSGTDYTFTISSLEAEDAATYFCQQGNTLPYTFGGGTKVEIKRTVAAPSVFIFPPSDEQLKSGTASVVCLLNNFYPREAKVQWKVDNALQSGNSQESVTEQDSKDSTYSLSSTLTLSKADYEKHKVYACEVTHQGLSSPVTKSFNRGEC

SEQ ID NO: 26380 - protein, 107 aa, Artificial Sequence
  Description of Artificial Sequence: Synthetic polypeptide
  VL of XENP021348
DIQMTQSPAFLSVTPGEKVTITCQASEDIGNYLNWFQQKPDQTVKLLIYYTSRLHSGVPSRFSGSGSGTDYTFTISSLEAEDAATYFCQQGNTLPYTFGGGTKVEIK

SEQ ID NO: 26381 - protein, 11 aa, Artificial Sequence
  Description of Artificial Sequence: Synthetic peptide
  XENP021348 vlCDR1
QASEDIGNYLN

SEQ ID NO: 26382 - protein, 7 aa, Artificial Sequence
  Description of Artificial Sequence: Synthetic peptide
  XENP021348 vlCDR2
YTSRLHS

SEQ ID NO: 26383 - protein, 9 aa, Artificial Sequence
  Description of Artificial Sequence: Synthetic peptide
  XENP021348 vlCDR3
QQGNTLPYT

SEQ ID NO: 26384 - protein, 223 aa, Artificial Sequence; identical to SEQ ID NO: 25194
  Description of Artificial Sequence: Synthetic polypeptide
  XENP021349 2A11_H1_L2.2_Fab Heavy Chain

SEQ ID NO: 26385 - protein, 118 aa, Artificial Sequence; identical to SEQ ID NO: 17236
  Description of Artificial Sequence: Synthetic polypeptide
  VH of XENP021349

SEQ ID NO: 26386 - protein, 5 aa, Artificial Sequence
  Description of Artificial Sequence: Synthetic peptide
  XENP021349 vhCDR1
DYYMH

SEQ ID NO: 26387 - protein, 17 aa, Artificial Sequence
  Description of Artificial Sequence: Synthetic peptide
  XENP021349 vhCDR2
WIDPENGDTEYAPKFQG

SEQ ID NO: 26388 - protein, 9 aa, Artificial Sequence
  Description of Artificial Sequence: Synthetic peptide
  XENP021349 vhCDR3
RGVRQALDY

SEQ ID NO: 26389 - protein, 214 aa, Artificial Sequence
  Description of Artificial Sequence: Synthetic polypeptide
  XENP021349 2A11_H1_L2.2_Fab Light Chain
DIQMTQSPAFLSVTPGEKVTITCQASQNIGNYLNWFQQKPDQTVKLLIYYTSRLHSGVPSRFSGSGSGTDYTFTISSLEAEDAATYFCQQGNTLPYTFGGGTKVEIKRTVAAPSVFIFPPSDEQLKSGTASVVCLLNNFYPREAKVQWKVDNALQSGNSQESVTEQDSKDSTYSLSSTLTLSKADYEKHKVYACEVTHQGLSSPVTKSFNRGEC

SEQ ID NO: 26390 - protein, 107 aa, Artificial Sequence
  Description of Artificial Sequence: Synthetic polypeptide
  VL of XENP021349
DIQMTQSPAFLSVTPGEKVTITCQASQNIGNYLNWFQQKPDQTVKLLIYYTSRLHSGVPSRFSGSGSGTDYTFTISSLEAEDAATYFCQQGNTLPYTFGGGTKVEIK

SEQ ID NO: 26391 - protein, 11 aa, Artificial Sequence
  Description of Artificial Sequence: Synthetic peptide
  XENP021349 vlCDR1
QASQNIGNYLN

SEQ ID NO: 26392 - protein, 7 aa, Artificial Sequence
  Description of Artificial Sequence: Synthetic peptide
  XENP021349 vlCDR2
YTSRLHS

SEQ ID NO: 26393 - protein, 9 aa, Artificial Sequence
  Description of Artificial Sequence: Synthetic peptide
  XENP021349 vlCDR3
QQGNTLPYT

SEQ ID NO: 26394 - protein, 223 aa, Artificial Sequence; identical to SEQ ID NO: 25194
  Description of Artificial Sequence: Synthetic polypeptide
  XENP021350 2A11_H1_L2.3_Fab Heavy Chain

SEQ ID NO: 26395 - protein, 118 aa, Artificial Sequence; identical to SEQ ID NO: 17236
  Description of Artificial Sequence: Synthetic polypeptide
  VH of XENP021350

SEQ ID NO: 26396 - protein, 5 aa, Artificial Sequence
  Description of Artificial Sequence: Synthetic peptide
  XENP021350 vhCDR1
DYYMH

SEQ ID NO: 26397 - protein, 17 aa, Artificial Sequence
  Description of Artificial Sequence: Synthetic peptide
  XENP021350 vhCDR2
WIDPENGDTEYAPKFQG

SEQ ID NO: 26398 - protein, 9 aa, Artificial Sequence
  Description of Artificial Sequence: Synthetic peptide
  XENP021350 vhCDR3
RGVRQALDY

SEQ ID NO: 26399 - protein, 214 aa, Artificial Sequence
  Description of Artificial Sequence: Synthetic polypeptide
  XENP021350 2A11_H1_L2.3_Fab Light Chain
DIQMTQSPAFLSVTPGEKVTITCQASQEIGNYLNWFQQKPDQTVKLLIYYTSRLHSGVPSRFSGSGSGTDYTFTISSLEAEDAATYFCQQGNTLPYTFGGGTKVEIKRTVAAPSVFIFPPSDEQLKSGTASVVCLLNNFYPREAKVQWKVDNALQSGNSQESVTEQDSKDSTYSLSSTLTLSKADYEKHKVYACEVTHQGLSSPVTKSFNRGEC

SEQ ID NO: 26400 - protein, 107 aa, Artificial Sequence
  Description of Artificial Sequence: Synthetic polypeptide
  VL of XENP021350
DIQMTQSPAFLSVTPGEKVTITCQASQEIGNYLNWFQQKPDQTVKLLIYYTSRLHSGVPSRFSGSGSGTDYTFTISSLEAEDAATYFCQQGNTLPYTFGGGTKVEIK

SEQ ID NO: 26401 - protein, 11 aa, Artificial Sequence
  Description of Artificial Sequence: Synthetic peptide
  XENP021350 vlCDR1
QASQEIGNYLN

SEQ ID NO: 26402 - protein, 7 aa, Artificial Sequence
  Description of Artificial Sequence: Synthetic peptide
  XENP021350 vlCDR2
YTSRLHS

SEQ ID NO: 26403 - protein, 9 aa, Artificial Sequence
  Description of Artificial Sequence: Synthetic peptide
  XENP021350 vlCDR3
QQGNTLPYT

SEQ ID NO: 26404 - protein, 223 aa, Artificial Sequence; identical to SEQ ID NO: 25194
  Description of Artificial Sequence: Synthetic polypeptide
  XENP021351 2A11_H1_L2.4_Fab Heavy Chain

SEQ ID NO: 26405 - protein, 118 aa, Artificial Sequence; identical to SEQ ID NO: 17236
  Description of Artificial Sequence: Synthetic polypeptide
  VH of XENP021351

SEQ ID NO: 26406 - protein, 5 aa, Artificial Sequence
  Description of Artificial Sequence: Synthetic peptide
  XENP021351 vhCDR1
DYYMH

SEQ ID NO: 26407 - protein, 17 aa, Artificial Sequence
  Description of Artificial Sequence: Synthetic peptide
  XENP021351 vhCDR2
WIDPENGDTEYAPKFQG

SEQ ID NO: 26408 - protein, 9 aa, Artificial Sequence
  Description of Artificial Sequence: Synthetic peptide
  XENP021351 vhCDR3
RGVRQALDY

SEQ ID NO: 26409 - protein, 214 aa, Artificial Sequence
  Description of Artificial Sequence: Synthetic polypeptide
  XENP021351 2A11_H1_L2.4_Fab Light Chain
DIQMTQSPAFLSVTPGEKVTITCQASQHIGNYLNWFQQKPDQTVKLLIYYTSRLHSGVPSRFSGSGSGTDYTFTISSLEAEDAATYFCQQGNTLPYTFGGGTKVEIKRTVAAPSVFIFPPSDEQLKSGTASVVCLLNNFYPREAKVQWKVDNALQSGNSQESVTEQDSKDSTYSLSSTLTLSKADYEKHKVYACEVTHQGLSSPVTKSFNRGEC

SEQ ID NO: 26410 - protein, 107 aa, Artificial Sequence
  Description of Artificial Sequence: Synthetic polypeptide
  VL of XENP021351
DIQMTQSPAFLSVTPGEKVTITCQASQHIGNYLNWFQQKPDQTVKLLIYYTSRLHSGVPSRFSGSGSGTDYTFTISSLEAEDAATYFCQQGNTLPYTFGGGTKVEIK

SEQ ID NO: 26411 - protein, 11 aa, Artificial Sequence
  Description of Artificial Sequence: Synthetic peptide
  XENP021351 vlCDR1
QASQHIGNYLN

SEQ ID NO: 26412 - protein, 7 aa, Artificial Sequence
  Description of Artificial Sequence: Synthetic peptide
  XENP021351 vlCDR2
YTSRLHS

SEQ ID NO: 26413 - protein, 9 aa, Artificial Sequence
  Description of Artificial Sequence: Synthetic peptide
  XENP021351 vlCDR3
QQGNTLPYT

SEQ ID NO: 26414 - protein, 223 aa, Artificial Sequence; identical to SEQ ID NO: 25194
  Description of Artificial Sequence: Synthetic polypeptide
  XENP021352 2A11_H1_L2.5_Fab Heavy Chain

SEQ ID NO: 26415 - protein, 118 aa, Artificial Sequence; identical to SEQ ID NO: 17236
  Description of Artificial Sequence: Synthetic polypeptide
  VH of XENP021352

SEQ ID NO: 26416 - protein, 5 aa, Artificial Sequence
  Description of Artificial Sequence: Synthetic peptide
  XENP021352 vhCDR1
DYYMH

SEQ ID NO: 26417 - protein, 17 aa, Artificial Sequence
  Description of Artificial Sequence: Synthetic peptide
  XENP021352 vhCDR2
WIDPENGDTEYAPKFQG

SEQ ID NO: 26418 - protein, 9 aa, Artificial Sequence
  Description of Artificial Sequence: Synthetic peptide
  XENP021352 vhCDR3
RGVRQALDY

SEQ ID NO: 26419 - protein, 214 aa, Artificial Sequence
  Description of Artificial Sequence: Synthetic polypeptide
  XENP021352 2A11_H1_L2.5_Fab Light Chain
DIQMTQSPAFLSVTPGEKVTITCQASQSIGNYLNWFQQKPDQTVKLLIYYTSRLHSGVPSRFSGSGSGTDYTFTISSLEAEDAATYFCQQGNTLPYTFGGGTKVEIKRTVAAPSVFIFPPSDEQLKSGTASVVCLLNNFYPREAKVQWKVDNALQSGNSQESVTEQDSKDSTYSLSSTLTLSKADYEKHKVYACEVTHQGLSSPVTKSFNRGEC

SEQ ID NO: 26420 - protein, 107 aa, Artificial Sequence
  Description of Artificial Sequence: Synthetic polypeptide
  VL of XENP021352
DIQMTQSPAFLSVTPGEKVTITCQASQSIGNYLNWFQQKPDQTVKLLIYYTSRLHSGVPSRFSGSGSGTDYTFTISSLEAEDAATYFCQQGNTLPYTFGGGTKVEIK

SEQ ID NO: 26421 - protein, 11 aa, Artificial Sequence
  Description of Artificial Sequence: Synthetic peptide
  XENP021352 vlCDR1
QASQSIGNYLN

SEQ ID NO: 26422 - protein, 7 aa, Artificial Sequence
  Description of Artificial Sequence: Synthetic peptide
  XENP021352 vlCDR2
YTSRLHS

SEQ ID NO: 26423 - protein, 9 aa, Artificial Sequence
  Description of Artificial Sequence: Synthetic peptide
  XENP021352 vlCDR3
QQGNTLPYT

SEQ ID NO: 26424 - protein, 223 aa, Artificial Sequence; identical to SEQ ID NO: 25194
  Description of Artificial Sequence: Synthetic polypeptide
  XENP021353 2A11_H1_L2.6_Fab Heavy Chain

SEQ ID NO: 26425 - protein, 118 aa, Artificial Sequence; identical to SEQ ID NO: 17236
  Description of Artificial Sequence: Synthetic polypeptide
  VH of XENP021353

SEQ ID NO: 26426 - protein, 5 aa, Artificial Sequence
  Description of Artificial Sequence: Synthetic peptide
  XENP021353 vhCDR1
DYYMH

SEQ ID NO: 26427 - protein, 17 aa, Artificial Sequence
  Description of Artificial Sequence: Synthetic peptide
  XENP021353 vhCDR2
WIDPENGDTEYAPKFQG

SEQ ID NO: 26428 - protein, 9 aa, Artificial Sequence
  Description of Artificial Sequence: Synthetic peptide
  XENP021353 vhCDR3
RGVRQALDY

SEQ ID NO: 26429 - protein, 214 aa, Artificial Sequence
  Description of Artificial Sequence: Synthetic polypeptide
  XENP021353 2A11_H1_L2.6_Fab Light Chain
DIQMTQSPAFLSVTPGEKVTITCQASQRIGNYLNWFQQKPDQTVKLLIYYTSRLHSGVPSRFSGSGSGTDYTFTISSLEAEDAATYFCQQGNTLPYTFGGGTKVEIKRTVAAPSVFIFPPSDEQLKSGTASVVCLLNNFYPREAKVQWKVDNALQSGNSQESVTEQDSKDSTYSLSSTLTLSKADYEKHKVYACEVTHQGLSSPVTKSFNRGEC

SEQ ID NO: 26430 - protein, 107 aa, Artificial Sequence
  Description of Artificial Sequence: Synthetic polypeptide
  VL of XENP021353
DIQMTQSPAFLSVTPGEKVTITCQASQRIGNYLNWFQQKPDQTVKLLIYYTSRLHSGVPSRFSGSGSGTDYTFTISSLEAEDAATYFCQQGNTLPYTFGGGTKVEIK

SEQ ID NO: 26431 - protein, 11 aa, Artificial Sequence
  Description of Artificial Sequence: Synthetic peptide
  XENP021353 vlCDR1
QASQRIGNYLN

SEQ ID NO: 26432 - protein, 7 aa, Artificial Sequence
  Description of Artificial Sequence: Synthetic peptide
  XENP021353 vlCDR2
YTSRLHS

SEQ ID NO: 26433 - protein, 9 aa, Artificial Sequence
  Description of Artificial Sequence: Synthetic peptide
  XENP021353 vlCDR3
QQGNTLPYT

SEQ ID NO: 26434 - protein, 223 aa, Artificial Sequence; identical to SEQ ID NO: 25194
  Description of Artificial Sequence: Synthetic polypeptide
  XENP021354 2A11_H1_L2.7_Fab Heavy Chain

SEQ ID NO: 26435 - protein, 118 aa, Artificial Sequence; identical to SEQ ID NO: 17236
  Description of Artificial Sequence: Synthetic polypeptide
  VH of XENP021354

SEQ ID NO: 26436 - protein, 5 aa, Artificial Sequence
  Description of Artificial Sequence: Synthetic peptide
  XENP021354 vhCDR1
DYYMH

SEQ ID NO: 26437 - protein, 17 aa, Artificial Sequence
  Description of Artificial Sequence: Synthetic peptide
  XENP021354 vhCDR2
WIDPENGDTEYAPKFQG

SEQ ID NO: 26438 - protein, 9 aa, Artificial Sequence
  Description of Artificial Sequence: Synthetic peptide
  XENP021354 vhCDR3
RGVRQALDY

SEQ ID NO: 26439 - protein, 214 aa, Artificial Sequence
  Description of Artificial Sequence: Synthetic polypeptide
  XENP021354 2A11_H1_L2.7_Fab Light Chain
DIQMTQSPAFLSVTPGEKVTITCQASQLIGNYLNWFQQKPDQTVKLLIYYTSRLHSGVPSRFSGSGSGTDYTFTISSLEAEDAATYFCQQGNTLPYTFGGGTKVEIKRTVAAPSVFIFPPSDEQLKSGTASVVCLLNNFYPREAKVQWKVDNALQSGNSQESVTEQDSKDSTYSLSSTLTLSKADYEKHKVYACEVTHQGLSSPVTKSFNRGEC

SEQ ID NO: 26440 - protein, 107 aa, Artificial Sequence
  Description of Artificial Sequence: Synthetic polypeptide
  VL of XENP021354
DIQMTQSPAFLSVTPGEKVTITCQASQLIGNYLNWFQQKPDQTVKLLIYYTSRLHSGVPSRFSGSGSGTDYTFTISSLEAEDAATYFCQQGNTLPYTFGGGTKVEIK

SEQ ID NO: 26441 - protein, 11 aa, Artificial Sequence
  Description of Artificial Sequence: Synthetic peptide
  XENP021354 vlCDR1
QASQLIGNYLN

SEQ ID NO: 26442 - protein, 7 aa, Artificial Sequence
  Description of Artificial Sequence: Synthetic peptide
  XENP021354 vlCDR2
YTSRLHS

SEQ ID NO: 26443 - protein, 9 aa, Artificial Sequence
  Description of Artificial Sequence: Synthetic peptide
  XENP021354 vlCDR3
QQGNTLPYT

SEQ ID NO: 26444 - protein, 223 aa, Artificial Sequence; identical to SEQ ID NO: 25194
  Description of Artificial Sequence: Synthetic polypeptide
  XENP021355 2A11_H1_L2.8_Fab Heavy Chain

SEQ ID NO: 26445 - protein, 118 aa, Artificial Sequence; identical to SEQ ID NO: 17236
  Description of Artificial Sequence: Synthetic polypeptide
  VH of XENP021355

SEQ ID NO: 26446 - protein, 5 aa, Artificial Sequence
  Description of Artificial Sequence: Synthetic peptide
  XENP021355 vhCDR1
DYYMH

SEQ ID NO: 26447 - protein, 17 aa, Artificial Sequence
  Description of Artificial Sequence: Synthetic peptide
  XENP021355 vhCDR2
WIDPENGDTEYAPKFQG

SEQ ID NO: 26448 - protein, 9 aa, Artificial Sequence
  Description of Artificial Sequence: Synthetic peptide
  XENP021355 vhCDR3
RGVRQALDY

SEQ ID NO: 26449 - protein, 214 aa, Artificial Sequence
  Description of Artificial Sequence: Synthetic polypeptide
  XENP021355 2A11_H1_L2.8_Fab Light Chain
DIQMTQSPAFLSVTPGEKVTITCQASQTIGNYLNWFQQKPDQTVKLLIYYTSRLHSGVPSRFSGSGSGTDYTFTISSLEAEDAATYFCQQGNTLPYTFGGGTKVEIKRTVAAPSVFIFPPSDEQLKSGTASVVCLLNNFYPREAKVQWKVDNALQSGNSQESVTEQDSKDSTYSLSSTLTLSKADYEKHKVYACEVTHQGLSSPVTKSFNRGEC

SEQ ID NO: 26450 - protein, 107 aa, Artificial Sequence
  Description of Artificial Sequence: Synthetic polypeptide
  VL of XENP021355
DIQMTQSPAFLSVTPGEKVTITCQASQTIGNYLNWFQQKPDQTVKLLIYYTSRLHSGVPSRFSGSGSGTDYTFTISSLEAEDAATYFCQQGNTLPYTFGGGTKVEIK

SEQ ID NO: 26451 - protein, 11 aa, Artificial Sequence
  Description of Artificial Sequence: Synthetic peptide
  XENP021355 vlCDR1
QASQTIGNYLN

SEQ ID NO: 26452 - protein, 7 aa, Artificial Sequence
  Description of Artificial Sequence: Synthetic peptide
  XENP021355 vlCDR2
YTSRLHS

SEQ ID NO: 26453 - protein, 9 aa, Artificial Sequence
  Description of Artificial Sequence: Synthetic peptide
  XENP021355 vlCDR3
QQGNTLPYT

SEQ ID NO: 26454 - protein, 223 aa, Artificial Sequence; identical to SEQ ID NO: 25194
  Description of Artificial Sequence: Synthetic polypeptide
  XENP021356 2A11_H1_L2.9_Fab Heavy Chain

SEQ ID NO: 26455 - protein, 118 aa, Artificial Sequence; identical to SEQ ID NO: 17236
  Description of Artificial Sequence: Synthetic polypeptide
  VH of XENP021356

SEQ ID NO: 26456 - protein, 5 aa, Artificial Sequence
  Description of Artificial Sequence: Synthetic peptide
  XENP021356 vhCDR1
DYYMH

SEQ ID NO: 26457 - protein, 17 aa, Artificial Sequence
  Description of Artificial Sequence: Synthetic peptide
  XENP021356 vhCDR2
WIDPENGDTEYAPKFQG

SEQ ID NO: 26458 - protein, 9 aa, Artificial Sequence
  Description of Artificial Sequence: Synthetic peptide
  XENP021356 vhCDR3
RGVRQALDY

SEQ ID NO: 26459 - protein, 214 aa, Artificial Sequence
  Description of Artificial Sequence: Synthetic polypeptide
  XENP021356 2A11_H1_L2.9_Fab Light Chain
DIQMTQSPAFLSVTPGEKVTITCQASQQIGNYLNWFQQKPDQTVKLLIYYTSRLHSGVPSRFSGSGSGTDYTFTISSLEAEDAATYFCQQGNTLPYTFGGGTKVEIKRTVAAPSVFIFPPSDEQLKSGTASVVCLLNNFYPREAKVQWKVDNALQSGNSQESVTEQDSKDSTYSLSSTLTLSKADYEKHKVYACEVTHQGLSSPVTKSFNRGEC

SEQ ID NO: 26460 - protein, 107 aa, Artificial Sequence
  Description of Artificial Sequence: Synthetic polypeptide
  VL of XENP021356
DIQMTQSPAFLSVTPGEKVTITCQASQQIGNYLNWFQQKPDQTVKLLIYYTSRLHSGVPSRFSGSGSGTDYTFTISSLEAEDAATYFCQQGNTLPYTFGGGTKVEIK

SEQ ID NO: 26461 - protein, 11 aa, Artificial Sequence
  Description of Artificial Sequence: Synthetic peptide
  XENP021356 vlCDR1
QASQQIGNYLN

SEQ ID NO: 26462 - protein, 7 aa, Artificial Sequence
  Description of Artificial Sequence: Synthetic peptide
  XENP021356 vlCDR2
YTSRLHS

SEQ ID NO: 26463 - protein, 9 aa, Artificial Sequence
  Description of Artificial Sequence: Synthetic peptide
  XENP021356 vlCDR3
QQGNTLPYT

SEQ ID NO: 26464 - protein, 223 aa, Artificial Sequence; identical to SEQ ID NO: 25194
  Description of Artificial Sequence: Synthetic polypeptide
  XENP021357 2A11_H1_L2.10_Fab Heavy Chain

SEQ ID NO: 26465 - protein, 118 aa, Artificial Sequence; identical to SEQ ID NO: 17236
  Description of Artificial Sequence: Synthetic polypeptide
  VH of XENP021357

SEQ ID NO: 26466 - protein, 5 aa, Artificial Sequence
  Description of Artificial Sequence: Synthetic peptide
  XENP021357 vhCDR1
DYYMH

SEQ ID NO: 26467 - protein, 17 aa, Artificial Sequence
  Description of Artificial Sequence: Synthetic peptide
  XENP021357 vhCDR2
WIDPENGDTEYAPKFQG

SEQ ID NO: 26468 - protein, 9 aa, Artificial Sequence
  Description of Artificial Sequence: Synthetic peptide
  XENP021357 vhCDR3
RGVRQALDY

SEQ ID NO: 26469 - protein, 214 aa, Artificial Sequence
  Description of Artificial Sequence: Synthetic polypeptide
  XENP021357 2A11_H1_L2.10_Fab Light Chain
DIQMTQSPAFLSVTPGEKVTITCQASQYIGNYLNWFQQKPDQTVKLLIYYTSRLHSGVPSRFSGSGSGTDYTFTISSLEAEDAATYFCQQGNTLPYTFGGGTKVEIKRTVAAPSVFIFPPSDEQLKSGTASVVCLLNNFYPREAKVQWKVDNALQSGNSQESVTEQDSKDSTYSLSSTLTLSKADYEKHKVYACEVTHQGLSSPVTKSFNRGEC

SEQ ID NO: 26470 - protein, 107 aa, Artificial Sequence
  Description of Artificial Sequence: Synthetic polypeptide
  VL of XENP021357
DIQMTQSPAFLSVTPGEKVTITCQASQYIGNYLNWFQQKPDQTVKLLIYYTSRLHSGVPSRFSGSGSGTDYTFTISSLEAEDAATYFCQQGNTLPYTFGGGTKVEIK

SEQ ID NO: 26471 - protein, 11 aa, Artificial Sequence
  Description of Artificial Sequence: Synthetic peptide
  XENP021357 vlCDR1
QASQYIGNYLN

SEQ ID NO: 26472 - protein, 7 aa, Artificial Sequence
  Description of Artificial Sequence: Synthetic peptide
  XENP021357 vlCDR2
YTSRLHS

SEQ ID NO: 26473 - protein, 9 aa, Artificial Sequence
  Description of Artificial Sequence: Synthetic peptide
  XENP021357 vlCDR3
QQGNTLPYT

SEQ ID NO: 26474 - protein, 223 aa, Artificial Sequence; identical to SEQ ID NO: 25194
  Description of Artificial Sequence: Synthetic polypeptide
  XENP021358 2A11_H1_L2.11_Fab Heavy Chain

SEQ ID NO: 26475 - protein, 118 aa, Artificial Sequence; identical to SEQ ID NO: 17236
  Description of Artificial Sequence: Synthetic polypeptide
  VH of XENP021358

SEQ ID NO: 26476 - protein, 5 aa, Artificial Sequence
  Description of Artificial Sequence: Synthetic peptide
  XENP021358 vhCDR1
DYYMH

SEQ ID NO: 26477 - protein, 17 aa, Artificial Sequence
  Description of Artificial Sequence: Synthetic peptide
  XENP021358 vhCDR2
WIDPENGDTEYAPKFQG

SEQ ID NO: 26478 - protein, 9 aa, Artificial Sequence
  Description of Artificial Sequence: Synthetic peptide
  XENP021358 vhCDR3
RGVRQALDY

SEQ ID NO: 26479 - protein, 214 aa, Artificial Sequence
  Description of Artificial Sequence: Synthetic polypeptide
  XENP021358 2A11_H1_L2.11_Fab Light Chain
DIQMTQSPAFLSVTPGEKVTITCQASQDVGNYLNWFQQKPDQTVKLLIYYTSRLHSGVPSRFSGSGSGTDYTFTISSLEAEDAATYFCQQGNTLPYTFGGGTKVEIKRTVAAPSVFIFPPSDEQLKSGTASVVCLLNNFYPREAKVQWKVDNALQSGNSQESVTEQDSKDSTYSLSSTLTLSKADYEKHKVYACEVTHQGLSSPVTKSFNRGEC

SEQ ID NO: 26480 - protein, 107 aa, Artificial Sequence
  Description of Artificial Sequence: Synthetic polypeptide
  VL of XENP021358
DIQMTQSPAFLSVTPGEKVTITCQASQDVGNYLNWFQQKPDQTVKLLIYYTSRLHSGVPSRFSGSGSGTDYTFTISSLEAEDAATYFCQQGNTLPYTFGGGTKVEIK

SEQ ID NO: 26481 - protein, 11 aa, Artificial Sequence
  Description of Artificial Sequence: Synthetic peptide
  XENP021358 vlCDR1
QASQDVGNYLN

SEQ ID NO: 26482 - protein, 7 aa, Artificial Sequence
  Description of Artificial Sequence: Synthetic peptide
  XENP021358 vlCDR2
YTSRLHS

SEQ ID NO: 26483 - protein, 9 aa, Artificial Sequence
  Description of Artificial Sequence: Synthetic peptide
  XENP021358 vlCDR3
QQGNTLPYT

SEQ ID NO: 26484 - protein, 223 aa, Artificial Sequence; identical to SEQ ID NO: 25194
  Description of Artificial Sequence: Synthetic polypeptide
  XENP021359 2A11_H1_L2.12_Fab Heavy Chain

SEQ ID NO: 26485 - protein, 118 aa, Artificial Sequence; identical to SEQ ID NO: 17236
  Description of Artificial Sequence: Synthetic polypeptide
  VH of XENP021359

SEQ ID NO: 26486 - protein, 5 aa, Artificial Sequence
  Description of Artificial Sequence: Synthetic peptide
  XENP021359 vhCDR1
DYYMH

SEQ ID NO: 26487 - protein, 17 aa, Artificial Sequence
  Description of Artificial Sequence: Synthetic peptide
  XENP021359 vhCDR2
WIDPENGDTEYAPKFQG

SEQ ID NO: 26488 - protein, 9 aa, Artificial Sequence
  Description of Artificial Sequence: Synthetic peptide
  XENP021359 vhCDR3
RGVRQALDY

SEQ ID NO: 26489 - protein, 214 aa, Artificial Sequence
  Description of Artificial Sequence: Synthetic polypeptide
  XENP021359 2A11_H1_L2.12_Fab Light Chain
DIQMTQSPAFLSVTPGEKVTITCQASQDLGNYLNWFQQKPDQTVKLLIYYTSRLHSGVPSRFSGSGSGTDYTFTISSLEAEDAATYFCQQGNTLPYTFGGGTKVEIKRTVAAPSVFIFPPSDEQLKSGTASVVCLLNNFYPREAKVQWKVDNALQSGNSQESVTEQDSKDSTYSLSSTLTLSKADYEKHKVYACEVTHQGLSSPVTKSFNRGEC

SEQ ID NO: 26490 - protein, 107 aa, Artificial Sequence
  Description of Artificial Sequence: Synthetic polypeptide
  VL of XENP021359
DIQMTQSPAFLSVTPGEKVTITCQASQDLGNYLNWFQQKPDQTVKLLIYYTSRLHSGVPSRFSGSGSGTDYTFTISSLEAEDAATYFCQQGNTLPYTFGGGTKVEIK

SEQ ID NO: 26491 - protein, 11 aa, Artificial Sequence
  Description of Artificial Sequence: Synthetic peptide
  XENP021359 vlCDR1
QASQDLGNYLN

SEQ ID NO: 26492 - protein, 7 aa, Artificial Sequence
  Description of Artificial Sequence: Synthetic peptide
  XENP021359 vlCDR2
YTSRLHS

SEQ ID NO: 26493 - protein, 9 aa, Artificial Sequence
  Description of Artificial Sequence: Synthetic peptide
  XENP021359 vlCDR3
QQGNTLPYT

SEQ ID NO: 26494 - protein, 223 aa, Artificial Sequence; identical to SEQ ID NO: 25194
  Description of Artificial Sequence: Synthetic polypeptide
  XENP021360 2A11_H1_L2.13_Fab Heavy Chain

SEQ ID NO: 26495 - protein, 118 aa, Artificial Sequence; identical to SEQ ID NO: 17236
  Description of Artificial Sequence: Synthetic polypeptide
  VH of XENP021360

SEQ ID NO: 26496 - protein, 5 aa, Artificial Sequence
  Description of Artificial Sequence: Synthetic peptide
  XENP021360 vhCDR1
DYYMH

SEQ ID NO: 26497 - protein, 17 aa, Artificial Sequence
  Description of Artificial Sequence: Synthetic peptide
  XENP021360 vhCDR2
WIDPENGDTEYAPKFQG

SEQ ID NO: 26498 - protein, 9 aa, Artificial Sequence
  Description of Artificial Sequence: Synthetic peptide
  XENP021360 vhCDR3
RGVRQALDY

SEQ ID NO: 26499 - protein, 214 aa, Artificial Sequence
  Description of Artificial Sequence: Synthetic polypeptide
  XENP021360 2A11_H1_L2.13_Fab Light Chain
DIQMTQSPAFLSVTPGEKVTITCQASQDIANYLNWFQQKPDQTVKLLIYYTSRLHSGVPSRFSGSGSGTDYTFTISSLEAEDAATYFCQQGNTLPYTFGGGTKVEIKRTVAAPSVFIFPPSDEQLKSGTASVVCLLNNFYPREAKVQWKVDNALQSGNSQESVTEQDSKDSTYSLSSTLTLSKADYEKHKVYACEVTHQGLSSPVTKSFNRGEC

SEQ ID NO: 26500 - protein, 107 aa, Artificial Sequence
  Description of Artificial Sequence: Synthetic polypeptide
  VL of XENP021360
DIQMTQSPAFLSVTPGEKVTITCQASQDIANYLNWFQQKPDQTVKLLIYYTSRLHSGVPSRFSGSGSGTDYTFTISSLEAEDAATYFCQQGNTLPYTFGGGTKVEIK

SEQ ID NO: 26501 - protein, 11 aa, Artificial Sequence
  Description of Artificial Sequence: Synthetic peptide
  XENP021360 vlCDR1
QASQDIANYLN

SEQ ID NO: 26502 - protein, 7 aa, Artificial Sequence
  Description of Artificial Sequence: Synthetic peptide
  XENP021360 vlCDR2
YTSRLHS

SEQ ID NO: 26503 - protein, 9 aa, Artificial Sequence
  Description of Artificial Sequence: Synthetic peptide
  XENP021360 vlCDR3
QQGNTLPYT

SEQ ID NO: 26504 - protein, 223 aa, Artificial Sequence; identical to SEQ ID NO: 25194
  Description of Artificial Sequence: Synthetic polypeptide
  XENP021361 2A11_H1_L2.14_Fab Heavy Chain

SEQ ID NO: 26505 - protein, 118 aa, Artificial Sequence; identical to SEQ ID NO: 17236
  Description of Artificial Sequence: Synthetic polypeptide
  VH of XENP021361

SEQ ID NO: 26506 - protein, 5 aa, Artificial Sequence
  Description of Artificial Sequence: Synthetic peptide
  XENP021361 vhCDR1
DYYMH

SEQ ID NO: 26507 - protein, 17 aa, Artificial Sequence
  Description of Artificial Sequence: Synthetic peptide
  XENP021361 vhCDR2
WIDPENGDTEYAPKFQG

SEQ ID NO: 26508 - protein, 9 aa, Artificial Sequence
  Description of Artificial Sequence: Synthetic peptide
  XENP021361 vhCDR3
RGVRQALDY

SEQ ID NO: 26509 - protein, 214 aa, Artificial Sequence
  Description of Artificial Sequence: Synthetic polypeptide
  XENP021361 2A11_H1_L2.14_Fab Light Chain
DIQMTQSPAFLSVTPGEKVTITCQASQDISNYLNWFQQKPDQTVKLLIYYTSRLHSGVPSRFSGSGSGTDYTFTISSLEAEDAATYFCQQGNTLPYTFGGGTKVEIKRTVAAPSVFIFPPSDEQLKSGTASVVCLLNNFYPREAKVQWKVDNALQSGNSQESVTEQDSKDSTYSLSSTLTLSKADYEKHKVYACEVTHQGLSSPVTKSFNRGEC

SEQ ID NO: 26510 - protein, 107 aa, Artificial Sequence
  Description of Artificial Sequence: Synthetic polypeptide
  VL of XENP021361
DIQMTQSPAFLSVTPGEKVTITCQASQDISNYLNWFQQKPDQTVKLLIYYTSRLHSGVPSRFSGSGSGTDYTFTISSLEAEDAATYFCQQGNTLPYTFGGGTKVEIK

SEQ ID NO: 26511 - protein, 11 aa, Artificial Sequence
  Description of Artificial Sequence: Synthetic peptide
  XENP021361 vlCDR1
QASQDISNYLN

SEQ ID NO: 26512 - protein, 7 aa, Artificial Sequence
  Description of Artificial Sequence: Synthetic peptide
  XENP021361 vlCDR2
YTSRLHS

SEQ ID NO: 26513 - protein, 9 aa, Artificial Sequence
  Description of Artificial Sequence: Synthetic peptide
  XENP021361 vlCDR3
QQGNTLPYT

SEQ ID NO: 26514 - protein, 223 aa, Artificial Sequence; identical to SEQ ID NO: 25194
  Description of Artificial Sequence: Synthetic polypeptide
  XENP021362 2A11_H1_L2.15_Fab Heavy Chain

SEQ ID NO: 26515 - protein, 118 aa, Artificial Sequence; identical to SEQ ID NO: 17236
  Description of Artificial Sequence: Synthetic polypeptide
  VH of XENP021362

SEQ ID NO: 26516 - protein, 5 aa, Artificial Sequence
  Description of Artificial Sequence: Synthetic peptide
  XENP021362 vhCDR1
DYYMH

SEQ ID NO: 26517 - protein, 17 aa, Artificial Sequence
  Description of Artificial Sequence: Synthetic peptide
  XENP021362 vhCDR2
WIDPENGDTEYAPKFQG

SEQ ID NO: 26518 - protein, 9 aa, Artificial Sequence
  Description of Artificial Sequence: Synthetic peptide
  XENP021362 vhCDR3
RGVRQALDY

SEQ ID NO: 26519 - protein, 214 aa, Artificial Sequence
  Description of Artificial Sequence: Synthetic polypeptide
  XENP021362 2A11_H1_L2.15_Fab Light Chain
DIQMTQSPAFLSVTPGEKVTITCQASQDIDNYLNWFQQKPDQTVKLLIYYTSRLHSGVPSRFSGSGSGTDYTFTISSLEAEDAATYFCQQGNTLPYTFGGGTKVEIKRTVAAPSVFIFPPSDEQLKSGTASVVCLLNNFYPREAKVQWKVDNALQSGNSQESVTEQDSKDSTYSLSSTLTLSKADYEKHKVYACEVTHQGLSSPVTKSFNRGEC

SEQ ID NO: 26520 - protein, 107 aa, Artificial Sequence
  Description of Artificial Sequence: Synthetic polypeptide
  VL of XENP021362
DIQMTQSPAFLSVTPGEKVTITCQASQDIDNYLNWFQQKPDQTVKLLIYYTSRLHSGVPSRFSGSGSGTDYTFTISSLEAEDAATYFCQQGNTLPYTFGGGTKVEIK

SEQ ID NO: 26521 - protein, 11 aa, Artificial Sequence
  Description of Artificial Sequence: Synthetic peptide
  XENP021362 vlCDR1
QASQDIDNYLN

SEQ ID NO: 26522 - protein, 7 aa, Artificial Sequence
  Description of Artificial Sequence: Synthetic peptide
  XENP021362 vlCDR2
YTSRLHS

SEQ ID NO: 26523 - protein, 9 aa, Artificial Sequence
  Description of Artificial Sequence: Synthetic peptide
  XENP021362 vlCDR3
QQGNTLPYT

SEQ ID NO: 26524 - protein, 223 aa, Artificial Sequence; identical to SEQ ID NO: 25194
  Description of Artificial Sequence: Synthetic polypeptide
  XENP021363 2A11_H1_L2.16_Fab Heavy Chain

SEQ ID NO: 26525 - protein, 118 aa, Artificial Sequence; identical to SEQ ID NO: 17236
  Description of Artificial Sequence: Synthetic polypeptide
  VH of XENP021363

SEQ ID NO: 26526 - protein, 5 aa, Artificial Sequence
  Description of Artificial Sequence: Synthetic peptide
  XENP021363 vhCDR1
DYYMH

SEQ ID NO: 26527 - protein, 17 aa, Artificial Sequence
  Description of Artificial Sequence: Synthetic peptide
  XENP021363 vhCDR2
WIDPENGDTEYAPKFQG

SEQ ID NO: 26528 - protein, 9 aa, Artificial Sequence
  Description of Artificial Sequence: Synthetic peptide
  XENP021363 vhCDR3
RGVRQALDY

SEQ ID NO: 26529 - protein, 214 aa, Artificial Sequence
  Description of Artificial Sequence: Synthetic polypeptide
  XENP021363 2A11_H1_L2.16_Fab Light Chain
DIQMTQSPAFLSVTPGEKVTITCQASQDIGDYLNWFQQKPDQTVKLLIYYTSRLHSGVPSRFSGSGSGTDYTFTISSLEAEDAATYFCQQGNTLPYTFGGGTKVEIKRTVAAPSVFIFPPSDEQLKSGTASVVCLLNNFYPREAKVQWKVDNALQSGNSQESVTEQDSKDSTYSLSSTLTLSKADYEKHKVYACEVTHQGLSSPVTKSFNRGEC

SEQ ID NO: 26530 - protein, 107 aa, Artificial Sequence
  Description of Artificial Sequence: Synthetic polypeptide
  VL of XENP021363
DIQMTQSPAFLSVTPGEKVTITCQASQDIGDYLNWFQQKPDQTVKLLIYYTSRLHSGVPSRFSGSGSGTDYTFTISSLEAEDAATYFCQQGNTLPYTFGGGTKVEIK

SEQ ID NO: 26531 - protein, 11 aa, Artificial Sequence
  Description of Artificial Sequence: Synthetic peptide
  XENP021363 vlCDR1
QASQDIGDYLN

SEQ ID NO: 26532 - protein, 7 aa, Artificial Sequence
  Description of Artificial Sequence: Synthetic peptide
  XENP021363 vlCDR2
YTSRLHS

SEQ ID NO: 26533 - protein, 9 aa, Artificial Sequence
  Description of Artificial Sequence: Synthetic peptide
  XENP021363 vlCDR3
QQGNTLPYT

SEQ ID NO: 26534 - protein, 223 aa, Artificial Sequence; identical to SEQ ID NO: 25194
  Description of Artificial Sequence: Synthetic polypeptide
  XENP021364 2A11_H1_L2.17_Fab Heavy Chain

SEQ ID NO: 26535 - protein, 118 aa, Artificial Sequence; identical to SEQ ID NO: 17236
  Description of Artificial Sequence: Synthetic polypeptide
  VH of XENP021364

SEQ ID NO: 26536 - protein, 5 aa, Artificial Sequence
  Description of Artificial Sequence: Synthetic peptide
  XENP021364 vhCDR1
DYYMH

SEQ ID NO: 26537 - protein, 17 aa, Artificial Sequence
  Description of Artificial Sequence: Synthetic peptide
  XENP021364 vhCDR2
WIDPENGDTEYAPKFQG

SEQ ID NO: 26538 - protein, 9 aa, Artificial Sequence
  Description of Artificial Sequence: Synthetic peptide
  XENP021364 vhCDR3
RGVRQALDY

SEQ ID NO: 26539 - protein, 214 aa, Artificial Sequence
  Description of Artificial Sequence: Synthetic polypeptide
  XENP021364 2A11_H1_L2.17_Fab Light Chain
DIQMTQSPAFLSVTPGEKVTITCQASQDIGHYLNWFQQKPDQTVKLLIYYTSRLHSGVPSRFSGSGSGTDYTFTISSLEAEDAATYFCQQGNTLPYTFGGGTKVEIKRTVAAPSVFIFPPSDEQLKSGTASVVCLLNNFYPREAKVQWKVDNALQSGNSQESVTEQDSKDSTYSLSSTLTLSKADYEKHKVYACEVTHQGLSSPVTKSFNRGEC

SEQ ID NO: 26540 - protein, 107 aa, Artificial Sequence
  Description of Artificial Sequence: Synthetic polypeptide
  VL of XENP021364
DIQMTQSPAFLSVTPGEKVTITCQASQDIGHYLNWFQQKPDQTVKLLIYYTSRLHSGVPSRFSGSGSGTDYTFTISSLEAEDAATYFCQQGNTLPYTFGGGTKVEIK

SEQ ID NO: 26541 - protein, 11 aa, Artificial Sequence
  Description of Artificial Sequence: Synthetic peptide
  XENP021364 vlCDR1
QASQDIGHYLN

SEQ ID NO: 26542 - protein, 7 aa, Artificial Sequence
  Description of Artificial Sequence: Synthetic peptide
  XENP021364 vlCDR2
YTSRLHS

SEQ ID NO: 26543 - protein, 9 aa, Artificial Sequence
  Description of Artificial Sequence: Synthetic peptide
  XENP021364 vlCDR3
QQGNTLPYT

SEQ ID NO: 26544 - protein, 223 aa, Artificial Sequence; identical to SEQ ID NO: 25194
  Description of Artificial Sequence: Synthetic polypeptide
  XENP021365 2A11_H1_L2.18_Fab Heavy Chain

SEQ ID NO: 26545 - protein, 118 aa, Artificial Sequence; identical to SEQ ID NO: 17236
  Description of Artificial Sequence: Synthetic polypeptide
  VH of XENP021365

SEQ ID NO: 26546 - protein, 5 aa, Artificial Sequence
  Description of Artificial Sequence: Synthetic peptide
  XENP021365 vhCDR1
DYYMH

SEQ ID NO: 26547 - protein, 17 aa, Artificial Sequence
  Description of Artificial Sequence: Synthetic peptide
  XENP021365 vhCDR2
WIDPENGDTEYAPKFQG

SEQ ID NO: 26548 - protein, 9 aa, Artificial Sequence
  Description of Artificial Sequence: Synthetic peptide
  XENP021365 vhCDR3
RGVRQALDY

SEQ ID NO: 26549 - protein, 214 aa, Artificial Sequence
  Description of Artificial Sequence: Synthetic polypeptide
  XENP021365 2A11_H1_L2.18_Fab Light Chain
DIQMTQSPAFLSVTPGEKVTITCQASQDIGEYLNWFQQKPDQTVKLLIYYTSRLHSGVPSRFSGSGSGTDYTFTISSLEAEDAATYFCQQGNTLPYTFGGGTKVEIKRTVAAPSVFIFPPSDEQLKSGTASVVCLLNNFYPREAKVQWKVDNALQSGNSQESVTEQDSKDSTYSLSSTLTLSKADYEKHKVYACEVTHQGLSSPVTKSFNRGEC

SEQ ID NO: 26550 - protein, 107 aa, Artificial Sequence
  Description of Artificial Sequence: Synthetic polypeptide
  VL of XENP021365
DIQMTQSPAFLSVTPGEKVTITCQASQDIGEYLNWFQQKPDQTVKLLIYYTSRLHSGVPSRFSGSGSGTDYTFTISSLEAEDAATYFCQQGNTLPYTFGGGTKVEIK

SEQ ID NO: 26551 - protein, 11 aa, Artificial Sequence
  Description of Artificial Sequence: Synthetic peptide
  XENP021365 vlCDR1
QASQDIGEYLN

SEQ ID NO: 26552 - protein, 7 aa, Artificial Sequence
  Description of Artificial Sequence: Synthetic peptide
  XENP021365 vlCDR2
YTSRLHS

SEQ ID NO: 26553 - protein, 9 aa, Artificial Sequence
  Description of Artificial Sequence: Synthetic peptide
  XENP021365 vlCDR3
QQGNTLPYT

SEQ ID NO: 26554 - protein, 223 aa, Artificial Sequence; identical to SEQ ID NO: 25194
  Description of Artificial Sequence: Synthetic polypeptide
  XENP021366 2A11_H1_L2.19_Fab Heavy Chain

SEQ ID NO: 26555 - protein, 118 aa, Artificial Sequence; identical to SEQ ID NO: 17236
  Description of Artificial Sequence: Synthetic polypeptide
  VH of XENP021366

SEQ ID NO: 26556 - protein, 5 aa, Artificial Sequence
  Description of Artificial Sequence: Synthetic peptide
  XENP021366 vhCDR1
DYYMH

SEQ ID NO: 26557 - protein, 17 aa, Artificial Sequence
  Description of Artificial Sequence: Synthetic peptide
  XENP021366 vhCDR2
WIDPENGDTEYAPKFQG

SEQ ID NO: 26558 - protein, 9 aa, Artificial Sequence
  Description of Artificial Sequence: Synthetic peptide
  XENP021366 vhCDR3
RGVRQALDY

SEQ ID NO: 26559 - protein, 214 aa, Artificial Sequence
  Description of Artificial Sequence: Synthetic polypeptide
  XENP021366 2A11_H1_L2.19_Fab Light Chain
DIQMTQSPAFLSVTPGEKVTITCQASQDIGSYLNWFQQKPDQTVKLLIYYTSRLHSGVPSRFSGSGSGTDYTFTISSLEAEDAATYFCQQGNTLPYTFGGGTKVEIKRTVAAPSVFIFPPSDEQLKSGTASVVCLLNNFYPREAKVQWKVDNALQSGNSQESVTEQDSKDSTYSLSSTLTLSKADYEKHKVYACEVTHQGLSSPVTKSFNRGEC

SEQ ID NO: 26560 - protein, 107 aa, Artificial Sequence
  Description of Artificial Sequence: Synthetic polypeptide
  VL of XENP021366
DIQMTQSPAFLSVTPGEKVTITCQASQDIGSYLNWFQQKPDQTVKLLIYYTSRLHSGVPSRFSGSGSGTDYTFTISSLEAEDAATYFCQQGNTLPYTFGGGTKVEIK

SEQ ID NO: 26561 - protein, 11 aa, Artificial Sequence
  Description of Artificial Sequence: Synthetic peptide
  XENP021366 vlCDR1
QASQDIGSYLN

SEQ ID NO: 26562 - protein, 7 aa, Artificial Sequence
  Description of Artificial Sequence: Synthetic peptide
  XENP021366 vlCDR2
YTSRLHS

SEQ ID NO: 26563 - protein, 9 aa, Artificial Sequence
  Description of Artificial Sequence: Synthetic peptide
  XENP021366 vlCDR3
QQGNTLPYT

SEQ ID NO: 26564 - protein, 223 aa, Artificial Sequence; identical to SEQ ID NO: 25194
  Description of Artificial Sequence: Synthetic polypeptide
  XENP021367 2A11_H1_L2.20_Fab Heavy Chain

SEQ ID NO: 26565 - protein, 118 aa, Artificial Sequence; identical to SEQ ID NO: 17236
  Description of Artificial Sequence: Synthetic polypeptide
  VH of XENP021367

SEQ ID NO: 26566 - protein, 5 aa, Artificial Sequence
  Description of Artificial Sequence: Synthetic peptide
  XENP021367 vhCDR1
DYYMH

SEQ ID NO: 26567 - protein, 17 aa, Artificial Sequence
  Description of Artificial Sequence: Synthetic peptide
  XENP021367 vhCDR2
WIDPENGDTEYAPKFQG

SEQ ID NO: 26568 - protein, 9 aa, Artificial Sequence
  Description of Artificial Sequence: Synthetic peptide
  XENP021367 vhCDR3
RGVRQALDY

SEQ ID NO: 26569 - protein, 214 aa, Artificial Sequence
  Description of Artificial Sequence: Synthetic polypeptide
  XENP021367 2A11_H1_L2.20_Fab Light Chain
DIQMTQSPAFLSVTPGEKVTITCQASQDIGRYLNWFQQKPDQTVKLLIYYTSRLHSGVPSRFSGSGSGTDYTFTISSLEAEDAATYFCQQGNTLPYTFGGGTKVEIKRTVAAPSVFIFPPSDEQLKSGTASVVCLLNNFYPREAKVQWKVDNALQSGNSQESVTEQDSKDSTYSLSSTLTLSKADYEKHKVYACEVTHQGLSSPVTKSFNRGEC

SEQ ID NO: 26570 - protein, 107 aa, Artificial Sequence
  Description of Artificial Sequence: Synthetic polypeptide
  VL of XENP021367
DIQMTQSPAFLSVTPGEKVTITCQASQDIGRYLNWFQQKPDQTVKLLIYYTSRLHSGVPSRFSGSGSGTDYTFTISSLEAEDAATYFCQQGNTLPYTFGGGTKVEIK

SEQ ID NO: 26571 - protein, 11 aa, Artificial Sequence
  Description of Artificial Sequence: Synthetic peptide
  XENP021367 vlCDR1
QASQDIGRYLN

SEQ ID NO: 26572 - protein, 7 aa, Artificial Sequence
  Description of Artificial Sequence: Synthetic peptide
  XENP021367 vlCDR2
YTSRLHS

SEQ ID NO: 26573 - protein, 9 aa, Artificial Sequence
  Description of Artificial Sequence: Synthetic peptide
  XENP021367 vlCDR3
QQGNTLPYT

SEQ ID NO: 26574 - protein, 223 aa, Artificial Sequence; identical to SEQ ID NO: 25194
  Description of Artificial Sequence: Synthetic polypeptide
  XENP021368 2A11_H1_L2.21_Fab Heavy Chain

SEQ ID NO: 26575 - protein, 118 aa, Artificial Sequence; identical to SEQ ID NO: 17236
  Description of Artificial Sequence: Synthetic polypeptide
  VH of XENP021368

SEQ ID NO: 26576 - protein, 5 aa, Artificial Sequence
  Description of Artificial Sequence: Synthetic peptide
  XENP021368 vhCDR1
DYYMH

SEQ ID NO: 26577 - protein, 17 aa, Artificial Sequence
  Description of Artificial Sequence: Synthetic peptide
  XENP021368 vhCDR2
WIDPENGDTEYAPKFQG

SEQ ID NO: 26578 - protein, 9 aa, Artificial Sequence
  Description of Artificial Sequence: Synthetic peptide
  XENP021368 vhCDR3
RGVRQALDY

SEQ ID NO: 26579 - protein, 214 aa, Artificial Sequence
  Description of Artificial Sequence: Synthetic polypeptide
  XENP021368 2A11_H1_L2.21_Fab Light Chain
DIQMTQSPAFLSVTPGEKVTITCQASQDIGLYLNWFQQKPDQTVKLLIYYTSRLHSGVPSRFSGSGSGTDYTFTISSLEAEDAATYFCQQGNTLPYTFGGGTKVEIKRTVAAPSVFIFPPSDEQLKSGTASVVCLLNNFYPREAKVQWKVDNALQSGNSQESVTEQDSKDSTYSLSSTLTLSKADYEKHKVYACEVTHQGLSSPVTKSFNRGEC

SEQ ID NO: 26580 - protein, 107 aa, Artificial Sequence
  Description of Artificial Sequence: Synthetic polypeptide
  VL of XENP021368
DIQMTQSPAFLSVTPGEKVTITCQASQDIGLYLNWFQQKPDQTVKLLIYYTSRLHSGVPSRFSGSGSGTDYTFTISSLEAEDAATYFCQQGNTLPYTFGGGTKVEIK

SEQ ID NO: 26581 - protein, 11 aa, Artificial Sequence
  Description of Artificial Sequence: Synthetic peptide
  XENP021368 vlCDR1
QASQDIGLYLN

SEQ ID NO: 26582 - protein, 7 aa, Artificial Sequence
  Description of Artificial Sequence: Synthetic peptide
  XENP021368 vlCDR2
YTSRLHS

SEQ ID NO: 26583 - protein, 9 aa, Artificial Sequence
  Description of Artificial Sequence: Synthetic peptide
  XENP021368 vlCDR3
QQGNTLPYT

SEQ ID NO: 26584 - protein, 223 aa, Artificial Sequence; identical to SEQ ID NO: 25194
  Description of Artificial Sequence: Synthetic polypeptide
  XENP021369 2A11_H1_L2.22_Fab Heavy Chain

SEQ ID NO: 26585 - protein, 118 aa, Artificial Sequence; identical to SEQ ID NO: 17236
  Description of Artificial Sequence: Synthetic polypeptide
  VH of XENP021369

SEQ ID NO: 26586 - protein, 5 aa, Artificial Sequence
  Description of Artificial Sequence: Synthetic peptide
  XENP021369 vhCDR1
DYYMH

SEQ ID NO: 26587 - protein, 17 aa, Artificial Sequence
  Description of Artificial Sequence: Synthetic peptide
  XENP021369 vhCDR2
WIDPENGDTEYAPKFQG

SEQ ID NO: 26588 - protein, 9 aa, Artificial Sequence
  Description of Artificial Sequence: Synthetic peptide
  XENP021369 vhCDR3
RGVRQALDY

SEQ ID NO: 26589 - protein, 214 aa, Artificial Sequence
  Description of Artificial Sequence: Synthetic polypeptide
  XENP021369 2A11_H1_L2.22_Fab Light Chain
DIQMTQSPAFLSVTPGEKVTITCQASQDIGTYLNWFQQKPDQTVKLLIYYTSRLHSGVPSRFSGSGSGTDYTFTISSLEAEDAATYFCQQGNTLPYTFGGGTKVEIKRTVAAPSVFIFPPSDEQLKSGTASVVCLLNNFYPREAKVQWKVDNALQSGNSQESVTEQDSKDSTYSLSSTLTLSKADYEKHKVYACEVTHQGLSSPVTKSFNRGEC

SEQ ID NO: 26590 - protein, 107 aa, Artificial Sequence
  Description of Artificial Sequence: Synthetic polypeptide
  VL of XENP021369
DIQMTQSPAFLSVTPGEKVTITCQASQDIGTYLNWFQQKPDQTVKLLIYYTSRLHSGVPSRFSGSGSGTDYTFTISSLEAEDAATYFCQQGNTLPYTFGGGTKVEIK

SEQ ID NO: 26591 - protein, 11 aa, Artificial Sequence
  Description of Artificial Sequence: Synthetic peptide
  XENP021369 vlCDR1
QASQDIGTYLN

SEQ ID NO: 26592 - protein, 7 aa, Artificial Sequence
  Description of Artificial Sequence: Synthetic peptide
  XENP021369 vlCDR2
YTSRLHS

SEQ ID NO: 26593 - protein, 9 aa, Artificial Sequence
  Description of Artificial Sequence: Synthetic peptide
  XENP021369 vlCDR3
QQGNTLPYT

SEQ ID NO: 26594 - protein, 223 aa, Artificial Sequence; identical to SEQ ID NO: 25194
  Description of Artificial Sequence: Synthetic polypeptide
  XENP021370 2A11_H1_L2.23_Fab Heavy Chain

SEQ ID NO: 26595 - protein, 118 aa, Artificial Sequence; identical to SEQ ID NO: 17236
  Description of Artificial Sequence: Synthetic polypeptide
  VH of XENP021370

SEQ ID NO: 26596 - protein, 5 aa, Artificial Sequence
  Description of Artificial Sequence: Synthetic peptide
  XENP021370 vhCDR1
DYYMH

SEQ ID NO: 26597 - protein, 17 aa, Artificial Sequence
  Description of Artificial Sequence: Synthetic peptide
  XENP021370 vhCDR2
WIDPENGDTEYAPKFQG

SEQ ID NO: 26598 - protein, 9 aa, Artificial Sequence
  Description of Artificial Sequence: Synthetic peptide
  XENP021370 vhCDR3
RGVRQALDY

SEQ ID NO: 26599 - protein, 214 aa, Artificial Sequence
  Description of Artificial Sequence: Synthetic polypeptide
  XENP021370 2A11_H1_L2.23_Fab Light Chain
DIQMTQSPAFLSVTPGEKVTITCQASQDIGKYLNWFQQKPDQTVKLLIYYTSRLHSGVPSRFSGSGSGTDYTFTISSLEAEDAATYFCQQGNTLPYTFGGGTKVEIKRTVAAPSVFIFPPSDEQLKSGTASVVCLLNNFYPREAKVQWKVDNALQSGNSQESVTEQDSKDSTYSLSSTLTLSKADYEKHKVYACEVTHQGLSSPVTKSFNRGEC

SEQ ID NO: 26600 - protein, 107 aa, Artificial Sequence
  Description of Artificial Sequence: Synthetic polypeptide
  VL of XENP021370
DIQMTQSPAFLSVTPGEKVTITCQASQDIGKYLNWFQQKPDQTVKLLIYYTSRLHSGVPSRFSGSGSGTDYTFTISSLEAEDAATYFCQQGNTLPYTFGGGTKVEIK

SEQ ID NO: 26601 - protein, 11 aa, Artificial Sequence
  Description of Artificial Sequence: Synthetic peptide
  XENP021370 vlCDR1
QASQDIGKYLN

SEQ ID NO: 26602 - protein, 7 aa, Artificial Sequence
  Description of Artificial Sequence: Synthetic peptide
  XENP021370 vlCDR2
YTSRLHS

SEQ ID NO: 26603 - protein, 9 aa, Artificial Sequence
  Description of Artificial Sequence: Synthetic peptide
  XENP021370 vlCDR3
QQGNTLPYT

SEQ ID NO: 26604 - protein, 223 aa, Artificial Sequence; identical to SEQ ID NO: 25194
  Description of Artificial Sequence: Synthetic polypeptide
  XENP021371 2A11_H1_L2.24_Fab Heavy Chain

SEQ ID NO: 26605 - protein, 118 aa, Artificial Sequence; identical to SEQ ID NO: 17236
  Description of Artificial Sequence: Synthetic polypeptide
  VH of XENP021371

SEQ ID NO: 26606 - protein, 5 aa, Artificial Sequence
  Description of Artificial Sequence: Synthetic peptide
  XENP021371 vhCDR1
DYYMH

SEQ ID NO: 26607 - protein, 17 aa, Artificial Sequence
  Description of Artificial Sequence: Synthetic peptide
  XENP021371 vhCDR2
WIDPENGDTEYAPKFQG

SEQ ID NO: 26608 - protein, 9 aa, Artificial Sequence
  Description of Artificial Sequence: Synthetic peptide
  XENP021371 vhCDR3
RGVRQALDY

SEQ ID NO: 26609 - protein, 214 aa, Artificial Sequence
  Description of Artificial Sequence: Synthetic polypeptide
  XENP021371 2A11_H1_L2.24_Fab Light Chain
DIQMTQSPAFLSVTPGEKVTITCQASQDIGNFLNWFQQKPDQTVKLLIYYTSRLHSGVPSRFSGSGSGTDYTFTISSLEAEDAATYFCQQGNTLPYTFGGGTKVEIKRTVAAPSVFIFPPSDEQLKSGTASVVCLLNNFYPREAKVQWKVDNALQSGNSQESVTEQDSKDSTYSLSSTLTLSKADYEKHKVYACEVTHQGLSSPVTKSFNRGEC

SEQ ID NO: 26610 - protein, 107 aa, Artificial Sequence
  Description of Artificial Sequence: Synthetic polypeptide
  VL of XENP021371
DIQMTQSPAFLSVTPGEKVTITCQASQDIGNFLNWFQQKPDQTVKLLIYYTSRLHSGVPSRFSGSGSGTDYTFTISSLEAEDAATYFCQQGNTLPYTFGGGTKVEIK

SEQ ID NO: 26611 - protein, 11 aa, Artificial Sequence
  Description of Artificial Sequence: Synthetic peptide
  XENP021371 vlCDR1
QASQDIGNFLN

SEQ ID NO: 26612 - protein, 7 aa, Artificial Sequence
  Description of Artificial Sequence: Synthetic peptide
  XENP021371 vlCDR2
YTSRLHS

SEQ ID NO: 26613 - protein, 9 aa, Artificial Sequence
  Description of Artificial Sequence: Synthetic peptide
  XENP021371 vlCDR3
QQGNTLPYT

SEQ ID NO: 26614 - protein, 223 aa, Artificial Sequence; identical to SEQ ID NO: 25194
  Description of Artificial Sequence: Synthetic polypeptide
  XENP021372 2A11_H1_L2.25_Fab Heavy Chain

SEQ ID NO: 26615 - protein, 118 aa, Artificial Sequence; identical to SEQ ID NO: 17236
  Description of Artificial Sequence: Synthetic polypeptide
  VH of XENP021372

SEQ ID NO: 26616 - protein, 5 aa, Artificial Sequence
  Description of Artificial Sequence: Synthetic peptide
  XENP021372 vhCDR1
DYYMH

SEQ ID NO: 26617 - protein, 17 aa, Artificial Sequence
  Description of Artificial Sequence: Synthetic peptide
  XENP021372 vhCDR2
WIDPENGDTEYAPKFQG

SEQ ID NO: 26618 - protein, 9 aa, Artificial Sequence
  Description of Artificial Sequence: Synthetic peptide
  XENP021372 vhCDR3
RGVRQALDY

SEQ ID NO: 26619 - protein, 214 aa, Artificial Sequence; identical to SEQ ID NO: 22179
  Description of Artificial Sequence: Synthetic polypeptide
  XENP021372 2A11_H1_L2.25_Fab Light Chain

SEQ ID NO: 26620 - protein, 107 aa, Artificial Sequence; identical to SEQ ID NO: 22180
  Description of Artificial Sequence: Synthetic polypeptide
  VL of XENP021372

SEQ ID NO: 26621 - protein, 11 aa, Artificial Sequence
  Description of Artificial Sequence: Synthetic peptide
  XENP021372 vlCDR1
QASQDIGNHLN

SEQ ID NO: 26622 - protein, 7 aa, Artificial Sequence
  Description of Artificial Sequence: Synthetic peptide
  XENP021372 vlCDR2
YTSRLHS

SEQ ID NO: 26623 - protein, 9 aa, Artificial Sequence
  Description of Artificial Sequence: Synthetic peptide
  XENP021372 vlCDR3
QQGNTLPYT

SEQ ID NO: 26624 - protein, 223 aa, Artificial Sequence; identical to SEQ ID NO: 25194
  Description of Artificial Sequence: Synthetic polypeptide
  XENP021373 2A11_H1_L2.26_Fab Heavy Chain

SEQ ID NO: 26625 - protein, 118 aa, Artificial Sequence; identical to SEQ ID NO: 17236
  Description of Artificial Sequence: Synthetic polypeptide
  VH of XENP021373

SEQ ID NO: 26626 - protein, 5 aa, Artificial Sequence
  Description of Artificial Sequence: Synthetic peptide
  XENP021373 vhCDR1
DYYMH

SEQ ID NO: 26627 - protein, 17 aa, Artificial Sequence
  Description of Artificial Sequence: Synthetic peptide
  XENP021373 vhCDR2
WIDPENGDTEYAPKFQG

SEQ ID NO: 26628 - protein, 9 aa, Artificial Sequence
  Description of Artificial Sequence: Synthetic peptide
  XENP021373 vhCDR3
RGVRQALDY

SEQ ID NO: 26629 - protein, 214 aa, Artificial Sequence
  Description of Artificial Sequence: Synthetic polypeptide
  XENP021373 2A11_H1_L2.26_Fab Light Chain
DIQMTQSPAFLSVTPGEKVTITCQASQDIGNLLNWFQQKPDQTVKLLIYYTSRLHSGVPSRFSGSGSGTDYTFTISSLEAEDAATYFCQQGNTLPYTFGGGTKVEIKRTVAAPSVFIFPPSDEQLKSGTASVVCLLNNFYPREAKVQWKVDNALQSGNSQESVTEQDSKDSTYSLSSTLTLSKADYEKHKVYACEVTHQGLSSPVTKSFNRGEC

SEQ ID NO: 26630 - protein, 107 aa, Artificial Sequence
  Description of Artificial Sequence: Synthetic polypeptide
  VL of XENP021373
DIQMTQSPAFLSVTPGEKVTITCQASQDIGNLLNWFQQKPDQTVKLLIYYTSRLHSGVPSRFSGSGSGTDYTFTISSLEAEDAATYFCQQGNTLPYTFGGGTKVEIK

SEQ ID NO: 26631 - protein, 11 aa, Artificial Sequence
  Description of Artificial Sequence: Synthetic peptide
  XENP021373 vlCDR1
QASQDIGNLLN

SEQ ID NO: 26632 - protein, 7 aa, Artificial Sequence
  Description of Artificial Sequence: Synthetic peptide
  XENP021373 vlCDR2
YTSRLHS

SEQ ID NO: 26633 - protein, 9 aa, Artificial Sequence
  Description of Artificial Sequence: Synthetic peptide
  XENP021373 vlCDR3
QQGNTLPYT

SEQ ID NO: 26634 - protein, 223 aa, Artificial Sequence; identical to SEQ ID NO: 25194
  Description of Artificial Sequence: Synthetic polypeptide
  XENP021374 2A11_H1_L2.27_Fab Heavy Chain

SEQ ID NO: 26635 - protein, 118 aa, Artificial Sequence; identical to SEQ ID NO: 17236
  Description of Artificial Sequence: Synthetic polypeptide
  VH of XENP021374

SEQ ID NO: 26636 - protein, 5 aa, Artificial Sequence
  Description of Artificial Sequence: Synthetic peptide
  XENP021374 vhCDR1
DYYMH

SEQ ID NO: 26637 - protein, 17 aa, Artificial Sequence
  Description of Artificial Sequence: Synthetic peptide
  XENP021374 vhCDR2
WIDPENGDTEYAPKFQG

SEQ ID NO: 26638 - protein, 9 aa, Artificial Sequence
  Description of Artificial Sequence: Synthetic peptide
  XENP021374 vhCDR3
RGVRQALDY

SEQ ID NO: 26639 - protein, 214 aa, Artificial Sequence
  Description of Artificial Sequence: Synthetic polypeptide
  XENP021374 2A11_H1_L2.27_Fab Light Chain
DIQMTQSPAFLSVTPGEKVTITCQASQDIGNWLNWFQQKPDQTVKLLIYYTSRLHSGVPSRFSGSGSGTDYTFTISSLEAEDAATYFCQQGNTLPYTFGGGTKVEIKRTVAAPSVFIFPPSDEQLKSGTASVVCLLNNFYPREAKVQWKVDNALQSGNSQESVTEQDSKDSTYSLSSTLTLSKADYEKHKVYACEVTHQGLSSPVTKSFNRGEC

SEQ ID NO: 26640 - protein, 107 aa, Artificial Sequence
  Description of Artificial Sequence: Synthetic polypeptide
  VL of XENP021374
DIQMTQSPAFLSVTPGEKVTITCQASQDIGNWLNWFQQKPDQTVKLLIYYTSRLHSGVPSRFSGSGSGTDYTFTISSLEAEDAATYFCQQGNTLPYTFGGGTKVEIK

SEQ ID NO: 26641 - protein, 11 aa, Artificial Sequence
  Description of Artificial Sequence: Synthetic peptide
  XENP021374 vlCDR1
QASQDIGNWLN

SEQ ID NO: 26642 - protein, 7 aa, Artificial Sequence
  Description of Artificial Sequence: Synthetic peptide
  XENP021374 vlCDR2
YTSRLHS

SEQ ID NO: 26643 - protein, 9 aa, Artificial Sequence
  Description of Artificial Sequence: Synthetic peptide
  XENP021374 vlCDR3
QQGNTLPYT

SEQ ID NO: 26644 - protein, 223 aa, Artificial Sequence; identical to SEQ ID NO: 25194
  Description of Artificial Sequence: Synthetic polypeptide
  XENP021375 2A11_H1_L2.28_Fab Heavy Chain

SEQ ID NO: 26645 - protein, 118 aa, Artificial Sequence; identical to SEQ ID NO: 17236
  Description of Artificial Sequence: Synthetic polypeptide
  VH of XENP021375

SEQ ID NO: 26646 - protein, 5 aa, Artificial Sequence
  Description of Artificial Sequence: Synthetic peptide
  XENP021375 vhCDR1
DYYMH

SEQ ID NO: 26647 - protein, 17 aa, Artificial Sequence
  Description of Artificial Sequence: Synthetic peptide
  XENP021375 vhCDR2
WIDPENGDTEYAPKFQG

SEQ ID NO: 26648 - protein, 9 aa, Artificial Sequence
  Description of Artificial Sequence: Synthetic peptide
  XENP021375 vhCDR3
RGVRQALDY

SEQ ID NO: 26649 - protein, 214 aa, Artificial Sequence
  Description of Artificial Sequence: Synthetic polypeptide
  XENP021375 2A11_H1_L2.28_Fab Light Chain
DIQMTQSPAFLSVTPGEKVTITCQASQDIGNVLNWFQQKPDQTVKLLIYYTSRLHSGVPSRFSGSGSGTDYTFTISSLEAEDAATYFCQQGNTLPYTFGGGTKVEIKRTVAAPSVFIFPPSDEQLKSGTASVVCLLNNFYPREAKVQWKVDNALQSGNSQESVTEQDSKDSTYSLSSTLTLSKADYEKHKVYACEVTHQGLSSPVTKSFNRGEC

SEQ ID NO: 26650 - protein, 107 aa, Artificial Sequence
  Description of Artificial Sequence: Synthetic polypeptide
  VL of XENP021375
DIQMTQSPAFLSVTPGEKVTITCQASQDIGNVLNWFQQKPDQTVKLLIYYTSRLHSGVPSRFSGSGSGTDYTFTISSLEAEDAATYFCQQGNTLPYTFGGGTKVEIK

SEQ ID NO: 26651 - protein, 11 aa, Artificial Sequence
  Description of Artificial Sequence: Synthetic peptide
  XENP021375 vlCDR1
QASQDIGNVLN

SEQ ID NO: 26652 - protein, 7 aa, Artificial Sequence
  Description of Artificial Sequence: Synthetic peptide
  XENP021375 vlCDR2
YTSRLHS

SEQ ID NO: 26653 - protein, 9 aa, Artificial Sequence
  Description of Artificial Sequence: Synthetic peptide
  XENP021375 vlCDR3
QQGNTLPYT

SEQ ID NO: 26654 - protein, 223 aa, Artificial Sequence; identical to SEQ ID NO: 25194
  Description of Artificial Sequence: Synthetic polypeptide
  XENP021376 2A11_H1_L2.29_Fab Heavy Chain

SEQ ID NO: 26655 - protein, 118 aa, Artificial Sequence; identical to SEQ ID NO: 17236
  Description of Artificial Sequence: Synthetic polypeptide
  VH of XENP021376

SEQ ID NO: 26656 - protein, 5 aa, Artificial Sequence
  Description of Artificial Sequence: Synthetic peptide
  XENP021376 vhCDR1
DYYMH

SEQ ID NO: 26657 - protein, 17 aa, Artificial Sequence
  Description of Artificial Sequence: Synthetic peptide
  XENP021376 vhCDR2
WIDPENGDTEYAPKFQG

SEQ ID NO: 26658 - protein, 9 aa, Artificial Sequence
  Description of Artificial Sequence: Synthetic peptide
  XENP021376 vhCDR3
RGVRQALDY

SEQ ID NO: 26659 - protein, 214 aa, Artificial Sequence
  Description of Artificial Sequence: Synthetic polypeptide
  XENP021376 2A11_H1_L2.29_Fab Light Chain
DIQMTQSPAFLSVTPGEKVTITCQASQDIGNALNWFQQKPDQTVKLLIYYTSRLHSGVPSRFSGSGSGTDYTFTISSLEAEDAATYFCQQGNTLPYTFGGGTKVEIKRTVAAPSVFIFPPSDEQLKSGTASVVCLLNNFYPREAKVQWKVDNALQSGNSQESVTEQDSKDSTYSLSSTLTLSKADYEKHKVYACEVTHQGLSSPVTKSFNRGEC

SEQ ID NO: 26660 - protein, 107 aa, Artificial Sequence
  Description of Artificial Sequence: Synthetic polypeptide
  VL of XENP021376
DIQMTQSPAFLSVTPGEKVTITCQASQDIGNALNWFQQKPDQTVKLLIYYTSRLHSGVPSRFSGSGSGTDYTFTISSLEAEDAATYFCQQGNTLPYTFGGGTKVEIK

SEQ ID NO: 26661 - protein, 11 aa, Artificial Sequence
  Description of Artificial Sequence: Synthetic peptide
  XENP021376 vlCDR1
QASQDIGNALN

SEQ ID NO: 26662 - protein, 7 aa, Artificial Sequence
  Description of Artificial Sequence: Synthetic peptide
  XENP021376 vlCDR2
YTSRLHS

SEQ ID NO: 26663 - protein, 9 aa, Artificial Sequence
  Description of Artificial Sequence: Synthetic peptide
  XENP021376 vlCDR3
QQGNTLPYT

SEQ ID NO: 26664 - protein, 223 aa, Artificial Sequence; identical to SEQ ID NO: 25194
  Description of Artificial Sequence: Synthetic polypeptide
  XENP021377 2A11_H1_L2.30_Fab Heavy Chain

SEQ ID NO: 26665 - protein, 118 aa, Artificial Sequence; identical to SEQ ID NO: 17236
  Description of Artificial Sequence: Synthetic polypeptide
  VH of XENP021377

SEQ ID NO: 26666 - protein, 5 aa, Artificial Sequence
  Description of Artificial Sequence: Synthetic peptide
  XENP021377 vhCDR1
DYYMH

SEQ ID NO: 26667 - protein, 17 aa, Artificial Sequence
  Description of Artificial Sequence: Synthetic peptide
  XENP021377 vhCDR2
WIDPENGDTEYAPKFQG

SEQ ID NO: 26668 - protein, 9 aa, Artificial Sequence
  Description of Artificial Sequence: Synthetic peptide
  XENP021377 vhCDR3
RGVRQALDY

SEQ ID NO: 26669 - protein, 214 aa, Artificial Sequence
  Description of Artificial Sequence: Synthetic polypeptide
  XENP021377 2A11_H1_L2.30_Fab Light Chain
DIQMTQSPAFLSVTPGEKVTITCQASQDIGNQLNWFQQKPDQTVKLLIYYTSRLHSGVPSRFSGSGSGTDYTFTISSLEAEDAATYFCQQGNTLPYTFGGGTKVEIKRTVAAPSVFIFPPSDEQLKSGTASVVCLLNNFYPREAKVQWKVDNALQSGNSQESVTEQDSKDSTYSLSSTLTLSKADYEKHKVYACEVTHQGLSSPVTKSFNRGEC

SEQ ID NO: 26670 - protein, 107 aa, Artificial Sequence
  Description of Artificial Sequence: Synthetic polypeptide
  VL of XENP021377
DIQMTQSPAFLSVTPGEKVTITCQASQDIGNQLNWFQQKPDQTVKLLIYYTSRLHSGVPSRFSGSGSGTDYTFTISSLEAEDAATYFCQQGNTLPYTFGGGTKVEIK

SEQ ID NO: 26671 - protein, 11 aa, Artificial Sequence
  Description of Artificial Sequence: Synthetic peptide
  XENP021377 vlCDR1
QASQDIGNQLN

SEQ ID NO: 26672 - protein, 7 aa, Artificial Sequence
  Description of Artificial Sequence: Synthetic peptide
  XENP021377 vlCDR2
YTSRLHS

SEQ ID NO: 26673 - protein, 9 aa, Artificial Sequence
  Description of Artificial Sequence: Synthetic peptide
  XENP021377 vlCDR3
QQGNTLPYT

SEQ ID NO: 26674 - protein, 223 aa, Artificial Sequence; identical to SEQ ID NO: 25194
  Description of Artificial Sequence: Synthetic polypeptide
  XENP021378 2A11_H1_L2.31_Fab Heavy Chain

SEQ ID NO: 26675 - protein, 118 aa, Artificial Sequence; identical to SEQ ID NO: 17236
  Description of Artificial Sequence: Synthetic polypeptide
  VH of XENP021378

SEQ ID NO: 26676 - protein, 5 aa, Artificial Sequence
  Description of Artificial Sequence: Synthetic peptide
  XENP021378 vhCDR1
DYYMH

SEQ ID NO: 26677 - protein, 17 aa, Artificial Sequence
  Description of Artificial Sequence: Synthetic peptide
  XENP021378 vhCDR2
WIDPENGDTEYAPKFQG

SEQ ID NO: 26678 - protein, 9 aa, Artificial Sequence
  Description of Artificial Sequence: Synthetic peptide
  XENP021378 vhCDR3
RGVRQALDY

SEQ ID NO: 26679 - protein, 214 aa, Artificial Sequence
  Description of Artificial Sequence: Synthetic polypeptide
  XENP021378 2A11_H1_L2.31_Fab Light Chain
DIQMTQSPAFLSVTPGEKVTITCQASQDIGNELNWFQQKPDQTVKLLIYYTSRLHSGVPSRFSGSGSGTDYTFTISSLEAEDAATYFCQQGNTLPYTFGGGTKVEIKRTVAAPSVFIFPPSDEQLKSGTASVVCLLNNFYPREAKVQWKVDNALQSGNSQESVTEQDSKDSTYSLSSTLTLSKADYEKHKVYACEVTHQGLSSPVTKSFNRGEC

SEQ ID NO: 26680 - protein, 107 aa, Artificial Sequence
  Description of Artificial Sequence: Synthetic polypeptide
  VL of XENP021378
DIQMTQSPAFLSVTPGEKVTITCQASQDIGNELNWFQQKPDQTVKLLIYYTSRLHSGVPSRFSGSGSGTDYTFTISSLEAEDAATYFCQQGNTLPYTFGGGTKVEIK

SEQ ID NO: 26681 - protein, 11 aa, Artificial Sequence
  Description of Artificial Sequence: Synthetic peptide
  XENP021378 vlCDR1
QASQDIGNELN

SEQ ID NO: 26682 - protein, 7 aa, Artificial Sequence
  Description of Artificial Sequence: Synthetic peptide
  XENP021378 vlCDR2
YTSRLHS

SEQ ID NO: 26683 - protein, 9 aa, Artificial Sequence
  Description of Artificial Sequence: Synthetic peptide
  XENP021378 vlCDR3
QQGNTLPYT

SEQ ID NO: 26684 - protein, 223 aa, Artificial Sequence; identical to SEQ ID NO: 25194
  Description of Artificial Sequence: Synthetic polypeptide
  XENP021379 2A11_H1_L2.32_Fab Heavy Chain

SEQ ID NO: 26685 - protein, 118 aa, Artificial Sequence; identical to SEQ ID NO: 17236
  Description of Artificial Sequence: Synthetic polypeptide
  VH of XENP021379

SEQ ID NO: 26686 - protein, 5 aa, Artificial Sequence
  Description of Artificial Sequence: Synthetic peptide
  XENP021379 vhCDR1
DYYMH

SEQ ID NO: 26687 - protein, 17 aa, Artificial Sequence
  Description of Artificial Sequence: Synthetic peptide
  XENP021379 vhCDR2
WIDPENGDTEYAPKFQG

SEQ ID NO: 26688 - protein, 9 aa, Artificial Sequence
  Description of Artificial Sequence: Synthetic peptide
  XENP021379 vhCDR3
RGVRQALDY

SEQ ID NO: 26689 - protein, 214 aa, Artificial Sequence
  Description of Artificial Sequence: Synthetic polypeptide
  XENP021379 2A11_H1_L2.32_Fab Light Chain
DIQMTQSPAFLSVTPGEKVTITCQASQDIGNKLNWFQQKPDQTVKLLIYYTSRLHSGVPSRFSGSGSGTDYTFTISSLEAEDAATYFCQQGNTLPYTFGGGTKVEIKRTVAAPSVFIFPPSDEQLKSGTASVVCLLNNFYPREAKVQWKVDNALQSGNSQESVTEQDSKDSTYSLSSTLTLSKADYEKHKVYACEVTHQGLSSPVTKSFNRGEC

SEQ ID NO: 26690 - protein, 107 aa, Artificial Sequence
  Description of Artificial Sequence: Synthetic polypeptide
  VL of XENP021379
DIQMTQSPAFLSVTPGEKVTITCQASQDIGNKLNWFQQKPDQTVKLLIYYTSRLHSGVPSRFSGSGSGTDYTFTISSLEAEDAATYFCQQGNTLPYTFGGGTKVEIK

SEQ ID NO: 26691 - protein, 11 aa, Artificial Sequence
  Description of Artificial Sequence: Synthetic peptide
  XENP021379 vlCDR1
QASQDIGNKLN

SEQ ID NO: 26692 - protein, 7 aa, Artificial Sequence
  Description of Artificial Sequence: Synthetic peptide
  XENP021379 vlCDR2
YTSRLHS

SEQ ID NO: 26693 - protein, 9 aa, Artificial Sequence
  Description of Artificial Sequence: Synthetic peptide
  XENP021379 vlCDR3
QQGNTLPYT

SEQ ID NO: 26694 - protein, 223 aa, Artificial Sequence; identical to SEQ ID NO: 25194
  Description of Artificial Sequence: Synthetic polypeptide
  XENP021380 2A11_H1_L2.33_Fab Heavy Chain

SEQ ID NO: 26695 - protein, 118 aa, Artificial Sequence; identical to SEQ ID NO: 17236
  Description of Artificial Sequence: Synthetic polypeptide
  VH of XENP021380

SEQ ID NO: 26696 - protein, 5 aa, Artificial Sequence
  Description of Artificial Sequence: Synthetic peptide
  XENP021380 vhCDR1
DYYMH

SEQ ID NO: 26697 - protein, 17 aa, Artificial Sequence
  Description of Artificial Sequence: Synthetic peptide
  XENP021380 vhCDR2
WIDPENGDTEYAPKFQG

SEQ ID NO: 26698 - protein, 9 aa, Artificial Sequence
  Description of Artificial Sequence: Synthetic peptide
  XENP021380 vhCDR3
RGVRQALDY

SEQ ID NO: 26699 - protein, 214 aa, Artificial Sequence
  Description of Artificial Sequence: Synthetic polypeptide
  XENP021380 2A11_H1_L2.33_Fab Light Chain
DIQMTQSPAFLSVTPGEKVTITCQASQDIGNYLHWFQQKPDQTVKLLIYYTSRLHSGVPSRFSGSGSGTDYTFTISSLEAEDAATYFCQQGNTLPYTFGGGTKVEIKRTVAAPSVFIFPPSDEQLKSGTASVVCLLNNFYPREAKVQWKVDNALQSGNSQESVTEQDSKDSTYSLSSTLTLSKADYEKHKVYACEVTHQGLSSPVTKSFNRGEC

SEQ ID NO: 26700 - protein, 107 aa, Artificial Sequence
  Description of Artificial Sequence: Synthetic polypeptide
  VL of XENP021380
DIQMTQSPAFLSVTPGEKVTITCQASQDIGNYLHWFQQKPDQTVKLLIYYTSRLHSGVPSRFSGSGSGTDYTFTISSLEAEDAATYFCQQGNTLPYTFGGGTKVEIK

SEQ ID NO: 26701 - protein, 11 aa, Artificial Sequence
  Description of Artificial Sequence: Synthetic peptide
  XENP021380 vlCDR1
QASQDIGNYLH

SEQ ID NO: 26702 - protein, 7 aa, Artificial Sequence
  Description of Artificial Sequence: Synthetic peptide
  XENP021380 vlCDR2
YTSRLHS

SEQ ID NO: 26703 - protein, 9 aa, Artificial Sequence
  Description of Artificial Sequence: Synthetic peptide
  XENP021380 vlCDR3
QQGNTLPYT

SEQ ID NO: 26704 - protein, 223 aa, Artificial Sequence; identical to SEQ ID NO: 25194
  Description of Artificial Sequence: Synthetic polypeptide
  XENP021381 2A11_H1_L2.34_Fab Heavy Chain

SEQ ID NO: 26705 - protein, 118 aa, Artificial Sequence; identical to SEQ ID NO: 17236
  Description of Artificial Sequence: Synthetic polypeptide
  VH of XENP021381

SEQ ID NO: 26706 - protein, 5 aa, Artificial Sequence
  Description of Artificial Sequence: Synthetic peptide
  XENP021381 vhCDR1
DYYMH

SEQ ID NO: 26707 - protein, 17 aa, Artificial Sequence
  Description of Artificial Sequence: Synthetic peptide
  XENP021381 vhCDR2
WIDPENGDTEYAPKFQG

SEQ ID NO: 26708 - protein, 9 aa, Artificial Sequence
  Description of Artificial Sequence: Synthetic peptide
  XENP021381 vhCDR3
RGVRQALDY

SEQ ID NO: 26709 - protein, 214 aa, Artificial Sequence
  Description of Artificial Sequence: Synthetic polypeptide
  XENP021381 2A11_H1_L2.34_Fab Light Chain
DIQMTQSPAFLSVTPGEKVTITCQASQDIGNYLYWFQQKPDQTVKLLIYYTSRLHSGVPSRFSGSGSGTDYTFTISSLEAEDAATYFCQQGNTLPYTFGGGTKVEIKRTVAAPSVFIFPPSDEQLKSGTASVVCLLNNFYPREAKVQWKVDNALQSGNSQESVTEQDSKDSTYSLSSTLTLSKADYEKHKVYACEVTHQGLSSPVTKSFNRGEC

SEQ ID NO: 26710 - protein, 107 aa, Artificial Sequence
  Description of Artificial Sequence: Synthetic polypeptide
  VL of XENP021381
DIQMTQSPAFLSVTPGEKVTITCQASQDIGNYLYWFQQKPDQTVKLLIYYTSRLHSGVPSRFSGSGSGTDYTFTISSLEAEDAATYFCQQGNTLPYTFGGGTKVEIK

SEQ ID NO: 26711 - protein, 11 aa, Artificial Sequence
  Description of Artificial Sequence: Synthetic peptide
  XENP021381 vlCDR1
QASQDIGNYLY

SEQ ID NO: 26712 - protein, 7 aa, Artificial Sequence
  Description of Artificial Sequence: Synthetic peptide
  XENP021381 vlCDR2
YTSRLHS

SEQ ID NO: 26713 - protein, 9 aa, Artificial Sequence
  Description of Artificial Sequence: Synthetic peptide
  XENP021381 vlCDR3
QQGNTLPYT

SEQ ID NO: 26714 - protein, 223 aa, Artificial Sequence; identical to SEQ ID NO: 25194
  Description of Artificial Sequence: Synthetic polypeptide
  XENP021382 2A11_H1_L2.35_Fab Heavy Chain

SEQ ID NO: 26715 - protein, 118 aa, Artificial Sequence; identical to SEQ ID NO: 17236
  Description of Artificial Sequence: Synthetic polypeptide
  VH of XENP021382

SEQ ID NO: 26716 - protein, 5 aa, Artificial Sequence
  Description of Artificial Sequence: Synthetic peptide
  XENP021382 vhCDR1
DYYMH

SEQ ID NO: 26717 - protein, 17 aa, Artificial Sequence
  Description of Artificial Sequence: Synthetic peptide
  XENP021382 vhCDR2
WIDPENGDTEYAPKFQG

SEQ ID NO: 26718 - protein, 9 aa, Artificial Sequence
  Description of Artificial Sequence: Synthetic peptide
  XENP021382 vhCDR3
RGVRQALDY

SEQ ID NO: 26719 - protein, 214 aa, Artificial Sequence
  Description of Artificial Sequence: Synthetic polypeptide
  XENP021382 2A11_H1_L2.35_Fab Light Chain
DIQMTQSPAFLSVTPGEKVTITCQASQDIGNYLNWFQQKPDQTVKLLIYFTSRLHSGVPSRFSGSGSGTDYTFTISSLEAEDAATYFCQQGNTLPYTFGGGTKVEIKRTVAAPSVFIFPPSDEQLKSGTASVVCLLNNFYPREAKVQWKVDNALQSGNSQESVTEQDSKDSTYSLSSTLTLSKADYEKHKVYACEVTHQGLSSPVTKSFNRGEC

SEQ ID NO: 26720 - protein, 107 aa, Artificial Sequence
  Description of Artificial Sequence: Synthetic polypeptide
  VL of XENP021382
DIQMTQSPAFLSVTPGEKVTITCQASQDIGNYLNWFQQKPDQTVKLLIYFTSRLHSGVPSRFSGSGSGTDYTFTISSLEAEDAATYFCQQGNTLPYTFGGGTKVEIK

SEQ ID NO: 26721 - protein, 11 aa, Artificial Sequence
  Description of Artificial Sequence: Synthetic peptide
  XENP021382 vlCDR1
QASQDIGNYLN

SEQ ID NO: 26722 - protein, 7 aa, Artificial Sequence
  Description of Artificial Sequence: Synthetic peptide
  XENP021382 vlCDR2
FTSRLHS

SEQ ID NO: 26723 - protein, 9 aa, Artificial Sequence
  Description of Artificial Sequence: Synthetic peptide
  XENP021382 vlCDR3
QQGNTLPYT

SEQ ID NO: 26724 - protein, 223 aa, Artificial Sequence; identical to SEQ ID NO: 25194
  Description of Artificial Sequence: Synthetic polypeptide
  XENP021383 2A11_H1_L2.36_Fab Heavy Chain

SEQ ID NO: 26725 - protein, 118 aa, Artificial Sequence; identical to SEQ ID NO: 17236
  Description of Artificial Sequence: Synthetic polypeptide
  VH of XENP021383

SEQ ID NO: 26726 - protein, 5 aa, Artificial Sequence
  Description of Artificial Sequence: Synthetic peptide
  XENP021383 vhCDR1
DYYMH

SEQ ID NO: 26727 - protein, 17 aa, Artificial Sequence
  Description of Artificial Sequence: Synthetic peptide
  XENP021383 vhCDR2
WIDPENGDTEYAPKFQG

SEQ ID NO: 26728 - protein, 9 aa, Artificial Sequence
  Description of Artificial Sequence: Synthetic peptide
  XENP021383 vhCDR3
RGVRQALDY

SEQ ID NO: 26729 - protein, 214 aa, Artificial Sequence
  Description of Artificial Sequence: Synthetic polypeptide
  XENP021383 2A11_H1_L2.36_Fab Light Chain
DIQMTQSPAFLSVTPGEKVTITCQASQDIGNYLNWFQQKPDQTVKLLIYHTSRLHSGVPSRFSGSGSGTDYTFTISSLEAEDAATYFCQQGNTLPYTFGGGTKVEIKRTVAAPSVFIFPPSDEQLKSGTASVVCLLNNFYPREAKVQWKVDNALQSGNSQESVTEQDSKDSTYSLSSTLTLSKADYEKHKVYACEVTHQGLSSPVTKSFNRGEC

SEQ ID NO: 26730 - protein, 107 aa, Artificial Sequence
  Description of Artificial Sequence: Synthetic polypeptide
  VL of XENP021383
DIQMTQSPAFLSVTPGEKVTITCQASQDIGNYLNWFQQKPDQTVKLLIYHTSRLHSGVPSRFSGSGSGTDYTFTISSLEAEDAATYFCQQGNTLPYTFGGGTKVEIK

SEQ ID NO: 26731 - protein, 11 aa, Artificial Sequence
  Description of Artificial Sequence: Synthetic peptide
  XENP021383 vlCDR1
QASQDIGNYLN

SEQ ID NO: 26732 - protein, 7 aa, Artificial Sequence
  Description of Artificial Sequence: Synthetic peptide
  XENP021383 vlCDR2
HTSRLHS

SEQ ID NO: 26733 - protein, 9 aa, Artificial Sequence
  Description of Artificial Sequence: Synthetic peptide
  XENP021383 vlCDR3
QQGNTLPYT

SEQ ID NO: 26734 - protein, 223 aa, Artificial Sequence; identical to SEQ ID NO: 25194
  Description of Artificial Sequence: Synthetic polypeptide
  XENP021384 2A11_H1_L2.37_Fab Heavy Chain

SEQ ID NO: 26735 - protein, 118 aa, Artificial Sequence; identical to SEQ ID NO: 17236
  Description of Artificial Sequence: Synthetic polypeptide
  VH of XENP021384

SEQ ID NO: 26736 - protein, 5 aa, Artificial Sequence
  Description of Artificial Sequence: Synthetic peptide
  XENP021384 vhCDR1
DYYMH

SEQ ID NO: 26737 - protein, 17 aa, Artificial Sequence
  Description of Artificial Sequence: Synthetic peptide
  XENP021384 vhCDR2
WIDPENGDTEYAPKFQG

SEQ ID NO: 26738 - protein, 9 aa, Artificial Sequence
  Description of Artificial Sequence: Synthetic peptide
  XENP021384 vhCDR3
RGVRQALDY

SEQ ID NO: 26739 - protein, 214 aa, Artificial Sequence
  Description of Artificial Sequence: Synthetic polypeptide
  XENP021384 2A11_H1_L2.37_Fab Light Chain
DIQMTQSPAFLSVTPGEKVTITCQASQDIGNYLNWFQQKPDQTVKLLIYLTSRLHSGVPSRFSGSGSGTDYTFTISSLEAEDAATYFCQQGNTLPYTFGGGTKVEIKRTVAAPSVFIFPPSDEQLKSGTASVVCLLNNFYPREAKVQWKVDNALQSGNSQESVTEQDSKDSTYSLSSTLTLSKADYEKHKVYACEVTHQGLSSPVTKSFNRGEC

SEQ ID NO: 26740 - protein, 107 aa, Artificial Sequence
  Description of Artificial Sequence: Synthetic polypeptide
  VL of XENP021384
DIQMTQSPAFLSVTPGEKVTITCQASQDIGNYLNWFQQKPDQTVKLLIYLTSRLHSGVPSRFSGSGSGTDYTFTISSLEAEDAATYFCQQGNTLPYTFGGGTKVEIK

SEQ ID NO: 26741 - protein, 11 aa, Artificial Sequence
  Description of Artificial Sequence: Synthetic peptide
  XENP021384 vlCDR1
QASQDIGNYLN

SEQ ID NO: 26742 - protein, 7 aa, Artificial Sequence
  Description of Artificial Sequence: Synthetic peptide
  XENP021384 vlCDR2
LTSRLHS

SEQ ID NO: 26743 - protein, 9 aa, Artificial Sequence
  Description of Artificial Sequence: Synthetic peptide
  XENP021384 vlCDR3
QQGNTLPYT

SEQ ID NO: 26744 - protein, 223 aa, Artificial Sequence; identical to SEQ ID NO: 25194
  Description of Artificial Sequence: Synthetic polypeptide
  XENP021385 2A11_H1_L2.38_Fab Heavy Chain

SEQ ID NO: 26745 - protein, 118 aa, Artificial Sequence; identical to SEQ ID NO: 17236
  Description of Artificial Sequence: Synthetic polypeptide
  VH of XENP021385

SEQ ID NO: 26746 - protein, 5 aa, Artificial Sequence
  Description of Artificial Sequence: Synthetic peptide
  XENP021385 vhCDR1
DYYMH

SEQ ID NO: 26747 - protein, 17 aa, Artificial Sequence
  Description of Artificial Sequence: Synthetic peptide
  XENP021385 vhCDR2
WIDPENGDTEYAPKFQG

SEQ ID NO: 26748 - protein, 9 aa, Artificial Sequence
  Description of Artificial Sequence: Synthetic peptide
  XENP021385 vhCDR3
RGVRQALDY

SEQ ID NO: 26749 - protein, 214 aa, Artificial Sequence
  Description of Artificial Sequence: Synthetic polypeptide
  XENP021385 2A11_H1_L2.38_Fab Light Chain
DIQMTQSPAFLSVTPGEKVTITCQASQDIGNYLNWFQQKPDQTVKLLIYWTSRLHSGVPSRFSGSGSGTDYTFTISSLEAEDAATYFCQQGNTLPYTFGGGTKVEIKRTVAAPSVFIFPPSDEQLKSGTASVVCLLNNFYPREAKVQWKVDNALQSGNSQESVTEQDSKDSTYSLSSTLTLSKADYEKHKVYACEVTHQGLSSPVTKSFNRGEC

SEQ ID NO: 26750 - protein, 107 aa, Artificial Sequence
  Description of Artificial Sequence: Synthetic polypeptide
  VL of XENP021385
DIQMTQSPAFLSVTPGEKVTITCQASQDIGNYLNWFQQKPDQTVKLLIYWTSRLHSGVPSRFSGSGSGTDYTFTISSLEAEDAATYFCQQGNTLPYTFGGGTKVEIK

SEQ ID NO: 26751 - protein, 11 aa, Artificial Sequence
  Description of Artificial Sequence: Synthetic peptide
  XENP021385 vlCDR1
QASQDIGNYLN

SEQ ID NO: 26752 - protein, 7 aa, Artificial Sequence
  Description of Artificial Sequence: Synthetic peptide
  XENP021385 vlCDR2
WTSRLHS

SEQ ID NO: 26753 - protein, 9 aa, Artificial Sequence
  Description of Artificial Sequence: Synthetic peptide
  XENP021385 vlCDR3
QQGNTLPYT

SEQ ID NO: 26754 - protein, 223 aa, Artificial Sequence; identical to SEQ ID NO: 25194
  Description of Artificial Sequence: Synthetic polypeptide
  XENP021386 2A11_H1_L2.39_Fab Heavy Chain

SEQ ID NO: 26755 - protein, 118 aa, Artificial Sequence; identical to SEQ ID NO: 17236
  Description of Artificial Sequence: Synthetic polypeptide
  VH of XENP021386

SEQ ID NO: 26756 - protein, 5 aa, Artificial Sequence
  Description of Artificial Sequence: Synthetic peptide
  XENP021386 vhCDR1
DYYMH

SEQ ID NO: 26757 - protein, 17 aa, Artificial Sequence
  Description of Artificial Sequence: Synthetic peptide
  XENP021386 vhCDR2
WIDPENGDTEYAPKFQG

SEQ ID NO: 26758 - protein, 9 aa, Artificial Sequence
  Description of Artificial Sequence: Synthetic peptide
  XENP021386 vhCDR3
RGVRQALDY

SEQ ID NO: 26759 - protein, 214 aa, Artificial Sequence
  Description of Artificial Sequence: Synthetic polypeptide
  XENP021386 2A11_H1_L2.39_Fab Light Chain
DIQMTQSPAFLSVTPGEKVTITCQASQDIGNYLNWFQQKPDQTVKLLIYATSRLHSGVPSRFSGSGSGTDYTFTISSLEAEDAATYFCQQGNTLPYTFGGGTKVEIKRTVAAPSVFIFPPSDEQLKSGTASVVCLLNNFYPREAKVQWKVDNALQSGNSQESVTEQDSKDSTYSLSSTLTLSKADYEKHKVYACEVTHQGLSSPVTKSFNRGEC

SEQ ID NO: 26760 - protein, 107 aa, Artificial Sequence
  Description of Artificial Sequence: Synthetic polypeptide
  VL of XENP021386
DIQMTQSPAFLSVTPGEKVTITCQASQDIGNYLNWFQQKPDQTVKLLIYATSRLHSGVPSRFSGSGSGTDYTFTISSLEAEDAATYFCQQGNTLPYTFGGGTKVEIK

SEQ ID NO: 26761 - protein, 11 aa, Artificial Sequence
  Description of Artificial Sequence: Synthetic peptide
  XENP021386 vlCDR1
QASQDIGNYLN

SEQ ID NO: 26762 - protein, 7 aa, Artificial Sequence
  Description of Artificial Sequence: Synthetic peptide
  XENP021386 vlCDR2
ATSRLHS

SEQ ID NO: 26763 - protein, 9 aa, Artificial Sequence
  Description of Artificial Sequence: Synthetic peptide
  XENP021386 vlCDR3
QQGNTLPYT

SEQ ID NO: 26764 - protein, 223 aa, Artificial Sequence; identical to SEQ ID NO: 25194
  Description of Artificial Sequence: Synthetic polypeptide
  XENP021387 2A11_H1_L2.40_Fab Heavy Chain

SEQ ID NO: 26765 - protein, 118 aa, Artificial Sequence; identical to SEQ ID NO: 17236
  Description of Artificial Sequence: Synthetic polypeptide
  VH of XENP021387

SEQ ID NO: 26766 - protein, 5 aa, Artificial Sequence
  Description of Artificial Sequence: Synthetic peptide
  XENP021387 vhCDR1
DYYMH

SEQ ID NO: 26767 - protein, 17 aa, Artificial Sequence
  Description of Artificial Sequence: Synthetic peptide
  XENP021387 vhCDR2
WIDPENGDTEYAPKFQG

SEQ ID NO: 26768 - protein, 9 aa, Artificial Sequence
  Description of Artificial Sequence: Synthetic peptide
  XENP021387 vhCDR3
RGVRQALDY

SEQ ID NO: 26769 - protein, 214 aa, Artificial Sequence
  Description of Artificial Sequence: Synthetic polypeptide
  XENP021387 2A11_H1_L2.40_Fab Light Chain
DIQMTQSPAFLSVTPGEKVTITCQASQDIGNYLNWFQQKPDQTVKLLIYTTSRLHSGVPSRFSGSGSGTDYTFTISSLEAEDAATYFCQQGNTLPYTFGGGTKVEIKRTVAAPSVFIFPPSDEQLKSGTASVVCLLNNFYPREAKVQWKVDNALQSGNSQESVTEQDSKDSTYSLSSTLTLSKADYEKHKVYACEVTHQGLSSPVTKSFNRGEC

SEQ ID NO: 26770 - protein, 107 aa, Artificial Sequence
  Description of Artificial Sequence: Synthetic polypeptide
  VL of XENP021387
DIQMTQSPAFLSVTPGEKVTITCQASQDIGNYLNWFQQKPDQTVKLLIYTTSRLHSGVPSRFSGSGSGTDYTFTISSLEAEDAATYFCQQGNTLPYTFGGGTKVEIK

SEQ ID NO: 26771 - protein, 11 aa, Artificial Sequence
  Description of Artificial Sequence: Synthetic peptide
  XENP021387 vlCDR1
QASQDIGNYLN

SEQ ID NO: 26772 - protein, 7 aa, Artificial Sequence
  Description of Artificial Sequence: Synthetic peptide
  XENP021387 vlCDR2
TTSRLHS

SEQ ID NO: 26773 - protein, 9 aa, Artificial Sequence
  Description of Artificial Sequence: Synthetic peptide
  XENP021387 vlCDR3
QQGNTLPYT

SEQ ID NO: 26774 - protein, 223 aa, Artificial Sequence; identical to SEQ ID NO: 25194
  Description of Artificial Sequence: Synthetic polypeptide
  XENP021388 2A11_H1_L2.41_Fab Heavy Chain

SEQ ID NO: 26775 - protein, 118 aa, Artificial Sequence; identical to SEQ ID NO: 17236
  Description of Artificial Sequence: Synthetic polypeptide
  VH of XENP021388

SEQ ID NO: 26776 - protein, 5 aa, Artificial Sequence
  Description of Artificial Sequence: Synthetic peptide
  XENP021388 vhCDR1
DYYMH

SEQ ID NO: 26777 - protein, 17 aa, Artificial Sequence
  Description of Artificial Sequence: Synthetic peptide
  XENP021388 vhCDR2
WIDPENGDTEYAPKFQG

SEQ ID NO: 26778 - protein, 9 aa, Artificial Sequence
  Description of Artificial Sequence: Synthetic peptide
  XENP021388 vhCDR3
RGVRQALDY

SEQ ID NO: 26779 - protein, 214 aa, Artificial Sequence
  Description of Artificial Sequence: Synthetic polypeptide
  XENP021388 2A11_H1_L2.41_Fab Light Chain
DIQMTQSPAFLSVTPGEKVTITCQASQDIGNYLNWFQQKPDQTVKLLIYQTSRLHSGVPSRFSGSGSGTDYTFTISSLEAEDAATYFCQQGNTLPYTFGGGTKVEIKRTVAAPSVFIFPPSDEQLKSGTASVVCLLNNFYPREAKVQWKVDNALQSGNSQESVTEQDSKDSTYSLSSTLTLSKADYEKHKVYACEVTHQGLSSPVTKSFNRGEC

SEQ ID NO: 26780 - protein, 107 aa, Artificial Sequence
  Description of Artificial Sequence: Synthetic polypeptide
  VL of XENP021388
DIQMTQSPAFLSVTPGEKVTITCQASQDIGNYLNWFQQKPDQTVKLLIYQTSRLHSGVPSRFSGSGSGTDYTFTISSLEAEDAATYFCQQGNTLPYTFGGGTKVEIK

SEQ ID NO: 26781 - protein, 11 aa, Artificial Sequence
  Description of Artificial Sequence: Synthetic peptide
  XENP021388 vlCDR1
QASQDIGNYLN

SEQ ID NO: 26782 - protein, 7 aa, Artificial Sequence
  Description of Artificial Sequence: Synthetic peptide
  XENP021388 vlCDR2
QTSRLHS

SEQ ID NO: 26783 - protein, 9 aa, Artificial Sequence
  Description of Artificial Sequence: Synthetic peptide
  XENP021388 vlCDR3
QQGNTLPYT

SEQ ID NO: 26784 - protein, 223 aa, Artificial Sequence; identical to SEQ ID NO: 25194
  Description of Artificial Sequence: Synthetic polypeptide
  XENP021389 2A11_H1_L2.42_Fab Heavy Chain

SEQ ID NO: 26785 - protein, 118 aa, Artificial Sequence; identical to SEQ ID NO: 17236
  Description of Artificial Sequence: Synthetic polypeptide
  VH of XENP021389

SEQ ID NO: 26786 - protein, 5 aa, Artificial Sequence
  Description of Artificial Sequence: Synthetic peptide
  XENP021389 vhCDR1
DYYMH

SEQ ID NO: 26787 - protein, 17 aa, Artificial Sequence
  Description of Artificial Sequence: Synthetic peptide
  XENP021389 vhCDR2
WIDPENGDTEYAPKFQG

SEQ ID NO: 26788 - protein, 9 aa, Artificial Sequence
  Description of Artificial Sequence: Synthetic peptide
  XENP021389 vhCDR3
RGVRQALDY

SEQ ID NO: 26789 - protein, 214 aa, Artificial Sequence
  Description of Artificial Sequence: Synthetic polypeptide
  XENP021389 2A11_H1_L2.42_Fab Light Chain
DIQMTQSPAFLSVTPGEKVTITCQASQDIGNYLNWFQQKPDQTVKLLIYETSRLHSGVPSRFSGSGSGTDYTFTISSLEAEDAATYFCQQGNTLPYTFGGGTKVEIKRTVAAPSVFIFPPSDEQLKSGTASVVCLLNNFYPREAKVQWKVDNALQSGNSQESVTEQDSKDSTYSLSSTLTLSKADYEKHKVYACEVTHQGLSSPVTKSFNRGEC

SEQ ID NO: 26790 - protein, 107 aa, Artificial Sequence
  Description of Artificial Sequence: Synthetic polypeptide
  VL of XENP021389
DIQMTQSPAFLSVTPGEKVTITCQASQDIGNYLNWFQQKPDQTVKLLIYETSRLHSGVPSRFSGSGSGTDYTFTISSLEAEDAATYFCQQGNTLPYTFGGGTKVEIK

SEQ ID NO: 26791 - protein, 11 aa, Artificial Sequence
  Description of Artificial Sequence: Synthetic peptide
  XENP021389 vlCDR1
QASQDIGNYLN

SEQ ID NO: 26792 - protein, 7 aa, Artificial Sequence
  Description of Artificial Sequence: Synthetic peptide
  XENP021389 vlCDR2
ETSRLHS

SEQ ID NO: 26793 - protein, 9 aa, Artificial Sequence
  Description of Artificial Sequence: Synthetic peptide
  XENP021389 vlCDR3
QQGNTLPYT

SEQ ID NO: 26794 - protein, 223 aa, Artificial Sequence; identical to SEQ ID NO: 25194
  Description of Artificial Sequence: Synthetic polypeptide
  XENP021390 2A11_H1_L2.43_Fab Heavy Chain

SEQ ID NO: 26795 - protein, 118 aa, Artificial Sequence; identical to SEQ ID NO: 17236
  Description of Artificial Sequence: Synthetic polypeptide
  VH of XENP021390

SEQ ID NO: 26796 - protein, 5 aa, Artificial Sequence
  Description of Artificial Sequence: Synthetic peptide
  XENP021390 vhCDR1
DYYMH

SEQ ID NO: 26797 - protein, 17 aa, Artificial Sequence
  Description of Artificial Sequence: Synthetic peptide
  XENP021390 vhCDR2
WIDPENGDTEYAPKFQG

SEQ ID NO: 26798 - protein, 9 aa, Artificial Sequence
  Description of Artificial Sequence: Synthetic peptide
  XENP021390 vhCDR3
RGVRQALDY

SEQ ID NO: 26799 - protein, 214 aa, Artificial Sequence
  Description of Artificial Sequence: Synthetic polypeptide
  XENP021390 2A11_H1_L2.43_Fab Light Chain
DIQMTQSPAFLSVTPGEKVTITCQASQDIGNYLNWFQQKPDQTVKLLIYKTSRLHSGVPSRFSGSGSGTDYTFTISSLEAEDAATYFCQQGNTLPYTFGGGTKVEIKRTVAAPSVFIFPPSDEQLKSGTASVVCLLNNFYPREAKVQWKVDNALQSGNSQESVTEQDSKDSTYSLSSTLTLSKADYEKHKVYACEVTHQGLSSPVTKSFNRGEC

SEQ ID NO: 26800 - protein, 107 aa, Artificial Sequence
  Description of Artificial Sequence: Synthetic polypeptide
  VL of XENP021390
DIQMTQSPAFLSVTPGEKVTITCQASQDIGNYLNWFQQKPDQTVKLLIYKTSRLHSGVPSRFSGSGSGTDYTFTISSLEAEDAATYFCQQGNTLPYTFGGGTKVEIK

SEQ ID NO: 26801 - protein, 11 aa, Artificial Sequence
  Description of Artificial Sequence: Synthetic peptide
  XENP021390 vlCDR1
QASQDIGNYLN

SEQ ID NO: 26802 - protein, 7 aa, Artificial Sequence
  Description of Artificial Sequence: Synthetic peptide
  XENP021390 vlCDR2
KTSRLHS

SEQ ID NO: 26803 - protein, 9 aa, Artificial Sequence
  Description of Artificial Sequence: Synthetic peptide
  XENP021390 vlCDR3
QQGNTLPYT

SEQ ID NO: 26804 - protein, 223 aa, Artificial Sequence; identical to SEQ ID NO: 25194
  Description of Artificial Sequence: Synthetic polypeptide
  XENP021391 2A11_H1_L2.44_Fab Heavy Chain

SEQ ID NO: 26805 - protein, 118 aa, Artificial Sequence; identical to SEQ ID NO: 17236
  Description of Artificial Sequence: Synthetic polypeptide
  VH of XENP021391

SEQ ID NO: 26806 - protein, 5 aa, Artificial Sequence
  Description of Artificial Sequence: Synthetic peptide
  XENP021391 vhCDR1
DYYMH

SEQ ID NO: 26807 - protein, 17 aa, Artificial Sequence
  Description of Artificial Sequence: Synthetic peptide
  XENP021391 vhCDR2
WIDPENGDTEYAPKFQG

SEQ ID NO: 26808 - protein, 9 aa, Artificial Sequence
  Description of Artificial Sequence: Synthetic peptide
  XENP021391 vhCDR3
RGVRQALDY

SEQ ID NO: 26809 - protein, 214 aa, Artificial Sequence
  Description of Artificial Sequence: Synthetic polypeptide
  XENP021391 2A11_H1_L2.44_Fab Light Chain
DIQMTQSPAFLSVTPGEKVTITCQASQDIGNYLNWFQQKPDQTVKLLIYYTSKLHSGVPSRFSGSGSGTDYTFTISSLEAEDAATYFCQQGNTLPYTFGGGTKVEIKRTVAAPSVFIFPPSDEQLKSGTASVVCLLNNFYPREAKVQWKVDNALQSGNSQESVTEQDSKDSTYSLSSTLTLSKADYEKHKVYACEVTHQGLSSPVTKSFNRGEC

SEQ ID NO: 26810 - protein, 107 aa, Artificial Sequence
  Description of Artificial Sequence: Synthetic polypeptide
  VL of XENP021391
DIQMTQSPAFLSVTPGEKVTITCQASQDIGNYLNWFQQKPDQTVKLLIYYTSKLHSGVPSRFSGSGSGTDYTFTISSLEAEDAATYFCQQGNTLPYTFGGGTKVEIK

SEQ ID NO: 26811 - protein, 11 aa, Artificial Sequence
  Description of Artificial Sequence: Synthetic peptide
  XENP021391 vlCDR1
QASQDIGNYLN

SEQ ID NO: 26812 - protein, 7 aa, Artificial Sequence
  Description of Artificial Sequence: Synthetic peptide
  XENP021391 vlCDR2
YTSKLHS

SEQ ID NO: 26813 - protein, 9 aa, Artificial Sequence
  Description of Artificial Sequence: Synthetic peptide
  XENP021391 vlCDR3
QQGNTLPYT

SEQ ID NO: 26814 - protein, 223 aa, Artificial Sequence; identical to SEQ ID NO: 25194
  Description of Artificial Sequence: Synthetic polypeptide
  XENP021392 2A11_H1_L2.45_Fab Heavy Chain

SEQ ID NO: 26815 - protein, 118 aa, Artificial Sequence; identical to SEQ ID NO: 17236
  Description of Artificial Sequence: Synthetic polypeptide
  VH of XENP021392

SEQ ID NO: 26816 - protein, 5 aa, Artificial Sequence
  Description of Artificial Sequence: Synthetic peptide
  XENP021392 vhCDR1
DYYMH

SEQ ID NO: 26817 - protein, 17 aa, Artificial Sequence
  Description of Artificial Sequence: Synthetic peptide
  XENP021392 vhCDR2
WIDPENGDTEYAPKFQG

SEQ ID NO: 26818 - protein, 9 aa, Artificial Sequence
  Description of Artificial Sequence: Synthetic peptide
  XENP021392 vhCDR3
RGVRQALDY

SEQ ID NO: 26819 - protein, 214 aa, Artificial Sequence
  Description of Artificial Sequence: Synthetic polypeptide
  XENP021392 2A11_H1_L2.45_Fab Light Chain
DIQMTQSPAFLSVTPGEKVTITCQASQDIGNYLNWFQQKPDQTVKLLIYYTSELHSGVPSRFSGSGSGTDYTFTISSLEAEDAATYFCQQGNTLPYTFGGGTKVEIKRTVAAPSVFIFPPSDEQLKSGTASVVCLLNNFYPREAKVQWKVDNALQSGNSQESVTEQDSKDSTYSLSSTLTLSKADYEKHKVYACEVTHQGLSSPVTKSFNRGEC

SEQ ID NO: 26820 - protein, 107 aa, Artificial Sequence
  Description of Artificial Sequence: Synthetic polypeptide
  VL of XENP021392
DIQMTQSPAFLSVTPGEKVTITCQASQDIGNYLNWFQQKPDQTVKLLIYYTSELHSGVPSRFSGSGSGTDYTFTISSLEAEDAATYFCQQGNTLPYTFGGGTKVEIK

SEQ ID NO: 26821 - protein, 11 aa, Artificial Sequence
  Description of Artificial Sequence: Synthetic peptide
  XENP021392 vlCDR1
QASQDIGNYLN

SEQ ID NO: 26822 - protein, 7 aa, Artificial Sequence
  Description of Artificial Sequence: Synthetic peptide
  XENP021392 vlCDR2
YTSELHS

SEQ ID NO: 26823 - protein, 9 aa, Artificial Sequence
  Description of Artificial Sequence: Synthetic peptide
  XENP021392 vlCDR3
QQGNTLPYT

SEQ ID NO: 26824 - protein, 223 aa, Artificial Sequence; identical to SEQ ID NO: 25194
  Description of Artificial Sequence: Synthetic polypeptide
  XENP021393 2A11_H1_L2.46_Fab Heavy Chain

SEQ ID NO: 26825 - protein, 118 aa, Artificial Sequence; identical to SEQ ID NO: 17236
  Description of Artificial Sequence: Synthetic polypeptide
  VH of XENP021393

SEQ ID NO: 26826 - protein, 5 aa, Artificial Sequence
  Description of Artificial Sequence: Synthetic peptide
  XENP021393 vhCDR1
DYYMH

SEQ ID NO: 26827 - protein, 17 aa, Artificial Sequence
  Description of Artificial Sequence: Synthetic peptide
  XENP021393 vhCDR2
WIDPENGDTEYAPKFQG

SEQ ID NO: 26828 - protein, 9 aa, Artificial Sequence
  Description of Artificial Sequence: Synthetic peptide
  XENP021393 vhCDR3
RGVRQALDY

SEQ ID NO: 26829 - protein, 214 aa, Artificial Sequence
  Description of Artificial Sequence: Synthetic polypeptide
  XENP021393 2A11_H1_L2.46_Fab Light Chain
DIQMTQSPAFLSVTPGEKVTITCQASQDIGNYLNWFQQKPDQTVKLLIYYTSDLHSGVPSRFSGSGSGTDYTFTISSLEAEDAATYFCQQGNTLPYTFGGGTKVEIKRTVAAPSVFIFPPSDEQLKSGTASVVCLLNNFYPREAKVQWKVDNALQSGNSQESVTEQDSKDSTYSLSSTLTLSKADYEKHKVYACEVTHQGLSSPVTKSFNRGEC

SEQ ID NO: 26830 - protein, 107 aa, Artificial Sequence
  Description of Artificial Sequence: Synthetic polypeptide
  VL of XENP021393
DIQMTQSPAFLSVTPGEKVTITCQASQDIGNYLNWFQQKPDQTVKLLIYYTSDLHSGVPSRFSGSGSGTDYTFTISSLEAEDAATYFCQQGNTLPYTFGGGTKVEIK

SEQ ID NO: 26831 - protein, 11 aa, Artificial Sequence
  Description of Artificial Sequence: Synthetic peptide
  XENP021393 vlCDR1
QASQDIGNYLN

SEQ ID NO: 26832 - protein, 7 aa, Artificial Sequence
  Description of Artificial Sequence: Synthetic peptide
  XENP021393 vlCDR2
YTSDLHS

SEQ ID NO: 26833 - protein, 9 aa, Artificial Sequence
  Description of Artificial Sequence: Synthetic peptide
  XENP021393 vlCDR3
QQGNTLPYT

SEQ ID NO: 26834 - protein, 223 aa, Artificial Sequence; identical to SEQ ID NO: 25194
  Description of Artificial Sequence: Synthetic polypeptide
  XENP021394 2A11_H1_L2.47_Fab Heavy Chain

SEQ ID NO: 26835 - protein, 118 aa, Artificial Sequence; identical to SEQ ID NO: 17236
  Description of Artificial Sequence: Synthetic polypeptide
  VH of XENP021394

SEQ ID NO: 26836 - protein, 5 aa, Artificial Sequence
  Description of Artificial Sequence: Synthetic peptide
  XENP021394 vhCDR1
DYYMH

SEQ ID NO: 26837 - protein, 17 aa, Artificial Sequence
  Description of Artificial Sequence: Synthetic peptide
  XENP021394 vhCDR2
WIDPENGDTEYAPKFQG

SEQ ID NO: 26838 - protein, 9 aa, Artificial Sequence
  Description of Artificial Sequence: Synthetic peptide
  XENP021394 vhCDR3
RGVRQALDY

SEQ ID NO: 26839 - protein, 214 aa, Artificial Sequence; identical to SEQ ID NO: 22039
  Description of Artificial Sequence: Synthetic polypeptide
  XENP021394 2A11_H1_L2.47_Fab Light Chain

SEQ ID NO: 26840 - protein, 107 aa, Artificial Sequence; identical to SEQ ID NO: 22040
  Description of Artificial Sequence: Synthetic polypeptide
  VL of XENP021394

SEQ ID NO: 26841 - protein, 11 aa, Artificial Sequence
  Description of Artificial Sequence: Synthetic peptide
  XENP021394 vlCDR1
QASQDIGNYLN

SEQ ID NO: 26842 - protein, 7 aa, Artificial Sequence
  Description of Artificial Sequence: Synthetic peptide
  XENP021394 vlCDR2
YTSHLHS

SEQ ID NO: 26843 - protein, 9 aa, Artificial Sequence
  Description of Artificial Sequence: Synthetic peptide
  XENP021394 vlCDR3
QQGNTLPYT

SEQ ID NO: 26844 - protein, 223 aa, Artificial Sequence; identical to SEQ ID NO: 25194
  Description of Artificial Sequence: Synthetic polypeptide
  XENP021395 2A11_H1_L2.48_Fab Heavy Chain

SEQ ID NO: 26845 - protein, 118 aa, Artificial Sequence; identical to SEQ ID NO: 17236
  Description of Artificial Sequence: Synthetic polypeptide
  VH of XENP021395

SEQ ID NO: 26846 - protein, 5 aa, Artificial Sequence
  Description of Artificial Sequence: Synthetic peptide
  XENP021395 vhCDR1
DYYMH

SEQ ID NO: 26847 - protein, 17 aa, Artificial Sequence
  Description of Artificial Sequence: Synthetic peptide
  XENP021395 vhCDR2
WIDPENGDTEYAPKFQG

SEQ ID NO: 26848 - protein, 9 aa, Artificial Sequence
  Description of Artificial Sequence: Synthetic peptide
  XENP021395 vhCDR3
RGVRQALDY

SEQ ID NO: 26849 - protein, 214 aa, Artificial Sequence
  Description of Artificial Sequence: Synthetic polypeptide
  XENP021395 2A11_H1_L2.48_Fab Light Chain
DIQMTQSPAFLSVTPGEKVTITCQASQDIGNYLNWFQQKPDQTVKLLIYYTSTLHSGVPSRFSGSGSGTDYTFTISSLEAEDAATYFCQQGNTLPYTFGGGTKVEIKRTVAAPSVFIFPPSDEQLKSGTASVVCLLNNFYPREAKVQWKVDNALQSGNSQESVTEQDSKDSTYSLSSTLTLSKADYEKHKVYACEVTHQGLSSPVTKSFNRGEC

SEQ ID NO: 26850 - protein, 107 aa, Artificial Sequence
  Description of Artificial Sequence: Synthetic polypeptide
  VL of XENP021395
DIQMTQSPAFLSVTPGEKVTITCQASQDIGNYLNWFQQKPDQTVKLLIYYTSTLHSGVPSRFSGSGSGTDYTFTISSLEAEDAATYFCQQGNTLPYTFGGGTKVEIK

SEQ ID NO: 26851 - protein, 11 aa, Artificial Sequence
  Description of Artificial Sequence: Synthetic peptide
  XENP021395 vlCDR1
QASQDIGNYLN

SEQ ID NO: 26852 - protein, 7 aa, Artificial Sequence
  Description of Artificial Sequence: Synthetic peptide
  XENP021395 vlCDR2
YTSTLHS

SEQ ID NO: 26853 - protein, 9 aa, Artificial Sequence
  Description of Artificial Sequence: Synthetic peptide
  XENP021395 vlCDR3
QQGNTLPYT

SEQ ID NO: 26854 - protein, 223 aa, Artificial Sequence; identical to SEQ ID NO: 25194
  Description of Artificial Sequence: Synthetic polypeptide
  XENP021396 2A11_H1_L2.49_Fab Heavy Chain

SEQ ID NO: 26855 - protein, 118 aa, Artificial Sequence; identical to SEQ ID NO: 17236
  Description of Artificial Sequence: Synthetic polypeptide
  VH of XENP021396

SEQ ID NO: 26856 - protein, 5 aa, Artificial Sequence
  Description of Artificial Sequence: Synthetic peptide
  XENP021396 vhCDR1
DYYMH

SEQ ID NO: 26857 - protein, 17 aa, Artificial Sequence
  Description of Artificial Sequence: Synthetic peptide
  XENP021396 vhCDR2
WIDPENGDTEYAPKFQG

SEQ ID NO: 26858 - protein, 9 aa, Artificial Sequence
  Description of Artificial Sequence: Synthetic peptide
  XENP021396 vhCDR3
RGVRQALDY

SEQ ID NO: 26859 - protein, 214 aa, Artificial Sequence
  Description of Artificial Sequence: Synthetic polypeptide
  XENP021396 2A11_H1_L2.49_Fab Light Chain
DIQMTQSPAFLSVTPGEKVTITCQASQDIGNYLNWFQQKPDQTVKLLIYYTSALHSGVPSRFSGSGSGTDYTFTISSLEAEDAATYFCQQGNTLPYTFGGGTKVEIKRTVAAPSVFIFPPSDEQLKSGTASVVCLLNNFYPREAKVQWKVDNALQSGNSQESVTEQDSKDSTYSLSSTLTLSKADYEKHKVYACEVTHQGLSSPVTKSFNRGEC

SEQ ID NO: 26860 - protein, 107 aa, Artificial Sequence
  Description of Artificial Sequence: Synthetic polypeptide
  VL of XENP021396
DIQMTQSPAFLSVTPGEKVTITCQASQDIGNYLNWFQQKPDQTVKLLIYYTSALHSGVPSRFSGSGSGTDYTFTISSLEAEDAATYFCQQGNTLPYTFGGGTKVEIK

SEQ ID NO: 26861 - protein, 11 aa, Artificial Sequence
  Description of Artificial Sequence: Synthetic peptide
  XENP021396 vlCDR1
QASQDIGNYLN

SEQ ID NO: 26862 - protein, 7 aa, Artificial Sequence
  Description of Artificial Sequence: Synthetic peptide
  XENP021396 vlCDR2
YTSALHS

SEQ ID NO: 26863 - protein, 9 aa, Artificial Sequence
  Description of Artificial Sequence: Synthetic peptide
  XENP021396 vlCDR3
QQGNTLPYT

SEQ ID NO: 26864 - protein, 223 aa, Artificial Sequence; identical to SEQ ID NO: 25194
  Description of Artificial Sequence: Synthetic polypeptide
  XENP021401 2A11_H1_L2.50_Fab Heavy Chain

SEQ ID NO: 26865 - protein, 118 aa, Artificial Sequence; identical to SEQ ID NO: 17236
  Description of Artificial Sequence: Synthetic polypeptide
  VH of XENP021401

SEQ ID NO: 26866 - protein, 5 aa, Artificial Sequence
  Description of Artificial Sequence: Synthetic peptide
  XENP021401 vhCDR1
DYYMH

SEQ ID NO: 26867 - protein, 17 aa, Artificial Sequence
  Description of Artificial Sequence: Synthetic peptide
  XENP021401 vhCDR2
WIDPENGDTEYAPKFQG

SEQ ID NO: 26868 - protein, 9 aa, Artificial Sequence
  Description of Artificial Sequence: Synthetic peptide
  XENP021401 vhCDR3
RGVRQALDY

SEQ ID NO: 26869 - protein, 214 aa, Artificial Sequence; identical to SEQ ID NO: 22059
  Description of Artificial Sequence: Synthetic polypeptide
  XENP021401 2A11_H1_L2.50_Fab Light Chain

SEQ ID NO: 26870 - protein, 107 aa, Artificial Sequence; identical to SEQ ID NO: 22060
  Description of Artificial Sequence: Synthetic polypeptide
  VL of XENP021401

SEQ ID NO: 26871 - protein, 11 aa, Artificial Sequence
  Description of Artificial Sequence: Synthetic peptide
  XENP021401 vlCDR1
QASQDIGNYLN

SEQ ID NO: 26872 - protein, 7 aa, Artificial Sequence
  Description of Artificial Sequence: Synthetic peptide
  XENP021401 vlCDR2
YTSYLHS

SEQ ID NO: 26873 - protein, 9 aa, Artificial Sequence
  Description of Artificial Sequence: Synthetic peptide
  XENP021401 vlCDR3
QQGNTLPYT

SEQ ID NO: 26874 - protein, 223 aa, Artificial Sequence; identical to SEQ ID NO: 25194
  Description of Artificial Sequence: Synthetic polypeptide
  XENP021402 2A11_H1_L2.51_Fab Heavy Chain

SEQ ID NO: 26875 - protein, 118 aa, Artificial Sequence; identical to SEQ ID NO: 17236
  Description of Artificial Sequence: Synthetic polypeptide
  VH of XENP021402

SEQ ID NO: 26876 - protein, 5 aa, Artificial Sequence
  Description of Artificial Sequence: Synthetic peptide
  XENP021402 vhCDR1
DYYMH

SEQ ID NO: 26877 - protein, 17 aa, Artificial Sequence
  Description of Artificial Sequence: Synthetic peptide
  XENP021402 vhCDR2
WIDPENGDTEYAPKFQG

SEQ ID NO: 26878 - protein, 9 aa, Artificial Sequence
  Description of Artificial Sequence: Synthetic peptide
  XENP021402 vhCDR3
RGVRQALDY

SEQ ID NO: 26879 - protein, 214 aa, Artificial Sequence
  Description of Artificial Sequence: Synthetic polypeptide
  XENP021402 2A11_H1_L2.51_Fab Light Chain
DIQMTQSPAFLSVTPGEKVTITCQASQDIGNYLNWFQQKPDQTVKLLIYYTSLLHSGVPSRFSGSGSGTDYTFTISSLEAEDAATYFCQQGNTLPYTFGGGTKVEIKRTVAAPSVFIFPPSDEQLKSGTASVVCLLNNFYPREAKVQWKVDNALQSGNSQESVTEQDSKDSTYSLSSTLTLSKADYEKHKVYACEVTHQGLSSPVTKSFNRGEC

SEQ ID NO: 26880 - protein, 107 aa, Artificial Sequence
  Description of Artificial Sequence: Synthetic polypeptide
  VL of XENP021402
DIQMTQSPAFLSVTPGEKVTITCQASQDIGNYLNWFQQKPDQTVKLLIYYTSLLHSGVPSRFSGSGSGTDYTFTISSLEAEDAATYFCQQGNTLPYTFGGGTKVEIK

SEQ ID NO: 26881 - protein, 11 aa, Artificial Sequence
  Description of Artificial Sequence: Synthetic peptide
  XENP021402 vlCDR1
QASQDIGNYLN

SEQ ID NO: 26882 - protein, 7 aa, Artificial Sequence
  Description of Artificial Sequence: Synthetic peptide
  XENP021402 vlCDR2
YTSLLHS

SEQ ID NO: 26883 - protein, 9 aa, Artificial Sequence
  Description of Artificial Sequence: Synthetic peptide
  XENP021402 vlCDR3
QQGNTLPYT

SEQ ID NO: 26884 - protein, 223 aa, Artificial Sequence; identical to SEQ ID NO: 25194
  Description of Artificial Sequence: Synthetic polypeptide
  XENP021403 2A11_H1_L2.52_Fab Heavy Chain

SEQ ID NO: 26885 - protein, 118 aa, Artificial Sequence; identical to SEQ ID NO: 17236
  Description of Artificial Sequence: Synthetic polypeptide
  VH of XENP021403

SEQ ID NO: 26886 - protein, 5 aa, Artificial Sequence
  Description of Artificial Sequence: Synthetic peptide
  XENP021403 vhCDR1
DYYMH

SEQ ID NO: 26887 - protein, 17 aa, Artificial Sequence
  Description of Artificial Sequence: Synthetic peptide
  XENP021403 vhCDR2
WIDPENGDTEYAPKFQG

SEQ ID NO: 26888 - protein, 9 aa, Artificial Sequence
  Description of Artificial Sequence: Synthetic peptide
  XENP021403 vhCDR3
RGVRQALDY

SEQ ID NO: 26889 - protein, 214 aa, Artificial Sequence
  Description of Artificial Sequence: Synthetic polypeptide
  XENP021403 2A11_H1_L2.52_Fab Light Chain
DIQMTQSPAFLSVTPGEKVTITCQASQDIGNYLNWFQQKPDQTVKLLIYYTSRYHSGVPSRFSGSGSGTDYTFTISSLEAEDAATYFCQQGNTLPYTFGGGTKVEIKRTVAAPSVFIFPPSDEQLKSGTASVVCLLNNFYPREAKVQWKVDNALQSGNSQESVTEQDSKDSTYSLSSTLTLSKADYEKHKVYACEVTHQGLSSPVTKSFNRGEC

SEQ ID NO: 26890 - protein, 107 aa, Artificial Sequence
  Description of Artificial Sequence: Synthetic polypeptide
  VL of XENP021403
DIQMTQSPAFLSVTPGEKVTITCQASQDIGNYLNWFQQKPDQTVKLLIYYTSRYHSGVPSRFSGSGSGTDYTFTISSLEAEDAATYFCQQGNTLPYTFGGGTKVEIK

SEQ ID NO: 26891 - protein, 11 aa, Artificial Sequence
  Description of Artificial Sequence: Synthetic peptide
  XENP021403 vlCDR1
QASQDIGNYLN

SEQ ID NO: 26892 - protein, 7 aa, Artificial Sequence
  Description of Artificial Sequence: Synthetic peptide
  XENP021403 vlCDR2
YTSRYHS

SEQ ID NO: 26893 - protein, 9 aa, Artificial Sequence
  Description of Artificial Sequence: Synthetic peptide
  XENP021403 vlCDR3
QQGNTLPYT

SEQ ID NO: 26894 - protein, 223 aa, Artificial Sequence; identical to SEQ ID NO: 25194
  Description of Artificial Sequence: Synthetic polypeptide
  XENP021404 2A11_H1_L2.53_Fab Heavy Chain

SEQ ID NO: 26895 - protein, 118 aa, Artificial Sequence; identical to SEQ ID NO: 17236
  Description of Artificial Sequence: Synthetic polypeptide
  VH of XENP021404

SEQ ID NO: 26896 - protein, 5 aa, Artificial Sequence
  Description of Artificial Sequence: Synthetic peptide
  XENP021404 vhCDR1
DYYMH

SEQ ID NO: 26897 - protein, 17 aa, Artificial Sequence
  Description of Artificial Sequence: Synthetic peptide
  XENP021404 vhCDR2
WIDPENGDTEYAPKFQG

SEQ ID NO: 26898 - protein, 9 aa, Artificial Sequence
  Description of Artificial Sequence: Synthetic peptide
  XENP021404 vhCDR3
RGVRQALDY

SEQ ID NO: 26899 - protein, 214 aa, Artificial Sequence
  Description of Artificial Sequence: Synthetic polypeptide
  XENP021404 2A11_H1_L2.53_Fab Light Chain
DIQMTQSPAFLSVTPGEKVTITCQASQDIGNYLNWFQQKPDQTVKLLIYYTSRRHSGVPSRFSGSGSGTDYTFTISSLEAEDAATYFCQQGNTLPYTFGGGTKVEIKRTVAAPSVFIFPPSDEQLKSGTASVVCLLNNFYPREAKVQWKVDNALQSGNSQESVTEQDSKDSTYSLSSTLTLSKADYEKHKVYACEVTHQGLSSPVTKSFNRGEC

SEQ ID NO: 26900 - protein, 107 aa, Artificial Sequence
  Description of Artificial Sequence: Synthetic polypeptide
  VL of XENP021404
DIQMTQSPAFLSVTPGEKVTITCQASQDIGNYLNWFQQKPDQTVKLLIYYTSRRHSGVPSRFSGSGSGTDYTFTISSLEAEDAATYFCQQGNTLPYTFGGGTKVEIK

SEQ ID NO: 26901 - protein, 11 aa, Artificial Sequence
  Description of Artificial Sequence: Synthetic peptide
  XENP021404 vlCDR1
QASQDIGNYLN

SEQ ID NO: 26902 - protein, 7 aa, Artificial Sequence
  Description of Artificial Sequence: Synthetic peptide
  XENP021404 vlCDR2
YTSRRHS

SEQ ID NO: 26903 - protein, 9 aa, Artificial Sequence
  Description of Artificial Sequence: Synthetic peptide
  XENP021404 vlCDR3
QQGNTLPYT

SEQ ID NO: 26904 - protein, 223 aa, Artificial Sequence; identical to SEQ ID NO: 25194
  Description of Artificial Sequence: Synthetic polypeptide
  XENP021405 2A11_H1_L2.54_Fab Heavy Chain

SEQ ID NO: 26905 - protein, 118 aa, Artificial Sequence; identical to SEQ ID NO: 17236
  Description of Artificial Sequence: Synthetic polypeptide
  VH of XENP021405

SEQ ID NO: 26906 - protein, 5 aa, Artificial Sequence
  Description of Artificial Sequence: Synthetic peptide
  XENP021405 vhCDR1
DYYMH

SEQ ID NO: 26907 - protein, 17 aa, Artificial Sequence
  Description of Artificial Sequence: Synthetic peptide
  XENP021405 vhCDR2
WIDPENGDTEYAPKFQG

SEQ ID NO: 26908 - protein, 9 aa, Artificial Sequence
  Description of Artificial Sequence: Synthetic peptide
  XENP021405 vhCDR3
RGVRQALDY

SEQ ID NO: 26909 - protein, 214 aa, Artificial Sequence
  Description of Artificial Sequence: Synthetic polypeptide
  XENP021405 2A11_H1_L2.54_Fab Light Chain
DIQMTQSPAFLSVTPGEKVTITCQASQDIGNYLNWFQQKPDQTVKLLIYYTSRLHSGVPSRFSGSGSGTDYTFTISSLEAEDAATYFCQQANTLPYTFGGGTKVEIKRTVAAPSVFIFPPSDEQLKSGTASVVCLLNNFYPREAKVQWKVDNALQSGNSQESVTEQDSKDSTYSLSSTLTLSKADYEKHKVYACEVTHQGLSSPVTKSFNRGEC

SEQ ID NO: 26910 - protein, 107 aa, Artificial Sequence
  Description of Artificial Sequence: Synthetic polypeptide
  VL of XENP021405
DIQMTQSPAFLSVTPGEKVTITCQASQDIGNYLNWFQQKPDQTVKLLIYYTSRLHSGVPSRFSGSGSGTDYTFTISSLEAEDAATYFCQQANTLPYTFGGGTKVEIK

SEQ ID NO: 26911 - protein, 11 aa, Artificial Sequence
  Description of Artificial Sequence: Synthetic peptide
  XENP021405 vlCDR1
QASQDIGNYLN

SEQ ID NO: 26912 - protein, 7 aa, Artificial Sequence
  Description of Artificial Sequence: Synthetic peptide
  XENP021405 vlCDR2
YTSRLHS

SEQ ID NO: 26913 - protein, 9 aa, Artificial Sequence
  Description of Artificial Sequence: Synthetic peptide
  XENP021405 vlCDR3
QQANTLPYT

SEQ ID NO: 26914 - protein, 223 aa, Artificial Sequence; identical to SEQ ID NO: 25194
  Description of Artificial Sequence: Synthetic polypeptide
  XENP021406 2A11_H1_L2.55_Fab Heavy Chain

SEQ ID NO: 26915 - protein, 118 aa, Artificial Sequence; identical to SEQ ID NO: 17236
  Description of Artificial Sequence: Synthetic polypeptide
  VH of XENP021406

SEQ ID NO: 26916 - protein, 5 aa, Artificial Sequence
  Description of Artificial Sequence: Synthetic peptide
  XENP021406 vhCDR1
DYYMH

SEQ ID NO: 26917 - protein, 17 aa, Artificial Sequence
  Description of Artificial Sequence: Synthetic peptide
  XENP021406 vhCDR2
WIDPENGDTEYAPKFQG

SEQ ID NO: 26918 - protein, 9 aa, Artificial Sequence
  Description of Artificial Sequence: Synthetic peptide
  XENP021406 vhCDR3
RGVRQALDY

SEQ ID NO: 26919 - protein, 214 aa, Artificial Sequence
  Description of Artificial Sequence: Synthetic polypeptide
  XENP021406 2A11_H1_L2.55_Fab Light Chain
DIQMTQSPAFLSVTPGEKVTITCQASQDIGNYLNWFQQKPDQTVKLLIYYTSRLHSGVPSRFSGSGSGTDYTFTISSLEAEDAATYFCQQSNTLPYTFGGGTKVEIKRTVAAPSVFIFPPSDEQLKSGTASVVCLLNNFYPREAKVQWKVDNALQSGNSQESVTEQDSKDSTYSLSSTLTLSKADYEKHKVYACEVTHQGLSSPVTKSFNRGEC

SEQ ID NO: 26920 - protein, 107 aa, Artificial Sequence
  Description of Artificial Sequence: Synthetic polypeptide
  VL of XENP021406
DIQMTQSPAFLSVTPGEKVTITCQASQDIGNYLNWFQQKPDQTVKLLIYYTSRLHSGVPSRFSGSGSGTDYTFTISSLEAEDAATYFCQQSNTLPYTFGGGTKVEIK

SEQ ID NO: 26921 - protein, 11 aa, Artificial Sequence
  Description of Artificial Sequence: Synthetic peptide
  XENP021406 vlCDR1
QASQDIGNYLN

SEQ ID NO: 26922 - protein, 7 aa, Artificial Sequence
  Description of Artificial Sequence: Synthetic peptide
  XENP021406 vlCDR2
YTSRLHS

SEQ ID NO: 26923 - protein, 9 aa, Artificial Sequence
  Description of Artificial Sequence: Synthetic peptide
  XENP021406 vlCDR3
QQSNTLPYT

SEQ ID NO: 26924 - protein, 223 aa, Artificial Sequence; identical to SEQ ID NO: 25194
  Description of Artificial Sequence: Synthetic polypeptide
  XENP021407 2A11_H1_L2.56_Fab Heavy Chain

SEQ ID NO: 26925 - protein, 118 aa, Artificial Sequence; identical to SEQ ID NO: 17236
  Description of Artificial Sequence: Synthetic polypeptide
  VH of XENP021407

SEQ ID NO: 26926 - protein, 5 aa, Artificial Sequence
  Description of Artificial Sequence: Synthetic peptide
  XENP021407 vhCDR1
DYYMH

SEQ ID NO: 26927 - protein, 17 aa, Artificial Sequence
  Description of Artificial Sequence: Synthetic peptide
  XENP021407 vhCDR2
WIDPENGDTEYAPKFQG

SEQ ID NO: 26928 - protein, 9 aa, Artificial Sequence
  Description of Artificial Sequence: Synthetic peptide
  XENP021407 vhCDR3
RGVRQALDY

SEQ ID NO: 26929 - protein, 214 aa, Artificial Sequence
  Description of Artificial Sequence: Synthetic polypeptide
  XENP021407 2A11_H1_L2.56_Fab Light Chain
DIQMTQSPAFLSVTPGEKVTITCQASQDIGNYLNWFQQKPDQTVKLLIYYTSRLHSGVPSRFSGSGSGTDYTFTISSLEAEDAATYFCQQTNTLPYTFGGGTKVEIKRTVAAPSVFIFPPSDEQLKSGTASVVCLLNNFYPREAKVQWKVDNALQSGNSQESVTEQDSKDSTYSLSSTLTLSKADYEKHKVYACEVTHQGLSSPVTKSFNRGEC

SEQ ID NO: 26930 - protein, 107 aa, Artificial Sequence
  Description of Artificial Sequence: Synthetic polypeptide
  VL of XENP021407
DIQMTQSPAFLSVTPGEKVTITCQASQDIGNYLNWFQQKPDQTVKLLIYYTSRLHSGVPSRFSGSGSGTDYTFTISSLEAEDAATYFCQQTNTLPYTFGGGTKVEIK

SEQ ID NO: 26931 - protein, 11 aa, Artificial Sequence
  Description of Artificial Sequence: Synthetic peptide
  XENP021407 vlCDR1
QASQDIGNYLN

SEQ ID NO: 26932 - protein, 7 aa, Artificial Sequence
  Description of Artificial Sequence: Synthetic peptide
  XENP021407 vlCDR2
YTSRLHS

SEQ ID NO: 26933 - protein, 9 aa, Artificial Sequence
  Description of Artificial Sequence: Synthetic peptide
  XENP021407 vlCDR3
QQTNTLPYT

SEQ ID NO: 26934 - protein, 223 aa, Artificial Sequence; identical to SEQ ID NO: 25194
  Description of Artificial Sequence: Synthetic polypeptide
  XENP021408 2A11_H1_L2.57_Fab Heavy Chain

SEQ ID NO: 26935 - protein, 118 aa, Artificial Sequence; identical to SEQ ID NO: 17236
  Description of Artificial Sequence: Synthetic polypeptide
  VH of XENP021408

SEQ ID NO: 26936 - protein, 5 aa, Artificial Sequence
  Description of Artificial Sequence: Synthetic peptide
  XENP021408 vhCDR1
DYYMH

SEQ ID NO: 26937 - protein, 17 aa, Artificial Sequence
  Description of Artificial Sequence: Synthetic peptide
  XENP021408 vhCDR2
WIDPENGDTEYAPKFQG

SEQ ID NO: 26938 - protein, 9 aa, Artificial Sequence
  Description of Artificial Sequence: Synthetic peptide
  XENP021408 vhCDR3
RGVRQALDY

SEQ ID NO: 26939 - protein, 214 aa, Artificial Sequence
  Description of Artificial Sequence: Synthetic polypeptide
  XENP021408 2A11_H1_L2.57_Fab Light Chain
DIQMTQSPAFLSVTPGEKVTITCQASQDIGNYLNWFQQKPDQTVKLLIYYTSRLHSGVPSRFSGSGSGTDYTFTISSLEAEDAATYFCQQGQTLPYTFGGGTKVEIKRTVAAPSVFIFPPSDEQLKSGTASVVCLLNNFYPREAKVQWKVDNALQSGNSQESVTEQDSKDSTYSLSSTLTLSKADYEKHKVYACEVTHQGLSSPVTKSFNRGEC

SEQ ID NO: 26940 - protein, 107 aa, Artificial Sequence
  Description of Artificial Sequence: Synthetic polypeptide
  VL of XENP021408
DIQMTQSPAFLSVTPGEKVTITCQASQDIGNYLNWFQQKPDQTVKLLIYYTSRLHSGVPSRFSGSGSGTDYTFTISSLEAEDAATYFCQQGQTLPYTFGGGTKVEIK

SEQ ID NO: 26941 - protein, 11 aa, Artificial Sequence
  Description of Artificial Sequence: Synthetic peptide
  XENP021408 vlCDR1
QASQDIGNYLN

SEQ ID NO: 26942 - protein, 7 aa, Artificial Sequence
  Description of Artificial Sequence: Synthetic peptide
  XENP021408 vlCDR2
YTSRLHS

SEQ ID NO: 26943 - protein, 9 aa, Artificial Sequence
  Description of Artificial Sequence: Synthetic peptide
  XENP021408 vlCDR3
QQGQTLPYT

SEQ ID NO: 26944 - protein, 223 aa, Artificial Sequence; identical to SEQ ID NO: 25194
  Description of Artificial Sequence: Synthetic polypeptide
  XENP021409 2A11_H1_L2.58_Fab Heavy Chain

SEQ ID NO: 26945 - protein, 118 aa, Artificial Sequence; identical to SEQ ID NO: 17236
  Description of Artificial Sequence: Synthetic polypeptide
  VH of XENP021409

SEQ ID NO: 26946 - protein, 5 aa, Artificial Sequence
  Description of Artificial Sequence: Synthetic peptide
  XENP021409 vhCDR1
DYYMH

SEQ ID NO: 26947 - protein, 17 aa, Artificial Sequence
  Description of Artificial Sequence: Synthetic peptide
  XENP021409 vhCDR2
WIDPENGDTEYAPKFQG

SEQ ID NO: 26948 - protein, 9 aa, Artificial Sequence
  Description of Artificial Sequence: Synthetic peptide
  XENP021409 vhCDR3
RGVRQALDY

SEQ ID NO: 26949 - protein, 214 aa, Artificial Sequence
  Description of Artificial Sequence: Synthetic polypeptide
  XENP021409 2A11_H1_L2.58_Fab Light Chain
DIQMTQSPAFLSVTPGEKVTITCQASQDIGNYLNWFQQKPDQTVKLLIYYTSRLHSGVPSRFSGSGSGTDYTFTISSLEAEDAATYFCQQGHTLPYTFGGGTKVEIKRTVAAPSVFIFPPSDEQLKSGTASVVCLLNNFYPREAKVQWKVDNALQSGNSQESVTEQDSKDSTYSLSSTLTLSKADYEKHKVYACEVTHQGLSSPVTKSFNRGEC

SEQ ID NO: 26950 - protein, 107 aa, Artificial Sequence
  Description of Artificial Sequence: Synthetic polypeptide
  VL of XENP021409
DIQMTQSPAFLSVTPGEKVTITCQASQDIGNYLNWFQQKPDQTVKLLIYYTSRLHSGVPSRFSGSGSGTDYTFTISSLEAEDAATYFCQQGHTLPYTFGGGTKVEIK

SEQ ID NO: 26951 - protein, 11 aa, Artificial Sequence
  Description of Artificial Sequence: Synthetic peptide
  XENP021409 vlCDR1
QASQDIGNYLN

SEQ ID NO: 26952 - protein, 7 aa, Artificial Sequence
  Description of Artificial Sequence: Synthetic peptide
  XENP021409 vlCDR2
YTSRLHS

SEQ ID NO: 26953 - protein, 9 aa, Artificial Sequence
  Description of Artificial Sequence: Synthetic peptide
  XENP021409 vlCDR3
QQGHTLPYT

SEQ ID NO: 26954 - protein, 223 aa, Artificial Sequence; identical to SEQ ID NO: 25194
  Description of Artificial Sequence: Synthetic polypeptide
  XENP021410 2A11_H1_L2.59_Fab Heavy Chain

SEQ ID NO: 26955 - protein, 118 aa, Artificial Sequence; identical to SEQ ID NO: 17236
  Description of Artificial Sequence: Synthetic polypeptide
  VH of XENP021410

SEQ ID NO: 26956 - protein, 5 aa, Artificial Sequence
  Description of Artificial Sequence: Synthetic peptide
  XENP021410 vhCDR1
DYYMH

SEQ ID NO: 26957 - protein, 17 aa, Artificial Sequence
  Description of Artificial Sequence: Synthetic peptide
  XENP021410 vhCDR2
WIDPENGDTEYAPKFQG

SEQ ID NO: 26958 - protein, 9 aa, Artificial Sequence
  Description of Artificial Sequence: Synthetic peptide
  XENP021410 vhCDR3
RGVRQALDY

SEQ ID NO: 26959 - protein, 214 aa, Artificial Sequence
  Description of Artificial Sequence: Synthetic polypeptide
  XENP021410 2A11_H1_L2.59_Fab Light Chain
DIQMTQSPAFLSVTPGEKVTITCQASQDIGNYLNWFQQKPDQTVKLLIYYTSRLHSGVPSRFSGSGSGTDYTFTISSLEAEDAATYFCQQGETLPYTFGGGTKVEIKRTVAAPSVFIFPPSDEQLKSGTASVVCLLNNFYPREAKVQWKVDNALQSGNSQESVTEQDSKDSTYSLSSTLTLSKADYEKHKVYACEVTHQGLSSPVTKSFNRGEC

SEQ ID NO: 26960 - protein, 107 aa, Artificial Sequence
  Description of Artificial Sequence: Synthetic polypeptide
  VL of XENP021410
DIQMTQSPAFLSVTPGEKVTITCQASQDIGNYLNWFQQKPDQTVKLLIYYTSRLHSGVPSRFSGSGSGTDYTFTISSLEAEDAATYFCQQGETLPYTFGGGTKVEIK

SEQ ID NO: 26961 - protein, 11 aa, Artificial Sequence
  Description of Artificial Sequence: Synthetic peptide
  XENP021410 vlCDR1
QASQDIGNYLN

SEQ ID NO: 26962 - protein, 7 aa, Artificial Sequence
  Description of Artificial Sequence: Synthetic peptide
  XENP021410 vlCDR2
YTSRLHS

SEQ ID NO: 26963 - protein, 9 aa, Artificial Sequence
  Description of Artificial Sequence: Synthetic peptide
  XENP021410 vlCDR3
QQGETLPYT

SEQ ID NO: 26964 - protein, 223 aa, Artificial Sequence; identical to SEQ ID NO: 25194
  Description of Artificial Sequence: Synthetic polypeptide
  XENP021411 2A11_H1_L2.60_Fab Heavy Chain

SEQ ID NO: 26965 - protein, 118 aa, Artificial Sequence; identical to SEQ ID NO: 17236
  Description of Artificial Sequence: Synthetic polypeptide
  VH of XENP021411

SEQ ID NO: 26966 - protein, 5 aa, Artificial Sequence
  Description of Artificial Sequence: Synthetic peptide
  XENP021411 vhCDR1
DYYMH

SEQ ID NO: 26967 - protein, 17 aa, Artificial Sequence
  Description of Artificial Sequence: Synthetic peptide
  XENP021411 vhCDR2
WIDPENGDTEYAPKFQG

SEQ ID NO: 26968 - protein, 9 aa, Artificial Sequence
  Description of Artificial Sequence: Synthetic peptide
  XENP021411 vhCDR3
RGVRQALDY

SEQ ID NO: 26969 - protein, 214 aa, Artificial Sequence
  Description of Artificial Sequence: Synthetic polypeptide
  XENP021411 2A11_H1_L2.60_Fab Light Chain
DIQMTQSPAFLSVTPGEKVTITCQASQDIGNYLNWFQQKPDQTVKLLIYYTSRLHSGVPSRFSGSGSGTDYTFTISSLEAEDAATYFCQQGSTLPYTFGGGTKVEIKRTVAAPSVFIFPPSDEQLKSGTASVVCLLNNFYPREAKVQWKVDNALQSGNSQESVTEQDSKDSTYSLSSTLTLSKADYEKHKVYACEVTHQGLSSPVTKSFNRGEC

SEQ ID NO: 26970 - protein, 107 aa, Artificial Sequence
  Description of Artificial Sequence: Synthetic polypeptide
  VL of XENP021411
DIQMTQSPAFLSVTPGEKVTITCQASQDIGNYLNWFQQKPDQTVKLLIYYTSRLHSGVPSRFSGSGSGTDYTFTISSLEAEDAATYFCQQGSTLPYTFGGGTKVEIK

SEQ ID NO: 26971 - protein, 11 aa, Artificial Sequence
  Description of Artificial Sequence: Synthetic peptide
  XENP021411 vlCDR1
QASQDIGNYLN

SEQ ID NO: 26972 - protein, 7 aa, Artificial Sequence
  Description of Artificial Sequence: Synthetic peptide
  XENP021411 vlCDR2
YTSRLHS

SEQ ID NO: 26973 - protein, 9 aa, Artificial Sequence
  Description of Artificial Sequence: Synthetic peptide
  XENP021411 vlCDR3
QQGSTLPYT

SEQ ID NO: 26974 - protein, 223 aa, Artificial Sequence; identical to SEQ ID NO: 25194
  Description of Artificial Sequence: Synthetic polypeptide
  XENP021412 2A11_H1_L2.61_Fab Heavy Chain

SEQ ID NO: 26975 - protein, 118 aa, Artificial Sequence; identical to SEQ ID NO: 17236
  Description of Artificial Sequence: Synthetic polypeptide
  VH of XENP021412

SEQ ID NO: 26976 - protein, 5 aa, Artificial Sequence
  Description of Artificial Sequence: Synthetic peptide
  XENP021412 vhCDR1
DYYMH

SEQ ID NO: 26977 - protein, 17 aa, Artificial Sequence
  Description of Artificial Sequence: Synthetic peptide
  XENP021412 vhCDR2
WIDPENGDTEYAPKFQG

SEQ ID NO: 26978 - protein, 9 aa, Artificial Sequence
  Description of Artificial Sequence: Synthetic peptide
  XENP021412 vhCDR3
RGVRQALDY

SEQ ID NO: 26979 - protein, 214 aa, Artificial Sequence
  Description of Artificial Sequence: Synthetic polypeptide
  XENP021412 2A11_H1_L2.61_Fab Light Chain
DIQMTQSPAFLSVTPGEKVTITCQASQDIGNYLNWFQQKPDQTVKLLIYYTSRLHSGVPSRFSGSGSGTDYTFTISSLEAEDAATYFCQQGRTLPYTFGGGTKVEIKRTVAAPSVFIFPPSDEQLKSGTASVVCLLNNFYPREAKVQWKVDNALQSGNSQESVTEQDSKDSTYSLSSTLTLSKADYEKHKVYACEVTHQGLSSPVTKSFNRGEC

SEQ ID NO: 26980 - protein, 107 aa, Artificial Sequence
  Description of Artificial Sequence: Synthetic polypeptide
  VL of XENP021412
DIQMTQSPAFLSVTPGEKVTITCQASQDIGNYLNWFQQKPDQTVKLLIYYTSRLHSGVPSRFSGSGSGTDYTFTISSLEAEDAATYFCQQGRTLPYTFGGGTKVEIK

SEQ ID NO: 26981 - protein, 11 aa, Artificial Sequence
  Description of Artificial Sequence: Synthetic peptide
  XENP021412 vlCDR1
QASQDIGNYLN

SEQ ID NO: 26982 - protein, 7 aa, Artificial Sequence
  Description of Artificial Sequence: Synthetic peptide
  XENP021412 vlCDR2
YTSRLHS

SEQ ID NO: 26983 - protein, 9 aa, Artificial Sequence
  Description of Artificial Sequence: Synthetic peptide
  XENP021412 vlCDR3
QQGRTLPYT

SEQ ID NO: 26984 - protein, 223 aa, Artificial Sequence; identical to SEQ ID NO: 25194
  Description of Artificial Sequence: Synthetic polypeptide
  XENP021413 2A11_H1_L2.62_Fab Heavy Chain

SEQ ID NO: 26985 - protein, 118 aa, Artificial Sequence; identical to SEQ ID NO: 17236
  Description of Artificial Sequence: Synthetic polypeptide
  VH of XENP021413

SEQ ID NO: 26986 - protein, 5 aa, Artificial Sequence
  Description of Artificial Sequence: Synthetic peptide
  XENP021413 vhCDR1
DYYMH

SEQ ID NO: 26987 - protein, 17 aa, Artificial Sequence
  Description of Artificial Sequence: Synthetic peptide
  XENP021413 vhCDR2
WIDPENGDTEYAPKFQG

SEQ ID NO: 26988 - protein, 9 aa, Artificial Sequence
  Description of Artificial Sequence: Synthetic peptide
  XENP021413 vhCDR3
RGVRQALDY

SEQ ID NO: 26989 - protein, 214 aa, Artificial Sequence
  Description of Artificial Sequence: Synthetic polypeptide
  XENP021413 2A11_H1_L2.62_Fab Light Chain
DIQMTQSPAFLSVTPGEKVTITCQASQDIGNYLNWFQQKPDQTVKLLIYYTSRLHSGVPSRFSGSGSGTDYTFTISSLEAEDAATYFCQQGLTLPYTFGGGTKVEIKRTVAAPSVFIFPPSDEQLKSGTASVVCLLNNFYPREAKVQWKVDNALQSGNSQESVTEQDSKDSTYSLSSTLTLSKADYEKHKVYACEVTHQGLSSPVTKSFNRGEC

SEQ ID NO: 26990 - protein, 107 aa, Artificial Sequence
  Description of Artificial Sequence: Synthetic polypeptide
  VL of XENP021413
DIQMTQSPAFLSVTPGEKVTITCQASQDIGNYLNWFQQKPDQTVKLLIYYTSRLHSGVPSRFSGSGSGTDYTFTISSLEAEDAATYFCQQGLTLPYTFGGGTKVEIK

SEQ ID NO: 26991 - protein, 11 aa, Artificial Sequence
  Description of Artificial Sequence: Synthetic peptide
  XENP021413 vlCDR1
QASQDIGNYLN

SEQ ID NO: 26992 - protein, 7 aa, Artificial Sequence
  Description of Artificial Sequence: Synthetic peptide
  XENP021413 vlCDR2
YTSRLHS

SEQ ID NO: 26993 - protein, 9 aa, Artificial Sequence
  Description of Artificial Sequence: Synthetic peptide
  XENP021413 vlCDR3
QQGLTLPYT

SEQ ID NO: 26994 - protein, 223 aa, Artificial Sequence; identical to SEQ ID NO: 25194
  Description of Artificial Sequence: Synthetic polypeptide
  XENP021414 2A11_H1_L2.63_Fab Heavy Chain

SEQ ID NO: 26995 - protein, 118 aa, Artificial Sequence; identical to SEQ ID NO: 17236
  Description of Artificial Sequence: Synthetic polypeptide
  VH of XENP021414

SEQ ID NO: 26996 - protein, 5 aa, Artificial Sequence
  Description of Artificial Sequence: Synthetic peptide
  XENP021414 vhCDR1
DYYMH

SEQ ID NO: 26997 - protein, 17 aa, Artificial Sequence
  Description of Artificial Sequence: Synthetic peptide
  XENP021414 vhCDR2
WIDPENGDTEYAPKFQG

SEQ ID NO: 26998 - protein, 9 aa, Artificial Sequence
  Description of Artificial Sequence: Synthetic peptide
  XENP021414 vhCDR3
RGVRQALDY

SEQ ID NO: 26999 - protein, 214 aa, Artificial Sequence
  Description of Artificial Sequence: Synthetic polypeptide
  XENP021414 2A11_H1_L2.63_Fab Light Chain
DIQMTQSPAFLSVTPGEKVTITCQASQDIGNYLNWFQQKPDQTVKLLIYYTSRLHSGVPSRFSGSGSGTDYTFTISSLEAEDAATYFCQQGTTLPYTFGGGTKVEIKRTVAAPSVFIFPPSDEQLKSGTASVVCLLNNFYPREAKVQWKVDNALQSGNSQESVTEQDSKDSTYSLSSTLTLSKADYEKHKVYACEVTHQGLSSPVTKSFNRGEC

SEQ ID NO: 27000 - protein, 107 aa, Artificial Sequence
  Description of Artificial Sequence: Synthetic polypeptide
  VL of XENP021414
DIQMTQSPAFLSVTPGEKVTITCQASQDIGNYLNWFQQKPDQTVKLLIYYTSRLHSGVPSRFSGSGSGTDYTFTISSLEAEDAATYFCQQGTTLPYTFGGGTKVEIK

SEQ ID NO: 27001 - protein, 11 aa, Artificial Sequence
  Description of Artificial Sequence: Synthetic peptide
  XENP021414 vlCDR1
QASQDIGNYLN

SEQ ID NO: 27002 - protein, 7 aa, Artificial Sequence
  Description of Artificial Sequence: Synthetic peptide
  XENP021414 vlCDR2
YTSRLHS

SEQ ID NO: 27003 - protein, 9 aa, Artificial Sequence
  Description of Artificial Sequence: Synthetic peptide
  XENP021414 vlCDR3
QQGTTLPYT

SEQ ID NO: 27004 - protein, 223 aa, Artificial Sequence; identical to SEQ ID NO: 25194
  Description of Artificial Sequence: Synthetic polypeptide
  XENP021415 2A11_H1_L2.64_Fab Heavy Chain

SEQ ID NO: 27005 - protein, 118 aa, Artificial Sequence; identical to SEQ ID NO: 17236
  Description of Artificial Sequence: Synthetic polypeptide
  VH of XENP021415

SEQ ID NO: 27006 - protein, 5 aa, Artificial Sequence
  Description of Artificial Sequence: Synthetic peptide
  XENP021415 vhCDR1
DYYMH

SEQ ID NO: 27007 - protein, 17 aa, Artificial Sequence
  Description of Artificial Sequence: Synthetic peptide
  XENP021415 vhCDR2
WIDPENGDTEYAPKFQG

SEQ ID NO: 27008 - protein, 9 aa, Artificial Sequence
  Description of Artificial Sequence: Synthetic peptide
  XENP021415 vhCDR3
RGVRQALDY

SEQ ID NO: 27009 - protein, 214 aa, Artificial Sequence
  Description of Artificial Sequence: Synthetic polypeptide
  XENP021415 2A11_H1_L2.64_Fab Light Chain
DIQMTQSPAFLSVTPGEKVTITCQASQDIGNYLNWFQQKPDQTVKLLIYYTSRLHSGVPSRFSGSGSGTDYTFTISSLEAEDAATYFCQQGGTLPYTFGGGTKVEIKRTVAAPSVFIFPPSDEQLKSGTASVVCLLNNFYPREAKVQWKVDNALQSGNSQESVTEQDSKDSTYSLSSTLTLSKADYEKHKVYACEVTHQGLSSPVTKSFNRGEC

SEQ ID NO: 27010 - protein, 107 aa, Artificial Sequence
  Description of Artificial Sequence: Synthetic polypeptide
  VL of XENP021415
DIQMTQSPAFLSVTPGEKVTITCQASQDIGNYLNWFQQKPDQTVKLLIYYTSRLHSGVPSRFSGSGSGTDYTFTISSLEAEDAATYFCQQGGTLPYTFGGGTKVEIK

SEQ ID NO: 27011 - protein, 11 aa, Artificial Sequence
  Description of Artificial Sequence: Synthetic peptide
  XENP021415 vlCDR1
QASQDIGNYLN

SEQ ID NO: 27012 - protein, 7 aa, Artificial Sequence
  Description of Artificial Sequence: Synthetic peptide
  XENP021415 vlCDR2
YTSRLHS

SEQ ID NO: 27013 - protein, 9 aa, Artificial Sequence
  Description of Artificial Sequence: Synthetic peptide
  XENP021415 vlCDR3
QQGGTLPYT

SEQ ID NO: 27014 - protein, 223 aa, Artificial Sequence; identical to SEQ ID NO: 25194
  Description of Artificial Sequence: Synthetic polypeptide
  XENP021416 2A11_H1_L2.65_Fab Heavy Chain

SEQ ID NO: 27015 - protein, 118 aa, Artificial Sequence; identical to SEQ ID NO: 17236
  Description of Artificial Sequence: Synthetic polypeptide
  VH of XENP021416

SEQ ID NO: 27016 - protein, 5 aa, Artificial Sequence
  Description of Artificial Sequence: Synthetic peptide
  XENP021416 vhCDR1
DYYMH

SEQ ID NO: 27017 - protein, 17 aa, Artificial Sequence
  Description of Artificial Sequence: Synthetic peptide
  XENP021416 vhCDR2
WIDPENGDTEYAPKFQG

SEQ ID NO: 27018 - protein, 9 aa, Artificial Sequence
  Description of Artificial Sequence: Synthetic peptide
  XENP021416 vhCDR3
RGVRQALDY

SEQ ID NO: 27019 - protein, 214 aa, Artificial Sequence
  Description of Artificial Sequence: Synthetic polypeptide
  XENP021416 2A11_H1_L2.65_Fab Light Chain
DIQMTQSPAFLSVTPGEKVTITCQASQDIGNYLNWFQQKPDQTVKLLIYYTSRLHSGVPSRFSGSGSGTDYTFTISSLEAEDAATYFCQQGYTLPYTFGGGTKVEIKRTVAAPSVFIFPPSDEQLKSGTASVVCLLNNFYPREAKVQWKVDNALQSGNSQESVTEQDSKDSTYSLSSTLTLSKADYEKHKVYACEVTHQGLSSPVTKSFNRGEC

SEQ ID NO: 27020 - protein, 107 aa, Artificial Sequence
  Description of Artificial Sequence: Synthetic polypeptide
  VL of XENP021416
DIQMTQSPAFLSVTPGEKVTITCQASQDIGNYLNWFQQKPDQTVKLLIYYTSRLHSGVPSRFSGSGSGTDYTFTISSLEAEDAATYFCQQGYTLPYTFGGGTKVEIK

SEQ ID NO: 27021 - protein, 11 aa, Artificial Sequence
  Description of Artificial Sequence: Synthetic peptide
  XENP021416 vlCDR1
QASQDIGNYLN

SEQ ID NO: 27022 - protein, 7 aa, Artificial Sequence
  Description of Artificial Sequence: Synthetic peptide
  XENP021416 vlCDR2
YTSRLHS

SEQ ID NO: 27023 - protein, 9 aa, Artificial Sequence
  Description of Artificial Sequence: Synthetic peptide
  XENP021416 vlCDR3
QQGYTLPYT

SEQ ID NO: 27024 - protein, 223 aa, Artificial Sequence; identical to SEQ ID NO: 25194
  Description of Artificial Sequence: Synthetic polypeptide
  XENP021417 2A11_H1_L2.66_Fab Heavy Chain

SEQ ID NO: 27025 - protein, 118 aa, Artificial Sequence; identical to SEQ ID NO: 17236
  Description of Artificial Sequence: Synthetic polypeptide
  VH of XENP021417

SEQ ID NO: 27026 - protein, 5 aa, Artificial Sequence
  Description of Artificial Sequence: Synthetic peptide
  XENP021417 vhCDR1
DYYMH

SEQ ID NO: 27027 - protein, 17 aa, Artificial Sequence
  Description of Artificial Sequence: Synthetic peptide
  XENP021417 vhCDR2
WIDPENGDTEYAPKFQG

SEQ ID NO: 27028 - protein, 9 aa, Artificial Sequence
  Description of Artificial Sequence: Synthetic peptide
  XENP021417 vhCDR3
RGVRQALDY

SEQ ID NO: 27029 - protein, 214 aa, Artificial Sequence
  Description of Artificial Sequence: Synthetic polypeptide
  XENP021417 2A11_H1_L2.66_Fab Light Chain
DIQMTQSPAFLSVTPGEKVTITCQASQDIGNYLNWFQQKPDQTVKLLIYYTSRLHSGVPSRFSGSGSGTDYTFTISSLEAEDAATYFCQQGNVLPYTFGGGTKVEIKRTVAAPSVFIFPPSDEQLKSGTASVVCLLNNFYPREAKVQWKVDNALQSGNSQESVTEQDSKDSTYSLSSTLTLSKADYEKHKVYACEVTHQGLSSPVTKSFNRGEC

SEQ ID NO: 27030 - protein, 107 aa, Artificial Sequence
  Description of Artificial Sequence: Synthetic polypeptide
  VL of XENP021417
DIQMTQSPAFLSVTPGEKVTITCQASQDIGNYLNWFQQKPDQTVKLLIYYTSRLHSGVPSRFSGSGSGTDYTFTISSLEAEDAATYFCQQGNVLPYTFGGGTKVEIK

SEQ ID NO: 27031 - protein, 11 aa, Artificial Sequence
  Description of Artificial Sequence: Synthetic peptide
  XENP021417 vlCDR1
QASQDIGNYLN

SEQ ID NO: 27032 - protein, 7 aa, Artificial Sequence
  Description of Artificial Sequence: Synthetic peptide
  XENP021417 vlCDR2
YTSRLHS

SEQ ID NO: 27033 - protein, 9 aa, Artificial Sequence
  Description of Artificial Sequence: Synthetic peptide
  XENP021417 vlCDR3
QQGNVLPYT

SEQ ID NO: 27034 - protein, 223 aa, Artificial Sequence; identical to SEQ ID NO: 25194
  Description of Artificial Sequence: Synthetic polypeptide
  XENP021418 2A11_H1_L2.67_Fab Heavy Chain

SEQ ID NO: 27035 - protein, 118 aa, Artificial Sequence; identical to SEQ ID NO: 17236
  Description of Artificial Sequence: Synthetic polypeptide
  VH of XENP021418

SEQ ID NO: 27036 - protein, 5 aa, Artificial Sequence
  Description of Artificial Sequence: Synthetic peptide
  XENP021418 vhCDR1
DYYMH

SEQ ID NO: 27037 - protein, 17 aa, Artificial Sequence
  Description of Artificial Sequence: Synthetic peptide
  XENP021418 vhCDR2
WIDPENGDTEYAPKFQG

SEQ ID NO: 27038 - protein, 9 aa, Artificial Sequence
  Description of Artificial Sequence: Synthetic peptide
  XENP021418 vhCDR3
RGVRQALDY

SEQ ID NO: 27039 - protein, 214 aa, Artificial Sequence
  Description of Artificial Sequence: Synthetic polypeptide
  XENP021418 2A11_H1_L2.67_Fab Light Chain
DIQMTQSPAFLSVTPGEKVTITCQASQDIGNYLNWFQQKPDQTVKLLIYYTSRLHSGVPSRFSGSGSGTDYTFTISSLEAEDAATYFCQQGNSLPYTFGGGTKVEIKRTVAAPSVFIFPPSDEQLKSGTASVVCLLNNFYPREAKVQWKVDNALQSGNSQESVTEQDSKDSTYSLSSTLTLSKADYEKHKVYACEVTHQGLSSPVTKSFNRGEC

SEQ ID NO: 27040 - protein, 107 aa, Artificial Sequence
  Description of Artificial Sequence: Synthetic polypeptide
  VL of XENP021418
DIQMTQSPAFLSVTPGEKVTITCQASQDIGNYLNWFQQKPDQTVKLLIYYTSRLHSGVPSRFSGSGSGTDYTFTISSLEAEDAATYFCQQGNSLPYTFGGGTKVEIK

SEQ ID NO: 27041 - protein, 11 aa, Artificial Sequence
  Description of Artificial Sequence: Synthetic peptide
  XENP021418 vlCDR1
QASQDIGNYLN

SEQ ID NO: 27042 - protein, 7 aa, Artificial Sequence
  Description of Artificial Sequence: Synthetic peptide
  XENP021418 vlCDR2
YTSRLHS

SEQ ID NO: 27043 - protein, 9 aa, Artificial Sequence
  Description of Artificial Sequence: Synthetic peptide
  XENP021418 vlCDR3
QQGNSLPYT

SEQ ID NO: 27044 - protein, 223 aa, Artificial Sequence; identical to SEQ ID NO: 25194
  Description of Artificial Sequence: Synthetic polypeptide
  XENP021419 2A11_H1_L2.68_Fab Heavy Chain

SEQ ID NO: 27045 - protein, 118 aa, Artificial Sequence; identical to SEQ ID NO: 17236
  Description of Artificial Sequence: Synthetic polypeptide
  VH of XENP021419

SEQ ID NO: 27046 - protein, 5 aa, Artificial Sequence
  Description of Artificial Sequence: Synthetic peptide
  XENP021419 vhCDR1
DYYMH

SEQ ID NO: 27047 - protein, 17 aa, Artificial Sequence
  Description of Artificial Sequence: Synthetic peptide
  XENP021419 vhCDR2
WIDPENGDTEYAPKFQG

SEQ ID NO: 27048 - protein, 9 aa, Artificial Sequence
  Description of Artificial Sequence: Synthetic peptide
  XENP021419 vhCDR3
RGVRQALDY

SEQ ID NO: 27049 - protein, 214 aa, Artificial Sequence
  Description of Artificial Sequence: Synthetic polypeptide
  XENP021419 2A11_H1_L2.68_Fab Light Chain
DIQMTQSPAFLSVTPGEKVTITCQASQDIGNYLNWFQQKPDQTVKLLIYYTSRLHSGVPSRFSGSGSGTDYTFTISSLEAEDAATYFCQQGNALPYTFGGGTKVEIKRTVAAPSVFIFPPSDEQLKSGTASVVCLLNNFYPREAKVQWKVDNALQSGNSQESVTEQDSKDSTYSLSSTLTLSKADYEKHKVYACEVTHQGLSSPVTKSFNRGEC

SEQ ID NO: 27050 - protein, 107 aa, Artificial Sequence
  Description of Artificial Sequence: Synthetic polypeptide
  VL of XENP021419
DIQMTQSPAFLSVTPGEKVTITCQASQDIGNYLNWFQQKPDQTVKLLIYYTSRLHSGVPSRFSGSGSGTDYTFTISSLEAEDAATYFCQQGNALPYTFGGGTKVEIK

SEQ ID NO: 27051 - protein, 11 aa, Artificial Sequence
  Description of Artificial Sequence: Synthetic peptide
  XENP021419 vlCDR1
QASQDIGNYLN

SEQ ID NO: 27052 - protein, 7 aa, Artificial Sequence
  Description of Artificial Sequence: Synthetic peptide
  XENP021419 vlCDR2
YTSRLHS

SEQ ID NO: 27053 - protein, 9 aa, Artificial Sequence
  Description of Artificial Sequence: Synthetic peptide
  XENP021419 vlCDR3
QQGNALPYT

SEQ ID NO: 27054 - protein, 223 aa, Artificial Sequence; identical to SEQ ID NO: 25194
  Description of Artificial Sequence: Synthetic polypeptide
  XENP021420 2A11_H1_L2.69_Fab Heavy Chain

SEQ ID NO: 27055 - protein, 118 aa, Artificial Sequence; identical to SEQ ID NO: 17236
  Description of Artificial Sequence: Synthetic polypeptide
  VH of XENP021420

SEQ ID NO: 27056 - protein, 5 aa, Artificial Sequence
  Description of Artificial Sequence: Synthetic peptide
  XENP021420 vhCDR1
DYYMH

SEQ ID NO: 27057 - protein, 17 aa, Artificial Sequence
  Description of Artificial Sequence: Synthetic peptide
  XENP021420 vhCDR2
WIDPENGDTEYAPKFQG

SEQ ID NO: 27058 - protein, 9 aa, Artificial Sequence
  Description of Artificial Sequence: Synthetic peptide
  XENP021420 vhCDR3
RGVRQALDY

SEQ ID NO: 27059 - protein, 214 aa, Artificial Sequence
  Description of Artificial Sequence: Synthetic polypeptide
  XENP021420 2A11_H1_L2.69_Fab Light Chain
DIQMTQSPAFLSVTPGEKVTITCQASQDIGNYLNWFQQKPDQTVKLLIYYTSRLHSGVPSRFSGSGSGTDYTFTISSLEAEDAATYFCQQGNILPYTFGGGTKVEIKRTVAAPSVFIFPPSDEQLKSGTASVVCLLNNFYPREAKVQWKVDNALQSGNSQESVTEQDSKDSTYSLSSTLTLSKADYEKHKVYACEVTHQGLSSPVTKSFNRGEC

SEQ ID NO: 27060 - protein, 107 aa, Artificial Sequence
  Description of Artificial Sequence: Synthetic polypeptide
  VL of XENP021420
DIQMTQSPAFLSVTPGEKVTITCQASQDIGNYLNWFQQKPDQTVKLLIYYTSRLHSGVPSRFSGSGSGTDYTFTISSLEAEDAATYFCQQGNILPYTFGGGTKVEIK

SEQ ID NO: 27061 - protein, 11 aa, Artificial Sequence
  Description of Artificial Sequence: Synthetic peptide
  XENP021420 vlCDR1
QASQDIGNYLN

SEQ ID NO: 27062 - protein, 7 aa, Artificial Sequence
  Description of Artificial Sequence: Synthetic peptide
  XENP021420 vlCDR2
YTSRLHS

SEQ ID NO: 27063 - protein, 9 aa, Artificial Sequence
  Description of Artificial Sequence: Synthetic peptide
  XENP021420 vlCDR3
QQGNILPYT

SEQ ID NO: 27064 - protein, 223 aa, Artificial Sequence; identical to SEQ ID NO: 25194
  Description of Artificial Sequence: Synthetic polypeptide
  XENP021421 2A11_H1_L2.70_Fab Heavy Chain

SEQ ID NO: 27065 - protein, 118 aa, Artificial Sequence; identical to SEQ ID NO: 17236
  Description of Artificial Sequence: Synthetic polypeptide
  VH of XENP021421

SEQ ID NO: 27066 - protein, 5 aa, Artificial Sequence
  Description of Artificial Sequence: Synthetic peptide
  XENP021421 vhCDR1
DYYMH

SEQ ID NO: 27067 - protein, 17 aa, Artificial Sequence
  Description of Artificial Sequence: Synthetic peptide
  XENP021421 vhCDR2
WIDPENGDTEYAPKFQG

SEQ ID NO: 27068 - protein, 9 aa, Artificial Sequence
  Description of Artificial Sequence: Synthetic peptide
  XENP021421 vhCDR3
RGVRQALDY

SEQ ID NO: 27069 - protein, 214 aa, Artificial Sequence
  Description of Artificial Sequence: Synthetic polypeptide
  XENP021421 2A11_H1_L2.70_Fab Light Chain
DIQMTQSPAFLSVTPGEKVTITCQASQDIGNYLNWFQQKPDQTVKLLIYYTSRLHSGVPSRFSGSGSGTDYTFTISSLEAEDAATYFCQQGNQLPYTFGGGTKVEIKRTVAAPSVFIFPPSDEQLKSGTASVVCLLNNFYPREAKVQWKVDNALQSGNSQESVTEQDSKDSTYSLSSTLTLSKADYEKHKVYACEVTHQGLSSPVTKSFNRGEC

SEQ ID NO: 27070 - protein, 107 aa, Artificial Sequence
  Description of Artificial Sequence: Synthetic polypeptide
  VL of XENP021421
DIQMTQSPAFLSVTPGEKVTITCQASQDIGNYLNWFQQKPDQTVKLLIYYTSRLHSGVPSRFSGSGSGTDYTFTISSLEAEDAATYFCQQGNQLPYTFGGGTKVEIK

SEQ ID NO: 27071 - protein, 11 aa, Artificial Sequence
  Description of Artificial Sequence: Synthetic peptide
  XENP021421 vlCDR1
QASQDIGNYLN

SEQ ID NO: 27072 - protein, 7 aa, Artificial Sequence
  Description of Artificial Sequence: Synthetic peptide
  XENP021421 vlCDR2
YTSRLHS

SEQ ID NO: 27073 - protein, 9 aa, Artificial Sequence
  Description of Artificial Sequence: Synthetic peptide
  XENP021421 vlCDR3
QQGNQLPYT

SEQ ID NO: 27074 - protein, 223 aa, Artificial Sequence; identical to SEQ ID NO: 25194
  Description of Artificial Sequence: Synthetic polypeptide
  XENP021422 2A11_H1_L2.71_Fab Heavy Chain

SEQ ID NO: 27075 - protein, 118 aa, Artificial Sequence; identical to SEQ ID NO: 17236
  Description of Artificial Sequence: Synthetic polypeptide
  VH of XENP021422

SEQ ID NO: 27076 - protein, 5 aa, Artificial Sequence
  Description of Artificial Sequence: Synthetic peptide
  XENP021422 vhCDR1
DYYMH

SEQ ID NO: 27077 - protein, 17 aa, Artificial Sequence
  Description of Artificial Sequence: Synthetic peptide
  XENP021422 vhCDR2
WIDPENGDTEYAPKFQG

SEQ ID NO: 27078 - protein, 9 aa, Artificial Sequence
  Description of Artificial Sequence: Synthetic peptide
  XENP021422 vhCDR3
RGVRQALDY

SEQ ID NO: 27079 - protein, 214 aa, Artificial Sequence
  Description of Artificial Sequence: Synthetic polypeptide
  XENP021422 2A11_H1_L2.71_Fab Light Chain
DIQMTQSPAFLSVTPGEKVTITCQASQDIGNYLNWFQQKPDQTVKLLIYYTSRLHSGVPSRFSGSGSGTDYTFTISSLEAEDAATYFCQQGNHLPYTFGGGTKVEIKRTVAAPSVFIFPPSDEQLKSGTASVVCLLNNFYPREAKVQWKVDNALQSGNSQESVTEQDSKDSTYSLSSTLTLSKADYEKHKVYACEVTHQGLSSPVTKSFNRGEC

SEQ ID NO: 27080 - protein, 107 aa, Artificial Sequence
  Description of Artificial Sequence: Synthetic polypeptide
  VL of XENP021422
DIQMTQSPAFLSVTPGEKVTITCQASQDIGNYLNWFQQKPDQTVKLLIYYTSRLHSGVPSRFSGSGSGTDYTFTISSLEAEDAATYFCQQGNHLPYTFGGGTKVEIK

SEQ ID NO: 27081 - protein, 11 aa, Artificial Sequence
  Description of Artificial Sequence: Synthetic peptide
  XENP021422 vlCDR1
QASQDIGNYLN

SEQ ID NO: 27082 - protein, 7 aa, Artificial Sequence
  Description of Artificial Sequence: Synthetic peptide
  XENP021422 vlCDR2
YTSRLHS

SEQ ID NO: 27083 - protein, 9 aa, Artificial Sequence
  Description of Artificial Sequence: Synthetic peptide
  XENP021422 vlCDR3
QQGNHLPYT

SEQ ID NO: 27084 - protein, 223 aa, Artificial Sequence; identical to SEQ ID NO: 25194
  Description of Artificial Sequence: Synthetic polypeptide
  XENP021423 2A11_H1_L2.72_Fab Heavy Chain

SEQ ID NO: 27085 - protein, 118 aa, Artificial Sequence; identical to SEQ ID NO: 17236
  Description of Artificial Sequence: Synthetic polypeptide
  VH of XENP021423

SEQ ID NO: 27086 - protein, 5 aa, Artificial Sequence
  Description of Artificial Sequence: Synthetic peptide
  XENP021423 vhCDR1
DYYMH

SEQ ID NO: 27087 - protein, 17 aa, Artificial Sequence
  Description of Artificial Sequence: Synthetic peptide
  XENP021423 vhCDR2
WIDPENGDTEYAPKFQG

SEQ ID NO: 27088 - protein, 9 aa, Artificial Sequence
  Description of Artificial Sequence: Synthetic peptide
  XENP021423 vhCDR3
RGVRQALDY

SEQ ID NO: 27089 - protein, 214 aa, Artificial Sequence
  Description of Artificial Sequence: Synthetic polypeptide
  XENP021423 2A11_H1_L2.72_Fab Light Chain
DIQMTQSPAFLSVTPGEKVTITCQASQDIGNYLNWFQQKPDQTVKLLIYYTSRLHSGVPSRFSGSGSGTDYTFTISSLEAEDAATYFCQQGNDLPYTFGGGTKVEIKRTVAAPSVFIFPPSDEQLKSGTASVVCLLNNFYPREAKVQWKVDNALQSGNSQESVTEQDSKDSTYSLSSTLTLSKADYEKHKVYACEVTHQGLSSPVTKSFNRGEC

SEQ ID NO: 27090 - protein, 107 aa, Artificial Sequence
  Description of Artificial Sequence: Synthetic polypeptide
  VL of XENP021423
DIQMTQSPAFLSVTPGEKVTITCQASQDIGNYLNWFQQKPDQTVKLLIYYTSRLHSGVPSRFSGSGSGTDYTFTISSLEAEDAATYFCQQGNDLPYTFGGGTKVEIK

SEQ ID NO: 27091 - protein, 11 aa, Artificial Sequence
  Description of Artificial Sequence: Synthetic peptide
  XENP021423 vlCDR1
QASQDIGNYLN

SEQ ID NO: 27092 - protein, 7 aa, Artificial Sequence
  Description of Artificial Sequence: Synthetic peptide
  XENP021423 vlCDR2
YTSRLHS

SEQ ID NO: 27093 - protein, 9 aa, Artificial Sequence
  Description of Artificial Sequence: Synthetic peptide
  XENP021423 vlCDR3
QQGNDLPYT

SEQ ID NO: 27094 - protein, 223 aa, Artificial Sequence; identical to SEQ ID NO: 25194
  Description of Artificial Sequence: Synthetic polypeptide
  XENP021424 2A11_H1_L2.73_Fab Heavy Chain

SEQ ID NO: 27095 - protein, 118 aa, Artificial Sequence; identical to SEQ ID NO: 17236
  Description of Artificial Sequence: Synthetic polypeptide
  VH of XENP021424

SEQ ID NO: 27096 - protein, 5 aa, Artificial Sequence
  Description of Artificial Sequence: Synthetic peptide
  XENP021424 vhCDR1
DYYMH

SEQ ID NO: 27097 - protein, 17 aa, Artificial Sequence
  Description of Artificial Sequence: Synthetic peptide
  XENP021424 vhCDR2
WIDPENGDTEYAPKFQG

SEQ ID NO: 27098 - protein, 9 aa, Artificial Sequence
  Description of Artificial Sequence: Synthetic peptide
  XENP021424 vhCDR3
RGVRQALDY

SEQ ID NO: 27099 - protein, 214 aa, Artificial Sequence
  Description of Artificial Sequence: Synthetic polypeptide
  XENP021424 2A11_H1_L2.73_Fab Light Chain
DIQMTQSPAFLSVTPGEKVTITCQASQDIGNYLNWFQQKPDQTVKLLIYYTSRLHSGVPSRFSGSGSGTDYTFTISSLEAEDAATYFCQQGNKLPYTFGGGTKVEIKRTVAAPSVFIFPPSDEQLKSGTASVVCLLNNFYPREAKVQWKVDNALQSGNSQESVTEQDSKDSTYSLSSTLTLSKADYEKHKVYACEVTHQGLSSPVTKSFNRGEC

SEQ ID NO: 27100 - protein, 107 aa, Artificial Sequence
  Description of Artificial Sequence: Synthetic polypeptide
  VL of XENP021424
DIQMTQSPAFLSVTPGEKVTITCQASQDIGNYLNWFQQKPDQTVKLLIYYTSRLHSGVPSRFSGSGSGTDYTFTISSLEAEDAATYFCQQGNKLPYTFGGGTKVEIK

SEQ ID NO: 27101 - protein, 11 aa, Artificial Sequence
  Description of Artificial Sequence: Synthetic peptide
  XENP021424 vlCDR1
QASQDIGNYLN

SEQ ID NO: 27102 - protein, 7 aa, Artificial Sequence
  Description of Artificial Sequence: Synthetic peptide
  XENP021424 vlCDR2
YTSRLHS

SEQ ID NO: 27103 - protein, 9 aa, Artificial Sequence
  Description of Artificial Sequence: Synthetic peptide
  XENP021424 vlCDR3
QQGNKLPYT

SEQ ID NO: 27104 - protein, 223 aa, Artificial Sequence; identical to SEQ ID NO: 25194
  Description of Artificial Sequence: Synthetic polypeptide
  XENP021425 2A11_H1_L2.74_Fab Heavy Chain

SEQ ID NO: 27105 - protein, 118 aa, Artificial Sequence; identical to SEQ ID NO: 17236
  Description of Artificial Sequence: Synthetic polypeptide
  VH of XENP021425

SEQ ID NO: 27106 - protein, 5 aa, Artificial Sequence
  Description of Artificial Sequence: Synthetic peptide
  XENP021425 vhCDR1
DYYMH

SEQ ID NO: 27107 - protein, 17 aa, Artificial Sequence
  Description of Artificial Sequence: Synthetic peptide
  XENP021425 vhCDR2
WIDPENGDTEYAPKFQG

SEQ ID NO: 27108 - protein, 9 aa, Artificial Sequence
  Description of Artificial Sequence: Synthetic peptide
  XENP021425 vhCDR3
RGVRQALDY

SEQ ID NO: 27109 - protein, 214 aa, Artificial Sequence
  Description of Artificial Sequence: Synthetic polypeptide
  XENP021425 2A11_H1_L2.74_Fab Light Chain
DIQMTQSPAFLSVTPGEKVTITCQASQDIGNYLNWFQQKPDQTVKLLIYYTSRLHSGVPSRFSGSGSGTDYTFTISSLEAEDAATYFCQQGNYLPYTFGGGTKVEIKRTVAAPSVFIFPPSDEQLKSGTASVVCLLNNFYPREAKVQWKVDNALQSGNSQESVTEQDSKDSTYSLSSTLTLSKADYEKHKVYACEVTHQGLSSPVTKSFNRGEC

SEQ ID NO: 27110 - protein, 107 aa, Artificial Sequence
  Description of Artificial Sequence: Synthetic polypeptide
  VL of XENP021425
DIQMTQSPAFLSVTPGEKVTITCQASQDIGNYLNWFQQKPDQTVKLLIYYTSRLHSGVPSRFSGSGSGTDYTFTISSLEAEDAATYFCQQGNYLPYTFGGGTKVEIK

SEQ ID NO: 27111 - protein, 11 aa, Artificial Sequence
  Description of Artificial Sequence: Synthetic peptide
  XENP021425 vlCDR1
QASQDIGNYLN

SEQ ID NO: 27112 - protein, 7 aa, Artificial Sequence
  Description of Artificial Sequence: Synthetic peptide
  XENP021425 vlCDR2
YTSRLHS

SEQ ID NO: 27113 - protein, 9 aa, Artificial Sequence
  Description of Artificial Sequence: Synthetic peptide
  XENP021425 vlCDR3
QQGNYLPYT

SEQ ID NO: 27114 - protein, 223 aa, Artificial Sequence; identical to SEQ ID NO: 25194
  Description of Artificial Sequence: Synthetic polypeptide
  XENP021426 2A11_H1_L2.75_Fab Heavy Chain

SEQ ID NO: 27115 - protein, 118 aa, Artificial Sequence; identical to SEQ ID NO: 17236
  Description of Artificial Sequence: Synthetic polypeptide
  VH of XENP021426

SEQ ID NO: 27116 - protein, 5 aa, Artificial Sequence
  Description of Artificial Sequence: Synthetic peptide
  XENP021426 vhCDR1
DYYMH

SEQ ID NO: 27117 - protein, 17 aa, Artificial Sequence
  Description of Artificial Sequence: Synthetic peptide
  XENP021426 vhCDR2
WIDPENGDTEYAPKFQG

SEQ ID NO: 27118 - protein, 9 aa, Artificial Sequence
  Description of Artificial Sequence: Synthetic peptide
  XENP021426 vhCDR3
RGVRQALDY

SEQ ID NO: 27119 - protein, 214 aa, Artificial Sequence
  Description of Artificial Sequence: Synthetic polypeptide
  XENP021426 2A11_H1_L2.75_Fab Light Chain
DIQMTQSPAFLSVTPGEKVTITCQASQDIGNYLNWFQQKPDQTVKLLIYYTSRLHSGVPSRFSGSGSGTDYTFTISSLEAEDAATYFCQQGNTIPYTFGGGTKVEIKRTVAAPSVFIFPPSDEQLKSGTASVVCLLNNFYPREAKVQWKVDNALQSGNSQESVTEQDSKDSTYSLSSTLTLSKADYEKHKVYACEVTHQGLSSPVTKSFNRGEC

SEQ ID NO: 27120 - protein, 107 aa, Artificial Sequence
  Description of Artificial Sequence: Synthetic polypeptide
  VL of XENP021426
DIQMTQSPAFLSVTPGEKVTITCQASQDIGNYLNWFQQKPDQTVKLLIYYTSRLHSGVPSRFSGSGSGTDYTFTISSLEAEDAATYFCQQGNTIPYTFGGGTKVEIK

SEQ ID NO: 27121 - protein, 11 aa, Artificial Sequence
  Description of Artificial Sequence: Synthetic peptide
  XENP021426 vlCDR1
QASQDIGNYLN

SEQ ID NO: 27122 - protein, 7 aa, Artificial Sequence
  Description of Artificial Sequence: Synthetic peptide
  XENP021426 vlCDR2
YTSRLHS

SEQ ID NO: 27123 - protein, 9 aa, Artificial Sequence
  Description of Artificial Sequence: Synthetic peptide
  XENP021426 vlCDR3
QQGNTIPYT

SEQ ID NO: 27124 - protein, 223 aa, Artificial Sequence; identical to SEQ ID NO: 25194
  Description of Artificial Sequence: Synthetic polypeptide
  XENP021427 2A11_H1_L2.76_Fab Heavy Chain

SEQ ID NO: 27125 - protein, 118 aa, Artificial Sequence; identical to SEQ ID NO: 17236
  Description of Artificial Sequence: Synthetic polypeptide
  VH of XENP021427

SEQ ID NO: 27126 - protein, 5 aa, Artificial Sequence
  Description of Artificial Sequence: Synthetic peptide
  XENP021427 vhCDR1
DYYMH

SEQ ID NO: 27127 - protein, 17 aa, Artificial Sequence
  Description of Artificial Sequence: Synthetic peptide
  XENP021427 vhCDR2
WIDPENGDTEYAPKFQG

SEQ ID NO: 27128 - protein, 9 aa, Artificial Sequence
  Description of Artificial Sequence: Synthetic peptide
  XENP021427 vhCDR3
RGVRQALDY

SEQ ID NO: 27129 - protein, 214 aa, Artificial Sequence
  Description of Artificial Sequence: Synthetic polypeptide
  XENP021427 2A11_H1_L2.76_Fab Light Chain
DIQMTQSPAFLSVTPGEKVTITCQASQDIGNYLNWFQQKPDQTVKLLIYYTSRLHSGVPSRFSGSGSGTDYTFTISSLEAEDAATYFCQQGNTFPYTFGGGTKVEIKRTVAAPSVFIFPPSDEQLKSGTASVVCLLNNFYPREAKVQWKVDNALQSGNSQESVTEQDSKDSTYSLSSTLTLSKADYEKHKVYACEVTHQGLSSPVTKSFNRGEC

SEQ ID NO: 27130 - protein, 107 aa, Artificial Sequence
  Description of Artificial Sequence: Synthetic polypeptide
  VL of XENP021427
DIQMTQSPAFLSVTPGEKVTITCQASQDIGNYLNWFQQKPDQTVKLLIYYTSRLHSGVPSRFSGSGSGTDYTFTISSLEAEDAATYFCQQGNTFPYTFGGGTKVEIK

SEQ ID NO: 27131 - protein, 11 aa, Artificial Sequence
  Description of Artificial Sequence: Synthetic peptide
  XENP021427 vlCDR1
QASQDIGNYLN

SEQ ID NO: 27132 - protein, 7 aa, Artificial Sequence
  Description of Artificial Sequence: Synthetic peptide
  XENP021427 vlCDR2
YTSRLHS

SEQ ID NO: 27133 - protein, 9 aa, Artificial Sequence
  Description of Artificial Sequence: Synthetic peptide
  XENP021427 vlCDR3
QQGNTFPYT

SEQ ID NO: 27134 - protein, 223 aa, Artificial Sequence; identical to SEQ ID NO: 25194
  Description of Artificial Sequence: Synthetic polypeptide
  XENP021428 2A11_H1_L2.77_Fab Heavy Chain

SEQ ID NO: 27135 - protein, 118 aa, Artificial Sequence; identical to SEQ ID NO: 17236
  Description of Artificial Sequence: Synthetic polypeptide
  VH of XENP021428

SEQ ID NO: 27136 - protein, 5 aa, Artificial Sequence
  Description of Artificial Sequence: Synthetic peptide
  XENP021428 vhCDR1
DYYMH

SEQ ID NO: 27137 - protein, 17 aa, Artificial Sequence
  Description of Artificial Sequence: Synthetic peptide
  XENP021428 vhCDR2
WIDPENGDTEYAPKFQG

SEQ ID NO: 27138 - protein, 9 aa, Artificial Sequence
  Description of Artificial Sequence: Synthetic peptide
  XENP021428 vhCDR3
RGVRQALDY

SEQ ID NO: 27139 - protein, 214 aa, Artificial Sequence
  Description of Artificial Sequence: Synthetic polypeptide
  XENP021428 2A11_H1_L2.77_Fab Light Chain
DIQMTQSPAFLSVTPGEKVTITCQASQDIGNYLNWFQQKPDQTVKLLIYYTSRLHSGVPSRFSGSGSGTDYTFTISSLEAEDAATYFCQQGNTVPYTFGGGTKVEIKRTVAAPSVFIFPPSDEQLKSGTASVVCLLNNFYPREAKVQWKVDNALQSGNSQESVTEQDSKDSTYSLSSTLTLSKADYEKHKVYACEVTHQGLSSPVTKSFNRGEC

SEQ ID NO: 27140 - protein, 107 aa, Artificial Sequence
  Description of Artificial Sequence: Synthetic polypeptide
  VL of XENP021428
DIQMTQSPAFLSVTPGEKVTITCQASQDIGNYLNWFQQKPDQTVKLLIYYTSRLHSGVPSRFSGSGSGTDYTFTISSLEAEDAATYFCQQGNTVPYTFGGGTKVEIK

SEQ ID NO: 27141 - protein, 11 aa, Artificial Sequence
  Description of Artificial Sequence: Synthetic peptide
  XENP021428 vlCDR1
QASQDIGNYLN

SEQ ID NO: 27142 - protein, 7 aa, Artificial Sequence
  Description of Artificial Sequence: Synthetic peptide
  XENP021428 vlCDR2
YTSRLHS

SEQ ID NO: 27143 - protein, 9 aa, Artificial Sequence
  Description of Artificial Sequence: Synthetic peptide
  XENP021428 vlCDR3
QQGNTVPYT

SEQ ID NO: 27144 - protein, 223 aa, Artificial Sequence; identical to SEQ ID NO: 25194
  Description of Artificial Sequence: Synthetic polypeptide
  XENP021429 2A11_H1_L2.78_Fab Heavy Chain

SEQ ID NO: 27145 - protein, 118 aa, Artificial Sequence; identical to SEQ ID NO: 17236
  Description of Artificial Sequence: Synthetic polypeptide
  VH of XENP021429

SEQ ID NO: 27146 - protein, 5 aa, Artificial Sequence
  Description of Artificial Sequence: Synthetic peptide
  XENP021429 vhCDR1
DYYMH

SEQ ID NO: 27147 - protein, 17 aa, Artificial Sequence
  Description of Artificial Sequence: Synthetic peptide
  XENP021429 vhCDR2
WIDPENGDTEYAPKFQG

SEQ ID NO: 27148 - protein, 9 aa, Artificial Sequence
  Description of Artificial Sequence: Synthetic peptide
  XENP021429 vhCDR3
RGVRQALDY

SEQ ID NO: 27149 - protein, 214 aa, Artificial Sequence
  Description of Artificial Sequence: Synthetic polypeptide
  XENP021429 2A11_H1_L2.78_Fab Light Chain
DIQMTQSPAFLSVTPGEKVTITCQASQDIGNYLNWFQQKPDQTVKLLIYYTSRLHSGVPSRFSGSGSGTDYTFTISSLEAEDAATYFCQQGNTYPYTFGGGTKVEIKRTVAAPSVFIFPPSDEQLKSGTASVVCLLNNFYPREAKVQWKVDNALQSGNSQESVTEQDSKDSTYSLSSTLTLSKADYEKHKVYACEVTHQGLSSPVTKSFNRGEC

SEQ ID NO: 27150 - protein, 107 aa, Artificial Sequence
  Description of Artificial Sequence: Synthetic polypeptide
  VL of XENP021429
DIQMTQSPAFLSVTPGEKVTITCQASQDIGNYLNWFQQKPDQTVKLLIYYTSRLHSGVPSRFSGSGSGTDYTFTISSLEAEDAATYFCQQGNTYPYTFGGGTKVEIK

SEQ ID NO: 27151 - protein, 11 aa, Artificial Sequence
  Description of Artificial Sequence: Synthetic peptide
  XENP021429 vlCDR1
QASQDIGNYLN

SEQ ID NO: 27152 - protein, 7 aa, Artificial Sequence
  Description of Artificial Sequence: Synthetic peptide
  XENP021429 vlCDR2
YTSRLHS

SEQ ID NO: 27153 - protein, 9 aa, Artificial Sequence
  Description of Artificial Sequence: Synthetic peptide
  XENP021429 vlCDR3
QQGNTYPYT

SEQ ID NO: 27154 - protein, 223 aa, Artificial Sequence; identical to SEQ ID NO: 25194
  Description of Artificial Sequence: Synthetic polypeptide
  XENP021430 2A11_H1_L2.79_Fab Heavy Chain

SEQ ID NO: 27155 - protein, 118 aa, Artificial Sequence; identical to SEQ ID NO: 17236
  Description of Artificial Sequence: Synthetic polypeptide
  VH of XENP021430

SEQ ID NO: 27156 - protein, 5 aa, Artificial Sequence
  Description of Artificial Sequence: Synthetic peptide
  XENP021430 vhCDR1
DYYMH

SEQ ID NO: 27157 - protein, 17 aa, Artificial Sequence
  Description of Artificial Sequence: Synthetic peptide
  XENP021430 vhCDR2
WIDPENGDTEYAPKFQG

SEQ ID NO: 27158 - protein, 9 aa, Artificial Sequence
  Description of Artificial Sequence: Synthetic peptide
  XENP021430 vhCDR3
RGVRQALDY

SEQ ID NO: 27159 - protein, 214 aa, Artificial Sequence
  Description of Artificial Sequence: Synthetic polypeptide
  XENP021430 2A11_H1_L2.79_Fab Light Chain
DIQMTQSPAFLSVTPGEKVTITCQASQDIGNYLNWFQQKPDQTVKLLIYYTSRLHSGVPSRFSGSGSGTDYTFTISSLEAEDAATYFCQQGNTWPYTFGGGTKVEIKRTVAAPSVFIFPPSDEQLKSGTASVVCLLNNFYPREAKVQWKVDNALQSGNSQESVTEQDSKDSTYSLSSTLTLSKADYEKHKVYACEVTHQGLSSPVTKSFNRGEC

SEQ ID NO: 27160 - protein, 107 aa, Artificial Sequence
  Description of Artificial Sequence: Synthetic polypeptide
  VL of XENP021430
DIQMTQSPAFLSVTPGEKVTITCQASQDIGNYLNWFQQKPDQTVKLLIYYTSRLHSGVPSRFSGSGSGTDYTFTISSLEAEDAATYFCQQGNTWPYTFGGGTKVEIK

SEQ ID NO: 27161 - protein, 11 aa, Artificial Sequence
  Description of Artificial Sequence: Synthetic peptide
  XENP021430 vlCDR1
QASQDIGNYLN

SEQ ID NO: 27162 - protein, 7 aa, Artificial Sequence
  Description of Artificial Sequence: Synthetic peptide
  XENP021430 vlCDR2
YTSRLHS

SEQ ID NO: 27163 - protein, 9 aa, Artificial Sequence
  Description of Artificial Sequence: Synthetic peptide
  XENP021430 vlCDR3
QQGNTWPYT

SEQ ID NO: 27164 - protein, 223 aa, Artificial Sequence; identical to SEQ ID NO: 25194
  Description of Artificial Sequence: Synthetic polypeptide
  XENP021431 2A11_H1_L2.80_Fab Heavy Chain

SEQ ID NO: 27165 - protein, 118 aa, Artificial Sequence; identical to SEQ ID NO: 17236
  Description of Artificial Sequence: Synthetic polypeptide
  VH of XENP021431

SEQ ID NO: 27166 - protein, 5 aa, Artificial Sequence
  Description of Artificial Sequence: Synthetic peptide
  XENP021431 vhCDR1
DYYMH

SEQ ID NO: 27167 - protein, 17 aa, Artificial Sequence
  Description of Artificial Sequence: Synthetic peptide
  XENP021431 vhCDR2
WIDPENGDTEYAPKFQG

SEQ ID NO: 27168 - protein, 9 aa, Artificial Sequence
  Description of Artificial Sequence: Synthetic peptide
  XENP021431 vhCDR3
RGVRQALDY

SEQ ID NO: 27169 - protein, 214 aa, Artificial Sequence
  Description of Artificial Sequence: Synthetic polypeptide
  XENP021431 2A11_H1_L2.80_Fab Light Chain
DIQMTQSPAFLSVTPGEKVTITCQASQDIGNYLNWFQQKPDQTVKLLIYYTSRLHSGVPSRFSGSGSGTDYTFTISSLEAEDAATYFCQQGNTTPYTFGGGTKVEIKRTVAAPSVFIFPPSDEQLKSGTASVVCLLNNFYPREAKVQWKVDNALQSGNSQESVTEQDSKDSTYSLSSTLTLSKADYEKHKVYACEVTHQGLSSPVTKSFNRGEC

SEQ ID NO: 27170 - protein, 107 aa, Artificial Sequence
  Description of Artificial Sequence: Synthetic polypeptide
  VL of XENP021431
DIQMTQSPAFLSVTPGEKVTITCQASQDIGNYLNWFQQKPDQTVKLLIYYTSRLHSGVPSRFSGSGSGTDYTFTISSLEAEDAATYFCQQGNTTPYTFGGGTKVEIK

SEQ ID NO: 27171 - protein, 11 aa, Artificial Sequence
  Description of Artificial Sequence: Synthetic peptide
  XENP021431 vlCDR1
QASQDIGNYLN

SEQ ID NO: 27172 - protein, 7 aa, Artificial Sequence
  Description of Artificial Sequence: Synthetic peptide
  XENP021431 vlCDR2
YTSRLHS

SEQ ID NO: 27173 - protein, 9 aa, Artificial Sequence
  Description of Artificial Sequence: Synthetic peptide
  XENP021431 vlCDR3
QQGNTTPYT

SEQ ID NO: 27174 - protein, 223 aa, Artificial Sequence; identical to SEQ ID NO: 25194
  Description of Artificial Sequence: Synthetic polypeptide
  XENP021432 2A11_H1_L2.81_Fab Heavy Chain

SEQ ID NO: 27175 - protein, 118 aa, Artificial Sequence; identical to SEQ ID NO: 17236
  Description of Artificial Sequence: Synthetic polypeptide
  VH of XENP021432

SEQ ID NO: 27176 - protein, 5 aa, Artificial Sequence
  Description of Artificial Sequence: Synthetic peptide
  XENP021432 vhCDR1
DYYMH

SEQ ID NO: 27177 - protein, 17 aa, Artificial Sequence
  Description of Artificial Sequence: Synthetic peptide
  XENP021432 vhCDR2
WIDPENGDTEYAPKFQG

SEQ ID NO: 27178 - protein, 9 aa, Artificial Sequence
  Description of Artificial Sequence: Synthetic peptide
  XENP021432 vhCDR3
RGVRQALDY

SEQ ID NO: 27179 - protein, 214 aa, Artificial Sequence
  Description of Artificial Sequence: Synthetic polypeptide
  XENP021432 2A11_H1_L2.81_Fab Light Chain
DIQMTQSPAFLSVTPGEKVTITCQASQDIGNYLNWFQQKPDQTVKLLIYYTSRLHSGVPSRFSGSGSGTDYTFTISSLEAEDAATYFCQQGNTAPYTFGGGTKVEIKRTVAAPSVFIFPPSDEQLKSGTASVVCLLNNFYPREAKVQWKVDNALQSGNSQESVTEQDSKDSTYSLSSTLTLSKADYEKHKVYACEVTHQGLSSPVTKSFNRGEC

SEQ ID NO: 27180 - protein, 107 aa, Artificial Sequence
  Description of Artificial Sequence: Synthetic polypeptide
  VL of XENP021432
DIQMTQSPAFLSVTPGEKVTITCQASQDIGNYLNWFQQKPDQTVKLLIYYTSRLHSGVPSRFSGSGSGTDYTFTISSLEAEDAATYFCQQGNTAPYTFGGGTKVEIK

SEQ ID NO: 27181 - protein, 11 aa, Artificial Sequence
  Description of Artificial Sequence: Synthetic peptide
  XENP021432 vlCDR1
QASQDIGNYLN

SEQ ID NO: 27182 - protein, 7 aa, Artificial Sequence
  Description of Artificial Sequence: Synthetic peptide
  XENP021432 vlCDR2
YTSRLHS

SEQ ID NO: 27183 - protein, 9 aa, Artificial Sequence
  Description of Artificial Sequence: Synthetic peptide
  XENP021432 vlCDR3
QQGNTAPYT

SEQ ID NO: 27184 - protein, 223 aa, Artificial Sequence; identical to SEQ ID NO: 25194
  Description of Artificial Sequence: Synthetic polypeptide
  XENP021433 2A11_H1_L2.82_Fab Heavy Chain

SEQ ID NO: 27185 - protein, 118 aa, Artificial Sequence; identical to SEQ ID NO: 17236
  Description of Artificial Sequence: Synthetic polypeptide
  VH of XENP021433

SEQ ID NO: 27186 - protein, 5 aa, Artificial Sequence
  Description of Artificial Sequence: Synthetic peptide
  XENP021433 vhCDR1
DYYMH

SEQ ID NO: 27187 - protein, 17 aa, Artificial Sequence
  Description of Artificial Sequence: Synthetic peptide
  XENP021433 vhCDR2
WIDPENGDTEYAPKFQG

SEQ ID NO: 27188 - protein, 9 aa, Artificial Sequence
  Description of Artificial Sequence: Synthetic peptide
  XENP021433 vhCDR3
RGVRQALDY

SEQ ID NO: 27189 - protein, 214 aa, Artificial Sequence
  Description of Artificial Sequence: Synthetic polypeptide
  XENP021433 2A11_H1_L2.82_Fab Light Chain
DIQMTQSPAFLSVTPGEKVTITCQASQDIGNYLNWFQQKPDQTVKLLIYYTSRLHSGVPSRFSGSGSGTDYTFTISSLEAEDAATYFCQQGNTQPYTFGGGTKVEIKRTVAAPSVFIFPPSDEQLKSGTASVVCLLNNFYPREAKVQWKVDNALQSGNSQESVTEQDSKDSTYSLSSTLTLSKADYEKHKVYACEVTHQGLSSPVTKSFNRGEC

SEQ ID NO: 27190 - protein, 107 aa, Artificial Sequence
  Description of Artificial Sequence: Synthetic polypeptide
  VL of XENP021433
DIQMTQSPAFLSVTPGEKVTITCQASQDIGNYLNWFQQKPDQTVKLLIYYTSRLHSGVPSRFSGSGSGTDYTFTISSLEAEDAATYFCQQGNTQPYTFGGGTKVEIK

SEQ ID NO: 27191 - protein, 11 aa, Artificial Sequence
  Description of Artificial Sequence: Synthetic peptide
  XENP021433 vlCDR1
QASQDIGNYLN

SEQ ID NO: 27192 - protein, 7 aa, Artificial Sequence
  Description of Artificial Sequence: Synthetic peptide
  XENP021433 vlCDR2
YTSRLHS

SEQ ID NO: 27193 - protein, 9 aa, Artificial Sequence
  Description of Artificial Sequence: Synthetic peptide
  XENP021433 vlCDR3
QQGNTQPYT

SEQ ID NO: 27194 - protein, 223 aa, Artificial Sequence; identical to SEQ ID NO: 25194
  Description of Artificial Sequence: Synthetic polypeptide
  XENP021434 2A11_H1_L2.83_Fab Heavy Chain

SEQ ID NO: 27195 - protein, 118 aa, Artificial Sequence; identical to SEQ ID NO: 17236
  Description of Artificial Sequence: Synthetic polypeptide
  VH of XENP021434

SEQ ID NO: 27196 - protein, 5 aa, Artificial Sequence
  Description of Artificial Sequence: Synthetic peptide
  XENP021434 vhCDR1
DYYMH

SEQ ID NO: 27197 - protein, 17 aa, Artificial Sequence
  Description of Artificial Sequence: Synthetic peptide
  XENP021434 vhCDR2
WIDPENGDTEYAPKFQG

SEQ ID NO: 27198 - protein, 9 aa, Artificial Sequence
  Description of Artificial Sequence: Synthetic peptide
  XENP021434 vhCDR3
RGVRQALDY

SEQ ID NO: 27199 - protein, 214 aa, Artificial Sequence
  Description of Artificial Sequence: Synthetic polypeptide
  XENP021434 2A11_H1_L2.83_Fab Light Chain
DIQMTQSPAFLSVTPGEKVTITCQASQDIGNYLNWFQQKPDQTVKLLIYYTSRLHSGVPSRFSGSGSGTDYTFTISSLEAEDAATYFCQQGNTKPYTFGGGTKVEIKRTVAAPSVFIFPPSDEQLKSGTASVVCLLNNFYPREAKVQWKVDNALQSGNSQESVTEQDSKDSTYSLSSTLTLSKADYEKHKVYACEVTHQGLSSPVTKSFNRGEC

SEQ ID NO: 27200 - protein, 107 aa, Artificial Sequence
  Description of Artificial Sequence: Synthetic polypeptide
  VL of XENP021434
DIQMTQSPAFLSVTPGEKVTITCQASQDIGNYLNWFQQKPDQTVKLLIYYTSRLHSGVPSRFSGSGSGTDYTFTISSLEAEDAATYFCQQGNTKPYTFGGGTKVEIK

SEQ ID NO: 27201 - protein, 11 aa, Artificial Sequence
  Description of Artificial Sequence: Synthetic peptide
  XENP021434 vlCDR1
QASQDIGNYLN

SEQ ID NO: 27202 - protein, 7 aa, Artificial Sequence
  Description of Artificial Sequence: Synthetic peptide
  XENP021434 vlCDR2
YTSRLHS

SEQ ID NO: 27203 - protein, 9 aa, Artificial Sequence
  Description of Artificial Sequence: Synthetic peptide
  XENP021434 vlCDR3
QQGNTKPYT

SEQ ID NO: 27204 - protein, 223 aa, Artificial Sequence; identical to SEQ ID NO: 25194
  Description of Artificial Sequence: Synthetic polypeptide
  XENP021435 2A11_H1_L2.84_Fab Heavy Chain

SEQ ID NO: 27205 - protein, 118 aa, Artificial Sequence; identical to SEQ ID NO: 17236
  Description of Artificial Sequence: Synthetic polypeptide
  VH of XENP021435

SEQ ID NO: 27206 - protein, 5 aa, Artificial Sequence
  Description of Artificial Sequence: Synthetic peptide
  XENP021435 vhCDR1
DYYMH

SEQ ID NO: 27207 - protein, 17 aa, Artificial Sequence
  Description of Artificial Sequence: Synthetic peptide
  XENP021435 vhCDR2
WIDPENGDTEYAPKFQG

SEQ ID NO: 27208 - protein, 9 aa, Artificial Sequence
  Description of Artificial Sequence: Synthetic peptide
  XENP021435 vhCDR3
RGVRQALDY

SEQ ID NO: 27209 - protein, 214 aa, Artificial Sequence
  Description of Artificial Sequence: Synthetic polypeptide
  XENP021435 2A11_H1_L2.84_Fab Light Chain
DIQMTQSPAFLSVTPGEKVTITCQASQDIGNYLNWFQQKPDQTVKLLIYYTSRLHSGVPSRFSGSGSGTDYTFTISSLEAEDAATYFCQQGNTLPFTFGGGTKVEIKRTVAAPSVFIFPPSDEQLKSGTASVVCLLNNFYPREAKVQWKVDNALQSGNSQESVTEQDSKDSTYSLSSTLTLSKADYEKHKVYACEVTHQGLSSPVTKSFNRGEC

SEQ ID NO: 27210 - protein, 107 aa, Artificial Sequence
  Description of Artificial Sequence: Synthetic polypeptide
  VL of XENP021435
DIQMTQSPAFLSVTPGEKVTITCQASQDIGNYLNWFQQKPDQTVKLLIYYTSRLHSGVPSRFSGSGSGTDYTFTISSLEAEDAATYFCQQGNTLPFTFGGGTKVEIK

SEQ ID NO: 27211 - protein, 11 aa, Artificial Sequence
  Description of Artificial Sequence: Synthetic peptide
  XENP021435 vlCDR1
QASQDIGNYLN

SEQ ID NO: 27212 - protein, 7 aa, Artificial Sequence
  Description of Artificial Sequence: Synthetic peptide
  XENP021435 vlCDR2
YTSRLHS

SEQ ID NO: 27213 - protein, 9 aa, Artificial Sequence
  Description of Artificial Sequence: Synthetic peptide
  XENP021435 vlCDR3
QQGNTLPFT

SEQ ID NO: 27214 - protein, 223 aa, Artificial Sequence; identical to SEQ ID NO: 25194
  Description of Artificial Sequence: Synthetic polypeptide
  XENP021436 2A11_H1_L2.85_Fab Heavy Chain

SEQ ID NO: 27215 - protein, 118 aa, Artificial Sequence; identical to SEQ ID NO: 17236
  Description of Artificial Sequence: Synthetic polypeptide
  VH of XENP021436

SEQ ID NO: 27216 - protein, 5 aa, Artificial Sequence
  Description of Artificial Sequence: Synthetic peptide
  XENP021436 vhCDR1
DYYMH

SEQ ID NO: 27217 - protein, 17 aa, Artificial Sequence
  Description of Artificial Sequence: Synthetic peptide
  XENP021436 vhCDR2
WIDPENGDTEYAPKFQG

SEQ ID NO: 27218 - protein, 9 aa, Artificial Sequence
  Description of Artificial Sequence: Synthetic peptide
  XENP021436 vhCDR3
RGVRQALDY

SEQ ID NO: 27219 - protein, 214 aa, Artificial Sequence
  Description of Artificial Sequence: Synthetic polypeptide
  XENP021436 2A11_H1_L2.85_Fab Light Chain
DIQMTQSPAFLSVTPGEKVTITCQASQDIGNYLNWFQQKPDQTVKLLIYYTSRLHSGVPSRFSGSGSGTDYTFTISSLEAEDAATYFCQQGNTLPHTFGGGTKVEIKRTVAAPSVFIFPPSDEQLKSGTASVVCLLNNFYPREAKVQWKVDNALQSGNSQESVTEQDSKDSTYSLSSTLTLSKADYEKHKVYACEVTHQGLSSPVTKSFNRGEC

SEQ ID NO: 27220 - protein, 107 aa, Artificial Sequence
  Description of Artificial Sequence: Synthetic polypeptide
  VL of XENP021436
DIQMTQSPAFLSVTPGEKVTITCQASQDIGNYLNWFQQKPDQTVKLLIYYTSRLHSGVPSRFSGSGSGTDYTFTISSLEAEDAATYFCQQGNTLPHTFGGGTKVEIK

SEQ ID NO: 27221 - protein, 11 aa, Artificial Sequence
  Description of Artificial Sequence: Synthetic peptide
  XENP021436 vlCDR1
QASQDIGNYLN

SEQ ID NO: 27222 - protein, 7 aa, Artificial Sequence
  Description of Artificial Sequence: Synthetic peptide
  XENP021436 vlCDR2
YTSRLHS

SEQ ID NO: 27223 - protein, 9 aa, Artificial Sequence
  Description of Artificial Sequence: Synthetic peptide
  XENP021436 vlCDR3
QQGNTLPHT

SEQ ID NO: 27224 - protein, 223 aa, Artificial Sequence; identical to SEQ ID NO: 25194
  Description of Artificial Sequence: Synthetic polypeptide
  XENP021437 2A11_H1_L2.86_Fab Heavy Chain

SEQ ID NO: 27225 - protein, 118 aa, Artificial Sequence; identical to SEQ ID NO: 17236
  Description of Artificial Sequence: Synthetic polypeptide
  VH of XENP021437

SEQ ID NO: 27226 - protein, 5 aa, Artificial Sequence
  Description of Artificial Sequence: Synthetic peptide
  XENP021437 vhCDR1
DYYMH

SEQ ID NO: 27227 - protein, 17 aa, Artificial Sequence
  Description of Artificial Sequence: Synthetic peptide
  XENP021437 vhCDR2
WIDPENGDTEYAPKFQG

SEQ ID NO: 27228 - protein, 9 aa, Artificial Sequence
  Description of Artificial Sequence: Synthetic peptide
  XENP021437 vhCDR3
RGVRQALDY

SEQ ID NO: 27229 - protein, 214 aa, Artificial Sequence
  Description of Artificial Sequence: Synthetic polypeptide
  XENP021437 2A11_H1_L2.86_Fab Light Chain
DIQMTQSPAFLSVTPGEKVTITCQASQDIGNYLNWFQQKPDQTVKLLIYYTSRLHSGVPSRFSGSGSGTDYTFTISSLEAEDAATYFCQQGNTLPLTFGGGTKVEIKRTVAAPSVFIFPPSDEQLKSGTASVVCLLNNFYPREAKVQWKVDNALQSGNSQESVTEQDSKDSTYSLSSTLTLSKADYEKHKVYACEVTHQGLSSPVTKSFNRGEC

SEQ ID NO: 27230 - protein, 107 aa, Artificial Sequence
  Description of Artificial Sequence: Synthetic polypeptide
  VL of XENP021437
DIQMTQSPAFLSVTPGEKVTITCQASQDIGNYLNWFQQKPDQTVKLLIYYTSRLHSGVPSRFSGSGSGTDYTFTISSLEAEDAATYFCQQGNTLPLTFGGGTKVEIK

SEQ ID NO: 27231 - protein, 11 aa, Artificial Sequence
  Description of Artificial Sequence: Synthetic peptide
  XENP021437 vlCDR1
QASQDIGNYLN

SEQ ID NO: 27232 - protein, 7 aa, Artificial Sequence
  Description of Artificial Sequence: Synthetic peptide
  XENP021437 vlCDR2
YTSRLHS

SEQ ID NO: 27233 - protein, 9 aa, Artificial Sequence
  Description of Artificial Sequence: Synthetic peptide
  XENP021437 vlCDR3
QQGNTLPLT

SEQ ID NO: 27234 - protein, 223 aa, Artificial Sequence; identical to SEQ ID NO: 25194
  Description of Artificial Sequence: Synthetic polypeptide
  XENP021438 2A11_H1_L2.87_Fab Heavy Chain

SEQ ID NO: 27235 - protein, 118 aa, Artificial Sequence; identical to SEQ ID NO: 17236
  Description of Artificial Sequence: Synthetic polypeptide
  VH of XENP021438

SEQ ID NO: 27236 - protein, 5 aa, Artificial Sequence
  Description of Artificial Sequence: Synthetic peptide
  XENP021438 vhCDR1
DYYMH

SEQ ID NO: 27237 - protein, 17 aa, Artificial Sequence
  Description of Artificial Sequence: Synthetic peptide
  XENP021438 vhCDR2
WIDPENGDTEYAPKFQG

SEQ ID NO: 27238 - protein, 9 aa, Artificial Sequence
  Description of Artificial Sequence: Synthetic peptide
  XENP021438 vhCDR3
RGVRQALDY

SEQ ID NO: 27239 - protein, 214 aa, Artificial Sequence
  Description of Artificial Sequence: Synthetic polypeptide
  XENP021438 2A11_H1_L2.87_Fab Light Chain
DIQMTQSPAFLSVTPGEKVTITCQASQDIGNYLNWFQQKPDQTVKLLIYYTSRLHSGVPSRFSGSGSGTDYTFTISSLEAEDAATYFCQQGNTLPWTFGGGTKVEIKRTVAAPSVFIFPPSDEQLKSGTASVVCLLNNFYPREAKVQWKVDNALQSGNSQESVTEQDSKDSTYSLSSTLTLSKADYEKHKVYACEVTHQGLSSPVTKSFNRGEC

SEQ ID NO: 27240 - protein, 107 aa, Artificial Sequence
  Description of Artificial Sequence: Synthetic polypeptide
  VL of XENP021438
DIQMTQSPAFLSVTPGEKVTITCQASQDIGNYLNWFQQKPDQTVKLLIYYTSRLHSGVPSRFSGSGSGTDYTFTISSLEAEDAATYFCQQGNTLPWTFGGGTKVEIK

SEQ ID NO: 27241 - protein, 11 aa, Artificial Sequence
  Description of Artificial Sequence: Synthetic peptide
  XENP021438 vlCDR1
QASQDIGNYLN

SEQ ID NO: 27242 - protein, 7 aa, Artificial Sequence
  Description of Artificial Sequence: Synthetic peptide
  XENP021438 vlCDR2
YTSRLHS

SEQ ID NO: 27243 - protein, 9 aa, Artificial Sequence
  Description of Artificial Sequence: Synthetic peptide
  XENP021438 vlCDR3
QQGNTLPWT

SEQ ID NO: 27244 - protein, 223 aa, Artificial Sequence; identical to SEQ ID NO: 25194
  Description of Artificial Sequence: Synthetic polypeptide
  XENP021439 2A11_H1_L2.88_Fab Heavy Chain

SEQ ID NO: 27245 - protein, 118 aa, Artificial Sequence; identical to SEQ ID NO: 17236
  Description of Artificial Sequence: Synthetic polypeptide
  VH of XENP021439

SEQ ID NO: 27246 - protein, 5 aa, Artificial Sequence
  Description of Artificial Sequence: Synthetic peptide
  XENP021439 vhCDR1
DYYMH

SEQ ID NO: 27247 - protein, 17 aa, Artificial Sequence
  Description of Artificial Sequence: Synthetic peptide
  XENP021439 vhCDR2
WIDPENGDTEYAPKFQG

SEQ ID NO: 27248 - protein, 9 aa, Artificial Sequence
  Description of Artificial Sequence: Synthetic peptide
  XENP021439 vhCDR3
RGVRQALDY

SEQ ID NO: 27249 - protein, 214 aa, Artificial Sequence
  Description of Artificial Sequence: Synthetic polypeptide
  XENP021439 2A11_H1_L2.88_Fab Light Chain
DIQMTQSPAFLSVTPGEKVTITCQASQDIGNYLNWFQQKPDQTVKLLIYYTSRLHSGVPSRFSGSGSGTDYTFTISSLEAEDAATYFCQQGNTLPRTFGGGTKVEIKRTVAAPSVFIFPPSDEQLKSGTASVVCLLNNFYPREAKVQWKVDNALQSGNSQESVTEQDSKDSTYSLSSTLTLSKADYEKHKVYACEVTHQGLSSPVTKSFNRGEC

SEQ ID NO: 27250 - protein, 107 aa, Artificial Sequence
  Description of Artificial Sequence: Synthetic polypeptide
  VL of XENP021439
DIQMTQSPAFLSVTPGEKVTITCQASQDIGNYLNWFQQKPDQTVKLLIYYTSRLHSGVPSRFSGSGSGTDYTFTISSLEAEDAATYFCQQGNTLPRTFGGGTKVEIK

SEQ ID NO: 27251 - protein, 11 aa, Artificial Sequence
  Description of Artificial Sequence: Synthetic peptide
  XENP021439 vlCDR1
QASQDIGNYLN

SEQ ID NO: 27252 - protein, 7 aa, Artificial Sequence
  Description of Artificial Sequence: Synthetic peptide
  XENP021439 vlCDR2
YTSRLHS

SEQ ID NO: 27253 - protein, 9 aa, Artificial Sequence
  Description of Artificial Sequence: Synthetic peptide
  XENP021439 vlCDR3
QQGNTLPRT

SEQ ID NO: 27254 - protein, 223 aa, Artificial Sequence; identical to SEQ ID NO: 25194
  Description of Artificial Sequence: Synthetic polypeptide
  XENP021440 2A11_H1_L2.89_Fab Heavy Chain

SEQ ID NO: 27255 - protein, 118 aa, Artificial Sequence; identical to SEQ ID NO: 17236
  Description of Artificial Sequence: Synthetic polypeptide
  VH of XENP021440

SEQ ID NO: 27256 - protein, 5 aa, Artificial Sequence
  Description of Artificial Sequence: Synthetic peptide
  XENP021440 vhCDR1
DYYMH

SEQ ID NO: 27257 - protein, 17 aa, Artificial Sequence
  Description of Artificial Sequence: Synthetic peptide
  XENP021440 vhCDR2
WIDPENGDTEYAPKFQG

SEQ ID NO: 27258 - protein, 9 aa, Artificial Sequence
  Description of Artificial Sequence: Synthetic peptide
  XENP021440 vhCDR3
RGVRQALDY

SEQ ID NO: 27259 - protein, 214 aa, Artificial Sequence
  Description of Artificial Sequence: Synthetic polypeptide
  XENP021440 2A11_H1_L2.89_Fab Light Chain
DIQMTQSPAFLSVTPGEKVTITCQASQDIGNYLNWFQQKPDQTVKLLIYYTSRLHSGVPSRFSGSGSGTDYTFTISSLEAEDAATYFCQQGNTLPATFGGGTKVEIKRTVAAPSVFIFPPSDEQLKSGTASVVCLLNNFYPREAKVQWKVDNALQSGNSQESVTEQDSKDSTYSLSSTLTLSKADYEKHKVYACEVTHQGLSSPVTKSFNRGEC

SEQ ID NO: 27260 - protein, 107 aa, Artificial Sequence
  Description of Artificial Sequence: Synthetic polypeptide
  VL of XENP021440
DIQMTQSPAFLSVTPGEKVTITCQASQDIGNYLNWFQQKPDQTVKLLIYYTSRLHSGVPSRFSGSGSGTDYTFTISSLEAEDAATYFCQQGNTLPATFGGGTKVEIK

SEQ ID NO: 27261 - protein, 11 aa, Artificial Sequence
  Description of Artificial Sequence: Synthetic peptide
  XENP021440 vlCDR1
QASQDIGNYLN

SEQ ID NO: 27262 - protein, 7 aa, Artificial Sequence
  Description of Artificial Sequence: Synthetic peptide
  XENP021440 vlCDR2
YTSRLHS

SEQ ID NO: 27263 - protein, 9 aa, Artificial Sequence
  Description of Artificial Sequence: Synthetic peptide
  XENP021440 vlCDR3
QQGNTLPAT

SEQ ID NO: 27264 - protein, 223 aa, Artificial Sequence; identical to SEQ ID NO: 25574
  Description of Artificial Sequence: Synthetic polypeptide
  XENP021606 2A11_H1.37_L2.35_Fab Heavy Chain

SEQ ID NO: 27265 - protein, 118 aa, Artificial Sequence; identical to SEQ ID NO: 25575
  Description of Artificial Sequence: Synthetic polypeptide
  VH of XENP021606

SEQ ID NO: 27266 - protein, 5 aa, Artificial Sequence
  Description of Artificial Sequence: Synthetic peptide
  XENP021606 vhCDR1
DYFMH

SEQ ID NO: 27267 - protein, 17 aa, Artificial Sequence
  Description of Artificial Sequence: Synthetic peptide
  XENP021606 vhCDR2
WIDPENGDTEYAPKFQG

SEQ ID NO: 27268 - protein, 9 aa, Artificial Sequence
  Description of Artificial Sequence: Synthetic peptide
  XENP021606 vhCDR3
RGVRQALDY

SEQ ID NO: 27269 - protein, 214 aa, Artificial Sequence; identical to SEQ ID NO: 26719
  Description of Artificial Sequence: Synthetic polypeptide
  XENP021606 2A11_H1.37_L2.35_Fab Light Chain

SEQ ID NO: 27270 - protein, 107 aa, Artificial Sequence; identical to SEQ ID NO: 26720
  Description of Artificial Sequence: Synthetic polypeptide
  VL of XENP021606

SEQ ID NO: 27271 - protein, 11 aa, Artificial Sequence
  Description of Artificial Sequence: Synthetic peptide
  XENP021606 vlCDR1
QASQDIGNYLN

SEQ ID NO: 27272 - protein, 7 aa, Artificial Sequence
  Description of Artificial Sequence: Synthetic peptide
  XENP021606 vlCDR2
FTSRLHS

SEQ ID NO: 27273 - protein, 9 aa, Artificial Sequence
  Description of Artificial Sequence: Synthetic peptide
  XENP021606 vlCDR3
QQGNTLPYT

SEQ ID NO: 27274 - protein, 223 aa, Artificial Sequence; identical to SEQ ID NO: 25574
  Description of Artificial Sequence: Synthetic polypeptide
  XENP021607 2A11_H1.37_L2.47_Fab Heavy Chain

SEQ ID NO: 27275 - protein, 118 aa, Artificial Sequence; identical to SEQ ID NO: 25575
  Description of Artificial Sequence: Synthetic polypeptide
  VH of XENP021607

SEQ ID NO: 27276 - protein, 5 aa, Artificial Sequence
  Description of Artificial Sequence: Synthetic peptide
  XENP021607 vhCDR1
DYFMH

SEQ ID NO: 27277 - protein, 17 aa, Artificial Sequence
  Description of Artificial Sequence: Synthetic peptide
  XENP021607 vhCDR2
WIDPENGDTEYAPKFQG

SEQ ID NO: 27278 - protein, 9 aa, Artificial Sequence
  Description of Artificial Sequence: Synthetic peptide
  XENP021607 vhCDR3
RGVRQALDY

SEQ ID NO: 27279 - protein, 214 aa, Artificial Sequence; identical to SEQ ID NO: 22039
  Description of Artificial Sequence: Synthetic polypeptide
  XENP021607 2A11_H1.37_L2.47_Fab Light Chain

SEQ ID NO: 27280 - protein, 107 aa, Artificial Sequence; identical to SEQ ID NO: 22040
  Description of Artificial Sequence: Synthetic polypeptide
  VL of XENP021607

SEQ ID NO: 27281 - protein, 11 aa, Artificial Sequence
  Description of Artificial Sequence: Synthetic peptide
  XENP021607 vlCDR1
QASQDIGNYLN

SEQ ID NO: 27282 - protein, 7 aa, Artificial Sequence
  Description of Artificial Sequence: Synthetic peptide
  XENP021607 vlCDR2
YTSHLHS

SEQ ID NO: 27283 - protein, 9 aa, Artificial Sequence
  Description of Artificial Sequence: Synthetic peptide
  XENP021607 vlCDR3
QQGNTLPYT

SEQ ID NO: 27284 - protein, 223 aa, Artificial Sequence; identical to SEQ ID NO: 25574
  Description of Artificial Sequence: Synthetic polypeptide
  XENP021608 2A11_H1.37_L2.50_Fab Heavy Chain

SEQ ID NO: 27285 - protein, 118 aa, Artificial Sequence; identical to SEQ ID NO: 25575
  Description of Artificial Sequence: Synthetic polypeptide
  VH of XENP021608

SEQ ID NO: 27286 - protein, 5 aa, Artificial Sequence
  Description of Artificial Sequence: Synthetic peptide
  XENP021608 vhCDR1
DYFMH

SEQ ID NO: 27287 - protein, 17 aa, Artificial Sequence
  Description of Artificial Sequence: Synthetic peptide
  XENP021608 vhCDR2
WIDPENGDTEYAPKFQG

SEQ ID NO: 27288 - protein, 9 aa, Artificial Sequence
  Description of Artificial Sequence: Synthetic peptide
  XENP021608 vhCDR3
RGVRQALDY

SEQ ID NO: 27289 - protein, 214 aa, Artificial Sequence; identical to SEQ ID NO: 22059
  Description of Artificial Sequence: Synthetic polypeptide
  XENP021608 2A11_H1.37_L2.50_Fab Light Chain

SEQ ID NO: 27290 - protein, 107 aa, Artificial Sequence; identical to SEQ ID NO: 22060
  Description of Artificial Sequence: Synthetic polypeptide
  VL of XENP021608

SEQ ID NO: 27291 - protein, 11 aa, Artificial Sequence
  Description of Artificial Sequence: Synthetic peptide
  XENP021608 vlCDR1
QASQDIGNYLN

SEQ ID NO: 27292 - protein, 7 aa, Artificial Sequence
  Description of Artificial Sequence: Synthetic peptide
  XENP021608 vlCDR2
YTSYLHS

SEQ ID NO: 27293 - protein, 9 aa, Artificial Sequence
  Description of Artificial Sequence: Synthetic peptide
  XENP021608 vlCDR3
QQGNTLPYT

SEQ ID NO: 27294 - protein, 223 aa, Artificial Sequence; identical to SEQ ID NO: 25844
  Description of Artificial Sequence: Synthetic polypeptide
  XENP021609 2A11_H1.64_L2.35_Fab Heavy Chain

SEQ ID NO: 27295 - protein, 118 aa, Artificial Sequence; identical to SEQ ID NO: 25845
  Description of Artificial Sequence: Synthetic polypeptide
  VH of XENP021609

SEQ ID NO: 27296 - protein, 5 aa, Artificial Sequence
  Description of Artificial Sequence: Synthetic peptide
  XENP021609 vhCDR1
DYYMH

SEQ ID NO: 27297 - protein, 17 aa, Artificial Sequence
  Description of Artificial Sequence: Synthetic peptide
  XENP021609 vhCDR2
WIDPYNGDTEYAPKFQG

SEQ ID NO: 27298 - protein, 9 aa, Artificial Sequence
  Description of Artificial Sequence: Synthetic peptide
  XENP021609 vhCDR3
RGVRQALDY

SEQ ID NO: 27299 - protein, 214 aa, Artificial Sequence; identical to SEQ ID NO: 26719
  Description of Artificial Sequence: Synthetic polypeptide
  XENP021609 2A11_H1.64_L2.35_Fab Light Chain

SEQ ID NO: 27300 - protein, 107 aa, Artificial Sequence; identical to SEQ ID NO: 26720
  Description of Artificial Sequence: Synthetic polypeptide
  VL of XENP021609

SEQ ID NO: 27301 - protein, 11 aa, Artificial Sequence
  Description of Artificial Sequence: Synthetic peptide
  XENP021609 vlCDR1
QASQDIGNYLN

SEQ ID NO: 27302 - protein, 7 aa, Artificial Sequence
  Description of Artificial Sequence: Synthetic peptide
  XENP021609 vlCDR2
FTSRLHS

SEQ ID NO: 27303 - protein, 9 aa, Artificial Sequence
  Description of Artificial Sequence: Synthetic peptide
  XENP021609 vlCDR3
QQGNTLPYT

SEQ ID NO: 27304 - protein, 223 aa, Artificial Sequence; identical to SEQ ID NO: 25844
  Description of Artificial Sequence: Synthetic polypeptide
  XENP021610 2A11_H1.64_L2.47_Fab Heavy Chain

SEQ ID NO: 27305 - protein, 118 aa, Artificial Sequence; identical to SEQ ID NO: 25845
  Description of Artificial Sequence: Synthetic polypeptide
  VH of XENP021610

SEQ ID NO: 27306 - protein, 5 aa, Artificial Sequence
  Description of Artificial Sequence: Synthetic peptide
  XENP021610 vhCDR1
DYYMH

SEQ ID NO: 27307 - protein, 17 aa, Artificial Sequence
  Description of Artificial Sequence: Synthetic peptide
  XENP021610 vhCDR2
WIDPYNGDTEYAPKFQG

SEQ ID NO: 27308 - protein, 9 aa, Artificial Sequence
  Description of Artificial Sequence: Synthetic peptide
  XENP021610 vhCDR3
RGVRQALDY

SEQ ID NO: 27309 - protein, 214 aa, Artificial Sequence; identical to SEQ ID NO: 22039
  Description of Artificial Sequence: Synthetic polypeptide
  XENP021610 2A11_H1.64_L2.47_Fab Light Chain

SEQ ID NO: 27310 - protein, 107 aa, Artificial Sequence; identical to SEQ ID NO: 22040
  Description of Artificial Sequence: Synthetic polypeptide
  VL of XENP021610

SEQ ID NO: 27311 - protein, 11 aa, Artificial Sequence
  Description of Artificial Sequence: Synthetic peptide
  XENP021610 vlCDR1
QASQDIGNYLN

SEQ ID NO: 27312 - protein, 7 aa, Artificial Sequence
  Description of Artificial Sequence: Synthetic peptide
  XENP021610 vlCDR2
YTSHLHS

SEQ ID NO: 27313 - protein, 9 aa, Artificial Sequence
  Description of Artificial Sequence: Synthetic peptide
  XENP021610 vlCDR3
QQGNTLPYT

SEQ ID NO: 27314 - protein, 223 aa, Artificial Sequence; identical to SEQ ID NO: 25844
  Description of Artificial Sequence: Synthetic polypeptide
  XENP021611 2A11_H1.64_L2.50_Fab Heavy Chain

SEQ ID NO: 27315 - protein, 118 aa, Artificial Sequence; identical to SEQ ID NO: 25845
  Description of Artificial Sequence: Synthetic polypeptide
  VH of XENP021611

SEQ ID NO: 27316 - protein, 5 aa, Artificial Sequence
  Description of Artificial Sequence: Synthetic peptide
  XENP021611 vhCDR1
DYYMH

SEQ ID NO: 27317 - protein, 17 aa, Artificial Sequence
  Description of Artificial Sequence: Synthetic peptide
  XENP021611 vhCDR2
WIDPYNGDTEYAPKFQG

SEQ ID NO: 27318 - protein, 9 aa, Artificial Sequence
  Description of Artificial Sequence: Synthetic peptide
  XENP021611 vhCDR3
RGVRQALDY

SEQ ID NO: 27319 - protein, 214 aa, Artificial Sequence; identical to SEQ ID NO: 22059
  Description of Artificial Sequence: Synthetic polypeptide
  XENP021611 2A11_H1.64_L2.50_Fab Light Chain

SEQ ID NO: 27320 - protein, 107 aa, Artificial Sequence; identical to SEQ ID NO: 22060
  Description of Artificial Sequence: Synthetic polypeptide
  VL of XENP021611

SEQ ID NO: 27321 - protein, 11 aa, Artificial Sequence
  Description of Artificial Sequence: Synthetic peptide
  XENP021611 vlCDR1
QASQDIGNYLN

SEQ ID NO: 27322 - protein, 7 aa, Artificial Sequence
  Description of Artificial Sequence: Synthetic peptide
  XENP021611 vlCDR2
YTSYLHS

SEQ ID NO: 27323 - protein, 9 aa, Artificial Sequence
  Description of Artificial Sequence: Synthetic peptide
  XENP021611 vlCDR3
QQGNTLPYT

SEQ ID NO: 27324 - protein, 223 aa, Artificial Sequence; identical to SEQ ID NO: 25904
  Description of Artificial Sequence: Synthetic polypeptide
  XENP021612 2A11_H1.70_L2.35_Fab Heavy Chain

SEQ ID NO: 27325 - protein, 118 aa, Artificial Sequence; identical to SEQ ID NO: 25905
  Description of Artificial Sequence: Synthetic polypeptide
  VH of XENP021612

SEQ ID NO: 27326 - protein, 5 aa, Artificial Sequence
  Description of Artificial Sequence: Synthetic peptide
  XENP021612 vhCDR1
DYYMH

SEQ ID NO: 27327 - protein, 17 aa, Artificial Sequence
  Description of Artificial Sequence: Synthetic peptide
  XENP021612 vhCDR2
WIDPELGDTEYAPKFQG

SEQ ID NO: 27328 - protein, 9 aa, Artificial Sequence
  Description of Artificial Sequence: Synthetic peptide
  XENP021612 vhCDR3
RGVRQALDY

SEQ ID NO: 27329 - protein, 214 aa, Artificial Sequence; identical to SEQ ID NO: 26719
  Description of Artificial Sequence: Synthetic polypeptide
  XENP021612 2A11_H1.70_L2.35_Fab Light Chain

SEQ ID NO: 27330 - protein, 107 aa, Artificial Sequence; identical to SEQ ID NO: 26720
  Description of Artificial Sequence: Synthetic polypeptide
  VL of XENP021612

SEQ ID NO: 27331 - protein, 11 aa, Artificial Sequence
  Description of Artificial Sequence: Synthetic peptide
  XENP021612 vlCDR1
QASQDIGNYLN

SEQ ID NO: 27332 - protein, 7 aa, Artificial Sequence
  Description of Artificial Sequence: Synthetic peptide
  XENP021612 vlCDR2
FTSRLHS

SEQ ID NO: 27333 - protein, 9 aa, Artificial Sequence
  Description of Artificial Sequence: Synthetic peptide
  XENP021612 vlCDR3
QQGNTLPYT

SEQ ID NO: 27334 - protein, 223 aa, Artificial Sequence; identical to SEQ ID NO: 25904
  Description of Artificial Sequence: Synthetic polypeptide
  XENP021613 2A11_H1.70_L2.47_Fab Heavy Chain

SEQ ID NO: 27335 - protein, 118 aa, Artificial Sequence; identical to SEQ ID NO: 25905
  Description of Artificial Sequence: Synthetic polypeptide
  VH of XENP021613

SEQ ID NO: 27336 - protein, 5 aa, Artificial Sequence
  Description of Artificial Sequence: Synthetic peptide
  XENP021613 vhCDR1
DYYMH

SEQ ID NO: 27337 - protein, 17 aa, Artificial Sequence
  Description of Artificial Sequence: Synthetic peptide
  XENP021613 vhCDR2
WIDPELGDTEYAPKFQG

SEQ ID NO: 27338 - protein, 9 aa, Artificial Sequence
  Description of Artificial Sequence: Synthetic peptide
  XENP021613 vhCDR3
RGVRQALDY

SEQ ID NO: 27339 - protein, 214 aa, Artificial Sequence; identical to SEQ ID NO: 22039
  Description of Artificial Sequence: Synthetic polypeptide
  XENP021613 2A11_H1.70_L2.47_Fab Light Chain

SEQ ID NO: 27340 - protein, 107 aa, Artificial Sequence; identical to SEQ ID NO: 22040
  Description of Artificial Sequence: Synthetic polypeptide
  VL of XENP021613

SEQ ID NO: 27341 - protein, 11 aa, Artificial Sequence
  Description of Artificial Sequence: Synthetic peptide
  XENP021613 vlCDR1
QASQDIGNYLN

SEQ ID NO: 27342 - protein, 7 aa, Artificial Sequence
  Description of Artificial Sequence: Synthetic peptide
  XENP021613 vlCDR2
YTSHLHS

SEQ ID NO: 27343 - protein, 9 aa, Artificial Sequence
  Description of Artificial Sequence: Synthetic peptide
  XENP021613 vlCDR3
QQGNTLPYT

SEQ ID NO: 27344 - protein, 223 aa, Artificial Sequence; identical to SEQ ID NO: 25904
  Description of Artificial Sequence: Synthetic polypeptide
  XENP021614 2A11_H1.70_L2.50_Fab Heavy Chain

SEQ ID NO: 27345 - protein, 118 aa, Artificial Sequence; identical to SEQ ID NO: 25905
  Description of Artificial Sequence: Synthetic polypeptide
  VH of XENP021614

SEQ ID NO: 27346 - protein, 5 aa, Artificial Sequence
  Description of Artificial Sequence: Synthetic peptide
  XENP021614 vhCDR1
DYYMH

SEQ ID NO: 27347 - protein, 17 aa, Artificial Sequence
  Description of Artificial Sequence: Synthetic peptide
  XENP021614 vhCDR2
WIDPELGDTEYAPKFQG

SEQ ID NO: 27348 - protein, 9 aa, Artificial Sequence
  Description of Artificial Sequence: Synthetic peptide
  XENP021614 vhCDR3
RGVRQALDY

SEQ ID NO: 27349 - protein, 214 aa, Artificial Sequence; identical to SEQ ID NO: 22059
  Description of Artificial Sequence: Synthetic polypeptide
  XENP021614 2A11_H1.70_L2.50_Fab Light Chain

SEQ ID NO: 27350 - protein, 107 aa, Artificial Sequence; identical to SEQ ID NO: 22060
  Description of Artificial Sequence: Synthetic polypeptide
  VL of XENP021614

SEQ ID NO: 27351 - protein, 11 aa, Artificial Sequence
  Description of Artificial Sequence: Synthetic peptide
  XENP021614 vlCDR1
QASQDIGNYLN

SEQ ID NO: 27352 - protein, 7 aa, Artificial Sequence
  Description of Artificial Sequence: Synthetic peptide
  XENP021614 vlCDR2
YTSYLHS

SEQ ID NO: 27353 - protein, 9 aa, Artificial Sequence
  Description of Artificial Sequence: Synthetic peptide
  XENP021614 vlCDR3
QQGNTLPYT

SEQ ID NO: 27354 - protein, 223 aa, Artificial Sequence; identical to SEQ ID NO: 26254
  Description of Artificial Sequence: Synthetic polypeptide
  XENP021615 2A11_H1.105_L2.35_Fab Heavy Chain

SEQ ID NO: 27355 - protein, 118 aa, Artificial Sequence; identical to SEQ ID NO: 26255
  Description of Artificial Sequence: Synthetic polypeptide
  VH of XENP021615

SEQ ID NO: 27356 - protein, 5 aa, Artificial Sequence
  Description of Artificial Sequence: Synthetic peptide
  XENP021615 vhCDR1
DYYMH

SEQ ID NO: 27357 - protein, 17 aa, Artificial Sequence
  Description of Artificial Sequence: Synthetic peptide
  XENP021615 vhCDR2
WIDPENGDTEYAPKFQG

SEQ ID NO: 27358 - protein, 9 aa, Artificial Sequence
  Description of Artificial Sequence: Synthetic peptide
  XENP021615 vhCDR3
RGVYQALDY

SEQ ID NO: 27359 - protein, 214 aa, Artificial Sequence; identical to SEQ ID NO: 26719
  Description of Artificial Sequence: Synthetic polypeptide
  XENP021615 2A11_H1.105_L2.35_Fab Light Chain

SEQ ID NO: 27360 - protein, 107 aa, Artificial Sequence; identical to SEQ ID NO: 26720
  Description of Artificial Sequence: Synthetic polypeptide
  VL of XENP021615

SEQ ID NO: 27361 - protein, 11 aa, Artificial Sequence
  Description of Artificial Sequence: Synthetic peptide
  XENP021615 vlCDR1
QASQDIGNYLN

SEQ ID NO: 27362 - protein, 7 aa, Artificial Sequence
  Description of Artificial Sequence: Synthetic peptide
  XENP021615 vlCDR2
FTSRLHS

SEQ ID NO: 27363 - protein, 9 aa, Artificial Sequence
  Description of Artificial Sequence: Synthetic peptide
  XENP021615 vlCDR3
QQGNTLPYT

SEQ ID NO: 27364 - protein, 223 aa, Artificial Sequence; identical to SEQ ID NO: 26254
  Description of Artificial Sequence: Synthetic polypeptide
  XENP021616 2A11_H1.105_L2.47_Fab Heavy Chain

SEQ ID NO: 27365 - protein, 118 aa, Artificial Sequence; identical to SEQ ID NO: 26255
  Description of Artificial Sequence: Synthetic polypeptide
  VH of XENP021616

SEQ ID NO: 27366 - protein, 5 aa, Artificial Sequence
  Description of Artificial Sequence: Synthetic peptide
  XENP021616 vhCDR1
DYYMH

SEQ ID NO: 27367 - protein, 17 aa, Artificial Sequence
  Description of Artificial Sequence: Synthetic peptide
  XENP021616 vhCDR2
WIDPENGDTEYAPKFQG

SEQ ID NO: 27368 - protein, 9 aa, Artificial Sequence
  Description of Artificial Sequence: Synthetic peptide
  XENP021616 vhCDR3
RGVYQALDY

SEQ ID NO: 27369 - protein, 214 aa, Artificial Sequence; identical to SEQ ID NO: 22039
  Description of Artificial Sequence: Synthetic polypeptide
  XENP021616 2A11_H1.105_L2.47_Fab Light Chain

SEQ ID NO: 27370 - protein, 107 aa, Artificial Sequence; identical to SEQ ID NO: 22040
  Description of Artificial Sequence: Synthetic polypeptide
  VL of XENP021616

SEQ ID NO: 27371 - protein, 11 aa, Artificial Sequence
  Description of Artificial Sequence: Synthetic peptide
  XENP021616 vlCDR1
QASQDIGNYLN

SEQ ID NO: 27372 - protein, 7 aa, Artificial Sequence
  Description of Artificial Sequence: Synthetic peptide
  XENP021616 vlCDR2
YTSHLHS

SEQ ID NO: 27373 - protein, 9 aa, Artificial Sequence
  Description of Artificial Sequence: Synthetic peptide
  XENP021616 vlCDR3
QQGNTLPYT

SEQ ID NO: 27374 - protein, 223 aa, Artificial Sequence; identical to SEQ ID NO: 26254
  Description of Artificial Sequence: Synthetic polypeptide
  XENP021617 2A11_H1.105_L2.50_Fab Heavy Chain

SEQ ID NO: 27375 - protein, 118 aa, Artificial Sequence; identical to SEQ ID NO: 26255
  Description of Artificial Sequence: Synthetic polypeptide
  VH of XENP021617

SEQ ID NO: 27376 - protein, 5 aa, Artificial Sequence
  Description of Artificial Sequence: Synthetic peptide
  XENP021617 vhCDR1
DYYMH

SEQ ID NO: 27377 - protein, 17 aa, Artificial Sequence
  Description of Artificial Sequence: Synthetic peptide
  XENP021617 vhCDR2
WIDPENGDTEYAPKFQG

SEQ ID NO: 27378 - protein, 9 aa, Artificial Sequence
  Description of Artificial Sequence: Synthetic peptide
  XENP021617 vhCDR3
RGVYQALDY

SEQ ID NO: 27379 - protein, 214 aa, Artificial Sequence; identical to SEQ ID NO: 22059
  Description of Artificial Sequence: Synthetic polypeptide
  XENP021617 2A11_H1.105_L2.50_Fab Light Chain

SEQ ID NO: 27380 - protein, 107 aa, Artificial Sequence; identical to SEQ ID NO: 22060
  Description of Artificial Sequence: Synthetic polypeptide
  VL of XENP021617

SEQ ID NO: 27381 - protein, 11 aa, Artificial Sequence
  Description of Artificial Sequence: Synthetic peptide
  XENP021617 vlCDR1
QASQDIGNYLN

SEQ ID NO: 27382 - protein, 7 aa, Artificial Sequence
  Description of Artificial Sequence: Synthetic peptide
  XENP021617 vlCDR2
YTSYLHS

SEQ ID NO: 27383 - protein, 9 aa, Artificial Sequence
  Description of Artificial Sequence: Synthetic peptide
  XENP021617 vlCDR3
QQGNTLPYT

SEQ ID NO: 27384 - protein, 223 aa, Artificial Sequence
  Description of Artificial Sequence: Synthetic polypeptide
  XENP021705 2A11_H1.117_L2_Fab Heavy Chain
EVQLVQSGAEVKKPGATVKISCKASGFNIKHYFMHWVQQAPGKGLEWMGWIDPYLGDTEYAPKFQGRVTITADTSTNTAYMELSSLRSEDTAVYYCYARGVRQALDYWGQGTLVTVSSASTKGPSVFPLAPSSKSTSGGTAALGCLVKDYFPEPVTVSWNSGALTSGVHTFPAVLQSSGLYSLSSVVTVPSSSLGTQTYICNVNHKPSNTKVDKKVEPKSCGS

SEQ ID NO: 27385 - protein, 118 aa, Artificial Sequence; identical to SEQ ID NO: 22105
  Description of Artificial Sequence: Synthetic polypeptide
  VH of XENP021705

SEQ ID NO: 27386 - protein, 5 aa, Artificial Sequence
  Description of Artificial Sequence: Synthetic peptide
  XENP021705 vhCDR1
HYFMH

SEQ ID NO: 27387 - protein, 17 aa, Artificial Sequence
  Description of Artificial Sequence: Synthetic peptide
  XENP021705 vhCDR2
WIDPYLGDTEYAPKFQG

SEQ ID NO: 27388 - protein, 9 aa, Artificial Sequence
  Description of Artificial Sequence: Synthetic peptide
  XENP021705 vhCDR3
RGVRQALDY

SEQ ID NO: 27389 - protein, 214 aa, Artificial Sequence; identical to SEQ ID NO: 17250
  Description of Artificial Sequence: Synthetic polypeptide
  XENP021705 2A11_H1.117_L2_Fab Light Chain

SEQ ID NO: 27390 - protein, 107 aa, Artificial Sequence; identical to SEQ ID NO: 17251
  Description of Artificial Sequence: Synthetic polypeptide
  VL of XENP021705

SEQ ID NO: 27391 - protein, 11 aa, Artificial Sequence
  Description of Artificial Sequence: Synthetic peptide
  XENP021705 vlCDR1
QASQDIGNYLN

SEQ ID NO: 27392 - protein, 7 aa, Artificial Sequence
  Description of Artificial Sequence: Synthetic peptide
  XENP021705 vlCDR2
YTSRLHS

SEQ ID NO: 27393 - protein, 9 aa, Artificial Sequence
  Description of Artificial Sequence: Synthetic peptide
  XENP021705 vlCDR3
QQGNTLPYT

SEQ ID NO: 27394 - protein, 223 aa, Artificial Sequence
  Description of Artificial Sequence: Synthetic polypeptide
  XENP021706 2A11_H1.118_L2_Fab Heavy Chain
EVQLVQSGAEVKKPGATVKISCKASGFNIKHYFMHWVQQAPGKGLEWMGWIDPYTGDTEYAPKFQGRVTITADTSTNTAYMELSSLRSEDTAVYYCYARGVRQALDYWGQGTLVTVSSASTKGPSVFPLAPSSKSTSGGTAALGCLVKDYFPEPVTVSWNSGALTSGVHTFPAVLQSSGLYSLSSVVTVPSSSLGTQTYICNVNHKPSNTKVDKKVEPKSCGS

SEQ ID NO: 27395 - protein, 118 aa, Artificial Sequence
  Description of Artificial Sequence: Synthetic polypeptide
  VH of XENP021706
EVQLVQSGAEVKKPGATVKISCKASGFNIKHYFMHWVQQAPGKGLEWMGWIDPYTGDTEYAPKFQGRVTITADTSTNTAYMELSSLRSEDTAVYYCYARGVRQALDYWGQGTLVTVSS

SEQ ID NO: 27396 - protein, 5 aa, Artificial Sequence
  Description of Artificial Sequence: Synthetic peptide
  XENP021706 vhCDR1
HYFMH

SEQ ID NO: 27397 - protein, 17 aa, Artificial Sequence
  Description of Artificial Sequence: Synthetic peptide
  XENP021706 vhCDR2
WIDPYTGDTEYAPKFQG

SEQ ID NO: 27398 - protein, 9 aa, Artificial Sequence
  Description of Artificial Sequence: Synthetic peptide
  XENP021706 vhCDR3
RGVRQALDY

SEQ ID NO: 27399 - protein, 214 aa, Artificial Sequence; identical to SEQ ID NO: 17250
  Description of Artificial Sequence: Synthetic polypeptide
  XENP021706 2A11_H1.118_L2_Fab Light Chain

SEQ ID NO: 27400 - protein, 107 aa, Artificial Sequence; identical to SEQ ID NO: 17251
  Description of Artificial Sequence: Synthetic polypeptide
  VL of XENP021706

SEQ ID NO: 27401 - protein, 11 aa, Artificial Sequence
  Description of Artificial Sequence: Synthetic peptide
  XENP021706 vlCDR1
QASQDIGNYLN

SEQ ID NO: 27402 - protein, 7 aa, Artificial Sequence
  Description of Artificial Sequence: Synthetic peptide
  XENP021706 vlCDR2
YTSRLHS

SEQ ID NO: 27403 - protein, 9 aa, Artificial Sequence
  Description of Artificial Sequence: Synthetic peptide
  XENP021706 vlCDR3
QQGNTLPYT

SEQ ID NO: 27404 - protein, 223 aa, Artificial Sequence
  Description of Artificial Sequence: Synthetic polypeptide
  XENP021707 2A11_H1.119_L2_Fab Heavy Chain
EVQLVQSGAEVKKPGATVKISCKASGFNIKHYFMHWVQQAPGKGLEWMGWIDPELGDTEYAPKFQGRVTITADTSTNTAYMELSSLRSEDTAVYYCYARGVRQALDYWGQGTLVTVSSASTKGPSVFPLAPSSKSTSGGTAALGCLVKDYFPEPVTVSWNSGALTSGVHTFPAVLQSSGLYSLSSVVTVPSSSLGTQTYICNVNHKPSNTKVDKKVEPKSCGS

SEQ ID NO: 27405 - protein, 118 aa, Artificial Sequence
  Description of Artificial Sequence: Synthetic polypeptide
  VH of XENP021707
EVQLVQSGAEVKKPGATVKISCKASGFNIKHYFMHWVQQAPGKGLEWMGWIDPELGDTEYAPKFQGRVTITADTSTNTAYMELSSLRSEDTAVYYCYARGVRQALDYWGQGTLVTVSS

SEQ ID NO: 27406 - protein, 5 aa, Artificial Sequence
  Description of Artificial Sequence: Synthetic peptide
  XENP021707 vhCDR1
HYFMH

SEQ ID NO: 27407 - protein, 17 aa, Artificial Sequence
  Description of Artificial Sequence: Synthetic peptide
  XENP021707 vhCDR2
WIDPELGDTEYAPKFQG

SEQ ID NO: 27408 - protein, 9 aa, Artificial Sequence
  Description of Artificial Sequence: Synthetic peptide
  XENP021707 vhCDR3
RGVRQALDY

SEQ ID NO: 27409 - protein, 214 aa, Artificial Sequence; identical to SEQ ID NO: 17250
  Description of Artificial Sequence: Synthetic polypeptide
  XENP021707 2A11_H1.119_L2_Fab Light Chain

SEQ ID NO: 27410 - protein, 107 aa, Artificial Sequence; identical to SEQ ID NO: 17251
  Description of Artificial Sequence: Synthetic polypeptide
  VL of XENP021707

SEQ ID NO: 27411 - protein, 11 aa, Artificial Sequence
  Description of Artificial Sequence: Synthetic peptide
  XENP021707 vlCDR1
QASQDIGNYLN

SEQ ID NO: 27412 - protein, 7 aa, Artificial Sequence
  Description of Artificial Sequence: Synthetic peptide
  XENP021707 vlCDR2
YTSRLHS

SEQ ID NO: 27413 - protein, 9 aa, Artificial Sequence
  Description of Artificial Sequence: Synthetic peptide
  XENP021707 vlCDR3
QQGNTLPYT

SEQ ID NO: 27414 - protein, 223 aa, Artificial Sequence
  Description of Artificial Sequence: Synthetic polypeptide
  XENP021708 2A11_H1.120_L2_Fab Heavy Chain
EVQLVQSGAEVKKPGATVKISCKASGFNIKHYFMHWVQQAPGKGLEWMGWIDPETGDTEYAPKFQGRVTITADTSTNTAYMELSSLRSEDTAVYYCYARGVRQALDYWGQGTLVTVSSASTKGPSVFPLAPSSKSTSGGTAALGCLVKDYFPEPVTVSWNSGALTSGVHTFPAVLQSSGLYSLSSVVTVPSSSLGTQTYICNVNHKPSNTKVDKKVEPKSCGS

SEQ ID NO: 27415 - protein, 118 aa, Artificial Sequence
  Description of Artificial Sequence: Synthetic polypeptide
  VH of XENP021708
EVQLVQSGAEVKKPGATVKISCKASGFNIKHYFMHWVQQAPGKGLEWMGWIDPETGDTEYAPKFQGRVTITADTSTNTAYMELSSLRSEDTAVYYCYARGVRQALDYWGQGTLVTVSS

SEQ ID NO: 27416 - protein, 5 aa, Artificial Sequence
  Description of Artificial Sequence: Synthetic peptide
  XENP021708 vhCDR1
HYFMH

SEQ ID NO: 27417 - protein, 17 aa, Artificial Sequence
  Description of Artificial Sequence: Synthetic peptide
  XENP021708 vhCDR2
WIDPETGDTEYAPKFQG

SEQ ID NO: 27418 - protein, 9 aa, Artificial Sequence
  Description of Artificial Sequence: Synthetic peptide
  XENP021708 vhCDR3
RGVRQALDY

SEQ ID NO: 27419 - protein, 214 aa, Artificial Sequence; identical to SEQ ID NO: 17250
  Description of Artificial Sequence: Synthetic polypeptide
  XENP021708 2A11_H1.120_L2_Fab Light Chain

SEQ ID NO: 27420 - protein, 107 aa, Artificial Sequence; identical to SEQ ID NO: 17251
  Description of Artificial Sequence: Synthetic polypeptide
  VL of XENP021708

SEQ ID NO: 27421 - protein, 11 aa, Artificial Sequence
  Description of Artificial Sequence: Synthetic peptide
  XENP021708 vlCDR1
QASQDIGNYLN

SEQ ID NO: 27422 - protein, 7 aa, Artificial Sequence
  Description of Artificial Sequence: Synthetic peptide
  XENP021708 vlCDR2
YTSRLHS

SEQ ID NO: 27423 - protein, 9 aa, Artificial Sequence
  Description of Artificial Sequence: Synthetic peptide
  XENP021708 vlCDR3
QQGNTLPYT

SEQ ID NO: 27424 - protein, 223 aa, Artificial Sequence
  Description of Artificial Sequence: Synthetic polypeptide
  XENP021709 2A11_H1.121_L2_Fab Heavy Chain
EVQLVQSGAEVKKPGATVKISCKASGFNIKHYFMHWVQQAPGKGLEWMGWIDPYLGDTEYAPKFQGRVTITADTSTNTAYMELSSLRSEDTAVYYCYARGVKQALDYWGQGTLVTVSSASTKGPSVFPLAPSSKSTSGGTAALGCLVKDYFPEPVTVSWNSGALTSGVHTFPAVLQSSGLYSLSSVVTVPSSSLGTQTYICNVNHKPSNTKVDKKVEPKSCGS

SEQ ID NO: 27425 - protein, 118 aa, Artificial Sequence
  Description of Artificial Sequence: Synthetic polypeptide
  VH of XENP021709
EVQLVQSGAEVKKPGATVKISCKASGFNIKHYFMHWVQQAPGKGLEWMGWIDPYLGDTEYAPKFQGRVTITADTSTNTAYMELSSLRSEDTAVYYCYARGVKQALDYWGQGTLVTVSS

SEQ ID NO: 27426 - protein, 5 aa, Artificial Sequence
  Description of Artificial Sequence: Synthetic peptide
  XENP021709 vhCDR1
HYFMH

SEQ ID NO: 27427 - protein, 17 aa, Artificial Sequence
  Description of Artificial Sequence: Synthetic peptide
  XENP021709 vhCDR2
WIDPYLGDTEYAPKFQG

SEQ ID NO: 27428 - protein, 9 aa, Artificial Sequence
  Description of Artificial Sequence: Synthetic peptide
  XENP021709 vhCDR3
RGVKQALDY

SEQ ID NO: 27429 - protein, 214 aa, Artificial Sequence; identical to SEQ ID NO: 17250
  Description of Artificial Sequence: Synthetic polypeptide
  XENP021709 2A11_H1.121_L2_Fab Light Chain

SEQ ID NO: 27430 - protein, 107 aa, Artificial Sequence; identical to SEQ ID NO: 17251
  Description of Artificial Sequence: Synthetic polypeptide
  VL of XENP021709

SEQ ID NO: 27431 - protein, 11 aa, Artificial Sequence
  Description of Artificial Sequence: Synthetic peptide
  XENP021709 vlCDR1
QASQDIGNYLN

SEQ ID NO: 27432 - protein, 7 aa, Artificial Sequence
  Description of Artificial Sequence: Synthetic peptide
  XENP021709 vlCDR2
YTSRLHS

SEQ ID NO: 27433 - protein, 9 aa, Artificial Sequence
  Description of Artificial Sequence: Synthetic peptide
  XENP021709 vlCDR3
QQGNTLPYT

SEQ ID NO: 27434 - protein, 223 aa, Artificial Sequence
  Description of Artificial Sequence: Synthetic polypeptide
  XENP021710 2A11_H1.122_L2_Fab Heavy Chain
EVQLVQSGAEVKKPGATVKISCKASGFNIKHYFMHWVQQAPGKGLEWMGWIDPYTGDTEYAPKFQGRVTITADTSTNTAYMELSSLRSEDTAVYYCYARGVKQALDYWGQGTLVTVSSASTKGPSVFPLAPSSKSTSGGTAALGCLVKDYFPEPVTVSWNSGALTSGVHTFPAVLQSSGLYSLSSVVTVPSSSLGTQTYICNVNHKPSNTKVDKKVEPKSCGS

SEQ ID NO: 27435 - protein, 118 aa, Artificial Sequence
  Description of Artificial Sequence: Synthetic polypeptide
  VH of XENP021710
EVQLVQSGAEVKKPGATVKISCKASGFNIKHYFMHWVQQAPGKGLEWMGWIDPYTGDTEYAPKFQGRVTITADTSTNTAYMELSSLRSEDTAVYYCYARGVKQALDYWGQGTLVTVSS

SEQ ID NO: 27436 - protein, 5 aa, Artificial Sequence
  Description of Artificial Sequence: Synthetic peptide
  XENP021710 vhCDR1
HYFMH

SEQ ID NO: 27437 - protein, 17 aa, Artificial Sequence
  Description of Artificial Sequence: Synthetic peptide
  XENP021710 vhCDR2
WIDPYTGDTEYAPKFQG

SEQ ID NO: 27438 - protein, 9 aa, Artificial Sequence
  Description of Artificial Sequence: Synthetic peptide
  XENP021710 vhCDR3
RGVKQALDY

SEQ ID NO: 27439 - protein, 214 aa, Artificial Sequence; identical to SEQ ID NO: 17250
  Description of Artificial Sequence: Synthetic polypeptide
  XENP021710 2A11_H1.122_L2_Fab Light Chain

SEQ ID NO: 27440 - protein, 107 aa, Artificial Sequence; identical to SEQ ID NO: 17251
  Description of Artificial Sequence: Synthetic polypeptide
  VL of XENP021710

SEQ ID NO: 27441 - protein, 11 aa, Artificial Sequence
  Description of Artificial Sequence: Synthetic peptide
  XENP021710 vlCDR1
QASQDIGNYLN

SEQ ID NO: 27442 - protein, 7 aa, Artificial Sequence
  Description of Artificial Sequence: Synthetic peptide
  XENP021710 vlCDR2
YTSRLHS

SEQ ID NO: 27443 - protein, 9 aa, Artificial Sequence
  Description of Artificial Sequence: Synthetic peptide
  XENP021710 vlCDR3
QQGNTLPYT

SEQ ID NO: 27444 - protein, 223 aa, Artificial Sequence
  Description of Artificial Sequence: Synthetic polypeptide
  XENP021711 2A11_H1.123_L2_Fab Heavy Chain
EVQLVQSGAEVKKPGATVKISCKASGFNIKHYFMHWVQQAPGKGLEWMGWIDPELGDTEYAPKFQGRVTITADTSTNTAYMELSSLRSEDTAVYYCYARGVKQALDYWGQGTLVTVSSASTKGPSVFPLAPSSKSTSGGTAALGCLVKDYFPEPVTVSWNSGALTSGVHTFPAVLQSSGLYSLSSVVTVPSSSLGTQTYICNVNHKPSNTKVDKKVEPKSCGS

SEQ ID NO: 27445 - protein, 118 aa, Artificial Sequence
  Description of Artificial Sequence: Synthetic polypeptide
  VH of XENP021711
EVQLVQSGAEVKKPGATVKISCKASGFNIKHYFMHWVQQAPGKGLEWMGWIDPELGDTEYAPKFQGRVTITADTSTNTAYMELSSLRSEDTAVYYCYARGVKQALDYWGQGTLVTVSS

SEQ ID NO: 27446 - protein, 5 aa, Artificial Sequence
  Description of Artificial Sequence: Synthetic peptide
  XENP021711 vhCDR1
HYFMH

SEQ ID NO: 27447 - protein, 17 aa, Artificial Sequence
  Description of Artificial Sequence: Synthetic peptide
  XENP021711 vhCDR2
WIDPELGDTEYAPKFQG

SEQ ID NO: 27448 - protein, 9 aa, Artificial Sequence
  Description of Artificial Sequence: Synthetic peptide
  XENP021711 vhCDR3
RGVKQALDY

SEQ ID NO: 27449 - protein, 214 aa, Artificial Sequence; identical to SEQ ID NO: 17250
  Description of Artificial Sequence: Synthetic polypeptide
  XENP021711 2A11_H1.123_L2_Fab Light Chain

SEQ ID NO: 27450 - protein, 107 aa, Artificial Sequence; identical to SEQ ID NO: 17251
  Description of Artificial Sequence: Synthetic polypeptide
  VL of XENP021711

SEQ ID NO: 27451 - protein, 11 aa, Artificial Sequence
  Description of Artificial Sequence: Synthetic peptide
  XENP021711 vlCDR1
QASQDIGNYLN

SEQ ID NO: 27452 - protein, 7 aa, Artificial Sequence
  Description of Artificial Sequence: Synthetic peptide
  XENP021711 vlCDR2
YTSRLHS

SEQ ID NO: 27453 - protein, 9 aa, Artificial Sequence
  Description of Artificial Sequence: Synthetic peptide
  XENP021711 vlCDR3
QQGNTLPYT

SEQ ID NO: 27454 - protein, 223 aa, Artificial Sequence
  Description of Artificial Sequence: Synthetic polypeptide
  XENP021712 2A11_H1.124_L2_Fab Heavy Chain
EVQLVQSGAEVKKPGATVKISCKASGFNIKHYFMHWVQQAPGKGLEWMGWIDPETGDTEYAPKFQGRVTITADTSTNTAYMELSSLRSEDTAVYYCYARGVKQALDYWGQGTLVTVSSASTKGPSVFPLAPSSKSTSGGTAALGCLVKDYFPEPVTVSWNSGALTSGVHTFPAVLQSSGLYSLSSVVTVPSSSLGTQTYICNVNHKPSNTKVDKKVEPKSCGS

SEQ ID NO: 27455 - protein, 118 aa, Artificial Sequence
  Description of Artificial Sequence: Synthetic polypeptide
  VH of XENP021712
EVQLVQSGAEVKKPGATVKISCKASGFNIKHYFMHWVQQAPGKGLEWMGWIDPETGDTEYAPKFQGRVTITADTSTNTAYMELSSLRSEDTAVYYCYARGVKQALDYWGQGTLVTVSS

SEQ ID NO: 27456 - protein, 5 aa, Artificial Sequence
  Description of Artificial Sequence: Synthetic peptide
  XENP021712 vhCDR1
HYFMH

SEQ ID NO: 27457 - protein, 17 aa, Artificial Sequence
  Description of Artificial Sequence: Synthetic peptide
  XENP021712 vhCDR2
WIDPETGDTEYAPKFQG

SEQ ID NO: 27458 - protein, 9 aa, Artificial Sequence
  Description of Artificial Sequence: Synthetic peptide
  XENP021712 vhCDR3
RGVKQALDY

SEQ ID NO: 27459 - protein, 214 aa, Artificial Sequence; identical to SEQ ID NO: 17250
  Description of Artificial Sequence: Synthetic polypeptide
  XENP021712 2A11_H1.124_L2_Fab Light Chain

SEQ ID NO: 27460 - protein, 107 aa, Artificial Sequence; identical to SEQ ID NO: 17251
  Description of Artificial Sequence: Synthetic polypeptide
  VL of XENP021712

SEQ ID NO: 27461 - protein, 11 aa, Artificial Sequence
  Description of Artificial Sequence: Synthetic peptide
  XENP021712 vlCDR1
QASQDIGNYLN

SEQ ID NO: 27462 - protein, 7 aa, Artificial Sequence
  Description of Artificial Sequence: Synthetic peptide
  XENP021712 vlCDR2
YTSRLHS

SEQ ID NO: 27463 - protein, 9 aa, Artificial Sequence
  Description of Artificial Sequence: Synthetic peptide
  XENP021712 vlCDR3
QQGNTLPYT

SEQ ID NO: 27464 - protein, 223 aa, Artificial Sequence
  Description of Artificial Sequence: Synthetic polypeptide
  XENP021713 2A11_H1.126_L2_Fab Heavy Chain
EVQLVQSGAEVKKPGATVKISCKASGFNIKHYFMHWVQQAPGKGLEWMGWIDPYTGDTEYAPKFQGRVTITADTSTNTAYMELSSLRSEDTAVYYCYARGVYQALDYWGQGTLVTVSSASTKGPSVFPLAPSSKSTSGGTAALGCLVKDYFPEPVTVSWNSGALTSGVHTFPAVLQSSGLYSLSSVVTVPSSSLGTQTYICNVNHKPSNTKVDKKVEPKSCGS

SEQ ID NO: 27465 - protein, 118 aa, Artificial Sequence
  Description of Artificial Sequence: Synthetic polypeptide
  VH of XENP021713
EVQLVQSGAEVKKPGATVKISCKASGFNIKHYFMHWVQQAPGKGLEWMGWIDPYTGDTEYAPKFQGRVTITADTSTNTAYMELSSLRSEDTAVYYCYARGVYQALDYWGQGTLVTVSS

SEQ ID NO: 27466 - protein, 5 aa, Artificial Sequence
  Description of Artificial Sequence: Synthetic peptide
  XENP021713 vhCDR1
HYFMH

SEQ ID NO: 27467 - protein, 17 aa, Artificial Sequence
  Description of Artificial Sequence: Synthetic peptide
  XENP021713 vhCDR2
WIDPYTGDTEYAPKFQG

SEQ ID NO: 27468 - protein, 9 aa, Artificial Sequence
  Description of Artificial Sequence: Synthetic peptide
  XENP021713 vhCDR3
RGVYQALDY

SEQ ID NO: 27469 - protein, 214 aa, Artificial Sequence; identical to SEQ ID NO: 17250
  Description of Artificial Sequence: Synthetic polypeptide
  XENP021713 2A11_H1.126_L2_Fab Light Chain

SEQ ID NO: 27470 - protein, 107 aa, Artificial Sequence; identical to SEQ ID NO: 17251
  Description of Artificial Sequence: Synthetic polypeptide
  VL of XENP021713

SEQ ID NO: 27471 - protein, 11 aa, Artificial Sequence
  Description of Artificial Sequence: Synthetic peptide
  XENP021713 vlCDR1
QASQDIGNYLN

SEQ ID NO: 27472 - protein, 7 aa, Artificial Sequence
  Description of Artificial Sequence: Synthetic peptide
  XENP021713 vlCDR2
YTSRLHS

SEQ ID NO: 27473 - protein, 9 aa, Artificial Sequence
  Description of Artificial Sequence: Synthetic peptide
  XENP021713 vlCDR3
QQGNTLPYT

SEQ ID NO: 27474 - protein, 223 aa, Artificial Sequence
  Description of Artificial Sequence: Synthetic polypeptide
  XENP021714 2A11_H1.128_L2_Fab Heavy Chain
EVQLVQSGAEVKKPGATVKISCKASGFNIKHYFMHWVQQAPGKGLEWMGWIDPELGDTEYAPKFQGRVTITADTSTNTAYMELSSLRSEDTAVYYCYARGVYQALDYWGQGTLVTVSSASTKGPSVFPLAPSSKSTSGGTAALGCLVKDYFPEPVTVSWNSGALTSGVHTFPAVLQSSGLYSLSSVVTVPSSSLGTQTYICNVNHKPSNTKVDKKVEPKSCGS

SEQ ID NO: 27475 - protein, 118 aa, Artificial Sequence
  Description of Artificial Sequence: Synthetic polypeptide
  VH of XENP021714
EVQLVQSGAEVKKPGATVKISCKASGFNIKHYFMHWVQQAPGKGLEWMGWIDPELGDTEYAPKFQGRVTITADTSTNTAYMELSSLRSEDTAVYYCYARGVYQALDYWGQGTLVTVSS

SEQ ID NO: 27476 - protein, 5 aa, Artificial Sequence
  Description of Artificial Sequence: Synthetic peptide
  XENP021714 vhCDR1
HYFMH

SEQ ID NO: 27477 - protein, 17 aa, Artificial Sequence
  Description of Artificial Sequence: Synthetic peptide
  XENP021714 vhCDR2
WIDPELGDTEYAPKFQG

SEQ ID NO: 27478 - protein, 9 aa, Artificial Sequence
  Description of Artificial Sequence: Synthetic peptide
  XENP021714 vhCDR3
RGVYQALDY

SEQ ID NO: 27479 - protein, 214 aa, Artificial Sequence; identical to SEQ ID NO: 17250
  Description of Artificial Sequence: Synthetic polypeptide
  XENP021714 2A11_H1.128_L2_Fab Light Chain

SEQ ID NO: 27480 - protein, 107 aa, Artificial Sequence; identical to SEQ ID NO: 17251
  Description of Artificial Sequence: Synthetic polypeptide
  VL of XENP021714

SEQ ID NO: 27481 - protein, 11 aa, Artificial Sequence
  Description of Artificial Sequence: Synthetic peptide
  XENP021714 vlCDR1
QASQDIGNYLN

SEQ ID NO: 27482 - protein, 7 aa, Artificial Sequence
  Description of Artificial Sequence: Synthetic peptide
  XENP021714 vlCDR2
YTSRLHS

SEQ ID NO: 27483 - protein, 9 aa, Artificial Sequence
  Description of Artificial Sequence: Synthetic peptide
  XENP021714 vlCDR3
QQGNTLPYT

SEQ ID NO: 27484 - protein, 223 aa, Artificial Sequence
  Description of Artificial Sequence: Synthetic polypeptide
  XENP021715 2A11_H1.129_L2_Fab Heavy Chain
EVQLVQSGAEVKKPGATVKISCKASGFNIKHYYMHWVQQAPGKGLEWMGWIDPELGDTEYAPKFQGRVTITADTSTNTAYMELSSLRSEDTAVYYCYARGVRQALDYWGQGTLVTVSSASTKGPSVFPLAPSSKSTSGGTAALGCLVKDYFPEPVTVSWNSGALTSGVHTFPAVLQSSGLYSLSSVVTVPSSSLGTQTYICNVNHKPSNTKVDKKVEPKSCGS

SEQ ID NO: 27485 - protein, 118 aa, Artificial Sequence
  Description of Artificial Sequence: Synthetic polypeptide
  VH of XENP021715
EVQLVQSGAEVKKPGATVKISCKASGFNIKHYYMHWVQQAPGKGLEWMGWIDPELGDTEYAPKFQGRVTITADTSTNTAYMELSSLRSEDTAVYYCYARGVRQALDYWGQGTLVTVSS

SEQ ID NO: 27486 - protein, 5 aa, Artificial Sequence
  Description of Artificial Sequence: Synthetic peptide
  XENP021715 vhCDR1
HYYMH

SEQ ID NO: 27487 - protein, 17 aa, Artificial Sequence
  Description of Artificial Sequence: Synthetic peptide
  XENP021715 vhCDR2
WIDPELGDTEYAPKFQG

SEQ ID NO: 27488 - protein, 9 aa, Artificial Sequence
  Description of Artificial Sequence: Synthetic peptide
  XENP021715 vhCDR3
RGVRQALDY

SEQ ID NO: 27489 - protein, 214 aa, Artificial Sequence; identical to SEQ ID NO: 17250
  Description of Artificial Sequence: Synthetic polypeptide
  XENP021715 2A11_H1.129_L2_Fab Light Chain

SEQ ID NO: 27490 - protein, 107 aa, Artificial Sequence; identical to SEQ ID NO: 17251
  Description of Artificial Sequence: Synthetic polypeptide
  VL of XENP021715

SEQ ID NO: 27491 - protein, 11 aa, Artificial Sequence
  Description of Artificial Sequence: Synthetic peptide
  XENP021715 vlCDR1
QASQDIGNYLN

SEQ ID NO: 27492 - protein, 7 aa, Artificial Sequence
  Description of Artificial Sequence: Synthetic peptide
  XENP021715 vlCDR2
YTSRLHS

SEQ ID NO: 27493 - protein, 9 aa, Artificial Sequence
  Description of Artificial Sequence: Synthetic peptide
  XENP021715 vlCDR3
QQGNTLPYT

SEQ ID NO: 27494 - protein, 223 aa, Artificial Sequence
  Description of Artificial Sequence: Synthetic polypeptide
  XENP021716 2A11_H1.130_L2_Fab Heavy Chain
EVQLVQSGAEVKKPGATVKISCKASGFNIKHYYMHWVQQAPGKGLEWMGWIDPELGDTEYAPKFQGRVTITADTSTNTAYMELSSLRSEDTAVYYCYARGVYQALDYWGQGTLVTVSSASTKGPSVFPLAPSSKSTSGGTAALGCLVKDYFPEPVTVSWNSGALTSGVHTFPAVLQSSGLYSLSSVVTVPSSSLGTQTYICNVNHKPSNTKVDKKVEPKSCGS

SEQ ID NO: 27495 - protein, 118 aa, Artificial Sequence
  Description of Artificial Sequence: Synthetic polypeptide
  VH of XENP021716
EVQLVQSGAEVKKPGATVKISCKASGFNIKHYYMHWVQQAPGKGLEWMGWIDPELGDTEYAPKFQGRVTITADTSTNTAYMELSSLRSEDTAVYYCYARGVYQALDYWGQGTLVTVSS

SEQ ID NO: 27496 - protein, 5 aa, Artificial Sequence
  Description of Artificial Sequence: Synthetic peptide
  XENP021716 vhCDR1
HYYMH

SEQ ID NO: 27497 - protein, 17 aa, Artificial Sequence
  Description of Artificial Sequence: Synthetic peptide
  XENP021716 vhCDR2
WIDPELGDTEYAPKFQG

SEQ ID NO: 27498 - protein, 9 aa, Artificial Sequence
  Description of Artificial Sequence: Synthetic peptide
  XENP021716 vhCDR3
RGVYQALDY

SEQ ID NO: 27499 - protein, 214 aa, Artificial Sequence; identical to SEQ ID NO: 17250
  Description of Artificial Sequence: Synthetic polypeptide
  XENP021716 2A11_H1.130_L2_Fab Light Chain

SEQ ID NO: 27500 - protein, 107 aa, Artificial Sequence; identical to SEQ ID NO: 17251
  Description of Artificial Sequence: Synthetic polypeptide
  VL of XENP021716

SEQ ID NO: 27501 - protein, 11 aa, Artificial Sequence
  Description of Artificial Sequence: Synthetic peptide
  XENP021716 vlCDR1
QASQDIGNYLN

SEQ ID NO: 27502 - protein, 7 aa, Artificial Sequence
  Description of Artificial Sequence: Synthetic peptide
  XENP021716 vlCDR2
YTSRLHS

SEQ ID NO: 27503 - protein, 9 aa, Artificial Sequence
  Description of Artificial Sequence: Synthetic peptide
  XENP021716 vlCDR3
QQGNTLPYT

SEQ ID NO: 27504 - protein, 223 aa, Artificial Sequence
  Description of Artificial Sequence: Synthetic polypeptide
  XENP021717 2A11_H1.131_L2_Fab Heavy Chain
EVQLVQSGAEVKKPGATVKISCKASGFNIKHYYMHWVQQAPGKGLEWMGWIDPELGDTEYAPKFQGRVTITADTSTNTAYMELSSLRSEDTAVYYCYARGVKQALDYWGQGTLVTVSSASTKGPSVFPLAPSSKSTSGGTAALGCLVKDYFPEPVTVSWNSGALTSGVHTFPAVLQSSGLYSLSSVVTVPSSSLGTQTYICNVNHKPSNTKVDKKVEPKSCGS

SEQ ID NO: 27505 - protein, 118 aa, Artificial Sequence
  Description of Artificial Sequence: Synthetic polypeptide
  VH of XENP021717
EVQLVQSGAEVKKPGATVKISCKASGFNIKHYYMHWVQQAPGKGLEWMGWIDPELGDTEYAPKFQGRVTITADTSTNTAYMELSSLRSEDTAVYYCYARGVKQALDYWGQGTLVTVSS

SEQ ID NO: 27506 - protein, 5 aa, Artificial Sequence
  Description of Artificial Sequence: Synthetic peptide
  XENP021717 vhCDR1
HYYMH

SEQ ID NO: 27507 - protein, 17 aa, Artificial Sequence
  Description of Artificial Sequence: Synthetic peptide
  XENP021717 vhCDR2
WIDPELGDTEYAPKFQG

SEQ ID NO: 27508 - protein, 9 aa, Artificial Sequence
  Description of Artificial Sequence: Synthetic peptide
  XENP021717 vhCDR3
RGVKQALDY

SEQ ID NO: 27509 - protein, 214 aa, Artificial Sequence; identical to SEQ ID NO: 17250
  Description of Artificial Sequence: Synthetic polypeptide
  XENP021717 2A11_H1.131_L2_Fab Light Chain

SEQ ID NO: 27510 - protein, 107 aa, Artificial Sequence; identical to SEQ ID NO: 17251
  Description of Artificial Sequence: Synthetic polypeptide
  VL of XENP021717

SEQ ID NO: 27511 - protein, 11 aa, Artificial Sequence
  Description of Artificial Sequence: Synthetic peptide
  XENP021717 vlCDR1
QASQDIGNYLN

SEQ ID NO: 27512 - protein, 7 aa, Artificial Sequence
  Description of Artificial Sequence: Synthetic peptide
  XENP021717 vlCDR2
YTSRLHS

SEQ ID NO: 27513 - protein, 9 aa, Artificial Sequence
  Description of Artificial Sequence: Synthetic peptide
  XENP021717 vlCDR3
QQGNTLPYT

SEQ ID NO: 27514 - protein, 223 aa, Artificial Sequence
  Description of Artificial Sequence: Synthetic polypeptide
  XENP021718 2A11_H1.132_L2_Fab Heavy Chain
EVQLVQSGAEVKKPGATVKISCKASGFNIKHYYMHWVQQAPGKGLEWMGWIDPETGDTEYAPKFQGRVTITADTSTNTAYMELSSLRSEDTAVYYCYARGVRQALDYWGQGTLVTVSSASTKGPSVFPLAPSSKSTSGGTAALGCLVKDYFPEPVTVSWNSGALTSGVHTFPAVLQSSGLYSLSSVVTVPSSSLGTQTYICNVNHKPSNTKVDKKVEPKSCGS

SEQ ID NO: 27515 - protein, 118 aa, Artificial Sequence
  Description of Artificial Sequence: Synthetic polypeptide
  VH of XENP021718
EVQLVQSGAEVKKPGATVKISCKASGFNIKHYYMHWVQQAPGKGLEWMGWIDPETGDTEYAPKFQGRVTITADTSTNTAYMELSSLRSEDTAVYYCYARGVRQALDYWGQGTLVTVSS

SEQ ID NO: 27516 - protein, 5 aa, Artificial Sequence
  Description of Artificial Sequence: Synthetic peptide
  XENP021718 vhCDR1
HYYMH

SEQ ID NO: 27517 - protein, 17 aa, Artificial Sequence
  Description of Artificial Sequence: Synthetic peptide
  XENP021718 vhCDR2
WIDPETGDTEYAPKFQG

SEQ ID NO: 27518 - protein, 9 aa, Artificial Sequence
  Description of Artificial Sequence: Synthetic peptide
  XENP021718 vhCDR3
RGVRQALDY

SEQ ID NO: 27519 - protein, 214 aa, Artificial Sequence; identical to SEQ ID NO: 17250
  Description of Artificial Sequence: Synthetic polypeptide
  XENP021718 2A11_H1.132_L2_Fab Light Chain

SEQ ID NO: 27520 - protein, 107 aa, Artificial Sequence; identical to SEQ ID NO: 17251
  Description of Artificial Sequence: Synthetic polypeptide
  VL of XENP021718

SEQ ID NO: 27521 - protein, 11 aa, Artificial Sequence
  Description of Artificial Sequence: Synthetic peptide
  XENP021718 vlCDR1
QASQDIGNYLN

SEQ ID NO: 27522 - protein, 7 aa, Artificial Sequence
  Description of Artificial Sequence: Synthetic peptide
  XENP021718 vlCDR2
YTSRLHS

SEQ ID NO: 27523 - protein, 9 aa, Artificial Sequence
  Description of Artificial Sequence: Synthetic peptide
  XENP021718 vlCDR3
QQGNTLPYT

SEQ ID NO: 27524 - protein, 223 aa, Artificial Sequence
  Description of Artificial Sequence: Synthetic polypeptide
  XENP021719 2A11_H1.133_L2_Fab Heavy Chain
EVQLVQSGAEVKKPGATVKISCKASGFNIKHYYMHWVQQAPGKGLEWMGWIDPETGDTEYAPKFQGRVTITADTSTNTAYMELSSLRSEDTAVYYCYARGVYQALDYWGQGTLVTVSSASTKGPSVFPLAPSSKSTSGGTAALGCLVKDYFPEPVTVSWNSGALTSGVHTFPAVLQSSGLYSLSSVVTVPSSSLGTQTYICNVNHKPSNTKVDKKVEPKSCGS

SEQ ID NO: 27525 - protein, 118 aa, Artificial Sequence
  Description of Artificial Sequence: Synthetic polypeptide
  VH of XENP021719
EVQLVQSGAEVKKPGATVKISCKASGFNIKHYYMHWVQQAPGKGLEWMGWIDPETGDTEYAPKFQGRVTITADTSTNTAYMELSSLRSEDTAVYYCYARGVYQALDYWGQGTLVTVSS

SEQ ID NO: 27526 - protein, 5 aa, Artificial Sequence
  Description of Artificial Sequence: Synthetic peptide
  XENP021719 vhCDR1
HYYMH

SEQ ID NO: 27527 - protein, 17 aa, Artificial Sequence
  Description of Artificial Sequence: Synthetic peptide
  XENP021719 vhCDR2
WIDPETGDTEYAPKFQG

SEQ ID NO: 27528 - protein, 9 aa, Artificial Sequence
  Description of Artificial Sequence: Synthetic peptide
  XENP021719 vhCDR3
RGVYQALDY

SEQ ID NO: 27529 - protein, 214 aa, Artificial Sequence; identical to SEQ ID NO: 17250
  Description of Artificial Sequence: Synthetic polypeptide
  XENP021719 2A11_H1.133_L2_Fab Light Chain

SEQ ID NO: 27530 - protein, 107 aa, Artificial Sequence; identical to SEQ ID NO: 17251
  Description of Artificial Sequence: Synthetic polypeptide
  VL of XENP021719

SEQ ID NO: 27531 - protein, 11 aa, Artificial Sequence
  Description of Artificial Sequence: Synthetic peptide
  XENP021719 vlCDR1
QASQDIGNYLN

SEQ ID NO: 27532 - protein, 7 aa, Artificial Sequence
  Description of Artificial Sequence: Synthetic peptide
  XENP021719 vlCDR2
YTSRLHS

SEQ ID NO: 27533 - protein, 9 aa, Artificial Sequence
  Description of Artificial Sequence: Synthetic peptide
  XENP021719 vlCDR3
QQGNTLPYT

SEQ ID NO: 27534 - protein, 223 aa, Artificial Sequence
  Description of Artificial Sequence: Synthetic polypeptide
  XENP021720 2A11_H1.134_L2_Fab Heavy Chain
EVQLVQSGAEVKKPGATVKISCKASGFNIKHYYMHWVQQAPGKGLEWMGWIDPETGDTEYAPKFQGRVTITADTSTNTAYMELSSLRSEDTAVYYCYARGVKQALDYWGQGTLVTVSSASTKGPSVFPLAPSSKSTSGGTAALGCLVKDYFPEPVTVSWNSGALTSGVHTFPAVLQSSGLYSLSSVVTVPSSSLGTQTYICNVNHKPSNTKVDKKVEPKSCGS

SEQ ID NO: 27535 - protein, 118 aa, Artificial Sequence
  Description of Artificial Sequence: Synthetic polypeptide
  VH of XENP021720
EVQLVQSGAEVKKPGATVKISCKASGFNIKHYYMHWVQQAPGKGLEWMGWIDPETGDTEYAPKFQGRVTITADTSTNTAYMELSSLRSEDTAVYYCYARGVKQALDYWGQGTLVTVSS

SEQ ID NO: 27536 - protein, 5 aa, Artificial Sequence
  Description of Artificial Sequence: Synthetic peptide
  XENP021720 vhCDR1
HYYMH

SEQ ID NO: 27537 - protein, 17 aa, Artificial Sequence
  Description of Artificial Sequence: Synthetic peptide
  XENP021720 vhCDR2
WIDPETGDTEYAPKFQG

SEQ ID NO: 27538 - protein, 9 aa, Artificial Sequence
  Description of Artificial Sequence: Synthetic peptide
  XENP021720 vhCDR3
RGVKQALDY

SEQ ID NO: 27539 - protein, 214 aa, Artificial Sequence; identical to SEQ ID NO: 17250
  Description of Artificial Sequence: Synthetic polypeptide
  XENP021720 2A11_H1.134_L2_Fab Light Chain

SEQ ID NO: 27540 - protein, 107 aa, Artificial Sequence; identical to SEQ ID NO: 17251
  Description of Artificial Sequence: Synthetic polypeptide
  VL of XENP021720

SEQ ID NO: 27541 - protein, 11 aa, Artificial Sequence
  Description of Artificial Sequence: Synthetic peptide
  XENP021720 vlCDR1
QASQDIGNYLN

SEQ ID NO: 27542 - protein, 7 aa, Artificial Sequence
  Description of Artificial Sequence: Synthetic peptide
  XENP021720 vlCDR2
YTSRLHS

SEQ ID NO: 27543 - protein, 9 aa, Artificial Sequence
  Description of Artificial Sequence: Synthetic peptide
  XENP021720 vlCDR3
QQGNTLPYT

SEQ ID NO: 27544 - protein, 223 aa, Artificial Sequence
  Description of Artificial Sequence: Synthetic polypeptide
  XENP021721 2A11_H1.135_L2_Fab Heavy Chain
EVQLVQSGAEVKKPGATVKISCKASGFNIKHYYMHWVQQAPGKGLEWMGWIDPYLGDTEYAPKFQGRVTITADTSTNTAYMELSSLRSEDTAVYYCYARGVRQALDYWGQGTLVTVSSASTKGPSVFPLAPSSKSTSGGTAALGCLVKDYFPEPVTVSWNSGALTSGVHTFPAVLQSSGLYSLSSVVTVPSSSLGTQTYICNVNHKPSNTKVDKKVEPKSCGS

SEQ ID NO: 27545 - protein, 118 aa, Artificial Sequence
  Description of Artificial Sequence: Synthetic polypeptide
  VH of XENP021721
EVQLVQSGAEVKKPGATVKISCKASGFNIKHYYMHWVQQAPGKGLEWMGWIDPYLGDTEYAPKFQGRVTITADTSTNTAYMELSSLRSEDTAVYYCYARGVRQALDYWGQGTLVTVSS

SEQ ID NO: 27546 - protein, 5 aa, Artificial Sequence
  Description of Artificial Sequence: Synthetic peptide
  XENP021721 vhCDR1
HYYMH

SEQ ID NO: 27547 - protein, 17 aa, Artificial Sequence
  Description of Artificial Sequence: Synthetic peptide
  XENP021721 vhCDR2
WIDPYLGDTEYAPKFQG

SEQ ID NO: 27548 - protein, 9 aa, Artificial Sequence
  Description of Artificial Sequence: Synthetic peptide
  XENP021721 vhCDR3
RGVRQALDY

SEQ ID NO: 27549 - protein, 214 aa, Artificial Sequence; identical to SEQ ID NO: 17250
  Description of Artificial Sequence: Synthetic polypeptide
  XENP021721 2A11_H1.135_L2_Fab Light Chain

SEQ ID NO: 27550 - protein, 107 aa, Artificial Sequence; identical to SEQ ID NO: 17251
  Description of Artificial Sequence: Synthetic polypeptide
  VL of XENP021721

SEQ ID NO: 27551 - protein, 11 aa, Artificial Sequence
  Description of Artificial Sequence: Synthetic peptide
  XENP021721 vlCDR1
QASQDIGNYLN

SEQ ID NO: 27552 - protein, 7 aa, Artificial Sequence
  Description of Artificial Sequence: Synthetic peptide
  XENP021721 vlCDR2
YTSRLHS

SEQ ID NO: 27553 - protein, 9 aa, Artificial Sequence
  Description of Artificial Sequence: Synthetic peptide
  XENP021721 vlCDR3
QQGNTLPYT

SEQ ID NO: 27554 - protein, 223 aa, Artificial Sequence
  Description of Artificial Sequence: Synthetic polypeptide
  XENP021722 2A11_H1.136_L2_Fab Heavy Chain
EVQLVQSGAEVKKPGATVKISCKASGFNIKHYYMHWVQQAPGKGLEWMGWIDPYLGDTEYAPKFQGRVTITADTSTNTAYMELSSLRSEDTAVYYCYARGVYQALDYWGQGTLVTVSSASTKGPSVFPLAPSSKSTSGGTAALGCLVKDYFPEPVTVSWNSGALTSGVHTFPAVLQSSGLYSLSSVVTVPSSSLGTQTYICNVNHKPSNTKVDKKVEPKSCGS

SEQ ID NO: 27555 - protein, 118 aa, Artificial Sequence
  Description of Artificial Sequence: Synthetic polypeptide
  VH of XENP021722
EVQLVQSGAEVKKPGATVKISCKASGFNIKHYYMHWVQQAPGKGLEWMGWIDPYLGDTEYAPKFQGRVTITADTSTNTAYMELSSLRSEDTAVYYCYARGVYQALDYWGQGTLVTVSS

SEQ ID NO: 27556 - protein, 5 aa, Artificial Sequence
  Description of Artificial Sequence: Synthetic peptide
  XENP021722 vhCDR1
HYYMH

SEQ ID NO: 27557 - protein, 17 aa, Artificial Sequence
  Description of Artificial Sequence: Synthetic peptide
  XENP021722 vhCDR2
WIDPYLGDTEYAPKFQG

SEQ ID NO: 27558 - protein, 9 aa, Artificial Sequence
  Description of Artificial Sequence: Synthetic peptide
  XENP021722 vhCDR3
RGVYQALDY

SEQ ID NO: 27559 - protein, 214 aa, Artificial Sequence; identical to SEQ ID NO: 17250
  Description of Artificial Sequence: Synthetic polypeptide
  XENP021722 2A11_H1.136_L2_Fab Light Chain

SEQ ID NO: 27560 - protein, 107 aa, Artificial Sequence; identical to SEQ ID NO: 17251
  Description of Artificial Sequence: Synthetic polypeptide
  VL of XENP021722

SEQ ID NO: 27561 - protein, 11 aa, Artificial Sequence
  Description of Artificial Sequence: Synthetic peptide
  XENP021722 vlCDR1
QASQDIGNYLN

SEQ ID NO: 27562 - protein, 7 aa, Artificial Sequence
  Description of Artificial Sequence: Synthetic peptide
  XENP021722 vlCDR2
YTSRLHS

SEQ ID NO: 27563 - protein, 9 aa, Artificial Sequence
  Description of Artificial Sequence: Synthetic peptide
  XENP021722 vlCDR3
QQGNTLPYT

SEQ ID NO: 27564 - protein, 223 aa, Artificial Sequence
  Description of Artificial Sequence: Synthetic polypeptide
  XENP021723 2A11_H1.137_L2_Fab Heavy Chain
EVQLVQSGAEVKKPGATVKISCKASGFNIKHYYMHWVQQAPGKGLEWMGWIDPYLGDTEYAPKFQGRVTITADTSTNTAYMELSSLRSEDTAVYYCYARGVKQALDYWGQGTLVTVSSASTKGPSVFPLAPSSKSTSGGTAALGCLVKDYFPEPVTVSWNSGALTSGVHTFPAVLQSSGLYSLSSVVTVPSSSLGTQTYICNVNHKPSNTKVDKKVEPKSCGS

SEQ ID NO: 27565 - protein, 118 aa, Artificial Sequence
  Description of Artificial Sequence: Synthetic polypeptide
  VH of XENP021723
EVQLVQSGAEVKKPGATVKISCKASGFNIKHYYMHWVQQAPGKGLEWMGWIDPYLGDTEYAPKFQGRVTITADTSTNTAYMELSSLRSEDTAVYYCYARGVKQALDYWGQGTLVTVSS

SEQ ID NO: 27566 - protein, 5 aa, Artificial Sequence
  Description of Artificial Sequence: Synthetic peptide
  XENP021723 vhCDR1
HYYMH

SEQ ID NO: 27567 - protein, 17 aa, Artificial Sequence
  Description of Artificial Sequence: Synthetic peptide
  XENP021723 vhCDR2
WIDPYLGDTEYAPKFQG

SEQ ID NO: 27568 - protein, 9 aa, Artificial Sequence
  Description of Artificial Sequence: Synthetic peptide
  XENP021723 vhCDR3
RGVKQALDY

SEQ ID NO: 27569 - protein, 214 aa, Artificial Sequence; identical to SEQ ID NO: 17250
  Description of Artificial Sequence: Synthetic polypeptide
  XENP021723 2A11_H1.137_L2_Fab Light Chain

SEQ ID NO: 27570 - protein, 107 aa, Artificial Sequence; identical to SEQ ID NO: 17251
  Description of Artificial Sequence: Synthetic polypeptide
  VL of XENP021723

SEQ ID NO: 27571 - protein, 11 aa, Artificial Sequence
  Description of Artificial Sequence: Synthetic peptide
  XENP021723 vlCDR1
QASQDIGNYLN

SEQ ID NO: 27572 - protein, 7 aa, Artificial Sequence
  Description of Artificial Sequence: Synthetic peptide
  XENP021723 vlCDR2
YTSRLHS

SEQ ID NO: 27573 - protein, 9 aa, Artificial Sequence
  Description of Artificial Sequence: Synthetic peptide
  XENP021723 vlCDR3
QQGNTLPYT

SEQ ID NO: 27574 - protein, 223 aa, Artificial Sequence
  Description of Artificial Sequence: Synthetic polypeptide
  XENP021724 2A11_H1.138_L2_Fab Heavy Chain
EVQLVQSGAEVKKPGATVKISCKASGFNIKHYYMHWVQQAPGKGLEWMGWIDPYTGDTEYAPKFQGRVTITADTSTNTAYMELSSLRSEDTAVYYCYARGVRQALDYWGQGTLVTVSSASTKGPSVFPLAPSSKSTSGGTAALGCLVKDYFPEPVTVSWNSGALTSGVHTFPAVLQSSGLYSLSSVVTVPSSSLGTQTYICNVNHKPSNTKVDKKVEPKSCGS

SEQ ID NO: 27575 - protein, 118 aa, Artificial Sequence
  Description of Artificial Sequence: Synthetic polypeptide
  VH of XENP021724
EVQLVQSGAEVKKPGATVKISCKASGFNIKHYYMHWVQQAPGKGLEWMGWIDPYTGDTEYAPKFQGRVTITADTSTNTAYMELSSLRSEDTAVYYCYARGVRQALDYWGQGTLVTVSS

SEQ ID NO: 27576 - protein, 5 aa, Artificial Sequence
  Description of Artificial Sequence: Synthetic peptide
  XENP021724 vhCDR1
HYYMH

SEQ ID NO: 27577 - protein, 17 aa, Artificial Sequence
  Description of Artificial Sequence: Synthetic peptide
  XENP021724 vhCDR2
WIDPYTGDTEYAPKFQG

SEQ ID NO: 27578 - protein, 9 aa, Artificial Sequence
  Description of Artificial Sequence: Synthetic peptide
  XENP021724 vhCDR3
RGVRQALDY

SEQ ID NO: 27579 - protein, 214 aa, Artificial Sequence; identical to SEQ ID NO: 17250
  Description of Artificial Sequence: Synthetic polypeptide
  XENP021724 2A11_H1.138_L2_Fab Light Chain

SEQ ID NO: 27580 - protein, 107 aa, Artificial Sequence; identical to SEQ ID NO: 17251
  Description of Artificial Sequence: Synthetic polypeptide
  VL of XENP021724

SEQ ID NO: 27581 - protein, 11 aa, Artificial Sequence
  Description of Artificial Sequence: Synthetic peptide
  XENP021724 vlCDR1
QASQDIGNYLN

SEQ ID NO: 27582 - protein, 7 aa, Artificial Sequence
  Description of Artificial Sequence: Synthetic peptide
  XENP021724 vlCDR2
YTSRLHS

SEQ ID NO: 27583 - protein, 9 aa, Artificial Sequence
  Description of Artificial Sequence: Synthetic peptide
  XENP021724 vlCDR3
QQGNTLPYT

SEQ ID NO: 27584 - protein, 223 aa, Artificial Sequence
  Description of Artificial Sequence: Synthetic polypeptide
  XENP021725 2A11_H1.139_L2_Fab Heavy Chain
EVQLVQSGAEVKKPGATVKISCKASGFNIKHYYMHWVQQAPGKGLEWMGWIDPYTGDTEYAPKFQGRVTITADTSTNTAYMELSSLRSEDTAVYYCYARGVYQALDYWGQGTLVTVSSASTKGPSVFPLAPSSKSTSGGTAALGCLVKDYFPEPVTVSWNSGALTSGVHTFPAVLQSSGLYSLSSVVTVPSSSLGTQTYICNVNHKPSNTKVDKKVEPKSCGS

SEQ ID NO: 27585 - protein, 118 aa, Artificial Sequence
  Description of Artificial Sequence: Synthetic polypeptide
  VH of XENP021725
EVQLVQSGAEVKKPGATVKISCKASGFNIKHYYMHWVQQAPGKGLEWMGWIDPYTGDTEYAPKFQGRVTITADTSTNTAYMELSSLRSEDTAVYYCYARGVYQALDYWGQGTLVTVSS

SEQ ID NO: 27586 - protein, 5 aa, Artificial Sequence
  Description of Artificial Sequence: Synthetic peptide
  XENP021725 vhCDR1
HYYMH

SEQ ID NO: 27587 - protein, 17 aa, Artificial Sequence
  Description of Artificial Sequence: Synthetic peptide
  XENP021725 vhCDR2
WIDPYTGDTEYAPKFQG

SEQ ID NO: 27588 - protein, 9 aa, Artificial Sequence
  Description of Artificial Sequence: Synthetic peptide
  XENP021725 vhCDR3
RGVYQALDY

SEQ ID NO: 27589 - protein, 214 aa, Artificial Sequence; identical to SEQ ID NO: 17250
  Description of Artificial Sequence: Synthetic polypeptide
  XENP021725 2A11_H1.139_L2_Fab Light Chain

SEQ ID NO: 27590 - protein, 107 aa, Artificial Sequence; identical to SEQ ID NO: 17251
  Description of Artificial Sequence: Synthetic polypeptide
  VL of XENP021725

SEQ ID NO: 27591 - protein, 11 aa, Artificial Sequence
  Description of Artificial Sequence: Synthetic peptide
  XENP021725 vlCDR1
QASQDIGNYLN

SEQ ID NO: 27592 - protein, 7 aa, Artificial Sequence
  Description of Artificial Sequence: Synthetic peptide
  XENP021725 vlCDR2
YTSRLHS

SEQ ID NO: 27593 - protein, 9 aa, Artificial Sequence
  Description of Artificial Sequence: Synthetic peptide
  XENP021725 vlCDR3
QQGNTLPYT

SEQ ID NO: 27594 - protein, 223 aa, Artificial Sequence
  Description of Artificial Sequence: Synthetic polypeptide
  XENP021726 2A11_H1.140_L2_Fab Heavy Chain
EVQLVQSGAEVKKPGATVKISCKASGFNIKHYYMHWVQQAPGKGLEWMGWIDPYTGDTEYAPKFQGRVTITADTSTNTAYMELSSLRSEDTAVYYCYARGVKQALDYWGQGTLVTVSSASTKGPSVFPLAPSSKSTSGGTAALGCLVKDYFPEPVTVSWNSGALTSGVHTFPAVLQSSGLYSLSSVVTVPSSSLGTQTYICNVNHKPSNTKVDKKVEPKSCGS

SEQ ID NO: 27595 - protein, 118 aa, Artificial Sequence
  Description of Artificial Sequence: Synthetic polypeptide
  VH of XENP021726
EVQLVQSGAEVKKPGATVKISCKASGFNIKHYYMHWVQQAPGKGLEWMGWIDPYTGDTEYAPKFQGRVTITADTSTNTAYMELSSLRSEDTAVYYCYARGVKQALDYWGQGTLVTVSS

SEQ ID NO: 27596 - protein, 5 aa, Artificial Sequence
  Description of Artificial Sequence: Synthetic peptide
  XENP021726 vhCDR1
HYYMH

SEQ ID NO: 27597 - protein, 17 aa, Artificial Sequence
  Description of Artificial Sequence: Synthetic peptide
  XENP021726 vhCDR2
WIDPYTGDTEYAPKFQG

SEQ ID NO: 27598 - protein, 9 aa, Artificial Sequence
  Description of Artificial Sequence: Synthetic peptide
  XENP021726 vhCDR3
RGVKQALDY

SEQ ID NO: 27599 - protein, 214 aa, Artificial Sequence; identical to SEQ ID NO: 17250
  Description of Artificial Sequence: Synthetic polypeptide
  XENP021726 2A11_H1.140_L2_Fab Light Chain

SEQ ID NO: 27600 - protein, 107 aa, Artificial Sequence; identical to SEQ ID NO: 17251
  Description of Artificial Sequence: Synthetic polypeptide
  VL of XENP021726

SEQ ID NO: 27601 - protein, 11 aa, Artificial Sequence
  Description of Artificial Sequence: Synthetic peptide
  XENP021726 vlCDR1
QASQDIGNYLN

SEQ ID NO: 27602 - protein, 7 aa, Artificial Sequence
  Description of Artificial Sequence: Synthetic peptide
  XENP021726 vlCDR2
YTSRLHS

SEQ ID NO: 27603 - protein, 9 aa, Artificial Sequence
  Description of Artificial Sequence: Synthetic peptide
  XENP021726 vlCDR3
QQGNTLPYT

SEQ ID NO: 27604 - protein, 223 aa, Artificial Sequence
  Description of Artificial Sequence: Synthetic polypeptide
  XENP021727 2A11_H1.141_L2_Fab Heavy Chain
EVQLVQSGAEVKKPGATVKISCKASGFNIKDYFMHWVQQAPGKGLEWMGWIDPELGDTEYAPKFQGRVTITADTSTNTAYMELSSLRSEDTAVYYCYARGVRQALDYWGQGTLVTVSSASTKGPSVFPLAPSSKSTSGGTAALGCLVKDYFPEPVTVSWNSGALTSGVHTFPAVLQSSGLYSLSSVVTVPSSSLGTQTYICNVNHKPSNTKVDKKVEPKSCGS

SEQ ID NO: 27605 - protein, 118 aa, Artificial Sequence
  Description of Artificial Sequence: Synthetic polypeptide
  VH of XENP021727
EVQLVQSGAEVKKPGATVKISCKASGFNIKDYFMHWVQQAPGKGLEWMGWIDPELGDTEYAPKFQGRVTITADTSTNTAYMELSSLRSEDTAVYYCYARGVRQALDYWGQGTLVTVSS

SEQ ID NO: 27606 - protein, 5 aa, Artificial Sequence
  Description of Artificial Sequence: Synthetic peptide
  XENP021727 vhCDR1
DYFMH

SEQ ID NO: 27607 - protein, 17 aa, Artificial Sequence
  Description of Artificial Sequence: Synthetic peptide
  XENP021727 vhCDR2
WIDPELGDTEYAPKFQG

SEQ ID NO: 27608 - protein, 9 aa, Artificial Sequence
  Description of Artificial Sequence: Synthetic peptide
  XENP021727 vhCDR3
RGVRQALDY

SEQ ID NO: 27609 - protein, 214 aa, Artificial Sequence; identical to SEQ ID NO: 17250
  Description of Artificial Sequence: Synthetic polypeptide
  XENP021727 2A11_H1.141_L2_Fab Light Chain

SEQ ID NO: 27610 - protein, 107 aa, Artificial Sequence; identical to SEQ ID NO: 17251
  Description of Artificial Sequence: Synthetic polypeptide
  VL of XENP021727

SEQ ID NO: 27611 - protein, 11 aa, Artificial Sequence
  Description of Artificial Sequence: Synthetic peptide
  XENP021727 vlCDR1
QASQDIGNYLN

SEQ ID NO: 27612 - protein, 7 aa, Artificial Sequence
  Description of Artificial Sequence: Synthetic peptide
  XENP021727 vlCDR2
YTSRLHS

SEQ ID NO: 27613 - protein, 9 aa, Artificial Sequence
  Description of Artificial Sequence: Synthetic peptide
  XENP021727 vlCDR3
QQGNTLPYT

SEQ ID NO: 27614 - protein, 223 aa, Artificial Sequence
  Description of Artificial Sequence: Synthetic polypeptide
  XENP021728 2A11_H1.142_L2_Fab Heavy Chain
EVQLVQSGAEVKKPGATVKISCKASGFNIKDYFMHWVQQAPGKGLEWMGWIDPETGDTEYAPKFQGRVTITADTSTNTAYMELSSLRSEDTAVYYCYARGVRQALDYWGQGTLVTVSSASTKGPSVFPLAPSSKSTSGGTAALGCLVKDYFPEPVTVSWNSGALTSGVHTFPAVLQSSGLYSLSSVVTVPSSSLGTQTYICNVNHKPSNTKVDKKVEPKSCGS

SEQ ID NO: 27615 - protein, 118 aa, Artificial Sequence
  Description of Artificial Sequence: Synthetic polypeptide
  VH of XENP021728
EVQLVQSGAEVKKPGATVKISCKASGFNIKDYFMHWVQQAPGKGLEWMGWIDPETGDTEYAPKFQGRVTITADTSTNTAYMELSSLRSEDTAVYYCYARGVRQALDYWGQGTLVTVSS

SEQ ID NO: 27616 - protein, 5 aa, Artificial Sequence
  Description of Artificial Sequence: Synthetic peptide
  XENP021728 vhCDR1
DYFMH

SEQ ID NO: 27617 - protein, 17 aa, Artificial Sequence
  Description of Artificial Sequence: Synthetic peptide
  XENP021728 vhCDR2
WIDPETGDTEYAPKFQG

SEQ ID NO: 27618 - protein, 9 aa, Artificial Sequence
  Description of Artificial Sequence: Synthetic peptide
  XENP021728 vhCDR3
RGVRQALDY

SEQ ID NO: 27619 - protein, 214 aa, Artificial Sequence; identical to SEQ ID NO: 17250
  Description of Artificial Sequence: Synthetic polypeptide
  XENP021728 2A11_H1.142_L2_Fab Light Chain

SEQ ID NO: 27620 - protein, 107 aa, Artificial Sequence; identical to SEQ ID NO: 17251
  Description of Artificial Sequence: Synthetic polypeptide
  VL of XENP021728

SEQ ID NO: 27621 - protein, 11 aa, Artificial Sequence
  Description of Artificial Sequence: Synthetic peptide
  XENP021728 vlCDR1
QASQDIGNYLN

SEQ ID NO: 27622 - protein, 7 aa, Artificial Sequence
  Description of Artificial Sequence: Synthetic peptide
  XENP021728 vlCDR2
YTSRLHS

SEQ ID NO: 27623 - protein, 9 aa, Artificial Sequence
  Description of Artificial Sequence: Synthetic peptide
  XENP021728 vlCDR3
QQGNTLPYT

SEQ ID NO: 27624 - protein, 223 aa, Artificial Sequence
  Description of Artificial Sequence: Synthetic polypeptide
  XENP021729 2A11_H1.143_L2_Fab Heavy Chain
EVQLVQSGAEVKKPGATVKISCKASGFNIKDYFMHWVQQAPGKGLEWMGWIDPELGDTEYAPKFQGRVTITADTSTNTAYMELSSLRSEDTAVYYCYARGVKQALDYWGQGTLVTVSSASTKGPSVFPLAPSSKSTSGGTAALGCLVKDYFPEPVTVSWNSGALTSGVHTFPAVLQSSGLYSLSSVVTVPSSSLGTQTYICNVNHKPSNTKVDKKVEPKSCGS

SEQ ID NO: 27625 - protein, 118 aa, Artificial Sequence
  Description of Artificial Sequence: Synthetic polypeptide
  VH of XENP021729
EVQLVQSGAEVKKPGATVKISCKASGFNIKDYFMHWVQQAPGKGLEWMGWIDPELGDTEYAPKFQGRVTITADTSTNTAYMELSSLRSEDTAVYYCYARGVKQALDYWGQGTLVTVSS

SEQ ID NO: 27626 - protein, 5 aa, Artificial Sequence
  Description of Artificial Sequence: Synthetic peptide
  XENP021729 vhCDR1
DYFMH

SEQ ID NO: 27627 - protein, 17 aa, Artificial Sequence
  Description of Artificial Sequence: Synthetic peptide
  XENP021729 vhCDR2
WIDPELGDTEYAPKFQG

SEQ ID NO: 27628 - protein, 9 aa, Artificial Sequence
  Description of Artificial Sequence: Synthetic peptide
  XENP021729 vhCDR3
RGVKQALDY

SEQ ID NO: 27629 - protein, 214 aa, Artificial Sequence; identical to SEQ ID NO: 17250
  Description of Artificial Sequence: Synthetic polypeptide
  XENP021729 2A11_H1.143_L2_Fab Light Chain

SEQ ID NO: 27630 - protein, 107 aa, Artificial Sequence; identical to SEQ ID NO: 17251
  Description of Artificial Sequence: Synthetic polypeptide
  VL of XENP021729

SEQ ID NO: 27631 - protein, 11 aa, Artificial Sequence
  Description of Artificial Sequence: Synthetic peptide
  XENP021729 vlCDR1
QASQDIGNYLN

SEQ ID NO: 27632 - protein, 7 aa, Artificial Sequence
  Description of Artificial Sequence: Synthetic peptide
  XENP021729 vlCDR2
YTSRLHS

SEQ ID NO: 27633 - protein, 9 aa, Artificial Sequence
  Description of Artificial Sequence: Synthetic peptide
  XENP021729 vlCDR3
QQGNTLPYT

SEQ ID NO: 27634 - protein, 223 aa, Artificial Sequence
  Description of Artificial Sequence: Synthetic polypeptide
  XENP021730 2A11_H1.144_L2_Fab Heavy Chain
EVQLVQSGAEVKKPGATVKISCKASGFNIKDYFMHWVQQAPGKGLEWMGWIDPELGDTEYAPKFQGRVTITADTSTNTAYMELSSLRSEDTAVYYCYARGVYQALDYWGQGTLVTVSSASTKGPSVFPLAPSSKSTSGGTAALGCLVKDYFPEPVTVSWNSGALTSGVHTFPAVLQSSGLYSLSSVVTVPSSSLGTQTYICNVNHKPSNTKVDKKVEPKSCGS

SEQ ID NO: 27635 - protein, 118 aa, Artificial Sequence; identical to SEQ ID NO: 22085
  Description of Artificial Sequence: Synthetic polypeptide
  VH of XENP021730

SEQ ID NO: 27636 - protein, 5 aa, Artificial Sequence
  Description of Artificial Sequence: Synthetic peptide
  XENP021730 vhCDR1
DYFMH

SEQ ID NO: 27637 - protein, 17 aa, Artificial Sequence
  Description of Artificial Sequence: Synthetic peptide
  XENP021730 vhCDR2
WIDPELGDTEYAPKFQG

SEQ ID NO: 27638 - protein, 9 aa, Artificial Sequence
  Description of Artificial Sequence: Synthetic peptide
  XENP021730 vhCDR3
RGVYQALDY

SEQ ID NO: 27639 - protein, 214 aa, Artificial Sequence; identical to SEQ ID NO: 17250
  Description of Artificial Sequence: Synthetic polypeptide
  XENP021730 2A11_H1.144_L2_Fab Light Chain

SEQ ID NO: 27640 - protein, 107 aa, Artificial Sequence; identical to SEQ ID NO: 17251
  Description of Artificial Sequence: Synthetic polypeptide
  VL of XENP021730

SEQ ID NO: 27641 - protein, 11 aa, Artificial Sequence
  Description of Artificial Sequence: Synthetic peptide
  XENP021730 vlCDR1
QASQDIGNYLN

SEQ ID NO: 27642 - protein, 7 aa, Artificial Sequence
  Description of Artificial Sequence: Synthetic peptide
  XENP021730 vlCDR2
YTSRLHS

SEQ ID NO: 27643 - protein, 9 aa, Artificial Sequence
  Description of Artificial Sequence: Synthetic peptide
  XENP021730 vlCDR3
QQGNTLPYT

SEQ ID NO: 27644 - protein, 223 aa, Artificial Sequence
  Description of Artificial Sequence: Synthetic polypeptide
  XENP021731 2A11_H1.145_L2_Fab Heavy Chain
EVQLVQSGAEVKKPGATVKISCKASGFNIKDYFMHWVQQAPGKGLEWMGWIDPETGDTEYAPKFQGRVTITADTSTNTAYMELSSLRSEDTAVYYCYARGVKQALDYWGQGTLVTVSSASTKGPSVFPLAPSSKSTSGGTAALGCLVKDYFPEPVTVSWNSGALTSGVHTFPAVLQSSGLYSLSSVVTVPSSSLGTQTYICNVNHKPSNTKVDKKVEPKSCGS

SEQ ID NO: 27645 - protein, 118 aa, Artificial Sequence
  Description of Artificial Sequence: Synthetic polypeptide
  VH of XENP021731
EVQLVQSGAEVKKPGATVKISCKASGFNIKDYFMHWVQQAPGKGLEWMGWIDPETGDTEYAPKFQGRVTITADTSTNTAYMELSSLRSEDTAVYYCYARGVKQALDYWGQGTLVTVSS

SEQ ID NO: 27646 - protein, 5 aa, Artificial Sequence
  Description of Artificial Sequence: Synthetic peptide
  XENP021731 vhCDR1
DYFMH

SEQ ID NO: 27647 - protein, 17 aa, Artificial Sequence
  Description of Artificial Sequence: Synthetic peptide
  XENP021731 vhCDR2
WIDPETGDTEYAPKFQG

SEQ ID NO: 27648 - protein, 9 aa, Artificial Sequence
  Description of Artificial Sequence: Synthetic peptide
  XENP021731 vhCDR3
RGVKQALDY

SEQ ID NO: 27649 - protein, 214 aa, Artificial Sequence; identical to SEQ ID NO: 17250
  Description of Artificial Sequence: Synthetic polypeptide
  XENP021731 2A11_H1.145_L2_Fab Light Chain

SEQ ID NO: 27650 - protein, 107 aa, Artificial Sequence; identical to SEQ ID NO: 17251
  Description of Artificial Sequence: Synthetic polypeptide
  VL of XENP021731

SEQ ID NO: 27651 - protein, 11 aa, Artificial Sequence
  Description of Artificial Sequence: Synthetic peptide
  XENP021731 vlCDR1
QASQDIGNYLN

SEQ ID NO: 27652 - protein, 7 aa, Artificial Sequence
  Description of Artificial Sequence: Synthetic peptide
  XENP021731 vlCDR2
YTSRLHS

SEQ ID NO: 27653 - protein, 9 aa, Artificial Sequence
  Description of Artificial Sequence: Synthetic peptide
  XENP021731 vlCDR3
QQGNTLPYT

SEQ ID NO: 27654 - protein, 223 aa, Artificial Sequence
  Description of Artificial Sequence: Synthetic polypeptide
  XENP021732 2A11_H1.146_L2_Fab Heavy Chain
EVQLVQSGAEVKKPGATVKISCKASGFNIKDYFMHWVQQAPGKGLEWMGWIDPETGDTEYAPKFQGRVTITADTSTNTAYMELSSLRSEDTAVYYCYARGVYQALDYWGQGTLVTVSSASTKGPSVFPLAPSSKSTSGGTAALGCLVKDYFPEPVTVSWNSGALTSGVHTFPAVLQSSGLYSLSSVVTVPSSSLGTQTYICNVNHKPSNTKVDKKVEPKSCGS

SEQ ID NO: 27655 - protein, 118 aa, Artificial Sequence
  Description of Artificial Sequence: Synthetic polypeptide
  VH of XENP021732
EVQLVQSGAEVKKPGATVKISCKASGFNIKDYFMHWVQQAPGKGLEWMGWIDPETGDTEYAPKFQGRVTITADTSTNTAYMELSSLRSEDTAVYYCYARGVYQALDYWGQGTLVTVSS

SEQ ID NO: 27656 - protein, 5 aa, Artificial Sequence
  Description of Artificial Sequence: Synthetic peptide
  XENP021732 vhCDR1
DYFMH

SEQ ID NO: 27657 - protein, 17 aa, Artificial Sequence
  Description of Artificial Sequence: Synthetic peptide
  XENP021732 vhCDR2
WIDPETGDTEYAPKFQG

SEQ ID NO: 27658 - protein, 9 aa, Artificial Sequence
  Description of Artificial Sequence: Synthetic peptide
  XENP021732 vhCDR3
RGVYQALDY

SEQ ID NO: 27659 - protein, 214 aa, Artificial Sequence; identical to SEQ ID NO: 17250
  Description of Artificial Sequence: Synthetic polypeptide
  XENP021732 2A11_H1.146_L2_Fab Light Chain

SEQ ID NO: 27660 - protein, 107 aa, Artificial Sequence; identical to SEQ ID NO: 17251
  Description of Artificial Sequence: Synthetic polypeptide
  VL of XENP021732

SEQ ID NO: 27661 - protein, 11 aa, Artificial Sequence
  Description of Artificial Sequence: Synthetic peptide
  XENP021732 vlCDR1
QASQDIGNYLN

SEQ ID NO: 27662 - protein, 7 aa, Artificial Sequence
  Description of Artificial Sequence: Synthetic peptide
  XENP021732 vlCDR2
YTSRLHS

SEQ ID NO: 27663 - protein, 9 aa, Artificial Sequence
  Description of Artificial Sequence: Synthetic peptide
  XENP021732 vlCDR3
QQGNTLPYT

SEQ ID NO: 27664 - protein, 223 aa, Artificial Sequence
  Description of Artificial Sequence: Synthetic polypeptide
  XENP021733 2A11_H1.147_L2_Fab Heavy Chain
EVQLVQSGAEVKKPGATVKISCKASGFNIKDYYMHWVQQAPGKGLEWMGWIDLENGDTEYAPKFQGRVTITADTSTNTAYMELSSLRSEDTAVYYCYARGVRQALDYWGQGTLVTVSSASTKGPSVFPLAPSSKSTSGGTAALGCLVKDYFPEPVTVSWNSGALTSGVHTFPAVLQSSGLYSLSSVVTVPSSSLGTQTYICNVNHKPSNTKVDKKVEPKSCGS

SEQ ID NO: 27665 - protein, 118 aa, Artificial Sequence
  Description of Artificial Sequence: Synthetic polypeptide
  VH of XENP021733
EVQLVQSGAEVKKPGATVKISCKASGFNIKDYYMHWVQQAPGKGLEWMGWIDLENGDTEYAPKFQGRVTITADTSTNTAYMELSSLRSEDTAVYYCYARGVRQALDYWGQGTLVTVSS

SEQ ID NO: 27666 - protein, 5 aa, Artificial Sequence
  Description of Artificial Sequence: Synthetic peptide
  XENP021733 vhCDR1
DYYMH

SEQ ID NO: 27667 - protein, 17 aa, Artificial Sequence
  Description of Artificial Sequence: Synthetic peptide
  XENP021733 vhCDR2
WIDLENGDTEYAPKFQG

SEQ ID NO: 27668 - protein, 9 aa, Artificial Sequence
  Description of Artificial Sequence: Synthetic peptide
  XENP021733 vhCDR3
RGVRQALDY

SEQ ID NO: 27669 - protein, 214 aa, Artificial Sequence; identical to SEQ ID NO: 17250
  Description of Artificial Sequence: Synthetic polypeptide
  XENP021733 2A11_H1.147_L2_Fab Light Chain

SEQ ID NO: 27670 - protein, 107 aa, Artificial Sequence; identical to SEQ ID NO: 17251
  Description of Artificial Sequence: Synthetic polypeptide
  VL of XENP021733

SEQ ID NO: 27671 - protein, 11 aa, Artificial Sequence
  Description of Artificial Sequence: Synthetic peptide
  XENP021733 vlCDR1
QASQDIGNYLN

SEQ ID NO: 27672 - protein, 7 aa, Artificial Sequence
  Description of Artificial Sequence: Synthetic peptide
  XENP021733 vlCDR2
YTSRLHS

SEQ ID NO: 27673 - protein, 9 aa, Artificial Sequence
  Description of Artificial Sequence: Synthetic peptide
  XENP021733 vlCDR3
QQGNTLPYT

SEQ ID NO: 27674 - protein, 223 aa, Artificial Sequence
  Description of Artificial Sequence: Synthetic polypeptide
  XENP021734 2A11_H1.148_L2_Fab Heavy Chain
EVQLVQSGAEVKKPGATVKISCKASGFNIKDYYMHWVQQAPGKGLEWMGWIDIENGDTEYAPKFQGRVTITADTSTNTAYMELSSLRSEDTAVYYCYARGVRQALDYWGQGTLVTVSSASTKGPSVFPLAPSSKSTSGGTAALGCLVKDYFPEPVTVSWNSGALTSGVHTFPAVLQSSGLYSLSSVVTVPSSSLGTQTYICNVNHKPSNTKVDKKVEPKSCGS

SEQ ID NO: 27675 - protein, 118 aa, Artificial Sequence
  Description of Artificial Sequence: Synthetic polypeptide
  VH of XENP021734
EVQLVQSGAEVKKPGATVKISCKASGFNIKDYYMHWVQQAPGKGLEWMGWIDIENGDTEYAPKFQGRVTITADTSTNTAYMELSSLRSEDTAVYYCYARGVRQALDYWGQGTLVTVSS

SEQ ID NO: 27676 - protein, 5 aa, Artificial Sequence
  Description of Artificial Sequence: Synthetic peptide
  XENP021734 vhCDR1
DYYMH

SEQ ID NO: 27677 - protein, 17 aa, Artificial Sequence
  Description of Artificial Sequence: Synthetic peptide
  XENP021734 vhCDR2
WIDIENGDTEYAPKFQG

SEQ ID NO: 27678 - protein, 9 aa, Artificial Sequence
  Description of Artificial Sequence: Synthetic peptide
  XENP021734 vhCDR3
RGVRQALDY

SEQ ID NO: 27679 - protein, 214 aa, Artificial Sequence; identical to SEQ ID NO: 17250
  Description of Artificial Sequence: Synthetic polypeptide
  XENP021734 2A11_H1.148_L2_Fab Light Chain

SEQ ID NO: 27680 - protein, 107 aa, Artificial Sequence; identical to SEQ ID NO: 17251
  Description of Artificial Sequence: Synthetic polypeptide
  VL of XENP021734

SEQ ID NO: 27681 - protein, 11 aa, Artificial Sequence
  Description of Artificial Sequence: Synthetic peptide
  XENP021734 vlCDR1
QASQDIGNYLN

SEQ ID NO: 27682 - protein, 7 aa, Artificial Sequence
  Description of Artificial Sequence: Synthetic peptide
  XENP021734 vlCDR2
YTSRLHS

SEQ ID NO: 27683 - protein, 9 aa, Artificial Sequence
  Description of Artificial Sequence: Synthetic peptide
  XENP021734 vlCDR3
QQGNTLPYT

SEQ ID NO: 27684 - protein, 223 aa, Artificial Sequence
  Description of Artificial Sequence: Synthetic polypeptide
  XENP021735 2A11_H1.149_L2_Fab Heavy Chain
EVQLVQSGAEVKKPGATVKISCKASGFNIKDYYMHWVQQAPGKGLEWMGWIDAENGDTEYAPKFQGRVTITADTSTNTAYMELSSLRSEDTAVYYCYARGVRQALDYWGQGTLVTVSSASTKGPSVFPLAPSSKSTSGGTAALGCLVKDYFPEPVTVSWNSGALTSGVHTFPAVLQSSGLYSLSSVVTVPSSSLGTQTYICNVNHKPSNTKVDKKVEPKSCGS

SEQ ID NO: 27685 - protein, 118 aa, Artificial Sequence
  Description of Artificial Sequence: Synthetic polypeptide
  VH of XENP021735
EVQLVQSGAEVKKPGATVKISCKASGFNIKDYYMHWVQQAPGKGLEWMGWIDAENGDTEYAPKFQGRVTITADTSTNTAYMELSSLRSEDTAVYYCYARGVRQALDYWGQGTLVTVSS

SEQ ID NO: 27686 - protein, 5 aa, Artificial Sequence
  Description of Artificial Sequence: Synthetic peptide
  XENP021735 vhCDR1
DYYMH

SEQ ID NO: 27687 - protein, 17 aa, Artificial Sequence
  Description of Artificial Sequence: Synthetic peptide
  XENP021735 vhCDR2
WIDAENGDTEYAPKFQG

SEQ ID NO: 27688 - protein, 9 aa, Artificial Sequence
  Description of Artificial Sequence: Synthetic peptide
  XENP021735 vhCDR3
RGVRQALDY

SEQ ID NO: 27689 - protein, 214 aa, Artificial Sequence; identical to SEQ ID NO: 17250
  Description of Artificial Sequence: Synthetic polypeptide
  XENP021735 2A11_H1.149_L2_Fab Light Chain

SEQ ID NO: 27690 - protein, 107 aa, Artificial Sequence; identical to SEQ ID NO: 17251
  Description of Artificial Sequence: Synthetic polypeptide
  VL of XENP021735

SEQ ID NO: 27691 - protein, 11 aa, Artificial Sequence
  Description of Artificial Sequence: Synthetic peptide
  XENP021735 vlCDR1
QASQDIGNYLN

SEQ ID NO: 27692 - protein, 7 aa, Artificial Sequence
  Description of Artificial Sequence: Synthetic peptide
  XENP021735 vlCDR2
YTSRLHS

SEQ ID NO: 27693 - protein, 9 aa, Artificial Sequence
  Description of Artificial Sequence: Synthetic peptide
  XENP021735 vlCDR3
QQGNTLPYT

SEQ ID NO: 27694 - protein, 223 aa, Artificial Sequence
  Description of Artificial Sequence: Synthetic polypeptide
  XENP021736 2A11_H1.150_L2_Fab Heavy Chain
EVQLVQSGAEVKKPGATVKISCKASGFNIKDYYMHWVQQAPGKGLEWMGWIDQENGDTEYAPKFQGRVTITADTSTNTAYMELSSLRSEDTAVYYCYARGVRQALDYWGQGTLVTVSSASTKGPSVFPLAPSSKSTSGGTAALGCLVKDYFPEPVTVSWNSGALTSGVHTFPAVLQSSGLYSLSSVVTVPSSSLGTQTYICNVNHKPSNTKVDKKVEPKSCGS

SEQ ID NO: 27695 - protein, 118 aa, Artificial Sequence
  Description of Artificial Sequence: Synthetic polypeptide
  VH of XENP021736
EVQLVQSGAEVKKPGATVKISCKASGFNIKDYYMHWVQQAPGKGLEWMGWIDQENGDTEYAPKFQGRVTITADTSTNTAYMELSSLRSEDTAVYYCYARGVRQALDYWGQGTLVTVSS

SEQ ID NO: 27696 - protein, 5 aa, Artificial Sequence
  Description of Artificial Sequence: Synthetic peptide
  XENP021736 vhCDR1
DYYMH

SEQ ID NO: 27697 - protein, 17 aa, Artificial Sequence
  Description of Artificial Sequence: Synthetic peptide
  XENP021736 vhCDR2
WIDQENGDTEYAPKFQG

SEQ ID NO: 27698 - protein, 9 aa, Artificial Sequence
  Description of Artificial Sequence: Synthetic peptide
  XENP021736 vhCDR3
RGVRQALDY

SEQ ID NO: 27699 - protein, 214 aa, Artificial Sequence; identical to SEQ ID NO: 17250
  Description of Artificial Sequence: Synthetic polypeptide
  XENP021736 2A11_H1.150_L2_Fab Light Chain

SEQ ID NO: 27700 - protein, 107 aa, Artificial Sequence; identical to SEQ ID NO: 17251
  Description of Artificial Sequence: Synthetic polypeptide
  VL of XENP021736

SEQ ID NO: 27701 - protein, 11 aa, Artificial Sequence
  Description of Artificial Sequence: Synthetic peptide
  XENP021736 vlCDR1
QASQDIGNYLN

SEQ ID NO: 27702 - protein, 7 aa, Artificial Sequence
  Description of Artificial Sequence: Synthetic peptide
  XENP021736 vlCDR2
YTSRLHS

SEQ ID NO: 27703 - protein, 9 aa, Artificial Sequence
  Description of Artificial Sequence: Synthetic peptide
  XENP021736 vlCDR3
QQGNTLPYT

SEQ ID NO: 27704 - protein, 223 aa, Artificial Sequence
  Description of Artificial Sequence: Synthetic polypeptide
  XENP021737 2A11_H1.151_L2_Fab Heavy Chain
EVQLVQSGAEVKKPGATVKISCKASGFNIKDYYMHWVQQAPGKGLEWMGWIDHENGDTEYAPKFQGRVTITADTSTNTAYMELSSLRSEDTAVYYCYARGVRQALDYWGQGTLVTVSSASTKGPSVFPLAPSSKSTSGGTAALGCLVKDYFPEPVTVSWNSGALTSGVHTFPAVLQSSGLYSLSSVVTVPSSSLGTQTYICNVNHKPSNTKVDKKVEPKSCGS

SEQ ID NO: 27705 - protein, 118 aa, Artificial Sequence
  Description of Artificial Sequence: Synthetic polypeptide
  VH of XENP021737
EVQLVQSGAEVKKPGATVKISCKASGFNIKDYYMHWVQQAPGKGLEWMGWIDHENGDTEYAPKFQGRVTITADTSTNTAYMELSSLRSEDTAVYYCYARGVRQALDYWGQGTLVTVSS

SEQ ID NO: 27706 - protein, 5 aa, Artificial Sequence
  Description of Artificial Sequence: Synthetic peptide
  XENP021737 vhCDR1
DYYMH

SEQ ID NO: 27707 - protein, 17 aa, Artificial Sequence
  Description of Artificial Sequence: Synthetic peptide
  XENP021737 vhCDR2
WIDHENGDTEYAPKFQG

SEQ ID NO: 27708 - protein, 9 aa, Artificial Sequence
  Description of Artificial Sequence: Synthetic peptide
  XENP021737 vhCDR3
RGVRQALDY

SEQ ID NO: 27709 - protein, 214 aa, Artificial Sequence; identical to SEQ ID NO: 17250
  Description of Artificial Sequence: Synthetic polypeptide
  XENP021737 2A11_H1.151_L2_Fab Light Chain

SEQ ID NO: 27710 - protein, 107 aa, Artificial Sequence; identical to SEQ ID NO: 17251
  Description of Artificial Sequence: Synthetic polypeptide
  VL of XENP021737

SEQ ID NO: 27711 - protein, 11 aa, Artificial Sequence
  Description of Artificial Sequence: Synthetic peptide
  XENP021737 vlCDR1
QASQDIGNYLN

SEQ ID NO: 27712 - protein, 7 aa, Artificial Sequence
  Description of Artificial Sequence: Synthetic peptide
  XENP021737 vlCDR2
YTSRLHS

SEQ ID NO: 27713 - protein, 9 aa, Artificial Sequence
  Description of Artificial Sequence: Synthetic peptide
  XENP021737 vlCDR3
QQGNTLPYT

SEQ ID NO: 27714 - protein, 223 aa, Artificial Sequence
  Description of Artificial Sequence: Synthetic polypeptide
  XENP021738 2A11_H1.152_L2_Fab Heavy Chain
EVQLVQSGAEVKKPGATVKISCKASGFNIKDYYMHWVQQAPGKGLEWMGWIDVENGDTEYAPKFQGRVTITADTSTNTAYMELSSLRSEDTAVYYCYARGVRQALDYWGQGTLVTVSSASTKGPSVFPLAPSSKSTSGGTAALGCLVKDYFPEPVTVSWNSGALTSGVHTFPAVLQSSGLYSLSSVVTVPSSSLGTQTYICNVNHKPSNTKVDKKVEPKSCGS

SEQ ID NO: 27715 - protein, 118 aa, Artificial Sequence
  Description of Artificial Sequence: Synthetic polypeptide
  VH of XENP021738
EVQLVQSGAEVKKPGATVKISCKASGFNIKDYYMHWVQQAPGKGLEWMGWIDVENGDTEYAPKFQGRVTITADTSTNTAYMELSSLRSEDTAVYYCYARGVRQALDYWGQGTLVTVSS

SEQ ID NO: 27716 - protein, 5 aa, Artificial Sequence
  Description of Artificial Sequence: Synthetic peptide
  XENP021738 vhCDR1
DYYMH

SEQ ID NO: 27717 - protein, 17 aa, Artificial Sequence
  Description of Artificial Sequence: Synthetic peptide
  XENP021738 vhCDR2
WIDVENGDTEYAPKFQG

SEQ ID NO: 27718 - protein, 9 aa, Artificial Sequence
  Description of Artificial Sequence: Synthetic peptide
  XENP021738 vhCDR3
RGVRQALDY

SEQ ID NO: 27719 - protein, 214 aa, Artificial Sequence; identical to SEQ ID NO: 17250
  Description of Artificial Sequence: Synthetic polypeptide
  XENP021738 2A11_H1.152_L2_Fab Light Chain

SEQ ID NO: 27720 - protein, 107 aa, Artificial Sequence; identical to SEQ ID NO: 17251
  Description of Artificial Sequence: Synthetic polypeptide
  VL of XENP021738

SEQ ID NO: 27721 - protein, 11 aa, Artificial Sequence
  Description of Artificial Sequence: Synthetic peptide
  XENP021738 vlCDR1
QASQDIGNYLN

SEQ ID NO: 27722 - protein, 7 aa, Artificial Sequence
  Description of Artificial Sequence: Synthetic peptide
  XENP021738 vlCDR2
YTSRLHS

SEQ ID NO: 27723 - protein, 9 aa, Artificial Sequence
  Description of Artificial Sequence: Synthetic peptide
  XENP021738 vlCDR3
QQGNTLPYT

SEQ ID NO: 27724 - protein, 223 aa, Artificial Sequence
  Description of Artificial Sequence: Synthetic polypeptide
  XENP021739 2A11_H1.153_L2_Fab Heavy Chain
EVQLVQSGAEVKKPGATVKISCKASGFNIKDYYMHWVQQAPGKGLEWMGWIDWENGDTEYAPKFQGRVTITADTSTNTAYMELSSLRSEDTAVYYCYARGVRQALDYWGQGTLVTVSSASTKGPSVFPLAPSSKSTSGGTAALGCLVKDYFPEPVTVSWNSGALTSGVHTFPAVLQSSGLYSLSSVVTVPSSSLGTQTYICNVNHKPSNTKVDKKVEPKSCGS

SEQ ID NO: 27725 - protein, 118 aa, Artificial Sequence
  Description of Artificial Sequence: Synthetic polypeptide
  VH of XENP021739
EVQLVQSGAEVKKPGATVKISCKASGFNIKDYYMHWVQQAPGKGLEWMGWIDWENGDTEYAPKFQGRVTITADTSTNTAYMELSSLRSEDTAVYYCYARGVRQALDYWGQGTLVTVSS

SEQ ID NO: 27726 - protein, 5 aa, Artificial Sequence
  Description of Artificial Sequence: Synthetic peptide
  XENP021739 vhCDR1
DYYMH

SEQ ID NO: 27727 - protein, 17 aa, Artificial Sequence
  Description of Artificial Sequence: Synthetic peptide
  XENP021739 vhCDR2
WIDWENGDTEYAPKFQG

SEQ ID NO: 27728 - protein, 9 aa, Artificial Sequence
  Description of Artificial Sequence: Synthetic peptide
  XENP021739 vhCDR3
RGVRQALDY

SEQ ID NO: 27729 - protein, 214 aa, Artificial Sequence; identical to SEQ ID NO: 17250
  Description of Artificial Sequence: Synthetic polypeptide
  XENP021739 2A11_H1.153_L2_Fab Light Chain

SEQ ID NO: 27730 - protein, 107 aa, Artificial Sequence; identical to SEQ ID NO: 17251
  Description of Artificial Sequence: Synthetic polypeptide
  VL of XENP021739

SEQ ID NO: 27731 - protein, 11 aa, Artificial Sequence
  Description of Artificial Sequence: Synthetic peptide
  XENP021739 vlCDR1
QASQDIGNYLN

SEQ ID NO: 27732 - protein, 7 aa, Artificial Sequence
  Description of Artificial Sequence: Synthetic peptide
  XENP021739 vlCDR2
YTSRLHS

SEQ ID NO: 27733 - protein, 9 aa, Artificial Sequence
  Description of Artificial Sequence: Synthetic peptide
  XENP021739 vlCDR3
QQGNTLPYT

SEQ ID NO: 27734 - protein, 223 aa, Artificial Sequence
  Description of Artificial Sequence: Synthetic polypeptide
  XENP021794 2A11_H1.125_L2_Fab Heavy Chain
EVQLVQSGAEVKKPGATVKISCKASGFNIKHYFMHWVQQAPGKGLEWMGWIDPYLGDTEYAPKFQGRVTITADTSTNTAYMELSSLRSEDTAVYYCYARGVYQALDYWGQGTLVTVSSASTKGPSVFPLAPSSKSTSGGTAALGCLVKDYFPEPVTVSWNSGALTSGVHTFPAVLQSSGLYSLSSVVTVPSSSLGTQTYICNVNHKPSNTKVDKKVEPKSCGS

SEQ ID NO: 27735 - protein, 118 aa, Artificial Sequence; identical to SEQ ID NO: 22065
  Description of Artificial Sequence: Synthetic polypeptide
  VH of XENP021794

SEQ ID NO: 27736 - protein, 5 aa, Artificial Sequence
  Description of Artificial Sequence: Synthetic peptide
  XENP021794 vhCDR1
HYFMH

SEQ ID NO: 27737 - protein, 17 aa, Artificial Sequence
  Description of Artificial Sequence: Synthetic peptide
  XENP021794 vhCDR2
WIDPYLGDTEYAPKFQG

SEQ ID NO: 27738 - protein, 9 aa, Artificial Sequence
  Description of Artificial Sequence: Synthetic peptide
  XENP021794 vhCDR3
RGVYQALDY

SEQ ID NO: 27739 - protein, 214 aa, Artificial Sequence; identical to SEQ ID NO: 17250
  Description of Artificial Sequence: Synthetic polypeptide
  XENP021794 2A11_H1.125_L2_Fab Light Chain

SEQ ID NO: 27740 - protein, 107 aa, Artificial Sequence; identical to SEQ ID NO: 17251
  Description of Artificial Sequence: Synthetic polypeptide
  VL of XENP021794

SEQ ID NO: 27741 - protein, 11 aa, Artificial Sequence
  Description of Artificial Sequence: Synthetic peptide
  XENP021794 vlCDR1
QASQDIGNYLN

SEQ ID NO: 27742 - protein, 7 aa, Artificial Sequence
  Description of Artificial Sequence: Synthetic peptide
  XENP021794 vlCDR2
YTSRLHS

SEQ ID NO: 27743 - protein, 9 aa, Artificial Sequence
  Description of Artificial Sequence: Synthetic peptide
  XENP021794 vlCDR3
QQGNTLPYT

SEQ ID NO: 27744 - protein, 223 aa, Artificial Sequence; identical to SEQ ID NO: 27474
  Description of Artificial Sequence: Synthetic polypeptide
  XENP021795 2A11_H1.127_L2_Fab Heavy Chain

SEQ ID NO: 27745 - protein, 118 aa, Artificial Sequence; identical to SEQ ID NO: 27475
  Description of Artificial Sequence: Synthetic polypeptide
  VH of XENP021795

SEQ ID NO: 27746 - protein, 5 aa, Artificial Sequence
  Description of Artificial Sequence: Synthetic peptide
  XENP021795 vhCDR1
HYFMH

SEQ ID NO: 27747 - protein, 17 aa, Artificial Sequence
  Description of Artificial Sequence: Synthetic peptide
  XENP021795 vhCDR2
WIDPELGDTEYAPKFQG

SEQ ID NO: 27748 - protein, 9 aa, Artificial Sequence
  Description of Artificial Sequence: Synthetic peptide
  XENP021795 vhCDR3
RGVYQALDY

SEQ ID NO: 27749 - protein, 214 aa, Artificial Sequence; identical to SEQ ID NO: 17250
  Description of Artificial Sequence: Synthetic polypeptide
  XENP021795 2A11_H1.127_L2_Fab Light Chain

SEQ ID NO: 27750 - protein, 107 aa, Artificial Sequence; identical to SEQ ID NO: 17251
  Description of Artificial Sequence: Synthetic polypeptide
  VL of XENP021795

SEQ ID NO: 27751 - protein, 11 aa, Artificial Sequence
  Description of Artificial Sequence: Synthetic peptide
  XENP021795 vlCDR1
QASQDIGNYLN

SEQ ID NO: 27752 - protein, 7 aa, Artificial Sequence
  Description of Artificial Sequence: Synthetic peptide
  XENP021795 vlCDR2
YTSRLHS

SEQ ID NO: 27753 - protein, 9 aa, Artificial Sequence
  Description of Artificial Sequence: Synthetic peptide
  XENP021795 vlCDR3
QQGNTLPYT

SEQ ID NO: 27754 - protein, 223 aa, Artificial Sequence; identical to SEQ ID NO: 25194
  Description of Artificial Sequence: Synthetic polypeptide
  XENP021796 2A11_H1_L2.102_Fab Heavy Chain

SEQ ID NO: 27755 - protein, 118 aa, Artificial Sequence; identical to SEQ ID NO: 17236
  Description of Artificial Sequence: Synthetic polypeptide
  VH of XENP021796

SEQ ID NO: 27756 - protein, 5 aa, Artificial Sequence
  Description of Artificial Sequence: Synthetic peptide
  XENP021796 vhCDR1
DYYMH

SEQ ID NO: 27757 - protein, 17 aa, Artificial Sequence
  Description of Artificial Sequence: Synthetic peptide
  XENP021796 vhCDR2
WIDPENGDTEYAPKFQG

SEQ ID NO: 27758 - protein, 9 aa, Artificial Sequence
  Description of Artificial Sequence: Synthetic peptide
  XENP021796 vhCDR3
RGVRQALDY

SEQ ID NO: 27759 - protein, 214 aa, Artificial Sequence
  Description of Artificial Sequence: Synthetic polypeptide
  XENP021796 2A11_H1_L2.102_Fab Light Chain
DIQMTQSPAFLSVTPGEKVTITCQASQDIGNYLNWFQQKPDQTVKLLIYYTSRLHSGVPSRFSGSGSGTDYTFTISSLEAEDAATYFCQEGNTLPYTFGGGTKVEIKRTVAAPSVFIFPPSDEQLKSGTASVVCLLNNFYPREAKVQWKVDNALQSGNSQESVTEQDSKDSTYSLSSTLTLSKADYEKHKVYACEVTHQGLSSPVTKSFNRGEC

SEQ ID NO: 27760 - protein, 107 aa, Artificial Sequence
  Description of Artificial Sequence: Synthetic polypeptide
  VL of XENP021796
DIQMTQSPAFLSVTPGEKVTITCQASQDIGNYLNWFQQKPDQTVKLLIYYTSRLHSGVPSRFSGSGSGTDYTFTISSLEAEDAATYFCQEGNTLPYTFGGGTKVEIK

SEQ ID NO: 27761 - protein, 11 aa, Artificial Sequence
  Description of Artificial Sequence: Synthetic peptide
  XENP021796 vlCDR1
QASQDIGNYLN

SEQ ID NO: 27762 - protein, 7 aa, Artificial Sequence
  Description of Artificial Sequence: Synthetic peptide
  XENP021796 vlCDR2
YTSRLHS

SEQ ID NO: 27763 - protein, 9 aa, Artificial Sequence
  Description of Artificial Sequence: Synthetic peptide
  XENP021796 vlCDR3
QEGNTLPYT

SEQ ID NO: 27764 - protein, 223 aa, Artificial Sequence; identical to SEQ ID NO: 25194
  Description of Artificial Sequence: Synthetic polypeptide
  XENP021801 2A11_H1_L2.103_Fab Heavy Chain

SEQ ID NO: 27765 - protein, 118 aa, Artificial Sequence; identical to SEQ ID NO: 17236
  Description of Artificial Sequence: Synthetic polypeptide
  VH of XENP021801

SEQ ID NO: 27766 - protein, 5 aa, Artificial Sequence
  Description of Artificial Sequence: Synthetic peptide
  XENP021801 vhCDR1
DYYMH

SEQ ID NO: 27767 - protein, 17 aa, Artificial Sequence
  Description of Artificial Sequence: Synthetic peptide
  XENP021801 vhCDR2
WIDPENGDTEYAPKFQG

SEQ ID NO: 27768 - protein, 9 aa, Artificial Sequence
  Description of Artificial Sequence: Synthetic peptide
  XENP021801 vhCDR3
RGVRQALDY

SEQ ID NO: 27769 - protein, 214 aa, Artificial Sequence
  Description of Artificial Sequence: Synthetic polypeptide
  XENP021801 2A11_H1_L2.103_Fab Light Chain
DIQMTQSPAFLSVTPGEKVTITCQASQDIGNYLNWFQQKPDQTVKLLIYYTSRLHSGVPSRFSGSGSGTDYTFTISSLEAEDAATYFCQHGNTLPYTFGGGTKVEIKRTVAAPSVFIFPPSDEQLKSGTASVVCLLNNFYPREAKVQWKVDNALQSGNSQESVTEQDSKDSTYSLSSTLTLSKADYEKHKVYACEVTHQGLSSPVTKSFNRGEC

SEQ ID NO: 27770 - protein, 107 aa, Artificial Sequence
  Description of Artificial Sequence: Synthetic polypeptide
  VL of XENP021801
DIQMTQSPAFLSVTPGEKVTITCQASQDIGNYLNWFQQKPDQTVKLLIYYTSRLHSGVPSRFSGSGSGTDYTFTISSLEAEDAATYFCQHGNTLPYTFGGGTKVEIK

SEQ ID NO: 27771 - protein, 11 aa, Artificial Sequence
  Description of Artificial Sequence: Synthetic peptide
  XENP021801 vlCDR1
QASQDIGNYLN

SEQ ID NO: 27772 - protein, 7 aa, Artificial Sequence
  Description of Artificial Sequence: Synthetic peptide
  XENP021801 vlCDR2
YTSRLHS

SEQ ID NO: 27773 - protein, 9 aa, Artificial Sequence
  Description of Artificial Sequence: Synthetic peptide
  XENP021801 vlCDR3
QHGNTLPYT

SEQ ID NO: 27774 - protein, 223 aa, Artificial Sequence; identical to SEQ ID NO: 25194
  Description of Artificial Sequence: Synthetic polypeptide
  XENP021802 2A11_H1_L2.104_Fab Heavy Chain

SEQ ID NO: 27775 - protein, 118 aa, Artificial Sequence; identical to SEQ ID NO: 17236
  Description of Artificial Sequence: Synthetic polypeptide
  VH of XENP021802

SEQ ID NO: 27776 - protein, 5 aa, Artificial Sequence
  Description of Artificial Sequence: Synthetic peptide
  XENP021802 vhCDR1
DYYMH

SEQ ID NO: 27777 - protein, 17 aa, Artificial Sequence
  Description of Artificial Sequence: Synthetic peptide
  XENP021802 vhCDR2
WIDPENGDTEYAPKFQG

SEQ ID NO: 27778 - protein, 9 aa, Artificial Sequence
  Description of Artificial Sequence: Synthetic peptide
  XENP021802 vhCDR3
RGVRQALDY

SEQ ID NO: 27779 - protein, 214 aa, Artificial Sequence
  Description of Artificial Sequence: Synthetic polypeptide
  XENP021802 2A11_H1_L2.104_Fab Light Chain
DIQMTQSPAFLSVTPGEKVTITCQASQDIGNYLNWFQQKPDQTVKLLIYYTSRLHSGVPSRFSGSGSGTDYTFTISSLEAEDAATYFCQKGNTLPYTFGGGTKVEIKRTVAAPSVFIFPPSDEQLKSGTASVVCLLNNFYPREAKVQWKVDNALQSGNSQESVTEQDSKDSTYSLSSTLTLSKADYEKHKVYACEVTHQGLSSPVTKSFNRGEC

SEQ ID NO: 27780 - protein, 107 aa, Artificial Sequence
  Description of Artificial Sequence: Synthetic polypeptide
  VL of XENP021802
DIQMTQSPAFLSVTPGEKVTITCQASQDIGNYLNWFQQKPDQTVKLLIYYTSRLHSGVPSRFSGSGSGTDYTFTISSLEAEDAATYFCQKGNTLPYTFGGGTKVEIK

SEQ ID NO: 27781 - protein, 11 aa, Artificial Sequence
  Description of Artificial Sequence: Synthetic peptide
  XENP021802 vlCDR1
QASQDIGNYLN

SEQ ID NO: 27782 - protein, 7 aa, Artificial Sequence
  Description of Artificial Sequence: Synthetic peptide
  XENP021802 vlCDR2
YTSRLHS

SEQ ID NO: 27783 - protein, 9 aa, Artificial Sequence
  Description of Artificial Sequence: Synthetic peptide
  XENP021802 vlCDR3
QKGNTLPYT

SEQ ID NO: 27784 - protein, 223 aa, Artificial Sequence; identical to SEQ ID NO: 25194
  Description of Artificial Sequence: Synthetic polypeptide
  XENP021803 2A11_H1_L2.105_Fab Heavy Chain

SEQ ID NO: 27785 - protein, 118 aa, Artificial Sequence; identical to SEQ ID NO: 17236
  Description of Artificial Sequence: Synthetic polypeptide
  VH of XENP021803

SEQ ID NO: 27786 - protein, 5 aa, Artificial Sequence
  Description of Artificial Sequence: Synthetic peptide
  XENP021803 vhCDR1
DYYMH

SEQ ID NO: 27787 - protein, 17 aa, Artificial Sequence
  Description of Artificial Sequence: Synthetic peptide
  XENP021803 vhCDR2
WIDPENGDTEYAPKFQG

SEQ ID NO: 27788 - protein, 9 aa, Artificial Sequence
  Description of Artificial Sequence: Synthetic peptide
  XENP021803 vhCDR3
RGVRQALDY

SEQ ID NO: 27789 - protein, 214 aa, Artificial Sequence
  Description of Artificial Sequence: Synthetic polypeptide
  XENP021803 2A11_H1_L2.105_Fab Light Chain
DIQMTQSPAFLSVTPGEKVTITCQASQDIGNYLNWFQQKPDQTVKLLIYYTSRLHSGVPSRFSGSGSGTDYTFTISSLEAEDAATYFCQTGNTLPYTFGGGTKVEIKRTVAAPSVFIFPPSDEQLKSGTASVVCLLNNFYPREAKVQWKVDNALQSGNSQESVTEQDSKDSTYSLSSTLTLSKADYEKHKVYACEVTHQGLSSPVTKSFNRGEC

SEQ ID NO: 27790 - protein, 107 aa, Artificial Sequence
  Description of Artificial Sequence: Synthetic polypeptide
  VL of XENP021803
DIQMTQSPAFLSVTPGEKVTITCQASQDIGNYLNWFQQKPDQTVKLLIYYTSRLHSGVPSRFSGSGSGTDYTFTISSLEAEDAATYFCQTGNTLPYTFGGGTKVEIK

SEQ ID NO: 27791 - protein, 11 aa, Artificial Sequence
  Description of Artificial Sequence: Synthetic peptide
  XENP021803 vlCDR1
QASQDIGNYLN

SEQ ID NO: 27792 - protein, 7 aa, Artificial Sequence
  Description of Artificial Sequence: Synthetic peptide
  XENP021803 vlCDR2
YTSRLHS

SEQ ID NO: 27793 - protein, 9 aa, Artificial Sequence
  Description of Artificial Sequence: Synthetic peptide
  XENP021803 vlCDR3
QTGNTLPYT

SEQ ID NO: 27794 - protein, 223 aa, Artificial Sequence; identical to SEQ ID NO: 25194
  Description of Artificial Sequence: Synthetic polypeptide
  XENP021804 2A11_H1_L2.106_Fab Heavy Chain

SEQ ID NO: 27795 - protein, 118 aa, Artificial Sequence; identical to SEQ ID NO: 17236
  Description of Artificial Sequence: Synthetic polypeptide
  VH of XENP021804

SEQ ID NO: 27796 - protein, 5 aa, Artificial Sequence
  Description of Artificial Sequence: Synthetic peptide
  XENP021804 vhCDR1
DYYMH

SEQ ID NO: 27797 - protein, 17 aa, Artificial Sequence
  Description of Artificial Sequence: Synthetic peptide
  XENP021804 vhCDR2
WIDPENGDTEYAPKFQG

SEQ ID NO: 27798 - protein, 9 aa, Artificial Sequence
  Description of Artificial Sequence: Synthetic peptide
  XENP021804 vhCDR3
RGVRQALDY

SEQ ID NO: 27799 - protein, 214 aa, Artificial Sequence
  Description of Artificial Sequence: Synthetic polypeptide
  XENP021804 2A11_H1_L2.106_Fab Light Chain
DIQMTQSPAFLSVTPGEKVTITCQASQDIGNYLNWFQQKPDQTVKLLIYYTSRLHSGVPSRFSGSGSGTDYTFTISSLEAEDAATYFCQRGNTLPYTFGGGTKVEIKRTVAAPSVFIFPPSDEQLKSGTASVVCLLNNFYPREAKVQWKVDNALQSGNSQESVTEQDSKDSTYSLSSTLTLSKADYEKHKVYACEVTHQGLSSPVTKSFNRGEC

SEQ ID NO: 27800 - protein, 107 aa, Artificial Sequence
  Description of Artificial Sequence: Synthetic polypeptide
  VL of XENP021804
DIQMTQSPAFLSVTPGEKVTITCQASQDIGNYLNWFQQKPDQTVKLLIYYTSRLHSGVPSRFSGSGSGTDYTFTISSLEAEDAATYFCQRGNTLPYTFGGGTKVEIK

SEQ ID NO: 27801 - protein, 11 aa, Artificial Sequence
  Description of Artificial Sequence: Synthetic peptide
  XENP021804 vlCDR1
QASQDIGNYLN

SEQ ID NO: 27802 - protein, 7 aa, Artificial Sequence
  Description of Artificial Sequence: Synthetic peptide
  XENP021804 vlCDR2
YTSRLHS

SEQ ID NO: 27803 - protein, 9 aa, Artificial Sequence
  Description of Artificial Sequence: Synthetic peptide
  XENP021804 vlCDR3
QRGNTLPYT

SEQ ID NO: 27804 - protein, 223 aa, Artificial Sequence; identical to SEQ ID NO: 25194
  Description of Artificial Sequence: Synthetic polypeptide
  XENP021805 2A11_H1_L2.107_Fab Heavy Chain

SEQ ID NO: 27805 - protein, 118 aa, Artificial Sequence; identical to SEQ ID NO: 17236
  Description of Artificial Sequence: Synthetic polypeptide
  VH of XENP021805

SEQ ID NO: 27806 - protein, 5 aa, Artificial Sequence
  Description of Artificial Sequence: Synthetic peptide
  XENP021805 vhCDR1
DYYMH

SEQ ID NO: 27807 - protein, 17 aa, Artificial Sequence
  Description of Artificial Sequence: Synthetic peptide
  XENP021805 vhCDR2
WIDPENGDTEYAPKFQG

SEQ ID NO: 27808 - protein, 9 aa, Artificial Sequence
  Description of Artificial Sequence: Synthetic peptide
  XENP021805 vhCDR3
RGVRQALDY

SEQ ID NO: 27809 - protein, 214 aa, Artificial Sequence
  Description of Artificial Sequence: Synthetic polypeptide
  XENP021805 2A11_H1_L2.107_Fab Light Chain
DIQMTQSPAFLSVTPGEKVTITCQASQDIGNYLNWFQQKPDQTVKLLIYYTSRLHSGVPSRFSGSGSGTDYTFTISSLEAEDAATYFCQIGNTLPYTFGGGTKVEIKRTVAAPSVFIFPPSDEQLKSGTASVVCLLNNFYPREAKVQWKVDNALQSGNSQESVTEQDSKDSTYSLSSTLTLSKADYEKHKVYACEVTHQGLSSPVTKSFNRGEC

SEQ ID NO: 27810 - protein, 107 aa, Artificial Sequence
  Description of Artificial Sequence: Synthetic polypeptide
  VL of XENP021805
DIQMTQSPAFLSVTPGEKVTITCQASQDIGNYLNWFQQKPDQTVKLLIYYTSRLHSGVPSRFSGSGSGTDYTFTISSLEAEDAATYFCQIGNTLPYTFGGGTKVEIK

SEQ ID NO: 27811 - protein, 11 aa, Artificial Sequence
  Description of Artificial Sequence: Synthetic peptide
  XENP021805 vlCDR1
QASQDIGNYLN

SEQ ID NO: 27812 - protein, 7 aa, Artificial Sequence
  Description of Artificial Sequence: Synthetic peptide
  XENP021805 vlCDR2
YTSRLHS

SEQ ID NO: 27813 - protein, 9 aa, Artificial Sequence
  Description of Artificial Sequence: Synthetic peptide
  XENP021805 vlCDR3
QIGNTLPYT

SEQ ID NO: 27814 - protein, 223 aa, Artificial Sequence; identical to SEQ ID NO: 25194
  Description of Artificial Sequence: Synthetic polypeptide
  XENP021806 2A11_H1_L2.108_Fab Heavy Chain

SEQ ID NO: 27815 - protein, 118 aa, Artificial Sequence; identical to SEQ ID NO: 17236
  Description of Artificial Sequence: Synthetic polypeptide
  VH of XENP021806

SEQ ID NO: 27816 - protein, 5 aa, Artificial Sequence
  Description of Artificial Sequence: Synthetic peptide
  XENP021806 vhCDR1
DYYMH

SEQ ID NO: 27817 - protein, 17 aa, Artificial Sequence
  Description of Artificial Sequence: Synthetic peptide
  XENP021806 vhCDR2
WIDPENGDTEYAPKFQG

SEQ ID NO: 27818 - protein, 9 aa, Artificial Sequence
  Description of Artificial Sequence: Synthetic peptide
  XENP021806 vhCDR3
RGVRQALDY

SEQ ID NO: 27819 - protein, 214 aa, Artificial Sequence
  Description of Artificial Sequence: Synthetic polypeptide
  XENP021806 2A11_H1_L2.108_Fab Light Chain
DIQMTQSPAFLSVTPGEKVTITCQASQDIGNYLNWFQQKPDQTVKLLIYYTSRLHSGVPSRFSGSGSGTDYTFTISSLEAEDAATYFCQYGNTLPYTFGGGTKVEIKRTVAAPSVFIFPPSDEQLKSGTASVVCLLNNFYPREAKVQWKVDNALQSGNSQESVTEQDSKDSTYSLSSTLTLSKADYEKHKVYACEVTHQGLSSPVTKSFNRGEC

SEQ ID NO: 27820 - protein, 107 aa, Artificial Sequence
  Description of Artificial Sequence: Synthetic polypeptide
  VL of XENP021806
DIQMTQSPAFLSVTPGEKVTITCQASQDIGNYLNWFQQKPDQTVKLLIYYTSRLHSGVPSRFSGSGSGTDYTFTISSLEAEDAATYFCQYGNTLPYTFGGGTKVEIK

SEQ ID NO: 27821 - protein, 11 aa, Artificial Sequence
  Description of Artificial Sequence: Synthetic peptide
  XENP021806 vlCDR1
QASQDIGNYLN

SEQ ID NO: 27822 - protein, 7 aa, Artificial Sequence
  Description of Artificial Sequence: Synthetic peptide
  XENP021806 vlCDR2
YTSRLHS

SEQ ID NO: 27823 - protein, 9 aa, Artificial Sequence
  Description of Artificial Sequence: Synthetic peptide
  XENP021806 vlCDR3
QYGNTLPYT

SEQ ID NO: 27824 - protein, 223 aa, Artificial Sequence; identical to SEQ ID NO: 25194
  Description of Artificial Sequence: Synthetic polypeptide
  XENP021807 2A11_H1_L2.109_Fab Heavy Chain

SEQ ID NO: 27825 - protein, 118 aa, Artificial Sequence; identical to SEQ ID NO: 17236
  Description of Artificial Sequence: Synthetic polypeptide
  VH of XENP021807

SEQ ID NO: 27826 - protein, 5 aa, Artificial Sequence
  Description of Artificial Sequence: Synthetic peptide
  XENP021807 vhCDR1
DYYMH

SEQ ID NO: 27827 - protein, 17 aa, Artificial Sequence
  Description of Artificial Sequence: Synthetic peptide
  XENP021807 vhCDR2
WIDPENGDTEYAPKFQG

SEQ ID NO: 27828 - protein, 9 aa, Artificial Sequence
  Description of Artificial Sequence: Synthetic peptide
  XENP021807 vhCDR3
RGVRQALDY

SEQ ID NO: 27829 - protein, 214 aa, Artificial Sequence
  Description of Artificial Sequence: Synthetic polypeptide
  XENP021807 2A11_H1_L2.109_Fab Light Chain
DIQMTQSPAFLSVTPGEKVTITCQASQDIGNYLNWFQQKPDQTVKLLIYFTSRLHSGVPSRFSGSGSGTDYTFTISSLEAEDAATYFCQQGHQLPYTFGGGTKVEIKRTVAAPSVFIFPPSDEQLKSGTASVVCLLNNFYPREAKVQWKVDNALQSGNSQESVTEQDSKDSTYSLSSTLTLSKADYEKHKVYACEVTHQGLSSPVTKSFNRGEC

SEQ ID NO: 27830 - protein, 107 aa, Artificial Sequence
  Description of Artificial Sequence: Synthetic polypeptide
  VL of XENP021807
DIQMTQSPAFLSVTPGEKVTITCQASQDIGNYLNWFQQKPDQTVKLLIYFTSRLHSGVPSRFSGSGSGTDYTFTISSLEAEDAATYFCQQGHQLPYTFGGGTKVEIK

SEQ ID NO: 27831 - protein, 11 aa, Artificial Sequence
  Description of Artificial Sequence: Synthetic peptide
  XENP021807 vlCDR1
QASQDIGNYLN

SEQ ID NO: 27832 - protein, 7 aa, Artificial Sequence
  Description of Artificial Sequence: Synthetic peptide
  XENP021807 vlCDR2
FTSRLHS

SEQ ID NO: 27833 - protein, 9 aa, Artificial Sequence
  Description of Artificial Sequence: Synthetic peptide
  XENP021807 vlCDR3
QQGHQLPYT

SEQ ID NO: 27834 - protein, 223 aa, Artificial Sequence; identical to SEQ ID NO: 25194
  Description of Artificial Sequence: Synthetic polypeptide
  XENP021808 2A11_H1_L2.110_Fab Heavy Chain

SEQ ID NO: 27835 - protein, 118 aa, Artificial Sequence; identical to SEQ ID NO: 17236
  Description of Artificial Sequence: Synthetic polypeptide
  VH of XENP021808

SEQ ID NO: 27836 - protein, 5 aa, Artificial Sequence
  Description of Artificial Sequence: Synthetic peptide
  XENP021808 vhCDR1
DYYMH

SEQ ID NO: 27837 - protein, 17 aa, Artificial Sequence
  Description of Artificial Sequence: Synthetic peptide
  XENP021808 vhCDR2
WIDPENGDTEYAPKFQG

SEQ ID NO: 27838 - protein, 9 aa, Artificial Sequence
  Description of Artificial Sequence: Synthetic peptide
  XENP021808 vhCDR3
RGVRQALDY

SEQ ID NO: 27839 - protein, 214 aa, Artificial Sequence
  Description of Artificial Sequence: Synthetic polypeptide
  XENP021808 2A11_H1_L2.110_Fab Light Chain
DIQMTQSPAFLSVTPGEKVTITCQASQDIGNYLNWFQQKPDQTVKLLIYYTSHLHSGVPSRFSGSGSGTDYTFTISSLEAEDAATYFCQQGHQLPYTFGGGTKVEIKRTVAAPSVFIFPPSDEQLKSGTASVVCLLNNFYPREAKVQWKVDNALQSGNSQESVTEQDSKDSTYSLSSTLTLSKADYEKHKVYACEVTHQGLSSPVTKSFNRGEC

SEQ ID NO: 27840 - protein, 107 aa, Artificial Sequence
  Description of Artificial Sequence: Synthetic polypeptide
  VL of XENP021808
DIQMTQSPAFLSVTPGEKVTITCQASQDIGNYLNWFQQKPDQTVKLLIYYTSHLHSGVPSRFSGSGSGTDYTFTISSLEAEDAATYFCQQGHQLPYTFGGGTKVEIK

SEQ ID NO: 27841 - protein, 11 aa, Artificial Sequence
  Description of Artificial Sequence: Synthetic peptide
  XENP021808 vlCDR1
QASQDIGNYLN

SEQ ID NO: 27842 - protein, 7 aa, Artificial Sequence
  Description of Artificial Sequence: Synthetic peptide
  XENP021808 vlCDR2
YTSHLHS

SEQ ID NO: 27843 - protein, 9 aa, Artificial Sequence
  Description of Artificial Sequence: Synthetic peptide
  XENP021808 vlCDR3
QQGHQLPYT

SEQ ID NO: 27844 - protein, 223 aa, Artificial Sequence; identical to SEQ ID NO: 25194
  Description of Artificial Sequence: Synthetic polypeptide
  XENP021809 2A11_H1_L2.111_Fab Heavy Chain

SEQ ID NO: 27845 - protein, 118 aa, Artificial Sequence; identical to SEQ ID NO: 17236
  Description of Artificial Sequence: Synthetic polypeptide
  VH of XENP021809

SEQ ID NO: 27846 - protein, 5 aa, Artificial Sequence
  Description of Artificial Sequence: Synthetic peptide
  XENP021809 vhCDR1
DYYMH

SEQ ID NO: 27847 - protein, 17 aa, Artificial Sequence
  Description of Artificial Sequence: Synthetic peptide
  XENP021809 vhCDR2
WIDPENGDTEYAPKFQG

SEQ ID NO: 27848 - protein, 9 aa, Artificial Sequence
  Description of Artificial Sequence: Synthetic peptide
  XENP021809 vhCDR3
RGVRQALDY

SEQ ID NO: 27849 - protein, 214 aa, Artificial Sequence
  Description of Artificial Sequence: Synthetic polypeptide
  XENP021809 2A11_H1_L2.111_Fab Light Chain
DIQMTQSPAFLSVTPGEKVTITCQASQDIGNYLNWFQQKPDQTVKLLIYYTSYLHSGVPSRFSGSGSGTDYTFTISSLEAEDAATYFCQQGHQLPYTFGGGTKVEIKRTVAAPSVFIFPPSDEQLKSGTASVVCLLNNFYPREAKVQWKVDNALQSGNSQESVTEQDSKDSTYSLSSTLTLSKADYEKHKVYACEVTHQGLSSPVTKSFNRGEC

SEQ ID NO: 27850 - protein, 107 aa, Artificial Sequence
  Description of Artificial Sequence: Synthetic polypeptide
  VL of XENP021809
DIQMTQSPAFLSVTPGEKVTITCQASQDIGNYLNWFQQKPDQTVKLLIYYTSYLHSGVPSRFSGSGSGTDYTFTISSLEAEDAATYFCQQGHQLPYTFGGGTKVEIK

SEQ ID NO: 27851 - protein, 11 aa, Artificial Sequence
  Description of Artificial Sequence: Synthetic peptide
  XENP021809 vlCDR1
QASQDIGNYLN

SEQ ID NO: 27852 - protein, 7 aa, Artificial Sequence
  Description of Artificial Sequence: Synthetic peptide
  XENP021809 vlCDR2
YTSYLHS

SEQ ID NO: 27853 - protein, 9 aa, Artificial Sequence
  Description of Artificial Sequence: Synthetic peptide
  XENP021809 vlCDR3
QQGHQLPYT

SEQ ID NO: 27854 - protein, 223 aa, Artificial Sequence; identical to SEQ ID NO: 25194
  Description of Artificial Sequence: Synthetic polypeptide
  XENP021810 2A11_H1_L2.112_Fab Heavy Chain

SEQ ID NO: 27855 - protein, 118 aa, Artificial Sequence; identical to SEQ ID NO: 17236
  Description of Artificial Sequence: Synthetic polypeptide
  VH of XENP021810

SEQ ID NO: 27856 - protein, 5 aa, Artificial Sequence
  Description of Artificial Sequence: Synthetic peptide
  XENP021810 vhCDR1
DYYMH

SEQ ID NO: 27857 - protein, 17 aa, Artificial Sequence
  Description of Artificial Sequence: Synthetic peptide
  XENP021810 vhCDR2
WIDPENGDTEYAPKFQG

SEQ ID NO: 27858 - protein, 9 aa, Artificial Sequence
  Description of Artificial Sequence: Synthetic peptide
  XENP021810 vhCDR3
RGVRQALDY

SEQ ID NO: 27859 - protein, 214 aa, Artificial Sequence
  Description of Artificial Sequence: Synthetic polypeptide
  XENP021810 2A11_H1_L2.112_Fab Light Chain
DIQMTQSPAFLSVTPGEKVTITCQASQDIGNYLNWFQQKPDQTVKLLIYFTSHLHSGVPSRFSGSGSGTDYTFTISSLEAEDAATYFCQQGNTLPYTFGGGTKVEIKRTVAAPSVFIFPPSDEQLKSGTASVVCLLNNFYPREAKVQWKVDNALQSGNSQESVTEQDSKDSTYSLSSTLTLSKADYEKHKVYACEVTHQGLSSPVTKSFNRGEC

SEQ ID NO: 27860 - protein, 107 aa, Artificial Sequence
  Description of Artificial Sequence: Synthetic polypeptide
  VL of XENP021810
DIQMTQSPAFLSVTPGEKVTITCQASQDIGNYLNWFQQKPDQTVKLLIYFTSHLHSGVPSRFSGSGSGTDYTFTISSLEAEDAATYFCQQGNTLPYTFGGGTKVEIK

SEQ ID NO: 27861 - protein, 11 aa, Artificial Sequence
  Description of Artificial Sequence: Synthetic peptide
  XENP021810 vlCDR1
QASQDIGNYLN

SEQ ID NO: 27862 - protein, 7 aa, Artificial Sequence
  Description of Artificial Sequence: Synthetic peptide
  XENP021810 vlCDR2
FTSHLHS

SEQ ID NO: 27863 - protein, 9 aa, Artificial Sequence
  Description of Artificial Sequence: Synthetic peptide
  XENP021810 vlCDR3
QQGNTLPYT

SEQ ID NO: 27864 - protein, 223 aa, Artificial Sequence; identical to SEQ ID NO: 25194
  Description of Artificial Sequence: Synthetic polypeptide
  XENP021811 2A11_H1_L2.113_Fab Heavy Chain

SEQ ID NO: 27865 - protein, 118 aa, Artificial Sequence; identical to SEQ ID NO: 17236
  Description of Artificial Sequence: Synthetic polypeptide
  VH of XENP021811

SEQ ID NO: 27866 - protein, 5 aa, Artificial Sequence
  Description of Artificial Sequence: Synthetic peptide
  XENP021811 vhCDR1
DYYMH

SEQ ID NO: 27867 - protein, 17 aa, Artificial Sequence
  Description of Artificial Sequence: Synthetic peptide
  XENP021811 vhCDR2
WIDPENGDTEYAPKFQG

SEQ ID NO: 27868 - protein, 9 aa, Artificial Sequence
  Description of Artificial Sequence: Synthetic peptide
  XENP021811 vhCDR3
RGVRQALDY

SEQ ID NO: 27869 - protein, 214 aa, Artificial Sequence; identical to SEQ ID NO: 22079
  Description of Artificial Sequence: Synthetic polypeptide
  XENP021811 2A11_H1_L2.113_Fab Light Chain

SEQ ID NO: 27870 - protein, 107 aa, Artificial Sequence; identical to SEQ ID NO: 22080
  Description of Artificial Sequence: Synthetic polypeptide
  VL of XENP021811

SEQ ID NO: 27871 - protein, 11 aa, Artificial Sequence
  Description of Artificial Sequence: Synthetic peptide
  XENP021811 vlCDR1
QASQDIGNYLN

SEQ ID NO: 27872 - protein, 7 aa, Artificial Sequence
  Description of Artificial Sequence: Synthetic peptide
  XENP021811 vlCDR2
FTSYLHS

SEQ ID NO: 27873 - protein, 9 aa, Artificial Sequence
  Description of Artificial Sequence: Synthetic peptide
  XENP021811 vlCDR3
QQGNTLPYT

SEQ ID NO: 27874 - protein, 223 aa, Artificial Sequence; identical to SEQ ID NO: 25194
  Description of Artificial Sequence: Synthetic polypeptide
  XENP021812 2A11_H1_L2.114_Fab Heavy Chain

SEQ ID NO: 27875 - protein, 118 aa, Artificial Sequence; identical to SEQ ID NO: 17236
  Description of Artificial Sequence: Synthetic polypeptide
  VH of XENP021812

SEQ ID NO: 27876 - protein, 5 aa, Artificial Sequence
  Description of Artificial Sequence: Synthetic peptide
  XENP021812 vhCDR1
DYYMH

SEQ ID NO: 27877 - protein, 17 aa, Artificial Sequence
  Description of Artificial Sequence: Synthetic peptide
  XENP021812 vhCDR2
WIDPENGDTEYAPKFQG

SEQ ID NO: 27878 - protein, 9 aa, Artificial Sequence
  Description of Artificial Sequence: Synthetic peptide
  XENP021812 vhCDR3
RGVRQALDY

SEQ ID NO: 27879 - protein, 214 aa, Artificial Sequence
  Description of Artificial Sequence: Synthetic polypeptide
  XENP021812 2A11_H1_L2.114_Fab Light Chain
DIQMTQSPAFLSVTPGEKVTITCQASQDIGNYLNWFQQKPDQTVKLLIYFTSHLHSGVPSRFSGSGSGTDYTFTISSLEAEDAATYFCQQGNQLPYTFGGGTKVEIKRTVAAPSVFIFPPSDEQLKSGTASVVCLLNNFYPREAKVQWKVDNALQSGNSQESVTEQDSKDSTYSLSSTLTLSKADYEKHKVYACEVTHQGLSSPVTKSFNRGEC

SEQ ID NO: 27880 - protein, 107 aa, Artificial Sequence
  Description of Artificial Sequence: Synthetic polypeptide
  VL of XENP021812
DIQMTQSPAFLSVTPGEKVTITCQASQDIGNYLNWFQQKPDQTVKLLIYFTSHLHSGVPSRFSGSGSGTDYTFTISSLEAEDAATYFCQQGNQLPYTFGGGTKVEIK

SEQ ID NO: 27881 - protein, 11 aa, Artificial Sequence
  Description of Artificial Sequence: Synthetic peptide
  XENP021812 vlCDR1
QASQDIGNYLN

SEQ ID NO: 27882 - protein, 7 aa, Artificial Sequence
  Description of Artificial Sequence: Synthetic peptide
  XENP021812 vlCDR2
FTSHLHS

SEQ ID NO: 27883 - protein, 9 aa, Artificial Sequence
  Description of Artificial Sequence: Synthetic peptide
  XENP021812 vlCDR3
QQGNQLPYT

SEQ ID NO: 27884 - protein, 223 aa, Artificial Sequence; identical to SEQ ID NO: 25194
  Description of Artificial Sequence: Synthetic polypeptide
  XENP021813 2A11_H1_L2.115_Fab Heavy Chain

SEQ ID NO: 27885 - protein, 118 aa, Artificial Sequence; identical to SEQ ID NO: 17236
  Description of Artificial Sequence: Synthetic polypeptide
  VH of XENP021813

SEQ ID NO: 27886 - protein, 5 aa, Artificial Sequence
  Description of Artificial Sequence: Synthetic peptide
  XENP021813 vhCDR1
DYYMH

SEQ ID NO: 27887 - protein, 17 aa, Artificial Sequence
  Description of Artificial Sequence: Synthetic peptide
  XENP021813 vhCDR2
WIDPENGDTEYAPKFQG

SEQ ID NO: 27888 - protein, 9 aa, Artificial Sequence
  Description of Artificial Sequence: Synthetic peptide
  XENP021813 vhCDR3
RGVRQALDY

SEQ ID NO: 27889 - protein, 214 aa, Artificial Sequence
  Description of Artificial Sequence: Synthetic polypeptide
  XENP021813 2A11_H1_L2.115_Fab Light Chain
DIQMTQSPAFLSVTPGEKVTITCQASQDIGNYLNWFQQKPDQTVKLLIYFTSYLHSGVPSRFSGSGSGTDYTFTISSLEAEDAATYFCQQGNQLPYTFGGGTKVEIKRTVAAPSVFIFPPSDEQLKSGTASVVCLLNNFYPREAKVQWKVDNALQSGNSQESVTEQDSKDSTYSLSSTLTLSKADYEKHKVYACEVTHQGLSSPVTKSFNRGEC

SEQ ID NO: 27890 - protein, 107 aa, Artificial Sequence
  Description of Artificial Sequence: Synthetic polypeptide
  VL of XENP021813
DIQMTQSPAFLSVTPGEKVTITCQASQDIGNYLNWFQQKPDQTVKLLIYFTSYLHSGVPSRFSGSGSGTDYTFTISSLEAEDAATYFCQQGNQLPYTFGGGTKVEIK

SEQ ID NO: 27891 - protein, 11 aa, Artificial Sequence
  Description of Artificial Sequence: Synthetic peptide
  XENP021813 vlCDR1
QASQDIGNYLN

SEQ ID NO: 27892 - protein, 7 aa, Artificial Sequence
  Description of Artificial Sequence: Synthetic peptide
  XENP021813 vlCDR2
FTSYLHS

SEQ ID NO: 27893 - protein, 9 aa, Artificial Sequence
  Description of Artificial Sequence: Synthetic peptide
  XENP021813 vlCDR3
QQGNQLPYT

SEQ ID NO: 27894 - protein, 223 aa, Artificial Sequence; identical to SEQ ID NO: 25194
  Description of Artificial Sequence: Synthetic polypeptide
  XENP021814 2A11_H1_L2.116_Fab Heavy Chain

SEQ ID NO: 27895 - protein, 118 aa, Artificial Sequence; identical to SEQ ID NO: 17236
  Description of Artificial Sequence: Synthetic polypeptide
  VH of XENP021814

SEQ ID NO: 27896 - protein, 5 aa, Artificial Sequence
  Description of Artificial Sequence: Synthetic peptide
  XENP021814 vhCDR1
DYYMH

SEQ ID NO: 27897 - protein, 17 aa, Artificial Sequence
  Description of Artificial Sequence: Synthetic peptide
  XENP021814 vhCDR2
WIDPENGDTEYAPKFQG

SEQ ID NO: 27898 - protein, 9 aa, Artificial Sequence
  Description of Artificial Sequence: Synthetic peptide
  XENP021814 vhCDR3
RGVRQALDY

SEQ ID NO: 27899 - protein, 214 aa, Artificial Sequence; identical to SEQ ID NO: 22119
  Description of Artificial Sequence: Synthetic polypeptide
  XENP021814 2A11_H1_L2.116_Fab Light Chain

SEQ ID NO: 27900 - protein, 107 aa, Artificial Sequence; identical to SEQ ID NO: 22120
  Description of Artificial Sequence: Synthetic polypeptide
  VL of XENP021814

SEQ ID NO: 27901 - protein, 11 aa, Artificial Sequence
  Description of Artificial Sequence: Synthetic peptide
  XENP021814 vlCDR1
QASQDIGNYLN

SEQ ID NO: 27902 - protein, 7 aa, Artificial Sequence
  Description of Artificial Sequence: Synthetic peptide
  XENP021814 vlCDR2
FTSHLHS

SEQ ID NO: 27903 - protein, 9 aa, Artificial Sequence
  Description of Artificial Sequence: Synthetic peptide
  XENP021814 vlCDR3
QQGHQLPYT

SEQ ID NO: 27904 - protein, 223 aa, Artificial Sequence; identical to SEQ ID NO: 25194
  Description of Artificial Sequence: Synthetic polypeptide
  XENP021815 2A11_H1_L2.117_Fab Heavy Chain

SEQ ID NO: 27905 - protein, 118 aa, Artificial Sequence; identical to SEQ ID NO: 17236
  Description of Artificial Sequence: Synthetic polypeptide
  VH of XENP021815

SEQ ID NO: 27906 - protein, 5 aa, Artificial Sequence
  Description of Artificial Sequence: Synthetic peptide
  XENP021815 vhCDR1
DYYMH

SEQ ID NO: 27907 - protein, 17 aa, Artificial Sequence
  Description of Artificial Sequence: Synthetic peptide
  XENP021815 vhCDR2
WIDPENGDTEYAPKFQG

SEQ ID NO: 27908 - protein, 9 aa, Artificial Sequence
  Description of Artificial Sequence: Synthetic peptide
  XENP021815 vhCDR3
RGVRQALDY

SEQ ID NO: 27909 - protein, 214 aa, Artificial Sequence
  Description of Artificial Sequence: Synthetic polypeptide
  XENP021815 2A11_H1_L2.117_Fab Light Chain
DIQMTQSPAFLSVTPGEKVTITCQASQDIGNYLNWFQQKPDQTVKLLIYFTSYLHSGVPSRFSGSGSGTDYTFTISSLEAEDAATYFCQQGHQLPYTFGGGTKVEIKRTVAAPSVFIFPPSDEQLKSGTASVVCLLNNFYPREAKVQWKVDNALQSGNSQESVTEQDSKDSTYSLSSTLTLSKADYEKHKVYACEVTHQGLSSPVTKSFNRGEC

SEQ ID NO: 27910 - protein, 107 aa, Artificial Sequence
  Description of Artificial Sequence: Synthetic polypeptide
  VL of XENP021815
DIQMTQSPAFLSVTPGEKVTITCQASQDIGNYLNWFQQKPDQTVKLLIYFTSYLHSGVPSRFSGSGSGTDYTFTISSLEAEDAATYFCQQGHQLPYTFGGGTKVEIK

SEQ ID NO: 27911 - protein, 11 aa, Artificial Sequence
  Description of Artificial Sequence: Synthetic peptide
  XENP021815 vlCDR1
QASQDIGNYLN

SEQ ID NO: 27912 - protein, 7 aa, Artificial Sequence
  Description of Artificial Sequence: Synthetic peptide
  XENP021815 vlCDR2
FTSYLHS

SEQ ID NO: 27913 - protein, 9 aa, Artificial Sequence
  Description of Artificial Sequence: Synthetic peptide
  XENP021815 vlCDR3
QQGHQLPYT

SEQ ID NO: 27914 - protein, 223 aa, Artificial Sequence; identical to SEQ ID NO: 25194
  Description of Artificial Sequence: Synthetic polypeptide
  XENP021816 2A11_H1_L2.118_Fab Heavy Chain

SEQ ID NO: 27915 - protein, 118 aa, Artificial Sequence; identical to SEQ ID NO: 17236
  Description of Artificial Sequence: Synthetic polypeptide
  VH of XENP021816

SEQ ID NO: 27916 - protein, 5 aa, Artificial Sequence
  Description of Artificial Sequence: Synthetic peptide
  XENP021816 vhCDR1
DYYMH

SEQ ID NO: 27917 - protein, 17 aa, Artificial Sequence
  Description of Artificial Sequence: Synthetic peptide
  XENP021816 vhCDR2
WIDPENGDTEYAPKFQG

SEQ ID NO: 27918 - protein, 9 aa, Artificial Sequence
  Description of Artificial Sequence: Synthetic peptide
  XENP021816 vhCDR3
RGVRQALDY

SEQ ID NO: 27919 - protein, 214 aa, Artificial Sequence
  Description of Artificial Sequence: Synthetic polypeptide
  XENP021816 2A11_H1_L2.118_Fab Light Chain
DIQMTQSPAFLSVTPGEKVTITCQASQDIGNYLNWFQQKPDQTVKLLIYFTSRLHSGVPSRFSGSGSGTDYTFTISSLEAEDAATYFCQQGNQLPYTFGGGTKVEIKRTVAAPSVFIFPPSDEQLKSGTASVVCLLNNFYPREAKVQWKVDNALQSGNSQESVTEQDSKDSTYSLSSTLTLSKADYEKHKVYACEVTHQGLSSPVTKSFNRGEC

SEQ ID NO: 27920 - protein, 107 aa, Artificial Sequence
  Description of Artificial Sequence: Synthetic polypeptide
  VL of XENP021816
DIQMTQSPAFLSVTPGEKVTITCQASQDIGNYLNWFQQKPDQTVKLLIYFTSRLHSGVPSRFSGSGSGTDYTFTISSLEAEDAATYFCQQGNQLPYTFGGGTKVEIK

SEQ ID NO: 27921 - protein, 11 aa, Artificial Sequence
  Description of Artificial Sequence: Synthetic peptide
  XENP021816 vlCDR1
QASQDIGNYLN

SEQ ID NO: 27922 - protein, 7 aa, Artificial Sequence
  Description of Artificial Sequence: Synthetic peptide
  XENP021816 vlCDR2
FTSRLHS

SEQ ID NO: 27923 - protein, 9 aa, Artificial Sequence
  Description of Artificial Sequence: Synthetic peptide
  XENP021816 vlCDR3
QQGNQLPYT

SEQ ID NO: 27924 - protein, 223 aa, Artificial Sequence; identical to SEQ ID NO: 25194
  Description of Artificial Sequence: Synthetic polypeptide
  XENP021817 2A11_H1_L2.119_Fab Heavy Chain

SEQ ID NO: 27925 - protein, 118 aa, Artificial Sequence; identical to SEQ ID NO: 17236
  Description of Artificial Sequence: Synthetic polypeptide
  VH of XENP021817

SEQ ID NO: 27926 - protein, 5 aa, Artificial Sequence
  Description of Artificial Sequence: Synthetic peptide
  XENP021817 vhCDR1
DYYMH

SEQ ID NO: 27927 - protein, 17 aa, Artificial Sequence
  Description of Artificial Sequence: Synthetic peptide
  XENP021817 vhCDR2
WIDPENGDTEYAPKFQG

SEQ ID NO: 27928 - protein, 9 aa, Artificial Sequence
  Description of Artificial Sequence: Synthetic peptide
  XENP021817 vhCDR3
RGVRQALDY

SEQ ID NO: 27929 - protein, 214 aa, Artificial Sequence
  Description of Artificial Sequence: Synthetic polypeptide
  XENP021817 2A11_H1_L2.119_Fab Light Chain
DIQMTQSPAFLSVTPGEKVTITCQASQDIGNYLNWFQQKPDQTVKLLIYYTSHLHSGVPSRFSGSGSGTDYTFTISSLEAEDAATYFCQQGNQLPYTFGGGTKVEIKRTVAAPSVFIFPPSDEQLKSGTASVVCLLNNFYPREAKVQWKVDNALQSGNSQESVTEQDSKDSTYSLSSTLTLSKADYEKHKVYACEVTHQGLSSPVTKSFNRGEC

SEQ ID NO: 27930 - protein, 107 aa, Artificial Sequence
  Description of Artificial Sequence: Synthetic polypeptide
  VL of XENP021817
DIQMTQSPAFLSVTPGEKVTITCQASQDIGNYLNWFQQKPDQTVKLLIYYTSHLHSGVPSRFSGSGSGTDYTFTISSLEAEDAATYFCQQGNQLPYTFGGGTKVEIK

SEQ ID NO: 27931 - protein, 11 aa, Artificial Sequence
  Description of Artificial Sequence: Synthetic peptide
  XENP021817 vlCDR1
QASQDIGNYLN

SEQ ID NO: 27932 - protein, 7 aa, Artificial Sequence
  Description of Artificial Sequence: Synthetic peptide
  XENP021817 vlCDR2
YTSHLHS

SEQ ID NO: 27933 - protein, 9 aa, Artificial Sequence
  Description of Artificial Sequence: Synthetic peptide
  XENP021817 vlCDR3
QQGNQLPYT

SEQ ID NO: 27934 - protein, 223 aa, Artificial Sequence; identical to SEQ ID NO: 25194
  Description of Artificial Sequence: Synthetic polypeptide
  XENP021818 2A11_H1_L2.120_Fab Heavy Chain

SEQ ID NO: 27935 - protein, 118 aa, Artificial Sequence; identical to SEQ ID NO: 17236
  Description of Artificial Sequence: Synthetic polypeptide
  VH of XENP021818

SEQ ID NO: 27936 - protein, 5 aa, Artificial Sequence
  Description of Artificial Sequence: Synthetic peptide
  XENP021818 vhCDR1
DYYMH

SEQ ID NO: 27937 - protein, 17 aa, Artificial Sequence
  Description of Artificial Sequence: Synthetic peptide
  XENP021818 vhCDR2
WIDPENGDTEYAPKFQG

SEQ ID NO: 27938 - protein, 9 aa, Artificial Sequence
  Description of Artificial Sequence: Synthetic peptide
  XENP021818 vhCDR3
RGVRQALDY

SEQ ID NO: 27939 - protein, 214 aa, Artificial Sequence
  Description of Artificial Sequence: Synthetic polypeptide
  XENP021818 2A11_H1_L2.120_Fab Light Chain
DIQMTQSPAFLSVTPGEKVTITCQASQDIGNYLNWFQQKPDQTVKLLIYYTSYLHSGVPSRFSGSGSGTDYTFTISSLEAEDAATYFCQQGNQLPYTFGGGTKVEIKRTVAAPSVFIFPPSDEQLKSGTASVVCLLNNFYPREAKVQWKVDNALQSGNSQESVTEQDSKDSTYSLSSTLTLSKADYEKHKVYACEVTHQGLSSPVTKSFNRGEC

SEQ ID NO: 27940 - protein, 107 aa, Artificial Sequence
  Description of Artificial Sequence: Synthetic polypeptide
  VL of XENP021818
DIQMTQSPAFLSVTPGEKVTITCQASQDIGNYLNWFQQKPDQTVKLLIYYTSYLHSGVPSRFSGSGSGTDYTFTISSLEAEDAATYFCQQGNQLPYTFGGGTKVEIK

SEQ ID NO: 27941 - protein, 11 aa, Artificial Sequence
  Description of Artificial Sequence: Synthetic peptide
  XENP021818 vlCDR1
QASQDIGNYLN

SEQ ID NO: 27942 - protein, 7 aa, Artificial Sequence
  Description of Artificial Sequence: Synthetic peptide
  XENP021818 vlCDR2
YTSYLHS

SEQ ID NO: 27943 - protein, 9 aa, Artificial Sequence
  Description of Artificial Sequence: Synthetic peptide
  XENP021818 vlCDR3
QQGNQLPYT

SEQ ID NO: 27944 - protein, 223 aa, Artificial Sequence; identical to SEQ ID NO: 25194
  Description of Artificial Sequence: Synthetic polypeptide
  XENP021819 2A11_H1_L2.121_Fab Heavy Chain

SEQ ID NO: 27945 - protein, 118 aa, Artificial Sequence; identical to SEQ ID NO: 17236
  Description of Artificial Sequence: Synthetic polypeptide
  VH of XENP021819

SEQ ID NO: 27946 - protein, 5 aa, Artificial Sequence
  Description of Artificial Sequence: Synthetic peptide
  XENP021819 vhCDR1
DYYMH

SEQ ID NO: 27947 - protein, 17 aa, Artificial Sequence
  Description of Artificial Sequence: Synthetic peptide
  XENP021819 vhCDR2
WIDPENGDTEYAPKFQG

SEQ ID NO: 27948 - protein, 9 aa, Artificial Sequence
  Description of Artificial Sequence: Synthetic peptide
  XENP021819 vhCDR3
RGVRQALDY

SEQ ID NO: 27949 - protein, 214 aa, Artificial Sequence
  Description of Artificial Sequence: Synthetic polypeptide
  XENP021819 2A11_H1_L2.121_Fab Light Chain
DIQMTQSPAFLSVTPGEKVTITCQASQDIGNYLNWFQQKPDQTVKLLIYYTSRLHSGVPSRFSGSGSGTDYTFTISSLEAEDAATYFCQQGHQLPYTFGGGTKVEIKRTVAAPSVFIFPPSDEQLKSGTASVVCLLNNFYPREAKVQWKVDNALQSGNSQESVTEQDSKDSTYSLSSTLTLSKADYEKHKVYACEVTHQGLSSPVTKSFNRGEC

SEQ ID NO: 27950 - protein, 107 aa, Artificial Sequence
  Description of Artificial Sequence: Synthetic polypeptide
  VL of XENP021819
DIQMTQSPAFLSVTPGEKVTITCQASQDIGNYLNWFQQKPDQTVKLLIYYTSRLHSGVPSRFSGSGSGTDYTFTISSLEAEDAATYFCQQGHQLPYTFGGGTKVEIK

SEQ ID NO: 27951 - protein, 11 aa, Artificial Sequence
  Description of Artificial Sequence: Synthetic peptide
  XENP021819 vlCDR1
QASQDIGNYLN

SEQ ID NO: 27952 - protein, 7 aa, Artificial Sequence
  Description of Artificial Sequence: Synthetic peptide
  XENP021819 vlCDR2
YTSRLHS

SEQ ID NO: 27953 - protein, 9 aa, Artificial Sequence
  Description of Artificial Sequence: Synthetic peptide
  XENP021819 vlCDR3
QQGHQLPYT

SEQ ID NO: 27954 - protein, 223 aa, Artificial Sequence; identical to SEQ ID NO: 27384
  Description of Artificial Sequence: Synthetic polypeptide
  XENP021912 2A11_H1.117_L2.50_Fab Heavy Chain

SEQ ID NO: 27955 - protein, 118 aa, Artificial Sequence; identical to SEQ ID NO: 22105
  Description of Artificial Sequence: Synthetic polypeptide
  VH of XENP021912

SEQ ID NO: 27956 - protein, 5 aa, Artificial Sequence
  Description of Artificial Sequence: Synthetic peptide
  XENP021912 vhCDR1
HYFMH

SEQ ID NO: 27957 - protein, 17 aa, Artificial Sequence
  Description of Artificial Sequence: Synthetic peptide
  XENP021912 vhCDR2
WIDPYLGDTEYAPKFQG

SEQ ID NO: 27958 - protein, 9 aa, Artificial Sequence
  Description of Artificial Sequence: Synthetic peptide
  XENP021912 vhCDR3
RGVRQALDY

SEQ ID NO: 27959 - protein, 214 aa, Artificial Sequence; identical to SEQ ID NO: 22059
  Description of Artificial Sequence: Synthetic polypeptide
  XENP021912 2A11_H1.117_L2.50_Fab Light Chain

SEQ ID NO: 27960 - protein, 107 aa, Artificial Sequence; identical to SEQ ID NO: 22060
  Description of Artificial Sequence: Synthetic polypeptide
  VL of XENP021912

SEQ ID NO: 27961 - protein, 11 aa, Artificial Sequence
  Description of Artificial Sequence: Synthetic peptide
  XENP021912 vlCDR1
QASQDIGNYLN

SEQ ID NO: 27962 - protein, 7 aa, Artificial Sequence
  Description of Artificial Sequence: Synthetic peptide
  XENP021912 vlCDR2
YTSYLHS

SEQ ID NO: 27963 - protein, 9 aa, Artificial Sequence
  Description of Artificial Sequence: Synthetic peptide
  XENP021912 vlCDR3
QQGNTLPYT

SEQ ID NO: 27964 - protein, 223 aa, Artificial Sequence; identical to SEQ ID NO: 27734
  Description of Artificial Sequence: Synthetic polypeptide
  XENP021913 2A11_H1.125_L2.50_Fab Heavy Chain

SEQ ID NO: 27965 - protein, 118 aa, Artificial Sequence; identical to SEQ ID NO: 22065
  Description of Artificial Sequence: Synthetic polypeptide
  VH of XENP021913

SEQ ID NO: 27966 - protein, 5 aa, Artificial Sequence
  Description of Artificial Sequence: Synthetic peptide
  XENP021913 vhCDR1
HYFMH

SEQ ID NO: 27967 - protein, 17 aa, Artificial Sequence
  Description of Artificial Sequence: Synthetic peptide
  XENP021913 vhCDR2
WIDPYLGDTEYAPKFQG

SEQ ID NO: 27968 - protein, 9 aa, Artificial Sequence
  Description of Artificial Sequence: Synthetic peptide
  XENP021913 vhCDR3
RGVYQALDY

SEQ ID NO: 27969 - protein, 214 aa, Artificial Sequence; identical to SEQ ID NO: 22059
  Description of Artificial Sequence: Synthetic polypeptide
  XENP021913 2A11_H1.125_L2.50_Fab Light Chain

SEQ ID NO: 27970 - protein, 107 aa, Artificial Sequence; identical to SEQ ID NO: 22060
  Description of Artificial Sequence: Synthetic polypeptide
  VL of XENP021913

SEQ ID NO: 27971 - protein, 11 aa, Artificial Sequence
  Description of Artificial Sequence: Synthetic peptide
  XENP021913 vlCDR1
QASQDIGNYLN

SEQ ID NO: 27972 - protein, 7 aa, Artificial Sequence
  Description of Artificial Sequence: Synthetic peptide
  XENP021913 vlCDR2
YTSYLHS

SEQ ID NO: 27973 - protein, 9 aa, Artificial Sequence
  Description of Artificial Sequence: Synthetic peptide
  XENP021913 vlCDR3
QQGNTLPYT

SEQ ID NO: 27974 - protein, 223 aa, Artificial Sequence; identical to SEQ ID NO: 27464
  Description of Artificial Sequence: Synthetic polypeptide
  XENP021914 2A11_H1.126_L2.50_Fab Heavy Chain

SEQ ID NO: 27975 - protein, 118 aa, Artificial Sequence; identical to SEQ ID NO: 27465
  Description of Artificial Sequence: Synthetic polypeptide
  VH of XENP021914

SEQ ID NO: 27976 - protein, 5 aa, Artificial Sequence
  Description of Artificial Sequence: Synthetic peptide
  XENP021914 vhCDR1
HYFMH

SEQ ID NO: 27977 - protein, 17 aa, Artificial Sequence
  Description of Artificial Sequence: Synthetic peptide
  XENP021914 vhCDR2
WIDPYTGDTEYAPKFQG

SEQ ID NO: 27978 - protein, 9 aa, Artificial Sequence
  Description of Artificial Sequence: Synthetic peptide
  XENP021914 vhCDR3
RGVYQALDY

SEQ ID NO: 27979 - protein, 214 aa, Artificial Sequence; identical to SEQ ID NO: 22059
  Description of Artificial Sequence: Synthetic polypeptide
  XENP021914 2A11_H1.126_L2.50_Fab Light Chain

SEQ ID NO: 27980 - protein, 107 aa, Artificial Sequence; identical to SEQ ID NO: 22060
  Description of Artificial Sequence: Synthetic polypeptide
  VL of XENP021914

SEQ ID NO: 27981 - protein, 11 aa, Artificial Sequence
  Description of Artificial Sequence: Synthetic peptide
  XENP021914 vlCDR1
QASQDIGNYLN

SEQ ID NO: 27982 - protein, 7 aa, Artificial Sequence
  Description of Artificial Sequence: Synthetic peptide
  XENP021914 vlCDR2
YTSYLHS

SEQ ID NO: 27983 - protein, 9 aa, Artificial Sequence
  Description of Artificial Sequence: Synthetic peptide
  XENP021914 vlCDR3
QQGNTLPYT

SEQ ID NO: 27984 - protein, 223 aa, Artificial Sequence; identical to SEQ ID NO: 27634
  Description of Artificial Sequence: Synthetic polypeptide
  XENP021915 2A11_H1.144_L2.50_Fab Heavy Chain

SEQ ID NO: 27985 - protein, 118 aa, Artificial Sequence; identical to SEQ ID NO: 22085
  Description of Artificial Sequence: Synthetic polypeptide
  VH of XENP021915

SEQ ID NO: 27986 - protein, 5 aa, Artificial Sequence
  Description of Artificial Sequence: Synthetic peptide
  XENP021915 vhCDR1
DYFMH

SEQ ID NO: 27987 - protein, 17 aa, Artificial Sequence
  Description of Artificial Sequence: Synthetic peptide
  XENP021915 vhCDR2
WIDPELGDTEYAPKFQG

SEQ ID NO: 27988 - protein, 9 aa, Artificial Sequence
  Description of Artificial Sequence: Synthetic peptide
  XENP021915 vhCDR3
RGVYQALDY

SEQ ID NO: 27989 - protein, 214 aa, Artificial Sequence; identical to SEQ ID NO: 22059
  Description of Artificial Sequence: Synthetic polypeptide
  XENP021915 2A11_H1.144_L2.50_Fab Light Chain

SEQ ID NO: 27990 - protein, 107 aa, Artificial Sequence; identical to SEQ ID NO: 22060
  Description of Artificial Sequence: Synthetic polypeptide
  VL of XENP021915

SEQ ID NO: 27991 - protein, 11 aa, Artificial Sequence
  Description of Artificial Sequence: Synthetic peptide
  XENP021915 vlCDR1
QASQDIGNYLN

SEQ ID NO: 27992 - protein, 7 aa, Artificial Sequence
  Description of Artificial Sequence: Synthetic peptide
  XENP021915 vlCDR2
YTSYLHS

SEQ ID NO: 27993 - protein, 9 aa, Artificial Sequence
  Description of Artificial Sequence: Synthetic peptide
  XENP021915 vlCDR3
QQGNTLPYT

SEQ ID NO: 27994 - protein, 223 aa, Artificial Sequence; identical to SEQ ID NO: 27474
  Description of Artificial Sequence: Synthetic polypeptide
  XENP021916 2A11_H1.127_L2.50_Fab Heavy Chain

SEQ ID NO: 27995 - protein, 118 aa, Artificial Sequence; identical to SEQ ID NO: 27475
  Description of Artificial Sequence: Synthetic polypeptide
  VH of XENP021916

SEQ ID NO: 27996 - protein, 5 aa, Artificial Sequence
  Description of Artificial Sequence: Synthetic peptide
  XENP021916 vhCDR1
HYFMH

SEQ ID NO: 27997 - protein, 17 aa, Artificial Sequence
  Description of Artificial Sequence: Synthetic peptide
  XENP021916 vhCDR2
WIDPELGDTEYAPKFQG

SEQ ID NO: 27998 - protein, 9 aa, Artificial Sequence
  Description of Artificial Sequence: Synthetic peptide
  XENP021916 vhCDR3
RGVYQALDY

SEQ ID NO: 27999 - protein, 214 aa, Artificial Sequence; identical to SEQ ID NO: 22059
  Description of Artificial Sequence: Synthetic polypeptide
  XENP021916 2A11_H1.127_L2.50_Fab Light Chain

SEQ ID NO: 28000 - protein, 107 aa, Artificial Sequence; identical to SEQ ID NO: 22060
  Description of Artificial Sequence: Synthetic polypeptide
  VL of XENP021916

SEQ ID NO: 28001 - protein, 11 aa, Artificial Sequence
  Description of Artificial Sequence: Synthetic peptide
  XENP021916 vlCDR1
QASQDIGNYLN

SEQ ID NO: 28002 - protein, 7 aa, Artificial Sequence
  Description of Artificial Sequence: Synthetic peptide
  XENP021916 vlCDR2
YTSYLHS

SEQ ID NO: 28003 - protein, 9 aa, Artificial Sequence
  Description of Artificial Sequence: Synthetic peptide
  XENP021916 vlCDR3
QQGNTLPYT

SEQ ID NO: 28004 - protein, 223 aa, Artificial Sequence; identical to SEQ ID NO: 27554
  Description of Artificial Sequence: Synthetic polypeptide
  XENP021917 2A11_H1.136_L2.50_Fab Heavy Chain

SEQ ID NO: 28005 - protein, 118 aa, Artificial Sequence; identical to SEQ ID NO: 27555
  Description of Artificial Sequence: Synthetic polypeptide
  VH of XENP021917

SEQ ID NO: 28006 - protein, 5 aa, Artificial Sequence
  Description of Artificial Sequence: Synthetic peptide
  XENP021917 vhCDR1
HYYMH

SEQ ID NO: 28007 - protein, 17 aa, Artificial Sequence
  Description of Artificial Sequence: Synthetic peptide
  XENP021917 vhCDR2
WIDPYLGDTEYAPKFQG

SEQ ID NO: 28008 - protein, 9 aa, Artificial Sequence
  Description of Artificial Sequence: Synthetic peptide
  XENP021917 vhCDR3
RGVYQALDY

SEQ ID NO: 28009 - protein, 214 aa, Artificial Sequence; identical to SEQ ID NO: 22059
  Description of Artificial Sequence: Synthetic polypeptide
  XENP021917 2A11_H1.136_L2.50_Fab Light Chain

SEQ ID NO: 28010 - protein, 107 aa, Artificial Sequence; identical to SEQ ID NO: 22060
  Description of Artificial Sequence: Synthetic polypeptide
  VL of XENP021917

SEQ ID NO: 28011 - protein, 11 aa, Artificial Sequence
  Description of Artificial Sequence: Synthetic peptide
  XENP021917 vlCDR1
QASQDIGNYLN

SEQ ID NO: 28012 - protein, 7 aa, Artificial Sequence
  Description of Artificial Sequence: Synthetic peptide
  XENP021917 vlCDR2
YTSYLHS

SEQ ID NO: 28013 - protein, 9 aa, Artificial Sequence
  Description of Artificial Sequence: Synthetic peptide
  XENP021917 vlCDR3
QQGNTLPYT

SEQ ID NO: 28014 - protein, 223 aa, Artificial Sequence
  Description of Artificial Sequence: Synthetic polypeptide
  XENP021918 2A11_H1.154_L2.50_Fab Heavy Chain
EVQLVQSGAEVKKPGATVKISCKASGFNIKDYYMHWVQQAPGKGLEWMGWIDPELGDTEYAPKFQGRVTITADTSTNTAYMELSSLRSEDTAVYYCYARGVYQALDYWGQGTLVTVSSASTKGPSVFPLAPSSKSTSGGTAALGCLVKDYFPEPVTVSWNSGALTSGVHTFPAVLQSSGLYSLSSVVTVPSSSLGTQTYICNVNHKPSNTKVDKKVEPKSCGS

SEQ ID NO: 28015 - protein, 118 aa, Artificial Sequence
  Description of Artificial Sequence: Synthetic polypeptide
  VH of XENP021918
EVQLVQSGAEVKKPGATVKISCKASGFNIKDYYMHWVQQAPGKGLEWMGWIDPELGDTEYAPKFQGRVTITADTSTNTAYMELSSLRSEDTAVYYCYARGVYQALDYWGQGTLVTVSS

SEQ ID NO: 28016 - protein, 5 aa, Artificial Sequence
  Description of Artificial Sequence: Synthetic peptide
  XENP021918 vhCDR1
DYYMH

SEQ ID NO: 28017 - protein, 17 aa, Artificial Sequence
  Description of Artificial Sequence: Synthetic peptide
  XENP021918 vhCDR2
WIDPELGDTEYAPKFQG

SEQ ID NO: 28018 - protein, 9 aa, Artificial Sequence
  Description of Artificial Sequence: Synthetic peptide
  XENP021918 vhCDR3
RGVYQALDY

SEQ ID NO: 28019 - protein, 214 aa, Artificial Sequence; identical to SEQ ID NO: 22059
  Description of Artificial Sequence: Synthetic polypeptide
  XENP021918 2A11_H1.154_L2.50_Fab Light Chain

SEQ ID NO: 28020 - protein, 107 aa, Artificial Sequence; identical to SEQ ID NO: 22060
  Description of Artificial Sequence: Synthetic polypeptide
  VL of XENP021918

SEQ ID NO: 28021 - protein, 11 aa, Artificial Sequence
  Description of Artificial Sequence: Synthetic peptide
  XENP021918 vlCDR1
QASQDIGNYLN

SEQ ID NO: 28022 - protein, 7 aa, Artificial Sequence
  Description of Artificial Sequence: Synthetic peptide
  XENP021918 vlCDR2
YTSYLHS

SEQ ID NO: 28023 - protein, 9 aa, Artificial Sequence
  Description of Artificial Sequence: Synthetic peptide
  XENP021918 vlCDR3
QQGNTLPYT

SEQ ID NO: 28024 - protein, 223 aa, Artificial Sequence; identical to SEQ ID NO: 27604
  Description of Artificial Sequence: Synthetic polypeptide
  XENP021919 2A11_H1.141_L2.50_Fab Heavy Chain

SEQ ID NO: 28025 - protein, 118 aa, Artificial Sequence; identical to SEQ ID NO: 27605
  Description of Artificial Sequence: Synthetic polypeptide
  VH of XENP021919

SEQ ID NO: 28026 - protein, 5 aa, Artificial Sequence
  Description of Artificial Sequence: Synthetic peptide
  XENP021919 vhCDR1
DYFMH

SEQ ID NO: 28027 - protein, 17 aa, Artificial Sequence
  Description of Artificial Sequence: Synthetic peptide
  XENP021919 vhCDR2
WIDPELGDTEYAPKFQG

SEQ ID NO: 28028 - protein, 9 aa, Artificial Sequence
  Description of Artificial Sequence: Synthetic peptide
  XENP021919 vhCDR3
RGVRQALDY

SEQ ID NO: 28029 - protein, 214 aa, Artificial Sequence; identical to SEQ ID NO: 22059
  Description of Artificial Sequence: Synthetic polypeptide
  XENP021919 2A11_H1.141_L2.50_Fab Light Chain

SEQ ID NO: 28030 - protein, 107 aa, Artificial Sequence; identical to SEQ ID NO: 22060
  Description of Artificial Sequence: Synthetic polypeptide
  VL of XENP021919

SEQ ID NO: 28031 - protein, 11 aa, Artificial Sequence
  Description of Artificial Sequence: Synthetic peptide
  XENP021919 vlCDR1
QASQDIGNYLN

SEQ ID NO: 28032 - protein, 7 aa, Artificial Sequence
  Description of Artificial Sequence: Synthetic peptide
  XENP021919 vlCDR2
YTSYLHS

SEQ ID NO: 28033 - protein, 9 aa, Artificial Sequence
  Description of Artificial Sequence: Synthetic peptide
  XENP021919 vlCDR3
QQGNTLPYT

SEQ ID NO: 28034 - protein, 223 aa, Artificial Sequence; identical to SEQ ID NO: 27384
  Description of Artificial Sequence: Synthetic polypeptide
  XENP021920 2A11_H1.117_L2.113_Fab Heavy Chain

SEQ ID NO: 28035 - protein, 118 aa, Artificial Sequence; identical to SEQ ID NO: 22105
  Description of Artificial Sequence: Synthetic polypeptide
  VH of XENP021920

SEQ ID NO: 28036 - protein, 5 aa, Artificial Sequence
  Description of Artificial Sequence: Synthetic peptide
  XENP021920 vhCDR1
HYFMH

SEQ ID NO: 28037 - protein, 17 aa, Artificial Sequence
  Description of Artificial Sequence: Synthetic peptide
  XENP021920 vhCDR2
WIDPYLGDTEYAPKFQG

SEQ ID NO: 28038 - protein, 9 aa, Artificial Sequence
  Description of Artificial Sequence: Synthetic peptide
  XENP021920 vhCDR3
RGVRQALDY

SEQ ID NO: 28039 - protein, 214 aa, Artificial Sequence; identical to SEQ ID NO: 22079
  Description of Artificial Sequence: Synthetic polypeptide
  XENP021920 2A11_H1.117_L2.113_Fab Light Chain

SEQ ID NO: 28040 - protein, 107 aa, Artificial Sequence; identical to SEQ ID NO: 22080
  Description of Artificial Sequence: Synthetic polypeptide
  VL of XENP021920

SEQ ID NO: 28041 - protein, 11 aa, Artificial Sequence
  Description of Artificial Sequence: Synthetic peptide
  XENP021920 vlCDR1
QASQDIGNYLN

SEQ ID NO: 28042 - protein, 7 aa, Artificial Sequence
  Description of Artificial Sequence: Synthetic peptide
  XENP021920 vlCDR2
FTSYLHS

SEQ ID NO: 28043 - protein, 9 aa, Artificial Sequence
  Description of Artificial Sequence: Synthetic peptide
  XENP021920 vlCDR3
QQGNTLPYT

SEQ ID NO: 28044 - protein, 223 aa, Artificial Sequence; identical to SEQ ID NO: 27734
  Description of Artificial Sequence: Synthetic polypeptide
  XENP021921 2A11_H1.125_L2.113_Fab Heavy Chain

SEQ ID NO: 28045 - protein, 118 aa, Artificial Sequence; identical to SEQ ID NO: 22065
  Description of Artificial Sequence: Synthetic polypeptide
  VH of XENP021921

SEQ ID NO: 28046 - protein, 5 aa, Artificial Sequence
  Description of Artificial Sequence: Synthetic peptide
  XENP021921 vhCDR1
HYFMH

SEQ ID NO: 28047 - protein, 17 aa, Artificial Sequence
  Description of Artificial Sequence: Synthetic peptide
  XENP021921 vhCDR2
WIDPYLGDTEYAPKFQG

SEQ ID NO: 28048 - protein, 9 aa, Artificial Sequence
  Description of Artificial Sequence: Synthetic peptide
  XENP021921 vhCDR3
RGVYQALDY

SEQ ID NO: 28049 - protein, 214 aa, Artificial Sequence; identical to SEQ ID NO: 22079
  Description of Artificial Sequence: Synthetic polypeptide
  XENP021921 2A11_H1.125_L2.113_Fab Light Chain

SEQ ID NO: 28050 - protein, 107 aa, Artificial Sequence; identical to SEQ ID NO: 22080
  Description of Artificial Sequence: Synthetic polypeptide
  VL of XENP021921

SEQ ID NO: 28051 - protein, 11 aa, Artificial Sequence
  Description of Artificial Sequence: Synthetic peptide
  XENP021921 vlCDR1
QASQDIGNYLN

SEQ ID NO: 28052 - protein, 7 aa, Artificial Sequence
  Description of Artificial Sequence: Synthetic peptide
  XENP021921 vlCDR2
FTSYLHS

SEQ ID NO: 28053 - protein, 9 aa, Artificial Sequence
  Description of Artificial Sequence: Synthetic peptide
  XENP021921 vlCDR3
QQGNTLPYT

SEQ ID NO: 28054 - protein, 223 aa, Artificial Sequence; identical to SEQ ID NO: 27464
  Description of Artificial Sequence: Synthetic polypeptide
  XENP021922 2A11_H1.126_L2.113_Fab Heavy Chain

SEQ ID NO: 28055 - protein, 118 aa, Artificial Sequence; identical to SEQ ID NO: 27465
  Description of Artificial Sequence: Synthetic polypeptide
  VH of XENP021922

SEQ ID NO: 28056 - protein, 5 aa, Artificial Sequence
  Description of Artificial Sequence: Synthetic peptide
  XENP021922 vhCDR1
HYFMH

SEQ ID NO: 28057 - protein, 17 aa, Artificial Sequence
  Description of Artificial Sequence: Synthetic peptide
  XENP021922 vhCDR2
WIDPYTGDTEYAPKFQG

SEQ ID NO: 28058 - protein, 9 aa, Artificial Sequence
  Description of Artificial Sequence: Synthetic peptide
  XENP021922 vhCDR3
RGVYQALDY

SEQ ID NO: 28059 - protein, 214 aa, Artificial Sequence; identical to SEQ ID NO: 22079
  Description of Artificial Sequence: Synthetic polypeptide
  XENP021922 2A11_H1.126_L2.113_Fab Light Chain

SEQ ID NO: 28060 - protein, 107 aa, Artificial Sequence; identical to SEQ ID NO: 22080
  Description of Artificial Sequence: Synthetic polypeptide
  VL of XENP021922

SEQ ID NO: 28061 - protein, 11 aa, Artificial Sequence
  Description of Artificial Sequence: Synthetic peptide
  XENP021922 vlCDR1
QASQDIGNYLN

SEQ ID NO: 28062 - protein, 7 aa, Artificial Sequence
  Description of Artificial Sequence: Synthetic peptide
  XENP021922 vlCDR2
FTSYLHS

SEQ ID NO: 28063 - protein, 9 aa, Artificial Sequence
  Description of Artificial Sequence: Synthetic peptide
  XENP021922 vlCDR3
QQGNTLPYT

SEQ ID NO: 28064 - protein, 223 aa, Artificial Sequence; identical to SEQ ID NO: 27634
  Description of Artificial Sequence: Synthetic polypeptide
  XENP021923 2A11_H1.144_L2.113_Fab Heavy Chain

SEQ ID NO: 28065 - protein, 118 aa, Artificial Sequence; identical to SEQ ID NO: 22085
  Description of Artificial Sequence: Synthetic polypeptide
  VH of XENP021923

SEQ ID NO: 28066 - protein, 5 aa, Artificial Sequence
  Description of Artificial Sequence: Synthetic peptide
  XENP021923 vhCDR1
DYFMH

SEQ ID NO: 28067 - protein, 17 aa, Artificial Sequence
  Description of Artificial Sequence: Synthetic peptide
  XENP021923 vhCDR2
WIDPELGDTEYAPKFQG

SEQ ID NO: 28068 - protein, 9 aa, Artificial Sequence
  Description of Artificial Sequence: Synthetic peptide
  XENP021923 vhCDR3
RGVYQALDY

SEQ ID NO: 28069 - protein, 214 aa, Artificial Sequence; identical to SEQ ID NO: 22079
  Description of Artificial Sequence: Synthetic polypeptide
  XENP021923 2A11_H1.144_L2.113_Fab Light Chain

SEQ ID NO: 28070 - protein, 107 aa, Artificial Sequence; identical to SEQ ID NO: 22080
  Description of Artificial Sequence: Synthetic polypeptide
  VL of XENP021923

SEQ ID NO: 28071 - protein, 11 aa, Artificial Sequence
  Description of Artificial Sequence: Synthetic peptide
  XENP021923 vlCDR1
QASQDIGNYLN

SEQ ID NO: 28072 - protein, 7 aa, Artificial Sequence
  Description of Artificial Sequence: Synthetic peptide
  XENP021923 vlCDR2
FTSYLHS

SEQ ID NO: 28073 - protein, 9 aa, Artificial Sequence
  Description of Artificial Sequence: Synthetic peptide
  XENP021923 vlCDR3
QQGNTLPYT

SEQ ID NO: 28074 - protein, 223 aa, Artificial Sequence; identical to SEQ ID NO: 27474
  Description of Artificial Sequence: Synthetic polypeptide
  XENP021924 2A11_H1.127_L2.113_Fab Heavy Chain

SEQ ID NO: 28075 - protein, 118 aa, Artificial Sequence; identical to SEQ ID NO: 27475
  Description of Artificial Sequence: Synthetic polypeptide
  VH of XENP021924

SEQ ID NO: 28076 - protein, 5 aa, Artificial Sequence
  Description of Artificial Sequence: Synthetic peptide
  XENP021924 vhCDR1
HYFMH

SEQ ID NO: 28077 - protein, 17 aa, Artificial Sequence
  Description of Artificial Sequence: Synthetic peptide
  XENP021924 vhCDR2
WIDPELGDTEYAPKFQG

SEQ ID NO: 28078 - protein, 9 aa, Artificial Sequence
  Description of Artificial Sequence: Synthetic peptide
  XENP021924 vhCDR3
RGVYQALDY

SEQ ID NO: 28079 - protein, 214 aa, Artificial Sequence; identical to SEQ ID NO: 22079
  Description of Artificial Sequence: Synthetic polypeptide
  XENP021924 2A11_H1.127_L2.113_Fab Light Chain

SEQ ID NO: 28080 - protein, 107 aa, Artificial Sequence; identical to SEQ ID NO: 22080
  Description of Artificial Sequence: Synthetic polypeptide
  VL of XENP021924

SEQ ID NO: 28081 - protein, 11 aa, Artificial Sequence
  Description of Artificial Sequence: Synthetic peptide
  XENP021924 vlCDR1
QASQDIGNYLN

SEQ ID NO: 28082 - protein, 7 aa, Artificial Sequence
  Description of Artificial Sequence: Synthetic peptide
  XENP021924 vlCDR2
FTSYLHS

SEQ ID NO: 28083 - protein, 9 aa, Artificial Sequence
  Description of Artificial Sequence: Synthetic peptide
  XENP021924 vlCDR3
QQGNTLPYT

SEQ ID NO: 28084 - protein, 223 aa, Artificial Sequence; identical to SEQ ID NO: 27554
  Description of Artificial Sequence: Synthetic polypeptide
  XENP021925 2A11_H1.136_L2.113_Fab Heavy Chain

SEQ ID NO: 28085 - protein, 118 aa, Artificial Sequence; identical to SEQ ID NO: 27555
  Description of Artificial Sequence: Synthetic polypeptide
  VH of XENP021925

SEQ ID NO: 28086 - protein, 5 aa, Artificial Sequence
  Description of Artificial Sequence: Synthetic peptide
  XENP021925 vhCDR1
HYYMH

SEQ ID NO: 28087 - protein, 17 aa, Artificial Sequence
  Description of Artificial Sequence: Synthetic peptide
  XENP021925 vhCDR2
WIDPYLGDTEYAPKFQG

SEQ ID NO: 28088 - protein, 9 aa, Artificial Sequence
  Description of Artificial Sequence: Synthetic peptide
  XENP021925 vhCDR3
RGVYQALDY

SEQ ID NO: 28089 - protein, 214 aa, Artificial Sequence; identical to SEQ ID NO: 22079
  Description of Artificial Sequence: Synthetic polypeptide
  XENP021925 2A11_H1.136_L2.113_Fab Light Chain

SEQ ID NO: 28090 - protein, 107 aa, Artificial Sequence; identical to SEQ ID NO: 22080
  Description of Artificial Sequence: Synthetic polypeptide
  VL of XENP021925

SEQ ID NO: 28091 - protein, 11 aa, Artificial Sequence
  Description of Artificial Sequence: Synthetic peptide
  XENP021925 vlCDR1
QASQDIGNYLN

SEQ ID NO: 28092 - protein, 7 aa, Artificial Sequence
  Description of Artificial Sequence: Synthetic peptide
  XENP021925 vlCDR2
FTSYLHS

SEQ ID NO: 28093 - protein, 9 aa, Artificial Sequence
  Description of Artificial Sequence: Synthetic peptide
  XENP021925 vlCDR3
QQGNTLPYT

SEQ ID NO: 28094 - protein, 223 aa, Artificial Sequence; identical to SEQ ID NO: 28014
  Description of Artificial Sequence: Synthetic polypeptide
  XENP021926 2A11_H1.154_L2.113_Fab Heavy Chain

SEQ ID NO: 28095 - protein, 118 aa, Artificial Sequence; identical to SEQ ID NO: 28015
  Description of Artificial Sequence: Synthetic polypeptide
  VH of XENP021926

SEQ ID NO: 28096 - protein, 5 aa, Artificial Sequence
  Description of Artificial Sequence: Synthetic peptide
  XENP021926 vhCDR1
DYYMH

SEQ ID NO: 28097 - protein, 17 aa, Artificial Sequence
  Description of Artificial Sequence: Synthetic peptide
  XENP021926 vhCDR2
WIDPELGDTEYAPKFQG

SEQ ID NO: 28098 - protein, 9 aa, Artificial Sequence
  Description of Artificial Sequence: Synthetic peptide
  XENP021926 vhCDR3
RGVYQALDY

SEQ ID NO: 28099 - protein, 214 aa, Artificial Sequence; identical to SEQ ID NO: 22079
  Description of Artificial Sequence: Synthetic polypeptide
  XENP021926 2A11_H1.154_L2.113_Fab Light Chain

SEQ ID NO: 28100 - protein, 107 aa, Artificial Sequence; identical to SEQ ID NO: 22080
  Description of Artificial Sequence: Synthetic polypeptide
  VL of XENP021926

SEQ ID NO: 28101 - protein, 11 aa, Artificial Sequence
  Description of Artificial Sequence: Synthetic peptide
  XENP021926 vlCDR1
QASQDIGNYLN

SEQ ID NO: 28102 - protein, 7 aa, Artificial Sequence
  Description of Artificial Sequence: Synthetic peptide
  XENP021926 vlCDR2
FTSYLHS

SEQ ID NO: 28103 - protein, 9 aa, Artificial Sequence
  Description of Artificial Sequence: Synthetic peptide
  XENP021926 vlCDR3
QQGNTLPYT

SEQ ID NO: 28104 - protein, 223 aa, Artificial Sequence; identical to SEQ ID NO: 27604
  Description of Artificial Sequence: Synthetic polypeptide
  XENP021927 2A11_H1.141_L2.113_Fab Heavy Chain

SEQ ID NO: 28105 - protein, 118 aa, Artificial Sequence; identical to SEQ ID NO: 27605
  Description of Artificial Sequence: Synthetic polypeptide
  VH of XENP021927

SEQ ID NO: 28106 - protein, 5 aa, Artificial Sequence
  Description of Artificial Sequence: Synthetic peptide
  XENP021927 vhCDR1
DYFMH

SEQ ID NO: 28107 - protein, 17 aa, Artificial Sequence
  Description of Artificial Sequence: Synthetic peptide
  XENP021927 vhCDR2
WIDPELGDTEYAPKFQG

SEQ ID NO: 28108 - protein, 9 aa, Artificial Sequence
  Description of Artificial Sequence: Synthetic peptide
  XENP021927 vhCDR3
RGVRQALDY

SEQ ID NO: 28109 - protein, 214 aa, Artificial Sequence; identical to SEQ ID NO: 22079
  Description of Artificial Sequence: Synthetic polypeptide
  XENP021927 2A11_H1.141_L2.113_Fab Light Chain

SEQ ID NO: 28110 - protein, 107 aa, Artificial Sequence; identical to SEQ ID NO: 22080
  Description of Artificial Sequence: Synthetic polypeptide
  VL of XENP021927

SEQ ID NO: 28111 - protein, 11 aa, Artificial Sequence
  Description of Artificial Sequence: Synthetic peptide
  XENP021927 vlCDR1
QASQDIGNYLN

SEQ ID NO: 28112 - protein, 7 aa, Artificial Sequence
  Description of Artificial Sequence: Synthetic peptide
  XENP021927 vlCDR2
FTSYLHS

SEQ ID NO: 28113 - protein, 9 aa, Artificial Sequence
  Description of Artificial Sequence: Synthetic peptide
  XENP021927 vlCDR3
QQGNTLPYT

SEQ ID NO: 28114 - protein, 223 aa, Artificial Sequence; identical to SEQ ID NO: 27384
  Description of Artificial Sequence: Synthetic polypeptide
  XENP021928 2A11_H1.117_L2.116_Fab Heavy Chain

SEQ ID NO: 28115 - protein, 118 aa, Artificial Sequence; identical to SEQ ID NO: 22105
  Description of Artificial Sequence: Synthetic polypeptide
  VH of XENP021928

SEQ ID NO: 28116 - protein, 5 aa, Artificial Sequence
  Description of Artificial Sequence: Synthetic peptide
  XENP021928 vhCDR1
HYFMH

SEQ ID NO: 28117 - protein, 17 aa, Artificial Sequence
  Description of Artificial Sequence: Synthetic peptide
  XENP021928 vhCDR2
WIDPYLGDTEYAPKFQG

SEQ ID NO: 28118 - protein, 9 aa, Artificial Sequence
  Description of Artificial Sequence: Synthetic peptide
  XENP021928 vhCDR3
RGVRQALDY

SEQ ID NO: 28119 - protein, 214 aa, Artificial Sequence; identical to SEQ ID NO: 22119
  Description of Artificial Sequence: Synthetic polypeptide
  XENP021928 2A11_H1.117_L2.116_Fab Light Chain

SEQ ID NO: 28120 - protein, 107 aa, Artificial Sequence; identical to SEQ ID NO: 22120
  Description of Artificial Sequence: Synthetic polypeptide
  VL of XENP021928

SEQ ID NO: 28121 - protein, 11 aa, Artificial Sequence
  Description of Artificial Sequence: Synthetic peptide
  XENP021928 vlCDR1
QASQDIGNYLN

SEQ ID NO: 28122 - protein, 7 aa, Artificial Sequence
  Description of Artificial Sequence: Synthetic peptide
  XENP021928 vlCDR2
FTSHLHS

SEQ ID NO: 28123 - protein, 9 aa, Artificial Sequence
  Description of Artificial Sequence: Synthetic peptide
  XENP021928 vlCDR3
QQGHQLPYT

SEQ ID NO: 28124 - protein, 223 aa, Artificial Sequence; identical to SEQ ID NO: 27734
  Description of Artificial Sequence: Synthetic polypeptide
  XENP021929 2A11_H1.125_L2.116_Fab Heavy Chain

SEQ ID NO: 28125 - protein, 118 aa, Artificial Sequence; identical to SEQ ID NO: 22065
  Description of Artificial Sequence: Synthetic polypeptide
  VH of XENP021929

SEQ ID NO: 28126 - protein, 5 aa, Artificial Sequence
  Description of Artificial Sequence: Synthetic peptide
  XENP021929 vhCDR1
HYFMH

SEQ ID NO: 28127 - protein, 17 aa, Artificial Sequence
  Description of Artificial Sequence: Synthetic peptide
  XENP021929 vhCDR2
WIDPYLGDTEYAPKFQG

SEQ ID NO: 28128 - protein, 9 aa, Artificial Sequence
  Description of Artificial Sequence: Synthetic peptide
  XENP021929 vhCDR3
RGVYQALDY

SEQ ID NO: 28129 - protein, 214 aa, Artificial Sequence; identical to SEQ ID NO: 22119
  Description of Artificial Sequence: Synthetic polypeptide
  XENP021929 2A11_H1.125_L2.116_Fab Light Chain

SEQ ID NO: 28130 - protein, 107 aa, Artificial Sequence; identical to SEQ ID NO: 22120
  Description of Artificial Sequence: Synthetic polypeptide
  VL of XENP021929

SEQ ID NO: 28131 - protein, 11 aa, Artificial Sequence
  Description of Artificial Sequence: Synthetic peptide
  XENP021929 vlCDR1
QASQDIGNYLN

SEQ ID NO: 28132 - protein, 7 aa, Artificial Sequence
  Description of Artificial Sequence: Synthetic peptide
  XENP021929 vlCDR2
FTSHLHS

SEQ ID NO: 28133 - protein, 9 aa, Artificial Sequence
  Description of Artificial Sequence: Synthetic peptide
  XENP021929 vlCDR3
QQGHQLPYT

SEQ ID NO: 28134 - protein, 223 aa, Artificial Sequence; identical to SEQ ID NO: 27464
  Description of Artificial Sequence: Synthetic polypeptide
  XENP021930 2A11_H1.126_L2.116_Fab Heavy Chain

SEQ ID NO: 28135 - protein, 118 aa, Artificial Sequence; identical to SEQ ID NO: 27465
  Description of Artificial Sequence: Synthetic polypeptide
  VH of XENP021930

SEQ ID NO: 28136 - protein, 5 aa, Artificial Sequence
  Description of Artificial Sequence: Synthetic peptide
  XENP021930 vhCDR1
HYFMH

SEQ ID NO: 28137 - protein, 17 aa, Artificial Sequence
  Description of Artificial Sequence: Synthetic peptide
  XENP021930 vhCDR2
WIDPYTGDTEYAPKFQG

SEQ ID NO: 28138 - protein, 9 aa, Artificial Sequence
  Description of Artificial Sequence: Synthetic peptide
  XENP021930 vhCDR3
RGVYQALDY

SEQ ID NO: 28139 - protein, 214 aa, Artificial Sequence; identical to SEQ ID NO: 22119
  Description of Artificial Sequence: Synthetic polypeptide
  XENP021930 2A11_H1.126_L2.116_Fab Light Chain

SEQ ID NO: 28140 - protein, 107 aa, Artificial Sequence; identical to SEQ ID NO: 22120
  Description of Artificial Sequence: Synthetic polypeptide
  VL of XENP021930

SEQ ID NO: 28141 - protein, 11 aa, Artificial Sequence
  Description of Artificial Sequence: Synthetic peptide
  XENP021930 vlCDR1
QASQDIGNYLN

SEQ ID NO: 28142 - protein, 7 aa, Artificial Sequence
  Description of Artificial Sequence: Synthetic peptide
  XENP021930 vlCDR2
FTSHLHS

SEQ ID NO: 28143 - protein, 9 aa, Artificial Sequence
  Description of Artificial Sequence: Synthetic peptide
  XENP021930 vlCDR3
QQGHQLPYT

SEQ ID NO: 28144 - protein, 223 aa, Artificial Sequence; identical to SEQ ID NO: 27634
  Description of Artificial Sequence: Synthetic polypeptide
  XENP021931 2A11_H1.144_L2.116_Fab Heavy Chain

SEQ ID NO: 28145 - protein, 118 aa, Artificial Sequence; identical to SEQ ID NO: 22085
  Description of Artificial Sequence: Synthetic polypeptide
  VH of XENP021931

SEQ ID NO: 28146 - protein, 5 aa, Artificial Sequence
  Description of Artificial Sequence: Synthetic peptide
  XENP021931 vhCDR1
DYFMH

SEQ ID NO: 28147 - protein, 17 aa, Artificial Sequence
  Description of Artificial Sequence: Synthetic peptide
  XENP021931 vhCDR2
WIDPELGDTEYAPKFQG

SEQ ID NO: 28148 - protein, 9 aa, Artificial Sequence
  Description of Artificial Sequence: Synthetic peptide
  XENP021931 vhCDR3
RGVYQALDY

SEQ ID NO: 28149 - protein, 214 aa, Artificial Sequence; identical to SEQ ID NO: 22119
  Description of Artificial Sequence: Synthetic polypeptide
  XENP021931 2A11_H1.144_L2.116_Fab Light Chain

SEQ ID NO: 28150 - protein, 107 aa, Artificial Sequence; identical to SEQ ID NO: 22120
  Description of Artificial Sequence: Synthetic polypeptide
  VL of XENP021931

SEQ ID NO: 28151 - protein, 11 aa, Artificial Sequence
  Description of Artificial Sequence: Synthetic peptide
  XENP021931 vlCDR1
QASQDIGNYLN

SEQ ID NO: 28152 - protein, 7 aa, Artificial Sequence
  Description of Artificial Sequence: Synthetic peptide
  XENP021931 vlCDR2
FTSHLHS

SEQ ID NO: 28153 - protein, 9 aa, Artificial Sequence
  Description of Artificial Sequence: Synthetic peptide
  XENP021931 vlCDR3
QQGHQLPYT

SEQ ID NO: 28154 - protein, 223 aa, Artificial Sequence; identical to SEQ ID NO: 27474
  Description of Artificial Sequence: Synthetic polypeptide
  XENP021932 2A11_H1.127_L2.116_Fab Heavy Chain

SEQ ID NO: 28155 - protein, 118 aa, Artificial Sequence; identical to SEQ ID NO: 27475
  Description of Artificial Sequence: Synthetic polypeptide
  VH of XENP021932

SEQ ID NO: 28156 - protein, 5 aa, Artificial Sequence
  Description of Artificial Sequence: Synthetic peptide
  XENP021932 vhCDR1
HYFMH

SEQ ID NO: 28157 - protein, 17 aa, Artificial Sequence
  Description of Artificial Sequence: Synthetic peptide
  XENP021932 vhCDR2
WIDPELGDTEYAPKFQG

SEQ ID NO: 28158 - protein, 9 aa, Artificial Sequence
  Description of Artificial Sequence: Synthetic peptide
  XENP021932 vhCDR3
RGVYQALDY

SEQ ID NO: 28159 - protein, 214 aa, Artificial Sequence; identical to SEQ ID NO: 22119
  Description of Artificial Sequence: Synthetic polypeptide
  XENP021932 2A11_H1.127_L2.116_Fab Light Chain

SEQ ID NO: 28160 - protein, 107 aa, Artificial Sequence; identical to SEQ ID NO: 22120
  Description of Artificial Sequence: Synthetic polypeptide
  VL of XENP021932

SEQ ID NO: 28161 - protein, 11 aa, Artificial Sequence
  Description of Artificial Sequence: Synthetic peptide
  XENP021932 vlCDR1
QASQDIGNYLN

SEQ ID NO: 28162 - protein, 7 aa, Artificial Sequence
  Description of Artificial Sequence: Synthetic peptide
  XENP021932 vlCDR2
FTSHLHS

SEQ ID NO: 28163 - protein, 9 aa, Artificial Sequence
  Description of Artificial Sequence: Synthetic peptide
  XENP021932 vlCDR3
QQGHQLPYT

SEQ ID NO: 28164 - protein, 223 aa, Artificial Sequence; identical to SEQ ID NO: 27554
  Description of Artificial Sequence: Synthetic polypeptide
  XENP021933 2A11_H1.136_L2.116_Fab Heavy Chain

SEQ ID NO: 28165 - protein, 118 aa, Artificial Sequence; identical to SEQ ID NO: 27555
  Description of Artificial Sequence: Synthetic polypeptide
  VH of XENP021933

SEQ ID NO: 28166 - protein, 5 aa, Artificial Sequence
  Description of Artificial Sequence: Synthetic peptide
  XENP021933 vhCDR1
HYYMH

SEQ ID NO: 28167 - protein, 17 aa, Artificial Sequence
  Description of Artificial Sequence: Synthetic peptide
  XENP021933 vhCDR2
WIDPYLGDTEYAPKFQG

SEQ ID NO: 28168 - protein, 9 aa, Artificial Sequence
  Description of Artificial Sequence: Synthetic peptide
  XENP021933 vhCDR3
RGVYQALDY

SEQ ID NO: 28169 - protein, 214 aa, Artificial Sequence; identical to SEQ ID NO: 22119
  Description of Artificial Sequence: Synthetic polypeptide
  XENP021933 2A11_H1.136_L2.116_Fab Light Chain

SEQ ID NO: 28170 - protein, 107 aa, Artificial Sequence; identical to SEQ ID NO: 22120
  Description of Artificial Sequence: Synthetic polypeptide
  VL of XENP021933

SEQ ID NO: 28171 - protein, 11 aa, Artificial Sequence
  Description of Artificial Sequence: Synthetic peptide
  XENP021933 vlCDR1
QASQDIGNYLN

SEQ ID NO: 28172 - protein, 7 aa, Artificial Sequence
  Description of Artificial Sequence: Synthetic peptide
  XENP021933 vlCDR2
FTSHLHS

SEQ ID NO: 28173 - protein, 9 aa, Artificial Sequence
  Description of Artificial Sequence: Synthetic peptide
  XENP021933 vlCDR3
QQGHQLPYT

SEQ ID NO: 28174 - protein, 223 aa, Artificial Sequence; identical to SEQ ID NO: 28014
  Description of Artificial Sequence: Synthetic polypeptide
  XENP021934 2A11_H1.154_L2.116_Fab Heavy Chain

SEQ ID NO: 28175 - protein, 118 aa, Artificial Sequence; identical to SEQ ID NO: 28015
  Description of Artificial Sequence: Synthetic polypeptide
  VH of XENP021934

SEQ ID NO: 28176 - protein, 5 aa, Artificial Sequence
  Description of Artificial Sequence: Synthetic peptide
  XENP021934 vhCDR1
DYYMH

SEQ ID NO: 28177 - protein, 17 aa, Artificial Sequence
  Description of Artificial Sequence: Synthetic peptide
  XENP021934 vhCDR2
WIDPELGDTEYAPKFQG

SEQ ID NO: 28178 - protein, 9 aa, Artificial Sequence
  Description of Artificial Sequence: Synthetic peptide
  XENP021934 vhCDR3
RGVYQALDY

SEQ ID NO: 28179 - protein, 214 aa, Artificial Sequence; identical to SEQ ID NO: 22119
  Description of Artificial Sequence: Synthetic polypeptide
  XENP021934 2A11_H1.154_L2.116_Fab Light Chain

SEQ ID NO: 28180 - protein, 107 aa, Artificial Sequence; identical to SEQ ID NO: 22120
  Description of Artificial Sequence: Synthetic polypeptide
  VL of XENP021934

SEQ ID NO: 28181 - protein, 11 aa, Artificial Sequence
  Description of Artificial Sequence: Synthetic peptide
  XENP021934 vlCDR1
QASQDIGNYLN

SEQ ID NO: 28182 - protein, 7 aa, Artificial Sequence
  Description of Artificial Sequence: Synthetic peptide
  XENP021934 vlCDR2
FTSHLHS

SEQ ID NO: 28183 - protein, 9 aa, Artificial Sequence
  Description of Artificial Sequence: Synthetic peptide
  XENP021934 vlCDR3
QQGHQLPYT

SEQ ID NO: 28184 - protein, 223 aa, Artificial Sequence; identical to SEQ ID NO: 27604
  Description of Artificial Sequence: Synthetic polypeptide
  XENP021935 2A11_H1.141_L2.116_Fab Heavy Chain

SEQ ID NO: 28185 - protein, 118 aa, Artificial Sequence; identical to SEQ ID NO: 27605
  Description of Artificial Sequence: Synthetic polypeptide
  VH of XENP021935

SEQ ID NO: 28186 - protein, 5 aa, Artificial Sequence
  Description of Artificial Sequence: Synthetic peptide
  XENP021935 vhCDR1
DYFMH

SEQ ID NO: 28187 - protein, 17 aa, Artificial Sequence
  Description of Artificial Sequence: Synthetic peptide
  XENP021935 vhCDR2
WIDPELGDTEYAPKFQG

SEQ ID NO: 28188 - protein, 9 aa, Artificial Sequence
  Description of Artificial Sequence: Synthetic peptide
  XENP021935 vhCDR3
RGVRQALDY

SEQ ID NO: 28189 - protein, 214 aa, Artificial Sequence; identical to SEQ ID NO: 22119
  Description of Artificial Sequence: Synthetic polypeptide
  XENP021935 2A11_H1.141_L2.116_Fab Light Chain

SEQ ID NO: 28190 - protein, 107 aa, Artificial Sequence; identical to SEQ ID NO: 22120
  Description of Artificial Sequence: Synthetic polypeptide
  VL of XENP021935

SEQ ID NO: 28191 - protein, 11 aa, Artificial Sequence
  Description of Artificial Sequence: Synthetic peptide
  XENP021935 vlCDR1
QASQDIGNYLN

SEQ ID NO: 28192 - protein, 7 aa, Artificial Sequence
  Description of Artificial Sequence: Synthetic peptide
  XENP021935 vlCDR2
FTSHLHS

SEQ ID NO: 28193 - protein, 9 aa, Artificial Sequence
  Description of Artificial Sequence: Synthetic peptide
  XENP021935 vlCDR3
QQGHQLPYT

SEQ ID NO: 28194 - protein, 223 aa, Artificial Sequence
  Description of Artificial Sequence: Synthetic polypeptide
  XENP022132 2A11_H1.155_L2.50_Fab Heavy Chain
EVQLVQSGAEVKKPGATVKISCKASGFNIKDYFMHWVQQAPGKGLEWMGWIDPYLGDTEYAPKFQGRVTITADTSTNTAYMELSSLRSEDTAVYYCYARGVYQALDYWGQGTLVTVSSASTKGPSVFPLAPSSKSTSGGTAALGCLVKDYFPEPVTVSWNSGALTSGVHTFPAVLQSSGLYSLSSVVTVPSSSLGTQTYICNVNHKPSNTKVDKKVEPKSCGS

SEQ ID NO: 28195 - protein, 118 aa, Artificial Sequence
  Description of Artificial Sequence: Synthetic polypeptide
  VH of XENP022132
EVQLVQSGAEVKKPGATVKISCKASGFNIKDYFMHWVQQAPGKGLEWMGWIDPYLGDTEYAPKFQGRVTITADTSTNTAYMELSSLRSEDTAVYYCYARGVYQALDYWGQGTLVTVSS

SEQ ID NO: 28196 - protein, 5 aa, Artificial Sequence
  Description of Artificial Sequence: Synthetic peptide
  XENP022132 vhCDR1
DYFMH

SEQ ID NO: 28197 - protein, 17 aa, Artificial Sequence
  Description of Artificial Sequence: Synthetic peptide
  XENP022132 vhCDR2
WIDPYLGDTEYAPKFQG

SEQ ID NO: 28198 - protein, 9 aa, Artificial Sequence
  Description of Artificial Sequence: Synthetic peptide
  XENP022132 vhCDR3
RGVYQALDY

SEQ ID NO: 28199 - protein, 214 aa, Artificial Sequence; identical to SEQ ID NO: 22059
  Description of Artificial Sequence: Synthetic polypeptide
  XENP022132 2A11_H1.155_L2.50_Fab Light Chain

SEQ ID NO: 28200 - protein, 107 aa, Artificial Sequence; identical to SEQ ID NO: 22060
  Description of Artificial Sequence: Synthetic polypeptide
  VL of XENP022132

SEQ ID NO: 28201 - protein, 11 aa, Artificial Sequence
  Description of Artificial Sequence: Synthetic peptide
  XENP022132 vlCDR1
QASQDIGNYLN

SEQ ID NO: 28202 - protein, 7 aa, Artificial Sequence
  Description of Artificial Sequence: Synthetic peptide
  XENP022132 vlCDR2
YTSYLHS

SEQ ID NO: 28203 - protein, 9 aa, Artificial Sequence
  Description of Artificial Sequence: Synthetic peptide
  XENP022132 vlCDR3
QQGNTLPYT

SEQ ID NO: 28204 - protein, 223 aa, Artificial Sequence
  Description of Artificial Sequence: Synthetic polypeptide
  XENP022133 2A11_H1.156_L2.50_Fab Heavy Chain
EVQLVQSGAEVKKPGATVKISCKASGFNIKDYFMHWVQQAPGKGLEWMGWIDPYLGDTEYAPKFQGRVTITADTSTNTAYMELSSLRSEDTAVYYCYARGVKQALDYWGQGTLVTVSSASTKGPSVFPLAPSSKSTSGGTAALGCLVKDYFPEPVTVSWNSGALTSGVHTFPAVLQSSGLYSLSSVVTVPSSSLGTQTYICNVNHKPSNTKVDKKVEPKSCGS

SEQ ID NO: 28205 - protein, 118 aa, Artificial Sequence
  Description of Artificial Sequence: Synthetic polypeptide
  VH of XENP022133
EVQLVQSGAEVKKPGATVKISCKASGFNIKDYFMHWVQQAPGKGLEWMGWIDPYLGDTEYAPKFQGRVTITADTSTNTAYMELSSLRSEDTAVYYCYARGVKQALDYWGQGTLVTVSS

SEQ ID NO: 28206 - protein, 5 aa, Artificial Sequence
  Description of Artificial Sequence: Synthetic peptide
  XENP022133 vhCDR1
DYFMH

SEQ ID NO: 28207 - protein, 17 aa, Artificial Sequence
  Description of Artificial Sequence: Synthetic peptide
  XENP022133 vhCDR2
WIDPYLGDTEYAPKFQG

SEQ ID NO: 28208 - protein, 9 aa, Artificial Sequence
  Description of Artificial Sequence: Synthetic peptide
  XENP022133 vhCDR3
RGVKQALDY

SEQ ID NO: 28209 - protein, 214 aa, Artificial Sequence; identical to SEQ ID NO: 22059
  Description of Artificial Sequence: Synthetic polypeptide
  XENP022133 2A11_H1.156_L2.50_Fab Light Chain

SEQ ID NO: 28210 - protein, 107 aa, Artificial Sequence; identical to SEQ ID NO: 22060
  Description of Artificial Sequence: Synthetic polypeptide
  VL of XENP022133

SEQ ID NO: 28211 - protein, 11 aa, Artificial Sequence
  Description of Artificial Sequence: Synthetic peptide
  XENP022133 vlCDR1
QASQDIGNYLN

SEQ ID NO: 28212 - protein, 7 aa, Artificial Sequence
  Description of Artificial Sequence: Synthetic peptide
  XENP022133 vlCDR2
YTSYLHS

SEQ ID NO: 28213 - protein, 9 aa, Artificial Sequence
  Description of Artificial Sequence: Synthetic peptide
  XENP022133 vlCDR3
QQGNTLPYT

SEQ ID NO: 28214 - protein, 223 aa, Artificial Sequence; identical to SEQ ID NO: 28194
  Description of Artificial Sequence: Synthetic polypeptide
  XENP022134 2A11_H1.155_L2.113_Fab Heavy Chain

SEQ ID NO: 28215 - protein, 118 aa, Artificial Sequence; identical to SEQ ID NO: 28195
  Description of Artificial Sequence: Synthetic polypeptide
  VH of XENP022134

SEQ ID NO: 28216 - protein, 5 aa, Artificial Sequence
  Description of Artificial Sequence: Synthetic peptide
  XENP022134 vhCDR1
DYFMH

SEQ ID NO: 28217 - protein, 17 aa, Artificial Sequence
  Description of Artificial Sequence: Synthetic peptide
  XENP022134 vhCDR2
WIDPYLGDTEYAPKFQG

SEQ ID NO: 28218 - protein, 9 aa, Artificial Sequence
  Description of Artificial Sequence: Synthetic peptide
  XENP022134 vhCDR3
RGVYQALDY

SEQ ID NO: 28219 - protein, 214 aa, Artificial Sequence; identical to SEQ ID NO: 22079
  Description of Artificial Sequence: Synthetic polypeptide
  XENP022134 2A11_H1.155_L2.113_Fab Light Chain

SEQ ID NO: 28220 - protein, 107 aa, Artificial Sequence; identical to SEQ ID NO: 22080
  Description of Artificial Sequence: Synthetic polypeptide
  VL of XENP022134

SEQ ID NO: 28221 - protein, 11 aa, Artificial Sequence
  Description of Artificial Sequence: Synthetic peptide
  XENP022134 vlCDR1
QASQDIGNYLN

SEQ ID NO: 28222 - protein, 7 aa, Artificial Sequence
  Description of Artificial Sequence: Synthetic peptide
  XENP022134 vlCDR2
FTSYLHS

SEQ ID NO: 28223 - protein, 9 aa, Artificial Sequence
  Description of Artificial Sequence: Synthetic peptide
  XENP022134 vlCDR3
QQGNTLPYT

SEQ ID NO: 28224 - protein, 223 aa, Artificial Sequence; identical to SEQ ID NO: 28204
  Description of Artificial Sequence: Synthetic polypeptide
  XENP022135 2A11_H1.156_L2.113_Fab Heavy Chain

SEQ ID NO: 28225 - protein, 118 aa, Artificial Sequence; identical to SEQ ID NO: 28205
  Description of Artificial Sequence: Synthetic polypeptide
  VH of XENP022135

SEQ ID NO: 28226 - protein, 5 aa, Artificial Sequence
  Description of Artificial Sequence: Synthetic peptide
  XENP022135 vhCDR1
DYFMH

SEQ ID NO: 28227 - protein, 17 aa, Artificial Sequence
  Description of Artificial Sequence: Synthetic peptide
  XENP022135 vhCDR2
WIDPYLGDTEYAPKFQG

SEQ ID NO: 28228 - protein, 9 aa, Artificial Sequence
  Description of Artificial Sequence: Synthetic peptide
  XENP022135 vhCDR3
RGVKQALDY

SEQ ID NO: 28229 - protein, 214 aa, Artificial Sequence; identical to SEQ ID NO: 22079
  Description of Artificial Sequence: Synthetic polypeptide
  XENP022135 2A11_H1.156_L2.113_Fab Light Chain

SEQ ID NO: 28230 - protein, 107 aa, Artificial Sequence; identical to SEQ ID NO: 22080
  Description of Artificial Sequence: Synthetic polypeptide
  VL of XENP022135

SEQ ID NO: 28231 - protein, 11 aa, Artificial Sequence
  Description of Artificial Sequence: Synthetic peptide
  XENP022135 vlCDR1
QASQDIGNYLN

SEQ ID NO: 28232 - protein, 7 aa, Artificial Sequence
  Description of Artificial Sequence: Synthetic peptide
  XENP022135 vlCDR2
FTSYLHS

SEQ ID NO: 28233 - protein, 9 aa, Artificial Sequence
  Description of Artificial Sequence: Synthetic peptide
  XENP022135 vlCDR3
QQGNTLPYT

SEQ ID NO: 28234 - protein, 223 aa, Artificial Sequence; identical to SEQ ID NO: 28194
  Description of Artificial Sequence: Synthetic polypeptide
  XENP022136 2A11_H1.155_L2.116_Fab Heavy Chain

SEQ ID NO: 28235 - protein, 118 aa, Artificial Sequence; identical to SEQ ID NO: 28195
  Description of Artificial Sequence: Synthetic polypeptide
  VH of XENP022136

SEQ ID NO: 28236 - protein, 5 aa, Artificial Sequence
  Description of Artificial Sequence: Synthetic peptide
  XENP022136 vhCDR1
DYFMH

SEQ ID NO: 28237 - protein, 17 aa, Artificial Sequence
  Description of Artificial Sequence: Synthetic peptide
  XENP022136 vhCDR2
WIDPYLGDTEYAPKFQG

SEQ ID NO: 28238 - protein, 9 aa, Artificial Sequence
  Description of Artificial Sequence: Synthetic peptide
  XENP022136 vhCDR3
RGVYQALDY

SEQ ID NO: 28239 - protein, 214 aa, Artificial Sequence; identical to SEQ ID NO: 22119
  Description of Artificial Sequence: Synthetic polypeptide
  XENP022136 2A11_H1.155_L2.116_Fab Light Chain

SEQ ID NO: 28240 - protein, 107 aa, Artificial Sequence; identical to SEQ ID NO: 22120
  Description of Artificial Sequence: Synthetic polypeptide
  VL of XENP022136

SEQ ID NO: 28241 - protein, 11 aa, Artificial Sequence
  Description of Artificial Sequence: Synthetic peptide
  XENP022136 vlCDR1
QASQDIGNYLN

SEQ ID NO: 28242 - protein, 7 aa, Artificial Sequence
  Description of Artificial Sequence: Synthetic peptide
  XENP022136 vlCDR2
FTSHLHS

SEQ ID NO: 28243 - protein, 9 aa, Artificial Sequence
  Description of Artificial Sequence: Synthetic peptide
  XENP022136 vlCDR3
QQGHQLPYT

SEQ ID NO: 28244 - protein, 223 aa, Artificial Sequence; identical to SEQ ID NO: 28204
  Description of Artificial Sequence: Synthetic polypeptide
  XENP022137 2A11_H1.156_L2.116_Fab Heavy Chain

SEQ ID NO: 28245 - protein, 118 aa, Artificial Sequence; identical to SEQ ID NO: 28205
  Description of Artificial Sequence: Synthetic polypeptide
  VH of XENP022137

SEQ ID NO: 28246 - protein, 5 aa, Artificial Sequence
  Description of Artificial Sequence: Synthetic peptide
  XENP022137 vhCDR1
DYFMH

SEQ ID NO: 28247 - protein, 17 aa, Artificial Sequence
  Description of Artificial Sequence: Synthetic peptide
  XENP022137 vhCDR2
WIDPYLGDTEYAPKFQG

SEQ ID NO: 28248 - protein, 9 aa, Artificial Sequence
  Description of Artificial Sequence: Synthetic peptide
  XENP022137 vhCDR3
RGVKQALDY

SEQ ID NO: 28249 - protein, 214 aa, Artificial Sequence; identical to SEQ ID NO: 22119
  Description of Artificial Sequence: Synthetic polypeptide
  XENP022137 2A11_H1.156_L2.116_Fab Light Chain

SEQ ID NO: 28250 - protein, 107 aa, Artificial Sequence; identical to SEQ ID NO: 22120
  Description of Artificial Sequence: Synthetic polypeptide
  VL of XENP022137

SEQ ID NO: 28251 - protein, 11 aa, Artificial Sequence
  Description of Artificial Sequence: Synthetic peptide
  XENP022137 vlCDR1
QASQDIGNYLN

SEQ ID NO: 28252 - protein, 7 aa, Artificial Sequence
  Description of Artificial Sequence: Synthetic peptide
  XENP022137 vlCDR2
FTSHLHS

SEQ ID NO: 28253 - protein, 9 aa, Artificial Sequence
  Description of Artificial Sequence: Synthetic peptide
  XENP022137 vlCDR3
QQGHQLPYT

SEQ ID NO: 28254 - protein, 223 aa, Artificial Sequence
  Description of Artificial Sequence: Synthetic polypeptide
  XENP022138 2A11_H1.158_L2.126_Fab Heavy Chain
EVQLVQSGAEVKKPGATVKISCKASGFNIKDYFMHWVQQAPGKGLEWMGWITPELGDTEYAPKFQGRVTITADTSTNTAYMELSSLRSEDTAVYYCYARGVYQALDYWGQGTLVTVSSASTKGPSVFPLAPSSKSTSGGTAALGCLVKDYFPEPVTVSWNSGALTSGVHTFPAVLQSSGLYSLSSVVTVPSSSLGTQTYICNVNHKPSNTKVDKKVEPKSCGS

SEQ ID NO: 28255 - protein, 118 aa, Artificial Sequence
  Description of Artificial Sequence: Synthetic polypeptide
  VH of XENP022138
EVQLVQSGAEVKKPGATVKISCKASGFNIKDYFMHWVQQAPGKGLEWMGWITPELGDTEYAPKFQGRVTITADTSTNTAYMELSSLRSEDTAVYYCYARGVYQALDYWGQGTLVTVSS

SEQ ID NO: 28256 - protein, 5 aa, Artificial Sequence
  Description of Artificial Sequence: Synthetic peptide
  XENP022138 vhCDR1
DYFMH

SEQ ID NO: 28257 - protein, 17 aa, Artificial Sequence
  Description of Artificial Sequence: Synthetic peptide
  XENP022138 vhCDR2
WITPELGDTEYAPKFQG

SEQ ID NO: 28258 - protein, 9 aa, Artificial Sequence
  Description of Artificial Sequence: Synthetic peptide
  XENP022138 vhCDR3
RGVYQALDY

SEQ ID NO: 28259 - protein, 214 aa, Artificial Sequence; identical to SEQ ID NO: 22259
  Description of Artificial Sequence: Synthetic polypeptide
  XENP022138 2A11_H1.158_L2.126_Fab Light Chain

SEQ ID NO: 28260 - protein, 107 aa, Artificial Sequence; identical to SEQ ID NO: 22260
  Description of Artificial Sequence: Synthetic polypeptide
  VL of XENP022138

SEQ ID NO: 28261 - protein, 11 aa, Artificial Sequence
  Description of Artificial Sequence: Synthetic peptide
  XENP022138 vlCDR1
QASQDIGNYLN

SEQ ID NO: 28262 - protein, 7 aa, Artificial Sequence
  Description of Artificial Sequence: Synthetic peptide
  XENP022138 vlCDR2
FTSYLHS

SEQ ID NO: 28263 - protein, 9 aa, Artificial Sequence
  Description of Artificial Sequence: Synthetic peptide
  XENP022138 vlCDR3
QEGNTLPYT

SEQ ID NO: 28264 - protein, 223 aa, Artificial Sequence
  Description of Artificial Sequence: Synthetic polypeptide
  XENP022139 2A11_H1.159_L2.126_Fab Heavy Chain
EVQLVQSGAEVKKPGATVKISCKASGFNIKDYFMHWVQQAPGKGLEWMGWIVPELGDTEYAPKFQGRVTITADTSTNTAYMELSSLRSEDTAVYYCYARGVYQALDYWGQGTLVTVSSASTKGPSVFPLAPSSKSTSGGTAALGCLVKDYFPEPVTVSWNSGALTSGVHTFPAVLQSSGLYSLSSVVTVPSSSLGTQTYICNVNHKPSNTKVDKKVEPKSCGS

SEQ ID NO: 28265 - protein, 118 aa, Artificial Sequence
  Description of Artificial Sequence: Synthetic polypeptide
  VH of XENP022139
EVQLVQSGAEVKKPGATVKISCKASGFNIKDYFMHWVQQAPGKGLEWMGWIVPELGDTEYAPKFQGRVTITADTSTNTAYMELSSLRSEDTAVYYCYARGVYQALDYWGQGTLVTVSS

SEQ ID NO: 28266 - protein, 5 aa, Artificial Sequence
  Description of Artificial Sequence: Synthetic peptide
  XENP022139 vhCDR1
DYFMH

SEQ ID NO: 28267 - protein, 17 aa, Artificial Sequence
  Description of Artificial Sequence: Synthetic peptide
  XENP022139 vhCDR2
WIVPELGDTEYAPKFQG

SEQ ID NO: 28268 - protein, 9 aa, Artificial Sequence
  Description of Artificial Sequence: Synthetic peptide
  XENP022139 vhCDR3
RGVYQALDY

SEQ ID NO: 28269 - protein, 214 aa, Artificial Sequence; identical to SEQ ID NO: 22259
  Description of Artificial Sequence: Synthetic polypeptide
  XENP022139 2A11_H1.159_L2.126_Fab Light Chain

SEQ ID NO: 28270 - protein, 107 aa, Artificial Sequence; identical to SEQ ID NO: 22260
  Description of Artificial Sequence: Synthetic polypeptide
  VL of XENP022139

SEQ ID NO: 28271 - protein, 11 aa, Artificial Sequence
  Description of Artificial Sequence: Synthetic peptide
  XENP022139 vlCDR1
QASQDIGNYLN

SEQ ID NO: 28272 - protein, 7 aa, Artificial Sequence
  Description of Artificial Sequence: Synthetic peptide
  XENP022139 vlCDR2
FTSYLHS

SEQ ID NO: 28273 - protein, 9 aa, Artificial Sequence
  Description of Artificial Sequence: Synthetic peptide
  XENP022139 vlCDR3
QEGNTLPYT

SEQ ID NO: 28274 - protein, 223 aa, Artificial Sequence
  Description of Artificial Sequence: Synthetic polypeptide
  XENP022140 2A11_H1.160_L2.126_Fab Heavy Chain
EVQLVQSGAEVKKPGATVKISCKASGFNIKDYFMHWVQQAPGKGLEWMGWIAPELGDTEYAPKFQGRVTITADTSTNTAYMELSSLRSEDTAVYYCYARGVYQALDYWGQGTLVTVSSASTKGPSVFPLAPSSKSTSGGTAALGCLVKDYFPEPVTVSWNSGALTSGVHTFPAVLQSSGLYSLSSVVTVPSSSLGTQTYICNVNHKPSNTKVDKKVEPKSCGS

SEQ ID NO: 28275 - protein, 118 aa, Artificial Sequence
  Description of Artificial Sequence: Synthetic polypeptide
  VH of XENP022140
EVQLVQSGAEVKKPGATVKISCKASGFNIKDYFMHWVQQAPGKGLEWMGWIAPELGDTEYAPKFQGRVTITADTSTNTAYMELSSLRSEDTAVYYCYARGVYQALDYWGQGTLVTVSS

SEQ ID NO: 28276 - protein, 5 aa, Artificial Sequence
  Description of Artificial Sequence: Synthetic peptide
  XENP022140 vhCDR1
DYFMH

SEQ ID NO: 28277 - protein, 17 aa, Artificial Sequence
  Description of Artificial Sequence: Synthetic peptide
  XENP022140 vhCDR2
WIAPELGDTEYAPKFQG

SEQ ID NO: 28278 - protein, 9 aa, Artificial Sequence
  Description of Artificial Sequence: Synthetic peptide
  XENP022140 vhCDR3
RGVYQALDY

SEQ ID NO: 28279 - protein, 214 aa, Artificial Sequence; identical to SEQ ID NO: 22259
  Description of Artificial Sequence: Synthetic polypeptide
  XENP022140 2A11_H1.160_L2.126_Fab Light Chain

SEQ ID NO: 28280 - protein, 107 aa, Artificial Sequence; identical to SEQ ID NO: 22260
  Description of Artificial Sequence: Synthetic polypeptide
  VL of XENP022140

SEQ ID NO: 28281 - protein, 11 aa, Artificial Sequence
  Description of Artificial Sequence: Synthetic peptide
  XENP022140 vlCDR1
QASQDIGNYLN

SEQ ID NO: 28282 - protein, 7 aa, Artificial Sequence
  Description of Artificial Sequence: Synthetic peptide
  XENP022140 vlCDR2
FTSYLHS

SEQ ID NO: 28283 - protein, 9 aa, Artificial Sequence
  Description of Artificial Sequence: Synthetic peptide
  XENP022140 vlCDR3
QEGNTLPYT

SEQ ID NO: 28284 - protein, 223 aa, Artificial Sequence
  Description of Artificial Sequence: Synthetic polypeptide
  XENP022141 2A11_H1.161_L2.126_Fab Heavy Chain
EVQLVQSGAEVKKPGATVKISCKASGFNIKDYFMHWVQQAPGKGLEWMGWIIPELGDTEYAPKFQGRVTITADTSTNTAYMELSSLRSEDTAVYYCYARGVYQALDYWGQGTLVTVSSASTKGPSVFPLAPSSKSTSGGTAALGCLVKDYFPEPVTVSWNSGALTSGVHTFPAVLQSSGLYSLSSVVTVPSSSLGTQTYICNVNHKPSNTKVDKKVEPKSCGS

SEQ ID NO: 28285 - protein, 118 aa, Artificial Sequence
  Description of Artificial Sequence: Synthetic polypeptide
  VH of XENP022141
EVQLVQSGAEVKKPGATVKISCKASGFNIKDYFMHWVQQAPGKGLEWMGWIIPELGDTEYAPKFQGRVTITADTSTNTAYMELSSLRSEDTAVYYCYARGVYQALDYWGQGTLVTVSS

SEQ ID NO: 28286 - protein, 5 aa, Artificial Sequence
  Description of Artificial Sequence: Synthetic peptide
  XENP022141 vhCDR1
DYFMH

SEQ ID NO: 28287 - protein, 17 aa, Artificial Sequence
  Description of Artificial Sequence: Synthetic peptide
  XENP022141 vhCDR2
WIIPELGDTEYAPKFQG

SEQ ID NO: 28288 - protein, 9 aa, Artificial Sequence
  Description of Artificial Sequence: Synthetic peptide
  XENP022141 vhCDR3
RGVYQALDY

SEQ ID NO: 28289 - protein, 214 aa, Artificial Sequence; identical to SEQ ID NO: 22259
  Description of Artificial Sequence: Synthetic polypeptide
  XENP022141 2A11_H1.161_L2.126_Fab Light Chain

SEQ ID NO: 28290 - protein, 107 aa, Artificial Sequence; identical to SEQ ID NO: 22260
  Description of Artificial Sequence: Synthetic polypeptide
  VL of XENP022141

SEQ ID NO: 28291 - protein, 11 aa, Artificial Sequence
  Description of Artificial Sequence: Synthetic peptide
  XENP022141 vlCDR1
QASQDIGNYLN

SEQ ID NO: 28292 - protein, 7 aa, Artificial Sequence
  Description of Artificial Sequence: Synthetic peptide
  XENP022141 vlCDR2
FTSYLHS

SEQ ID NO: 28293 - protein, 9 aa, Artificial Sequence
  Description of Artificial Sequence: Synthetic peptide
  XENP022141 vlCDR3
QEGNTLPYT

SEQ ID NO: 28294 - protein, 223 aa, Artificial Sequence
  Description of Artificial Sequence: Synthetic polypeptide
  XENP022142 2A11_H1.162_L2.126_Fab Heavy Chain
EVQLVQSGAEVKKPGATVKISCKASGFNIKDYFMHWVQQAPGKGLEWMGWIGPELGDTEYAPKFQGRVTITADTSTNTAYMELSSLRSEDTAVYYCYARGVYQALDYWGQGTLVTVSSASTKGPSVFPLAPSSKSTSGGTAALGCLVKDYFPEPVTVSWNSGALTSGVHTFPAVLQSSGLYSLSSVVTVPSSSLGTQTYICNVNHKPSNTKVDKKVEPKSCGS

SEQ ID NO: 28295 - protein, 118 aa, Artificial Sequence
  Description of Artificial Sequence: Synthetic polypeptide
  VH of XENP022142
EVQLVQSGAEVKKPGATVKISCKASGFNIKDYFMHWVQQAPGKGLEWMGWIGPELGDTEYAPKFQGRVTITADTSTNTAYMELSSLRSEDTAVYYCYARGVYQALDYWGQGTLVTVSS

SEQ ID NO: 28296 - protein, 5 aa, Artificial Sequence
  Description of Artificial Sequence: Synthetic peptide
  XENP022142 vhCDR1
DYFMH

SEQ ID NO: 28297 - protein, 17 aa, Artificial Sequence
  Description of Artificial Sequence: Synthetic peptide
  XENP022142 vhCDR2
WIGPELGDTEYAPKFQG

SEQ ID NO: 28298 - protein, 9 aa, Artificial Sequence
  Description of Artificial Sequence: Synthetic peptide
  XENP022142 vhCDR3
RGVYQALDY

SEQ ID NO: 28299 - protein, 214 aa, Artificial Sequence; identical to SEQ ID NO: 22259
  Description of Artificial Sequence: Synthetic polypeptide
  XENP022142 2A11_H1.162_L2.126_Fab Light Chain

SEQ ID NO: 28300 - protein, 107 aa, Artificial Sequence; identical to SEQ ID NO: 22260
  Description of Artificial Sequence: Synthetic polypeptide
  VL of XENP022142

SEQ ID NO: 28301 - protein, 11 aa, Artificial Sequence
  Description of Artificial Sequence: Synthetic peptide
  XENP022142 vlCDR1
QASQDIGNYLN

SEQ ID NO: 28302 - protein, 7 aa, Artificial Sequence
  Description of Artificial Sequence: Synthetic peptide
  XENP022142 vlCDR2
FTSYLHS

SEQ ID NO: 28303 - protein, 9 aa, Artificial Sequence
  Description of Artificial Sequence: Synthetic peptide
  XENP022142 vlCDR3
QEGNTLPYT

SEQ ID NO: 28304 - protein, 223 aa, Artificial Sequence
  Description of Artificial Sequence: Synthetic polypeptide
  XENP022143 2A11_H1.163_L2.126_Fab Heavy Chain
EVQLVQSGAEVKKPGATVKISCKASGFNIKDYFMHWVQQAPGKGLEWMGWILPELGDTEYAPKFQGRVTITADTSTNTAYMELSSLRSEDTAVYYCYARGVYQALDYWGQGTLVTVSSASTKGPSVFPLAPSSKSTSGGTAALGCLVKDYFPEPVTVSWNSGALTSGVHTFPAVLQSSGLYSLSSVVTVPSSSLGTQTYICNVNHKPSNTKVDKKVEPKSCGS

SEQ ID NO: 28305 - protein, 118 aa, Artificial Sequence
  Description of Artificial Sequence: Synthetic polypeptide
  VH of XENP022143
EVQLVQSGAEVKKPGATVKISCKASGFNIKDYFMHWVQQAPGKGLEWMGWILPELGDTEYAPKFQGRVTITADTSTNTAYMELSSLRSEDTAVYYCYARGVYQALDYWGQGTLVTVSS

SEQ ID NO: 28306 - protein, 5 aa, Artificial Sequence
  Description of Artificial Sequence: Synthetic peptide
  XENP022143 vhCDR1
DYFMH

SEQ ID NO: 28307 - protein, 17 aa, Artificial Sequence
  Description of Artificial Sequence: Synthetic peptide
  XENP022143 vhCDR2
WILPELGDTEYAPKFQG

SEQ ID NO: 28308 - protein, 9 aa, Artificial Sequence
  Description of Artificial Sequence: Synthetic peptide
  XENP022143 vhCDR3
RGVYQALDY

SEQ ID NO: 28309 - protein, 214 aa, Artificial Sequence; identical to SEQ ID NO: 22259
  Description of Artificial Sequence: Synthetic polypeptide
  XENP022143 2A11_H1.163_L2.126_Fab Light Chain

SEQ ID NO: 28310 - protein, 107 aa, Artificial Sequence; identical to SEQ ID NO: 22260
  Description of Artificial Sequence: Synthetic polypeptide
  VL of XENP022143

SEQ ID NO: 28311 - protein, 11 aa, Artificial Sequence
  Description of Artificial Sequence: Synthetic peptide
  XENP022143 vlCDR1
QASQDIGNYLN

SEQ ID NO: 28312 - protein, 7 aa, Artificial Sequence
  Description of Artificial Sequence: Synthetic peptide
  XENP022143 vlCDR2
FTSYLHS

SEQ ID NO: 28313 - protein, 9 aa, Artificial Sequence
  Description of Artificial Sequence: Synthetic peptide
  XENP022143 vlCDR3
QEGNTLPYT

SEQ ID NO: 28314 - protein, 223 aa, Artificial Sequence
  Description of Artificial Sequence: Synthetic polypeptide
  XENP022144 2A11_H1.164_L2.126_Fab Heavy Chain
EVQLVQSGAEVKKPGATVKISCKASGFNIKDYFMHWVQQAPGKGLEWMGWITPETGDTEYAPKFQGRVTITADTSTNTAYMELSSLRSEDTAVYYCYARGVYQALDYWGQGTLVTVSSASTKGPSVFPLAPSSKSTSGGTAALGCLVKDYFPEPVTVSWNSGALTSGVHTFPAVLQSSGLYSLSSVVTVPSSSLGTQTYICNVNHKPSNTKVDKKVEPKSCGS

SEQ ID NO: 28315 - protein, 118 aa, Artificial Sequence
  Description of Artificial Sequence: Synthetic polypeptide
  VH of XENP022144
EVQLVQSGAEVKKPGATVKISCKASGFNIKDYFMHWVQQAPGKGLEWMGWITPETGDTEYAPKFQGRVTITADTSTNTAYMELSSLRSEDTAVYYCYARGVYQALDYWGQGTLVTVSS

SEQ ID NO: 28316 - protein, 5 aa, Artificial Sequence
  Description of Artificial Sequence: Synthetic peptide
  XENP022144 vhCDR1
DYFMH

SEQ ID NO: 28317 - protein, 17 aa, Artificial Sequence
  Description of Artificial Sequence: Synthetic peptide
  XENP022144 vhCDR2
WITPETGDTEYAPKFQG

SEQ ID NO: 28318 - protein, 9 aa, Artificial Sequence
  Description of Artificial Sequence: Synthetic peptide
  XENP022144 vhCDR3
RGVYQALDY

SEQ ID NO: 28319 - protein, 214 aa, Artificial Sequence; identical to SEQ ID NO: 22259
  Description of Artificial Sequence: Synthetic polypeptide
  XENP022144 2A11_H1.164_L2.126_Fab Light Chain

SEQ ID NO: 28320 - protein, 107 aa, Artificial Sequence; identical to SEQ ID NO: 22260
  Description of Artificial Sequence: Synthetic polypeptide
  VL of XENP022144

SEQ ID NO: 28321 - protein, 11 aa, Artificial Sequence
  Description of Artificial Sequence: Synthetic peptide
  XENP022144 vlCDR1
QASQDIGNYLN

SEQ ID NO: 28322 - protein, 7 aa, Artificial Sequence
  Description of Artificial Sequence: Synthetic peptide
  XENP022144 vlCDR2
FTSYLHS

SEQ ID NO: 28323 - protein, 9 aa, Artificial Sequence
  Description of Artificial Sequence: Synthetic peptide
  XENP022144 vlCDR3
QEGNTLPYT

SEQ ID NO: 28324 - protein, 223 aa, Artificial Sequence
  Description of Artificial Sequence: Synthetic polypeptide
  XENP022145 2A11_H1.165_L2.126_Fab Heavy Chain
EVQLVQSGAEVKKPGATVKISCKASGFNIKDYFMHWVQQAPGKGLEWMGWIVPETGDTEYAPKFQGRVTITADTSTNTAYMELSSLRSEDTAVYYCYARGVYQALDYWGQGTLVTVSSASTKGPSVFPLAPSSKSTSGGTAALGCLVKDYFPEPVTVSWNSGALTSGVHTFPAVLQSSGLYSLSSVVTVPSSSLGTQTYICNVNHKPSNTKVDKKVEPKSCGS

SEQ ID NO: 28325 - protein, 118 aa, Artificial Sequence
  Description of Artificial Sequence: Synthetic polypeptide
  VH of XENP022145
EVQLVQSGAEVKKPGATVKISCKASGFNIKDYFMHWVQQAPGKGLEWMGWIVPETGDTEYAPKFQGRVTITADTSTNTAYMELSSLRSEDTAVYYCYARGVYQALDYWGQGTLVTVSS

SEQ ID NO: 28326 - protein, 5 aa, Artificial Sequence
  Description of Artificial Sequence: Synthetic peptide
  XENP022145 vhCDR1
DYFMH

SEQ ID NO: 28327 - protein, 17 aa, Artificial Sequence
  Description of Artificial Sequence: Synthetic peptide
  XENP022145 vhCDR2
WIVPETGDTEYAPKFQG

SEQ ID NO: 28328 - protein, 9 aa, Artificial Sequence
  Description of Artificial Sequence: Synthetic peptide
  XENP022145 vhCDR3
RGVYQALDY

SEQ ID NO: 28329 - protein, 214 aa, Artificial Sequence; identical to SEQ ID NO: 22259
  Description of Artificial Sequence: Synthetic polypeptide
  XENP022145 2A11_H1.165_L2.126_Fab Light Chain

SEQ ID NO: 28330 - protein, 107 aa, Artificial Sequence; identical to SEQ ID NO: 22260
  Description of Artificial Sequence: Synthetic polypeptide
  VL of XENP022145

SEQ ID NO: 28331 - protein, 11 aa, Artificial Sequence
  Description of Artificial Sequence: Synthetic peptide
  XENP022145 vlCDR1
QASQDIGNYLN

SEQ ID NO: 28332 - protein, 7 aa, Artificial Sequence
  Description of Artificial Sequence: Synthetic peptide
  XENP022145 vlCDR2
FTSYLHS

SEQ ID NO: 28333 - protein, 9 aa, Artificial Sequence
  Description of Artificial Sequence: Synthetic peptide
  XENP022145 vlCDR3
QEGNTLPYT

SEQ ID NO: 28334 - protein, 223 aa, Artificial Sequence
  Description of Artificial Sequence: Synthetic polypeptide
  XENP022146 2A11_H1.166_L2.126_Fab Heavy Chain
EVQLVQSGAEVKKPGATVKISCKASGFNIKDYFMHWVQQAPGKGLEWMGWIAPETGDTEYAPKFQGRVTITADTSTNTAYMELSSLRSEDTAVYYCYARGVYQALDYWGQGTLVTVSSASTKGPSVFPLAPSSKSTSGGTAALGCLVKDYFPEPVTVSWNSGALTSGVHTFPAVLQSSGLYSLSSVVTVPSSSLGTQTYICNVNHKPSNTKVDKKVEPKSCGS

SEQ ID NO: 28335 - protein, 118 aa, Artificial Sequence
  Description of Artificial Sequence: Synthetic polypeptide
  VH of XENP022146
EVQLVQSGAEVKKPGATVKISCKASGFNIKDYFMHWVQQAPGKGLEWMGWIAPETGDTEYAPKFQGRVTITADTSTNTAYMELSSLRSEDTAVYYCYARGVYQALDYWGQGTLVTVSS

SEQ ID NO: 28336 - protein, 5 aa, Artificial Sequence
  Description of Artificial Sequence: Synthetic peptide
  XENP022146 vhCDR1
DYFMH

SEQ ID NO: 28337 - protein, 17 aa, Artificial Sequence
  Description of Artificial Sequence: Synthetic peptide
  XENP022146 vhCDR2
WIAPETGDTEYAPKFQG

SEQ ID NO: 28338 - protein, 9 aa, Artificial Sequence
  Description of Artificial Sequence: Synthetic peptide
  XENP022146 vhCDR3
RGVYQALDY

SEQ ID NO: 28339 - protein, 214 aa, Artificial Sequence; identical to SEQ ID NO: 22259
  Description of Artificial Sequence: Synthetic polypeptide
  XENP022146 2A11_H1.166_L2.126_Fab Light Chain

SEQ ID NO: 28340 - protein, 107 aa, Artificial Sequence; identical to SEQ ID NO: 22260
  Description of Artificial Sequence: Synthetic polypeptide
  VL of XENP022146

SEQ ID NO: 28341 - protein, 11 aa, Artificial Sequence
  Description of Artificial Sequence: Synthetic peptide
  XENP022146 vlCDR1
QASQDIGNYLN

SEQ ID NO: 28342 - protein, 7 aa, Artificial Sequence
  Description of Artificial Sequence: Synthetic peptide
  XENP022146 vlCDR2
FTSYLHS

SEQ ID NO: 28343 - protein, 9 aa, Artificial Sequence
  Description of Artificial Sequence: Synthetic peptide
  XENP022146 vlCDR3
QEGNTLPYT

SEQ ID NO: 28344 - protein, 223 aa, Artificial Sequence
  Description of Artificial Sequence: Synthetic polypeptide
  XENP022147 2A11_H1.167_L2.126_Fab Heavy Chain
EVQLVQSGAEVKKPGATVKISCKASGFNIKDYFMHWVQQAPGKGLEWMGWIIPETGDTEYAPKFQGRVTITADTSTNTAYMELSSLRSEDTAVYYCYARGVYQALDYWGQGTLVTVSSASTKGPSVFPLAPSSKSTSGGTAALGCLVKDYFPEPVTVSWNSGALTSGVHTFPAVLQSSGLYSLSSVVTVPSSSLGTQTYICNVNHKPSNTKVDKKVEPKSCGS

SEQ ID NO: 28345 - protein, 118 aa, Artificial Sequence
  Description of Artificial Sequence: Synthetic polypeptide
  VH of XENP022147
EVQLVQSGAEVKKPGATVKISCKASGFNIKDYFMHWVQQAPGKGLEWMGWIIPETGDTEYAPKFQGRVTITADTSTNTAYMELSSLRSEDTAVYYCYARGVYQALDYWGQGTLVTVSS

SEQ ID NO: 28346 - protein, 5 aa, Artificial Sequence
  Description of Artificial Sequence: Synthetic peptide
  XENP022147 vhCDR1
DYFMH

SEQ ID NO: 28347 - protein, 17 aa, Artificial Sequence
  Description of Artificial Sequence: Synthetic peptide
  XENP022147 vhCDR2
WIIPETGDTEYAPKFQG

SEQ ID NO: 28348 - protein, 9 aa, Artificial Sequence
  Description of Artificial Sequence: Synthetic peptide
  XENP022147 vhCDR3
RGVYQALDY

SEQ ID NO: 28349 - protein, 214 aa, Artificial Sequence; identical to SEQ ID NO: 22259
  Description of Artificial Sequence: Synthetic polypeptide
  XENP022147 2A11_H1.167_L2.126_Fab Light Chain

SEQ ID NO: 28350 - protein, 107 aa, Artificial Sequence; identical to SEQ ID NO: 22260
  Description of Artificial Sequence: Synthetic polypeptide
  VL of XENP022147

SEQ ID NO: 28351 - protein, 11 aa, Artificial Sequence
  Description of Artificial Sequence: Synthetic peptide
  XENP022147 vlCDR1
QASQDIGNYLN

SEQ ID NO: 28352 - protein, 7 aa, Artificial Sequence
  Description of Artificial Sequence: Synthetic peptide
  XENP022147 vlCDR2
FTSYLHS

SEQ ID NO: 28353 - protein, 9 aa, Artificial Sequence
  Description of Artificial Sequence: Synthetic peptide
  XENP022147 vlCDR3
QEGNTLPYT

SEQ ID NO: 28354 - protein, 223 aa, Artificial Sequence
  Description of Artificial Sequence: Synthetic polypeptide
  XENP022148 2A11_H1.168_L2.126_Fab Heavy Chain
EVQLVQSGAEVKKPGATVKISCKASGFNIKDYFMHWVQQAPGKGLEWMGWIGPETGDTEYAPKFQGRVTITADTSTNTAYMELSSLRSEDTAVYYCYARGVYQALDYWGQGTLVTVSSASTKGPSVFPLAPSSKSTSGGTAALGCLVKDYFPEPVTVSWNSGALTSGVHTFPAVLQSSGLYSLSSVVTVPSSSLGTQTYICNVNHKPSNTKVDKKVEPKSCGS

SEQ ID NO: 28355 - protein, 118 aa, Artificial Sequence
  Description of Artificial Sequence: Synthetic polypeptide
  VH of XENP022148
EVQLVQSGAEVKKPGATVKISCKASGFNIKDYFMHWVQQAPGKGLEWMGWIGPETGDTEYAPKFQGRVTITADTSTNTAYMELSSLRSEDTAVYYCYARGVYQALDYWGQGTLVTVSS

SEQ ID NO: 28356 - protein, 5 aa, Artificial Sequence
  Description of Artificial Sequence: Synthetic peptide
  XENP022148 vhCDR1
DYFMH

SEQ ID NO: 28357 - protein, 17 aa, Artificial Sequence
  Description of Artificial Sequence: Synthetic peptide
  XENP022148 vhCDR2
WIGPETGDTEYAPKFQG

SEQ ID NO: 28358 - protein, 9 aa, Artificial Sequence
  Description of Artificial Sequence: Synthetic peptide
  XENP022148 vhCDR3
RGVYQALDY

SEQ ID NO: 28359 - protein, 214 aa, Artificial Sequence; identical to SEQ ID NO: 22259
  Description of Artificial Sequence: Synthetic polypeptide
  XENP022148 2A11_H1.168_L2.126_Fab Light Chain

SEQ ID NO: 28360 - protein, 107 aa, Artificial Sequence; identical to SEQ ID NO: 22260
  Description of Artificial Sequence: Synthetic polypeptide
  VL of XENP022148

SEQ ID NO: 28361 - protein, 11 aa, Artificial Sequence
  Description of Artificial Sequence: Synthetic peptide
  XENP022148 vlCDR1
QASQDIGNYLN

SEQ ID NO: 28362 - protein, 7 aa, Artificial Sequence
  Description of Artificial Sequence: Synthetic peptide
  XENP022148 vlCDR2
FTSYLHS

SEQ ID NO: 28363 - protein, 9 aa, Artificial Sequence
  Description of Artificial Sequence: Synthetic peptide
  XENP022148 vlCDR3
QEGNTLPYT

SEQ ID NO: 28364 - protein, 223 aa, Artificial Sequence
  Description of Artificial Sequence: Synthetic polypeptide
  XENP022149 2A11_H1.169_L2.126_Fab Heavy Chain
EVQLVQSGAEVKKPGATVKISCKASGFNIKDYFMHWVQQAPGKGLEWMGWILPETGDTEYAPKFQGRVTITADTSTNTAYMELSSLRSEDTAVYYCYARGVYQALDYWGQGTLVTVSSASTKGPSVFPLAPSSKSTSGGTAALGCLVKDYFPEPVTVSWNSGALTSGVHTFPAVLQSSGLYSLSSVVTVPSSSLGTQTYICNVNHKPSNTKVDKKVEPKSCGS

SEQ ID NO: 28365 - protein, 118 aa, Artificial Sequence
  Description of Artificial Sequence: Synthetic polypeptide
  VH of XENP022149
EVQLVQSGAEVKKPGATVKISCKASGFNIKDYFMHWVQQAPGKGLEWMGWILPETGDTEYAPKFQGRVTITADTSTNTAYMELSSLRSEDTAVYYCYARGVYQALDYWGQGTLVTVSS

SEQ ID NO: 28366 - protein, 5 aa, Artificial Sequence
  Description of Artificial Sequence: Synthetic peptide
  XENP022149 vhCDR1
DYFMH

SEQ ID NO: 28367 - protein, 17 aa, Artificial Sequence
  Description of Artificial Sequence: Synthetic peptide
  XENP022149 vhCDR2
WILPETGDTEYAPKFQG

SEQ ID NO: 28368 - protein, 9 aa, Artificial Sequence
  Description of Artificial Sequence: Synthetic peptide
  XENP022149 vhCDR3
RGVYQALDY

SEQ ID NO: 28369 - protein, 214 aa, Artificial Sequence; identical to SEQ ID NO: 22259
  Description of Artificial Sequence: Synthetic polypeptide
  XENP022149 2A11_H1.169_L2.126_Fab Light Chain

SEQ ID NO: 28370 - protein, 107 aa, Artificial Sequence; identical to SEQ ID NO: 22260
  Description of Artificial Sequence: Synthetic polypeptide
  VL of XENP022149

SEQ ID NO: 28371 - protein, 11 aa, Artificial Sequence
  Description of Artificial Sequence: Synthetic peptide
  XENP022149 vlCDR1
QASQDIGNYLN

SEQ ID NO: 28372 - protein, 7 aa, Artificial Sequence
  Description of Artificial Sequence: Synthetic peptide
  XENP022149 vlCDR2
FTSYLHS

SEQ ID NO: 28373 - protein, 9 aa, Artificial Sequence
  Description of Artificial Sequence: Synthetic peptide
  XENP022149 vlCDR3
QEGNTLPYT

SEQ ID NO: 28374 - protein, 223 aa, Artificial Sequence; identical to SEQ ID NO: 27634
  Description of Artificial Sequence: Synthetic polypeptide
  XENP022450 2A11_H1.144_L2.128_Fab Heavy Chain

SEQ ID NO: 28375 - protein, 118 aa, Artificial Sequence; identical to SEQ ID NO: 22085
  Description of Artificial Sequence: Synthetic polypeptide
  VH of XENP022450

SEQ ID NO: 28376 - protein, 5 aa, Artificial Sequence
  Description of Artificial Sequence: Synthetic peptide
  XENP022450 vhCDR1
DYFMH

SEQ ID NO: 28377 - protein, 17 aa, Artificial Sequence
  Description of Artificial Sequence: Synthetic peptide
  XENP022450 vhCDR2
WIDPELGDTEYAPKFQG

SEQ ID NO: 28378 - protein, 9 aa, Artificial Sequence
  Description of Artificial Sequence: Synthetic peptide
  XENP022450 vhCDR3
RGVYQALDY

SEQ ID NO: 28379 - protein, 214 aa, Artificial Sequence
  Description of Artificial Sequence: Synthetic polypeptide
  XENP022450 2A11_H1.144_L2.128_Fab Light Chain
DIQMTQSPAFLSVTPGEKVTITCQASQDIGNYLNWFQQKPGQTVKLLIYYTSYLHSGVPSRFSGSGSGTDYTFTISSLEAEDAATYFCQEGNTLPYTFGGGTKVEIKRTVAAPSVFIFPPSDEQLKSGTASVVCLLNNFYPREAKVQWKVDNALQSGNSQESVTEQDSKDSTYSLSSTLTLSKADYEKHKVYACEVTHQGLSSPVTKSFNRGEC

SEQ ID NO: 28380 - protein, 107 aa, Artificial Sequence
  Description of Artificial Sequence: Synthetic polypeptide
  VL of XENP022450
DIQMTQSPAFLSVTPGEKVTITCQASQDIGNYLNWFQQKPGQTVKLLIYYTSYLHSGVPSRFSGSGSGTDYTFTISSLEAEDAATYFCQEGNTLPYTFGGGTKVEIK

SEQ ID NO: 28381 - protein, 11 aa, Artificial Sequence
  Description of Artificial Sequence: Synthetic peptide
  XENP022450 vlCDR1
QASQDIGNYLN

SEQ ID NO: 28382 - protein, 7 aa, Artificial Sequence
  Description of Artificial Sequence: Synthetic peptide
  XENP022450 vlCDR2
YTSYLHS

SEQ ID NO: 28383 - protein, 9 aa, Artificial Sequence
  Description of Artificial Sequence: Synthetic peptide
  XENP022450 vlCDR3
QEGNTLPYT

SEQ ID NO: 28384 - protein, 223 aa, Artificial Sequence; identical to SEQ ID NO: 27634
  Description of Artificial Sequence: Synthetic polypeptide
  XENP022451 2A11_H1.144_L2.129_Fab Heavy Chain

SEQ ID NO: 28385 - protein, 118 aa, Artificial Sequence; identical to SEQ ID NO: 22085
  Description of Artificial Sequence: Synthetic polypeptide
  VH of XENP022451

SEQ ID NO: 28386 - protein, 5 aa, Artificial Sequence
  Description of Artificial Sequence: Synthetic peptide
  XENP022451 vhCDR1
DYFMH

SEQ ID NO: 28387 - protein, 17 aa, Artificial Sequence
  Description of Artificial Sequence: Synthetic peptide
  XENP022451 vhCDR2
WIDPELGDTEYAPKFQG

SEQ ID NO: 28388 - protein, 9 aa, Artificial Sequence
  Description of Artificial Sequence: Synthetic peptide
  XENP022451 vhCDR3
RGVYQALDY

SEQ ID NO: 28389 - protein, 214 aa, Artificial Sequence
  Description of Artificial Sequence: Synthetic polypeptide
  XENP022451 2A11_H1.144_L2.129_Fab Light Chain
DIQMTQSPAFLSVTPGEKVTITCQASQDIGNYLNWFQQKPDQTPKLLIYYTSYLHSGVPSRFSGSGSGTDYTFTISSLEAEDAATYFCQEGNTLPYTFGGGTKVEIKRTVAAPSVFIFPPSDEQLKSGTASVVCLLNNFYPREAKVQWKVDNALQSGNSQESVTEQDSKDSTYSLSSTLTLSKADYEKHKVYACEVTHQGLSSPVTKSFNRGEC

SEQ ID NO: 28390 - protein, 107 aa, Artificial Sequence
  Description of Artificial Sequence: Synthetic polypeptide
  VL of XENP022451
DIQMTQSPAFLSVTPGEKVTITCQASQDIGNYLNWFQQKPDQTPKLLIYYTSYLHSGVPSRFSGSGSGTDYTFTISSLEAEDAATYFCQEGNTLPYTFGGGTKVEIK

SEQ ID NO: 28391 - protein, 11 aa, Artificial Sequence
  Description of Artificial Sequence: Synthetic peptide
  XENP022451 vlCDR1
QASQDIGNYLN

SEQ ID NO: 28392 - protein, 7 aa, Artificial Sequence
  Description of Artificial Sequence: Synthetic peptide
  XENP022451 vlCDR2
YTSYLHS

SEQ ID NO: 28393 - protein, 9 aa, Artificial Sequence
  Description of Artificial Sequence: Synthetic peptide
  XENP022451 vlCDR3
QEGNTLPYT

SEQ ID NO: 28394 - protein, 223 aa, Artificial Sequence; identical to SEQ ID NO: 27634
  Description of Artificial Sequence: Synthetic polypeptide
  XENP022452 2A11_H1.144_L2.130_Fab Heavy Chain

SEQ ID NO: 28395 - protein, 118 aa, Artificial Sequence; identical to SEQ ID NO: 22085
  Description of Artificial Sequence: Synthetic polypeptide
  VH of XENP022452

SEQ ID NO: 28396 - protein, 5 aa, Artificial Sequence
  Description of Artificial Sequence: Synthetic peptide
  XENP022452 vhCDR1
DYFMH

SEQ ID NO: 28397 - protein, 17 aa, Artificial Sequence
  Description of Artificial Sequence: Synthetic peptide
  XENP022452 vhCDR2
WIDPELGDTEYAPKFQG

SEQ ID NO: 28398 - protein, 9 aa, Artificial Sequence
  Description of Artificial Sequence: Synthetic peptide
  XENP022452 vhCDR3
RGVYQALDY

SEQ ID NO: 28399 - protein, 214 aa, Artificial Sequence
  Description of Artificial Sequence: Synthetic polypeptide
  XENP022452 2A11_H1.144_L2.130_Fab Light Chain
DIQMTQSPAFLSVTPGEKVTITCQASQDIGNYLNWFQQKPGQTPKLLIYYTSYLHSGVPSRFSGSGSGTDYTFTISSLEAEDAATYFCQEGNTLPYTFGGGTKVEIKRTVAAPSVFIFPPSDEQLKSGTASVVCLLNNFYPREAKVQWKVDNALQSGNSQESVTEQDSKDSTYSLSSTLTLSKADYEKHKVYACEVTHQGLSSPVTKSFNRGEC

SEQ ID NO: 28400 - protein, 107 aa, Artificial Sequence
  Description of Artificial Sequence: Synthetic polypeptide
  VL of XENP022452
DIQMTQSPAFLSVTPGEKVTITCQASQDIGNYLNWFQQKPGQTPKLLIYYTSYLHSGVPSRFSGSGSGTDYTFTISSLEAEDAATYFCQEGNTLPYTFGGGTKVEIK

SEQ ID NO: 28401 - protein, 11 aa, Artificial Sequence
  Description of Artificial Sequence: Synthetic peptide
  XENP022452 vlCDR1
QASQDIGNYLN

SEQ ID NO: 28402 - protein, 7 aa, Artificial Sequence
  Description of Artificial Sequence: Synthetic peptide
  XENP022452 vlCDR2
YTSYLHS

SEQ ID NO: 28403 - protein, 9 aa, Artificial Sequence
  Description of Artificial Sequence: Synthetic peptide
  XENP022452 vlCDR3
QEGNTLPYT

SEQ ID NO: 28404 - protein, 223 aa, Artificial Sequence; identical to SEQ ID NO: 27634
  Description of Artificial Sequence: Synthetic polypeptide
  XENP022453 2A11_H1.144_L2.131_Fab Heavy Chain

SEQ ID NO: 28405 - protein, 118 aa, Artificial Sequence; identical to SEQ ID NO: 22085
  Description of Artificial Sequence: Synthetic polypeptide
  VH of XENP022453

SEQ ID NO: 28406 - protein, 5 aa, Artificial Sequence
  Description of Artificial Sequence: Synthetic peptide
  XENP022453 vhCDR1
DYFMH

SEQ ID NO: 28407 - protein, 17 aa, Artificial Sequence
  Description of Artificial Sequence: Synthetic peptide
  XENP022453 vhCDR2
WIDPELGDTEYAPKFQG

SEQ ID NO: 28408 - protein, 9 aa, Artificial Sequence
  Description of Artificial Sequence: Synthetic peptide
  XENP022453 vhCDR3
RGVYQALDY

SEQ ID NO: 28409 - protein, 214 aa, Artificial Sequence
  Description of Artificial Sequence: Synthetic polypeptide
  XENP022453 2A11_H1.144_L2.131_Fab Light Chain
DIQMTQSPAFLSVTPGEKVTITCQASQDIGNYLNWFQQKPGQSPKLLIYYTSYLHSGVPSRFSGSGSGTDYTFTISSLEAEDAATYFCQEGNTLPYTFGGGTKVEIKRTVAAPSVFIFPPSDEQLKSGTASVVCLLNNFYPREAKVQWKVDNALQSGNSQESVTEQDSKDSTYSLSSTLTLSKADYEKHKVYACEVTHQGLSSPVTKSFNRGEC

SEQ ID NO: 28410 - protein, 107 aa, Artificial Sequence
  Description of Artificial Sequence: Synthetic polypeptide
  VL of XENP022453
DIQMTQSPAFLSVTPGEKVTITCQASQDIGNYLNWFQQKPGQSPKLLIYYTSYLHSGVPSRFSGSGSGTDYTFTISSLEAEDAATYFCQEGNTLPYTFGGGTKVEIK

SEQ ID NO: 28411 - protein, 11 aa, Artificial Sequence
  Description of Artificial Sequence: Synthetic peptide
  XENP022453 vlCDR1
QASQDIGNYLN

SEQ ID NO: 28412 - protein, 7 aa, Artificial Sequence
  Description of Artificial Sequence: Synthetic peptide
  XENP022453 vlCDR2
YTSYLHS

SEQ ID NO: 28413 - protein, 9 aa, Artificial Sequence
  Description of Artificial Sequence: Synthetic peptide
  XENP022453 vlCDR3
QEGNTLPYT

SEQ ID NO: 28414 - protein, 223 aa, Artificial Sequence; identical to SEQ ID NO: 28344
  Description of Artificial Sequence: Synthetic polypeptide
  XENP022454 2A11_H1.167_L2.128_Fab Heavy Chain

SEQ ID NO: 28415 - protein, 118 aa, Artificial Sequence; identical to SEQ ID NO: 28345
  Description of Artificial Sequence: Synthetic polypeptide
  VH of XENP022454

SEQ ID NO: 28416 - protein, 5 aa, Artificial Sequence
  Description of Artificial Sequence: Synthetic peptide
  XENP022454 vhCDR1
DYFMH

SEQ ID NO: 28417 - protein, 17 aa, Artificial Sequence
  Description of Artificial Sequence: Synthetic peptide
  XENP022454 vhCDR2
WIIPETGDTEYAPKFQG

SEQ ID NO: 28418 - protein, 9 aa, Artificial Sequence
  Description of Artificial Sequence: Synthetic peptide
  XENP022454 vhCDR3
RGVYQALDY

SEQ ID NO: 28419 - protein, 214 aa, Artificial Sequence; identical to SEQ ID NO: 28379
  Description of Artificial Sequence: Synthetic polypeptide
  XENP022454 2A11_H1.167_L2.128_Fab Light Chain

SEQ ID NO: 28420 - protein, 107 aa, Artificial Sequence; identical to SEQ ID NO: 28380
  Description of Artificial Sequence: Synthetic polypeptide
  VL of XENP022454

SEQ ID NO: 28421 - protein, 11 aa, Artificial Sequence
  Description of Artificial Sequence: Synthetic peptide
  XENP022454 vlCDR1
QASQDIGNYLN

SEQ ID NO: 28422 - protein, 7 aa, Artificial Sequence
  Description of Artificial Sequence: Synthetic peptide
  XENP022454 vlCDR2
YTSYLHS

SEQ ID NO: 28423 - protein, 9 aa, Artificial Sequence
  Description of Artificial Sequence: Synthetic peptide
  XENP022454 vlCDR3
QEGNTLPYT

SEQ ID NO: 28424 - protein, 223 aa, Artificial Sequence; identical to SEQ ID NO: 28344
  Description of Artificial Sequence: Synthetic polypeptide
  XENP022455 2A11_H1.167_L2.129_Fab Heavy Chain

SEQ ID NO: 28425 - protein, 118 aa, Artificial Sequence; identical to SEQ ID NO: 28345
  Description of Artificial Sequence: Synthetic polypeptide
  VH of XENP022455

SEQ ID NO: 28426 - protein, 5 aa, Artificial Sequence
  Description of Artificial Sequence: Synthetic peptide
  XENP022455 vhCDR1
DYFMH

SEQ ID NO: 28427 - protein, 17 aa, Artificial Sequence
  Description of Artificial Sequence: Synthetic peptide
  XENP022455 vhCDR2
WIIPETGDTEYAPKFQG

SEQ ID NO: 28428 - protein, 9 aa, Artificial Sequence
  Description of Artificial Sequence: Synthetic peptide
  XENP022455 vhCDR3
RGVYQALDY

SEQ ID NO: 28429 - protein, 214 aa, Artificial Sequence; identical to SEQ ID NO: 28389
  Description of Artificial Sequence: Synthetic polypeptide
  XENP022455 2A11_H1.167_L2.129_Fab Light Chain

SEQ ID NO: 28430 - protein, 107 aa, Artificial Sequence; identical to SEQ ID NO: 28390
  Description of Artificial Sequence: Synthetic polypeptide
  VL of XENP022455

SEQ ID NO: 28431 - protein, 11 aa, Artificial Sequence
  Description of Artificial Sequence: Synthetic peptide
  XENP022455 vlCDR1
QASQDIGNYLN

SEQ ID NO: 28432 - protein, 7 aa, Artificial Sequence
  Description of Artificial Sequence: Synthetic peptide
  XENP022455 vlCDR2
YTSYLHS

SEQ ID NO: 28433 - protein, 9 aa, Artificial Sequence
  Description of Artificial Sequence: Synthetic peptide
  XENP022455 vlCDR3
QEGNTLPYT

SEQ ID NO: 28434 - protein, 223 aa, Artificial Sequence; identical to SEQ ID NO: 28344
  Description of Artificial Sequence: Synthetic polypeptide
  XENP022456 2A11_H1.167_L2.130_Fab Heavy Chain

SEQ ID NO: 28435 - protein, 118 aa, Artificial Sequence; identical to SEQ ID NO: 28345
  Description of Artificial Sequence: Synthetic polypeptide
  VH of XENP022456

SEQ ID NO: 28436 - protein, 5 aa, Artificial Sequence
  Description of Artificial Sequence: Synthetic peptide
  XENP022456 vhCDR1
DYFMH

SEQ ID NO: 28437 - protein, 17 aa, Artificial Sequence
  Description of Artificial Sequence: Synthetic peptide
  XENP022456 vhCDR2
WIIPETGDTEYAPKFQG

SEQ ID NO: 28438 - protein, 9 aa, Artificial Sequence
  Description of Artificial Sequence: Synthetic peptide
  XENP022456 vhCDR3
RGVYQALDY

SEQ ID NO: 28439 - protein, 214 aa, Artificial Sequence; identical to SEQ ID NO: 28399
  Description of Artificial Sequence: Synthetic polypeptide
  XENP022456 2A11_H1.167_L2.130_Fab Light Chain

SEQ ID NO: 28440 - protein, 107 aa, Artificial Sequence; identical to SEQ ID NO: 28400
  Description of Artificial Sequence: Synthetic polypeptide
  VL of XENP022456

SEQ ID NO: 28441 - protein, 11 aa, Artificial Sequence
  Description of Artificial Sequence: Synthetic peptide
  XENP022456 vlCDR1
QASQDIGNYLN

SEQ ID NO: 28442 - protein, 7 aa, Artificial Sequence
  Description of Artificial Sequence: Synthetic peptide
  XENP022456 vlCDR2
YTSYLHS

SEQ ID NO: 28443 - protein, 9 aa, Artificial Sequence
  Description of Artificial Sequence: Synthetic peptide
  XENP022456 vlCDR3
QEGNTLPYT

SEQ ID NO: 28444 - protein, 223 aa, Artificial Sequence; identical to SEQ ID NO: 28344
  Description of Artificial Sequence: Synthetic polypeptide
  XENP022457 2A11_H1.167_L2.131_Fab Heavy Chain

SEQ ID NO: 28445 - protein, 118 aa, Artificial Sequence; identical to SEQ ID NO: 28345
  Description of Artificial Sequence: Synthetic polypeptide
  VH of XENP022457

SEQ ID NO: 28446 - protein, 5 aa, Artificial Sequence
  Description of Artificial Sequence: Synthetic peptide
  XENP022457 vhCDR1
DYFMH

SEQ ID NO: 28447 - protein, 17 aa, Artificial Sequence
  Description of Artificial Sequence: Synthetic peptide
  XENP022457 vhCDR2
WIIPETGDTEYAPKFQG

SEQ ID NO: 28448 - protein, 9 aa, Artificial Sequence
  Description of Artificial Sequence: Synthetic peptide
  XENP022457 vhCDR3
RGVYQALDY

SEQ ID NO: 28449 - protein, 214 aa, Artificial Sequence; identical to SEQ ID NO: 28409
  Description of Artificial Sequence: Synthetic polypeptide
  XENP022457 2A11_H1.167_L2.131_Fab Light Chain

SEQ ID NO: 28450 - protein, 107 aa, Artificial Sequence; identical to SEQ ID NO: 28410
  Description of Artificial Sequence: Synthetic polypeptide
  VL of XENP022457

SEQ ID NO: 28451 - protein, 11 aa, Artificial Sequence
  Description of Artificial Sequence: Synthetic peptide
  XENP022457 vlCDR1
QASQDIGNYLN

SEQ ID NO: 28452 - protein, 7 aa, Artificial Sequence
  Description of Artificial Sequence: Synthetic peptide
  XENP022457 vlCDR2
YTSYLHS

SEQ ID NO: 28453 - protein, 9 aa, Artificial Sequence
  Description of Artificial Sequence: Synthetic peptide
  XENP022457 vlCDR3
QEGNTLPYT

SEQ ID NO: 28454 - protein, 223 aa, Artificial Sequence; identical to SEQ ID NO: 27734
  Description of Artificial Sequence: Synthetic polypeptide
  XENP022458 2A11_H1.125_L2.128_Fab Heavy Chain

SEQ ID NO: 28455 - protein, 118 aa, Artificial Sequence; identical to SEQ ID NO: 22065
  Description of Artificial Sequence: Synthetic polypeptide
  VH of XENP022458

SEQ ID NO: 28456 - protein, 5 aa, Artificial Sequence
  Description of Artificial Sequence: Synthetic peptide
  XENP022458 vhCDR1
HYFMH

SEQ ID NO: 28457 - protein, 17 aa, Artificial Sequence
  Description of Artificial Sequence: Synthetic peptide
  XENP022458 vhCDR2
WIDPYLGDTEYAPKFQG

SEQ ID NO: 28458 - protein, 9 aa, Artificial Sequence
  Description of Artificial Sequence: Synthetic peptide
  XENP022458 vhCDR3
RGVYQALDY

SEQ ID NO: 28459 - protein, 214 aa, Artificial Sequence; identical to SEQ ID NO: 28379
  Description of Artificial Sequence: Synthetic polypeptide
  XENP022458 2A11_H1.125_L2.128_Fab Light Chain

SEQ ID NO: 28460 - protein, 107 aa, Artificial Sequence; identical to SEQ ID NO: 28380
  Description of Artificial Sequence: Synthetic polypeptide
  VL of XENP022458

SEQ ID NO: 28461 - protein, 11 aa, Artificial Sequence
  Description of Artificial Sequence: Synthetic peptide
  XENP022458 vlCDR1
QASQDIGNYLN

SEQ ID NO: 28462 - protein, 7 aa, Artificial Sequence
  Description of Artificial Sequence: Synthetic peptide
  XENP022458 vlCDR2
YTSYLHS

SEQ ID NO: 28463 - protein, 9 aa, Artificial Sequence
  Description of Artificial Sequence: Synthetic peptide
  XENP022458 vlCDR3
QEGNTLPYT

SEQ ID NO: 28464 - protein, 223 aa, Artificial Sequence; identical to SEQ ID NO: 27734
  Description of Artificial Sequence: Synthetic polypeptide
  XENP022459 2A11_H1.125_L2.129_Fab Heavy Chain

SEQ ID NO: 28465 - protein, 118 aa, Artificial Sequence; identical to SEQ ID NO: 22065
  Description of Artificial Sequence: Synthetic polypeptide
  VH of XENP022459

SEQ ID NO: 28466 - protein, 5 aa, Artificial Sequence
  Description of Artificial Sequence: Synthetic peptide
  XENP022459 vhCDR1
HYFMH

SEQ ID NO: 28467 - protein, 17 aa, Artificial Sequence
  Description of Artificial Sequence: Synthetic peptide
  XENP022459 vhCDR2
WIDPYLGDTEYAPKFQG

SEQ ID NO: 28468 - protein, 9 aa, Artificial Sequence
  Description of Artificial Sequence: Synthetic peptide
  XENP022459 vhCDR3
RGVYQALDY

SEQ ID NO: 28469 - protein, 214 aa, Artificial Sequence; identical to SEQ ID NO: 28389
  Description of Artificial Sequence: Synthetic polypeptide
  XENP022459 2A11_H1.125_L2.129_Fab Light Chain

SEQ ID NO: 28470 - protein, 107 aa, Artificial Sequence; identical to SEQ ID NO: 28390
  Description of Artificial Sequence: Synthetic polypeptide
  VL of XENP022459

SEQ ID NO: 28471 - protein, 11 aa, Artificial Sequence
  Description of Artificial Sequence: Synthetic peptide
  XENP022459 vlCDR1
QASQDIGNYLN

SEQ ID NO: 28472 - protein, 7 aa, Artificial Sequence
  Description of Artificial Sequence: Synthetic peptide
  XENP022459 vlCDR2
YTSYLHS

SEQ ID NO: 28473 - protein, 9 aa, Artificial Sequence
  Description of Artificial Sequence: Synthetic peptide
  XENP022459 vlCDR3
QEGNTLPYT

SEQ ID NO: 28474 - protein, 223 aa, Artificial Sequence; identical to SEQ ID NO: 27734
  Description of Artificial Sequence: Synthetic polypeptide
  XENP022460 2A11_H1.125_L2.130_Fab Heavy Chain

SEQ ID NO: 28475 - protein, 118 aa, Artificial Sequence; identical to SEQ ID NO: 22065
  Description of Artificial Sequence: Synthetic polypeptide
  VH of XENP022460

SEQ ID NO: 28476 - protein, 5 aa, Artificial Sequence
  Description of Artificial Sequence: Synthetic peptide
  XENP022460 vhCDR1
HYFMH

SEQ ID NO: 28477 - protein, 17 aa, Artificial Sequence
  Description of Artificial Sequence: Synthetic peptide
  XENP022460 vhCDR2
WIDPYLGDTEYAPKFQG

SEQ ID NO: 28478 - protein, 9 aa, Artificial Sequence
  Description of Artificial Sequence: Synthetic peptide
  XENP022460 vhCDR3
RGVYQALDY

SEQ ID NO: 28479 - protein, 214 aa, Artificial Sequence; identical to SEQ ID NO: 28399
  Description of Artificial Sequence: Synthetic polypeptide
  XENP022460 2A11_H1.125_L2.130_Fab Light Chain

SEQ ID NO: 28480 - protein, 107 aa, Artificial Sequence; identical to SEQ ID NO: 28400
  Description of Artificial Sequence: Synthetic polypeptide
  VL of XENP022460

SEQ ID NO: 28481 - protein, 11 aa, Artificial Sequence
  Description of Artificial Sequence: Synthetic peptide
  XENP022460 vlCDR1
QASQDIGNYLN

SEQ ID NO: 28482 - protein, 7 aa, Artificial Sequence
  Description of Artificial Sequence: Synthetic peptide
  XENP022460 vlCDR2
YTSYLHS

SEQ ID NO: 28483 - protein, 9 aa, Artificial Sequence
  Description of Artificial Sequence: Synthetic peptide
  XENP022460 vlCDR3
QEGNTLPYT

SEQ ID NO: 28484 - protein, 223 aa, Artificial Sequence; identical to SEQ ID NO: 27734
  Description of Artificial Sequence: Synthetic polypeptide
  XENP022461 2A11_H1.125_L2.131_Fab Heavy Chain

SEQ ID NO: 28485 - protein, 118 aa, Artificial Sequence; identical to SEQ ID NO: 22065
  Description of Artificial Sequence: Synthetic polypeptide
  VH of XENP022461

SEQ ID NO: 28486 - protein, 5 aa, Artificial Sequence
  Description of Artificial Sequence: Synthetic peptide
  XENP022461 vhCDR1
HYFMH

SEQ ID NO: 28487 - protein, 17 aa, Artificial Sequence
  Description of Artificial Sequence: Synthetic peptide
  XENP022461 vhCDR2
WIDPYLGDTEYAPKFQG

SEQ ID NO: 28488 - protein, 9 aa, Artificial Sequence
  Description of Artificial Sequence: Synthetic peptide
  XENP022461 vhCDR3
RGVYQALDY

SEQ ID NO: 28489 - protein, 214 aa, Artificial Sequence; identical to SEQ ID NO: 28409
  Description of Artificial Sequence: Synthetic polypeptide
  XENP022461 2A11_H1.125_L2.131_Fab Light Chain

SEQ ID NO: 28490 - protein, 107 aa, Artificial Sequence; identical to SEQ ID NO: 28410
  Description of Artificial Sequence: Synthetic polypeptide
  VL of XENP022461

SEQ ID NO: 28491 - protein, 11 aa, Artificial Sequence
  Description of Artificial Sequence: Synthetic peptide
  XENP022461 vlCDR1
QASQDIGNYLN

SEQ ID NO: 28492 - protein, 7 aa, Artificial Sequence
  Description of Artificial Sequence: Synthetic peptide
  XENP022461 vlCDR2
YTSYLHS

SEQ ID NO: 28493 - protein, 9 aa, Artificial Sequence
  Description of Artificial Sequence: Synthetic peptide
  XENP022461 vlCDR3
QEGNTLPYT

SEQ ID NO: 28494 - protein, 223 aa, Artificial Sequence; identical to SEQ ID NO: 27634
  Description of Artificial Sequence: Synthetic polypeptide
  XENP022570 2A11_H1.144_L2.132_Fab Heavy Chain

SEQ ID NO: 28495 - protein, 118 aa, Artificial Sequence; identical to SEQ ID NO: 22085
  Description of Artificial Sequence: Synthetic polypeptide
  VH of XENP022570

SEQ ID NO: 28496 - protein, 5 aa, Artificial Sequence
  Description of Artificial Sequence: Synthetic peptide
  XENP022570 vhCDR1
DYFMH

SEQ ID NO: 28497 - protein, 17 aa, Artificial Sequence
  Description of Artificial Sequence: Synthetic peptide
  XENP022570 vhCDR2
WIDPELGDTEYAPKFQG

SEQ ID NO: 28498 - protein, 9 aa, Artificial Sequence
  Description of Artificial Sequence: Synthetic peptide
  XENP022570 vhCDR3
RGVYQALDY

SEQ ID NO: 28499 - protein, 214 aa, Artificial Sequence; identical to SEQ ID NO: 22219
  Description of Artificial Sequence: Synthetic polypeptide
  XENP022570 2A11_H1.144_L2.132_Fab Light Chain

SEQ ID NO: 28500 - protein, 107 aa, Artificial Sequence; identical to SEQ ID NO: 22220
  Description of Artificial Sequence: Synthetic polypeptide
  VL of XENP022570

SEQ ID NO: 28501 - protein, 11 aa, Artificial Sequence
  Description of Artificial Sequence: Synthetic peptide
  XENP022570 vlCDR1
QASQDIGNYLN

SEQ ID NO: 28502 - protein, 7 aa, Artificial Sequence
  Description of Artificial Sequence: Synthetic peptide
  XENP022570 vlCDR2
FTSYLHS

SEQ ID NO: 28503 - protein, 9 aa, Artificial Sequence
  Description of Artificial Sequence: Synthetic peptide
  XENP022570 vlCDR3
QEGNTLPYT

SEQ ID NO: 28504 - protein, 223 aa, Artificial Sequence; identical to SEQ ID NO: 27634
  Description of Artificial Sequence: Synthetic polypeptide
  XENP022571 2A11_H1.144_L2.133_Fab Heavy Chain

SEQ ID NO: 28505 - protein, 118 aa, Artificial Sequence; identical to SEQ ID NO: 22085
  Description of Artificial Sequence: Synthetic polypeptide
  VH of XENP022571

SEQ ID NO: 28506 - protein, 5 aa, Artificial Sequence
  Description of Artificial Sequence: Synthetic peptide
  XENP022571 vhCDR1
DYFMH

SEQ ID NO: 28507 - protein, 17 aa, Artificial Sequence
  Description of Artificial Sequence: Synthetic peptide
  XENP022571 vhCDR2
WIDPELGDTEYAPKFQG

SEQ ID NO: 28508 - protein, 9 aa, Artificial Sequence
  Description of Artificial Sequence: Synthetic peptide
  XENP022571 vhCDR3
RGVYQALDY

SEQ ID NO: 28509 - protein, 214 aa, Artificial Sequence; identical to SEQ ID NO: 22199
  Description of Artificial Sequence: Synthetic polypeptide
  XENP022571 2A11_H1.144_L2.133_Fab Light Chain

SEQ ID NO: 28510 - protein, 107 aa, Artificial Sequence; identical to SEQ ID NO: 22200
  Description of Artificial Sequence: Synthetic polypeptide
  VL of XENP022571

SEQ ID NO: 28511 - protein, 11 aa, Artificial Sequence
  Description of Artificial Sequence: Synthetic peptide
  XENP022571 vlCDR1
QASQDIGNYLN

SEQ ID NO: 28512 - protein, 7 aa, Artificial Sequence
  Description of Artificial Sequence: Synthetic peptide
  XENP022571 vlCDR2
FTSYLHS

SEQ ID NO: 28513 - protein, 9 aa, Artificial Sequence
  Description of Artificial Sequence: Synthetic peptide
  XENP022571 vlCDR3
QEGNTLPYT

SEQ ID NO: 28514 - protein, 223 aa, Artificial Sequence; identical to SEQ ID NO: 27634
  Description of Artificial Sequence: Synthetic polypeptide
  XENP022572 2A11_H1.144_L2.134_Fab Heavy Chain

SEQ ID NO: 28515 - protein, 118 aa, Artificial Sequence; identical to SEQ ID NO: 22085
  Description of Artificial Sequence: Synthetic polypeptide
  VH of XENP022572

SEQ ID NO: 28516 - protein, 5 aa, Artificial Sequence
  Description of Artificial Sequence: Synthetic peptide
  XENP022572 vhCDR1
DYFMH

SEQ ID NO: 28517 - protein, 17 aa, Artificial Sequence
  Description of Artificial Sequence: Synthetic peptide
  XENP022572 vhCDR2
WIDPELGDTEYAPKFQG

SEQ ID NO: 28518 - protein, 9 aa, Artificial Sequence
  Description of Artificial Sequence: Synthetic peptide
  XENP022572 vhCDR3
RGVYQALDY

SEQ ID NO: 28519 - protein, 214 aa, Artificial Sequence
  Description of Artificial Sequence: Synthetic polypeptide
  XENP022572 2A11_H1.144_L2.134_Fab Light Chain
DIQMTQSPAFLSVTPGEKVTITCQASQDIGNYLNWFQQKPGQTPKLLIYFTSYLHSGVPSRFSGSGSGTDYTFTISSLEAEDAATYFCQEGNTLPYTFGGGTKVEIKRTVAAPSVFIFPPSDEQLKSGTASVVCLLNNFYPREAKVQWKVDNALQSGNSQESVTEQDSKDSTYSLSSTLTLSKADYEKHKVYACEVTHQGLSSPVTKSFNRGEC

SEQ ID NO: 28520 - protein, 107 aa, Artificial Sequence
  Description of Artificial Sequence: Synthetic polypeptide
  VL of XENP022572
DIQMTQSPAFLSVTPGEKVTITCQASQDIGNYLNWFQQKPGQTPKLLIYFTSYLHSGVPSRFSGSGSGTDYTFTISSLEAEDAATYFCQEGNTLPYTFGGGTKVEIK

SEQ ID NO: 28521 - protein, 11 aa, Artificial Sequence
  Description of Artificial Sequence: Synthetic peptide
  XENP022572 vlCDR1
QASQDIGNYLN

SEQ ID NO: 28522 - protein, 7 aa, Artificial Sequence
  Description of Artificial Sequence: Synthetic peptide
  XENP022572 vlCDR2
FTSYLHS

SEQ ID NO: 28523 - protein, 9 aa, Artificial Sequence
  Description of Artificial Sequence: Synthetic peptide
  XENP022572 vlCDR3
QEGNTLPYT

SEQ ID NO: 28524 - protein, 223 aa, Artificial Sequence; identical to SEQ ID NO: 27634
  Description of Artificial Sequence: Synthetic polypeptide
  XENP022573 2A11_H1.144_L2.135_Fab Heavy Chain

SEQ ID NO: 28525 - protein, 118 aa, Artificial Sequence; identical to SEQ ID NO: 22085
  Description of Artificial Sequence: Synthetic polypeptide
  VH of XENP022573

SEQ ID NO: 28526 - protein, 5 aa, Artificial Sequence
  Description of Artificial Sequence: Synthetic peptide
  XENP022573 vhCDR1
DYFMH

SEQ ID NO: 28527 - protein, 17 aa, Artificial Sequence
  Description of Artificial Sequence: Synthetic peptide
  XENP022573 vhCDR2
WIDPELGDTEYAPKFQG

SEQ ID NO: 28528 - protein, 9 aa, Artificial Sequence
  Description of Artificial Sequence: Synthetic peptide
  XENP022573 vhCDR3
RGVYQALDY

SEQ ID NO: 28529 - protein, 214 aa, Artificial Sequence
  Description of Artificial Sequence: Synthetic polypeptide
  XENP022573 2A11_H1.144_L2.135_Fab Light Chain
DIQMTQSPAFLSVTPGEKVTITCQASQDIGNYLNWFQQKPGQSPKLLIYFTSYLHSGVPSRFSGSGSGTDYTFTISSLEAEDAATYFCQEGNTLPYTFGGGTKVEIKRTVAAPSVFIFPPSDEQLKSGTASVVCLLNNFYPREAKVQWKVDNALQSGNSQESVTEQDSKDSTYSLSSTLTLSKADYEKHKVYACEVTHQGLSSPVTKSFNRGEC

SEQ ID NO: 28530 - protein, 107 aa, Artificial Sequence
  Description of Artificial Sequence: Synthetic polypeptide
  VL of XENP022573
DIQMTQSPAFLSVTPGEKVTITCQASQDIGNYLNWFQQKPGQSPKLLIYFTSYLHSGVPSRFSGSGSGTDYTFTISSLEAEDAATYFCQEGNTLPYTFGGGTKVEIK

SEQ ID NO: 28531 - protein, 11 aa, Artificial Sequence
  Description of Artificial Sequence: Synthetic peptide
  XENP022573 vlCDR1
QASQDIGNYLN

SEQ ID NO: 28532 - protein, 7 aa, Artificial Sequence
  Description of Artificial Sequence: Synthetic peptide
  XENP022573 vlCDR2
FTSYLHS

SEQ ID NO: 28533 - protein, 9 aa, Artificial Sequence
  Description of Artificial Sequence: Synthetic peptide
  XENP022573 vlCDR3
QEGNTLPYT

SEQ ID NO: 28534 - protein, 223 aa, Artificial Sequence; identical to SEQ ID NO: 27734
  Description of Artificial Sequence: Synthetic polypeptide
  XENP022574 2A11_H1.125_L2.132_Fab Heavy Chain

SEQ ID NO: 28535 - protein, 118 aa, Artificial Sequence; identical to SEQ ID NO: 22065
  Description of Artificial Sequence: Synthetic polypeptide
  VH of XENP022574

SEQ ID NO: 28536 - protein, 5 aa, Artificial Sequence
  Description of Artificial Sequence: Synthetic peptide
  XENP022574 vhCDR1
HYFMH

SEQ ID NO: 28537 - protein, 17 aa, Artificial Sequence
  Description of Artificial Sequence: Synthetic peptide
  XENP022574 vhCDR2
WIDPYLGDTEYAPKFQG

SEQ ID NO: 28538 - protein, 9 aa, Artificial Sequence
  Description of Artificial Sequence: Synthetic peptide
  XENP022574 vhCDR3
RGVYQALDY

SEQ ID NO: 28539 - protein, 214 aa, Artificial Sequence; identical to SEQ ID NO: 22219
  Description of Artificial Sequence: Synthetic polypeptide
  XENP022574 2A11_H1.125_L2.132_Fab Light Chain

SEQ ID NO: 28540 - protein, 107 aa, Artificial Sequence; identical to SEQ ID NO: 22220
  Description of Artificial Sequence: Synthetic polypeptide
  VL of XENP022574

SEQ ID NO: 28541 - protein, 11 aa, Artificial Sequence
  Description of Artificial Sequence: Synthetic peptide
  XENP022574 vlCDR1
QASQDIGNYLN

SEQ ID NO: 28542 - protein, 7 aa, Artificial Sequence
  Description of Artificial Sequence: Synthetic peptide
  XENP022574 vlCDR2
FTSYLHS

SEQ ID NO: 28543 - protein, 9 aa, Artificial Sequence
  Description of Artificial Sequence: Synthetic peptide
  XENP022574 vlCDR3
QEGNTLPYT

SEQ ID NO: 28544 - protein, 223 aa, Artificial Sequence; identical to SEQ ID NO: 27734
  Description of Artificial Sequence: Synthetic polypeptide
  XENP022575 2A11_H1.125_L2.133_Fab Heavy Chain

SEQ ID NO: 28545 - protein, 118 aa, Artificial Sequence; identical to SEQ ID NO: 22065
  Description of Artificial Sequence: Synthetic polypeptide
  VH of XENP022575

SEQ ID NO: 28546 - protein, 5 aa, Artificial Sequence
  Description of Artificial Sequence: Synthetic peptide
  XENP022575 vhCDR1
HYFMH

SEQ ID NO: 28547 - protein, 17 aa, Artificial Sequence
  Description of Artificial Sequence: Synthetic peptide
  XENP022575 vhCDR2
WIDPYLGDTEYAPKFQG

SEQ ID NO: 28548 - protein, 9 aa, Artificial Sequence
  Description of Artificial Sequence: Synthetic peptide
  XENP022575 vhCDR3
RGVYQALDY

SEQ ID NO: 28549 - protein, 214 aa, Artificial Sequence; identical to SEQ ID NO: 22199
  Description of Artificial Sequence: Synthetic polypeptide
  XENP022575 2A11_H1.125_L2.133_Fab Light Chain

SEQ ID NO: 28550 - protein, 107 aa, Artificial Sequence; identical to SEQ ID NO: 22200
  Description of Artificial Sequence: Synthetic polypeptide
  VL of XENP022575

SEQ ID NO: 28551 - protein, 11 aa, Artificial Sequence
  Description of Artificial Sequence: Synthetic peptide
  XENP022575 vlCDR1
QASQDIGNYLN

SEQ ID NO: 28552 - protein, 7 aa, Artificial Sequence
  Description of Artificial Sequence: Synthetic peptide
  XENP022575 vlCDR2
FTSYLHS

SEQ ID NO: 28553 - protein, 9 aa, Artificial Sequence
  Description of Artificial Sequence: Synthetic peptide
  XENP022575 vlCDR3
QEGNTLPYT

SEQ ID NO: 28554 - protein, 223 aa, Artificial Sequence; identical to SEQ ID NO: 27734
  Description of Artificial Sequence: Synthetic polypeptide
  XENP022576 2A11_H1.125_L2.134_Fab Heavy Chain

SEQ ID NO: 28555 - protein, 118 aa, Artificial Sequence; identical to SEQ ID NO: 22065
  Description of Artificial Sequence: Synthetic polypeptide
  VH of XENP022576

SEQ ID NO: 28556 - protein, 5 aa, Artificial Sequence
  Description of Artificial Sequence: Synthetic peptide
  XENP022576 vhCDR1
HYFMH

SEQ ID NO: 28557 - protein, 17 aa, Artificial Sequence
  Description of Artificial Sequence: Synthetic peptide
  XENP022576 vhCDR2
WIDPYLGDTEYAPKFQG

SEQ ID NO: 28558 - protein, 9 aa, Artificial Sequence
  Description of Artificial Sequence: Synthetic peptide
  XENP022576 vhCDR3
RGVYQALDY

SEQ ID NO: 28559 - protein, 214 aa, Artificial Sequence; identical to SEQ ID NO: 28519
  Description of Artificial Sequence: Synthetic polypeptide
  XENP022576 2A11_H1.125_L2.134_Fab Light Chain

SEQ ID NO: 28560 - protein, 107 aa, Artificial Sequence; identical to SEQ ID NO: 28520
  Description of Artificial Sequence: Synthetic polypeptide
  VL of XENP022576

SEQ ID NO: 28561 - protein, 11 aa, Artificial Sequence
  Description of Artificial Sequence: Synthetic peptide
  XENP022576 vlCDR1
QASQDIGNYLN

SEQ ID NO: 28562 - protein, 7 aa, Artificial Sequence
  Description of Artificial Sequence: Synthetic peptide
  XENP022576 vlCDR2
FTSYLHS

SEQ ID NO: 28563 - protein, 9 aa, Artificial Sequence
  Description of Artificial Sequence: Synthetic peptide
  XENP022576 vlCDR3
QEGNTLPYT

SEQ ID NO: 28564 - protein, 223 aa, Artificial Sequence; identical to SEQ ID NO: 27734
  Description of Artificial Sequence: Synthetic polypeptide
  XENP022577 2A11_H1.125_L2.135_Fab Heavy Chain

SEQ ID NO: 28565 - protein, 118 aa, Artificial Sequence; identical to SEQ ID NO: 22065
  Description of Artificial Sequence: Synthetic polypeptide
  VH of XENP022577

SEQ ID NO: 28566 - protein, 5 aa, Artificial Sequence
  Description of Artificial Sequence: Synthetic peptide
  XENP022577 vhCDR1
HYFMH

SEQ ID NO: 28567 - protein, 17 aa, Artificial Sequence
  Description of Artificial Sequence: Synthetic peptide
  XENP022577 vhCDR2
WIDPYLGDTEYAPKFQG

SEQ ID NO: 28568 - protein, 9 aa, Artificial Sequence
  Description of Artificial Sequence: Synthetic peptide
  XENP022577 vhCDR3
RGVYQALDY

SEQ ID NO: 28569 - protein, 214 aa, Artificial Sequence; identical to SEQ ID NO: 28529
  Description of Artificial Sequence: Synthetic polypeptide
  XENP022577 2A11_H1.125_L2.135_Fab Light Chain

SEQ ID NO: 28570 - protein, 107 aa, Artificial Sequence; identical to SEQ ID NO: 28530
  Description of Artificial Sequence: Synthetic polypeptide
  VL of XENP022577

SEQ ID NO: 28571 - protein, 11 aa, Artificial Sequence
  Description of Artificial Sequence: Synthetic peptide
  XENP022577 vlCDR1
QASQDIGNYLN

SEQ ID NO: 28572 - protein, 7 aa, Artificial Sequence
  Description of Artificial Sequence: Synthetic peptide
  XENP022577 vlCDR2
FTSYLHS

SEQ ID NO: 28573 - protein, 9 aa, Artificial Sequence
  Description of Artificial Sequence: Synthetic peptide
  XENP022577 vlCDR3
QEGNTLPYT

SEQ ID NO: 28574 - protein, 223 aa, Artificial Sequence; identical to SEQ ID NO: 27604
  Description of Artificial Sequence: Synthetic polypeptide
  XENP022578 2A11_H1.141_L2.132_Fab Heavy Chain

SEQ ID NO: 28575 - protein, 118 aa, Artificial Sequence; identical to SEQ ID NO: 27605
  Description of Artificial Sequence: Synthetic polypeptide
  VH of XENP022578

SEQ ID NO: 28576 - protein, 5 aa, Artificial Sequence
  Description of Artificial Sequence: Synthetic peptide
  XENP022578 vhCDR1
DYFMH

SEQ ID NO: 28577 - protein, 17 aa, Artificial Sequence
  Description of Artificial Sequence: Synthetic peptide
  XENP022578 vhCDR2
WIDPELGDTEYAPKFQG

SEQ ID NO: 28578 - protein, 9 aa, Artificial Sequence
  Description of Artificial Sequence: Synthetic peptide
  XENP022578 vhCDR3
RGVRQALDY

SEQ ID NO: 28579 - protein, 214 aa, Artificial Sequence; identical to SEQ ID NO: 22219
  Description of Artificial Sequence: Synthetic polypeptide
  XENP022578 2A11_H1.141_L2.132_Fab Light Chain

SEQ ID NO: 28580 - protein, 107 aa, Artificial Sequence; identical to SEQ ID NO: 22220
  Description of Artificial Sequence: Synthetic polypeptide
  VL of XENP022578

SEQ ID NO: 28581 - protein, 11 aa, Artificial Sequence
  Description of Artificial Sequence: Synthetic peptide
  XENP022578 vlCDR1
QASQDIGNYLN

SEQ ID NO: 28582 - protein, 7 aa, Artificial Sequence
  Description of Artificial Sequence: Synthetic peptide
  XENP022578 vlCDR2
FTSYLHS

SEQ ID NO: 28583 - protein, 9 aa, Artificial Sequence
  Description of Artificial Sequence: Synthetic peptide
  XENP022578 vlCDR3
QEGNTLPYT

SEQ ID NO: 28584 - protein, 223 aa, Artificial Sequence; identical to SEQ ID NO: 27604
  Description of Artificial Sequence: Synthetic polypeptide
  XENP022579 2A11_H1.141_L2.133_Fab Heavy Chain

SEQ ID NO: 28585 - protein, 118 aa, Artificial Sequence; identical to SEQ ID NO: 27605
  Description of Artificial Sequence: Synthetic polypeptide
  VH of XENP022579

SEQ ID NO: 28586 - protein, 5 aa, Artificial Sequence
  Description of Artificial Sequence: Synthetic peptide
  XENP022579 vhCDR1
DYFMH

SEQ ID NO: 28587 - protein, 17 aa, Artificial Sequence
  Description of Artificial Sequence: Synthetic peptide
  XENP022579 vhCDR2
WIDPELGDTEYAPKFQG

SEQ ID NO: 28588 - protein, 9 aa, Artificial Sequence
  Description of Artificial Sequence: Synthetic peptide
  XENP022579 vhCDR3
RGVRQALDY

SEQ ID NO: 28589 - protein, 214 aa, Artificial Sequence; identical to SEQ ID NO: 22199
  Description of Artificial Sequence: Synthetic polypeptide
  XENP022579 2A11_H1.141_L2.133_Fab Light Chain

SEQ ID NO: 28590 - protein, 107 aa, Artificial Sequence; identical to SEQ ID NO: 22200
  Description of Artificial Sequence: Synthetic polypeptide
  VL of XENP022579

SEQ ID NO: 28591 - protein, 11 aa, Artificial Sequence
  Description of Artificial Sequence: Synthetic peptide
  XENP022579 vlCDR1
QASQDIGNYLN

SEQ ID NO: 28592 - protein, 7 aa, Artificial Sequence
  Description of Artificial Sequence: Synthetic peptide
  XENP022579 vlCDR2
FTSYLHS

SEQ ID NO: 28593 - protein, 9 aa, Artificial Sequence
  Description of Artificial Sequence: Synthetic peptide
  XENP022579 vlCDR3
QEGNTLPYT

SEQ ID NO: 28594 - protein, 223 aa, Artificial Sequence; identical to SEQ ID NO: 27604
  Description of Artificial Sequence: Synthetic polypeptide
  XENP022580 2A11_H1.141_L2.134_Fab Heavy Chain

SEQ ID NO: 28595 - protein, 118 aa, Artificial Sequence; identical to SEQ ID NO: 27605
  Description of Artificial Sequence: Synthetic polypeptide
  VH of XENP022580

SEQ ID NO: 28596 - protein, 5 aa, Artificial Sequence
  Description of Artificial Sequence: Synthetic peptide
  XENP022580 vhCDR1
DYFMH

SEQ ID NO: 28597 - protein, 17 aa, Artificial Sequence
  Description of Artificial Sequence: Synthetic peptide
  XENP022580 vhCDR2
WIDPELGDTEYAPKFQG

SEQ ID NO: 28598 - protein, 9 aa, Artificial Sequence
  Description of Artificial Sequence: Synthetic peptide
  XENP022580 vhCDR3
RGVRQALDY

SEQ ID NO: 28599 - protein, 214 aa, Artificial Sequence; identical to SEQ ID NO: 28519
  Description of Artificial Sequence: Synthetic polypeptide
  XENP022580 2A11_H1.141_L2.134_Fab Light Chain

SEQ ID NO: 28600 - protein, 107 aa, Artificial Sequence; identical to SEQ ID NO: 28520
  Description of Artificial Sequence: Synthetic polypeptide
  VL of XENP022580

SEQ ID NO: 28601 - protein, 11 aa, Artificial Sequence
  Description of Artificial Sequence: Synthetic peptide
  XENP022580 vlCDR1
QASQDIGNYLN

SEQ ID NO: 28602 - protein, 7 aa, Artificial Sequence
  Description of Artificial Sequence: Synthetic peptide
  XENP022580 vlCDR2
FTSYLHS

SEQ ID NO: 28603 - protein, 9 aa, Artificial Sequence
  Description of Artificial Sequence: Synthetic peptide
  XENP022580 vlCDR3
QEGNTLPYT

SEQ ID NO: 28604 - protein, 223 aa, Artificial Sequence; identical to SEQ ID NO: 27604
  Description of Artificial Sequence: Synthetic polypeptide
  XENP022581 2A11_H1.141_L2.135_Fab Heavy Chain

SEQ ID NO: 28605 - protein, 118 aa, Artificial Sequence; identical to SEQ ID NO: 27605
  Description of Artificial Sequence: Synthetic polypeptide
  VH of XENP022581

SEQ ID NO: 28606 - protein, 5 aa, Artificial Sequence
  Description of Artificial Sequence: Synthetic peptide
  XENP022581 vhCDR1
DYFMH

SEQ ID NO: 28607 - protein, 17 aa, Artificial Sequence
  Description of Artificial Sequence: Synthetic peptide
  XENP022581 vhCDR2
WIDPELGDTEYAPKFQG

SEQ ID NO: 28608 - protein, 9 aa, Artificial Sequence
  Description of Artificial Sequence: Synthetic peptide
  XENP022581 vhCDR3
RGVRQALDY

SEQ ID NO: 28609 - protein, 214 aa, Artificial Sequence; identical to SEQ ID NO: 28529
  Description of Artificial Sequence: Synthetic polypeptide
  XENP022581 2A11_H1.141_L2.135_Fab Light Chain

SEQ ID NO: 28610 - protein, 107 aa, Artificial Sequence; identical to SEQ ID NO: 28530
  Description of Artificial Sequence: Synthetic polypeptide
  VL of XENP022581

SEQ ID NO: 28611 - protein, 11 aa, Artificial Sequence
  Description of Artificial Sequence: Synthetic peptide
  XENP022581 vlCDR1
QASQDIGNYLN

SEQ ID NO: 28612 - protein, 7 aa, Artificial Sequence
  Description of Artificial Sequence: Synthetic peptide
  XENP022581 vlCDR2
FTSYLHS

SEQ ID NO: 28613 - protein, 9 aa, Artificial Sequence
  Description of Artificial Sequence: Synthetic peptide
  XENP022581 vlCDR3
QEGNTLPYT

SEQ ID NO: 28614 - protein, 223 aa, Artificial Sequence; identical to SEQ ID NO: 27634
  Description of Artificial Sequence: Synthetic polypeptide
  XENP022609 2A11_H1.144_L2.136_Fab Heavy Chain

SEQ ID NO: 28615 - protein, 118 aa, Artificial Sequence; identical to SEQ ID NO: 22085
  Description of Artificial Sequence: Synthetic polypeptide
  VH of XENP022609

SEQ ID NO: 28616 - protein, 5 aa, Artificial Sequence
  Description of Artificial Sequence: Synthetic peptide
  XENP022609 vhCDR1
DYFMH

SEQ ID NO: 28617 - protein, 17 aa, Artificial Sequence
  Description of Artificial Sequence: Synthetic peptide
  XENP022609 vhCDR2
WIDPELGDTEYAPKFQG

SEQ ID NO: 28618 - protein, 9 aa, Artificial Sequence
  Description of Artificial Sequence: Synthetic peptide
  XENP022609 vhCDR3
RGVYQALDY

SEQ ID NO: 28619 - protein, 214 aa, Artificial Sequence
  Description of Artificial Sequence: Synthetic polypeptide
  XENP022609 2A11_H1.144_L2.136_Fab Light Chain
DIQMTQSPAFLSVTPGEKVTITCQASQDIGNYLNWFQQKPGKVPKLLIYYTSYLHSGVPSRFSGSGSGTDYTFTISSLEAEDAATYFCQEGNTLPYTFGGGTKVEIKRTVAAPSVFIFPPSDEQLKSGTASVVCLLNNFYPREAKVQWKVDNALQSGNSQESVTEQDSKDSTYSLSSTLTLSKADYEKHKVYACEVTHQGLSSPVTKSFNRGEC

SEQ ID NO: 28620 - protein, 107 aa, Artificial Sequence
  Description of Artificial Sequence: Synthetic polypeptide
  VL of XENP022609
DIQMTQSPAFLSVTPGEKVTITCQASQDIGNYLNWFQQKPGKVPKLLIYYTSYLHSGVPSRFSGSGSGTDYTFTISSLEAEDAATYFCQEGNTLPYTFGGGTKVEIK

SEQ ID NO: 28621 - protein, 11 aa, Artificial Sequence
  Description of Artificial Sequence: Synthetic peptide
  XENP022609 vlCDR1
QASQDIGNYLN

SEQ ID NO: 28622 - protein, 7 aa, Artificial Sequence
  Description of Artificial Sequence: Synthetic peptide
  XENP022609 vlCDR2
YTSYLHS

SEQ ID NO: 28623 - protein, 9 aa, Artificial Sequence
  Description of Artificial Sequence: Synthetic peptide
  XENP022609 vlCDR3
QEGNTLPYT

SEQ ID NO: 28624 - protein, 223 aa, Artificial Sequence; identical to SEQ ID NO: 27734
  Description of Artificial Sequence: Synthetic polypeptide
  XENP022610 2A11_H1.125_L2.136_Fab Heavy Chain

SEQ ID NO: 28625 - protein, 118 aa, Artificial Sequence; identical to SEQ ID NO: 22065
  Description of Artificial Sequence: Synthetic polypeptide
  VH of XENP022610

SEQ ID NO: 28626 - protein, 5 aa, Artificial Sequence
  Description of Artificial Sequence: Synthetic peptide
  XENP022610 vhCDR1
HYFMH

SEQ ID NO: 28627 - protein, 17 aa, Artificial Sequence
  Description of Artificial Sequence: Synthetic peptide
  XENP022610 vhCDR2
WIDPYLGDTEYAPKFQG

SEQ ID NO: 28628 - protein, 9 aa, Artificial Sequence
  Description of Artificial Sequence: Synthetic peptide
  XENP022610 vhCDR3
RGVYQALDY

SEQ ID NO: 28629 - protein, 214 aa, Artificial Sequence; identical to SEQ ID NO: 28619
  Description of Artificial Sequence: Synthetic polypeptide
  XENP022610 2A11_H1.125_L2.136_Fab Light Chain

SEQ ID NO: 28630 - protein, 107 aa, Artificial Sequence; identical to SEQ ID NO: 28620
  Description of Artificial Sequence: Synthetic polypeptide
  VL of XENP022610

SEQ ID NO: 28631 - protein, 11 aa, Artificial Sequence
  Description of Artificial Sequence: Synthetic peptide
  XENP022610 vlCDR1
QASQDIGNYLN

SEQ ID NO: 28632 - protein, 7 aa, Artificial Sequence
  Description of Artificial Sequence: Synthetic peptide
  XENP022610 vlCDR2
YTSYLHS

SEQ ID NO: 28633 - protein, 9 aa, Artificial Sequence
  Description of Artificial Sequence: Synthetic peptide
  XENP022610 vlCDR3
QEGNTLPYT

SEQ ID NO: 28634 - protein, 223 aa, Artificial Sequence; identical to SEQ ID NO: 27604
  Description of Artificial Sequence: Synthetic polypeptide
  XENP022611 2A11_H1.141_L2.136_Fab Heavy Chain

SEQ ID NO: 28635 - protein, 118 aa, Artificial Sequence; identical to SEQ ID NO: 27605
  Description of Artificial Sequence: Synthetic polypeptide
  VH of XENP022611

SEQ ID NO: 28636 - protein, 5 aa, Artificial Sequence
  Description of Artificial Sequence: Synthetic peptide
  XENP022611 vhCDR1
DYFMH

SEQ ID NO: 28637 - protein, 17 aa, Artificial Sequence
  Description of Artificial Sequence: Synthetic peptide
  XENP022611 vhCDR2
WIDPELGDTEYAPKFQG

SEQ ID NO: 28638 - protein, 9 aa, Artificial Sequence
  Description of Artificial Sequence: Synthetic peptide
  XENP022611 vhCDR3
RGVRQALDY

SEQ ID NO: 28639 - protein, 214 aa, Artificial Sequence; identical to SEQ ID NO: 28619
  Description of Artificial Sequence: Synthetic polypeptide
  XENP022611 2A11_H1.141_L2.136_Fab Light Chain

SEQ ID NO: 28640 - protein, 107 aa, Artificial Sequence; identical to SEQ ID NO: 28620
  Description of Artificial Sequence: Synthetic polypeptide
  VL of XENP022611

SEQ ID NO: 28641 - protein, 11 aa, Artificial Sequence
  Description of Artificial Sequence: Synthetic peptide
  XENP022611 vlCDR1
QASQDIGNYLN

SEQ ID NO: 28642 - protein, 7 aa, Artificial Sequence
  Description of Artificial Sequence: Synthetic peptide
  XENP022611 vlCDR2
YTSYLHS

SEQ ID NO: 28643 - protein, 9 aa, Artificial Sequence
  Description of Artificial Sequence: Synthetic peptide
  XENP022611 vlCDR3
QEGNTLPYT

SEQ ID NO: 28644 - protein, 223 aa, Artificial Sequence; identical to SEQ ID NO: 27634
  Description of Artificial Sequence: Synthetic polypeptide
  XENP022612 2A11_H1.144_L2.137_Fab Heavy Chain

SEQ ID NO: 28645 - protein, 118 aa, Artificial Sequence; identical to SEQ ID NO: 22085
  Description of Artificial Sequence: Synthetic polypeptide
  VH of XENP022612

SEQ ID NO: 28646 - protein, 5 aa, Artificial Sequence
  Description of Artificial Sequence: Synthetic peptide
  XENP022612 vhCDR1
DYFMH

SEQ ID NO: 28647 - protein, 17 aa, Artificial Sequence
  Description of Artificial Sequence: Synthetic peptide
  XENP022612 vhCDR2
WIDPELGDTEYAPKFQG

SEQ ID NO: 28648 - protein, 9 aa, Artificial Sequence
  Description of Artificial Sequence: Synthetic peptide
  XENP022612 vhCDR3
RGVYQALDY

SEQ ID NO: 28649 - protein, 214 aa, Artificial Sequence; identical to SEQ ID NO: 22239
  Description of Artificial Sequence: Synthetic polypeptide
  XENP022612 2A11_H1.144_L2.137_Fab Light Chain

SEQ ID NO: 28650 - protein, 107 aa, Artificial Sequence; identical to SEQ ID NO: 22240
  Description of Artificial Sequence: Synthetic polypeptide
  VL of XENP022612

SEQ ID NO: 28651 - protein, 11 aa, Artificial Sequence
  Description of Artificial Sequence: Synthetic peptide
  XENP022612 vlCDR1
QASQDIGNYLN

SEQ ID NO: 28652 - protein, 7 aa, Artificial Sequence
  Description of Artificial Sequence: Synthetic peptide
  XENP022612 vlCDR2
FTSYLHS

SEQ ID NO: 28653 - protein, 9 aa, Artificial Sequence
  Description of Artificial Sequence: Synthetic peptide
  XENP022612 vlCDR3
QEGNTLPYT

SEQ ID NO: 28654 - protein, 223 aa, Artificial Sequence; identical to SEQ ID NO: 27734
  Description of Artificial Sequence: Synthetic polypeptide
  XENP022613 2A11_H1.125_L2.137_Fab Heavy Chain

SEQ ID NO: 28655 - protein, 118 aa, Artificial Sequence; identical to SEQ ID NO: 22065
  Description of Artificial Sequence: Synthetic polypeptide
  VH of XENP022613

SEQ ID NO: 28656 - protein, 5 aa, Artificial Sequence
  Description of Artificial Sequence: Synthetic peptide
  XENP022613 vhCDR1
HYFMH

SEQ ID NO: 28657 - protein, 17 aa, Artificial Sequence
  Description of Artificial Sequence: Synthetic peptide
  XENP022613 vhCDR2
WIDPYLGDTEYAPKFQG

SEQ ID NO: 28658 - protein, 9 aa, Artificial Sequence
  Description of Artificial Sequence: Synthetic peptide
  XENP022613 vhCDR3
RGVYQALDY

SEQ ID NO: 28659 - protein, 214 aa, Artificial Sequence; identical to SEQ ID NO: 22239
  Description of Artificial Sequence: Synthetic polypeptide
  XENP022613 2A11_H1.125_L2.137_Fab Light Chain

SEQ ID NO: 28660 - protein, 107 aa, Artificial Sequence; identical to SEQ ID NO: 22240
  Description of Artificial Sequence: Synthetic polypeptide
  VL of XENP022613

SEQ ID NO: 28661 - protein, 11 aa, Artificial Sequence
  Description of Artificial Sequence: Synthetic peptide
  XENP022613 vlCDR1
QASQDIGNYLN

SEQ ID NO: 28662 - protein, 7 aa, Artificial Sequence
  Description of Artificial Sequence: Synthetic peptide
  XENP022613 vlCDR2
FTSYLHS

SEQ ID NO: 28663 - protein, 9 aa, Artificial Sequence
  Description of Artificial Sequence: Synthetic peptide
  XENP022613 vlCDR3
QEGNTLPYT

SEQ ID NO: 28664 - protein, 223 aa, Artificial Sequence; identical to SEQ ID NO: 27604
  Description of Artificial Sequence: Synthetic polypeptide
  XENP022614 2A11_H1.141_L2.137_Fab Heavy Chain

SEQ ID NO: 28665 - protein, 118 aa, Artificial Sequence; identical to SEQ ID NO: 27605
  Description of Artificial Sequence: Synthetic polypeptide
  VH of XENP022614

SEQ ID NO: 28666 - protein, 5 aa, Artificial Sequence
  Description of Artificial Sequence: Synthetic peptide
  XENP022614 vhCDR1
DYFMH

SEQ ID NO: 28667 - protein, 17 aa, Artificial Sequence
  Description of Artificial Sequence: Synthetic peptide
  XENP022614 vhCDR2
WIDPELGDTEYAPKFQG

SEQ ID NO: 28668 - protein, 9 aa, Artificial Sequence
  Description of Artificial Sequence: Synthetic peptide
  XENP022614 vhCDR3
RGVRQALDY

SEQ ID NO: 28669 - protein, 214 aa, Artificial Sequence; identical to SEQ ID NO: 22239
  Description of Artificial Sequence: Synthetic polypeptide
  XENP022614 2A11_H1.141_L2.137_Fab Light Chain

SEQ ID NO: 28670 - protein, 107 aa, Artificial Sequence; identical to SEQ ID NO: 22240
  Description of Artificial Sequence: Synthetic polypeptide
  VL of XENP022614

SEQ ID NO: 28671 - protein, 11 aa, Artificial Sequence
  Description of Artificial Sequence: Synthetic peptide
  XENP022614 vlCDR1
QASQDIGNYLN

SEQ ID NO: 28672 - protein, 7 aa, Artificial Sequence
  Description of Artificial Sequence: Synthetic peptide
  XENP022614 vlCDR2
FTSYLHS

SEQ ID NO: 28673 - protein, 9 aa, Artificial Sequence
  Description of Artificial Sequence: Synthetic peptide
  XENP022614 vlCDR3
QEGNTLPYT

SEQ ID NO: 28674 - protein, 223 aa, Artificial Sequence; identical to SEQ ID NO: 27634
  Description of Artificial Sequence: Synthetic polypeptide
  XENP022615 2A11_H1.144_L2.126_Fab Heavy Chain

SEQ ID NO: 28675 - protein, 118 aa, Artificial Sequence; identical to SEQ ID NO: 22085
  Description of Artificial Sequence: Synthetic polypeptide
  VH of XENP022615

SEQ ID NO: 28676 - protein, 5 aa, Artificial Sequence
  Description of Artificial Sequence: Synthetic peptide
  XENP022615 vhCDR1
DYFMH

SEQ ID NO: 28677 - protein, 17 aa, Artificial Sequence
  Description of Artificial Sequence: Synthetic peptide
  XENP022615 vhCDR2
WIDPELGDTEYAPKFQG

SEQ ID NO: 28678 - protein, 9 aa, Artificial Sequence
  Description of Artificial Sequence: Synthetic peptide
  XENP022615 vhCDR3
RGVYQALDY

SEQ ID NO: 28679 - protein, 214 aa, Artificial Sequence; identical to SEQ ID NO: 22259
  Description of Artificial Sequence: Synthetic polypeptide
  XENP022615 2A11_H1.144_L2.126_Fab Light Chain

SEQ ID NO: 28680 - protein, 107 aa, Artificial Sequence; identical to SEQ ID NO: 22260
  Description of Artificial Sequence: Synthetic polypeptide
  VL of XENP022615

SEQ ID NO: 28681 - protein, 11 aa, Artificial Sequence
  Description of Artificial Sequence: Synthetic peptide
  XENP022615 vlCDR1
QASQDIGNYLN

SEQ ID NO: 28682 - protein, 7 aa, Artificial Sequence
  Description of Artificial Sequence: Synthetic peptide
  XENP022615 vlCDR2
FTSYLHS

SEQ ID NO: 28683 - protein, 9 aa, Artificial Sequence
  Description of Artificial Sequence: Synthetic peptide
  XENP022615 vlCDR3
QEGNTLPYT

SEQ ID NO: 28684 - protein, 223 aa, Artificial Sequence; identical to SEQ ID NO: 27634
  Description of Artificial Sequence: Synthetic polypeptide
  XENP022616 2A11_H1.144_L2.91_Fab Heavy Chain

SEQ ID NO: 28685 - protein, 118 aa, Artificial Sequence; identical to SEQ ID NO: 22085
  Description of Artificial Sequence: Synthetic polypeptide
  VH of XENP022616

SEQ ID NO: 28686 - protein, 5 aa, Artificial Sequence
  Description of Artificial Sequence: Synthetic peptide
  XENP022616 vhCDR1
DYFMH

SEQ ID NO: 28687 - protein, 17 aa, Artificial Sequence
  Description of Artificial Sequence: Synthetic peptide
  XENP022616 vhCDR2
WIDPELGDTEYAPKFQG

SEQ ID NO: 28688 - protein, 9 aa, Artificial Sequence
  Description of Artificial Sequence: Synthetic peptide
  XENP022616 vhCDR3
RGVYQALDY

SEQ ID NO: 28689 - protein, 321 aa, Artificial Sequence
  Description of Artificial Sequence: Synthetic polypeptide
  XENP022616 2A11_H1.144_L2.91_Fab Light Chain
DIQMTQSPAFLSVTPGEKVTITCQASQDIGNYLNWFQQKPGQTVKLLIYYTSRLHSGVPSRFSGSGSGTDYTFTISSLEAEDAATYFCQQGNTLPYTFGGGTKVEIKDIQMTQSPAFLSVTPGEKVTITCQASQDIGNYLNWYQQKPDQTVKLLIYYTSRLHSGVPSRFSGSGSGTDYTFTISSLEAEDAATYFCQQGNTLPYTFGGGTKVEIKRTVAAPSVFIFPPSDEQLKSGTASVVCLLNNFYPREAKVQWKVDNALQSGNSQESVTEQDSKDSTYSLSSTLTLSKADYEKHKVYACEVTHQGLSSPVTKSFNRGEC

SEQ ID NO: 28690 - protein, 214 aa, Artificial Sequence
  Description of Artificial Sequence: Synthetic polypeptide
  VL of XENP022616
DIQMTQSPAFLSVTPGEKVTITCQASQDIGNYLNWFQQKPGQTVKLLIYYTSRLHSGVPSRFSGSGSGTDYTFTISSLEAEDAATYFCQQGNTLPYTFGGGTKVEIKDIQMTQSPAFLSVTPGEKVTITCQASQDIGNYLNWYQQKPDQTVKLLIYYTSRLHSGVPSRFSGSGSGTDYTFTISSLEAEDAATYFCQQGNTLPYTFGGGTKVEIK

SEQ ID NO: 28691 - protein, 11 aa, Artificial Sequence
  Description of Artificial Sequence: Synthetic peptide
  XENP022616 vlCDR1
QASQDIGNYLN

SEQ ID NO: 28692 - protein, 7 aa, Artificial Sequence
  Description of Artificial Sequence: Synthetic peptide
  XENP022616 vlCDR2
YTSRLHS

SEQ ID NO: 28693 - protein, 9 aa, Artificial Sequence
  Description of Artificial Sequence: Synthetic peptide
  XENP022616 vlCDR3
QQGNTLPYT

SEQ ID NO: 28694 - protein, 223 aa, Artificial Sequence; identical to SEQ ID NO: 27634
  Description of Artificial Sequence: Synthetic polypeptide
  XENP022617 2A11_H1.144_L2.93_Fab Heavy Chain

SEQ ID NO: 28695 - protein, 118 aa, Artificial Sequence; identical to SEQ ID NO: 22085
  Description of Artificial Sequence: Synthetic polypeptide
  VH of XENP022617

SEQ ID NO: 28696 - protein, 5 aa, Artificial Sequence
  Description of Artificial Sequence: Synthetic peptide
  XENP022617 vhCDR1
DYFMH

SEQ ID NO: 28697 - protein, 17 aa, Artificial Sequence
  Description of Artificial Sequence: Synthetic peptide
  XENP022617 vhCDR2
WIDPELGDTEYAPKFQG

SEQ ID NO: 28698 - protein, 9 aa, Artificial Sequence
  Description of Artificial Sequence: Synthetic peptide
  XENP022617 vhCDR3
RGVYQALDY

SEQ ID NO: 28699 - protein, 535 aa, Artificial Sequence
  Description of Artificial Sequence: Synthetic polypeptide
  XENP022617 2A11_H1.144_L2.93_Fab Light Chain
DIQMTQSPAFLSVTPGEKVTITCQASQDIGNYLNWFQQKPDQTPKLLIYYTSRLHSGVPSRFSGSGSGTDYTFTISSLEAEDAATYFCQQGNTLPYTFGGGTKVEIKDIQMTQSPAFLSVTPGEKVTITCQASQDIGNYLNWFQQKPDQSVKLLIYYTSRLHSGVPSRFSGSGSGTDYTFTISSLEAEDAATYFCQQGNTLPYTFGGGTKVEIKDIQMTQSPAFLSVTPGEKVTITCQASQDIGNYLNWFQQKPGQTVKLLIYYTSRLHSGVPSRFSGSGSGTDYTFTISSLEAEDAATYFCQQGNTLPYTFGGGTKVEIKDIQMTQSPAFLSVTPGEKVTITCQASQDIGNYLNWYQQKPDQTVKLLIYYTSRLHSGVPSRFSGSGSGTDYTFTISSLEAEDAATYFCQQGNTLPYTFGGGTKVEIKRTVAAPSVFIFPPSDEQLKSGTASVVCLLNNFYPREAKVQWKVDNALQSGNSQESVTEQDSKDSTYSLSSTLTLSKADYEKHKVYACEVTHQGLSSPVTKSFNRGEC

SEQ ID NO: 28700 - protein, 428 aa, Artificial Sequence
  Description of Artificial Sequence: Synthetic polypeptide
  VL of XENP022617
DIQMTQSPAFLSVTPGEKVTITCQASQDIGNYLNWFQQKPDQTPKLLIYYTSRLHSGVPSRFSGSGSGTDYTFTISSLEAEDAATYFCQQGNTLPYTFGGGTKVEIKDIQMTQSPAFLSVTPGEKVTITCQASQDIGNYLNWFQQKPDQSVKLLIYYTSRLHSGVPSRFSGSGSGTDYTFTISSLEAEDAATYFCQQGNTLPYTFGGGTKVEIKDIQMTQSPAFLSVTPGEKVTITCQASQDIGNYLNWFQQKPGQTVKLLIYYTSRLHSGVPSRFSGSGSGTDYTFTISSLEAEDAATYFCQQGNTLPYTFGGGTKVEIKDIQMTQSPAFLSVTPGEKVTITCQASQDIGNYLNWYQQKPDQTVKLLIYYTSRLHSGVPSRFSGSGSGTDYTFTISSLEAEDAATYFCQQGNTLPYTFGGGTKVEIK

SEQ ID NO: 28701 - protein, 11 aa, Artificial Sequence
  Description of Artificial Sequence: Synthetic peptide
  XENP022617 vlCDR1
QASQDIGNYLN

SEQ ID NO: 28702 - protein, 7 aa, Artificial Sequence
  Description of Artificial Sequence: Synthetic peptide
  XENP022617 vlCDR2
YTSRLHS

SEQ ID NO: 28703 - protein, 9 aa, Artificial Sequence
  Description of Artificial Sequence: Synthetic peptide
  XENP022617 vlCDR3
QQGNTLPYT

SEQ ID NO: 28704 - protein, 223 aa, Artificial Sequence; identical to SEQ ID NO: 27634
  Description of Artificial Sequence: Synthetic polypeptide
  XENP022618 2A11_H1.144_L2.122_Fab Heavy Chain

SEQ ID NO: 28705 - protein, 118 aa, Artificial Sequence; identical to SEQ ID NO: 22085
  Description of Artificial Sequence: Synthetic polypeptide
  VH of XENP022618

SEQ ID NO: 28706 - protein, 5 aa, Artificial Sequence
  Description of Artificial Sequence: Synthetic peptide
  XENP022618 vhCDR1
DYFMH

SEQ ID NO: 28707 - protein, 17 aa, Artificial Sequence
  Description of Artificial Sequence: Synthetic peptide
  XENP022618 vhCDR2
WIDPELGDTEYAPKFQG

SEQ ID NO: 28708 - protein, 9 aa, Artificial Sequence
  Description of Artificial Sequence: Synthetic peptide
  XENP022618 vhCDR3
RGVYQALDY

SEQ ID NO: 28709 - protein, 214 aa, Artificial Sequence; identical to SEQ ID NO: 24690
  Description of Artificial Sequence: Synthetic polypeptide
  XENP022618 2A11_H1.144_L2.122_Fab Light Chain

SEQ ID NO: 28710 - protein, 107 aa, Artificial Sequence; identical to SEQ ID NO: 24691
  Description of Artificial Sequence: Synthetic polypeptide
  VL of XENP022618

SEQ ID NO: 28711 - protein, 11 aa, Artificial Sequence
  Description of Artificial Sequence: Synthetic peptide
  XENP022618 vlCDR1
QASQDIGNYLN

SEQ ID NO: 28712 - protein, 7 aa, Artificial Sequence
  Description of Artificial Sequence: Synthetic peptide
  XENP022618 vlCDR2
YTSRLHS

SEQ ID NO: 28713 - protein, 9 aa, Artificial Sequence
  Description of Artificial Sequence: Synthetic peptide
  XENP022618 vlCDR3
QQGNTLPYT

SEQ ID NO: 28714 - protein, 223 aa, Artificial Sequence; identical to SEQ ID NO: 27634
  Description of Artificial Sequence: Synthetic polypeptide
  XENP022619 2A11_H1.144_L2.124_Fab Heavy Chain

SEQ ID NO: 28715 - protein, 118 aa, Artificial Sequence; identical to SEQ ID NO: 22085
  Description of Artificial Sequence: Synthetic polypeptide
  VH of XENP022619

SEQ ID NO: 28716 - protein, 5 aa, Artificial Sequence
  Description of Artificial Sequence: Synthetic peptide
  XENP022619 vhCDR1
DYFMH

SEQ ID NO: 28717 - protein, 17 aa, Artificial Sequence
  Description of Artificial Sequence: Synthetic peptide
  XENP022619 vhCDR2
WIDPELGDTEYAPKFQG

SEQ ID NO: 28718 - protein, 9 aa, Artificial Sequence
  Description of Artificial Sequence: Synthetic peptide
  XENP022619 vhCDR3
RGVYQALDY

SEQ ID NO: 28719 - protein, 214 aa, Artificial Sequence; identical to SEQ ID NO: 24730
  Description of Artificial Sequence: Synthetic polypeptide
  XENP022619 2A11_H1.144_L2.124_Fab Light Chain

SEQ ID NO: 28720 - protein, 107 aa, Artificial Sequence; identical to SEQ ID NO: 24731
  Description of Artificial Sequence: Synthetic polypeptide
  VL of XENP022619

SEQ ID NO: 28721 - protein, 11 aa, Artificial Sequence
  Description of Artificial Sequence: Synthetic peptide
  XENP022619 vlCDR1
QASQDIGNYLN

SEQ ID NO: 28722 - protein, 7 aa, Artificial Sequence
  Description of Artificial Sequence: Synthetic peptide
  XENP022619 vlCDR2
YTSRLHS

SEQ ID NO: 28723 - protein, 9 aa, Artificial Sequence
  Description of Artificial Sequence: Synthetic peptide
  XENP022619 vlCDR3
QQGNTLPYT

SEQ ID NO: 28724 - protein, 223 aa, Artificial Sequence; identical to SEQ ID NO: 27734
  Description of Artificial Sequence: Synthetic polypeptide
  XENP022620 2A11_H1.125_L2.126_Fab Heavy Chain

SEQ ID NO: 28725 - protein, 118 aa, Artificial Sequence; identical to SEQ ID NO: 22065
  Description of Artificial Sequence: Synthetic polypeptide
  VH of XENP022620

SEQ ID NO: 28726 - protein, 5 aa, Artificial Sequence
  Description of Artificial Sequence: Synthetic peptide
  XENP022620 vhCDR1
HYFMH

SEQ ID NO: 28727 - protein, 17 aa, Artificial Sequence
  Description of Artificial Sequence: Synthetic peptide
  XENP022620 vhCDR2
WIDPYLGDTEYAPKFQG

SEQ ID NO: 28728 - protein, 9 aa, Artificial Sequence
  Description of Artificial Sequence: Synthetic peptide
  XENP022620 vhCDR3
RGVYQALDY

SEQ ID NO: 28729 - protein, 214 aa, Artificial Sequence; identical to SEQ ID NO: 22259
  Description of Artificial Sequence: Synthetic polypeptide
  XENP022620 2A11_H1.125_L2.126_Fab Light Chain

SEQ ID NO: 28730 - protein, 107 aa, Artificial Sequence; identical to SEQ ID NO: 22260
  Description of Artificial Sequence: Synthetic polypeptide
  VL of XENP022620

SEQ ID NO: 28731 - protein, 11 aa, Artificial Sequence
  Description of Artificial Sequence: Synthetic peptide
  XENP022620 vlCDR1
QASQDIGNYLN

SEQ ID NO: 28732 - protein, 7 aa, Artificial Sequence
  Description of Artificial Sequence: Synthetic peptide
  XENP022620 vlCDR2
FTSYLHS

SEQ ID NO: 28733 - protein, 9 aa, Artificial Sequence
  Description of Artificial Sequence: Synthetic peptide
  XENP022620 vlCDR3
QEGNTLPYT

SEQ ID NO: 28734 - protein, 223 aa, Artificial Sequence; identical to SEQ ID NO: 27734
  Description of Artificial Sequence: Synthetic polypeptide
  XENP022621 2A11_H1.125_L2.91_Fab Heavy Chain

SEQ ID NO: 28735 - protein, 118 aa, Artificial Sequence; identical to SEQ ID NO: 22065
  Description of Artificial Sequence: Synthetic polypeptide
  VH of XENP022621

SEQ ID NO: 28736 - protein, 5 aa, Artificial Sequence
  Description of Artificial Sequence: Synthetic peptide
  XENP022621 vhCDR1
HYFMH

SEQ ID NO: 28737 - protein, 17 aa, Artificial Sequence
  Description of Artificial Sequence: Synthetic peptide
  XENP022621 vhCDR2
WIDPYLGDTEYAPKFQG

SEQ ID NO: 28738 - protein, 9 aa, Artificial Sequence
  Description of Artificial Sequence: Synthetic peptide
  XENP022621 vhCDR3
RGVYQALDY

SEQ ID NO: 28739 - protein, 321 aa, Artificial Sequence; identical to SEQ ID NO: 28689
  Description of Artificial Sequence: Synthetic polypeptide
  XENP022621 2A11_H1.125_L2.91_Fab Light Chain

SEQ ID NO: 28740 - protein, 214 aa, Artificial Sequence; identical to SEQ ID NO: 28690
  Description of Artificial Sequence: Synthetic polypeptide
  VL of XENP022621

SEQ ID NO: 28741 - protein, 11 aa, Artificial Sequence
  Description of Artificial Sequence: Synthetic peptide
  XENP022621 vlCDR1
QASQDIGNYLN

SEQ ID NO: 28742 - protein, 7 aa, Artificial Sequence
  Description of Artificial Sequence: Synthetic peptide
  XENP022621 vlCDR2
YTSRLHS

SEQ ID NO: 28743 - protein, 9 aa, Artificial Sequence
  Description of Artificial Sequence: Synthetic peptide
  XENP022621 vlCDR3
QQGNTLPYT

SEQ ID NO: 28744 - protein, 223 aa, Artificial Sequence; identical to SEQ ID NO: 27734
  Description of Artificial Sequence: Synthetic polypeptide
  XENP022622 2A11_H1.125_L2.93_Fab Heavy Chain

SEQ ID NO: 28745 - protein, 118 aa, Artificial Sequence; identical to SEQ ID NO: 22065
  Description of Artificial Sequence: Synthetic polypeptide
  VH of XENP022622

SEQ ID NO: 28746 - protein, 5 aa, Artificial Sequence
  Description of Artificial Sequence: Synthetic peptide
  XENP022622 vhCDR1
HYFMH

SEQ ID NO: 28747 - protein, 17 aa, Artificial Sequence
  Description of Artificial Sequence: Synthetic peptide
  XENP022622 vhCDR2
WIDPYLGDTEYAPKFQG

SEQ ID NO: 28748 - protein, 9 aa, Artificial Sequence
  Description of Artificial Sequence: Synthetic peptide
  XENP022622 vhCDR3
RGVYQALDY

SEQ ID NO: 28749 - protein, 535 aa, Artificial Sequence; identical to SEQ ID NO: 28699
  Description of Artificial Sequence: Synthetic polypeptide
  XENP022622 2A11_H1.125_L2.93_Fab Light Chain

SEQ ID NO: 28750 - protein, 428 aa, Artificial Sequence; identical to SEQ ID NO: 28700
  Description of Artificial Sequence: Synthetic polypeptide
  VL of XENP022622

SEQ ID NO: 28751 - protein, 11 aa, Artificial Sequence
  Description of Artificial Sequence: Synthetic peptide
  XENP022622 vlCDR1
QASQDIGNYLN

SEQ ID NO: 28752 - protein, 7 aa, Artificial Sequence
  Description of Artificial Sequence: Synthetic peptide
  XENP022622 vlCDR2
YTSRLHS

SEQ ID NO: 28753 - protein, 9 aa, Artificial Sequence
  Description of Artificial Sequence: Synthetic peptide
  XENP022622 vlCDR3
QQGNTLPYT

SEQ ID NO: 28754 - protein, 223 aa, Artificial Sequence; identical to SEQ ID NO: 27734
  Description of Artificial Sequence: Synthetic polypeptide
  XENP022623 2A11_H1.125_L2.122_Fab Heavy Chain

SEQ ID NO: 28755 - protein, 118 aa, Artificial Sequence; identical to SEQ ID NO: 22065
  Description of Artificial Sequence: Synthetic polypeptide
  VH of XENP022623

SEQ ID NO: 28756 - protein, 5 aa, Artificial Sequence
  Description of Artificial Sequence: Synthetic peptide
  XENP022623 vhCDR1
HYFMH

SEQ ID NO: 28757 - protein, 17 aa, Artificial Sequence
  Description of Artificial Sequence: Synthetic peptide
  XENP022623 vhCDR2
WIDPYLGDTEYAPKFQG

SEQ ID NO: 28758 - protein, 9 aa, Artificial Sequence
  Description of Artificial Sequence: Synthetic peptide
  XENP022623 vhCDR3
RGVYQALDY

SEQ ID NO: 28759 - protein, 214 aa, Artificial Sequence; identical to SEQ ID NO: 24690
  Description of Artificial Sequence: Synthetic polypeptide
  XENP022623 2A11_H1.125_L2.122_Fab Light Chain

SEQ ID NO: 28760 - protein, 107 aa, Artificial Sequence; identical to SEQ ID NO: 24691
  Description of Artificial Sequence: Synthetic polypeptide
  VL of XENP022623

SEQ ID NO: 28761 - protein, 11 aa, Artificial Sequence
  Description of Artificial Sequence: Synthetic peptide
  XENP022623 vlCDR1
QASQDIGNYLN

SEQ ID NO: 28762 - protein, 7 aa, Artificial Sequence
  Description of Artificial Sequence: Synthetic peptide
  XENP022623 vlCDR2
YTSRLHS

SEQ ID NO: 28763 - protein, 9 aa, Artificial Sequence
  Description of Artificial Sequence: Synthetic peptide
  XENP022623 vlCDR3
QQGNTLPYT

SEQ ID NO: 28764 - protein, 223 aa, Artificial Sequence; identical to SEQ ID NO: 27734
  Description of Artificial Sequence: Synthetic polypeptide
  XENP022624 2A11_H1.125_L2.124_Fab Heavy Chain

SEQ ID NO: 28765 - protein, 118 aa, Artificial Sequence; identical to SEQ ID NO: 22065
  Description of Artificial Sequence: Synthetic polypeptide
  VH of XENP022624

SEQ ID NO: 28766 - protein, 5 aa, Artificial Sequence
  Description of Artificial Sequence: Synthetic peptide
  XENP022624 vhCDR1
HYFMH

SEQ ID NO: 28767 - protein, 17 aa, Artificial Sequence
  Description of Artificial Sequence: Synthetic peptide
  XENP022624 vhCDR2
WIDPYLGDTEYAPKFQG

SEQ ID NO: 28768 - protein, 9 aa, Artificial Sequence
  Description of Artificial Sequence: Synthetic peptide
  XENP022624 vhCDR3
RGVYQALDY

SEQ ID NO: 28769 - protein, 214 aa, Artificial Sequence; identical to SEQ ID NO: 24730
  Description of Artificial Sequence: Synthetic polypeptide
  XENP022624 2A11_H1.125_L2.124_Fab Light Chain

SEQ ID NO: 28770 - protein, 107 aa, Artificial Sequence; identical to SEQ ID NO: 24731
  Description of Artificial Sequence: Synthetic polypeptide
  VL of XENP022624

SEQ ID NO: 28771 - protein, 11 aa, Artificial Sequence
  Description of Artificial Sequence: Synthetic peptide
  XENP022624 vlCDR1
QASQDIGNYLN

SEQ ID NO: 28772 - protein, 7 aa, Artificial Sequence
  Description of Artificial Sequence: Synthetic peptide
  XENP022624 vlCDR2
YTSRLHS

SEQ ID NO: 28773 - protein, 9 aa, Artificial Sequence
  Description of Artificial Sequence: Synthetic peptide
  XENP022624 vlCDR3
QQGNTLPYT

SEQ ID NO: 28774 - protein, 223 aa, Artificial Sequence; identical to SEQ ID NO: 27634
  Description of Artificial Sequence: Synthetic polypeptide
  XENP022652 2A11_H1.144_L2.138_Fab Heavy Chain

SEQ ID NO: 28775 - protein, 118 aa, Artificial Sequence; identical to SEQ ID NO: 22085
  Description of Artificial Sequence: Synthetic polypeptide
  VH of XENP022652

SEQ ID NO: 28776 - protein, 5 aa, Artificial Sequence
  Description of Artificial Sequence: Synthetic peptide
  XENP022652 vhCDR1
DYFMH

SEQ ID NO: 28777 - protein, 17 aa, Artificial Sequence
  Description of Artificial Sequence: Synthetic peptide
  XENP022652 vhCDR2
WIDPELGDTEYAPKFQG

SEQ ID NO: 28778 - protein, 9 aa, Artificial Sequence
  Description of Artificial Sequence: Synthetic peptide
  XENP022652 vhCDR3
RGVYQALDY

SEQ ID NO: 28779 - protein, 214 aa, Artificial Sequence
  Description of Artificial Sequence: Synthetic polypeptide
  XENP022652 2A11_H1.144_L2.138_Fab Light Chain
DIQMTQSPAFLSVTPGEKVTITCQASQDIGNYLNWFQQKPGQTVKLLIYYTSYLHSGVPSRFSGSGSGTDYTFTISSLEAEDAATYFCQQGNTLPYTFGGGTKVEIKRTVAAPSVFIFPPSDEQLKSGTASVVCLLNNFYPREAKVQWKVDNALQSGNSQESVTEQDSKDSTYSLSSTLTLSKADYEKHKVYACEVTHQGLSSPVTKSFNRGEC

SEQ ID NO: 28780 - protein, 107 aa, Artificial Sequence
  Description of Artificial Sequence: Synthetic polypeptide
  VL of XENP022652
DIQMTQSPAFLSVTPGEKVTITCQASQDIGNYLNWFQQKPGQTVKLLIYYTSYLHSGVPSRFSGSGSGTDYTFTISSLEAEDAATYFCQQGNTLPYTFGGGTKVEIK

SEQ ID NO: 28781 - protein, 11 aa, Artificial Sequence
  Description of Artificial Sequence: Synthetic peptide
  XENP022652 vlCDR1
QASQDIGNYLN

SEQ ID NO: 28782 - protein, 7 aa, Artificial Sequence
  Description of Artificial Sequence: Synthetic peptide
  XENP022652 vlCDR2
YTSYLHS

SEQ ID NO: 28783 - protein, 9 aa, Artificial Sequence
  Description of Artificial Sequence: Synthetic peptide
  XENP022652 vlCDR3
QQGNTLPYT

SEQ ID NO: 28784 - protein, 223 aa, Artificial Sequence; identical to SEQ ID NO: 27634
  Description of Artificial Sequence: Synthetic polypeptide
  XENP022653 2A11_H1.144_L2.139_Fab Heavy Chain

SEQ ID NO: 28785 - protein, 118 aa, Artificial Sequence; identical to SEQ ID NO: 22085
  Description of Artificial Sequence: Synthetic polypeptide
  VH of XENP022653

SEQ ID NO: 28786 - protein, 5 aa, Artificial Sequence
  Description of Artificial Sequence: Synthetic peptide
  XENP022653 vhCDR1
DYFMH

SEQ ID NO: 28787 - protein, 17 aa, Artificial Sequence
  Description of Artificial Sequence: Synthetic peptide
  XENP022653 vhCDR2
WIDPELGDTEYAPKFQG

SEQ ID NO: 28788 - protein, 9 aa, Artificial Sequence
  Description of Artificial Sequence: Synthetic peptide
  XENP022653 vhCDR3
RGVYQALDY

SEQ ID NO: 28789 - protein, 214 aa, Artificial Sequence
  Description of Artificial Sequence: Synthetic polypeptide
  XENP022653 2A11_H1.144_L2.139_Fab Light Chain
DIQMTQSPAFLSVTPGEKVTITCQASQDIGNYLNWFQQKPDQTPKLLIYYTSYLHSGVPSRFSGSGSGTDYTFTISSLEAEDAATYFCQQGNTLPYTFGGGTKVEIKRTVAAPSVFIFPPSDEQLKSGTASVVCLLNNFYPREAKVQWKVDNALQSGNSQESVTEQDSKDSTYSLSSTLTLSKADYEKHKVYACEVTHQGLSSPVTKSFNRGEC

SEQ ID NO: 28790 - protein, 107 aa, Artificial Sequence
  Description of Artificial Sequence: Synthetic polypeptide
  VL of XENP022653
DIQMTQSPAFLSVTPGEKVTITCQASQDIGNYLNWFQQKPDQTPKLLIYYTSYLHSGVPSRFSGSGSGTDYTFTISSLEAEDAATYFCQQGNTLPYTFGGGTKVEIK

SEQ ID NO: 28791 - protein, 11 aa, Artificial Sequence
  Description of Artificial Sequence: Synthetic peptide
  XENP022653 vlCDR1
QASQDIGNYLN

SEQ ID NO: 28792 - protein, 7 aa, Artificial Sequence
  Description of Artificial Sequence: Synthetic peptide
  XENP022653 vlCDR2
YTSYLHS

SEQ ID NO: 28793 - protein, 9 aa, Artificial Sequence
  Description of Artificial Sequence: Synthetic peptide
  XENP022653 vlCDR3
QQGNTLPYT

SEQ ID NO: 28794 - protein, 223 aa, Artificial Sequence; identical to SEQ ID NO: 27634
  Description of Artificial Sequence: Synthetic polypeptide
  XENP022654 2A11_H1.144_L2.140_Fab Heavy Chain

SEQ ID NO: 28795 - protein, 118 aa, Artificial Sequence; identical to SEQ ID NO: 22085
  Description of Artificial Sequence: Synthetic polypeptide
  VH of XENP022654

SEQ ID NO: 28796 - protein, 5 aa, Artificial Sequence
  Description of Artificial Sequence: Synthetic peptide
  XENP022654 vhCDR1
DYFMH

SEQ ID NO: 28797 - protein, 17 aa, Artificial Sequence
  Description of Artificial Sequence: Synthetic peptide
  XENP022654 vhCDR2
WIDPELGDTEYAPKFQG

SEQ ID NO: 28798 - protein, 9 aa, Artificial Sequence
  Description of Artificial Sequence: Synthetic peptide
  XENP022654 vhCDR3
RGVYQALDY

SEQ ID NO: 28799 - protein, 214 aa, Artificial Sequence
  Description of Artificial Sequence: Synthetic polypeptide
  XENP022654 2A11_H1.144_L2.140_Fab Light Chain
DIQMTQSPAFLSVTPGEKVTITCQASQDIGNYLNWFQQKPGQTPKLLIYYTSYLHSGVPSRFSGSGSGTDYTFTISSLEAEDAATYFCQQGNTLPYTFGGGTKVEIKRTVAAPSVFIFPPSDEQLKSGTASVVCLLNNFYPREAKVQWKVDNALQSGNSQESVTEQDSKDSTYSLSSTLTLSKADYEKHKVYACEVTHQGLSSPVTKSFNRGEC

SEQ ID NO: 28800 - protein, 107 aa, Artificial Sequence
  Description of Artificial Sequence: Synthetic polypeptide
  VL of XENP022654
DIQMTQSPAFLSVTPGEKVTITCQASQDIGNYLNWFQQKPGQTPKLLIYYTSYLHSGVPSRFSGSGSGTDYTFTISSLEAEDAATYFCQQGNTLPYTFGGGTKVEIK

SEQ ID NO: 28801 - protein, 11 aa, Artificial Sequence
  Description of Artificial Sequence: Synthetic peptide
  XENP022654 vlCDR1
QASQDIGNYLN

SEQ ID NO: 28802 - protein, 7 aa, Artificial Sequence
  Description of Artificial Sequence: Synthetic peptide
  XENP022654 vlCDR2
YTSYLHS

SEQ ID NO: 28803 - protein, 9 aa, Artificial Sequence
  Description of Artificial Sequence: Synthetic peptide
  XENP022654 vlCDR3
QQGNTLPYT

SEQ ID NO: 28804 - protein, 223 aa, Artificial Sequence; identical to SEQ ID NO: 27634
  Description of Artificial Sequence: Synthetic polypeptide
  XENP022655 2A11_H1.144_L2.141_Fab Heavy Chain

SEQ ID NO: 28805 - protein, 118 aa, Artificial Sequence; identical to SEQ ID NO: 22085
  Description of Artificial Sequence: Synthetic polypeptide
  VH of XENP022655

SEQ ID NO: 28806 - protein, 5 aa, Artificial Sequence
  Description of Artificial Sequence: Synthetic peptide
  XENP022655 vhCDR1
DYFMH

SEQ ID NO: 28807 - protein, 17 aa, Artificial Sequence
  Description of Artificial Sequence: Synthetic peptide
  XENP022655 vhCDR2
WIDPELGDTEYAPKFQG

SEQ ID NO: 28808 - protein, 9 aa, Artificial Sequence
  Description of Artificial Sequence: Synthetic peptide
  XENP022655 vhCDR3
RGVYQALDY

SEQ ID NO: 28809 - protein, 214 aa, Artificial Sequence
  Description of Artificial Sequence: Synthetic polypeptide
  XENP022655 2A11_H1.144_L2.141_Fab Light Chain
DIQMTQSPAFLSVTPGEKVTITCQASQDIGNYLNWFQQKPGKVPKLLIYYTSYLHSGVPSRFSGSGSGTDYTFTISSLEAEDAATYFCQQGNTLPYTFGGGTKVEIKRTVAAPSVFIFPPSDEQLKSGTASVVCLLNNFYPREAKVQWKVDNALQSGNSQESVTEQDSKDSTYSLSSTLTLSKADYEKHKVYACEVTHQGLSSPVTKSFNRGEC

SEQ ID NO: 28810 - protein, 107 aa, Artificial Sequence
  Description of Artificial Sequence: Synthetic polypeptide
  VL of XENP022655
DIQMTQSPAFLSVTPGEKVTITCQASQDIGNYLNWFQQKPGKVPKLLIYYTSYLHSGVPSRFSGSGSGTDYTFTISSLEAEDAATYFCQQGNTLPYTFGGGTKVEIK

SEQ ID NO: 28811 - protein, 11 aa, Artificial Sequence
  Description of Artificial Sequence: Synthetic peptide
  XENP022655 vlCDR1
QASQDIGNYLN

SEQ ID NO: 28812 - protein, 7 aa, Artificial Sequence
  Description of Artificial Sequence: Synthetic peptide
  XENP022655 vlCDR2
YTSYLHS

SEQ ID NO: 28813 - protein, 9 aa, Artificial Sequence
  Description of Artificial Sequence: Synthetic peptide
  XENP022655 vlCDR3
QQGNTLPYT

SEQ ID NO: 28814 - protein, 223 aa, Artificial Sequence; identical to SEQ ID NO: 27634
  Description of Artificial Sequence: Synthetic polypeptide
  XENP022656 2A11_H1.144_L2.142_Fab Heavy Chain

SEQ ID NO: 28815 - protein, 118 aa, Artificial Sequence; identical to SEQ ID NO: 22085
  Description of Artificial Sequence: Synthetic polypeptide
  VH of XENP022656

SEQ ID NO: 28816 - protein, 5 aa, Artificial Sequence
  Description of Artificial Sequence: Synthetic peptide
  XENP022656 vhCDR1
DYFMH

SEQ ID NO: 28817 - protein, 17 aa, Artificial Sequence
  Description of Artificial Sequence: Synthetic peptide
  XENP022656 vhCDR2
WIDPELGDTEYAPKFQG

SEQ ID NO: 28818 - protein, 9 aa, Artificial Sequence
  Description of Artificial Sequence: Synthetic peptide
  XENP022656 vhCDR3
RGVYQALDY

SEQ ID NO: 28819 - protein, 214 aa, Artificial Sequence; identical to SEQ ID NO: 22279
  Description of Artificial Sequence: Synthetic polypeptide
  XENP022656 2A11_H1.144_L2.142_Fab Light Chain

SEQ ID NO: 28820 - protein, 107 aa, Artificial Sequence; identical to SEQ ID NO: 22280
  Description of Artificial Sequence: Synthetic polypeptide
  VL of XENP022656

SEQ ID NO: 28821 - protein, 11 aa, Artificial Sequence
  Description of Artificial Sequence: Synthetic peptide
  XENP022656 vlCDR1
QASQDIGNYLN

SEQ ID NO: 28822 - protein, 7 aa, Artificial Sequence
  Description of Artificial Sequence: Synthetic peptide
  XENP022656 vlCDR2
FTSYLHS

SEQ ID NO: 28823 - protein, 9 aa, Artificial Sequence
  Description of Artificial Sequence: Synthetic peptide
  XENP022656 vlCDR3
QQGNTLPYT

SEQ ID NO: 28824 - protein, 223 aa, Artificial Sequence; identical to SEQ ID NO: 27634
  Description of Artificial Sequence: Synthetic polypeptide
  XENP022657 2A11_H1.144_L2.143_Fab Heavy Chain

SEQ ID NO: 28825 - protein, 118 aa, Artificial Sequence; identical to SEQ ID NO: 22085
  Description of Artificial Sequence: Synthetic polypeptide
  VH of XENP022657

SEQ ID NO: 28826 - protein, 5 aa, Artificial Sequence
  Description of Artificial Sequence: Synthetic peptide
  XENP022657 vhCDR1
DYFMH

SEQ ID NO: 28827 - protein, 17 aa, Artificial Sequence
  Description of Artificial Sequence: Synthetic peptide
  XENP022657 vhCDR2
WIDPELGDTEYAPKFQG

SEQ ID NO: 28828 - protein, 9 aa, Artificial Sequence
  Description of Artificial Sequence: Synthetic peptide
  XENP022657 vhCDR3
RGVYQALDY

SEQ ID NO: 28829 - protein, 214 aa, Artificial Sequence
  Description of Artificial Sequence: Synthetic polypeptide
  XENP022657 2A11_H1.144_L2.143_Fab Light Chain
DIQMTQSPAFLSVTPGEKVTITCQASQDIGNYLNWFQQKPDQTPKLLIYFTSYLHSGVPSRFSGSGSGTDYTFTISSLEAEDAATYFCQQGNTLPYTFGGGTKVEIKRTVAAPSVFIFPPSDEQLKSGTASVVCLLNNFYPREAKVQWKVDNALQSGNSQESVTEQDSKDSTYSLSSTLTLSKADYEKHKVYACEVTHQGLSSPVTKSFNRGEC

SEQ ID NO: 28830 - protein, 107 aa, Artificial Sequence
  Description of Artificial Sequence: Synthetic polypeptide
  VL of XENP022657
DIQMTQSPAFLSVTPGEKVTITCQASQDIGNYLNWFQQKPDQTPKLLIYFTSYLHSGVPSRFSGSGSGTDYTFTISSLEAEDAATYFCQQGNTLPYTFGGGTKVEIK

SEQ ID NO: 28831 - protein, 11 aa, Artificial Sequence
  Description of Artificial Sequence: Synthetic peptide
  XENP022657 vlCDR1
QASQDIGNYLN

SEQ ID NO: 28832 - protein, 7 aa, Artificial Sequence
  Description of Artificial Sequence: Synthetic peptide
  XENP022657 vlCDR2
FTSYLHS

SEQ ID NO: 28833 - protein, 9 aa, Artificial Sequence
  Description of Artificial Sequence: Synthetic peptide
  XENP022657 vlCDR3
QQGNTLPYT

SEQ ID NO: 28834 - protein, 223 aa, Artificial Sequence; identical to SEQ ID NO: 27634
  Description of Artificial Sequence: Synthetic polypeptide
  XENP022658 2A11_H1.144_L2.144_Fab Heavy Chain

SEQ ID NO: 28835 - protein, 118 aa, Artificial Sequence; identical to SEQ ID NO: 22085
  Description of Artificial Sequence: Synthetic polypeptide
  VH of XENP022658

SEQ ID NO: 28836 - protein, 5 aa, Artificial Sequence
  Description of Artificial Sequence: Synthetic peptide
  XENP022658 vhCDR1
DYFMH

SEQ ID NO: 28837 - protein, 17 aa, Artificial Sequence
  Description of Artificial Sequence: Synthetic peptide
  XENP022658 vhCDR2
WIDPELGDTEYAPKFQG

SEQ ID NO: 28838 - protein, 9 aa, Artificial Sequence
  Description of Artificial Sequence: Synthetic peptide
  XENP022658 vhCDR3
RGVYQALDY

SEQ ID NO: 28839 - protein, 214 aa, Artificial Sequence
  Description of Artificial Sequence: Synthetic polypeptide
  XENP022658 2A11_H1.144_L2.144_Fab Light Chain
DIQMTQSPAFLSVTPGEKVTITCQASQDIGNYLNWFQQKPGQTPKLLIYFTSYLHSGVPSRFSGSGSGTDYTFTISSLEAEDAATYFCQQGNTLPYTFGGGTKVEIKRTVAAPSVFIFPPSDEQLKSGTASVVCLLNNFYPREAKVQWKVDNALQSGNSQESVTEQDSKDSTYSLSSTLTLSKADYEKHKVYACEVTHQGLSSPVTKSFNRGEC

SEQ ID NO: 28840 - protein, 107 aa, Artificial Sequence
  Description of Artificial Sequence: Synthetic polypeptide
  VL of XENP022658
DIQMTQSPAFLSVTPGEKVTITCQASQDIGNYLNWFQQKPGQTPKLLIYFTSYLHSGVPSRFSGSGSGTDYTFTISSLEAEDAATYFCQQGNTLPYTFGGGTKVEIK

SEQ ID NO: 28841 - protein, 11 aa, Artificial Sequence
  Description of Artificial Sequence: Synthetic peptide
  XENP022658 vlCDR1
QASQDIGNYLN

SEQ ID NO: 28842 - protein, 7 aa, Artificial Sequence
  Description of Artificial Sequence: Synthetic peptide
  XENP022658 vlCDR2
FTSYLHS

SEQ ID NO: 28843 - protein, 9 aa, Artificial Sequence
  Description of Artificial Sequence: Synthetic peptide
  XENP022658 vlCDR3
QQGNTLPYT

SEQ ID NO: 28844 - protein, 223 aa, Artificial Sequence; identical to SEQ ID NO: 27634
  Description of Artificial Sequence: Synthetic polypeptide
  XENP022659 2A11_H1.144_L2.145_Fab Heavy Chain

SEQ ID NO: 28845 - protein, 118 aa, Artificial Sequence; identical to SEQ ID NO: 22085
  Description of Artificial Sequence: Synthetic polypeptide
  VH of XENP022659

SEQ ID NO: 28846 - protein, 5 aa, Artificial Sequence
  Description of Artificial Sequence: Synthetic peptide
  XENP022659 vhCDR1
DYFMH

SEQ ID NO: 28847 - protein, 17 aa, Artificial Sequence
  Description of Artificial Sequence: Synthetic peptide
  XENP022659 vhCDR2
WIDPELGDTEYAPKFQG

SEQ ID NO: 28848 - protein, 9 aa, Artificial Sequence
  Description of Artificial Sequence: Synthetic peptide
  XENP022659 vhCDR3
RGVYQALDY

SEQ ID NO: 28849 - protein, 214 aa, Artificial Sequence
  Description of Artificial Sequence: Synthetic polypeptide
  XENP022659 2A11_H1.144_L2.145_Fab Light Chain
DIQMTQSPAFLSVTPGEKVTITCQASQDIGNYLNWFQQKPGKVPKLLIYFTSYLHSGVPSRFSGSGSGTDYTFTISSLEAEDAATYFCQQGNTLPYTFGGGTKVEIKRTVAAPSVFIFPPSDEQLKSGTASVVCLLNNFYPREAKVQWKVDNALQSGNSQESVTEQDSKDSTYSLSSTLTLSKADYEKHKVYACEVTHQGLSSPVTKSFNRGEC

SEQ ID NO: 28850 - protein, 107 aa, Artificial Sequence
  Description of Artificial Sequence: Synthetic polypeptide
  VL of XENP022659
DIQMTQSPAFLSVTPGEKVTITCQASQDIGNYLNWFQQKPGKVPKLLIYFTSYLHSGVPSRFSGSGSGTDYTFTISSLEAEDAATYFCQQGNTLPYTFGGGTKVEIK

SEQ ID NO: 28851 - protein, 11 aa, Artificial Sequence
  Description of Artificial Sequence: Synthetic peptide
  XENP022659 vlCDR1
QASQDIGNYLN

SEQ ID NO: 28852 - protein, 7 aa, Artificial Sequence
  Description of Artificial Sequence: Synthetic peptide
  XENP022659 vlCDR2
FTSYLHS

SEQ ID NO: 28853 - protein, 9 aa, Artificial Sequence
  Description of Artificial Sequence: Synthetic peptide
  XENP022659 vlCDR3
QQGNTLPYT

SEQ ID NO: 28854 - protein, 223 aa, Artificial Sequence; identical to SEQ ID NO: 27734
  Description of Artificial Sequence: Synthetic polypeptide
  XENP022660 2A11_H1.125_L2.138_Fab Heavy Chain

SEQ ID NO: 28855 - protein, 118 aa, Artificial Sequence; identical to SEQ ID NO: 22065
  Description of Artificial Sequence: Synthetic polypeptide
  VH of XENP022660

SEQ ID NO: 28856 - protein, 5 aa, Artificial Sequence
  Description of Artificial Sequence: Synthetic peptide
  XENP022660 vhCDR1
HYFMH

SEQ ID NO: 28857 - protein, 17 aa, Artificial Sequence
  Description of Artificial Sequence: Synthetic peptide
  XENP022660 vhCDR2
WIDPYLGDTEYAPKFQG

SEQ ID NO: 28858 - protein, 9 aa, Artificial Sequence
  Description of Artificial Sequence: Synthetic peptide
  XENP022660 vhCDR3
RGVYQALDY

SEQ ID NO: 28859 - protein, 214 aa, Artificial Sequence; identical to SEQ ID NO: 28779
  Description of Artificial Sequence: Synthetic polypeptide
  XENP022660 2A11_H1.125_L2.138_Fab Light Chain

SEQ ID NO: 28860 - protein, 107 aa, Artificial Sequence; identical to SEQ ID NO: 28780
  Description of Artificial Sequence: Synthetic polypeptide
  VL of XENP022660

SEQ ID NO: 28861 - protein, 11 aa, Artificial Sequence
  Description of Artificial Sequence: Synthetic peptide
  XENP022660 vlCDR1
QASQDIGNYLN

SEQ ID NO: 28862 - protein, 7 aa, Artificial Sequence
  Description of Artificial Sequence: Synthetic peptide
  XENP022660 vlCDR2
YTSYLHS

SEQ ID NO: 28863 - protein, 9 aa, Artificial Sequence
  Description of Artificial Sequence: Synthetic peptide
  XENP022660 vlCDR3
QQGNTLPYT

SEQ ID NO: 28864 - protein, 223 aa, Artificial Sequence; identical to SEQ ID NO: 27734
  Description of Artificial Sequence: Synthetic polypeptide
  XENP022661 2A11_H1.125_L2.139_Fab Heavy Chain

SEQ ID NO: 28865 - protein, 118 aa, Artificial Sequence; identical to SEQ ID NO: 22065
  Description of Artificial Sequence: Synthetic polypeptide
  VH of XENP022661

SEQ ID NO: 28866 - protein, 5 aa, Artificial Sequence
  Description of Artificial Sequence: Synthetic peptide
  XENP022661 vhCDR1
HYFMH

SEQ ID NO: 28867 - protein, 17 aa, Artificial Sequence
  Description of Artificial Sequence: Synthetic peptide
  XENP022661 vhCDR2
WIDPYLGDTEYAPKFQG

SEQ ID NO: 28868 - protein, 9 aa, Artificial Sequence
  Description of Artificial Sequence: Synthetic peptide
  XENP022661 vhCDR3
RGVYQALDY

SEQ ID NO: 28869 - protein, 214 aa, Artificial Sequence; identical to SEQ ID NO: 28789
  Description of Artificial Sequence: Synthetic polypeptide
  XENP022661 2A11_H1.125_L2.139_Fab Light Chain

SEQ ID NO: 28870 - protein, 107 aa, Artificial Sequence; identical to SEQ ID NO: 28790
  Description of Artificial Sequence: Synthetic polypeptide
  VL of XENP022661

SEQ ID NO: 28871 - protein, 11 aa, Artificial Sequence
  Description of Artificial Sequence: Synthetic peptide
  XENP022661 vlCDR1
QASQDIGNYLN

SEQ ID NO: 28872 - protein, 7 aa, Artificial Sequence
  Description of Artificial Sequence: Synthetic peptide
  XENP022661 vlCDR2
YTSYLHS

SEQ ID NO: 28873 - protein, 9 aa, Artificial Sequence
  Description of Artificial Sequence: Synthetic peptide
  XENP022661 vlCDR3
QQGNTLPYT

SEQ ID NO: 28874 - protein, 223 aa, Artificial Sequence; identical to SEQ ID NO: 27734
  Description of Artificial Sequence: Synthetic polypeptide
  XENP022662 2A11_H1.125_L2.140_Fab Heavy Chain

SEQ ID NO: 28875 - protein, 118 aa, Artificial Sequence; identical to SEQ ID NO: 22065
  Description of Artificial Sequence: Synthetic polypeptide
  VH of XENP022662

SEQ ID NO: 28876 - protein, 5 aa, Artificial Sequence
  Description of Artificial Sequence: Synthetic peptide
  XENP022662 vhCDR1
HYFMH

SEQ ID NO: 28877 - protein, 17 aa, Artificial Sequence
  Description of Artificial Sequence: Synthetic peptide
  XENP022662 vhCDR2
WIDPYLGDTEYAPKFQG

SEQ ID NO: 28878 - protein, 9 aa, Artificial Sequence
  Description of Artificial Sequence: Synthetic peptide
  XENP022662 vhCDR3
RGVYQALDY

SEQ ID NO: 28879 - protein, 214 aa, Artificial Sequence; identical to SEQ ID NO: 28799
  Description of Artificial Sequence: Synthetic polypeptide
  XENP022662 2A11_H1.125_L2.140_Fab Light Chain

SEQ ID NO: 28880 - protein, 107 aa, Artificial Sequence; identical to SEQ ID NO: 28800
  Description of Artificial Sequence: Synthetic polypeptide
  VL of XENP022662

SEQ ID NO: 28881 - protein, 11 aa, Artificial Sequence
  Description of Artificial Sequence: Synthetic peptide
  XENP022662 vlCDR1
QASQDIGNYLN

SEQ ID NO: 28882 - protein, 7 aa, Artificial Sequence
  Description of Artificial Sequence: Synthetic peptide
  XENP022662 vlCDR2
YTSYLHS

SEQ ID NO: 28883 - protein, 9 aa, Artificial Sequence
  Description of Artificial Sequence: Synthetic peptide
  XENP022662 vlCDR3
QQGNTLPYT

SEQ ID NO: 28884 - protein, 223 aa, Artificial Sequence; identical to SEQ ID NO: 27734
  Description of Artificial Sequence: Synthetic polypeptide
  XENP022663 2A11_H1.125_L2.141_Fab Heavy Chain

SEQ ID NO: 28885 - protein, 118 aa, Artificial Sequence; identical to SEQ ID NO: 22065
  Description of Artificial Sequence: Synthetic polypeptide
  VH of XENP022663

SEQ ID NO: 28886 - protein, 5 aa, Artificial Sequence
  Description of Artificial Sequence: Synthetic peptide
  XENP022663 vhCDR1
HYFMH

SEQ ID NO: 28887 - protein, 17 aa, Artificial Sequence
  Description of Artificial Sequence: Synthetic peptide
  XENP022663 vhCDR2
WIDPYLGDTEYAPKFQG

SEQ ID NO: 28888 - protein, 9 aa, Artificial Sequence
  Description of Artificial Sequence: Synthetic peptide
  XENP022663 vhCDR3
RGVYQALDY

SEQ ID NO: 28889 - protein, 214 aa, Artificial Sequence; identical to SEQ ID NO: 28809
  Description of Artificial Sequence: Synthetic polypeptide
  XENP022663 2A11_H1.125_L2.141_Fab Light Chain

SEQ ID NO: 28890 - protein, 107 aa, Artificial Sequence; identical to SEQ ID NO: 28810
  Description of Artificial Sequence: Synthetic polypeptide
  VL of XENP022663

SEQ ID NO: 28891 - protein, 11 aa, Artificial Sequence
  Description of Artificial Sequence: Synthetic peptide
  XENP022663 vlCDR1
QASQDIGNYLN

SEQ ID NO: 28892 - protein, 7 aa, Artificial Sequence
  Description of Artificial Sequence: Synthetic peptide
  XENP022663 vlCDR2
YTSYLHS

SEQ ID NO: 28893 - protein, 9 aa, Artificial Sequence
  Description of Artificial Sequence: Synthetic peptide
  XENP022663 vlCDR3
QQGNTLPYT

SEQ ID NO: 28894 - protein, 223 aa, Artificial Sequence; identical to SEQ ID NO: 27734
  Description of Artificial Sequence: Synthetic polypeptide
  XENP022664 2A11_H1.125_L2.142_Fab Heavy Chain

SEQ ID NO: 28895 - protein, 118 aa, Artificial Sequence; identical to SEQ ID NO: 22065
  Description of Artificial Sequence: Synthetic polypeptide
  VH of XENP022664

SEQ ID NO: 28896 - protein, 5 aa, Artificial Sequence
  Description of Artificial Sequence: Synthetic peptide
  XENP022664 vhCDR1
HYFMH

SEQ ID NO: 28897 - protein, 17 aa, Artificial Sequence
  Description of Artificial Sequence: Synthetic peptide
  XENP022664 vhCDR2
WIDPYLGDTEYAPKFQG

SEQ ID NO: 28898 - protein, 9 aa, Artificial Sequence
  Description of Artificial Sequence: Synthetic peptide
  XENP022664 vhCDR3
RGVYQALDY

SEQ ID NO: 28899 - protein, 214 aa, Artificial Sequence; identical to SEQ ID NO: 22279
  Description of Artificial Sequence: Synthetic polypeptide
  XENP022664 2A11_H1.125_L2.142_Fab Light Chain

SEQ ID NO: 28900 - protein, 107 aa, Artificial Sequence; identical to SEQ ID NO: 22280
  Description of Artificial Sequence: Synthetic polypeptide
  VL of XENP022664

SEQ ID NO: 28901 - protein, 11 aa, Artificial Sequence
  Description of Artificial Sequence: Synthetic peptide
  XENP022664 vlCDR1
QASQDIGNYLN

SEQ ID NO: 28902 - protein, 7 aa, Artificial Sequence
  Description of Artificial Sequence: Synthetic peptide
  XENP022664 vlCDR2
FTSYLHS

SEQ ID NO: 28903 - protein, 9 aa, Artificial Sequence
  Description of Artificial Sequence: Synthetic peptide
  XENP022664 vlCDR3
QQGNTLPYT

SEQ ID NO: 28904 - protein, 223 aa, Artificial Sequence; identical to SEQ ID NO: 27734
  Description of Artificial Sequence: Synthetic polypeptide
  XENP022665 2A11_H1.125_L2.143_Fab Heavy Chain

SEQ ID NO: 28905 - protein, 118 aa, Artificial Sequence; identical to SEQ ID NO: 22065
  Description of Artificial Sequence: Synthetic polypeptide
  VH of XENP022665

SEQ ID NO: 28906 - protein, 5 aa, Artificial Sequence
  Description of Artificial Sequence: Synthetic peptide
  XENP022665 vhCDR1
HYFMH

SEQ ID NO: 28907 - protein, 17 aa, Artificial Sequence
  Description of Artificial Sequence: Synthetic peptide
  XENP022665 vhCDR2
WIDPYLGDTEYAPKFQG

SEQ ID NO: 28908 - protein, 9 aa, Artificial Sequence
  Description of Artificial Sequence: Synthetic peptide
  XENP022665 vhCDR3
RGVYQALDY

SEQ ID NO: 28909 - protein, 214 aa, Artificial Sequence; identical to SEQ ID NO: 28829
  Description of Artificial Sequence: Synthetic polypeptide
  XENP022665 2A11_H1.125_L2.143_Fab Light Chain

SEQ ID NO: 28910 - protein, 107 aa, Artificial Sequence; identical to SEQ ID NO: 28830
  Description of Artificial Sequence: Synthetic polypeptide
  VL of XENP022665

SEQ ID NO: 28911 - protein, 11 aa, Artificial Sequence
  Description of Artificial Sequence: Synthetic peptide
  XENP022665 vlCDR1
QASQDIGNYLN

SEQ ID NO: 28912 - protein, 7 aa, Artificial Sequence
  Description of Artificial Sequence: Synthetic peptide
  XENP022665 vlCDR2
FTSYLHS

SEQ ID NO: 28913 - protein, 9 aa, Artificial Sequence
  Description of Artificial Sequence: Synthetic peptide
  XENP022665 vlCDR3
QQGNTLPYT

SEQ ID NO: 28914 - protein, 223 aa, Artificial Sequence; identical to SEQ ID NO: 27734
  Description of Artificial Sequence: Synthetic polypeptide
  XENP022666 2A11_H1.125_L2.144_Fab Heavy Chain

SEQ ID NO: 28915 - protein, 118 aa, Artificial Sequence; identical to SEQ ID NO: 22065
  Description of Artificial Sequence: Synthetic polypeptide
  VH of XENP022666

SEQ ID NO: 28916 - protein, 5 aa, Artificial Sequence
  Description of Artificial Sequence: Synthetic peptide
  XENP022666 vhCDR1
HYFMH

SEQ ID NO: 28917 - protein, 17 aa, Artificial Sequence
  Description of Artificial Sequence: Synthetic peptide
  XENP022666 vhCDR2
WIDPYLGDTEYAPKFQG

SEQ ID NO: 28918 - protein, 9 aa, Artificial Sequence
  Description of Artificial Sequence: Synthetic peptide
  XENP022666 vhCDR3
RGVYQALDY

SEQ ID NO: 28919 - protein, 214 aa, Artificial Sequence; identical to SEQ ID NO: 28839
  Description of Artificial Sequence: Synthetic polypeptide
  XENP022666 2A11_H1.125_L2.144_Fab Light Chain

SEQ ID NO: 28920 - protein, 107 aa, Artificial Sequence; identical to SEQ ID NO: 28840
  Description of Artificial Sequence: Synthetic polypeptide
  VL of XENP022666

SEQ ID NO: 28921 - protein, 11 aa, Artificial Sequence
  Description of Artificial Sequence: Synthetic peptide
  XENP022666 vlCDR1
QASQDIGNYLN

SEQ ID NO: 28922 - protein, 7 aa, Artificial Sequence
  Description of Artificial Sequence: Synthetic peptide
  XENP022666 vlCDR2
FTSYLHS

SEQ ID NO: 28923 - protein, 9 aa, Artificial Sequence
  Description of Artificial Sequence: Synthetic peptide
  XENP022666 vlCDR3
QQGNTLPYT

SEQ ID NO: 28924 - protein, 223 aa, Artificial Sequence; identical to SEQ ID NO: 27734
  Description of Artificial Sequence: Synthetic polypeptide
  XENP022667 2A11_H1.125_L2.145_Fab Heavy Chain

SEQ ID NO: 28925 - protein, 118 aa, Artificial Sequence; identical to SEQ ID NO: 22065
  Description of Artificial Sequence: Synthetic polypeptide
  VH of XENP022667

SEQ ID NO: 28926 - protein, 5 aa, Artificial Sequence
  Description of Artificial Sequence: Synthetic peptide
  XENP022667 vhCDR1
HYFMH

SEQ ID NO: 28927 - protein, 17 aa, Artificial Sequence
  Description of Artificial Sequence: Synthetic peptide
  XENP022667 vhCDR2
WIDPYLGDTEYAPKFQG

SEQ ID NO: 28928 - protein, 9 aa, Artificial Sequence
  Description of Artificial Sequence: Synthetic peptide
  XENP022667 vhCDR3
RGVYQALDY

SEQ ID NO: 28929 - protein, 214 aa, Artificial Sequence; identical to SEQ ID NO: 28849
  Description of Artificial Sequence: Synthetic polypeptide
  XENP022667 2A11_H1.125_L2.145_Fab Light Chain

SEQ ID NO: 28930 - protein, 107 aa, Artificial Sequence; identical to SEQ ID NO: 28850
  Description of Artificial Sequence: Synthetic polypeptide
  VL of XENP022667

SEQ ID NO: 28931 - protein, 11 aa, Artificial Sequence
  Description of Artificial Sequence: Synthetic peptide
  XENP022667 vlCDR1
QASQDIGNYLN

SEQ ID NO: 28932 - protein, 7 aa, Artificial Sequence
  Description of Artificial Sequence: Synthetic peptide
  XENP022667 vlCDR2
FTSYLHS

SEQ ID NO: 28933 - protein, 9 aa, Artificial Sequence
  Description of Artificial Sequence: Synthetic peptide
  XENP022667 vlCDR3
QQGNTLPYT

SEQ ID NO: 28934 - protein, 226 aa, Artificial Sequence
  Description of Artificial Sequence: Synthetic polypeptide
  XENP020844 7G8_H3L1_Fab Heavy Chain
EVQLVESGGGLVQPGGSLRLSCAASGFTFSDAWMDWVRQAPGKGLEWVAEIRTKANNHATYYAESVKGRFTISRDDSKSSVYLQMNSLRAEDTAVYYCTRLANWDWYFDVWGQGTTVTVSSASTKGPSVFPLAPSSKSTSGGTAALGCLVKDYFPEPVTVSWNSGALTSGVHTFPAVLQSSGLYSLSSVVTVPSSSLGTQTYICNVNHKPSNTKVDKKVEPKSCGS

SEQ ID NO: 28935 - protein, 121 aa, Artificial Sequence; identical to SEQ ID NO: 17806
  Description of Artificial Sequence: Synthetic polypeptide
  VH of XENP020844

SEQ ID NO: 28936 - protein, 5 aa, Artificial Sequence
  Description of Artificial Sequence: Synthetic peptide
  XENP020844 vhCDR1
DAWMD

SEQ ID NO: 28937 - protein, 19 aa, Artificial Sequence
  Description of Artificial Sequence: Synthetic peptide
  XENP020844 vhCDR2
EIRTKANNHATYYAESVKG

SEQ ID NO: 28938 - protein, 10 aa, Artificial Sequence
  Description of Artificial Sequence: Synthetic peptide
  XENP020844 vhCDR3
LANWDWYFDV

SEQ ID NO: 28939 - protein, 218 aa, Artificial Sequence; identical to SEQ ID NO: 17600
  Description of Artificial Sequence: Synthetic polypeptide
  XENP020844 7G8_H3L1_Fab Light Chain

SEQ ID NO: 28940 - protein, 111 aa, Artificial Sequence; identical to SEQ ID NO: 17601
  Description of Artificial Sequence: Synthetic polypeptide
  VL of XENP020844

SEQ ID NO: 28941 - protein, 15 aa, Artificial Sequence
  Description of Artificial Sequence: Synthetic peptide
  XENP020844 vlCDR1
RASQSVDYDGDSYMN

SEQ ID NO: 28942 - protein, 7 aa, Artificial Sequence
  Description of Artificial Sequence: Synthetic peptide
  XENP020844 vlCDR2
AASNLES

SEQ ID NO: 28943 - protein, 9 aa, Artificial Sequence
  Description of Artificial Sequence: Synthetic peptide
  XENP020844 vlCDR3
QQSNEDPFT

SEQ ID NO: 28944 - protein, 226 aa, Artificial Sequence
  Description of Artificial Sequence: Synthetic polypeptide
  XENP020911 7G8_H3.1_L1_Fab Heavy Chain
EVQLVESGGGLVQPGGSLRLSCAASGDTFDDAWMDWVRQAPGKGLEWVAEIRTKANNHATYYAESVKGRFTISRDDSKSSVYLQMNSLRAEDTAVYYCTRLATWDWYFDVWGQGTTVTVSSASTKGPSVFPLAPSSKSTSGGTAALGCLVKDYFPEPVTVSWNSGALTSGVHTFPAVLQSSGLYSLSSVVTVPSSSLGTQTYICNVNHKPSNTKVDKKVEPKSCGS

SEQ ID NO: 28945 - protein, 121 aa, Artificial Sequence
  Description of Artificial Sequence: Synthetic polypeptide
  VH of XENP020911
EVQLVESGGGLVQPGGSLRLSCAASGDTFDDAWMDWVRQAPGKGLEWVAEIRTKANNHATYYAESVKGRFTISRDDSKSSVYLQMNSLRAEDTAVYYCTRLATWDWYFDVWGQGTTVTVSS

SEQ ID NO: 28946 - protein, 5 aa, Artificial Sequence
  Description of Artificial Sequence: Synthetic peptide
  XENP020911 vhCDR1
DAWMD

SEQ ID NO: 28947 - protein, 19 aa, Artificial Sequence
  Description of Artificial Sequence: Synthetic peptide
  XENP020911 vhCDR2
EIRTKANNHATYYAESVKG

SEQ ID NO: 28948 - protein, 10 aa, Artificial Sequence
  Description of Artificial Sequence: Synthetic peptide
  XENP020911 vhCDR3
LATWDWYFDV

SEQ ID NO: 28949 - protein, 218 aa, Artificial Sequence; identical to SEQ ID NO: 17600
  Description of Artificial Sequence: Synthetic polypeptide
  XENP020911 7G8_H3.1_L1_Fab Light Chain

SEQ ID NO: 28950 - protein, 111 aa, Artificial Sequence; identical to SEQ ID NO: 17601
  Description of Artificial Sequence: Synthetic polypeptide
  VL of XENP020911

SEQ ID NO: 28951 - protein, 15 aa, Artificial Sequence
  Description of Artificial Sequence: Synthetic peptide
  XENP020911 vlCDR1
RASQSVDYDGDSYMN

SEQ ID NO: 28952 - protein, 7 aa, Artificial Sequence
  Description of Artificial Sequence: Synthetic peptide
  XENP020911 vlCDR2
AASNLES

SEQ ID NO: 28953 - protein, 9 aa, Artificial Sequence
  Description of Artificial Sequence: Synthetic peptide
  XENP020911 vlCDR3
QQSNEDPFT

SEQ ID NO: 28954 - protein, 226 aa, Artificial Sequence
  Description of Artificial Sequence: Synthetic polypeptide
  XENP020912 7G8_H3.2_L1_Fab Heavy Chain
EVQLVESGGGLVQPGGSLRLSCAASGDTFDDAWMDWVRQAPGKGLEWVAEIRTKANNHATYYAESVKGRFTISRDDSKSSVYLQMNSLRAEDTAVYYCTRLANWDWYFDVWGQGTTVTVSSASTKGPSVFPLAPSSKSTSGGTAALGCLVKDYFPEPVTVSWNSGALTSGVHTFPAVLQSSGLYSLSSVVTVPSSSLGTQTYICNVNHKPSNTKVDKKVEPKSCGS

SEQ ID NO: 28955 - protein, 121 aa, Artificial Sequence
  Description of Artificial Sequence: Synthetic polypeptide
  VH of XENP020912
EVQLVESGGGLVQPGGSLRLSCAASGDTFDDAWMDWVRQAPGKGLEWVAEIRTKANNHATYYAESVKGRFTISRDDSKSSVYLQMNSLRAEDTAVYYCTRLANWDWYFDVWGQGTTVTVSS

SEQ ID NO: 28956 - protein, 5 aa, Artificial Sequence
  Description of Artificial Sequence: Synthetic peptide
  XENP020912 vhCDR1
DAWMD

SEQ ID NO: 28957 - protein, 19 aa, Artificial Sequence
  Description of Artificial Sequence: Synthetic peptide
  XENP020912 vhCDR2
EIRTKANNHATYYAESVKG

SEQ ID NO: 28958 - protein, 10 aa, Artificial Sequence
  Description of Artificial Sequence: Synthetic peptide
  XENP020912 vhCDR3
LANWDWYFDV

SEQ ID NO: 28959 - protein, 218 aa, Artificial Sequence; identical to SEQ ID NO: 17600
  Description of Artificial Sequence: Synthetic polypeptide
  XENP020912 7G8_H3.2_L1_Fab Light Chain

SEQ ID NO: 28960 - protein, 111 aa, Artificial Sequence; identical to SEQ ID NO: 17601
  Description of Artificial Sequence: Synthetic polypeptide
  VL of XENP020912

SEQ ID NO: 28961 - protein, 15 aa, Artificial Sequence
  Description of Artificial Sequence: Synthetic peptide
  XENP020912 vlCDR1
RASQSVDYDGDSYMN

SEQ ID NO: 28962 - protein, 7 aa, Artificial Sequence
  Description of Artificial Sequence: Synthetic peptide
  XENP020912 vlCDR2
AASNLES

SEQ ID NO: 28963 - protein, 9 aa, Artificial Sequence
  Description of Artificial Sequence: Synthetic peptide
  XENP020912 vlCDR3
QQSNEDPFT

SEQ ID NO: 28964 - protein, 226 aa, Artificial Sequence
  Description of Artificial Sequence: Synthetic polypeptide
  XENP020913 7G8_H3.3_L1_Fab Heavy Chain
EVQLVESGGGLVQPGGSLRLSCAASGDTFSDAWMDWVRQAPGKGLEWVAEIRTKANNHATYYAESVKGRFTISRDDSKSSVYLQMNSLRAEDTAVYYCTRLATWDWYFDVWGQGTTVTVSSASTKGPSVFPLAPSSKSTSGGTAALGCLVKDYFPEPVTVSWNSGALTSGVHTFPAVLQSSGLYSLSSVVTVPSSSLGTQTYICNVNHKPSNTKVDKKVEPKSCGS

SEQ ID NO: 28965 - protein, 121 aa, Artificial Sequence
  Description of Artificial Sequence: Synthetic polypeptide
  VH of XENP020913
EVQLVESGGGLVQPGGSLRLSCAASGDTFSDAWMDWVRQAPGKGLEWVAEIRTKANNHATYYAESVKGRFTISRDDSKSSVYLQMNSLRAEDTAVYYCTRLATWDWYFDVWGQGTTVTVSS

SEQ ID NO: 28966 - protein, 5 aa, Artificial Sequence
  Description of Artificial Sequence: Synthetic peptide
  XENP020913 vhCDR1
DAWMD

SEQ ID NO: 28967 - protein, 19 aa, Artificial Sequence
  Description of Artificial Sequence: Synthetic peptide
  XENP020913 vhCDR2
EIRTKANNHATYYAESVKG

SEQ ID NO: 28968 - protein, 10 aa, Artificial Sequence
  Description of Artificial Sequence: Synthetic peptide
  XENP020913 vhCDR3
LATWDWYFDV

SEQ ID NO: 28969 - protein, 218 aa, Artificial Sequence; identical to SEQ ID NO: 17600
  Description of Artificial Sequence: Synthetic polypeptide
  XENP020913 7G8_H3.3_L1_Fab Light Chain

SEQ ID NO: 28970 - protein, 111 aa, Artificial Sequence; identical to SEQ ID NO: 17601
  Description of Artificial Sequence: Synthetic polypeptide
  VL of XENP020913

SEQ ID NO: 28971 - protein, 15 aa, Artificial Sequence
  Description of Artificial Sequence: Synthetic peptide
  XENP020913 vlCDR1
RASQSVDYDGDSYMN

SEQ ID NO: 28972 - protein, 7 aa, Artificial Sequence
  Description of Artificial Sequence: Synthetic peptide
  XENP020913 vlCDR2
AASNLES

SEQ ID NO: 28973 - protein, 9 aa, Artificial Sequence
  Description of Artificial Sequence: Synthetic peptide
  XENP020913 vlCDR3
QQSNEDPFT

SEQ ID NO: 28974 - protein, 226 aa, Artificial Sequence
  Description of Artificial Sequence: Synthetic polypeptide
  XENP020914 7G8_H3.4_L1_Fab Heavy Chain
EVQLVESGGGLVQPGGSLRLSCAASGFTFDDAWMDWVRQAPGKGLEWVAEIRTKANNHATYYAESVKGRFTISRDDSKSSVYLQMNSLRAEDTAVYYCTRLATWDWYFDVWGQGTTVTVSSASTKGPSVFPLAPSSKSTSGGTAALGCLVKDYFPEPVTVSWNSGALTSGVHTFPAVLQSSGLYSLSSVVTVPSSSLGTQTYICNVNHKPSNTKVDKKVEPKSCGS

SEQ ID NO: 28975 - protein, 121 aa, Artificial Sequence
  Description of Artificial Sequence: Synthetic polypeptide
  VH of XENP020914
EVQLVESGGGLVQPGGSLRLSCAASGFTFDDAWMDWVRQAPGKGLEWVAEIRTKANNHATYYAESVKGRFTISRDDSKSSVYLQMNSLRAEDTAVYYCTRLATWDWYFDVWGQGTTVTVSS

SEQ ID NO: 28976 - protein, 5 aa, Artificial Sequence
  Description of Artificial Sequence: Synthetic peptide
  XENP020914 vhCDR1
DAWMD

SEQ ID NO: 28977 - protein, 19 aa, Artificial Sequence
  Description of Artificial Sequence: Synthetic peptide
  XENP020914 vhCDR2
EIRTKANNHATYYAESVKG

SEQ ID NO: 28978 - protein, 10 aa, Artificial Sequence
  Description of Artificial Sequence: Synthetic peptide
  XENP020914 vhCDR3
LATWDWYFDV

SEQ ID NO: 28979 - protein, 218 aa, Artificial Sequence; identical to SEQ ID NO: 17600
  Description of Artificial Sequence: Synthetic polypeptide
  XENP020914 7G8_H3.4_L1_Fab Light Chain

SEQ ID NO: 28980 - protein, 111 aa, Artificial Sequence; identical to SEQ ID NO: 17601
  Description of Artificial Sequence: Synthetic polypeptide
  VL of XENP020914

SEQ ID NO: 28981 - protein, 15 aa, Artificial Sequence
  Description of Artificial Sequence: Synthetic peptide
  XENP020914 vlCDR1
RASQSVDYDGDSYMN

SEQ ID NO: 28982 - protein, 7 aa, Artificial Sequence
  Description of Artificial Sequence: Synthetic peptide
  XENP020914 vlCDR2
AASNLES

SEQ ID NO: 28983 - protein, 9 aa, Artificial Sequence
  Description of Artificial Sequence: Synthetic peptide
  XENP020914 vlCDR3
QQSNEDPFT

SEQ ID NO: 28984 - protein, 226 aa, Artificial Sequence
  Description of Artificial Sequence: Synthetic polypeptide
  XENP020915 7G8_H3.5_L1_Fab Heavy Chain
EVQLVESGGGLVQPGGSLRLSCAASGDTFTDAWMDWVRQAPGKGLEWVAEIRTKANNHATYYAESVKGRFTISRDDSKSSVYLQMNSLRAEDTAVYYCTRLATWDWYFDVWGQGTTVTVSSASTKGPSVFPLAPSSKSTSGGTAALGCLVKDYFPEPVTVSWNSGALTSGVHTFPAVLQSSGLYSLSSVVTVPSSSLGTQTYICNVNHKPSNTKVDKKVEPKSCGS

SEQ ID NO: 28985 - protein, 121 aa, Artificial Sequence
  Description of Artificial Sequence: Synthetic polypeptide
  VH of XENP020915
EVQLVESGGGLVQPGGSLRLSCAASGDTFTDAWMDWVRQAPGKGLEWVAEIRTKANNHATYYAESVKGRFTISRDDSKSSVYLQMNSLRAEDTAVYYCTRLATWDWYFDVWGQGTTVTVSS

SEQ ID NO: 28986 - protein, 5 aa, Artificial Sequence
  Description of Artificial Sequence: Synthetic peptide
  XENP020915 vhCDR1
DAWMD

SEQ ID NO: 28987 - protein, 19 aa, Artificial Sequence
  Description of Artificial Sequence: Synthetic peptide
  XENP020915 vhCDR2
EIRTKANNHATYYAESVKG

SEQ ID NO: 28988 - protein, 10 aa, Artificial Sequence
  Description of Artificial Sequence: Synthetic peptide
  XENP020915 vhCDR3
LATWDWYFDV

SEQ ID NO: 28989 - protein, 218 aa, Artificial Sequence; identical to SEQ ID NO: 17600
  Description of Artificial Sequence: Synthetic polypeptide
  XENP020915 7G8_H3.5_L1_Fab Light Chain

SEQ ID NO: 28990 - protein, 111 aa, Artificial Sequence; identical to SEQ ID NO: 17601
  Description of Artificial Sequence: Synthetic polypeptide
  VL of XENP020915

SEQ ID NO: 28991 - protein, 15 aa, Artificial Sequence
  Description of Artificial Sequence: Synthetic peptide
  XENP020915 vlCDR1
RASQSVDYDGDSYMN

SEQ ID NO: 28992 - protein, 7 aa, Artificial Sequence
  Description of Artificial Sequence: Synthetic peptide
  XENP020915 vlCDR2
AASNLES

SEQ ID NO: 28993 - protein, 9 aa, Artificial Sequence
  Description of Artificial Sequence: Synthetic peptide
  XENP020915 vlCDR3
QQSNEDPFT

SEQ ID NO: 28994 - protein, 226 aa, Artificial Sequence
  Description of Artificial Sequence: Synthetic polypeptide
  XENP020916 7G8_H3.6_L1_Fab Heavy Chain
EVQLVESGGGLVQPGGSLRLSCAASGDTFTDAWMDWVRQAPGKGLEWVAEIRTKANNHATYYAESVKGRFTISRDDSKSSVYLQMNSLRAEDTAVYYCTRLANWDWYFDVWGQGTTVTVSSASTKGPSVFPLAPSSKSTSGGTAALGCLVKDYFPEPVTVSWNSGALTSGVHTFPAVLQSSGLYSLSSVVTVPSSSLGTQTYICNVNHKPSNTKVDKKVEPKSCGS

SEQ ID NO: 28995 - protein, 121 aa, Artificial Sequence
  Description of Artificial Sequence: Synthetic polypeptide
  VH of XENP020916
EVQLVESGGGLVQPGGSLRLSCAASGDTFTDAWMDWVRQAPGKGLEWVAEIRTKANNHATYYAESVKGRFTISRDDSKSSVYLQMNSLRAEDTAVYYCTRLANWDWYFDVWGQGTTVTVSS

SEQ ID NO: 28996 - protein, 5 aa, Artificial Sequence
  Description of Artificial Sequence: Synthetic peptide
  XENP020916 vhCDR1
DAWMD

SEQ ID NO: 28997 - protein, 19 aa, Artificial Sequence
  Description of Artificial Sequence: Synthetic peptide
  XENP020916 vhCDR2
EIRTKANNHATYYAESVKG

SEQ ID NO: 28998 - protein, 10 aa, Artificial Sequence
  Description of Artificial Sequence: Synthetic peptide
  XENP020916 vhCDR3
LANWDWYFDV

SEQ ID NO: 28999 - protein, 218 aa, Artificial Sequence; identical to SEQ ID NO: 17600
  Description of Artificial Sequence: Synthetic polypeptide
  XENP020916 7G8_H3.6_L1_Fab Light Chain

SEQ ID NO: 29000 - protein, 111 aa, Artificial Sequence; identical to SEQ ID NO: 17601
  Description of Artificial Sequence: Synthetic polypeptide
  VL of XENP020916

SEQ ID NO: 29001 - protein, 15 aa, Artificial Sequence
  Description of Artificial Sequence: Synthetic peptide
  XENP020916 vlCDR1
RASQSVDYDGDSYMN

SEQ ID NO: 29002 - protein, 7 aa, Artificial Sequence
  Description of Artificial Sequence: Synthetic peptide
  XENP020916 vlCDR2
AASNLES

SEQ ID NO: 29003 - protein, 9 aa, Artificial Sequence
  Description of Artificial Sequence: Synthetic peptide
  XENP020916 vlCDR3
QQSNEDPFT

SEQ ID NO: 29004 - protein, 226 aa, Artificial Sequence
  Description of Artificial Sequence: Synthetic polypeptide
  XENP020917 7G8_H3.8_L1_Fab Heavy Chain
EVQLVESGGGLVQPGGSLRLSCAASGFTFTDAWMDWVRQAPGKGLEWVAEIRTKANNHATYYAESVKGRFTISRDDSKSSVYLQMNSLRAEDTAVYYCTRLATWDWYFDVWGQGTTVTVSSASTKGPSVFPLAPSSKSTSGGTAALGCLVKDYFPEPVTVSWNSGALTSGVHTFPAVLQSSGLYSLSSVVTVPSSSLGTQTYICNVNHKPSNTKVDKKVEPKSCGS

SEQ ID NO: 29005 - protein, 121 aa, Artificial Sequence
  Description of Artificial Sequence: Synthetic polypeptide
  VH of XENP020917
EVQLVESGGGLVQPGGSLRLSCAASGFTFTDAWMDWVRQAPGKGLEWVAEIRTKANNHATYYAESVKGRFTISRDDSKSSVYLQMNSLRAEDTAVYYCTRLATWDWYFDVWGQGTTVTVSS

SEQ ID NO: 29006 - protein, 5 aa, Artificial Sequence
  Description of Artificial Sequence: Synthetic peptide
  XENP020917 vhCDR1
DAWMD

SEQ ID NO: 29007 - protein, 19 aa, Artificial Sequence
  Description of Artificial Sequence: Synthetic peptide
  XENP020917 vhCDR2
EIRTKANNHATYYAESVKG

SEQ ID NO: 29008 - protein, 10 aa, Artificial Sequence
  Description of Artificial Sequence: Synthetic peptide
  XENP020917 vhCDR3
LATWDWYFDV

SEQ ID NO: 29009 - protein, 218 aa, Artificial Sequence; identical to SEQ ID NO: 17600
  Description of Artificial Sequence: Synthetic polypeptide
  XENP020917 7G8_H3.8_L1_Fab Light Chain

SEQ ID NO: 29010 - protein, 111 aa, Artificial Sequence; identical to SEQ ID NO: 17601
  Description of Artificial Sequence: Synthetic polypeptide
  VL of XENP020917

SEQ ID NO: 29011 - protein, 15 aa, Artificial Sequence
  Description of Artificial Sequence: Synthetic peptide
  XENP020917 vlCDR1
RASQSVDYDGDSYMN

SEQ ID NO: 29012 - protein, 7 aa, Artificial Sequence
  Description of Artificial Sequence: Synthetic peptide
  XENP020917 vlCDR2
AASNLES

SEQ ID NO: 29013 - protein, 9 aa, Artificial Sequence
  Description of Artificial Sequence: Synthetic peptide
  XENP020917 vlCDR3
QQSNEDPFT

SEQ ID NO: 29014 - protein, 226 aa, Artificial Sequence; identical to SEQ ID NO: 28934
  Description of Artificial Sequence: Synthetic polypeptide
  XENP020918 7G8_H3_L1.1_Fab Heavy Chain

SEQ ID NO: 29015 - protein, 121 aa, Artificial Sequence; identical to SEQ ID NO: 17806
  Description of Artificial Sequence: Synthetic polypeptide
  VH of XENP020918

SEQ ID NO: 29016 - protein, 5 aa, Artificial Sequence
  Description of Artificial Sequence: Synthetic peptide
  XENP020918 vhCDR1
DAWMD

SEQ ID NO: 29017 - protein, 19 aa, Artificial Sequence
  Description of Artificial Sequence: Synthetic peptide
  XENP020918 vhCDR2
EIRTKANNHATYYAESVKG

SEQ ID NO: 29018 - protein, 10 aa, Artificial Sequence
  Description of Artificial Sequence: Synthetic peptide
  XENP020918 vhCDR3
LANWDWYFDV

SEQ ID NO: 29019 - protein, 218 aa, Artificial Sequence
  Description of Artificial Sequence: Synthetic polypeptide
  XENP020918 7G8_H3_L1.1_Fab Light Chain
DTVLTQSPSSLSASVGDRVTITCRASQSVDYDDDSYMNWYQQKPGKPPKLLIYGASELESGIPARLSGSGSGTDFTLTISSLQPEDFATYYCQQSNEDPFTFGSGTKLEIKRTVAAPSVFIFPPSDEQLKSGTASVVCLLNNFYPREAKVQWKVDNALQSGNSQESVTEQDSKDSTYSLSSTLTLSKADYEKHKVYACEVTHQGLSSPVTKSFNRGEC

SEQ ID NO: 29020 - protein, 111 aa, Artificial Sequence
  Description of Artificial Sequence: Synthetic polypeptide
  VL of XENP020918
DTVLTQSPSSLSASVGDRVTITCRASQSVDYDDDSYMNWYQQKPGKPPKLLIYGASELESGIPARLSGSGSGTDFTLTISSLQPEDFATYYCQQSNEDPFTFGSGTKLEIK

SEQ ID NO: 29021 - protein, 15 aa, Artificial Sequence
  Description of Artificial Sequence: Synthetic peptide
  XENP020918 vlCDR1
RASQSVDYDDDSYMN

SEQ ID NO: 29022 - protein, 7 aa, Artificial Sequence
  Description of Artificial Sequence: Synthetic peptide
  XENP020918 vlCDR2
GASELES

SEQ ID NO: 29023 - protein, 9 aa, Artificial Sequence
  Description of Artificial Sequence: Synthetic peptide
  XENP020918 vlCDR3
QQSNEDPFT

SEQ ID NO: 29024 - protein, 226 aa, Artificial Sequence; identical to SEQ ID NO: 28934
  Description of Artificial Sequence: Synthetic polypeptide
  XENP020919 7G8_H3_L1.2_Fab Heavy Chain

SEQ ID NO: 29025 - protein, 121 aa, Artificial Sequence; identical to SEQ ID NO: 17806
  Description of Artificial Sequence: Synthetic polypeptide
  VH of XENP020919

SEQ ID NO: 29026 - protein, 5 aa, Artificial Sequence
  Description of Artificial Sequence: Synthetic peptide
  XENP020919 vhCDR1
DAWMD

SEQ ID NO: 29027 - protein, 19 aa, Artificial Sequence
  Description of Artificial Sequence: Synthetic peptide
  XENP020919 vhCDR2
EIRTKANNHATYYAESVKG

SEQ ID NO: 29028 - protein, 10 aa, Artificial Sequence
  Description of Artificial Sequence: Synthetic peptide
  XENP020919 vhCDR3
LANWDWYFDV

SEQ ID NO: 29029 - protein, 218 aa, Artificial Sequence
  Description of Artificial Sequence: Synthetic polypeptide
  XENP020919 7G8_H3_L1.2_Fab Light Chain
DTVLTQSPSSLSASVGDRVTITCRASQSVDYDDDSYMNWYQQKPGKPPKLLIYGASNLESGIPARLSGSGSGTDFTLTISSLQPEDFATYYCQQSNEDPFTFGSGTKLEIKRTVAAPSVFIFPPSDEQLKSGTASVVCLLNNFYPREAKVQWKVDNALQSGNSQESVTEQDSKDSTYSLSSTLTLSKADYEKHKVYACEVTHQGLSSPVTKSFNRGEC

SEQ ID NO: 29030 - protein, 111 aa, Artificial Sequence
  Description of Artificial Sequence: Synthetic polypeptide
  VL of XENP020919
DTVLTQSPSSLSASVGDRVTITCRASQSVDYDDDSYMNWYQQKPGKPPKLLIYGASNLESGIPARLSGSGSGTDFTLTISSLQPEDFATYYCQQSNEDPFTFGSGTKLEIK

SEQ ID NO: 29031 - protein, 15 aa, Artificial Sequence
  Description of Artificial Sequence: Synthetic peptide
  XENP020919 vlCDR1
RASQSVDYDDDSYMN

SEQ ID NO: 29032 - protein, 7 aa, Artificial Sequence
  Description of Artificial Sequence: Synthetic peptide
  XENP020919 vlCDR2
GASNLES

SEQ ID NO: 29033 - protein, 9 aa, Artificial Sequence
  Description of Artificial Sequence: Synthetic peptide
  XENP020919 vlCDR3
QQSNEDPFT

SEQ ID NO: 29034 - protein, 226 aa, Artificial Sequence; identical to SEQ ID NO: 28934
  Description of Artificial Sequence: Synthetic polypeptide
  XENP020920 7G8_H3_L1.3_Fab Heavy Chain

SEQ ID NO: 29035 - protein, 121 aa, Artificial Sequence; identical to SEQ ID NO: 17806
  Description of Artificial Sequence: Synthetic polypeptide
  VH of XENP020920

SEQ ID NO: 29036 - protein, 5 aa, Artificial Sequence
  Description of Artificial Sequence: Synthetic peptide
  XENP020920 vhCDR1
DAWMD

SEQ ID NO: 29037 - protein, 19 aa, Artificial Sequence
  Description of Artificial Sequence: Synthetic peptide
  XENP020920 vhCDR2
EIRTKANNHATYYAESVKG

SEQ ID NO: 29038 - protein, 10 aa, Artificial Sequence
  Description of Artificial Sequence: Synthetic peptide
  XENP020920 vhCDR3
LANWDWYFDV

SEQ ID NO: 29039 - protein, 218 aa, Artificial Sequence
  Description of Artificial Sequence: Synthetic polypeptide
  XENP020920 7G8_H3_L1.3_Fab Light Chain
DTVLTQSPSSLSASVGDRVTITCRASQSVDYDDDSYMNWYQQKPGKPPKLLIYAASELESGIPARLSGSGSGTDFTLTISSLQPEDFATYYCQQSNEDPFTFGSGTKLEIKRTVAAPSVFIFPPSDEQLKSGTASVVCLLNNFYPREAKVQWKVDNALQSGNSQESVTEQDSKDSTYSLSSTLTLSKADYEKHKVYACEVTHQGLSSPVTKSFNRGEC

SEQ ID NO: 29040 - protein, 111 aa, Artificial Sequence
  Description of Artificial Sequence: Synthetic polypeptide
  VL of XENP020920
DTVLTQSPSSLSASVGDRVTITCRASQSVDYDDDSYMNWYQQKPGKPPKLLIYAASELESGIPARLSGSGSGTDFTLTISSLQPEDFATYYCQQSNEDPFTFGSGTKLEIK

SEQ ID NO: 29041 - protein, 15 aa, Artificial Sequence
  Description of Artificial Sequence: Synthetic peptide
  XENP020920 vlCDR1
RASQSVDYDDDSYMN

SEQ ID NO: 29042 - protein, 7 aa, Artificial Sequence
  Description of Artificial Sequence: Synthetic peptide
  XENP020920 vlCDR2
AASELES

SEQ ID NO: 29043 - protein, 9 aa, Artificial Sequence
  Description of Artificial Sequence: Synthetic peptide
  XENP020920 vlCDR3
QQSNEDPFT

SEQ ID NO: 29044 - protein, 226 aa, Artificial Sequence; identical to SEQ ID NO: 28934
  Description of Artificial Sequence: Synthetic polypeptide
  XENP020921 7G8_H3_L1.4_Fab Heavy Chain

SEQ ID NO: 29045 - protein, 121 aa, Artificial Sequence; identical to SEQ ID NO: 17806
  Description of Artificial Sequence: Synthetic polypeptide
  VH of XENP020921

SEQ ID NO: 29046 - protein, 5 aa, Artificial Sequence
  Description of Artificial Sequence: Synthetic peptide
  XENP020921 vhCDR1
DAWMD

SEQ ID NO: 29047 - protein, 19 aa, Artificial Sequence
  Description of Artificial Sequence: Synthetic peptide
  XENP020921 vhCDR2
EIRTKANNHATYYAESVKG

SEQ ID NO: 29048 - protein, 10 aa, Artificial Sequence
  Description of Artificial Sequence: Synthetic peptide
  XENP020921 vhCDR3
LANWDWYFDV

SEQ ID NO: 29049 - protein, 218 aa, Artificial Sequence
  Description of Artificial Sequence: Synthetic polypeptide
  XENP020921 7G8_H3_L1.4_Fab Light Chain
DTVLTQSPSSLSASVGDRVTITCRASQSVDYDGDSYMNWYQQKPGKPPKLLIYGASELESGIPARLSGSGSGTDFTLTISSLQPEDFATYYCQQSNEDPFTFGSGTKLEIKRTVAAPSVFIFPPSDEQLKSGTASVVCLLNNFYPREAKVQWKVDNALQSGNSQESVTEQDSKDSTYSLSSTLTLSKADYEKHKVYACEVTHQGLSSPVTKSFNRGEC

SEQ ID NO: 29050 - protein, 111 aa, Artificial Sequence
  Description of Artificial Sequence: Synthetic polypeptide
  VL of XENP020921
DTVLTQSPSSLSASVGDRVTITCRASQSVDYDGDSYMNWYQQKPGKPPKLLIYGASELESGIPARLSGSGSGTDFTLTISSLQPEDFATYYCQQSNEDPFTFGSGTKLEIK

SEQ ID NO: 29051 - protein, 15 aa, Artificial Sequence
  Description of Artificial Sequence: Synthetic peptide
  XENP020921 vlCDR1
RASQSVDYDGDSYMN

SEQ ID NO: 29052 - protein, 7 aa, Artificial Sequence
  Description of Artificial Sequence: Synthetic peptide
  XENP020921 vlCDR2
GASELES

SEQ ID NO: 29053 - protein, 9 aa, Artificial Sequence
  Description of Artificial Sequence: Synthetic peptide
  XENP020921 vlCDR3
QQSNEDPFT

SEQ ID NO: 29054 - protein, 226 aa, Artificial Sequence; identical to SEQ ID NO: 28934
  Description of Artificial Sequence: Synthetic polypeptide
  XENP020922 7G8_H3_L1.5_Fab Heavy Chain

SEQ ID NO: 29055 - protein, 121 aa, Artificial Sequence; identical to SEQ ID NO: 17806
  Description of Artificial Sequence: Synthetic polypeptide
  VH of XENP020922

SEQ ID NO: 29056 - protein, 5 aa, Artificial Sequence
  Description of Artificial Sequence: Synthetic peptide
  XENP020922 vhCDR1
DAWMD

SEQ ID NO: 29057 - protein, 19 aa, Artificial Sequence
  Description of Artificial Sequence: Synthetic peptide
  XENP020922 vhCDR2
EIRTKANNHATYYAESVKG

SEQ ID NO: 29058 - protein, 10 aa, Artificial Sequence
  Description of Artificial Sequence: Synthetic peptide
  XENP020922 vhCDR3
LANWDWYFDV

SEQ ID NO: 29059 - protein, 218 aa, Artificial Sequence
  Description of Artificial Sequence: Synthetic polypeptide
  XENP020922 7G8_H3_L1.5_Fab Light Chain
DTVLTQSPSSLSASVGDRVTITCRASQSVDYDDDSYMNWYQQKPGKPPKLLIYSASELESGIPARLSGSGSGTDFTLTISSLQPEDFATYYCQQSNEDPFTFGSGTKLEIKRTVAAPSVFIFPPSDEQLKSGTASVVCLLNNFYPREAKVQWKVDNALQSGNSQESVTEQDSKDSTYSLSSTLTLSKADYEKHKVYACEVTHQGLSSPVTKSFNRGEC

SEQ ID NO: 29060 - protein, 111 aa, Artificial Sequence
  Description of Artificial Sequence: Synthetic polypeptide
  VL of XENP020922
DTVLTQSPSSLSASVGDRVTITCRASQSVDYDDDSYMNWYQQKPGKPPKLLIYSASELESGIPARLSGSGSGTDFTLTISSLQPEDFATYYCQQSNEDPFTFGSGTKLEIK

SEQ ID NO: 29061 - protein, 15 aa, Artificial Sequence
  Description of Artificial Sequence: Synthetic peptide
  XENP020922 vlCDR1
RASQSVDYDDDSYMN

SEQ ID NO: 29062 - protein, 7 aa, Artificial Sequence
  Description of Artificial Sequence: Synthetic peptide
  XENP020922 vlCDR2
SASELES

SEQ ID NO: 29063 - protein, 9 aa, Artificial Sequence
  Description of Artificial Sequence: Synthetic peptide
  XENP020922 vlCDR3
QQSNEDPFT

SEQ ID NO: 29064 - protein, 226 aa, Artificial Sequence; identical to SEQ ID NO: 28934
  Description of Artificial Sequence: Synthetic polypeptide
  XENP020923 7G8_H3_L1.6_Fab Heavy Chain

SEQ ID NO: 29065 - protein, 121 aa, Artificial Sequence; identical to SEQ ID NO: 17806
  Description of Artificial Sequence: Synthetic polypeptide
  VH of XENP020923

SEQ ID NO: 29066 - protein, 5 aa, Artificial Sequence
  Description of Artificial Sequence: Synthetic peptide
  XENP020923 vhCDR1
DAWMD

SEQ ID NO: 29067 - protein, 19 aa, Artificial Sequence
  Description of Artificial Sequence: Synthetic peptide
  XENP020923 vhCDR2
EIRTKANNHATYYAESVKG

SEQ ID NO: 29068 - protein, 10 aa, Artificial Sequence
  Description of Artificial Sequence: Synthetic peptide
  XENP020923 vhCDR3
LANWDWYFDV

SEQ ID NO: 29069 - protein, 218 aa, Artificial Sequence
  Description of Artificial Sequence: Synthetic polypeptide
  XENP020923 7G8_H3_L1.6_Fab Light Chain
DTVLTQSPSSLSASVGDRVTITCRASQSVDYDDDSYMNWYQQKPGKPPKLLIYSASNLESGIPARLSGSGSGTDFTLTISSLQPEDFATYYCQQSNEDPFTFGSGTKLEIKRTVAAPSVFIFPPSDEQLKSGTASVVCLLNNFYPREAKVQWKVDNALQSGNSQESVTEQDSKDSTYSLSSTLTLSKADYEKHKVYACEVTHQGLSSPVTKSFNRGEC

SEQ ID NO: 29070 - protein, 111 aa, Artificial Sequence
  Description of Artificial Sequence: Synthetic polypeptide
  VL of XENP020923
DTVLTQSPSSLSASVGDRVTITCRASQSVDYDDDSYMNWYQQKPGKPPKLLIYSASNLESGIPARLSGSGSGTDFTLTISSLQPEDFATYYCQQSNEDPFTFGSGTKLEIK

SEQ ID NO: 29071 - protein, 15 aa, Artificial Sequence
  Description of Artificial Sequence: Synthetic peptide
  XENP020923 vlCDR1
RASQSVDYDDDSYMN

SEQ ID NO: 29072 - protein, 7 aa, Artificial Sequence
  Description of Artificial Sequence: Synthetic peptide
  XENP020923 vlCDR2
SASNLES

SEQ ID NO: 29073 - protein, 9 aa, Artificial Sequence
  Description of Artificial Sequence: Synthetic peptide
  XENP020923 vlCDR3
QQSNEDPFT

SEQ ID NO: 29074 - protein, 226 aa, Artificial Sequence; identical to SEQ ID NO: 28934
  Description of Artificial Sequence: Synthetic polypeptide
  XENP020924 7G8_H3_L1.8_Fab Heavy Chain

SEQ ID NO: 29075 - protein, 121 aa, Artificial Sequence; identical to SEQ ID NO: 17806
  Description of Artificial Sequence: Synthetic polypeptide
  VH of XENP020924

SEQ ID NO: 29076 - protein, 5 aa, Artificial Sequence
  Description of Artificial Sequence: Synthetic peptide
  XENP020924 vhCDR1
DAWMD

SEQ ID NO: 29077 - protein, 19 aa, Artificial Sequence
  Description of Artificial Sequence: Synthetic peptide
  XENP020924 vhCDR2
EIRTKANNHATYYAESVKG

SEQ ID NO: 29078 - protein, 10 aa, Artificial Sequence
  Description of Artificial Sequence: Synthetic peptide
  XENP020924 vhCDR3
LANWDWYFDV

SEQ ID NO: 29079 - protein, 218 aa, Artificial Sequence
  Description of Artificial Sequence: Synthetic polypeptide
  XENP020924 7G8_H3_L1.8_Fab Light Chain
DTVLTQSPSSLSASVGDRVTITCRASQSVDYDGDSYMNWYQQKPGKPPKLLIYSASELESGIPARLSGSGSGTDFTLTISSLQPEDFATYYCQQSNEDPFTFGSGTKLEIKRTVAAPSVFIFPPSDEQLKSGTASVVCLLNNFYPREAKVQWKVDNALQSGNSQESVTEQDSKDSTYSLSSTLTLSKADYEKHKVYACEVTHQGLSSPVTKSFNRGEC

SEQ ID NO: 29080 - protein, 111 aa, Artificial Sequence
  Description of Artificial Sequence: Synthetic polypeptide
  VL of XENP020924
DTVLTQSPSSLSASVGDRVTITCRASQSVDYDGDSYMNWYQQKPGKPPKLLIYSASELESGIPARLSGSGSGTDFTLTISSLQPEDFATYYCQQSNEDPFTFGSGTKLEIK

SEQ ID NO: 29081 - protein, 15 aa, Artificial Sequence
  Description of Artificial Sequence: Synthetic peptide
  XENP020924 vlCDR1
RASQSVDYDGDSYMN

SEQ ID NO: 29082 - protein, 7 aa, Artificial Sequence
  Description of Artificial Sequence: Synthetic peptide
  XENP020924 vlCDR2
SASELES

SEQ ID NO: 29083 - protein, 9 aa, Artificial Sequence
  Description of Artificial Sequence: Synthetic peptide
  XENP020924 vlCDR3
QQSNEDPFT

SEQ ID NO: 29084 - protein, 226 aa, Artificial Sequence; identical to SEQ ID NO: 28944
  Description of Artificial Sequence: Synthetic polypeptide
  XENP020925 7G8_H3.1_L1.1_Fab Heavy Chain

SEQ ID NO: 29085 - protein, 121 aa, Artificial Sequence; identical to SEQ ID NO: 28945
  Description of Artificial Sequence: Synthetic polypeptide
  VH of XENP020925

SEQ ID NO: 29086 - protein, 5 aa, Artificial Sequence
  Description of Artificial Sequence: Synthetic peptide
  XENP020925 vhCDR1
DAWMD

SEQ ID NO: 29087 - protein, 19 aa, Artificial Sequence
  Description of Artificial Sequence: Synthetic peptide
  XENP020925 vhCDR2
EIRTKANNHATYYAESVKG

SEQ ID NO: 29088 - protein, 10 aa, Artificial Sequence
  Description of Artificial Sequence: Synthetic peptide
  XENP020925 vhCDR3
LATWDWYFDV

SEQ ID NO: 29089 - protein, 218 aa, Artificial Sequence; identical to SEQ ID NO: 29019
  Description of Artificial Sequence: Synthetic polypeptide
  XENP020925 7G8_H3.1_L1.1_Fab Light Chain

SEQ ID NO: 29090 - protein, 111 aa, Artificial Sequence; identical to SEQ ID NO: 29020
  Description of Artificial Sequence: Synthetic polypeptide
  VL of XENP020925

SEQ ID NO: 29091 - protein, 15 aa, Artificial Sequence
  Description of Artificial Sequence: Synthetic peptide
  XENP020925 vlCDR1
RASQSVDYDDDSYMN

SEQ ID NO: 29092 - protein, 7 aa, Artificial Sequence
  Description of Artificial Sequence: Synthetic peptide
  XENP020925 vlCDR2
GASELES

SEQ ID NO: 29093 - protein, 9 aa, Artificial Sequence
  Description of Artificial Sequence: Synthetic peptide
  XENP020925 vlCDR3
QQSNEDPFT

SEQ ID NO: 29094 - protein, 226 aa, Artificial Sequence; identical to SEQ ID NO: 28944
  Description of Artificial Sequence: Synthetic polypeptide
  XENP020926 7G8_H3.1_L1.5_Fab Heavy Chain

SEQ ID NO: 29095 - protein, 121 aa, Artificial Sequence; identical to SEQ ID NO: 28945
  Description of Artificial Sequence: Synthetic polypeptide
  VH of XENP020926

SEQ ID NO: 29096 - protein, 5 aa, Artificial Sequence
  Description of Artificial Sequence: Synthetic peptide
  XENP020926 vhCDR1
DAWMD

SEQ ID NO: 29097 - protein, 19 aa, Artificial Sequence
  Description of Artificial Sequence: Synthetic peptide
  XENP020926 vhCDR2
EIRTKANNHATYYAESVKG

SEQ ID NO: 29098 - protein, 10 aa, Artificial Sequence
  Description of Artificial Sequence: Synthetic peptide
  XENP020926 vhCDR3
LATWDWYFDV

SEQ ID NO: 29099 - protein, 218 aa, Artificial Sequence; identical to SEQ ID NO: 29059
  Description of Artificial Sequence: Synthetic polypeptide
  XENP020926 7G8_H3.1_L1.5_Fab Light Chain

SEQ ID NO: 29100 - protein, 111 aa, Artificial Sequence; identical to SEQ ID NO: 29060
  Description of Artificial Sequence: Synthetic polypeptide
  VL of XENP020926

SEQ ID NO: 29101 - protein, 15 aa, Artificial Sequence
  Description of Artificial Sequence: Synthetic peptide
  XENP020926 vlCDR1
RASQSVDYDDDSYMN

SEQ ID NO: 29102 - protein, 7 aa, Artificial Sequence
  Description of Artificial Sequence: Synthetic peptide
  XENP020926 vlCDR2
SASELES

SEQ ID NO: 29103 - protein, 9 aa, Artificial Sequence
  Description of Artificial Sequence: Synthetic peptide
  XENP020926 vlCDR3
QQSNEDPFT

SEQ ID NO: 29104 - protein, 226 aa, Artificial Sequence; identical to SEQ ID NO: 28984
  Description of Artificial Sequence: Synthetic polypeptide
  XENP020927 7G8_H3.5_L1.1_Fab Heavy Chain

SEQ ID NO: 29105 - protein, 121 aa, Artificial Sequence; identical to SEQ ID NO: 28985
  Description of Artificial Sequence: Synthetic polypeptide
  VH of XENP020927

SEQ ID NO: 29106 - protein, 5 aa, Artificial Sequence
  Description of Artificial Sequence: Synthetic peptide
  XENP020927 vhCDR1
DAWMD

SEQ ID NO: 29107 - protein, 19 aa, Artificial Sequence
  Description of Artificial Sequence: Synthetic peptide
  XENP020927 vhCDR2
EIRTKANNHATYYAESVKG

SEQ ID NO: 29108 - protein, 10 aa, Artificial Sequence
  Description of Artificial Sequence: Synthetic peptide
  XENP020927 vhCDR3
LATWDWYFDV

SEQ ID NO: 29109 - protein, 218 aa, Artificial Sequence; identical to SEQ ID NO: 29019
  Description of Artificial Sequence: Synthetic polypeptide
  XENP020927 7G8_H3.5_L1.1_Fab Light Chain

SEQ ID NO: 29110 - protein, 111 aa, Artificial Sequence; identical to SEQ ID NO: 29020
  Description of Artificial Sequence: Synthetic polypeptide
  VL of XENP020927

SEQ ID NO: 29111 - protein, 15 aa, Artificial Sequence
  Description of Artificial Sequence: Synthetic peptide
  XENP020927 vlCDR1
RASQSVDYDDDSYMN

SEQ ID NO: 29112 - protein, 7 aa, Artificial Sequence
  Description of Artificial Sequence: Synthetic peptide
  XENP020927 vlCDR2
GASELES

SEQ ID NO: 29113 - protein, 9 aa, Artificial Sequence
  Description of Artificial Sequence: Synthetic peptide
  XENP020927 vlCDR3
QQSNEDPFT

SEQ ID NO: 29114 - protein, 226 aa, Artificial Sequence; identical to SEQ ID NO: 28984
  Description of Artificial Sequence: Synthetic polypeptide
  XENP020928 7G8_H3.5_L1.5_Fab Heavy Chain

SEQ ID NO: 29115 - protein, 121 aa, Artificial Sequence; identical to SEQ ID NO: 28985
  Description of Artificial Sequence: Synthetic polypeptide
  VH of XENP020928

SEQ ID NO: 29116 - protein, 5 aa, Artificial Sequence
  Description of Artificial Sequence: Synthetic peptide
  XENP020928 vhCDR1
DAWMD

SEQ ID NO: 29117 - protein, 19 aa, Artificial Sequence
  Description of Artificial Sequence: Synthetic peptide
  XENP020928 vhCDR2
EIRTKANNHATYYAESVKG

SEQ ID NO: 29118 - protein, 10 aa, Artificial Sequence
  Description of Artificial Sequence: Synthetic peptide
  XENP020928 vhCDR3
LATWDWYFDV

SEQ ID NO: 29119 - protein, 218 aa, Artificial Sequence; identical to SEQ ID NO: 29059
  Description of Artificial Sequence: Synthetic polypeptide
  XENP020928 7G8_H3.5_L1.5_Fab Light Chain

SEQ ID NO: 29120 - protein, 111 aa, Artificial Sequence; identical to SEQ ID NO: 29060
  Description of Artificial Sequence: Synthetic polypeptide
  VL of XENP020928

SEQ ID NO: 29121 - protein, 15 aa, Artificial Sequence
  Description of Artificial Sequence: Synthetic peptide
  XENP020928 vlCDR1
RASQSVDYDDDSYMN

SEQ ID NO: 29122 - protein, 7 aa, Artificial Sequence
  Description of Artificial Sequence: Synthetic peptide
  XENP020928 vlCDR2
SASELES

SEQ ID NO: 29123 - protein, 9 aa, Artificial Sequence
  Description of Artificial Sequence: Synthetic peptide
  XENP020928 vlCDR3
QQSNEDPFT

SEQ ID NO: 29124 - protein, 226 aa, Artificial Sequence; identical to SEQ ID NO: 28934
  Description of Artificial Sequence: Synthetic polypeptide
  XENP020929 7G8_H3L0_Fab Heavy Chain

SEQ ID NO: 29125 - protein, 121 aa, Artificial Sequence; identical to SEQ ID NO: 17806
  Description of Artificial Sequence: Synthetic polypeptide
  VH of XENP020929

SEQ ID NO: 29126 - protein, 5 aa, Artificial Sequence
  Description of Artificial Sequence: Synthetic peptide
  XENP020929 vhCDR1
DAWMD

SEQ ID NO: 29127 - protein, 19 aa, Artificial Sequence
  Description of Artificial Sequence: Synthetic peptide
  XENP020929 vhCDR2
EIRTKANNHATYYAESVKG

SEQ ID NO: 29128 - protein, 10 aa, Artificial Sequence
  Description of Artificial Sequence: Synthetic peptide
  XENP020929 vhCDR3
LANWDWYFDV

SEQ ID NO: 29129 - protein, 218 aa, Artificial Sequence; identical to SEQ ID NO: 17590
  Description of Artificial Sequence: Synthetic polypeptide
  XENP020929 7G8_H3L0_Fab Light Chain

SEQ ID NO: 29130 - protein, 111 aa, Artificial Sequence; identical to SEQ ID NO: 17591
  Description of Artificial Sequence: Synthetic polypeptide
  VL of XENP020929

SEQ ID NO: 29131 - protein, 15 aa, Artificial Sequence
  Description of Artificial Sequence: Synthetic peptide
  XENP020929 vlCDR1
KASQSVDYDGDSYMN

SEQ ID NO: 29132 - protein, 7 aa, Artificial Sequence
  Description of Artificial Sequence: Synthetic peptide
  XENP020929 vlCDR2
AASNLES

SEQ ID NO: 29133 - protein, 9 aa, Artificial Sequence
  Description of Artificial Sequence: Synthetic peptide
  XENP020929 vlCDR3
QQSNEDPFT

SEQ ID NO: 29134 - protein, 226 aa, Artificial Sequence
  Description of Artificial Sequence: Synthetic polypeptide
  XENP020930 7G8_H0L0_Fab Heavy Chain
EVKLEESGGGLVQPGGSMKLSCAASGFTFSDAWMDWVRQSPEKGLEWVAEIRTKANNHATYYAESVKGRFTISRDDSKSSVYLQMNSLRAEDTGIYYCTRLANWDWYFDVWGAGTTVTVSSASTKGPSVFPLAPSSKSTSGGTAALGCLVKDYFPEPVTVSWNSGALTSGVHTFPAVLQSSGLYSLSSVVTVPSSSLGTQTYICNVNHKPSNTKVDKKVEPKSCGS

SEQ ID NO: 29135 - protein, 121 aa, Artificial Sequence; identical to SEQ ID NO: 17586
  Description of Artificial Sequence: Synthetic polypeptide
  VH of XENP020930

SEQ ID NO: 29136 - protein, 5 aa, Artificial Sequence
  Description of Artificial Sequence: Synthetic peptide
  XENP020930 vhCDR1
DAWMD

SEQ ID NO: 29137 - protein, 19 aa, Artificial Sequence
  Description of Artificial Sequence: Synthetic peptide
  XENP020930 vhCDR2
EIRTKANNHATYYAESVKG

SEQ ID NO: 29138 - protein, 10 aa, Artificial Sequence
  Description of Artificial Sequence: Synthetic peptide
  XENP020930 vhCDR3
LANWDWYFDV

SEQ ID NO: 29139 - protein, 218 aa, Artificial Sequence; identical to SEQ ID NO: 17590
  Description of Artificial Sequence: Synthetic polypeptide
  XENP020930 7G8_H0L0_Fab Light Chain

SEQ ID NO: 29140 - protein, 111 aa, Artificial Sequence; identical to SEQ ID NO: 17591
  Description of Artificial Sequence: Synthetic polypeptide
  VL of XENP020930

SEQ ID NO: 29141 - protein, 15 aa, Artificial Sequence
  Description of Artificial Sequence: Synthetic peptide
  XENP020930 vlCDR1
KASQSVDYDGDSYMN

SEQ ID NO: 29142 - protein, 7 aa, Artificial Sequence
  Description of Artificial Sequence: Synthetic peptide
  XENP020930 vlCDR2
AASNLES

SEQ ID NO: 29143 - protein, 9 aa, Artificial Sequence
  Description of Artificial Sequence: Synthetic peptide
  XENP020930 vlCDR3
QQSNEDPFT

SEQ ID NO: 29144 - protein, 226 aa, Artificial Sequence
  Description of Artificial Sequence: Synthetic polypeptide
  XENP020931 7G8_H1L0_Fab Heavy Chain
QVQLVQSGAEVKKPGASVKVSCKASGFTFSDAWMDWVRQAPGQGLEWMGEIRTKANNHATYYAEKFQGRVTMTRDDSTSTVYMELSSLRSEDTAVYYCTRLANWDWYFDVWGAGTTVTVSSASTKGPSVFPLAPSSKSTSGGTAALGCLVKDYFPEPVTVSWNSGALTSGVHTFPAVLQSSGLYSLSSVVTVPSSSLGTQTYICNVNHKPSNTKVDKKVEPKSCGS

SEQ ID NO: 29145 - protein, 121 aa, Artificial Sequence; identical to SEQ ID NO: 17596
  Description of Artificial Sequence: Synthetic polypeptide
  VH of XENP020931

SEQ ID NO: 29146 - protein, 5 aa, Artificial Sequence
  Description of Artificial Sequence: Synthetic peptide
  XENP020931 vhCDR1
DAWMD

SEQ ID NO: 29147 - protein, 19 aa, Artificial Sequence
  Description of Artificial Sequence: Synthetic peptide
  XENP020931 vhCDR2
EIRTKANNHATYYAEKFQG

SEQ ID NO: 29148 - protein, 10 aa, Artificial Sequence
  Description of Artificial Sequence: Synthetic peptide
  XENP020931 vhCDR3
LANWDWYFDV

SEQ ID NO: 29149 - protein, 218 aa, Artificial Sequence; identical to SEQ ID NO: 17590
  Description of Artificial Sequence: Synthetic polypeptide
  XENP020931 7G8_H1L0_Fab Light Chain

SEQ ID NO: 29150 - protein, 111 aa, Artificial Sequence; identical to SEQ ID NO: 17591
  Description of Artificial Sequence: Synthetic polypeptide
  VL of XENP020931

SEQ ID NO: 29151 - protein, 15 aa, Artificial Sequence
  Description of Artificial Sequence: Synthetic peptide
  XENP020931 vlCDR1
KASQSVDYDGDSYMN

SEQ ID NO: 29152 - protein, 7 aa, Artificial Sequence
  Description of Artificial Sequence: Synthetic peptide
  XENP020931 vlCDR2
AASNLES

SEQ ID NO: 29153 - protein, 9 aa, Artificial Sequence
  Description of Artificial Sequence: Synthetic peptide
  XENP020931 vlCDR3
QQSNEDPFT

SEQ ID NO: 29154 - protein, 226 aa, Artificial Sequence
  Description of Artificial Sequence: Synthetic polypeptide
  XENP020932 7G8_H2L0_Fab Heavy Chain
EVQLVESGGGLVQPGGSLRLSCAASGFTFSDAWMDWVRQAPGKGLEWVGEIRTKANNHATYYAESVKGRFTISRDDSKSSVYLQMNSLKTEDTAVYYCTRLANWDWYFDVWGAGTTVTVSSASTKGPSVFPLAPSSKSTSGGTAALGCLVKDYFPEPVTVSWNSGALTSGVHTFPAVLQSSGLYSLSSVVTVPSSSLGTQTYICNVNHKPSNTKVDKKVEPKSCGS

SEQ ID NO: 29155 - protein, 121 aa, Artificial Sequence; identical to SEQ ID NO: 17626
  Description of Artificial Sequence: Synthetic polypeptide
  VH of XENP020932

SEQ ID NO: 29156 - protein, 5 aa, Artificial Sequence
  Description of Artificial Sequence: Synthetic peptide
  XENP020932 vhCDR1
DAWMD

SEQ ID NO: 29157 - protein, 19 aa, Artificial Sequence
  Description of Artificial Sequence: Synthetic peptide
  XENP020932 vhCDR2
EIRTKANNHATYYAESVKG

SEQ ID NO: 29158 - protein, 10 aa, Artificial Sequence
  Description of Artificial Sequence: Synthetic peptide
  XENP020932 vhCDR3
LANWDWYFDV

SEQ ID NO: 29159 - protein, 218 aa, Artificial Sequence; identical to SEQ ID NO: 17590
  Description of Artificial Sequence: Synthetic polypeptide
  XENP020932 7G8_H2L0_Fab Light Chain

SEQ ID NO: 29160 - protein, 111 aa, Artificial Sequence; identical to SEQ ID NO: 17591
  Description of Artificial Sequence: Synthetic polypeptide
  VL of XENP020932

SEQ ID NO: 29161 - protein, 15 aa, Artificial Sequence
  Description of Artificial Sequence: Synthetic peptide
  XENP020932 vlCDR1
KASQSVDYDGDSYMN

SEQ ID NO: 29162 - protein, 7 aa, Artificial Sequence
  Description of Artificial Sequence: Synthetic peptide
  XENP020932 vlCDR2
AASNLES

SEQ ID NO: 29163 - protein, 9 aa, Artificial Sequence
  Description of Artificial Sequence: Synthetic peptide
  XENP020932 vlCDR3
QQSNEDPFT

SEQ ID NO: 29164 - protein, 226 aa, Artificial Sequence
  Description of Artificial Sequence: Synthetic polypeptide
  XENP020933 7G8_H0.1_L0_Fab Heavy Chain
EVKLEESGGGLVQPGGSMKLSCAASGYTFSDAWMDWVRQSPEKGLEWVAEIRTKANNHATYYAESVKGRFTISRDDSKSSVYLQMNSLRAEDTGIYYCTRLANWDWYFDVWGAGTTVTVSSASTKGPSVFPLAPSSKSTSGGTAALGCLVKDYFPEPVTVSWNSGALTSGVHTFPAVLQSSGLYSLSSVVTVPSSSLGTQTYICNVNHKPSNTKVDKKVEPKSCGS

SEQ ID NO: 29165 - protein, 121 aa, Artificial Sequence; identical to SEQ ID NO: 18216
  Description of Artificial Sequence: Synthetic polypeptide
  VH of XENP020933

SEQ ID NO: 29166 - protein, 5 aa, Artificial Sequence
  Description of Artificial Sequence: Synthetic peptide
  XENP020933 vhCDR1
DAWMD

SEQ ID NO: 29167 - protein, 19 aa, Artificial Sequence
  Description of Artificial Sequence: Synthetic peptide
  XENP020933 vhCDR2
EIRTKANNHATYYAESVKG

SEQ ID NO: 29168 - protein, 10 aa, Artificial Sequence
  Description of Artificial Sequence: Synthetic peptide
  XENP020933 vhCDR3
LANWDWYFDV

SEQ ID NO: 29169 - protein, 218 aa, Artificial Sequence; identical to SEQ ID NO: 17590
  Description of Artificial Sequence: Synthetic polypeptide
  XENP020933 7G8_H0.1_L0_Fab Light Chain

SEQ ID NO: 29170 - protein, 111 aa, Artificial Sequence; identical to SEQ ID NO: 17591
  Description of Artificial Sequence: Synthetic polypeptide
  VL of XENP020933

SEQ ID NO: 29171 - protein, 15 aa, Artificial Sequence
  Description of Artificial Sequence: Synthetic peptide
  XENP020933 vlCDR1
KASQSVDYDGDSYMN

SEQ ID NO: 29172 - protein, 7 aa, Artificial Sequence
  Description of Artificial Sequence: Synthetic peptide
  XENP020933 vlCDR2
AASNLES

SEQ ID NO: 29173 - protein, 9 aa, Artificial Sequence
  Description of Artificial Sequence: Synthetic peptide
  XENP020933 vlCDR3
QQSNEDPFT

SEQ ID NO: 29174 - protein, 226 aa, Artificial Sequence
  Description of Artificial Sequence: Synthetic polypeptide
  XENP020934 7G8_H0.2_L0_Fab Heavy Chain
EVKLEESGGGLVQPGGSMKLSCAASGGTFSDAWMDWVRQSPEKGLEWVAEIRTKANNHATYYAESVKGRFTISRDDSKSSVYLQMNSLRAEDTGIYYCTRLANWDWYFDVWGAGTTVTVSSASTKGPSVFPLAPSSKSTSGGTAALGCLVKDYFPEPVTVSWNSGALTSGVHTFPAVLQSSGLYSLSSVVTVPSSSLGTQTYICNVNHKPSNTKVDKKVEPKSCGS

SEQ ID NO: 29175 - protein, 121 aa, Artificial Sequence; identical to SEQ ID NO: 18226
  Description of Artificial Sequence: Synthetic polypeptide
  VH of XENP020934

SEQ ID NO: 29176 - protein, 5 aa, Artificial Sequence
  Description of Artificial Sequence: Synthetic peptide
  XENP020934 vhCDR1
DAWMD

SEQ ID NO: 29177 - protein, 19 aa, Artificial Sequence
  Description of Artificial Sequence: Synthetic peptide
  XENP020934 vhCDR2
EIRTKANNHATYYAESVKG

SEQ ID NO: 29178 - protein, 10 aa, Artificial Sequence
  Description of Artificial Sequence: Synthetic peptide
  XENP020934 vhCDR3
LANWDWYFDV

SEQ ID NO: 29179 - protein, 218 aa, Artificial Sequence; identical to SEQ ID NO: 17590
  Description of Artificial Sequence: Synthetic polypeptide
  XENP020934 7G8_H0.2_L0_Fab Light Chain

SEQ ID NO: 29180 - protein, 111 aa, Artificial Sequence; identical to SEQ ID NO: 17591
  Description of Artificial Sequence: Synthetic polypeptide
  VL of XENP020934

SEQ ID NO: 29181 - protein, 15 aa, Artificial Sequence
  Description of Artificial Sequence: Synthetic peptide
  XENP020934 vlCDR1
KASQSVDYDGDSYMN

SEQ ID NO: 29182 - protein, 7 aa, Artificial Sequence
  Description of Artificial Sequence: Synthetic peptide
  XENP020934 vlCDR2
AASNLES

SEQ ID NO: 29183 - protein, 9 aa, Artificial Sequence
  Description of Artificial Sequence: Synthetic peptide
  XENP020934 vlCDR3
QQSNEDPFT

SEQ ID NO: 29184 - protein, 226 aa, Artificial Sequence
  Description of Artificial Sequence: Synthetic polypeptide
  XENP020935 7G8_H0.3_L0_Fab Heavy Chain
EVKLEESGGGLVQPGGSMKLSCAASGDTFSDAWMDWVRQSPEKGLEWVAEIRTKANNHATYYAESVKGRFTISRDDSKSSVYLQMNSLRAEDTGIYYCTRLANWDWYFDVWGAGTTVTVSSASTKGPSVFPLAPSSKSTSGGTAALGCLVKDYFPEPVTVSWNSGALTSGVHTFPAVLQSSGLYSLSSVVTVPSSSLGTQTYICNVNHKPSNTKVDKKVEPKSCGS

SEQ ID NO: 29185 - protein, 121 aa, Artificial Sequence; identical to SEQ ID NO: 18236
  Description of Artificial Sequence: Synthetic polypeptide
  VH of XENP020935

SEQ ID NO: 29186 - protein, 5 aa, Artificial Sequence
  Description of Artificial Sequence: Synthetic peptide
  XENP020935 vhCDR1
DAWMD

SEQ ID NO: 29187 - protein, 19 aa, Artificial Sequence
  Description of Artificial Sequence: Synthetic peptide
  XENP020935 vhCDR2
EIRTKANNHATYYAESVKG

SEQ ID NO: 29188 - protein, 10 aa, Artificial Sequence
  Description of Artificial Sequence: Synthetic peptide
  XENP020935 vhCDR3
LANWDWYFDV

SEQ ID NO: 29189 - protein, 218 aa, Artificial Sequence; identical to SEQ ID NO: 17590
  Description of Artificial Sequence: Synthetic polypeptide
  XENP020935 7G8_H0.3_L0_Fab Light Chain

SEQ ID NO: 29190 - protein, 111 aa, Artificial Sequence; identical to SEQ ID NO: 17591
  Description of Artificial Sequence: Synthetic polypeptide
  VL of XENP020935

SEQ ID NO: 29191 - protein, 15 aa, Artificial Sequence
  Description of Artificial Sequence: Synthetic peptide
  XENP020935 vlCDR1
KASQSVDYDGDSYMN

SEQ ID NO: 29192 - protein, 7 aa, Artificial Sequence
  Description of Artificial Sequence: Synthetic peptide
  XENP020935 vlCDR2
AASNLES

SEQ ID NO: 29193 - protein, 9 aa, Artificial Sequence
  Description of Artificial Sequence: Synthetic peptide
  XENP020935 vlCDR3
QQSNEDPFT

SEQ ID NO: 29194 - protein, 226 aa, Artificial Sequence
  Description of Artificial Sequence: Synthetic polypeptide
  XENP020936 7G8_H0.4_L0_Fab Heavy Chain
EVKLEESGGGLVQPGGSMKLSCAASGFSFSDAWMDWVRQSPEKGLEWVAEIRTKANNHATYYAESVKGRFTISRDDSKSSVYLQMNSLRAEDTGIYYCTRLANWDWYFDVWGAGTTVTVSSASTKGPSVFPLAPSSKSTSGGTAALGCLVKDYFPEPVTVSWNSGALTSGVHTFPAVLQSSGLYSLSSVVTVPSSSLGTQTYICNVNHKPSNTKVDKKVEPKSCGS

SEQ ID NO: 29195 - protein, 121 aa, Artificial Sequence; identical to SEQ ID NO: 18246
  Description of Artificial Sequence: Synthetic polypeptide
  VH of XENP020936

SEQ ID NO: 29196 - protein, 5 aa, Artificial Sequence
  Description of Artificial Sequence: Synthetic peptide
  XENP020936 vhCDR1
DAWMD

SEQ ID NO: 29197 - protein, 19 aa, Artificial Sequence
  Description of Artificial Sequence: Synthetic peptide
  XENP020936 vhCDR2
EIRTKANNHATYYAESVKG

SEQ ID NO: 29198 - protein, 10 aa, Artificial Sequence
  Description of Artificial Sequence: Synthetic peptide
  XENP020936 vhCDR3
LANWDWYFDV

SEQ ID NO: 29199 - protein, 218 aa, Artificial Sequence; identical to SEQ ID NO: 17590
  Description of Artificial Sequence: Synthetic polypeptide
  XENP020936 7G8_H0.4_L0_Fab Light Chain

SEQ ID NO: 29200 - protein, 111 aa, Artificial Sequence; identical to SEQ ID NO: 17591
  Description of Artificial Sequence: Synthetic polypeptide
  VL of XENP020936

SEQ ID NO: 29201 - protein, 15 aa, Artificial Sequence
  Description of Artificial Sequence: Synthetic peptide
  XENP020936 vlCDR1
KASQSVDYDGDSYMN

SEQ ID NO: 29202 - protein, 7 aa, Artificial Sequence
  Description of Artificial Sequence: Synthetic peptide
  XENP020936 vlCDR2
AASNLES

SEQ ID NO: 29203 - protein, 9 aa, Artificial Sequence
  Description of Artificial Sequence: Synthetic peptide
  XENP020936 vlCDR3
QQSNEDPFT

SEQ ID NO: 29204 - protein, 226 aa, Artificial Sequence
  Description of Artificial Sequence: Synthetic polypeptide
  XENP020937 7G8_H0.5_L0_Fab Heavy Chain
EVKLEESGGGLVQPGGSMKLSCAASGFTFTDAWMDWVRQSPEKGLEWVAEIRTKANNHATYYAESVKGRFTISRDDSKSSVYLQMNSLRAEDTGIYYCTRLANWDWYFDVWGAGTTVTVSSASTKGPSVFPLAPSSKSTSGGTAALGCLVKDYFPEPVTVSWNSGALTSGVHTFPAVLQSSGLYSLSSVVTVPSSSLGTQTYICNVNHKPSNTKVDKKVEPKSCGS

SEQ ID NO: 29205 - protein, 121 aa, Artificial Sequence; identical to SEQ ID NO: 18256
  Description of Artificial Sequence: Synthetic polypeptide
  VH of XENP020937

SEQ ID NO: 29206 - protein, 5 aa, Artificial Sequence
  Description of Artificial Sequence: Synthetic peptide
  XENP020937 vhCDR1
DAWMD

SEQ ID NO: 29207 - protein, 19 aa, Artificial Sequence
  Description of Artificial Sequence: Synthetic peptide
  XENP020937 vhCDR2
EIRTKANNHATYYAESVKG

SEQ ID NO: 29208 - protein, 10 aa, Artificial Sequence
  Description of Artificial Sequence: Synthetic peptide
  XENP020937 vhCDR3
LANWDWYFDV

SEQ ID NO: 29209 - protein, 218 aa, Artificial Sequence; identical to SEQ ID NO: 17590
  Description of Artificial Sequence: Synthetic polypeptide
  XENP020937 7G8_H0.5_L0_Fab Light Chain

SEQ ID NO: 29210 - protein, 111 aa, Artificial Sequence; identical to SEQ ID NO: 17591
  Description of Artificial Sequence: Synthetic polypeptide
  VL of XENP020937

SEQ ID NO: 29211 - protein, 15 aa, Artificial Sequence
  Description of Artificial Sequence: Synthetic peptide
  XENP020937 vlCDR1
KASQSVDYDGDSYMN

SEQ ID NO: 29212 - protein, 7 aa, Artificial Sequence
  Description of Artificial Sequence: Synthetic peptide
  XENP020937 vlCDR2
AASNLES

SEQ ID NO: 29213 - protein, 9 aa, Artificial Sequence
  Description of Artificial Sequence: Synthetic peptide
  XENP020937 vlCDR3
QQSNEDPFT

SEQ ID NO: 29214 - protein, 226 aa, Artificial Sequence
  Description of Artificial Sequence: Synthetic polypeptide
  XENP020938 7G8_H0.6_L0_Fab Heavy Chain
EVKLEESGGGLVQPGGSMKLSCAASGFTFDDAWMDWVRQSPEKGLEWVAEIRTKANNHATYYAESVKGRFTISRDDSKSSVYLQMNSLRAEDTGIYYCTRLANWDWYFDVWGAGTTVTVSSASTKGPSVFPLAPSSKSTSGGTAALGCLVKDYFPEPVTVSWNSGALTSGVHTFPAVLQSSGLYSLSSVVTVPSSSLGTQTYICNVNHKPSNTKVDKKVEPKSCGS

SEQ ID NO: 29215 - protein, 121 aa, Artificial Sequence; identical to SEQ ID NO: 18266
  Description of Artificial Sequence: Synthetic polypeptide
  VH of XENP020938

SEQ ID NO: 29216 - protein, 5 aa, Artificial Sequence
  Description of Artificial Sequence: Synthetic peptide
  XENP020938 vhCDR1
DAWMD

SEQ ID NO: 29217 - protein, 19 aa, Artificial Sequence
  Description of Artificial Sequence: Synthetic peptide
  XENP020938 vhCDR2
EIRTKANNHATYYAESVKG

SEQ ID NO: 29218 - protein, 10 aa, Artificial Sequence
  Description of Artificial Sequence: Synthetic peptide
  XENP020938 vhCDR3
LANWDWYFDV

SEQ ID NO: 29219 - protein, 218 aa, Artificial Sequence; identical to SEQ ID NO: 17590
  Description of Artificial Sequence: Synthetic polypeptide
  XENP020938 7G8_H0.6_L0_Fab Light Chain

SEQ ID NO: 29220 - protein, 111 aa, Artificial Sequence; identical to SEQ ID NO: 17591
  Description of Artificial Sequence: Synthetic polypeptide
  VL of XENP020938

SEQ ID NO: 29221 - protein, 15 aa, Artificial Sequence
  Description of Artificial Sequence: Synthetic peptide
  XENP020938 vlCDR1
KASQSVDYDGDSYMN

SEQ ID NO: 29222 - protein, 7 aa, Artificial Sequence
  Description of Artificial Sequence: Synthetic peptide
  XENP020938 vlCDR2
AASNLES

SEQ ID NO: 29223 - protein, 9 aa, Artificial Sequence
  Description of Artificial Sequence: Synthetic peptide
  XENP020938 vlCDR3
QQSNEDPFT

SEQ ID NO: 29224 - protein, 226 aa, Artificial Sequence
  Description of Artificial Sequence: Synthetic polypeptide
  XENP020939 7G8_H0.7_L0_Fab Heavy Chain
EVKLEESGGGLVQPGGSMKLSCAASGFTFGDAWMDWVRQSPEKGLEWVAEIRTKANNHATYYAESVKGRFTISRDDSKSSVYLQMNSLRAEDTGIYYCTRLANWDWYFDVWGAGTTVTVSSASTKGPSVFPLAPSSKSTSGGTAALGCLVKDYFPEPVTVSWNSGALTSGVHTFPAVLQSSGLYSLSSVVTVPSSSLGTQTYICNVNHKPSNTKVDKKVEPKSCGS

SEQ ID NO: 29225 - protein, 121 aa, Artificial Sequence; identical to SEQ ID NO: 18276
  Description of Artificial Sequence: Synthetic polypeptide
  VH of XENP020939

SEQ ID NO: 29226 - protein, 5 aa, Artificial Sequence
  Description of Artificial Sequence: Synthetic peptide
  XENP020939 vhCDR1
DAWMD

SEQ ID NO: 29227 - protein, 19 aa, Artificial Sequence
  Description of Artificial Sequence: Synthetic peptide
  XENP020939 vhCDR2
EIRTKANNHATYYAESVKG

SEQ ID NO: 29228 - protein, 10 aa, Artificial Sequence
  Description of Artificial Sequence: Synthetic peptide
  XENP020939 vhCDR3
LANWDWYFDV

SEQ ID NO: 29229 - protein, 218 aa, Artificial Sequence; identical to SEQ ID NO: 17590
  Description of Artificial Sequence: Synthetic polypeptide
  XENP020939 7G8_H0.7_L0_Fab Light Chain

SEQ ID NO: 29230 - protein, 111 aa, Artificial Sequence; identical to SEQ ID NO: 17591
  Description of Artificial Sequence: Synthetic polypeptide
  VL of XENP020939

SEQ ID NO: 29231 - protein, 15 aa, Artificial Sequence
  Description of Artificial Sequence: Synthetic peptide
  XENP020939 vlCDR1
KASQSVDYDGDSYMN

SEQ ID NO: 29232 - protein, 7 aa, Artificial Sequence
  Description of Artificial Sequence: Synthetic peptide
  XENP020939 vlCDR2
AASNLES

SEQ ID NO: 29233 - protein, 9 aa, Artificial Sequence
  Description of Artificial Sequence: Synthetic peptide
  XENP020939 vlCDR3
QQSNEDPFT

SEQ ID NO: 29234 - protein, 226 aa, Artificial Sequence
  Description of Artificial Sequence: Synthetic polypeptide
  XENP020940 7G8_H0.8_L0_Fab Heavy Chain
EVKLEESGGGLVQPGGSMKLSCAASGFTFSNAWMDWVRQSPEKGLEWVAEIRTKANNHATYYAESVKGRFTISRDDSKSSVYLQMNSLRAEDTGIYYCTRLANWDWYFDVWGAGTTVTVSSASTKGPSVFPLAPSSKSTSGGTAALGCLVKDYFPEPVTVSWNSGALTSGVHTFPAVLQSSGLYSLSSVVTVPSSSLGTQTYICNVNHKPSNTKVDKKVEPKSCGS

SEQ ID NO: 29235 - protein, 121 aa, Artificial Sequence; identical to SEQ ID NO: 18286
  Description of Artificial Sequence: Synthetic polypeptide
  VH of XENP020940

SEQ ID NO: 29236 - protein, 5 aa, Artificial Sequence
  Description of Artificial Sequence: Synthetic peptide
  XENP020940 vhCDR1
NAWMD

SEQ ID NO: 29237 - protein, 19 aa, Artificial Sequence
  Description of Artificial Sequence: Synthetic peptide
  XENP020940 vhCDR2
EIRTKANNHATYYAESVKG

SEQ ID NO: 29238 - protein, 10 aa, Artificial Sequence
  Description of Artificial Sequence: Synthetic peptide
  XENP020940 vhCDR3
LANWDWYFDV

SEQ ID NO: 29239 - protein, 218 aa, Artificial Sequence; identical to SEQ ID NO: 17590
  Description of Artificial Sequence: Synthetic polypeptide
  XENP020940 7G8_H0.8_L0_Fab Light Chain

SEQ ID NO: 29240 - protein, 111 aa, Artificial Sequence; identical to SEQ ID NO: 17591
  Description of Artificial Sequence: Synthetic polypeptide
  VL of XENP020940

SEQ ID NO: 29241 - protein, 15 aa, Artificial Sequence
  Description of Artificial Sequence: Synthetic peptide
  XENP020940 vlCDR1
KASQSVDYDGDSYMN

SEQ ID NO: 29242 - protein, 7 aa, Artificial Sequence
  Description of Artificial Sequence: Synthetic peptide
  XENP020940 vlCDR2
AASNLES

SEQ ID NO: 29243 - protein, 9 aa, Artificial Sequence
  Description of Artificial Sequence: Synthetic peptide
  XENP020940 vlCDR3
QQSNEDPFT

SEQ ID NO: 29244 - protein, 226 aa, Artificial Sequence
  Description of Artificial Sequence: Synthetic polypeptide
  XENP020941 7G8_H0.9_L0_Fab Heavy Chain
EVKLEESGGGLVQPGGSMKLSCAASGFTFSEAWMDWVRQSPEKGLEWVAEIRTKANNHATYYAESVKGRFTISRDDSKSSVYLQMNSLRAEDTGIYYCTRLANWDWYFDVWGAGTTVTVSSASTKGPSVFPLAPSSKSTSGGTAALGCLVKDYFPEPVTVSWNSGALTSGVHTFPAVLQSSGLYSLSSVVTVPSSSLGTQTYICNVNHKPSNTKVDKKVEPKSCGS

SEQ ID NO: 29245 - protein, 121 aa, Artificial Sequence; identical to SEQ ID NO: 18296
  Description of Artificial Sequence: Synthetic polypeptide
  VH of XENP020941

SEQ ID NO: 29246 - protein, 5 aa, Artificial Sequence
  Description of Artificial Sequence: Synthetic peptide
  XENP020941 vhCDR1
EAWMD

SEQ ID NO: 29247 - protein, 19 aa, Artificial Sequence
  Description of Artificial Sequence: Synthetic peptide
  XENP020941 vhCDR2
EIRTKANNHATYYAESVKG

SEQ ID NO: 29248 - protein, 10 aa, Artificial Sequence
  Description of Artificial Sequence: Synthetic peptide
  XENP020941 vhCDR3
LANWDWYFDV

SEQ ID NO: 29249 - protein, 218 aa, Artificial Sequence; identical to SEQ ID NO: 17590
  Description of Artificial Sequence: Synthetic polypeptide
  XENP020941 7G8_H0.9_L0_Fab Light Chain

SEQ ID NO: 29250 - protein, 111 aa, Artificial Sequence; identical to SEQ ID NO: 17591
  Description of Artificial Sequence: Synthetic polypeptide
  VL of XENP020941

SEQ ID NO: 29251 - protein, 15 aa, Artificial Sequence
  Description of Artificial Sequence: Synthetic peptide
  XENP020941 vlCDR1
KASQSVDYDGDSYMN

SEQ ID NO: 29252 - protein, 7 aa, Artificial Sequence
  Description of Artificial Sequence: Synthetic peptide
  XENP020941 vlCDR2
AASNLES

SEQ ID NO: 29253 - protein, 9 aa, Artificial Sequence
  Description of Artificial Sequence: Synthetic peptide
  XENP020941 vlCDR3
QQSNEDPFT

SEQ ID NO: 29254 - protein, 226 aa, Artificial Sequence
  Description of Artificial Sequence: Synthetic polypeptide
  XENP020942 7G8_H0.10_L0_Fab Heavy Chain
EVKLEESGGGLVQPGGSMKLSCAASGFTFSHAWMDWVRQSPEKGLEWVAEIRTKANNHATYYAESVKGRFTISRDDSKSSVYLQMNSLRAEDTGIYYCTRLANWDWYFDVWGAGTTVTVSSASTKGPSVFPLAPSSKSTSGGTAALGCLVKDYFPEPVTVSWNSGALTSGVHTFPAVLQSSGLYSLSSVVTVPSSSLGTQTYICNVNHKPSNTKVDKKVEPKSCGS

SEQ ID NO: 29255 - protein, 121 aa, Artificial Sequence; identical to SEQ ID NO: 18306
  Description of Artificial Sequence: Synthetic polypeptide
  VH of XENP020942

SEQ ID NO: 29256 - protein, 5 aa, Artificial Sequence
  Description of Artificial Sequence: Synthetic peptide
  XENP020942 vhCDR1
HAWMD

SEQ ID NO: 29257 - protein, 19 aa, Artificial Sequence
  Description of Artificial Sequence: Synthetic peptide
  XENP020942 vhCDR2
EIRTKANNHATYYAESVKG

SEQ ID NO: 29258 - protein, 10 aa, Artificial Sequence
  Description of Artificial Sequence: Synthetic peptide
  XENP020942 vhCDR3
LANWDWYFDV

SEQ ID NO: 29259 - protein, 218 aa, Artificial Sequence; identical to SEQ ID NO: 17590
  Description of Artificial Sequence: Synthetic polypeptide
  XENP020942 7G8_H0.10_L0_Fab Light Chain

SEQ ID NO: 29260 - protein, 111 aa, Artificial Sequence; identical to SEQ ID NO: 17591
  Description of Artificial Sequence: Synthetic polypeptide
  VL of XENP020942

SEQ ID NO: 29261 - protein, 15 aa, Artificial Sequence
  Description of Artificial Sequence: Synthetic peptide
  XENP020942 vlCDR1
KASQSVDYDGDSYMN

SEQ ID NO: 29262 - protein, 7 aa, Artificial Sequence
  Description of Artificial Sequence: Synthetic peptide
  XENP020942 vlCDR2
AASNLES

SEQ ID NO: 29263 - protein, 9 aa, Artificial Sequence
  Description of Artificial Sequence: Synthetic peptide
  XENP020942 vlCDR3
QQSNEDPFT

SEQ ID NO: 29264 - protein, 226 aa, Artificial Sequence
  Description of Artificial Sequence: Synthetic polypeptide
  XENP020943 7G8_H0.11_L0_Fab Heavy Chain
EVKLEESGGGLVQPGGSMKLSCAASGFTFSSAWMDWVRQSPEKGLEWVAEIRTKANNHATYYAESVKGRFTISRDDSKSSVYLQMNSLRAEDTGIYYCTRLANWDWYFDVWGAGTTVTVSSASTKGPSVFPLAPSSKSTSGGTAALGCLVKDYFPEPVTVSWNSGALTSGVHTFPAVLQSSGLYSLSSVVTVPSSSLGTQTYICNVNHKPSNTKVDKKVEPKSCGS

SEQ ID NO: 29265 - protein, 121 aa, Artificial Sequence; identical to SEQ ID NO: 18316
  Description of Artificial Sequence: Synthetic polypeptide
  VH of XENP020943

SEQ ID NO: 29266 - protein, 5 aa, Artificial Sequence
  Description of Artificial Sequence: Synthetic peptide
  XENP020943 vhCDR1
SAWMD

SEQ ID NO: 29267 - protein, 19 aa, Artificial Sequence
  Description of Artificial Sequence: Synthetic peptide
  XENP020943 vhCDR2
EIRTKANNHATYYAESVKG

SEQ ID NO: 29268 - protein, 10 aa, Artificial Sequence
  Description of Artificial Sequence: Synthetic peptide
  XENP020943 vhCDR3
LANWDWYFDV

SEQ ID NO: 29269 - protein, 218 aa, Artificial Sequence; identical to SEQ ID NO: 17590
  Description of Artificial Sequence: Synthetic polypeptide
  XENP020943 7G8_H0.11_L0_Fab Light Chain

SEQ ID NO: 29270 - protein, 111 aa, Artificial Sequence; identical to SEQ ID NO: 17591
  Description of Artificial Sequence: Synthetic polypeptide
  VL of XENP020943

SEQ ID NO: 29271 - protein, 15 aa, Artificial Sequence
  Description of Artificial Sequence: Synthetic peptide
  XENP020943 vlCDR1
KASQSVDYDGDSYMN

SEQ ID NO: 29272 - protein, 7 aa, Artificial Sequence
  Description of Artificial Sequence: Synthetic peptide
  XENP020943 vlCDR2
AASNLES

SEQ ID NO: 29273 - protein, 9 aa, Artificial Sequence
  Description of Artificial Sequence: Synthetic peptide
  XENP020943 vlCDR3
QQSNEDPFT

SEQ ID NO: 29274 - protein, 226 aa, Artificial Sequence
  Description of Artificial Sequence: Synthetic polypeptide
  XENP020944 7G8_H0.12_L0_Fab Heavy Chain
EVKLEESGGGLVQPGGSMKLSCAASGFTFSRAWMDWVRQSPEKGLEWVAEIRTKANNHATYYAESVKGRFTISRDDSKSSVYLQMNSLRAEDTGIYYCTRLANWDWYFDVWGAGTTVTVSSASTKGPSVFPLAPSSKSTSGGTAALGCLVKDYFPEPVTVSWNSGALTSGVHTFPAVLQSSGLYSLSSVVTVPSSSLGTQTYICNVNHKPSNTKVDKKVEPKSCGS

SEQ ID NO: 29275 - protein, 121 aa, Artificial Sequence; identical to SEQ ID NO: 18326
  Description of Artificial Sequence: Synthetic polypeptide
  VH of XENP020944

SEQ ID NO: 29276 - protein, 5 aa, Artificial Sequence
  Description of Artificial Sequence: Synthetic peptide
  XENP020944 vhCDR1
RAWMD

SEQ ID NO: 29277 - protein, 19 aa, Artificial Sequence
  Description of Artificial Sequence: Synthetic peptide
  XENP020944 vhCDR2
EIRTKANNHATYYAESVKG

SEQ ID NO: 29278 - protein, 10 aa, Artificial Sequence
  Description of Artificial Sequence: Synthetic peptide
  XENP020944 vhCDR3
LANWDWYFDV

SEQ ID NO: 29279 - protein, 218 aa, Artificial Sequence; identical to SEQ ID NO: 17590
  Description of Artificial Sequence: Synthetic polypeptide
  XENP020944 7G8_H0.12_L0_Fab Light Chain

SEQ ID NO: 29280 - protein, 111 aa, Artificial Sequence; identical to SEQ ID NO: 17591
  Description of Artificial Sequence: Synthetic polypeptide
  VL of XENP020944

SEQ ID NO: 29281 - protein, 15 aa, Artificial Sequence
  Description of Artificial Sequence: Synthetic peptide
  XENP020944 vlCDR1
KASQSVDYDGDSYMN

SEQ ID NO: 29282 - protein, 7 aa, Artificial Sequence
  Description of Artificial Sequence: Synthetic peptide
  XENP020944 vlCDR2
AASNLES

SEQ ID NO: 29283 - protein, 9 aa, Artificial Sequence
  Description of Artificial Sequence: Synthetic peptide
  XENP020944 vlCDR3
QQSNEDPFT

SEQ ID NO: 29284 - protein, 226 aa, Artificial Sequence
  Description of Artificial Sequence: Synthetic polypeptide
  XENP020945 7G8_H0.13_L0_Fab Heavy Chain
EVKLEESGGGLVQPGGSMKLSCAASGFTFSLAWMDWVRQSPEKGLEWVAEIRTKANNHATYYAESVKGRFTISRDDSKSSVYLQMNSLRAEDTGIYYCTRLANWDWYFDVWGAGTTVTVSSASTKGPSVFPLAPSSKSTSGGTAALGCLVKDYFPEPVTVSWNSGALTSGVHTFPAVLQSSGLYSLSSVVTVPSSSLGTQTYICNVNHKPSNTKVDKKVEPKSCGS

SEQ ID NO: 29285 - protein, 121 aa, Artificial Sequence; identical to SEQ ID NO: 18336
  Description of Artificial Sequence: Synthetic polypeptide
  VH of XENP020945

SEQ ID NO: 29286 - protein, 5 aa, Artificial Sequence
  Description of Artificial Sequence: Synthetic peptide
  XENP020945 vhCDR1
LAWMD

SEQ ID NO: 29287 - protein, 19 aa, Artificial Sequence
  Description of Artificial Sequence: Synthetic peptide
  XENP020945 vhCDR2
EIRTKANNHATYYAESVKG

SEQ ID NO: 29288 - protein, 10 aa, Artificial Sequence
  Description of Artificial Sequence: Synthetic peptide
  XENP020945 vhCDR3
LANWDWYFDV

SEQ ID NO: 29289 - protein, 218 aa, Artificial Sequence; identical to SEQ ID NO: 17590
  Description of Artificial Sequence: Synthetic polypeptide
  XENP020945 7G8_H0.13_L0_Fab Light Chain

SEQ ID NO: 29290 - protein, 111 aa, Artificial Sequence; identical to SEQ ID NO: 17591
  Description of Artificial Sequence: Synthetic polypeptide
  VL of XENP020945

SEQ ID NO: 29291 - protein, 15 aa, Artificial Sequence
  Description of Artificial Sequence: Synthetic peptide
  XENP020945 vlCDR1
KASQSVDYDGDSYMN

SEQ ID NO: 29292 - protein, 7 aa, Artificial Sequence
  Description of Artificial Sequence: Synthetic peptide
  XENP020945 vlCDR2
AASNLES

SEQ ID NO: 29293 - protein, 9 aa, Artificial Sequence
  Description of Artificial Sequence: Synthetic peptide
  XENP020945 vlCDR3
QQSNEDPFT

SEQ ID NO: 29294 - protein, 226 aa, Artificial Sequence
  Description of Artificial Sequence: Synthetic polypeptide
  XENP020946 7G8_H0.14_L0_Fab Heavy Chain
EVKLEESGGGLVQPGGSMKLSCAASGFTFSTAWMDWVRQSPEKGLEWVAEIRTKANNHATYYAESVKGRFTISRDDSKSSVYLQMNSLRAEDTGIYYCTRLANWDWYFDVWGAGTTVTVSSASTKGPSVFPLAPSSKSTSGGTAALGCLVKDYFPEPVTVSWNSGALTSGVHTFPAVLQSSGLYSLSSVVTVPSSSLGTQTYICNVNHKPSNTKVDKKVEPKSCGS

SEQ ID NO: 29295 - protein, 121 aa, Artificial Sequence; identical to SEQ ID NO: 18346
  Description of Artificial Sequence: Synthetic polypeptide
  VH of XENP020946

SEQ ID NO: 29296 - protein, 5 aa, Artificial Sequence
  Description of Artificial Sequence: Synthetic peptide
  XENP020946 vhCDR1
TAWMD

SEQ ID NO: 29297 - protein, 19 aa, Artificial Sequence
  Description of Artificial Sequence: Synthetic peptide
  XENP020946 vhCDR2
EIRTKANNHATYYAESVKG

SEQ ID NO: 29298 - protein, 10 aa, Artificial Sequence
  Description of Artificial Sequence: Synthetic peptide
  XENP020946 vhCDR3
LANWDWYFDV

SEQ ID NO: 29299 - protein, 218 aa, Artificial Sequence; identical to SEQ ID NO: 17590
  Description of Artificial Sequence: Synthetic polypeptide
  XENP020946 7G8_H0.14_L0_Fab Light Chain

SEQ ID NO: 29300 - protein, 111 aa, Artificial Sequence; identical to SEQ ID NO: 17591
  Description of Artificial Sequence: Synthetic polypeptide
  VL of XENP020946

SEQ ID NO: 29301 - protein, 15 aa, Artificial Sequence
  Description of Artificial Sequence: Synthetic peptide
  XENP020946 vlCDR1
KASQSVDYDGDSYMN

SEQ ID NO: 29302 - protein, 7 aa, Artificial Sequence
  Description of Artificial Sequence: Synthetic peptide
  XENP020946 vlCDR2
AASNLES

SEQ ID NO: 29303 - protein, 9 aa, Artificial Sequence
  Description of Artificial Sequence: Synthetic peptide
  XENP020946 vlCDR3
QQSNEDPFT

SEQ ID NO: 29304 - protein, 226 aa, Artificial Sequence
  Description of Artificial Sequence: Synthetic polypeptide
  XENP020947 7G8_H0.15_L0_Fab Heavy Chain
EVKLEESGGGLVQPGGSMKLSCAASGFTFSGAWMDWVRQSPEKGLEWVAEIRTKANNHATYYAESVKGRFTISRDDSKSSVYLQMNSLRAEDTGIYYCTRLANWDWYFDVWGAGTTVTVSSASTKGPSVFPLAPSSKSTSGGTAALGCLVKDYFPEPVTVSWNSGALTSGVHTFPAVLQSSGLYSLSSVVTVPSSSLGTQTYICNVNHKPSNTKVDKKVEPKSCGS

SEQ ID NO: 29305 - protein, 121 aa, Artificial Sequence; identical to SEQ ID NO: 18356
  Description of Artificial Sequence: Synthetic polypeptide
  VH of XENP020947

SEQ ID NO: 29306 - protein, 5 aa, Artificial Sequence
  Description of Artificial Sequence: Synthetic peptide
  XENP020947 vhCDR1
GAWMD

SEQ ID NO: 29307 - protein, 19 aa, Artificial Sequence
  Description of Artificial Sequence: Synthetic peptide
  XENP020947 vhCDR2
EIRTKANNHATYYAESVKG

SEQ ID NO: 29308 - protein, 10 aa, Artificial Sequence
  Description of Artificial Sequence: Synthetic peptide
  XENP020947 vhCDR3
LANWDWYFDV

SEQ ID NO: 29309 - protein, 218 aa, Artificial Sequence; identical to SEQ ID NO: 17590
  Description of Artificial Sequence: Synthetic polypeptide
  XENP020947 7G8_H0.15_L0_Fab Light Chain

SEQ ID NO: 29310 - protein, 111 aa, Artificial Sequence; identical to SEQ ID NO: 17591
  Description of Artificial Sequence: Synthetic polypeptide
  VL of XENP020947

SEQ ID NO: 29311 - protein, 15 aa, Artificial Sequence
  Description of Artificial Sequence: Synthetic peptide
  XENP020947 vlCDR1
KASQSVDYDGDSYMN

SEQ ID NO: 29312 - protein, 7 aa, Artificial Sequence
  Description of Artificial Sequence: Synthetic peptide
  XENP020947 vlCDR2
AASNLES

SEQ ID NO: 29313 - protein, 9 aa, Artificial Sequence
  Description of Artificial Sequence: Synthetic peptide
  XENP020947 vlCDR3
QQSNEDPFT

SEQ ID NO: 29314 - protein, 226 aa, Artificial Sequence
  Description of Artificial Sequence: Synthetic polypeptide
  XENP020948 7G8_H0.17_L0_Fab Heavy Chain
EVKLEESGGGLVQPGGSMKLSCAASGFTFSDSWMDWVRQSPEKGLEWVAEIRTKANNHATYYAESVKGRFTISRDDSKSSVYLQMNSLRAEDTGIYYCTRLANWDWYFDVWGAGTTVTVSSASTKGPSVFPLAPSSKSTSGGTAALGCLVKDYFPEPVTVSWNSGALTSGVHTFPAVLQSSGLYSLSSVVTVPSSSLGTQTYICNVNHKPSNTKVDKKVEPKSCGS

SEQ ID NO: 29315 - protein, 121 aa, Artificial Sequence; identical to SEQ ID NO: 18376
  Description of Artificial Sequence: Synthetic polypeptide
  VH of XENP020948

SEQ ID NO: 29316 - protein, 5 aa, Artificial Sequence
  Description of Artificial Sequence: Synthetic peptide
  XENP020948 vhCDR1
DSWMD

SEQ ID NO: 29317 - protein, 19 aa, Artificial Sequence
  Description of Artificial Sequence: Synthetic peptide
  XENP020948 vhCDR2
EIRTKANNHATYYAESVKG

SEQ ID NO: 29318 - protein, 10 aa, Artificial Sequence
  Description of Artificial Sequence: Synthetic peptide
  XENP020948 vhCDR3
LANWDWYFDV

SEQ ID NO: 29319 - protein, 218 aa, Artificial Sequence; identical to SEQ ID NO: 17590
  Description of Artificial Sequence: Synthetic polypeptide
  XENP020948 7G8_H0.17_L0_Fab Light Chain

SEQ ID NO: 29320 - protein, 111 aa, Artificial Sequence; identical to SEQ ID NO: 17591
  Description of Artificial Sequence: Synthetic polypeptide
  VL of XENP020948

SEQ ID NO: 29321 - protein, 15 aa, Artificial Sequence
  Description of Artificial Sequence: Synthetic peptide
  XENP020948 vlCDR1
KASQSVDYDGDSYMN

SEQ ID NO: 29322 - protein, 7 aa, Artificial Sequence
  Description of Artificial Sequence: Synthetic peptide
  XENP020948 vlCDR2
AASNLES

SEQ ID NO: 29323 - protein, 9 aa, Artificial Sequence
  Description of Artificial Sequence: Synthetic peptide
  XENP020948 vlCDR3
QQSNEDPFT

SEQ ID NO: 29324 - protein, 226 aa, Artificial Sequence
  Description of Artificial Sequence: Synthetic polypeptide
  XENP020949 7G8_H0.18_L0_Fab Heavy Chain
EVKLEESGGGLVQPGGSMKLSCAASGFTFSDTWMDWVRQSPEKGLEWVAEIRTKANNHATYYAESVKGRFTISRDDSKSSVYLQMNSLRAEDTGIYYCTRLANWDWYFDVWGAGTTVTVSSASTKGPSVFPLAPSSKSTSGGTAALGCLVKDYFPEPVTVSWNSGALTSGVHTFPAVLQSSGLYSLSSVVTVPSSSLGTQTYICNVNHKPSNTKVDKKVEPKSCGS

SEQ ID NO: 29325 - protein, 121 aa, Artificial Sequence; identical to SEQ ID NO: 18386
  Description of Artificial Sequence: Synthetic polypeptide
  VH of XENP020949

SEQ ID NO: 29326 - protein, 5 aa, Artificial Sequence
  Description of Artificial Sequence: Synthetic peptide
  XENP020949 vhCDR1
DTWMD

SEQ ID NO: 29327 - protein, 19 aa, Artificial Sequence
  Description of Artificial Sequence: Synthetic peptide
  XENP020949 vhCDR2
EIRTKANNHATYYAESVKG

SEQ ID NO: 29328 - protein, 10 aa, Artificial Sequence
  Description of Artificial Sequence: Synthetic peptide
  XENP020949 vhCDR3
LANWDWYFDV

SEQ ID NO: 29329 - protein, 218 aa, Artificial Sequence; identical to SEQ ID NO: 17590
  Description of Artificial Sequence: Synthetic polypeptide
  XENP020949 7G8_H0.18_L0_Fab Light Chain

SEQ ID NO: 29330 - protein, 111 aa, Artificial Sequence; identical to SEQ ID NO: 17591
  Description of Artificial Sequence: Synthetic polypeptide
  VL of XENP020949

SEQ ID NO: 29331 - protein, 15 aa, Artificial Sequence
  Description of Artificial Sequence: Synthetic peptide
  XENP020949 vlCDR1
KASQSVDYDGDSYMN

SEQ ID NO: 29332 - protein, 7 aa, Artificial Sequence
  Description of Artificial Sequence: Synthetic peptide
  XENP020949 vlCDR2
AASNLES

SEQ ID NO: 29333 - protein, 9 aa, Artificial Sequence
  Description of Artificial Sequence: Synthetic peptide
  XENP020949 vlCDR3
QQSNEDPFT

SEQ ID NO: 29334 - protein, 226 aa, Artificial Sequence
  Description of Artificial Sequence: Synthetic polypeptide
  XENP020950 7G8_H0.19_L0_Fab Heavy Chain
EVKLEESGGGLVQPGGSMKLSCAASGFTFSDGWMDWVRQSPEKGLEWVAEIRTKANNHATYYAESVKGRFTISRDDSKSSVYLQMNSLRAEDTGIYYCTRLANWDWYFDVWGAGTTVTVSSASTKGPSVFPLAPSSKSTSGGTAALGCLVKDYFPEPVTVSWNSGALTSGVHTFPAVLQSSGLYSLSSVVTVPSSSLGTQTYICNVNHKPSNTKVDKKVEPKSCGS

SEQ ID NO: 29335 - protein, 121 aa, Artificial Sequence; identical to SEQ ID NO: 18396
  Description of Artificial Sequence: Synthetic polypeptide
  VH of XENP020950

SEQ ID NO: 29336 - protein, 5 aa, Artificial Sequence
  Description of Artificial Sequence: Synthetic peptide
  XENP020950 vhCDR1
DGWMD

SEQ ID NO: 29337 - protein, 19 aa, Artificial Sequence
  Description of Artificial Sequence: Synthetic peptide
  XENP020950 vhCDR2
EIRTKANNHATYYAESVKG

SEQ ID NO: 29338 - protein, 10 aa, Artificial Sequence
  Description of Artificial Sequence: Synthetic peptide
  XENP020950 vhCDR3
LANWDWYFDV

SEQ ID NO: 29339 - protein, 218 aa, Artificial Sequence; identical to SEQ ID NO: 17590
  Description of Artificial Sequence: Synthetic polypeptide
  XENP020950 7G8_H0.19_L0_Fab Light Chain

SEQ ID NO: 29340 - protein, 111 aa, Artificial Sequence; identical to SEQ ID NO: 17591
  Description of Artificial Sequence: Synthetic polypeptide
  VL of XENP020950

SEQ ID NO: 29341 - protein, 15 aa, Artificial Sequence
  Description of Artificial Sequence: Synthetic peptide
  XENP020950 vlCDR1
KASQSVDYDGDSYMN

SEQ ID NO: 29342 - protein, 7 aa, Artificial Sequence
  Description of Artificial Sequence: Synthetic peptide
  XENP020950 vlCDR2
AASNLES

SEQ ID NO: 29343 - protein, 9 aa, Artificial Sequence
  Description of Artificial Sequence: Synthetic peptide
  XENP020950 vlCDR3
QQSNEDPFT

SEQ ID NO: 29344 - protein, 226 aa, Artificial Sequence
  Description of Artificial Sequence: Synthetic polypeptide
  XENP020951 7G8_H0.20_L0_Fab Heavy Chain
EVKLEESGGGLVQPGGSMKLSCAASGFTFSDHWMDWVRQSPEKGLEWVAEIRTKANNHATYYAESVKGRFTISRDDSKSSVYLQMNSLRAEDTGIYYCTRLANWDWYFDVWGAGTTVTVSSASTKGPSVFPLAPSSKSTSGGTAALGCLVKDYFPEPVTVSWNSGALTSGVHTFPAVLQSSGLYSLSSVVTVPSSSLGTQTYICNVNHKPSNTKVDKKVEPKSCGS

SEQ ID NO: 29345 - protein, 121 aa, Artificial Sequence; identical to SEQ ID NO: 18406
  Description of Artificial Sequence: Synthetic polypeptide
  VH of XENP020951

SEQ ID NO: 29346 - protein, 5 aa, Artificial Sequence
  Description of Artificial Sequence: Synthetic peptide
  XENP020951 vhCDR1
DHWMD

SEQ ID NO: 29347 - protein, 19 aa, Artificial Sequence
  Description of Artificial Sequence: Synthetic peptide
  XENP020951 vhCDR2
EIRTKANNHATYYAESVKG

SEQ ID NO: 29348 - protein, 10 aa, Artificial Sequence
  Description of Artificial Sequence: Synthetic peptide
  XENP020951 vhCDR3
LANWDWYFDV

SEQ ID NO: 29349 - protein, 218 aa, Artificial Sequence; identical to SEQ ID NO: 17590
  Description of Artificial Sequence: Synthetic polypeptide
  XENP020951 7G8_H0.20_L0_Fab Light Chain

SEQ ID NO: 29350 - protein, 111 aa, Artificial Sequence; identical to SEQ ID NO: 17591
  Description of Artificial Sequence: Synthetic polypeptide
  VL of XENP020951

SEQ ID NO: 29351 - protein, 15 aa, Artificial Sequence
  Description of Artificial Sequence: Synthetic peptide
  XENP020951 vlCDR1
KASQSVDYDGDSYMN

SEQ ID NO: 29352 - protein, 7 aa, Artificial Sequence
  Description of Artificial Sequence: Synthetic peptide
  XENP020951 vlCDR2
AASNLES

SEQ ID NO: 29353 - protein, 9 aa, Artificial Sequence
  Description of Artificial Sequence: Synthetic peptide
  XENP020951 vlCDR3
QQSNEDPFT

SEQ ID NO: 29354 - protein, 226 aa, Artificial Sequence
  Description of Artificial Sequence: Synthetic polypeptide
  XENP020952 7G8_H0.21_L0_Fab Heavy Chain
EVKLEESGGGLVQPGGSMKLSCAASGFTFSDDWMDWVRQSPEKGLEWVAEIRTKANNHATYYAESVKGRFTISRDDSKSSVYLQMNSLRAEDTGIYYCTRLANWDWYFDVWGAGTTVTVSSASTKGPSVFPLAPSSKSTSGGTAALGCLVKDYFPEPVTVSWNSGALTSGVHTFPAVLQSSGLYSLSSVVTVPSSSLGTQTYICNVNHKPSNTKVDKKVEPKSCGS

SEQ ID NO: 29355 - protein, 121 aa, Artificial Sequence; identical to SEQ ID NO: 18416
  Description of Artificial Sequence: Synthetic polypeptide
  VH of XENP020952

SEQ ID NO: 29356 - protein, 5 aa, Artificial Sequence
  Description of Artificial Sequence: Synthetic peptide
  XENP020952 vhCDR1
DDWMD

SEQ ID NO: 29357 - protein, 19 aa, Artificial Sequence
  Description of Artificial Sequence: Synthetic peptide
  XENP020952 vhCDR2
EIRTKANNHATYYAESVKG

SEQ ID NO: 29358 - protein, 10 aa, Artificial Sequence
  Description of Artificial Sequence: Synthetic peptide
  XENP020952 vhCDR3
LANWDWYFDV

SEQ ID NO: 29359 - protein, 218 aa, Artificial Sequence; identical to SEQ ID NO: 17590
  Description of Artificial Sequence: Synthetic polypeptide
  XENP020952 7G8_H0.21_L0_Fab Light Chain

SEQ ID NO: 29360 - protein, 111 aa, Artificial Sequence; identical to SEQ ID NO: 17591
  Description of Artificial Sequence: Synthetic polypeptide
  VL of XENP020952

SEQ ID NO: 29361 - protein, 15 aa, Artificial Sequence
  Description of Artificial Sequence: Synthetic peptide
  XENP020952 vlCDR1
KASQSVDYDGDSYMN

SEQ ID NO: 29362 - protein, 7 aa, Artificial Sequence
  Description of Artificial Sequence: Synthetic peptide
  XENP020952 vlCDR2
AASNLES

SEQ ID NO: 29363 - protein, 9 aa, Artificial Sequence
  Description of Artificial Sequence: Synthetic peptide
  XENP020952 vlCDR3
QQSNEDPFT

SEQ ID NO: 29364 - protein, 226 aa, Artificial Sequence
  Description of Artificial Sequence: Synthetic polypeptide
  XENP020953 7G8_H0.22_L0_Fab Heavy Chain
EVKLEESGGGLVQPGGSMKLSCAASGFTFSDLWMDWVRQSPEKGLEWVAEIRTKANNHATYYAESVKGRFTISRDDSKSSVYLQMNSLRAEDTGIYYCTRLANWDWYFDVWGAGTTVTVSSASTKGPSVFPLAPSSKSTSGGTAALGCLVKDYFPEPVTVSWNSGALTSGVHTFPAVLQSSGLYSLSSVVTVPSSSLGTQTYICNVNHKPSNTKVDKKVEPKSCGS

SEQ ID NO: 29365 - protein, 121 aa, Artificial Sequence; identical to SEQ ID NO: 18426
  Description of Artificial Sequence: Synthetic polypeptide
  VH of XENP020953

SEQ ID NO: 29366 - protein, 5 aa, Artificial Sequence
  Description of Artificial Sequence: Synthetic peptide
  XENP020953 vhCDR1
DLWMD

SEQ ID NO: 29367 - protein, 19 aa, Artificial Sequence
  Description of Artificial Sequence: Synthetic peptide
  XENP020953 vhCDR2
EIRTKANNHATYYAESVKG

SEQ ID NO: 29368 - protein, 10 aa, Artificial Sequence
  Description of Artificial Sequence: Synthetic peptide
  XENP020953 vhCDR3
LANWDWYFDV

SEQ ID NO: 29369 - protein, 218 aa, Artificial Sequence; identical to SEQ ID NO: 17590
  Description of Artificial Sequence: Synthetic polypeptide
  XENP020953 7G8_H0.22_L0_Fab Light Chain

SEQ ID NO: 29370 - protein, 111 aa, Artificial Sequence; identical to SEQ ID NO: 17591
  Description of Artificial Sequence: Synthetic polypeptide
  VL of XENP020953

SEQ ID NO: 29371 - protein, 15 aa, Artificial Sequence
  Description of Artificial Sequence: Synthetic peptide
  XENP020953 vlCDR1
KASQSVDYDGDSYMN

SEQ ID NO: 29372 - protein, 7 aa, Artificial Sequence
  Description of Artificial Sequence: Synthetic peptide
  XENP020953 vlCDR2
AASNLES

SEQ ID NO: 29373 - protein, 9 aa, Artificial Sequence
  Description of Artificial Sequence: Synthetic peptide
  XENP020953 vlCDR3
QQSNEDPFT

SEQ ID NO: 29374 - protein, 226 aa, Artificial Sequence
  Description of Artificial Sequence: Synthetic polypeptide
  XENP020954 7G8_H0.23_L0_Fab Heavy Chain
EVKLEESGGGLVQPGGSMKLSCAASGFTFSDKWMDWVRQSPEKGLEWVAEIRTKANNHATYYAESVKGRFTISRDDSKSSVYLQMNSLRAEDTGIYYCTRLANWDWYFDVWGAGTTVTVSSASTKGPSVFPLAPSSKSTSGGTAALGCLVKDYFPEPVTVSWNSGALTSGVHTFPAVLQSSGLYSLSSVVTVPSSSLGTQTYICNVNHKPSNTKVDKKVEPKSCGS

SEQ ID NO: 29375 - protein, 121 aa, Artificial Sequence; identical to SEQ ID NO: 18436
  Description of Artificial Sequence: Synthetic polypeptide
  VH of XENP020954

SEQ ID NO: 29376 - protein, 5 aa, Artificial Sequence
  Description of Artificial Sequence: Synthetic peptide
  XENP020954 vhCDR1
DKWMD

SEQ ID NO: 29377 - protein, 19 aa, Artificial Sequence
  Description of Artificial Sequence: Synthetic peptide
  XENP020954 vhCDR2
EIRTKANNHATYYAESVKG

SEQ ID NO: 29378 - protein, 10 aa, Artificial Sequence
  Description of Artificial Sequence: Synthetic peptide
  XENP020954 vhCDR3
LANWDWYFDV

SEQ ID NO: 29379 - protein, 218 aa, Artificial Sequence; identical to SEQ ID NO: 17590
  Description of Artificial Sequence: Synthetic polypeptide
  XENP020954 7G8_H0.23_L0_Fab Light Chain

SEQ ID NO: 29380 - protein, 111 aa, Artificial Sequence; identical to SEQ ID NO: 17591
  Description of Artificial Sequence: Synthetic polypeptide
  VL of XENP020954

SEQ ID NO: 29381 - protein, 15 aa, Artificial Sequence
  Description of Artificial Sequence: Synthetic peptide
  XENP020954 vlCDR1
KASQSVDYDGDSYMN

SEQ ID NO: 29382 - protein, 7 aa, Artificial Sequence
  Description of Artificial Sequence: Synthetic peptide
  XENP020954 vlCDR2
AASNLES

SEQ ID NO: 29383 - protein, 9 aa, Artificial Sequence
  Description of Artificial Sequence: Synthetic peptide
  XENP020954 vlCDR3
QQSNEDPFT

SEQ ID NO: 29384 - protein, 226 aa, Artificial Sequence
  Description of Artificial Sequence: Synthetic polypeptide
  XENP020955 7G8_H0.24_L0_Fab Heavy Chain
EVKLEESGGGLVQPGGSMKLSCAASGFTFSDYWMDWVRQSPEKGLEWVAEIRTKANNHATYYAESVKGRFTISRDDSKSSVYLQMNSLRAEDTGIYYCTRLANWDWYFDVWGAGTTVTVSSASTKGPSVFPLAPSSKSTSGGTAALGCLVKDYFPEPVTVSWNSGALTSGVHTFPAVLQSSGLYSLSSVVTVPSSSLGTQTYICNVNHKPSNTKVDKKVEPKSCGS

SEQ ID NO: 29385 - protein, 121 aa, Artificial Sequence; identical to SEQ ID NO: 18446
  Description of Artificial Sequence: Synthetic polypeptide
  VH of XENP020955

SEQ ID NO: 29386 - protein, 5 aa, Artificial Sequence
  Description of Artificial Sequence: Synthetic peptide
  XENP020955 vhCDR1
DYWMD

SEQ ID NO: 29387 - protein, 19 aa, Artificial Sequence
  Description of Artificial Sequence: Synthetic peptide
  XENP020955 vhCDR2
EIRTKANNHATYYAESVKG

SEQ ID NO: 29388 - protein, 10 aa, Artificial Sequence
  Description of Artificial Sequence: Synthetic peptide
  XENP020955 vhCDR3
LANWDWYFDV

SEQ ID NO: 29389 - protein, 218 aa, Artificial Sequence; identical to SEQ ID NO: 17590
  Description of Artificial Sequence: Synthetic polypeptide
  XENP020955 7G8_H0.24_L0_Fab Light Chain

SEQ ID NO: 29390 - protein, 111 aa, Artificial Sequence; identical to SEQ ID NO: 17591
  Description of Artificial Sequence: Synthetic polypeptide
  VL of XENP020955

SEQ ID NO: 29391 - protein, 15 aa, Artificial Sequence
  Description of Artificial Sequence: Synthetic peptide
  XENP020955 vlCDR1
KASQSVDYDGDSYMN

SEQ ID NO: 29392 - protein, 7 aa, Artificial Sequence
  Description of Artificial Sequence: Synthetic peptide
  XENP020955 vlCDR2
AASNLES

SEQ ID NO: 29393 - protein, 9 aa, Artificial Sequence
  Description of Artificial Sequence: Synthetic peptide
  XENP020955 vlCDR3
QQSNEDPFT

SEQ ID NO: 29394 - protein, 226 aa, Artificial Sequence
  Description of Artificial Sequence: Synthetic polypeptide
  XENP020956 7G8_H0.25_L0_Fab Heavy Chain
EVKLEESGGGLVQPGGSMKLSCAASGFTFSDAYMDWVRQSPEKGLEWVAEIRTKANNHATYYAESVKGRFTISRDDSKSSVYLQMNSLRAEDTGIYYCTRLANWDWYFDVWGAGTTVTVSSASTKGPSVFPLAPSSKSTSGGTAALGCLVKDYFPEPVTVSWNSGALTSGVHTFPAVLQSSGLYSLSSVVTVPSSSLGTQTYICNVNHKPSNTKVDKKVEPKSCGS

SEQ ID NO: 29395 - protein, 121 aa, Artificial Sequence; identical to SEQ ID NO: 18456
  Description of Artificial Sequence: Synthetic polypeptide
  VH of XENP020956

SEQ ID NO: 29396 - protein, 5 aa, Artificial Sequence
  Description of Artificial Sequence: Synthetic peptide
  XENP020956 vhCDR1
DAYMD

SEQ ID NO: 29397 - protein, 19 aa, Artificial Sequence
  Description of Artificial Sequence: Synthetic peptide
  XENP020956 vhCDR2
EIRTKANNHATYYAESVKG

SEQ ID NO: 29398 - protein, 10 aa, Artificial Sequence
  Description of Artificial Sequence: Synthetic peptide
  XENP020956 vhCDR3
LANWDWYFDV

SEQ ID NO: 29399 - protein, 218 aa, Artificial Sequence; identical to SEQ ID NO: 17590
  Description of Artificial Sequence: Synthetic polypeptide
  XENP020956 7G8_H0.25_L0_Fab Light Chain

SEQ ID NO: 29400 - protein, 111 aa, Artificial Sequence; identical to SEQ ID NO: 17591
  Description of Artificial Sequence: Synthetic polypeptide
  VL of XENP020956

SEQ ID NO: 29401 - protein, 15 aa, Artificial Sequence
  Description of Artificial Sequence: Synthetic peptide
  XENP020956 vlCDR1
KASQSVDYDGDSYMN

SEQ ID NO: 29402 - protein, 7 aa, Artificial Sequence
  Description of Artificial Sequence: Synthetic peptide
  XENP020956 vlCDR2
AASNLES

SEQ ID NO: 29403 - protein, 9 aa, Artificial Sequence
  Description of Artificial Sequence: Synthetic peptide
  XENP020956 vlCDR3
QQSNEDPFT

SEQ ID NO: 29404 - protein, 226 aa, Artificial Sequence
  Description of Artificial Sequence: Synthetic polypeptide
  XENP020957 7G8_H0.26_L0_Fab Heavy Chain
EVKLEESGGGLVQPGGSMKLSCAASGFTFSDAFMDWVRQSPEKGLEWVAEIRTKANNHATYYAESVKGRFTISRDDSKSSVYLQMNSLRAEDTGIYYCTRLANWDWYFDVWGAGTTVTVSSASTKGPSVFPLAPSSKSTSGGTAALGCLVKDYFPEPVTVSWNSGALTSGVHTFPAVLQSSGLYSLSSVVTVPSSSLGTQTYICNVNHKPSNTKVDKKVEPKSCGS

SEQ ID NO: 29405 - protein, 121 aa, Artificial Sequence; identical to SEQ ID NO: 18466
  Description of Artificial Sequence: Synthetic polypeptide
  VH of XENP020957

SEQ ID NO: 29406 - protein, 5 aa, Artificial Sequence
  Description of Artificial Sequence: Synthetic peptide
  XENP020957 vhCDR1
DAFMD

SEQ ID NO: 29407 - protein, 19 aa, Artificial Sequence
  Description of Artificial Sequence: Synthetic peptide
  XENP020957 vhCDR2
EIRTKANNHATYYAESVKG

SEQ ID NO: 29408 - protein, 10 aa, Artificial Sequence
  Description of Artificial Sequence: Synthetic peptide
  XENP020957 vhCDR3
LANWDWYFDV

SEQ ID NO: 29409 - protein, 218 aa, Artificial Sequence; identical to SEQ ID NO: 17590
  Description of Artificial Sequence: Synthetic polypeptide
  XENP020957 7G8_H0.26_L0_Fab Light Chain

SEQ ID NO: 29410 - protein, 111 aa, Artificial Sequence; identical to SEQ ID NO: 17591
  Description of Artificial Sequence: Synthetic polypeptide
  VL of XENP020957

SEQ ID NO: 29411 - protein, 15 aa, Artificial Sequence
  Description of Artificial Sequence: Synthetic peptide
  XENP020957 vlCDR1
KASQSVDYDGDSYMN

SEQ ID NO: 29412 - protein, 7 aa, Artificial Sequence
  Description of Artificial Sequence: Synthetic peptide
  XENP020957 vlCDR2
AASNLES

SEQ ID NO: 29413 - protein, 9 aa, Artificial Sequence
  Description of Artificial Sequence: Synthetic peptide
  XENP020957 vlCDR3
QQSNEDPFT

SEQ ID NO: 29414 - protein, 226 aa, Artificial Sequence
  Description of Artificial Sequence: Synthetic polypeptide
  XENP020958 7G8_H0.27_L0_Fab Heavy Chain
EVKLEESGGGLVQPGGSMKLSCAASGFTFSDAWMDWVRQSPEKGLEWVAEIKTKANNHATYYAESVKGRFTISRDDSKSSVYLQMNSLRAEDTGIYYCTRLANWDWYFDVWGAGTTVTVSSASTKGPSVFPLAPSSKSTSGGTAALGCLVKDYFPEPVTVSWNSGALTSGVHTFPAVLQSSGLYSLSSVVTVPSSSLGTQTYICNVNHKPSNTKVDKKVEPKSCGS

SEQ ID NO: 29415 - protein, 121 aa, Artificial Sequence; identical to SEQ ID NO: 18476
  Description of Artificial Sequence: Synthetic polypeptide
  VH of XENP020958

SEQ ID NO: 29416 - protein, 5 aa, Artificial Sequence
  Description of Artificial Sequence: Synthetic peptide
  XENP020958 vhCDR1
DAWMD

SEQ ID NO: 29417 - protein, 19 aa, Artificial Sequence
  Description of Artificial Sequence: Synthetic peptide
  XENP020958 vhCDR2
EIKTKANNHATYYAESVKG

SEQ ID NO: 29418 - protein, 10 aa, Artificial Sequence
  Description of Artificial Sequence: Synthetic peptide
  XENP020958 vhCDR3
LANWDWYFDV

SEQ ID NO: 29419 - protein, 218 aa, Artificial Sequence; identical to SEQ ID NO: 17590
  Description of Artificial Sequence: Synthetic polypeptide
  XENP020958 7G8_H0.27_L0_Fab Light Chain

SEQ ID NO: 29420 - protein, 111 aa, Artificial Sequence; identical to SEQ ID NO: 17591
  Description of Artificial Sequence: Synthetic polypeptide
  VL of XENP020958

SEQ ID NO: 29421 - protein, 15 aa, Artificial Sequence
  Description of Artificial Sequence: Synthetic peptide
  XENP020958 vlCDR1
KASQSVDYDGDSYMN

SEQ ID NO: 29422 - protein, 7 aa, Artificial Sequence
  Description of Artificial Sequence: Synthetic peptide
  XENP020958 vlCDR2
AASNLES

SEQ ID NO: 29423 - protein, 9 aa, Artificial Sequence
  Description of Artificial Sequence: Synthetic peptide
  XENP020958 vlCDR3
QQSNEDPFT

SEQ ID NO: 29424 - protein, 226 aa, Artificial Sequence
  Description of Artificial Sequence: Synthetic polypeptide
  XENP020959 7G8_H0.28_L0_Fab Heavy Chain
EVKLEESGGGLVQPGGSMKLSCAASGFTFSDAWMDWVRQSPEKGLEWVAEIETKANNHATYYAESVKGRFTISRDDSKSSVYLQMNSLRAEDTGIYYCTRLANWDWYFDVWGAGTTVTVSSASTKGPSVFPLAPSSKSTSGGTAALGCLVKDYFPEPVTVSWNSGALTSGVHTFPAVLQSSGLYSLSSVVTVPSSSLGTQTYICNVNHKPSNTKVDKKVEPKSCGS

SEQ ID NO: 29425 - protein, 121 aa, Artificial Sequence; identical to SEQ ID NO: 18486
  Description of Artificial Sequence: Synthetic polypeptide
  VH of XENP020959

SEQ ID NO: 29426 - protein, 5 aa, Artificial Sequence
  Description of Artificial Sequence: Synthetic peptide
  XENP020959 vhCDR1
DAWMD

SEQ ID NO: 29427 - protein, 19 aa, Artificial Sequence
  Description of Artificial Sequence: Synthetic peptide
  XENP020959 vhCDR2
EIETKANNHATYYAESVKG

SEQ ID NO: 29428 - protein, 10 aa, Artificial Sequence
  Description of Artificial Sequence: Synthetic peptide
  XENP020959 vhCDR3
LANWDWYFDV

SEQ ID NO: 29429 - protein, 218 aa, Artificial Sequence; identical to SEQ ID NO: 17590
  Description of Artificial Sequence: Synthetic polypeptide
  XENP020959 7G8_H0.28_L0_Fab Light Chain

SEQ ID NO: 29430 - protein, 111 aa, Artificial Sequence; identical to SEQ ID NO: 17591
  Description of Artificial Sequence: Synthetic polypeptide
  VL of XENP020959

SEQ ID NO: 29431 - protein, 15 aa, Artificial Sequence
  Description of Artificial Sequence: Synthetic peptide
  XENP020959 vlCDR1
KASQSVDYDGDSYMN

SEQ ID NO: 29432 - protein, 7 aa, Artificial Sequence
  Description of Artificial Sequence: Synthetic peptide
  XENP020959 vlCDR2
AASNLES

SEQ ID NO: 29433 - protein, 9 aa, Artificial Sequence
  Description of Artificial Sequence: Synthetic peptide
  XENP020959 vlCDR3
QQSNEDPFT

SEQ ID NO: 29434 - protein, 226 aa, Artificial Sequence
  Description of Artificial Sequence: Synthetic polypeptide
  XENP020960 7G8_H0.29_L0_Fab Heavy Chain
EVKLEESGGGLVQPGGSMKLSCAASGFTFSDAWMDWVRQSPEKGLEWVAEIDTKANNHATYYAESVKGRFTISRDDSKSSVYLQMNSLRAEDTGIYYCTRLANWDWYFDVWGAGTTVTVSSASTKGPSVFPLAPSSKSTSGGTAALGCLVKDYFPEPVTVSWNSGALTSGVHTFPAVLQSSGLYSLSSVVTVPSSSLGTQTYICNVNHKPSNTKVDKKVEPKSCGS

SEQ ID NO: 29435 - protein, 121 aa, Artificial Sequence; identical to SEQ ID NO: 18496
  Description of Artificial Sequence: Synthetic polypeptide
  VH of XENP020960

SEQ ID NO: 29436 - protein, 5 aa, Artificial Sequence
  Description of Artificial Sequence: Synthetic peptide
  XENP020960 vhCDR1
DAWMD

SEQ ID NO: 29437 - protein, 19 aa, Artificial Sequence
  Description of Artificial Sequence: Synthetic peptide
  XENP020960 vhCDR2
EIDTKANNHATYYAESVKG

SEQ ID NO: 29438 - protein, 10 aa, Artificial Sequence
  Description of Artificial Sequence: Synthetic peptide
  XENP020960 vhCDR3
LANWDWYFDV

SEQ ID NO: 29439 - protein, 218 aa, Artificial Sequence; identical to SEQ ID NO: 17590
  Description of Artificial Sequence: Synthetic polypeptide
  XENP020960 7G8_H0.29_L0_Fab Light Chain

SEQ ID NO: 29440 - protein, 111 aa, Artificial Sequence; identical to SEQ ID NO: 17591
  Description of Artificial Sequence: Synthetic polypeptide
  VL of XENP020960

SEQ ID NO: 29441 - protein, 15 aa, Artificial Sequence
  Description of Artificial Sequence: Synthetic peptide
  XENP020960 vlCDR1
KASQSVDYDGDSYMN

SEQ ID NO: 29442 - protein, 7 aa, Artificial Sequence
  Description of Artificial Sequence: Synthetic peptide
  XENP020960 vlCDR2
AASNLES

SEQ ID NO: 29443 - protein, 9 aa, Artificial Sequence
  Description of Artificial Sequence: Synthetic peptide
  XENP020960 vlCDR3
QQSNEDPFT

SEQ ID NO: 29444 - protein, 226 aa, Artificial Sequence
  Description of Artificial Sequence: Synthetic polypeptide
  XENP020961 7G8_H0.30_L0_Fab Heavy Chain
EVKLEESGGGLVQPGGSMKLSCAASGFTFSDAWMDWVRQSPEKGLEWVAEIHTKANNHATYYAESVKGRFTISRDDSKSSVYLQMNSLRAEDTGIYYCTRLANWDWYFDVWGAGTTVTVSSASTKGPSVFPLAPSSKSTSGGTAALGCLVKDYFPEPVTVSWNSGALTSGVHTFPAVLQSSGLYSLSSVVTVPSSSLGTQTYICNVNHKPSNTKVDKKVEPKSCGS

SEQ ID NO: 29445 - protein, 121 aa, Artificial Sequence; identical to SEQ ID NO: 18506
  Description of Artificial Sequence: Synthetic polypeptide
  VH of XENP020961

SEQ ID NO: 29446 - protein, 5 aa, Artificial Sequence
  Description of Artificial Sequence: Synthetic peptide
  XENP020961 vhCDR1
DAWMD

SEQ ID NO: 29447 - protein, 19 aa, Artificial Sequence
  Description of Artificial Sequence: Synthetic peptide
  XENP020961 vhCDR2
EIHTKANNHATYYAESVKG

SEQ ID NO: 29448 - protein, 10 aa, Artificial Sequence
  Description of Artificial Sequence: Synthetic peptide
  XENP020961 vhCDR3
LANWDWYFDV

SEQ ID NO: 29449 - protein, 218 aa, Artificial Sequence; identical to SEQ ID NO: 17590
  Description of Artificial Sequence: Synthetic polypeptide
  XENP020961 7G8_H0.30_L0_Fab Light Chain

SEQ ID NO: 29450 - protein, 111 aa, Artificial Sequence; identical to SEQ ID NO: 17591
  Description of Artificial Sequence: Synthetic polypeptide
  VL of XENP020961

SEQ ID NO: 29451 - protein, 15 aa, Artificial Sequence
  Description of Artificial Sequence: Synthetic peptide
  XENP020961 vlCDR1
KASQSVDYDGDSYMN

SEQ ID NO: 29452 - protein, 7 aa, Artificial Sequence
  Description of Artificial Sequence: Synthetic peptide
  XENP020961 vlCDR2
AASNLES

SEQ ID NO: 29453 - protein, 9 aa, Artificial Sequence
  Description of Artificial Sequence: Synthetic peptide
  XENP020961 vlCDR3
QQSNEDPFT

SEQ ID NO: 29454 - protein, 226 aa, Artificial Sequence
  Description of Artificial Sequence: Synthetic polypeptide
  XENP020962 7G8_H0.31_L0_Fab Heavy Chain
EVKLEESGGGLVQPGGSMKLSCAASGFTFSDAWMDWVRQSPEKGLEWVAEISTKANNHATYYAESVKGRFTISRDDSKSSVYLQMNSLRAEDTGIYYCTRLANWDWYFDVWGAGTTVTVSSASTKGPSVFPLAPSSKSTSGGTAALGCLVKDYFPEPVTVSWNSGALTSGVHTFPAVLQSSGLYSLSSVVTVPSSSLGTQTYICNVNHKPSNTKVDKKVEPKSCGS

SEQ ID NO: 29455 - protein, 121 aa, Artificial Sequence; identical to SEQ ID NO: 18516
  Description of Artificial Sequence: Synthetic polypeptide
  VH of XENP020962

SEQ ID NO: 29456 - protein, 5 aa, Artificial Sequence
  Description of Artificial Sequence: Synthetic peptide
  XENP020962 vhCDR1
DAWMD

SEQ ID NO: 29457 - protein, 19 aa, Artificial Sequence
  Description of Artificial Sequence: Synthetic peptide
  XENP020962 vhCDR2
EISTKANNHATYYAESVKG

SEQ ID NO: 29458 - protein, 10 aa, Artificial Sequence
  Description of Artificial Sequence: Synthetic peptide
  XENP020962 vhCDR3
LANWDWYFDV

SEQ ID NO: 29459 - protein, 218 aa, Artificial Sequence; identical to SEQ ID NO: 17590
  Description of Artificial Sequence: Synthetic polypeptide
  XENP020962 7G8_H0.31_L0_Fab Light Chain

SEQ ID NO: 29460 - protein, 111 aa, Artificial Sequence; identical to SEQ ID NO: 17591
  Description of Artificial Sequence: Synthetic polypeptide
  VL of XENP020962

SEQ ID NO: 29461 - protein, 15 aa, Artificial Sequence
  Description of Artificial Sequence: Synthetic peptide
  XENP020962 vlCDR1
KASQSVDYDGDSYMN

SEQ ID NO: 29462 - protein, 7 aa, Artificial Sequence
  Description of Artificial Sequence: Synthetic peptide
  XENP020962 vlCDR2
AASNLES

SEQ ID NO: 29463 - protein, 9 aa, Artificial Sequence
  Description of Artificial Sequence: Synthetic peptide
  XENP020962 vlCDR3
QQSNEDPFT

SEQ ID NO: 29464 - protein, 226 aa, Artificial Sequence
  Description of Artificial Sequence: Synthetic polypeptide
  XENP020963 7G8_H0.32_L0_Fab Heavy Chain
EVKLEESGGGLVQPGGSMKLSCAASGFTFSDAWMDWVRQSPEKGLEWVAEIGTKANNHATYYAESVKGRFTISRDDSKSSVYLQMNSLRAEDTGIYYCTRLANWDWYFDVWGAGTTVTVSSASTKGPSVFPLAPSSKSTSGGTAALGCLVKDYFPEPVTVSWNSGALTSGVHTFPAVLQSSGLYSLSSVVTVPSSSLGTQTYICNVNHKPSNTKVDKKVEPKSCGS

SEQ ID NO: 29465 - protein, 121 aa, Artificial Sequence; identical to SEQ ID NO: 18526
  Description of Artificial Sequence: Synthetic polypeptide
  VH of XENP020963

SEQ ID NO: 29466 - protein, 5 aa, Artificial Sequence
  Description of Artificial Sequence: Synthetic peptide
  XENP020963 vhCDR1
DAWMD

SEQ ID NO: 29467 - protein, 19 aa, Artificial Sequence
  Description of Artificial Sequence: Synthetic peptide
  XENP020963 vhCDR2
EIGTKANNHATYYAESVKG

SEQ ID NO: 29468 - protein, 10 aa, Artificial Sequence
  Description of Artificial Sequence: Synthetic peptide
  XENP020963 vhCDR3
LANWDWYFDV

SEQ ID NO: 29469 - protein, 218 aa, Artificial Sequence; identical to SEQ ID NO: 17590
  Description of Artificial Sequence: Synthetic polypeptide
  XENP020963 7G8_H0.32_L0_Fab Light Chain

SEQ ID NO: 29470 - protein, 111 aa, Artificial Sequence; identical to SEQ ID NO: 17591
  Description of Artificial Sequence: Synthetic polypeptide
  VL of XENP020963

SEQ ID NO: 29471 - protein, 15 aa, Artificial Sequence
  Description of Artificial Sequence: Synthetic peptide
  XENP020963 vlCDR1
KASQSVDYDGDSYMN

SEQ ID NO: 29472 - protein, 7 aa, Artificial Sequence
  Description of Artificial Sequence: Synthetic peptide
  XENP020963 vlCDR2
AASNLES

SEQ ID NO: 29473 - protein, 9 aa, Artificial Sequence
  Description of Artificial Sequence: Synthetic peptide
  XENP020963 vlCDR3
QQSNEDPFT

SEQ ID NO: 29474 - protein, 226 aa, Artificial Sequence
  Description of Artificial Sequence: Synthetic polypeptide
  XENP020964 7G8_H0.33_L0_Fab Heavy Chain
EVKLEESGGGLVQPGGSMKLSCAASGFTFSDAWMDWVRQSPEKGLEWVAEIYTKANNHATYYAESVKGRFTISRDDSKSSVYLQMNSLRAEDTGIYYCTRLANWDWYFDVWGAGTTVTVSSASTKGPSVFPLAPSSKSTSGGTAALGCLVKDYFPEPVTVSWNSGALTSGVHTFPAVLQSSGLYSLSSVVTVPSSSLGTQTYICNVNHKPSNTKVDKKVEPKSCGS

SEQ ID NO: 29475 - protein, 121 aa, Artificial Sequence; identical to SEQ ID NO: 18536
  Description of Artificial Sequence: Synthetic polypeptide
  VH of XENP020964

SEQ ID NO: 29476 - protein, 5 aa, Artificial Sequence
  Description of Artificial Sequence: Synthetic peptide
  XENP020964 vhCDR1
DAWMD

SEQ ID NO: 29477 - protein, 19 aa, Artificial Sequence
  Description of Artificial Sequence: Synthetic peptide
  XENP020964 vhCDR2
EIYTKANNHATYYAESVKG

SEQ ID NO: 29478 - protein, 10 aa, Artificial Sequence
  Description of Artificial Sequence: Synthetic peptide
  XENP020964 vhCDR3
LANWDWYFDV

SEQ ID NO: 29479 - protein, 218 aa, Artificial Sequence; identical to SEQ ID NO: 17590
  Description of Artificial Sequence: Synthetic polypeptide
  XENP020964 7G8_H0.33_L0_Fab Light Chain

SEQ ID NO: 29480 - protein, 111 aa, Artificial Sequence; identical to SEQ ID NO: 17591
  Description of Artificial Sequence: Synthetic polypeptide
  VL of XENP020964

SEQ ID NO: 29481 - protein, 15 aa, Artificial Sequence
  Description of Artificial Sequence: Synthetic peptide
  XENP020964 vlCDR1
KASQSVDYDGDSYMN

SEQ ID NO: 29482 - protein, 7 aa, Artificial Sequence
  Description of Artificial Sequence: Synthetic peptide
  XENP020964 vlCDR2
AASNLES

SEQ ID NO: 29483 - protein, 9 aa, Artificial Sequence
  Description of Artificial Sequence: Synthetic peptide
  XENP020964 vlCDR3
QQSNEDPFT

SEQ ID NO: 29484 - protein, 226 aa, Artificial Sequence
  Description of Artificial Sequence: Synthetic polypeptide
  XENP020965 7G8_H0.34_L0_Fab Heavy Chain
EVKLEESGGGLVQPGGSMKLSCAASGFTFSDAWMDWVRQSPEKGLEWVAEIITKANNHATYYAESVKGRFTISRDDSKSSVYLQMNSLRAEDTGIYYCTRLANWDWYFDVWGAGTTVTVSSASTKGPSVFPLAPSSKSTSGGTAALGCLVKDYFPEPVTVSWNSGALTSGVHTFPAVLQSSGLYSLSSVVTVPSSSLGTQTYICNVNHKPSNTKVDKKVEPKSCGS

SEQ ID NO: 29485 - protein, 121 aa, Artificial Sequence; identical to SEQ ID NO: 18546
  Description of Artificial Sequence: Synthetic polypeptide
  VH of XENP020965

SEQ ID NO: 29486 - protein, 5 aa, Artificial Sequence
  Description of Artificial Sequence: Synthetic peptide
  XENP020965 vhCDR1
DAWMD

SEQ ID NO: 29487 - protein, 19 aa, Artificial Sequence
  Description of Artificial Sequence: Synthetic peptide
  XENP020965 vhCDR2
EIITKANNHATYYAESVKG

SEQ ID NO: 29488 - protein, 10 aa, Artificial Sequence
  Description of Artificial Sequence: Synthetic peptide
  XENP020965 vhCDR3
LANWDWYFDV

SEQ ID NO: 29489 - protein, 218 aa, Artificial Sequence; identical to SEQ ID NO: 17590
  Description of Artificial Sequence: Synthetic polypeptide
  XENP020965 7G8_H0.34_L0_Fab Light Chain

SEQ ID NO: 29490 - protein, 111 aa, Artificial Sequence; identical to SEQ ID NO: 17591
  Description of Artificial Sequence: Synthetic polypeptide
  VL of XENP020965

SEQ ID NO: 29491 - protein, 15 aa, Artificial Sequence
  Description of Artificial Sequence: Synthetic peptide
  XENP020965 vlCDR1
KASQSVDYDGDSYMN

SEQ ID NO: 29492 - protein, 7 aa, Artificial Sequence
  Description of Artificial Sequence: Synthetic peptide
  XENP020965 vlCDR2
AASNLES

SEQ ID NO: 29493 - protein, 9 aa, Artificial Sequence
  Description of Artificial Sequence: Synthetic peptide
  XENP020965 vlCDR3
QQSNEDPFT

SEQ ID NO: 29494 - protein, 226 aa, Artificial Sequence
  Description of Artificial Sequence: Synthetic polypeptide
  XENP020966 7G8_H0.35_L0_Fab Heavy Chain
EVKLEESGGGLVQPGGSMKLSCAASGFTFSDAWMDWVRQSPEKGLEWVAEIWTKANNHATYYAESVKGRFTISRDDSKSSVYLQMNSLRAEDTGIYYCTRLANWDWYFDVWGAGTTVTVSSASTKGPSVFPLAPSSKSTSGGTAALGCLVKDYFPEPVTVSWNSGALTSGVHTFPAVLQSSGLYSLSSVVTVPSSSLGTQTYICNVNHKPSNTKVDKKVEPKSCGS

SEQ ID NO: 29495 - protein, 121 aa, Artificial Sequence; identical to SEQ ID NO: 18556
  Description of Artificial Sequence: Synthetic polypeptide
  VH of XENP020966

SEQ ID NO: 29496 - protein, 5 aa, Artificial Sequence
  Description of Artificial Sequence: Synthetic peptide
  XENP020966 vhCDR1
DAWMD

SEQ ID NO: 29497 - protein, 19 aa, Artificial Sequence
  Description of Artificial Sequence: Synthetic peptide
  XENP020966 vhCDR2
EIWTKANNHATYYAESVKG

SEQ ID NO: 29498 - protein, 10 aa, Artificial Sequence
  Description of Artificial Sequence: Synthetic peptide
  XENP020966 vhCDR3
LANWDWYFDV

SEQ ID NO: 29499 - protein, 218 aa, Artificial Sequence; identical to SEQ ID NO: 17590
  Description of Artificial Sequence: Synthetic polypeptide
  XENP020966 7G8_H0.35_L0_Fab Light Chain

SEQ ID NO: 29500 - protein, 111 aa, Artificial Sequence; identical to SEQ ID NO: 17591
  Description of Artificial Sequence: Synthetic polypeptide
  VL of XENP020966

SEQ ID NO: 29501 - protein, 15 aa, Artificial Sequence
  Description of Artificial Sequence: Synthetic peptide
  XENP020966 vlCDR1
KASQSVDYDGDSYMN

SEQ ID NO: 29502 - protein, 7 aa, Artificial Sequence
  Description of Artificial Sequence: Synthetic peptide
  XENP020966 vlCDR2
AASNLES

SEQ ID NO: 29503 - protein, 9 aa, Artificial Sequence
  Description of Artificial Sequence: Synthetic peptide
  XENP020966 vlCDR3
QQSNEDPFT

SEQ ID NO: 29504 - protein, 226 aa, Artificial Sequence
  Description of Artificial Sequence: Synthetic polypeptide
  XENP020967 7G8_H0.36_L0_Fab Heavy Chain
EVKLEESGGGLVQPGGSMKLSCAASGFTFSDAWMDWVRQSPEKGLEWVAEIRVKANNHATYYAESVKGRFTISRDDSKSSVYLQMNSLRAEDTGIYYCTRLANWDWYFDVWGAGTTVTVSSASTKGPSVFPLAPSSKSTSGGTAALGCLVKDYFPEPVTVSWNSGALTSGVHTFPAVLQSSGLYSLSSVVTVPSSSLGTQTYICNVNHKPSNTKVDKKVEPKSCGS

SEQ ID NO: 29505 - protein, 121 aa, Artificial Sequence; identical to SEQ ID NO: 18566
  Description of Artificial Sequence: Synthetic polypeptide
  VH of XENP020967

SEQ ID NO: 29506 - protein, 5 aa, Artificial Sequence
  Description of Artificial Sequence: Synthetic peptide
  XENP020967 vhCDR1
DAWMD

SEQ ID NO: 29507 - protein, 19 aa, Artificial Sequence
  Description of Artificial Sequence: Synthetic peptide
  XENP020967 vhCDR2
EIRVKANNHATYYAESVKG

SEQ ID NO: 29508 - protein, 10 aa, Artificial Sequence
  Description of Artificial Sequence: Synthetic peptide
  XENP020967 vhCDR3
LANWDWYFDV

SEQ ID NO: 29509 - protein, 218 aa, Artificial Sequence; identical to SEQ ID NO: 17590
  Description of Artificial Sequence: Synthetic polypeptide
  XENP020967 7G8_H0.36_L0_Fab Light Chain

SEQ ID NO: 29510 - protein, 111 aa, Artificial Sequence; identical to SEQ ID NO: 17591
  Description of Artificial Sequence: Synthetic polypeptide
  VL of XENP020967

SEQ ID NO: 29511 - protein, 15 aa, Artificial Sequence
  Description of Artificial Sequence: Synthetic peptide
  XENP020967 vlCDR1
KASQSVDYDGDSYMN

SEQ ID NO: 29512 - protein, 7 aa, Artificial Sequence
  Description of Artificial Sequence: Synthetic peptide
  XENP020967 vlCDR2
AASNLES

SEQ ID NO: 29513 - protein, 9 aa, Artificial Sequence
  Description of Artificial Sequence: Synthetic peptide
  XENP020967 vlCDR3
QQSNEDPFT

SEQ ID NO: 29514 - protein, 226 aa, Artificial Sequence
  Description of Artificial Sequence: Synthetic polypeptide
  XENP020968 7G8_H0.37_L0_Fab Heavy Chain
EVKLEESGGGLVQPGGSMKLSCAASGFTFSDAWMDWVRQSPEKGLEWVAEIRSKANNHATYYAESVKGRFTISRDDSKSSVYLQMNSLRAEDTGIYYCTRLANWDWYFDVWGAGTTVTVSSASTKGPSVFPLAPSSKSTSGGTAALGCLVKDYFPEPVTVSWNSGALTSGVHTFPAVLQSSGLYSLSSVVTVPSSSLGTQTYICNVNHKPSNTKVDKKVEPKSCGS

SEQ ID NO: 29515 - protein, 121 aa, Artificial Sequence; identical to SEQ ID NO: 18576
  Description of Artificial Sequence: Synthetic polypeptide
  VH of XENP020968

SEQ ID NO: 29516 - protein, 5 aa, Artificial Sequence
  Description of Artificial Sequence: Synthetic peptide
  XENP020968 vhCDR1
DAWMD

SEQ ID NO: 29517 - protein, 19 aa, Artificial Sequence
  Description of Artificial Sequence: Synthetic peptide
  XENP020968 vhCDR2
EIRSKANNHATYYAESVKG

SEQ ID NO: 29518 - protein, 10 aa, Artificial Sequence
  Description of Artificial Sequence: Synthetic peptide
  XENP020968 vhCDR3
LANWDWYFDV

SEQ ID NO: 29519 - protein, 218 aa, Artificial Sequence; identical to SEQ ID NO: 17590
  Description of Artificial Sequence: Synthetic polypeptide
  XENP020968 7G8_H0.37_L0_Fab Light Chain

SEQ ID NO: 29520 - protein, 111 aa, Artificial Sequence; identical to SEQ ID NO: 17591
  Description of Artificial Sequence: Synthetic polypeptide
  VL of XENP020968

SEQ ID NO: 29521 - protein, 15 aa, Artificial Sequence
  Description of Artificial Sequence: Synthetic peptide
  XENP020968 vlCDR1
KASQSVDYDGDSYMN

SEQ ID NO: 29522 - protein, 7 aa, Artificial Sequence
  Description of Artificial Sequence: Synthetic peptide
  XENP020968 vlCDR2
AASNLES

SEQ ID NO: 29523 - protein, 9 aa, Artificial Sequence
  Description of Artificial Sequence: Synthetic peptide
  XENP020968 vlCDR3
QQSNEDPFT

SEQ ID NO: 29524 - protein, 226 aa, Artificial Sequence
  Description of Artificial Sequence: Synthetic polypeptide
  XENP020969 7G8_H0.38_L0_Fab Heavy Chain
EVKLEESGGGLVQPGGSMKLSCAASGFTFSDAWMDWVRQSPEKGLEWVAEIRAKANNHATYYAESVKGRFTISRDDSKSSVYLQMNSLRAEDTGIYYCTRLANWDWYFDVWGAGTTVTVSSASTKGPSVFPLAPSSKSTSGGTAALGCLVKDYFPEPVTVSWNSGALTSGVHTFPAVLQSSGLYSLSSVVTVPSSSLGTQTYICNVNHKPSNTKVDKKVEPKSCGS

SEQ ID NO: 29525 - protein, 121 aa, Artificial Sequence; identical to SEQ ID NO: 18586
  Description of Artificial Sequence: Synthetic polypeptide
  VH of XENP020969

SEQ ID NO: 29526 - protein, 5 aa, Artificial Sequence
  Description of Artificial Sequence: Synthetic peptide
  XENP020969 vhCDR1
DAWMD

SEQ ID NO: 29527 - protein, 19 aa, Artificial Sequence
  Description of Artificial Sequence: Synthetic peptide
  XENP020969 vhCDR2
EIRAKANNHATYYAESVKG

SEQ ID NO: 29528 - protein, 10 aa, Artificial Sequence
  Description of Artificial Sequence: Synthetic peptide
  XENP020969 vhCDR3
LANWDWYFDV

SEQ ID NO: 29529 - protein, 218 aa, Artificial Sequence; identical to SEQ ID NO: 17590
  Description of Artificial Sequence: Synthetic polypeptide
  XENP020969 7G8_H0.38_L0_Fab Light Chain

SEQ ID NO: 29530 - protein, 111 aa, Artificial Sequence; identical to SEQ ID NO: 17591
  Description of Artificial Sequence: Synthetic polypeptide
  VL of XENP020969

SEQ ID NO: 29531 - protein, 15 aa, Artificial Sequence
  Description of Artificial Sequence: Synthetic peptide
  XENP020969 vlCDR1
KASQSVDYDGDSYMN

SEQ ID NO: 29532 - protein, 7 aa, Artificial Sequence
  Description of Artificial Sequence: Synthetic peptide
  XENP020969 vlCDR2
AASNLES

SEQ ID NO: 29533 - protein, 9 aa, Artificial Sequence
  Description of Artificial Sequence: Synthetic peptide
  XENP020969 vlCDR3
QQSNEDPFT

SEQ ID NO: 29534 - protein, 226 aa, Artificial Sequence
  Description of Artificial Sequence: Synthetic polypeptide
  XENP020970 7G8_H0.39_L0_Fab Heavy Chain
EVKLEESGGGLVQPGGSMKLSCAASGFTFSDAWMDWVRQSPEKGLEWVAEIRIKANNHATYYAESVKGRFTISRDDSKSSVYLQMNSLRAEDTGIYYCTRLANWDWYFDVWGAGTTVTVSSASTKGPSVFPLAPSSKSTSGGTAALGCLVKDYFPEPVTVSWNSGALTSGVHTFPAVLQSSGLYSLSSVVTVPSSSLGTQTYICNVNHKPSNTKVDKKVEPKSCGS

SEQ ID NO: 29535 - protein, 121 aa, Artificial Sequence; identical to SEQ ID NO: 18596
  Description of Artificial Sequence: Synthetic polypeptide
  VH of XENP020970

SEQ ID NO: 29536 - protein, 5 aa, Artificial Sequence
  Description of Artificial Sequence: Synthetic peptide
  XENP020970 vhCDR1
DAWMD

SEQ ID NO: 29537 - protein, 19 aa, Artificial Sequence
  Description of Artificial Sequence: Synthetic peptide
  XENP020970 vhCDR2
EIRIKANNHATYYAESVKG

SEQ ID NO: 29538 - protein, 10 aa, Artificial Sequence
  Description of Artificial Sequence: Synthetic peptide
  XENP020970 vhCDR3
LANWDWYFDV

SEQ ID NO: 29539 - protein, 218 aa, Artificial Sequence; identical to SEQ ID NO: 17590
  Description of Artificial Sequence: Synthetic polypeptide
  XENP020970 7G8_H0.39_L0_Fab Light Chain

SEQ ID NO: 29540 - protein, 111 aa, Artificial Sequence; identical to SEQ ID NO: 17591
  Description of Artificial Sequence: Synthetic polypeptide
  VL of XENP020970

SEQ ID NO: 29541 - protein, 15 aa, Artificial Sequence
  Description of Artificial Sequence: Synthetic peptide
  XENP020970 vlCDR1
KASQSVDYDGDSYMN

SEQ ID NO: 29542 - protein, 7 aa, Artificial Sequence
  Description of Artificial Sequence: Synthetic peptide
  XENP020970 vlCDR2
AASNLES

SEQ ID NO: 29543 - protein, 9 aa, Artificial Sequence
  Description of Artificial Sequence: Synthetic peptide
  XENP020970 vlCDR3
QQSNEDPFT

SEQ ID NO: 29544 - protein, 226 aa, Artificial Sequence
  Description of Artificial Sequence: Synthetic polypeptide
  XENP020971 7G8_H0.40_L0_Fab Heavy Chain
EVKLEESGGGLVQPGGSMKLSCAASGFTFSDAWMDWVRQSPEKGLEWVAEIRQKANNHATYYAESVKGRFTISRDDSKSSVYLQMNSLRAEDTGIYYCTRLANWDWYFDVWGAGTTVTVSSASTKGPSVFPLAPSSKSTSGGTAALGCLVKDYFPEPVTVSWNSGALTSGVHTFPAVLQSSGLYSLSSVVTVPSSSLGTQTYICNVNHKPSNTKVDKKVEPKSCGS

SEQ ID NO: 29545 - protein, 121 aa, Artificial Sequence; identical to SEQ ID NO: 18606
  Description of Artificial Sequence: Synthetic polypeptide
  VH of XENP020971

SEQ ID NO: 29546 - protein, 5 aa, Artificial Sequence
  Description of Artificial Sequence: Synthetic peptide
  XENP020971 vhCDR1
DAWMD

SEQ ID NO: 29547 - protein, 19 aa, Artificial Sequence
  Description of Artificial Sequence: Synthetic peptide
  XENP020971 vhCDR2
EIRQKANNHATYYAESVKG

SEQ ID NO: 29548 - protein, 10 aa, Artificial Sequence
  Description of Artificial Sequence: Synthetic peptide
  XENP020971 vhCDR3
LANWDWYFDV

SEQ ID NO: 29549 - protein, 218 aa, Artificial Sequence; identical to SEQ ID NO: 17590
  Description of Artificial Sequence: Synthetic polypeptide
  XENP020971 7G8_H0.40_L0_Fab Light Chain

SEQ ID NO: 29550 - protein, 111 aa, Artificial Sequence; identical to SEQ ID NO: 17591
  Description of Artificial Sequence: Synthetic polypeptide
  VL of XENP020971

SEQ ID NO: 29551 - protein, 15 aa, Artificial Sequence
  Description of Artificial Sequence: Synthetic peptide
  XENP020971 vlCDR1
KASQSVDYDGDSYMN

SEQ ID NO: 29552 - protein, 7 aa, Artificial Sequence
  Description of Artificial Sequence: Synthetic peptide
  XENP020971 vlCDR2
AASNLES

SEQ ID NO: 29553 - protein, 9 aa, Artificial Sequence
  Description of Artificial Sequence: Synthetic peptide
  XENP020971 vlCDR3
QQSNEDPFT

SEQ ID NO: 29554 - protein, 226 aa, Artificial Sequence
  Description of Artificial Sequence: Synthetic polypeptide
  XENP020972 7G8_H0.41_L0_Fab Heavy Chain
EVKLEESGGGLVQPGGSMKLSCAASGFTFSDAWMDWVRQSPEKGLEWVAEIRHKANNHATYYAESVKGRFTISRDDSKSSVYLQMNSLRAEDTGIYYCTRLANWDWYFDVWGAGTTVTVSSASTKGPSVFPLAPSSKSTSGGTAALGCLVKDYFPEPVTVSWNSGALTSGVHTFPAVLQSSGLYSLSSVVTVPSSSLGTQTYICNVNHKPSNTKVDKKVEPKSCGS

SEQ ID NO: 29555 - protein, 121 aa, Artificial Sequence; identical to SEQ ID NO: 18616
  Description of Artificial Sequence: Synthetic polypeptide
  VH of XENP020972

SEQ ID NO: 29556 - protein, 5 aa, Artificial Sequence
  Description of Artificial Sequence: Synthetic peptide
  XENP020972 vhCDR1
DAWMD

SEQ ID NO: 29557 - protein, 19 aa, Artificial Sequence
  Description of Artificial Sequence: Synthetic peptide
  XENP020972 vhCDR2
EIRHKANNHATYYAESVKG

SEQ ID NO: 29558 - protein, 10 aa, Artificial Sequence
  Description of Artificial Sequence: Synthetic peptide
  XENP020972 vhCDR3
LANWDWYFDV

SEQ ID NO: 29559 - protein, 218 aa, Artificial Sequence; identical to SEQ ID NO: 17590
  Description of Artificial Sequence: Synthetic polypeptide
  XENP020972 7G8_H0.41_L0_Fab Light Chain

SEQ ID NO: 29560 - protein, 111 aa, Artificial Sequence; identical to SEQ ID NO: 17591
  Description of Artificial Sequence: Synthetic polypeptide
  VL of XENP020972

SEQ ID NO: 29561 - protein, 15 aa, Artificial Sequence
  Description of Artificial Sequence: Synthetic peptide
  XENP020972 vlCDR1
KASQSVDYDGDSYMN

SEQ ID NO: 29562 - protein, 7 aa, Artificial Sequence
  Description of Artificial Sequence: Synthetic peptide
  XENP020972 vlCDR2
AASNLES

SEQ ID NO: 29563 - protein, 9 aa, Artificial Sequence
  Description of Artificial Sequence: Synthetic peptide
  XENP020972 vlCDR3
QQSNEDPFT

SEQ ID NO: 29564 - protein, 226 aa, Artificial Sequence
  Description of Artificial Sequence: Synthetic polypeptide
  XENP020973 7G8_H0.42_L0_Fab Heavy Chain
EVKLEESGGGLVQPGGSMKLSCAASGFTFSDAWMDWVRQSPEKGLEWVAEIRDKANNHATYYAESVKGRFTISRDDSKSSVYLQMNSLRAEDTGIYYCTRLANWDWYFDVWGAGTTVTVSSASTKGPSVFPLAPSSKSTSGGTAALGCLVKDYFPEPVTVSWNSGALTSGVHTFPAVLQSSGLYSLSSVVTVPSSSLGTQTYICNVNHKPSNTKVDKKVEPKSCGS

SEQ ID NO: 29565 - protein, 121 aa, Artificial Sequence; identical to SEQ ID NO: 18626
  Description of Artificial Sequence: Synthetic polypeptide
  VH of XENP020973

SEQ ID NO: 29566 - protein, 5 aa, Artificial Sequence
  Description of Artificial Sequence: Synthetic peptide
  XENP020973 vhCDR1
DAWMD

SEQ ID NO: 29567 - protein, 19 aa, Artificial Sequence
  Description of Artificial Sequence: Synthetic peptide
  XENP020973 vhCDR2
EIRDKANNHATYYAESVKG

SEQ ID NO: 29568 - protein, 10 aa, Artificial Sequence
  Description of Artificial Sequence: Synthetic peptide
  XENP020973 vhCDR3
LANWDWYFDV

SEQ ID NO: 29569 - protein, 218 aa, Artificial Sequence; identical to SEQ ID NO: 17590
  Description of Artificial Sequence: Synthetic polypeptide
  XENP020973 7G8_H0.42_L0_Fab Light Chain

SEQ ID NO: 29570 - protein, 111 aa, Artificial Sequence; identical to SEQ ID NO: 17591
  Description of Artificial Sequence: Synthetic polypeptide
  VL of XENP020973

SEQ ID NO: 29571 - protein, 15 aa, Artificial Sequence
  Description of Artificial Sequence: Synthetic peptide
  XENP020973 vlCDR1
KASQSVDYDGDSYMN

SEQ ID NO: 29572 - protein, 7 aa, Artificial Sequence
  Description of Artificial Sequence: Synthetic peptide
  XENP020973 vlCDR2
AASNLES

SEQ ID NO: 29573 - protein, 9 aa, Artificial Sequence
  Description of Artificial Sequence: Synthetic peptide
  XENP020973 vlCDR3
QQSNEDPFT

SEQ ID NO: 29574 - protein, 226 aa, Artificial Sequence
  Description of Artificial Sequence: Synthetic polypeptide
  XENP020974 7G8_H0.43_L0_Fab Heavy Chain
EVKLEESGGGLVQPGGSMKLSCAASGFTFSDAWMDWVRQSPEKGLEWVAEIRKKANNHATYYAESVKGRFTISRDDSKSSVYLQMNSLRAEDTGIYYCTRLANWDWYFDVWGAGTTVTVSSASTKGPSVFPLAPSSKSTSGGTAALGCLVKDYFPEPVTVSWNSGALTSGVHTFPAVLQSSGLYSLSSVVTVPSSSLGTQTYICNVNHKPSNTKVDKKVEPKSCGS

SEQ ID NO: 29575 - protein, 121 aa, Artificial Sequence; identical to SEQ ID NO: 18636
  Description of Artificial Sequence: Synthetic polypeptide
  VH of XENP020974

SEQ ID NO: 29576 - protein, 5 aa, Artificial Sequence
  Description of Artificial Sequence: Synthetic peptide
  XENP020974 vhCDR1
DAWMD

SEQ ID NO: 29577 - protein, 19 aa, Artificial Sequence
  Description of Artificial Sequence: Synthetic peptide
  XENP020974 vhCDR2
EIRKKANNHATYYAESVKG

SEQ ID NO: 29578 - protein, 10 aa, Artificial Sequence
  Description of Artificial Sequence: Synthetic peptide
  XENP020974 vhCDR3
LANWDWYFDV

SEQ ID NO: 29579 - protein, 218 aa, Artificial Sequence; identical to SEQ ID NO: 17590
  Description of Artificial Sequence: Synthetic polypeptide
  XENP020974 7G8_H0.43_L0_Fab Light Chain

SEQ ID NO: 29580 - protein, 111 aa, Artificial Sequence; identical to SEQ ID NO: 17591
  Description of Artificial Sequence: Synthetic polypeptide
  VL of XENP020974

SEQ ID NO: 29581 - protein, 15 aa, Artificial Sequence
  Description of Artificial Sequence: Synthetic peptide
  XENP020974 vlCDR1
KASQSVDYDGDSYMN

SEQ ID NO: 29582 - protein, 7 aa, Artificial Sequence
  Description of Artificial Sequence: Synthetic peptide
  XENP020974 vlCDR2
AASNLES

SEQ ID NO: 29583 - protein, 9 aa, Artificial Sequence
  Description of Artificial Sequence: Synthetic peptide
  XENP020974 vlCDR3
QQSNEDPFT

SEQ ID NO: 29584 - protein, 226 aa, Artificial Sequence
  Description of Artificial Sequence: Synthetic polypeptide
  XENP020975 7G8_H0.44_L0_Fab Heavy Chain
EVKLEESGGGLVQPGGSMKLSCAASGFTFSDAWMDWVRQSPEKGLEWVAEIRYKANNHATYYAESVKGRFTISRDDSKSSVYLQMNSLRAEDTGIYYCTRLANWDWYFDVWGAGTTVTVSSASTKGPSVFPLAPSSKSTSGGTAALGCLVKDYFPEPVTVSWNSGALTSGVHTFPAVLQSSGLYSLSSVVTVPSSSLGTQTYICNVNHKPSNTKVDKKVEPKSCGS

SEQ ID NO: 29585 - protein, 121 aa, Artificial Sequence; identical to SEQ ID NO: 18646
  Description of Artificial Sequence: Synthetic polypeptide
  VH of XENP020975

SEQ ID NO: 29586 - protein, 5 aa, Artificial Sequence
  Description of Artificial Sequence: Synthetic peptide
  XENP020975 vhCDR1
DAWMD

SEQ ID NO: 29587 - protein, 19 aa, Artificial Sequence
  Description of Artificial Sequence: Synthetic peptide
  XENP020975 vhCDR2
EIRYKANNHATYYAESVKG

SEQ ID NO: 29588 - protein, 10 aa, Artificial Sequence
  Description of Artificial Sequence: Synthetic peptide
  XENP020975 vhCDR3
LANWDWYFDV

SEQ ID NO: 29589 - protein, 218 aa, Artificial Sequence; identical to SEQ ID NO: 17590
  Description of Artificial Sequence: Synthetic polypeptide
  XENP020975 7G8_H0.44_L0_Fab Light Chain

SEQ ID NO: 29590 - protein, 111 aa, Artificial Sequence; identical to SEQ ID NO: 17591
  Description of Artificial Sequence: Synthetic polypeptide
  VL of XENP020975

SEQ ID NO: 29591 - protein, 15 aa, Artificial Sequence
  Description of Artificial Sequence: Synthetic peptide
  XENP020975 vlCDR1
KASQSVDYDGDSYMN

SEQ ID NO: 29592 - protein, 7 aa, Artificial Sequence
  Description of Artificial Sequence: Synthetic peptide
  XENP020975 vlCDR2
AASNLES

SEQ ID NO: 29593 - protein, 9 aa, Artificial Sequence
  Description of Artificial Sequence: Synthetic peptide
  XENP020975 vlCDR3
QQSNEDPFT

SEQ ID NO: 29594 - protein, 226 aa, Artificial Sequence
  Description of Artificial Sequence: Synthetic polypeptide
  XENP020976 7G8_H0.45_L0_Fab Heavy Chain
EVKLEESGGGLVQPGGSMKLSCAASGFTFSDAWMDWVRQSPEKGLEWVAEIRTRANNHATYYAESVKGRFTISRDDSKSSVYLQMNSLRAEDTGIYYCTRLANWDWYFDVWGAGTTVTVSSASTKGPSVFPLAPSSKSTSGGTAALGCLVKDYFPEPVTVSWNSGALTSGVHTFPAVLQSSGLYSLSSVVTVPSSSLGTQTYICNVNHKPSNTKVDKKVEPKSCGS

SEQ ID NO: 29595 - protein, 121 aa, Artificial Sequence; identical to SEQ ID NO: 18656
  Description of Artificial Sequence: Synthetic polypeptide
  VH of XENP020976

SEQ ID NO: 29596 - protein, 5 aa, Artificial Sequence
  Description of Artificial Sequence: Synthetic peptide
  XENP020976 vhCDR1
DAWMD

SEQ ID NO: 29597 - protein, 19 aa, Artificial Sequence
  Description of Artificial Sequence: Synthetic peptide
  XENP020976 vhCDR2
EIRTRANNHATYYAESVKG

SEQ ID NO: 29598 - protein, 10 aa, Artificial Sequence
  Description of Artificial Sequence: Synthetic peptide
  XENP020976 vhCDR3
LANWDWYFDV

SEQ ID NO: 29599 - protein, 218 aa, Artificial Sequence; identical to SEQ ID NO: 17590
  Description of Artificial Sequence: Synthetic polypeptide
  XENP020976 7G8_H0.45_L0_Fab Light Chain

SEQ ID NO: 29600 - protein, 111 aa, Artificial Sequence; identical to SEQ ID NO: 17591
  Description of Artificial Sequence: Synthetic polypeptide
  VL of XENP020976

SEQ ID NO: 29601 - protein, 15 aa, Artificial Sequence
  Description of Artificial Sequence: Synthetic peptide
  XENP020976 vlCDR1
KASQSVDYDGDSYMN

SEQ ID NO: 29602 - protein, 7 aa, Artificial Sequence
  Description of Artificial Sequence: Synthetic peptide
  XENP020976 vlCDR2
AASNLES

SEQ ID NO: 29603 - protein, 9 aa, Artificial Sequence
  Description of Artificial Sequence: Synthetic peptide
  XENP020976 vlCDR3
QQSNEDPFT

SEQ ID NO: 29604 - protein, 226 aa, Artificial Sequence
  Description of Artificial Sequence: Synthetic polypeptide
  XENP020977 7G8_H0.46_L0_Fab Heavy Chain
EVKLEESGGGLVQPGGSMKLSCAASGFTFSDAWMDWVRQSPEKGLEWVAEIRTEANNHATYYAESVKGRFTISRDDSKSSVYLQMNSLRAEDTGIYYCTRLANWDWYFDVWGAGTTVTVSSASTKGPSVFPLAPSSKSTSGGTAALGCLVKDYFPEPVTVSWNSGALTSGVHTFPAVLQSSGLYSLSSVVTVPSSSLGTQTYICNVNHKPSNTKVDKKVEPKSCGS

SEQ ID NO: 29605 - protein, 121 aa, Artificial Sequence; identical to SEQ ID NO: 18666
  Description of Artificial Sequence: Synthetic polypeptide
  VH of XENP020977

SEQ ID NO: 29606 - protein, 5 aa, Artificial Sequence
  Description of Artificial Sequence: Synthetic peptide
  XENP020977 vhCDR1
DAWMD

SEQ ID NO: 29607 - protein, 19 aa, Artificial Sequence
  Description of Artificial Sequence: Synthetic peptide
  XENP020977 vhCDR2
EIRTEANNHATYYAESVKG

SEQ ID NO: 29608 - protein, 10 aa, Artificial Sequence
  Description of Artificial Sequence: Synthetic peptide
  XENP020977 vhCDR3
LANWDWYFDV

SEQ ID NO: 29609 - protein, 218 aa, Artificial Sequence; identical to SEQ ID NO: 17590
  Description of Artificial Sequence: Synthetic polypeptide
  XENP020977 7G8_H0.46_L0_Fab Light Chain

SEQ ID NO: 29610 - protein, 111 aa, Artificial Sequence; identical to SEQ ID NO: 17591
  Description of Artificial Sequence: Synthetic polypeptide
  VL of XENP020977

SEQ ID NO: 29611 - protein, 15 aa, Artificial Sequence
  Description of Artificial Sequence: Synthetic peptide
  XENP020977 vlCDR1
KASQSVDYDGDSYMN

SEQ ID NO: 29612 - protein, 7 aa, Artificial Sequence
  Description of Artificial Sequence: Synthetic peptide
  XENP020977 vlCDR2
AASNLES

SEQ ID NO: 29613 - protein, 9 aa, Artificial Sequence
  Description of Artificial Sequence: Synthetic peptide
  XENP020977 vlCDR3
QQSNEDPFT

SEQ ID NO: 29614 - protein, 226 aa, Artificial Sequence
  Description of Artificial Sequence: Synthetic polypeptide
  XENP020978 7G8_H0.47_L0_Fab Heavy Chain
EVKLEESGGGLVQPGGSMKLSCAASGFTFSDAWMDWVRQSPEKGLEWVAEIRTHANNHATYYAESVKGRFTISRDDSKSSVYLQMNSLRAEDTGIYYCTRLANWDWYFDVWGAGTTVTVSSASTKGPSVFPLAPSSKSTSGGTAALGCLVKDYFPEPVTVSWNSGALTSGVHTFPAVLQSSGLYSLSSVVTVPSSSLGTQTYICNVNHKPSNTKVDKKVEPKSCGS

SEQ ID NO: 29615 - protein, 121 aa, Artificial Sequence; identical to SEQ ID NO: 18676
  Description of Artificial Sequence: Synthetic polypeptide
  VH of XENP020978

SEQ ID NO: 29616 - protein, 5 aa, Artificial Sequence
  Description of Artificial Sequence: Synthetic peptide
  XENP020978 vhCDR1
DAWMD

SEQ ID NO: 29617 - protein, 19 aa, Artificial Sequence
  Description of Artificial Sequence: Synthetic peptide
  XENP020978 vhCDR2
EIRTHANNHATYYAESVKG

SEQ ID NO: 29618 - protein, 10 aa, Artificial Sequence
  Description of Artificial Sequence: Synthetic peptide
  XENP020978 vhCDR3
LANWDWYFDV

SEQ ID NO: 29619 - protein, 218 aa, Artificial Sequence; identical to SEQ ID NO: 17590
  Description of Artificial Sequence: Synthetic polypeptide
  XENP020978 7G8_H0.47_L0_Fab Light Chain

SEQ ID NO: 29620 - protein, 111 aa, Artificial Sequence; identical to SEQ ID NO: 17591
  Description of Artificial Sequence: Synthetic polypeptide
  VL of XENP020978

SEQ ID NO: 29621 - protein, 15 aa, Artificial Sequence
  Description of Artificial Sequence: Synthetic peptide
  XENP020978 vlCDR1
KASQSVDYDGDSYMN

SEQ ID NO: 29622 - protein, 7 aa, Artificial Sequence
  Description of Artificial Sequence: Synthetic peptide
  XENP020978 vlCDR2
AASNLES

SEQ ID NO: 29623 - protein, 9 aa, Artificial Sequence
  Description of Artificial Sequence: Synthetic peptide
  XENP020978 vlCDR3
QQSNEDPFT

SEQ ID NO: 29624 - protein, 226 aa, Artificial Sequence
  Description of Artificial Sequence: Synthetic polypeptide
  XENP020979 7G8_H0.48_L0_Fab Heavy Chain
EVKLEESGGGLVQPGGSMKLSCAASGFTFSDAWMDWVRQSPEKGLEWVAEIRTSANNHATYYAESVKGRFTISRDDSKSSVYLQMNSLRAEDTGIYYCTRLANWDWYFDVWGAGTTVTVSSASTKGPSVFPLAPSSKSTSGGTAALGCLVKDYFPEPVTVSWNSGALTSGVHTFPAVLQSSGLYSLSSVVTVPSSSLGTQTYICNVNHKPSNTKVDKKVEPKSCGS

SEQ ID NO: 29625 - protein, 121 aa, Artificial Sequence; identical to SEQ ID NO: 18686
  Description of Artificial Sequence: Synthetic polypeptide
  VH of XENP020979

SEQ ID NO: 29626 - protein, 5 aa, Artificial Sequence
  Description of Artificial Sequence: Synthetic peptide
  XENP020979 vhCDR1
DAWMD

SEQ ID NO: 29627 - protein, 19 aa, Artificial Sequence
  Description of Artificial Sequence: Synthetic peptide
  XENP020979 vhCDR2
EIRTSANNHATYYAESVKG

SEQ ID NO: 29628 - protein, 10 aa, Artificial Sequence
  Description of Artificial Sequence: Synthetic peptide
  XENP020979 vhCDR3
LANWDWYFDV

SEQ ID NO: 29629 - protein, 218 aa, Artificial Sequence; identical to SEQ ID NO: 17590
  Description of Artificial Sequence: Synthetic polypeptide
  XENP020979 7G8_H0.48_L0_Fab Light Chain

SEQ ID NO: 29630 - protein, 111 aa, Artificial Sequence; identical to SEQ ID NO: 17591
  Description of Artificial Sequence: Synthetic polypeptide
  VL of XENP020979

SEQ ID NO: 29631 - protein, 15 aa, Artificial Sequence
  Description of Artificial Sequence: Synthetic peptide
  XENP020979 vlCDR1
KASQSVDYDGDSYMN

SEQ ID NO: 29632 - protein, 7 aa, Artificial Sequence
  Description of Artificial Sequence: Synthetic peptide
  XENP020979 vlCDR2
AASNLES

SEQ ID NO: 29633 - protein, 9 aa, Artificial Sequence
  Description of Artificial Sequence: Synthetic peptide
  XENP020979 vlCDR3
QQSNEDPFT

SEQ ID NO: 29634 - protein, 226 aa, Artificial Sequence
  Description of Artificial Sequence: Synthetic polypeptide
  XENP020980 7G8_H0.49_L0_Fab Heavy Chain
EVKLEESGGGLVQPGGSMKLSCAASGFTFSDAWMDWVRQSPEKGLEWVAEIRTDANNHATYYAESVKGRFTISRDDSKSSVYLQMNSLRAEDTGIYYCTRLANWDWYFDVWGAGTTVTVSSASTKGPSVFPLAPSSKSTSGGTAALGCLVKDYFPEPVTVSWNSGALTSGVHTFPAVLQSSGLYSLSSVVTVPSSSLGTQTYICNVNHKPSNTKVDKKVEPKSCGS

SEQ ID NO: 29635 - protein, 121 aa, Artificial Sequence; identical to SEQ ID NO: 18696
  Description of Artificial Sequence: Synthetic polypeptide
  VH of XENP020980

SEQ ID NO: 29636 - protein, 5 aa, Artificial Sequence
  Description of Artificial Sequence: Synthetic peptide
  XENP020980 vhCDR1
DAWMD

SEQ ID NO: 29637 - protein, 19 aa, Artificial Sequence
  Description of Artificial Sequence: Synthetic peptide
  XENP020980 vhCDR2
EIRTDANNHATYYAESVKG

SEQ ID NO: 29638 - protein, 10 aa, Artificial Sequence
  Description of Artificial Sequence: Synthetic peptide
  XENP020980 vhCDR3
LANWDWYFDV

SEQ ID NO: 29639 - protein, 218 aa, Artificial Sequence; identical to SEQ ID NO: 17590
  Description of Artificial Sequence: Synthetic polypeptide
  XENP020980 7G8_H0.49_L0_Fab Light Chain

SEQ ID NO: 29640 - protein, 111 aa, Artificial Sequence; identical to SEQ ID NO: 17591
  Description of Artificial Sequence: Synthetic polypeptide
  VL of XENP020980

SEQ ID NO: 29641 - protein, 15 aa, Artificial Sequence
  Description of Artificial Sequence: Synthetic peptide
  XENP020980 vlCDR1
KASQSVDYDGDSYMN

SEQ ID NO: 29642 - protein, 7 aa, Artificial Sequence
  Description of Artificial Sequence: Synthetic peptide
  XENP020980 vlCDR2
AASNLES

SEQ ID NO: 29643 - protein, 9 aa, Artificial Sequence
  Description of Artificial Sequence: Synthetic peptide
  XENP020980 vlCDR3
QQSNEDPFT

SEQ ID NO: 29644 - protein, 226 aa, Artificial Sequence
  Description of Artificial Sequence: Synthetic polypeptide
  XENP020981 7G8_H0.50_L0_Fab Heavy Chain
EVKLEESGGGLVQPGGSMKLSCAASGFTFSDAWMDWVRQSPEKGLEWVAEIRTAANNHATYYAESVKGRFTISRDDSKSSVYLQMNSLRAEDTGIYYCTRLANWDWYFDVWGAGTTVTVSSASTKGPSVFPLAPSSKSTSGGTAALGCLVKDYFPEPVTVSWNSGALTSGVHTFPAVLQSSGLYSLSSVVTVPSSSLGTQTYICNVNHKPSNTKVDKKVEPKSCGS

SEQ ID NO: 29645 - protein, 121 aa, Artificial Sequence; identical to SEQ ID NO: 18706
  Description of Artificial Sequence: Synthetic polypeptide
  VH of XENP020981

SEQ ID NO: 29646 - protein, 5 aa, Artificial Sequence
  Description of Artificial Sequence: Synthetic peptide
  XENP020981 vhCDR1
DAWMD

SEQ ID NO: 29647 - protein, 19 aa, Artificial Sequence
  Description of Artificial Sequence: Synthetic peptide
  XENP020981 vhCDR2
EIRTAANNHATYYAESVKG

SEQ ID NO: 29648 - protein, 10 aa, Artificial Sequence
  Description of Artificial Sequence: Synthetic peptide
  XENP020981 vhCDR3
LANWDWYFDV

SEQ ID NO: 29649 - protein, 218 aa, Artificial Sequence; identical to SEQ ID NO: 17590
  Description of Artificial Sequence: Synthetic polypeptide
  XENP020981 7G8_H0.50_L0_Fab Light Chain

SEQ ID NO: 29650 - protein, 111 aa, Artificial Sequence; identical to SEQ ID NO: 17591
  Description of Artificial Sequence: Synthetic polypeptide
  VL of XENP020981

SEQ ID NO: 29651 - protein, 15 aa, Artificial Sequence
  Description of Artificial Sequence: Synthetic peptide
  XENP020981 vlCDR1
KASQSVDYDGDSYMN

SEQ ID NO: 29652 - protein, 7 aa, Artificial Sequence
  Description of Artificial Sequence: Synthetic peptide
  XENP020981 vlCDR2
AASNLES

SEQ ID NO: 29653 - protein, 9 aa, Artificial Sequence
  Description of Artificial Sequence: Synthetic peptide
  XENP020981 vlCDR3
QQSNEDPFT

SEQ ID NO: 29654 - protein, 226 aa, Artificial Sequence
  Description of Artificial Sequence: Synthetic polypeptide
  XENP020982 7G8_H0.51_L0_Fab Heavy Chain
EVKLEESGGGLVQPGGSMKLSCAASGFTFSDAWMDWVRQSPEKGLEWVAEIRTGANNHATYYAESVKGRFTISRDDSKSSVYLQMNSLRAEDTGIYYCTRLANWDWYFDVWGAGTTVTVSSASTKGPSVFPLAPSSKSTSGGTAALGCLVKDYFPEPVTVSWNSGALTSGVHTFPAVLQSSGLYSLSSVVTVPSSSLGTQTYICNVNHKPSNTKVDKKVEPKSCGS

SEQ ID NO: 29655 - protein, 121 aa, Artificial Sequence; identical to SEQ ID NO: 18716
  Description of Artificial Sequence: Synthetic polypeptide
  VH of XENP020982

SEQ ID NO: 29656 - protein, 5 aa, Artificial Sequence
  Description of Artificial Sequence: Synthetic peptide
  XENP020982 vhCDR1
DAWMD

SEQ ID NO: 29657 - protein, 19 aa, Artificial Sequence
  Description of Artificial Sequence: Synthetic peptide
  XENP020982 vhCDR2
EIRTGANNHATYYAESVKG

SEQ ID NO: 29658 - protein, 10 aa, Artificial Sequence
  Description of Artificial Sequence: Synthetic peptide
  XENP020982 vhCDR3
LANWDWYFDV

SEQ ID NO: 29659 - protein, 218 aa, Artificial Sequence; identical to SEQ ID NO: 17590
  Description of Artificial Sequence: Synthetic polypeptide
  XENP020982 7G8_H0.51_L0_Fab Light Chain

SEQ ID NO: 29660 - protein, 111 aa, Artificial Sequence; identical to SEQ ID NO: 17591
  Description of Artificial Sequence: Synthetic polypeptide
  VL of XENP020982

SEQ ID NO: 29661 - protein, 15 aa, Artificial Sequence
  Description of Artificial Sequence: Synthetic peptide
  XENP020982 vlCDR1
KASQSVDYDGDSYMN

SEQ ID NO: 29662 - protein, 7 aa, Artificial Sequence
  Description of Artificial Sequence: Synthetic peptide
  XENP020982 vlCDR2
AASNLES

SEQ ID NO: 29663 - protein, 9 aa, Artificial Sequence
  Description of Artificial Sequence: Synthetic peptide
  XENP020982 vlCDR3
QQSNEDPFT

SEQ ID NO: 29664 - protein, 226 aa, Artificial Sequence
  Description of Artificial Sequence: Synthetic polypeptide
  XENP020983 7G8_H0.52_L0_Fab Heavy Chain
EVKLEESGGGLVQPGGSMKLSCAASGFTFSDAWMDWVRQSPEKGLEWVAEIRTYANNHATYYAESVKGRFTISRDDSKSSVYLQMNSLRAEDTGIYYCTRLANWDWYFDVWGAGTTVTVSSASTKGPSVFPLAPSSKSTSGGTAALGCLVKDYFPEPVTVSWNSGALTSGVHTFPAVLQSSGLYSLSSVVTVPSSSLGTQTYICNVNHKPSNTKVDKKVEPKSCGS

SEQ ID NO: 29665 - protein, 121 aa, Artificial Sequence; identical to SEQ ID NO: 18726
  Description of Artificial Sequence: Synthetic polypeptide
  VH of XENP020983

SEQ ID NO: 29666 - protein, 5 aa, Artificial Sequence
  Description of Artificial Sequence: Synthetic peptide
  XENP020983 vhCDR1
DAWMD

SEQ ID NO: 29667 - protein, 19 aa, Artificial Sequence
  Description of Artificial Sequence: Synthetic peptide
  XENP020983 vhCDR2
EIRTYANNHATYYAESVKG

SEQ ID NO: 29668 - protein, 10 aa, Artificial Sequence
  Description of Artificial Sequence: Synthetic peptide
  XENP020983 vhCDR3
LANWDWYFDV

SEQ ID NO: 29669 - protein, 218 aa, Artificial Sequence; identical to SEQ ID NO: 17590
  Description of Artificial Sequence: Synthetic polypeptide
  XENP020983 7G8_H0.52_L0_Fab Light Chain

SEQ ID NO: 29670 - protein, 111 aa, Artificial Sequence; identical to SEQ ID NO: 17591
  Description of Artificial Sequence: Synthetic polypeptide
  VL of XENP020983

SEQ ID NO: 29671 - protein, 15 aa, Artificial Sequence
  Description of Artificial Sequence: Synthetic peptide
  XENP020983 vlCDR1
KASQSVDYDGDSYMN

SEQ ID NO: 29672 - protein, 7 aa, Artificial Sequence
  Description of Artificial Sequence: Synthetic peptide
  XENP020983 vlCDR2
AASNLES

SEQ ID NO: 29673 - protein, 9 aa, Artificial Sequence
  Description of Artificial Sequence: Synthetic peptide
  XENP020983 vlCDR3
QQSNEDPFT

SEQ ID NO: 29674 - protein, 226 aa, Artificial Sequence
  Description of Artificial Sequence: Synthetic polypeptide
  XENP020984 7G8_H0.53_L0_Fab Heavy Chain
EVKLEESGGGLVQPGGSMKLSCAASGFTFSDAWMDWVRQSPEKGLEWVAEIRTIANNHATYYAESVKGRFTISRDDSKSSVYLQMNSLRAEDTGIYYCTRLANWDWYFDVWGAGTTVTVSSASTKGPSVFPLAPSSKSTSGGTAALGCLVKDYFPEPVTVSWNSGALTSGVHTFPAVLQSSGLYSLSSVVTVPSSSLGTQTYICNVNHKPSNTKVDKKVEPKSCGS

SEQ ID NO: 29675 - protein, 121 aa, Artificial Sequence; identical to SEQ ID NO: 18736
  Description of Artificial Sequence: Synthetic polypeptide
  VH of XENP020984

SEQ ID NO: 29676 - protein, 5 aa, Artificial Sequence
  Description of Artificial Sequence: Synthetic peptide
  XENP020984 vhCDR1
DAWMD

SEQ ID NO: 29677 - protein, 19 aa, Artificial Sequence
  Description of Artificial Sequence: Synthetic peptide
  XENP020984 vhCDR2
EIRTIANNHATYYAESVKG

SEQ ID NO: 29678 - protein, 10 aa, Artificial Sequence
  Description of Artificial Sequence: Synthetic peptide
  XENP020984 vhCDR3
LANWDWYFDV

SEQ ID NO: 29679 - protein, 218 aa, Artificial Sequence; identical to SEQ ID NO: 17590
  Description of Artificial Sequence: Synthetic polypeptide
  XENP020984 7G8_H0.53_L0_Fab Light Chain

SEQ ID NO: 29680 - protein, 111 aa, Artificial Sequence; identical to SEQ ID NO: 17591
  Description of Artificial Sequence: Synthetic polypeptide
  VL of XENP020984

SEQ ID NO: 29681 - protein, 15 aa, Artificial Sequence
  Description of Artificial Sequence: Synthetic peptide
  XENP020984 vlCDR1
KASQSVDYDGDSYMN

SEQ ID NO: 29682 - protein, 7 aa, Artificial Sequence
  Description of Artificial Sequence: Synthetic peptide
  XENP020984 vlCDR2
AASNLES

SEQ ID NO: 29683 - protein, 9 aa, Artificial Sequence
  Description of Artificial Sequence: Synthetic peptide
  XENP020984 vlCDR3
QQSNEDPFT

SEQ ID NO: 29684 - protein, 226 aa, Artificial Sequence
  Description of Artificial Sequence: Synthetic polypeptide
  XENP020985 7G8_H0.54_L0_Fab Heavy Chain
EVKLEESGGGLVQPGGSMKLSCAASGFTFSDAWMDWVRQSPEKGLEWVAEIRTKSNNHATYYAESVKGRFTISRDDSKSSVYLQMNSLRAEDTGIYYCTRLANWDWYFDVWGAGTTVTVSSASTKGPSVFPLAPSSKSTSGGTAALGCLVKDYFPEPVTVSWNSGALTSGVHTFPAVLQSSGLYSLSSVVTVPSSSLGTQTYICNVNHKPSNTKVDKKVEPKSCGS

SEQ ID NO: 29685 - protein, 121 aa, Artificial Sequence; identical to SEQ ID NO: 18746
  Description of Artificial Sequence: Synthetic polypeptide
  VH of XENP020985

SEQ ID NO: 29686 - protein, 5 aa, Artificial Sequence
  Description of Artificial Sequence: Synthetic peptide
  XENP020985 vhCDR1
DAWMD

SEQ ID NO: 29687 - protein, 19 aa, Artificial Sequence
  Description of Artificial Sequence: Synthetic peptide
  XENP020985 vhCDR2
EIRTKSNNHATYYAESVKG

SEQ ID NO: 29688 - protein, 10 aa, Artificial Sequence
  Description of Artificial Sequence: Synthetic peptide
  XENP020985 vhCDR3
LANWDWYFDV

SEQ ID NO: 29689 - protein, 218 aa, Artificial Sequence; identical to SEQ ID NO: 17590
  Description of Artificial Sequence: Synthetic polypeptide
  XENP020985 7G8_H0.54_L0_Fab Light Chain

SEQ ID NO: 29690 - protein, 111 aa, Artificial Sequence; identical to SEQ ID NO: 17591
  Description of Artificial Sequence: Synthetic polypeptide
  VL of XENP020985

SEQ ID NO: 29691 - protein, 15 aa, Artificial Sequence
  Description of Artificial Sequence: Synthetic peptide
  XENP020985 vlCDR1
KASQSVDYDGDSYMN

SEQ ID NO: 29692 - protein, 7 aa, Artificial Sequence
  Description of Artificial Sequence: Synthetic peptide
  XENP020985 vlCDR2
AASNLES

SEQ ID NO: 29693 - protein, 9 aa, Artificial Sequence
  Description of Artificial Sequence: Synthetic peptide
  XENP020985 vlCDR3
QQSNEDPFT

SEQ ID NO: 29694 - protein, 226 aa, Artificial Sequence
  Description of Artificial Sequence: Synthetic polypeptide
  XENP020986 7G8_H0.55_L0_Fab Heavy Chain
EVKLEESGGGLVQPGGSMKLSCAASGFTFSDAWMDWVRQSPEKGLEWVAEIRTKTNNHATYYAESVKGRFTISRDDSKSSVYLQMNSLRAEDTGIYYCTRLANWDWYFDVWGAGTTVTVSSASTKGPSVFPLAPSSKSTSGGTAALGCLVKDYFPEPVTVSWNSGALTSGVHTFPAVLQSSGLYSLSSVVTVPSSSLGTQTYICNVNHKPSNTKVDKKVEPKSCGS

SEQ ID NO: 29695 - protein, 121 aa, Artificial Sequence; identical to SEQ ID NO: 18756
  Description of Artificial Sequence: Synthetic polypeptide
  VH of XENP020986

SEQ ID NO: 29696 - protein, 5 aa, Artificial Sequence
  Description of Artificial Sequence: Synthetic peptide
  XENP020986 vhCDR1
DAWMD

SEQ ID NO: 29697 - protein, 19 aa, Artificial Sequence
  Description of Artificial Sequence: Synthetic peptide
  XENP020986 vhCDR2
EIRTKTNNHATYYAESVKG

SEQ ID NO: 29698 - protein, 10 aa, Artificial Sequence
  Description of Artificial Sequence: Synthetic peptide
  XENP020986 vhCDR3
LANWDWYFDV

SEQ ID NO: 29699 - protein, 218 aa, Artificial Sequence; identical to SEQ ID NO: 17590
  Description of Artificial Sequence: Synthetic polypeptide
  XENP020986 7G8_H0.55_L0_Fab Light Chain

SEQ ID NO: 29700 - protein, 111 aa, Artificial Sequence; identical to SEQ ID NO: 17591
  Description of Artificial Sequence: Synthetic polypeptide
  VL of XENP020986

SEQ ID NO: 29701 - protein, 15 aa, Artificial Sequence
  Description of Artificial Sequence: Synthetic peptide
  XENP020986 vlCDR1
KASQSVDYDGDSYMN

SEQ ID NO: 29702 - protein, 7 aa, Artificial Sequence
  Description of Artificial Sequence: Synthetic peptide
  XENP020986 vlCDR2
AASNLES

SEQ ID NO: 29703 - protein, 9 aa, Artificial Sequence
  Description of Artificial Sequence: Synthetic peptide
  XENP020986 vlCDR3
QQSNEDPFT

SEQ ID NO: 29704 - protein, 226 aa, Artificial Sequence
  Description of Artificial Sequence: Synthetic polypeptide
  XENP020987 7G8_H0.56_L0_Fab Heavy Chain
EVKLEESGGGLVQPGGSMKLSCAASGFTFSDAWMDWVRQSPEKGLEWVAEIRTKGNNHATYYAESVKGRFTISRDDSKSSVYLQMNSLRAEDTGIYYCTRLANWDWYFDVWGAGTTVTVSSASTKGPSVFPLAPSSKSTSGGTAALGCLVKDYFPEPVTVSWNSGALTSGVHTFPAVLQSSGLYSLSSVVTVPSSSLGTQTYICNVNHKPSNTKVDKKVEPKSCGS

SEQ ID NO: 29705 - protein, 121 aa, Artificial Sequence; identical to SEQ ID NO: 18766
  Description of Artificial Sequence: Synthetic polypeptide
  VH of XENP020987

SEQ ID NO: 29706 - protein, 5 aa, Artificial Sequence
  Description of Artificial Sequence: Synthetic peptide
  XENP020987 vhCDR1
DAWMD

SEQ ID NO: 29707 - protein, 19 aa, Artificial Sequence
  Description of Artificial Sequence: Synthetic peptide
  XENP020987 vhCDR2
EIRTKGNNHATYYAESVKG

SEQ ID NO: 29708 - protein, 10 aa, Artificial Sequence
  Description of Artificial Sequence: Synthetic peptide
  XENP020987 vhCDR3
LANWDWYFDV

SEQ ID NO: 29709 - protein, 218 aa, Artificial Sequence; identical to SEQ ID NO: 17590
  Description of Artificial Sequence: Synthetic polypeptide
  XENP020987 7G8_H0.56_L0_Fab Light Chain

SEQ ID NO: 29710 - protein, 111 aa, Artificial Sequence; identical to SEQ ID NO: 17591
  Description of Artificial Sequence: Synthetic polypeptide
  VL of XENP020987

SEQ ID NO: 29711 - protein, 15 aa, Artificial Sequence
  Description of Artificial Sequence: Synthetic peptide
  XENP020987 vlCDR1
KASQSVDYDGDSYMN

SEQ ID NO: 29712 - protein, 7 aa, Artificial Sequence
  Description of Artificial Sequence: Synthetic peptide
  XENP020987 vlCDR2
AASNLES

SEQ ID NO: 29713 - protein, 9 aa, Artificial Sequence
  Description of Artificial Sequence: Synthetic peptide
  XENP020987 vlCDR3
QQSNEDPFT

SEQ ID NO: 29714 - protein, 226 aa, Artificial Sequence
  Description of Artificial Sequence: Synthetic polypeptide
  XENP020988 7G8_H0.57_L0_Fab Heavy Chain
EVKLEESGGGLVQPGGSMKLSCAASGFTFSDAWMDWVRQSPEKGLEWVAEIRTKHNNHATYYAESVKGRFTISRDDSKSSVYLQMNSLRAEDTGIYYCTRLANWDWYFDVWGAGTTVTVSSASTKGPSVFPLAPSSKSTSGGTAALGCLVKDYFPEPVTVSWNSGALTSGVHTFPAVLQSSGLYSLSSVVTVPSSSLGTQTYICNVNHKPSNTKVDKKVEPKSCGS

SEQ ID NO: 29715 - protein, 121 aa, Artificial Sequence; identical to SEQ ID NO: 18776
  Description of Artificial Sequence: Synthetic polypeptide
  VH of XENP020988

SEQ ID NO: 29716 - protein, 5 aa, Artificial Sequence
  Description of Artificial Sequence: Synthetic peptide
  XENP020988 vhCDR1
DAWMD

SEQ ID NO: 29717 - protein, 19 aa, Artificial Sequence
  Description of Artificial Sequence: Synthetic peptide
  XENP020988 vhCDR2
EIRTKHNNHATYYAESVKG

SEQ ID NO: 29718 - protein, 10 aa, Artificial Sequence
  Description of Artificial Sequence: Synthetic peptide
  XENP020988 vhCDR3
LANWDWYFDV

SEQ ID NO: 29719 - protein, 218 aa, Artificial Sequence; identical to SEQ ID NO: 17590
  Description of Artificial Sequence: Synthetic polypeptide
  XENP020988 7G8_H0.57_L0_Fab Light Chain

SEQ ID NO: 29720 - protein, 111 aa, Artificial Sequence; identical to SEQ ID NO: 17591
  Description of Artificial Sequence: Synthetic polypeptide
  VL of XENP020988

SEQ ID NO: 29721 - protein, 15 aa, Artificial Sequence
  Description of Artificial Sequence: Synthetic peptide
  XENP020988 vlCDR1
KASQSVDYDGDSYMN

SEQ ID NO: 29722 - protein, 7 aa, Artificial Sequence
  Description of Artificial Sequence: Synthetic peptide
  XENP020988 vlCDR2
AASNLES

SEQ ID NO: 29723 - protein, 9 aa, Artificial Sequence
  Description of Artificial Sequence: Synthetic peptide
  XENP020988 vlCDR3
QQSNEDPFT

SEQ ID NO: 29724 - protein, 226 aa, Artificial Sequence
  Description of Artificial Sequence: Synthetic polypeptide
  XENP020989 7G8_H0.58_L0_Fab Heavy Chain
EVKLEESGGGLVQPGGSMKLSCAASGFTFSDAWMDWVRQSPEKGLEWVAEIRTKQNNHATYYAESVKGRFTISRDDSKSSVYLQMNSLRAEDTGIYYCTRLANWDWYFDVWGAGTTVTVSSASTKGPSVFPLAPSSKSTSGGTAALGCLVKDYFPEPVTVSWNSGALTSGVHTFPAVLQSSGLYSLSSVVTVPSSSLGTQTYICNVNHKPSNTKVDKKVEPKSCGS

SEQ ID NO: 29725 - protein, 121 aa, Artificial Sequence; identical to SEQ ID NO: 18786
  Description of Artificial Sequence: Synthetic polypeptide
  VH of XENP020989

SEQ ID NO: 29726 - protein, 5 aa, Artificial Sequence
  Description of Artificial Sequence: Synthetic peptide
  XENP020989 vhCDR1
DAWMD

SEQ ID NO: 29727 - protein, 19 aa, Artificial Sequence
  Description of Artificial Sequence: Synthetic peptide
  XENP020989 vhCDR2
EIRTKQNNHATYYAESVKG

SEQ ID NO: 29728 - protein, 10 aa, Artificial Sequence
  Description of Artificial Sequence: Synthetic peptide
  XENP020989 vhCDR3
LANWDWYFDV

SEQ ID NO: 29729 - protein, 218 aa, Artificial Sequence; identical to SEQ ID NO: 17590
  Description of Artificial Sequence: Synthetic polypeptide
  XENP020989 7G8_H0.58_L0_Fab Light Chain

SEQ ID NO: 29730 - protein, 111 aa, Artificial Sequence; identical to SEQ ID NO: 17591
  Description of Artificial Sequence: Synthetic polypeptide
  VL of XENP020989

SEQ ID NO: 29731 - protein, 15 aa, Artificial Sequence
  Description of Artificial Sequence: Synthetic peptide
  XENP020989 vlCDR1
KASQSVDYDGDSYMN

SEQ ID NO: 29732 - protein, 7 aa, Artificial Sequence
  Description of Artificial Sequence: Synthetic peptide
  XENP020989 vlCDR2
AASNLES

SEQ ID NO: 29733 - protein, 9 aa, Artificial Sequence
  Description of Artificial Sequence: Synthetic peptide
  XENP020989 vlCDR3
QQSNEDPFT

SEQ ID NO: 29734 - protein, 226 aa, Artificial Sequence
  Description of Artificial Sequence: Synthetic polypeptide
  XENP020990 7G8_H0.59_L0_Fab Heavy Chain
EVKLEESGGGLVQPGGSMKLSCAASGFTFSDAWMDWVRQSPEKGLEWVAEIRTKDNNHATYYAESVKGRFTISRDDSKSSVYLQMNSLRAEDTGIYYCTRLANWDWYFDVWGAGTTVTVSSASTKGPSVFPLAPSSKSTSGGTAALGCLVKDYFPEPVTVSWNSGALTSGVHTFPAVLQSSGLYSLSSVVTVPSSSLGTQTYICNVNHKPSNTKVDKKVEPKSCGS

SEQ ID NO: 29735 - protein, 121 aa, Artificial Sequence; identical to SEQ ID NO: 18796
  Description of Artificial Sequence: Synthetic polypeptide
  VH of XENP020990

SEQ ID NO: 29736 - protein, 5 aa, Artificial Sequence
  Description of Artificial Sequence: Synthetic peptide
  XENP020990 vhCDR1
DAWMD

SEQ ID NO: 29737 - protein, 19 aa, Artificial Sequence
  Description of Artificial Sequence: Synthetic peptide
  XENP020990 vhCDR2
EIRTKDNNHATYYAESVKG

SEQ ID NO: 29738 - protein, 10 aa, Artificial Sequence
  Description of Artificial Sequence: Synthetic peptide
  XENP020990 vhCDR3
LANWDWYFDV

SEQ ID NO: 29739 - protein, 218 aa, Artificial Sequence; identical to SEQ ID NO: 17590
  Description of Artificial Sequence: Synthetic polypeptide
  XENP020990 7G8_H0.59_L0_Fab Light Chain

SEQ ID NO: 29740 - protein, 111 aa, Artificial Sequence; identical to SEQ ID NO: 17591
  Description of Artificial Sequence: Synthetic polypeptide
  VL of XENP020990

SEQ ID NO: 29741 - protein, 15 aa, Artificial Sequence
  Description of Artificial Sequence: Synthetic peptide
  XENP020990 vlCDR1
KASQSVDYDGDSYMN

SEQ ID NO: 29742 - protein, 7 aa, Artificial Sequence
  Description of Artificial Sequence: Synthetic peptide
  XENP020990 vlCDR2
AASNLES

SEQ ID NO: 29743 - protein, 9 aa, Artificial Sequence
  Description of Artificial Sequence: Synthetic peptide
  XENP020990 vlCDR3
QQSNEDPFT

SEQ ID NO: 29744 - protein, 226 aa, Artificial Sequence
  Description of Artificial Sequence: Synthetic polypeptide
  XENP020991 7G8_H0.60_L0_Fab Heavy Chain
EVKLEESGGGLVQPGGSMKLSCAASGFTFSDAWMDWVRQSPEKGLEWVAEIRTKLNNHATYYAESVKGRFTISRDDSKSSVYLQMNSLRAEDTGIYYCTRLANWDWYFDVWGAGTTVTVSSASTKGPSVFPLAPSSKSTSGGTAALGCLVKDYFPEPVTVSWNSGALTSGVHTFPAVLQSSGLYSLSSVVTVPSSSLGTQTYICNVNHKPSNTKVDKKVEPKSCGS

SEQ ID NO: 29745 - protein, 121 aa, Artificial Sequence; identical to SEQ ID NO: 18806
  Description of Artificial Sequence: Synthetic polypeptide
  VH of XENP020991

SEQ ID NO: 29746 - protein, 5 aa, Artificial Sequence
  Description of Artificial Sequence: Synthetic peptide
  XENP020991 vhCDR1
DAWMD

SEQ ID NO: 29747 - protein, 19 aa, Artificial Sequence
  Description of Artificial Sequence: Synthetic peptide
  XENP020991 vhCDR2
EIRTKLNNHATYYAESVKG

SEQ ID NO: 29748 - protein, 10 aa, Artificial Sequence
  Description of Artificial Sequence: Synthetic peptide
  XENP020991 vhCDR3
LANWDWYFDV

SEQ ID NO: 29749 - protein, 218 aa, Artificial Sequence; identical to SEQ ID NO: 17590
  Description of Artificial Sequence: Synthetic polypeptide
  XENP020991 7G8_H0.60_L0_Fab Light Chain

SEQ ID NO: 29750 - protein, 111 aa, Artificial Sequence; identical to SEQ ID NO: 17591
  Description of Artificial Sequence: Synthetic polypeptide
  VL of XENP020991

SEQ ID NO: 29751 - protein, 15 aa, Artificial Sequence
  Description of Artificial Sequence: Synthetic peptide
  XENP020991 vlCDR1
KASQSVDYDGDSYMN

SEQ ID NO: 29752 - protein, 7 aa, Artificial Sequence
  Description of Artificial Sequence: Synthetic peptide
  XENP020991 vlCDR2
AASNLES

SEQ ID NO: 29753 - protein, 9 aa, Artificial Sequence
  Description of Artificial Sequence: Synthetic peptide
  XENP020991 vlCDR3
QQSNEDPFT

SEQ ID NO: 29754 - protein, 226 aa, Artificial Sequence
  Description of Artificial Sequence: Synthetic polypeptide
  XENP020992 7G8_H0.61_L0_Fab Heavy Chain
EVKLEESGGGLVQPGGSMKLSCAASGFTFSDAWMDWVRQSPEKGLEWVAEIRTKKNNHATYYAESVKGRFTISRDDSKSSVYLQMNSLRAEDTGIYYCTRLANWDWYFDVWGAGTTVTVSSASTKGPSVFPLAPSSKSTSGGTAALGCLVKDYFPEPVTVSWNSGALTSGVHTFPAVLQSSGLYSLSSVVTVPSSSLGTQTYICNVNHKPSNTKVDKKVEPKSCGS

SEQ ID NO: 29755 - protein, 121 aa, Artificial Sequence; identical to SEQ ID NO: 18816
  Description of Artificial Sequence: Synthetic polypeptide
  VH of XENP020992

SEQ ID NO: 29756 - protein, 5 aa, Artificial Sequence
  Description of Artificial Sequence: Synthetic peptide
  XENP020992 vhCDR1
DAWMD

SEQ ID NO: 29757 - protein, 19 aa, Artificial Sequence
  Description of Artificial Sequence: Synthetic peptide
  XENP020992 vhCDR2
EIRTKKNNHATYYAESVKG

SEQ ID NO: 29758 - protein, 10 aa, Artificial Sequence
  Description of Artificial Sequence: Synthetic peptide
  XENP020992 vhCDR3
LANWDWYFDV

SEQ ID NO: 29759 - protein, 218 aa, Artificial Sequence; identical to SEQ ID NO: 17590
  Description of Artificial Sequence: Synthetic polypeptide
  XENP020992 7G8_H0.61_L0_Fab Light Chain

SEQ ID NO: 29760 - protein, 111 aa, Artificial Sequence; identical to SEQ ID NO: 17591
  Description of Artificial Sequence: Synthetic polypeptide
  VL of XENP020992

SEQ ID NO: 29761 - protein, 15 aa, Artificial Sequence
  Description of Artificial Sequence: Synthetic peptide
  XENP020992 vlCDR1
KASQSVDYDGDSYMN

SEQ ID NO: 29762 - protein, 7 aa, Artificial Sequence
  Description of Artificial Sequence: Synthetic peptide
  XENP020992 vlCDR2
AASNLES

SEQ ID NO: 29763 - protein, 9 aa, Artificial Sequence
  Description of Artificial Sequence: Synthetic peptide
  XENP020992 vlCDR3
QQSNEDPFT

SEQ ID NO: 29764 - protein, 226 aa, Artificial Sequence
  Description of Artificial Sequence: Synthetic polypeptide
  XENP020993 7G8_H0.62_L0_Fab Heavy Chain
EVKLEESGGGLVQPGGSMKLSCAASGFTFSDAWMDWVRQSPEKGLEWVAEIRTKYNNHATYYAESVKGRFTISRDDSKSSVYLQMNSLRAEDTGIYYCTRLANWDWYFDVWGAGTTVTVSSASTKGPSVFPLAPSSKSTSGGTAALGCLVKDYFPEPVTVSWNSGALTSGVHTFPAVLQSSGLYSLSSVVTVPSSSLGTQTYICNVNHKPSNTKVDKKVEPKSCGS

SEQ ID NO: 29765 - protein, 121 aa, Artificial Sequence; identical to SEQ ID NO: 18826
  Description of Artificial Sequence: Synthetic polypeptide
  VH of XENP020993

SEQ ID NO: 29766 - protein, 5 aa, Artificial Sequence
  Description of Artificial Sequence: Synthetic peptide
  XENP020993 vhCDR1
DAWMD

SEQ ID NO: 29767 - protein, 19 aa, Artificial Sequence
  Description of Artificial Sequence: Synthetic peptide
  XENP020993 vhCDR2
EIRTKYNNHATYYAESVKG

SEQ ID NO: 29768 - protein, 10 aa, Artificial Sequence
  Description of Artificial Sequence: Synthetic peptide
  XENP020993 vhCDR3
LANWDWYFDV

SEQ ID NO: 29769 - protein, 218 aa, Artificial Sequence; identical to SEQ ID NO: 17590
  Description of Artificial Sequence: Synthetic polypeptide
  XENP020993 7G8_H0.62_L0_Fab Light Chain

SEQ ID NO: 29770 - protein, 111 aa, Artificial Sequence; identical to SEQ ID NO: 17591
  Description of Artificial Sequence: Synthetic polypeptide
  VL of XENP020993

SEQ ID NO: 29771 - protein, 15 aa, Artificial Sequence
  Description of Artificial Sequence: Synthetic peptide
  XENP020993 vlCDR1
KASQSVDYDGDSYMN

SEQ ID NO: 29772 - protein, 7 aa, Artificial Sequence
  Description of Artificial Sequence: Synthetic peptide
  XENP020993 vlCDR2
AASNLES

SEQ ID NO: 29773 - protein, 9 aa, Artificial Sequence
  Description of Artificial Sequence: Synthetic peptide
  XENP020993 vlCDR3
QQSNEDPFT

SEQ ID NO: 29774 - protein, 226 aa, Artificial Sequence
  Description of Artificial Sequence: Synthetic polypeptide
  XENP020994 7G8_H0.63_L0_Fab Heavy Chain
EVKLEESGGGLVQPGGSMKLSCAASGFTFSDAWMDWVRQSPEKGLEWVAEIRTKADNHATYYAESVKGRFTISRDDSKSSVYLQMNSLRAEDTGIYYCTRLANWDWYFDVWGAGTTVTVSSASTKGPSVFPLAPSSKSTSGGTAALGCLVKDYFPEPVTVSWNSGALTSGVHTFPAVLQSSGLYSLSSVVTVPSSSLGTQTYICNVNHKPSNTKVDKKVEPKSCGS

SEQ ID NO: 29775 - protein, 121 aa, Artificial Sequence; identical to SEQ ID NO: 18836
  Description of Artificial Sequence: Synthetic polypeptide
  VH of XENP020994

SEQ ID NO: 29776 - protein, 5 aa, Artificial Sequence
  Description of Artificial Sequence: Synthetic peptide
  XENP020994 vhCDR1
DAWMD

SEQ ID NO: 29777 - protein, 19 aa, Artificial Sequence
  Description of Artificial Sequence: Synthetic peptide
  XENP020994 vhCDR2
EIRTKADNHATYYAESVKG

SEQ ID NO: 29778 - protein, 10 aa, Artificial Sequence
  Description of Artificial Sequence: Synthetic peptide
  XENP020994 vhCDR3
LANWDWYFDV

SEQ ID NO: 29779 - protein, 218 aa, Artificial Sequence; identical to SEQ ID NO: 17590
  Description of Artificial Sequence: Synthetic polypeptide
  XENP020994 7G8_H0.63_L0_Fab Light Chain

SEQ ID NO: 29780 - protein, 111 aa, Artificial Sequence; identical to SEQ ID NO: 17591
  Description of Artificial Sequence: Synthetic polypeptide
  VL of XENP020994

SEQ ID NO: 29781 - protein, 15 aa, Artificial Sequence
  Description of Artificial Sequence: Synthetic peptide
  XENP020994 vlCDR1
KASQSVDYDGDSYMN

SEQ ID NO: 29782 - protein, 7 aa, Artificial Sequence
  Description of Artificial Sequence: Synthetic peptide
  XENP020994 vlCDR2
AASNLES

SEQ ID NO: 29783 - protein, 9 aa, Artificial Sequence
  Description of Artificial Sequence: Synthetic peptide
  XENP020994 vlCDR3
QQSNEDPFT

SEQ ID NO: 29784 - protein, 226 aa, Artificial Sequence
  Description of Artificial Sequence: Synthetic polypeptide
  XENP020995 7G8_H0.64_L0_Fab Heavy Chain
EVKLEESGGGLVQPGGSMKLSCAASGFTFSDAWMDWVRQSPEKGLEWVAEIRTKAHNHATYYAESVKGRFTISRDDSKSSVYLQMNSLRAEDTGIYYCTRLANWDWYFDVWGAGTTVTVSSASTKGPSVFPLAPSSKSTSGGTAALGCLVKDYFPEPVTVSWNSGALTSGVHTFPAVLQSSGLYSLSSVVTVPSSSLGTQTYICNVNHKPSNTKVDKKVEPKSCGS

SEQ ID NO: 29785 - protein, 121 aa, Artificial Sequence; identical to SEQ ID NO: 18846
  Description of Artificial Sequence: Synthetic polypeptide
  VH of XENP020995

SEQ ID NO: 29786 - protein, 5 aa, Artificial Sequence
  Description of Artificial Sequence: Synthetic peptide
  XENP020995 vhCDR1
DAWMD

SEQ ID NO: 29787 - protein, 19 aa, Artificial Sequence
  Description of Artificial Sequence: Synthetic peptide
  XENP020995 vhCDR2
EIRTKAHNHATYYAESVKG

SEQ ID NO: 29788 - protein, 10 aa, Artificial Sequence
  Description of Artificial Sequence: Synthetic peptide
  XENP020995 vhCDR3
LANWDWYFDV

SEQ ID NO: 29789 - protein, 218 aa, Artificial Sequence; identical to SEQ ID NO: 17590
  Description of Artificial Sequence: Synthetic polypeptide
  XENP020995 7G8_H0.64_L0_Fab Light Chain

SEQ ID NO: 29790 - protein, 111 aa, Artificial Sequence; identical to SEQ ID NO: 17591
  Description of Artificial Sequence: Synthetic polypeptide
  VL of XENP020995

SEQ ID NO: 29791 - protein, 15 aa, Artificial Sequence
  Description of Artificial Sequence: Synthetic peptide
  XENP020995 vlCDR1
KASQSVDYDGDSYMN

SEQ ID NO: 29792 - protein, 7 aa, Artificial Sequence
  Description of Artificial Sequence: Synthetic peptide
  XENP020995 vlCDR2
AASNLES

SEQ ID NO: 29793 - protein, 9 aa, Artificial Sequence
  Description of Artificial Sequence: Synthetic peptide
  XENP020995 vlCDR3
QQSNEDPFT

SEQ ID NO: 29794 - protein, 226 aa, Artificial Sequence
  Description of Artificial Sequence: Synthetic polypeptide
  XENP020996 7G8_H0.65_L0_Fab Heavy Chain
EVKLEESGGGLVQPGGSMKLSCAASGFTFSDAWMDWVRQSPEKGLEWVAEIRTKAENHATYYAESVKGRFTISRDDSKSSVYLQMNSLRAEDTGIYYCTRLANWDWYFDVWGAGTTVTVSSASTKGPSVFPLAPSSKSTSGGTAALGCLVKDYFPEPVTVSWNSGALTSGVHTFPAVLQSSGLYSLSSVVTVPSSSLGTQTYICNVNHKPSNTKVDKKVEPKSCGS

SEQ ID NO: 29795 - protein, 121 aa, Artificial Sequence; identical to SEQ ID NO: 18856
  Description of Artificial Sequence: Synthetic polypeptide
  VH of XENP020996

SEQ ID NO: 29796 - protein, 5 aa, Artificial Sequence
  Description of Artificial Sequence: Synthetic peptide
  XENP020996 vhCDR1
DAWMD

SEQ ID NO: 29797 - protein, 19 aa, Artificial Sequence
  Description of Artificial Sequence: Synthetic peptide
  XENP020996 vhCDR2
EIRTKAENHATYYAESVKG

SEQ ID NO: 29798 - protein, 10 aa, Artificial Sequence
  Description of Artificial Sequence: Synthetic peptide
  XENP020996 vhCDR3
LANWDWYFDV

SEQ ID NO: 29799 - protein, 218 aa, Artificial Sequence; identical to SEQ ID NO: 17590
  Description of Artificial Sequence: Synthetic polypeptide
  XENP020996 7G8_H0.65_L0_Fab Light Chain

SEQ ID NO: 29800 - protein, 111 aa, Artificial Sequence; identical to SEQ ID NO: 17591
  Description of Artificial Sequence: Synthetic polypeptide
  VL of XENP020996

SEQ ID NO: 29801 - protein, 15 aa, Artificial Sequence
  Description of Artificial Sequence: Synthetic peptide
  XENP020996 vlCDR1
KASQSVDYDGDSYMN

SEQ ID NO: 29802 - protein, 7 aa, Artificial Sequence
  Description of Artificial Sequence: Synthetic peptide
  XENP020996 vlCDR2
AASNLES

SEQ ID NO: 29803 - protein, 9 aa, Artificial Sequence
  Description of Artificial Sequence: Synthetic peptide
  XENP020996 vlCDR3
QQSNEDPFT

SEQ ID NO: 29804 - protein, 226 aa, Artificial Sequence
  Description of Artificial Sequence: Synthetic polypeptide
  XENP021001 7G8_H0.66_L0_Fab Heavy Chain
EVKLEESGGGLVQPGGSMKLSCAASGFTFSDAWMDWVRQSPEKGLEWVAEIRTKASNHATYYAESVKGRFTISRDDSKSSVYLQMNSLRAEDTGIYYCTRLANWDWYFDVWGAGTTVTVSSASTKGPSVFPLAPSSKSTSGGTAALGCLVKDYFPEPVTVSWNSGALTSGVHTFPAVLQSSGLYSLSSVVTVPSSSLGTQTYICNVNHKPSNTKVDKKVEPKSCGS

SEQ ID NO: 29805 - protein, 121 aa, Artificial Sequence; identical to SEQ ID NO: 18866
  Description of Artificial Sequence: Synthetic polypeptide
  VH of XENP021001

SEQ ID NO: 29806 - protein, 5 aa, Artificial Sequence
  Description of Artificial Sequence: Synthetic peptide
  XENP021001 vhCDR1
DAWMD

SEQ ID NO: 29807 - protein, 19 aa, Artificial Sequence
  Description of Artificial Sequence: Synthetic peptide
  XENP021001 vhCDR2
EIRTKASNHATYYAESVKG

SEQ ID NO: 29808 - protein, 10 aa, Artificial Sequence
  Description of Artificial Sequence: Synthetic peptide
  XENP021001 vhCDR3
LANWDWYFDV

SEQ ID NO: 29809 - protein, 218 aa, Artificial Sequence; identical to SEQ ID NO: 17590
  Description of Artificial Sequence: Synthetic polypeptide
  XENP021001 7G8_H0.66_L0_Fab Light Chain

SEQ ID NO: 29810 - protein, 111 aa, Artificial Sequence; identical to SEQ ID NO: 17591
  Description of Artificial Sequence: Synthetic polypeptide
  VL of XENP021001

SEQ ID NO: 29811 - protein, 15 aa, Artificial Sequence
  Description of Artificial Sequence: Synthetic peptide
  XENP021001 vlCDR1
KASQSVDYDGDSYMN

SEQ ID NO: 29812 - protein, 7 aa, Artificial Sequence
  Description of Artificial Sequence: Synthetic peptide
  XENP021001 vlCDR2
AASNLES

SEQ ID NO: 29813 - protein, 9 aa, Artificial Sequence
  Description of Artificial Sequence: Synthetic peptide
  XENP021001 vlCDR3
QQSNEDPFT

SEQ ID NO: 29814 - protein, 226 aa, Artificial Sequence
  Description of Artificial Sequence: Synthetic polypeptide
  XENP021002 7G8_H0.67_L0_Fab Heavy Chain
EVKLEESGGGLVQPGGSMKLSCAASGFTFSDAWMDWVRQSPEKGLEWVAEIRTKARNHATYYAESVKGRFTISRDDSKSSVYLQMNSLRAEDTGIYYCTRLANWDWYFDVWGAGTTVTVSSASTKGPSVFPLAPSSKSTSGGTAALGCLVKDYFPEPVTVSWNSGALTSGVHTFPAVLQSSGLYSLSSVVTVPSSSLGTQTYICNVNHKPSNTKVDKKVEPKSCGS

SEQ ID NO: 29815 - protein, 121 aa, Artificial Sequence; identical to SEQ ID NO: 18876
  Description of Artificial Sequence: Synthetic polypeptide
  VH of XENP021002

SEQ ID NO: 29816 - protein, 5 aa, Artificial Sequence
  Description of Artificial Sequence: Synthetic peptide
  XENP021002 vhCDR1
DAWMD

SEQ ID NO: 29817 - protein, 19 aa, Artificial Sequence
  Description of Artificial Sequence: Synthetic peptide
  XENP021002 vhCDR2
EIRTKARNHATYYAESVKG

SEQ ID NO: 29818 - protein, 10 aa, Artificial Sequence
  Description of Artificial Sequence: Synthetic peptide
  XENP021002 vhCDR3
LANWDWYFDV

SEQ ID NO: 29819 - protein, 218 aa, Artificial Sequence; identical to SEQ ID NO: 17590
  Description of Artificial Sequence: Synthetic polypeptide
  XENP021002 7G8_H0.67_L0_Fab Light Chain

SEQ ID NO: 29820 - protein, 111 aa, Artificial Sequence; identical to SEQ ID NO: 17591
  Description of Artificial Sequence: Synthetic polypeptide
  VL of XENP021002

SEQ ID NO: 29821 - protein, 15 aa, Artificial Sequence
  Description of Artificial Sequence: Synthetic peptide
  XENP021002 vlCDR1
KASQSVDYDGDSYMN

SEQ ID NO: 29822 - protein, 7 aa, Artificial Sequence
  Description of Artificial Sequence: Synthetic peptide
  XENP021002 vlCDR2
AASNLES

SEQ ID NO: 29823 - protein, 9 aa, Artificial Sequence
  Description of Artificial Sequence: Synthetic peptide
  XENP021002 vlCDR3
QQSNEDPFT

SEQ ID NO: 29824 - protein, 226 aa, Artificial Sequence
  Description of Artificial Sequence: Synthetic polypeptide
  XENP021003 7G8_H0.68_L0_Fab Heavy Chain
EVKLEESGGGLVQPGGSMKLSCAASGFTFSDAWMDWVRQSPEKGLEWVAEIRTKALNHATYYAESVKGRFTISRDDSKSSVYLQMNSLRAEDTGIYYCTRLANWDWYFDVWGAGTTVTVSSASTKGPSVFPLAPSSKSTSGGTAALGCLVKDYFPEPVTVSWNSGALTSGVHTFPAVLQSSGLYSLSSVVTVPSSSLGTQTYICNVNHKPSNTKVDKKVEPKSCGS

SEQ ID NO: 29825 - protein, 121 aa, Artificial Sequence; identical to SEQ ID NO: 18886
  Description of Artificial Sequence: Synthetic polypeptide
  VH of XENP021003

SEQ ID NO: 29826 - protein, 5 aa, Artificial Sequence
  Description of Artificial Sequence: Synthetic peptide
  XENP021003 vhCDR1
DAWMD

SEQ ID NO: 29827 - protein, 19 aa, Artificial Sequence
  Description of Artificial Sequence: Synthetic peptide
  XENP021003 vhCDR2
EIRTKALNHATYYAESVKG

SEQ ID NO: 29828 - protein, 10 aa, Artificial Sequence
  Description of Artificial Sequence: Synthetic peptide
  XENP021003 vhCDR3
LANWDWYFDV

SEQ ID NO: 29829 - protein, 218 aa, Artificial Sequence; identical to SEQ ID NO: 17590
  Description of Artificial Sequence: Synthetic polypeptide
  XENP021003 7G8_H0.68_L0_Fab Light Chain

SEQ ID NO: 29830 - protein, 111 aa, Artificial Sequence; identical to SEQ ID NO: 17591
  Description of Artificial Sequence: Synthetic polypeptide
  VL of XENP021003

SEQ ID NO: 29831 - protein, 15 aa, Artificial Sequence
  Description of Artificial Sequence: Synthetic peptide
  XENP021003 vlCDR1
KASQSVDYDGDSYMN

SEQ ID NO: 29832 - protein, 7 aa, Artificial Sequence
  Description of Artificial Sequence: Synthetic peptide
  XENP021003 vlCDR2
AASNLES

SEQ ID NO: 29833 - protein, 9 aa, Artificial Sequence
  Description of Artificial Sequence: Synthetic peptide
  XENP021003 vlCDR3
QQSNEDPFT

SEQ ID NO: 29834 - protein, 226 aa, Artificial Sequence
  Description of Artificial Sequence: Synthetic polypeptide
  XENP021004 7G8_H0.69_L0_Fab Heavy Chain
EVKLEESGGGLVQPGGSMKLSCAASGFTFSDAWMDWVRQSPEKGLEWVAEIRTKATNHATYYAESVKGRFTISRDDSKSSVYLQMNSLRAEDTGIYYCTRLANWDWYFDVWGAGTTVTVSSASTKGPSVFPLAPSSKSTSGGTAALGCLVKDYFPEPVTVSWNSGALTSGVHTFPAVLQSSGLYSLSSVVTVPSSSLGTQTYICNVNHKPSNTKVDKKVEPKSCGS

SEQ ID NO: 29835 - protein, 121 aa, Artificial Sequence; identical to SEQ ID NO: 18896
  Description of Artificial Sequence: Synthetic polypeptide
  VH of XENP021004

SEQ ID NO: 29836 - protein, 5 aa, Artificial Sequence
  Description of Artificial Sequence: Synthetic peptide
  XENP021004 vhCDR1
DAWMD

SEQ ID NO: 29837 - protein, 19 aa, Artificial Sequence
  Description of Artificial Sequence: Synthetic peptide
  XENP021004 vhCDR2
EIRTKATNHATYYAESVKG

SEQ ID NO: 29838 - protein, 10 aa, Artificial Sequence
  Description of Artificial Sequence: Synthetic peptide
  XENP021004 vhCDR3
LANWDWYFDV

SEQ ID NO: 29839 - protein, 218 aa, Artificial Sequence; identical to SEQ ID NO: 17590
  Description of Artificial Sequence: Synthetic polypeptide
  XENP021004 7G8_H0.69_L0_Fab Light Chain

SEQ ID NO: 29840 - protein, 111 aa, Artificial Sequence; identical to SEQ ID NO: 17591
  Description of Artificial Sequence: Synthetic polypeptide
  VL of XENP021004

SEQ ID NO: 29841 - protein, 15 aa, Artificial Sequence
  Description of Artificial Sequence: Synthetic peptide
  XENP021004 vlCDR1
KASQSVDYDGDSYMN

SEQ ID NO: 29842 - protein, 7 aa, Artificial Sequence
  Description of Artificial Sequence: Synthetic peptide
  XENP021004 vlCDR2
AASNLES

SEQ ID NO: 29843 - protein, 9 aa, Artificial Sequence
  Description of Artificial Sequence: Synthetic peptide
  XENP021004 vlCDR3
QQSNEDPFT

SEQ ID NO: 29844 - protein, 226 aa, Artificial Sequence
  Description of Artificial Sequence: Synthetic polypeptide
  XENP021005 7G8_H0.70_L0_Fab Heavy Chain
EVKLEESGGGLVQPGGSMKLSCAASGFTFSDAWMDWVRQSPEKGLEWVAEIRTKAGNHATYYAESVKGRFTISRDDSKSSVYLQMNSLRAEDTGIYYCTRLANWDWYFDVWGAGTTVTVSSASTKGPSVFPLAPSSKSTSGGTAALGCLVKDYFPEPVTVSWNSGALTSGVHTFPAVLQSSGLYSLSSVVTVPSSSLGTQTYICNVNHKPSNTKVDKKVEPKSCGS

SEQ ID NO: 29845 - protein, 121 aa, Artificial Sequence; identical to SEQ ID NO: 18906
  Description of Artificial Sequence: Synthetic polypeptide
  VH of XENP021005

SEQ ID NO: 29846 - protein, 5 aa, Artificial Sequence
  Description of Artificial Sequence: Synthetic peptide
  XENP021005 vhCDR1
DAWMD

SEQ ID NO: 29847 - protein, 19 aa, Artificial Sequence
  Description of Artificial Sequence: Synthetic peptide
  XENP021005 vhCDR2
EIRTKAGNHATYYAESVKG

SEQ ID NO: 29848 - protein, 10 aa, Artificial Sequence
  Description of Artificial Sequence: Synthetic peptide
  XENP021005 vhCDR3
LANWDWYFDV

SEQ ID NO: 29849 - protein, 218 aa, Artificial Sequence; identical to SEQ ID NO: 17590
  Description of Artificial Sequence: Synthetic polypeptide
  XENP021005 7G8_H0.70_L0_Fab Light Chain

SEQ ID NO: 29850 - protein, 111 aa, Artificial Sequence; identical to SEQ ID NO: 17591
  Description of Artificial Sequence: Synthetic polypeptide
  VL of XENP021005

SEQ ID NO: 29851 - protein, 15 aa, Artificial Sequence
  Description of Artificial Sequence: Synthetic peptide
  XENP021005 vlCDR1
KASQSVDYDGDSYMN

SEQ ID NO: 29852 - protein, 7 aa, Artificial Sequence
  Description of Artificial Sequence: Synthetic peptide
  XENP021005 vlCDR2
AASNLES

SEQ ID NO: 29853 - protein, 9 aa, Artificial Sequence
  Description of Artificial Sequence: Synthetic peptide
  XENP021005 vlCDR3
QQSNEDPFT

SEQ ID NO: 29854 - protein, 226 aa, Artificial Sequence
  Description of Artificial Sequence: Synthetic polypeptide
  XENP021006 7G8_H0.71_L0_Fab Heavy Chain
EVKLEESGGGLVQPGGSMKLSCAASGFTFSDAWMDWVRQSPEKGLEWVAEIRTKAYNHATYYAESVKGRFTISRDDSKSSVYLQMNSLRAEDTGIYYCTRLANWDWYFDVWGAGTTVTVSSASTKGPSVFPLAPSSKSTSGGTAALGCLVKDYFPEPVTVSWNSGALTSGVHTFPAVLQSSGLYSLSSVVTVPSSSLGTQTYICNVNHKPSNTKVDKKVEPKSCGS

SEQ ID NO: 29855 - protein, 121 aa, Artificial Sequence; identical to SEQ ID NO: 18916
  Description of Artificial Sequence: Synthetic polypeptide
  VH of XENP021006

SEQ ID NO: 29856 - protein, 5 aa, Artificial Sequence
  Description of Artificial Sequence: Synthetic peptide
  XENP021006 vhCDR1
DAWMD

SEQ ID NO: 29857 - protein, 19 aa, Artificial Sequence
  Description of Artificial Sequence: Synthetic peptide
  XENP021006 vhCDR2
EIRTKAYNHATYYAESVKG

SEQ ID NO: 29858 - protein, 10 aa, Artificial Sequence
  Description of Artificial Sequence: Synthetic peptide
  XENP021006 vhCDR3
LANWDWYFDV

SEQ ID NO: 29859 - protein, 218 aa, Artificial Sequence; identical to SEQ ID NO: 17590
  Description of Artificial Sequence: Synthetic polypeptide
  XENP021006 7G8_H0.71_L0_Fab Light Chain

SEQ ID NO: 29860 - protein, 111 aa, Artificial Sequence; identical to SEQ ID NO: 17591
  Description of Artificial Sequence: Synthetic polypeptide
  VL of XENP021006

SEQ ID NO: 29861 - protein, 15 aa, Artificial Sequence
  Description of Artificial Sequence: Synthetic peptide
  XENP021006 vlCDR1
KASQSVDYDGDSYMN

SEQ ID NO: 29862 - protein, 7 aa, Artificial Sequence
  Description of Artificial Sequence: Synthetic peptide
  XENP021006 vlCDR2
AASNLES

SEQ ID NO: 29863 - protein, 9 aa, Artificial Sequence
  Description of Artificial Sequence: Synthetic peptide
  XENP021006 vlCDR3
QQSNEDPFT

SEQ ID NO: 29864 - protein, 226 aa, Artificial Sequence
  Description of Artificial Sequence: Synthetic polypeptide
  XENP021007 7G8_H0.72_L0_Fab Heavy Chain
EVKLEESGGGLVQPGGSMKLSCAASGFTFSDAWMDWVRQSPEKGLEWVAEIRTKANDHATYYAESVKGRFTISRDDSKSSVYLQMNSLRAEDTGIYYCTRLANWDWYFDVWGAGTTVTVSSASTKGPSVFPLAPSSKSTSGGTAALGCLVKDYFPEPVTVSWNSGALTSGVHTFPAVLQSSGLYSLSSVVTVPSSSLGTQTYICNVNHKPSNTKVDKKVEPKSCGS

SEQ ID NO: 29865 - protein, 121 aa, Artificial Sequence; identical to SEQ ID NO: 18926
  Description of Artificial Sequence: Synthetic polypeptide
  VH of XENP021007

SEQ ID NO: 29866 - protein, 5 aa, Artificial Sequence
  Description of Artificial Sequence: Synthetic peptide
  XENP021007 vhCDR1
DAWMD

SEQ ID NO: 29867 - protein, 19 aa, Artificial Sequence
  Description of Artificial Sequence: Synthetic peptide
  XENP021007 vhCDR2
EIRTKANDHATYYAESVKG

SEQ ID NO: 29868 - protein, 10 aa, Artificial Sequence
  Description of Artificial Sequence: Synthetic peptide
  XENP021007 vhCDR3
LANWDWYFDV

SEQ ID NO: 29869 - protein, 218 aa, Artificial Sequence; identical to SEQ ID NO: 17590
  Description of Artificial Sequence: Synthetic polypeptide
  XENP021007 7G8_H0.72_L0_Fab Light Chain

SEQ ID NO: 29870 - protein, 111 aa, Artificial Sequence; identical to SEQ ID NO: 17591
  Description of Artificial Sequence: Synthetic polypeptide
  VL of XENP021007

SEQ ID NO: 29871 - protein, 15 aa, Artificial Sequence
  Description of Artificial Sequence: Synthetic peptide
  XENP021007 vlCDR1
KASQSVDYDGDSYMN

SEQ ID NO: 29872 - protein, 7 aa, Artificial Sequence
  Description of Artificial Sequence: Synthetic peptide
  XENP021007 vlCDR2
AASNLES

SEQ ID NO: 29873 - protein, 9 aa, Artificial Sequence
  Description of Artificial Sequence: Synthetic peptide
  XENP021007 vlCDR3
QQSNEDPFT

SEQ ID NO: 29874 - protein, 226 aa, Artificial Sequence
  Description of Artificial Sequence: Synthetic polypeptide
  XENP021008 7G8_H0.73_L0_Fab Heavy Chain
EVKLEESGGGLVQPGGSMKLSCAASGFTFSDAWMDWVRQSPEKGLEWVAEIRTKANHHATYYAESVKGRFTISRDDSKSSVYLQMNSLRAEDTGIYYCTRLANWDWYFDVWGAGTTVTVSSASTKGPSVFPLAPSSKSTSGGTAALGCLVKDYFPEPVTVSWNSGALTSGVHTFPAVLQSSGLYSLSSVVTVPSSSLGTQTYICNVNHKPSNTKVDKKVEPKSCGS

SEQ ID NO: 29875 - protein, 121 aa, Artificial Sequence; identical to SEQ ID NO: 18936
  Description of Artificial Sequence: Synthetic polypeptide
  VH of XENP021008

SEQ ID NO: 29876 - protein, 5 aa, Artificial Sequence
  Description of Artificial Sequence: Synthetic peptide
  XENP021008 vhCDR1
DAWMD

SEQ ID NO: 29877 - protein, 19 aa, Artificial Sequence
  Description of Artificial Sequence: Synthetic peptide
  XENP021008 vhCDR2
EIRTKANHHATYYAESVKG

SEQ ID NO: 29878 - protein, 10 aa, Artificial Sequence
  Description of Artificial Sequence: Synthetic peptide
  XENP021008 vhCDR3
LANWDWYFDV

SEQ ID NO: 29879 - protein, 218 aa, Artificial Sequence; identical to SEQ ID NO: 17590
  Description of Artificial Sequence: Synthetic polypeptide
  XENP021008 7G8_H0.73_L0_Fab Light Chain

SEQ ID NO: 29880 - protein, 111 aa, Artificial Sequence; identical to SEQ ID NO: 17591
  Description of Artificial Sequence: Synthetic polypeptide
  VL of XENP021008

SEQ ID NO: 29881 - protein, 15 aa, Artificial Sequence
  Description of Artificial Sequence: Synthetic peptide
  XENP021008 vlCDR1
KASQSVDYDGDSYMN

SEQ ID NO: 29882 - protein, 7 aa, Artificial Sequence
  Description of Artificial Sequence: Synthetic peptide
  XENP021008 vlCDR2
AASNLES

SEQ ID NO: 29883 - protein, 9 aa, Artificial Sequence
  Description of Artificial Sequence: Synthetic peptide
  XENP021008 vlCDR3
QQSNEDPFT

SEQ ID NO: 29884 - protein, 226 aa, Artificial Sequence
  Description of Artificial Sequence: Synthetic polypeptide
  XENP021009 7G8_H0.74_L0_Fab Heavy Chain
EVKLEESGGGLVQPGGSMKLSCAASGFTFSDAWMDWVRQSPEKGLEWVAEIRTKANEHATYYAESVKGRFTISRDDSKSSVYLQMNSLRAEDTGIYYCTRLANWDWYFDVWGAGTTVTVSSASTKGPSVFPLAPSSKSTSGGTAALGCLVKDYFPEPVTVSWNSGALTSGVHTFPAVLQSSGLYSLSSVVTVPSSSLGTQTYICNVNHKPSNTKVDKKVEPKSCGS

SEQ ID NO: 29885 - protein, 121 aa, Artificial Sequence; identical to SEQ ID NO: 18946
  Description of Artificial Sequence: Synthetic polypeptide
  VH of XENP021009

SEQ ID NO: 29886 - protein, 5 aa, Artificial Sequence
  Description of Artificial Sequence: Synthetic peptide
  XENP021009 vhCDR1
DAWMD

SEQ ID NO: 29887 - protein, 19 aa, Artificial Sequence
  Description of Artificial Sequence: Synthetic peptide
  XENP021009 vhCDR2
EIRTKANEHATYYAESVKG

SEQ ID NO: 29888 - protein, 10 aa, Artificial Sequence
  Description of Artificial Sequence: Synthetic peptide
  XENP021009 vhCDR3
LANWDWYFDV

SEQ ID NO: 29889 - protein, 218 aa, Artificial Sequence; identical to SEQ ID NO: 17590
  Description of Artificial Sequence: Synthetic polypeptide
  XENP021009 7G8_H0.74_L0_Fab Light Chain

SEQ ID NO: 29890 - protein, 111 aa, Artificial Sequence; identical to SEQ ID NO: 17591
  Description of Artificial Sequence: Synthetic polypeptide
  VL of XENP021009

SEQ ID NO: 29891 - protein, 15 aa, Artificial Sequence
  Description of Artificial Sequence: Synthetic peptide
  XENP021009 vlCDR1
KASQSVDYDGDSYMN

SEQ ID NO: 29892 - protein, 7 aa, Artificial Sequence
  Description of Artificial Sequence: Synthetic peptide
  XENP021009 vlCDR2
AASNLES

SEQ ID NO: 29893 - protein, 9 aa, Artificial Sequence
  Description of Artificial Sequence: Synthetic peptide
  XENP021009 vlCDR3
QQSNEDPFT

SEQ ID NO: 29894 - protein, 226 aa, Artificial Sequence
  Description of Artificial Sequence: Synthetic polypeptide
  XENP021010 7G8_H0.75_L0_Fab Heavy Chain
EVKLEESGGGLVQPGGSMKLSCAASGFTFSDAWMDWVRQSPEKGLEWVAEIRTKANSHATYYAESVKGRFTISRDDSKSSVYLQMNSLRAEDTGIYYCTRLANWDWYFDVWGAGTTVTVSSASTKGPSVFPLAPSSKSTSGGTAALGCLVKDYFPEPVTVSWNSGALTSGVHTFPAVLQSSGLYSLSSVVTVPSSSLGTQTYICNVNHKPSNTKVDKKVEPKSCGS

SEQ ID NO: 29895 - protein, 121 aa, Artificial Sequence; identical to SEQ ID NO: 18956
  Description of Artificial Sequence: Synthetic polypeptide
  VH of XENP021010

SEQ ID NO: 29896 - protein, 5 aa, Artificial Sequence
  Description of Artificial Sequence: Synthetic peptide
  XENP021010 vhCDR1
DAWMD

SEQ ID NO: 29897 - protein, 19 aa, Artificial Sequence
  Description of Artificial Sequence: Synthetic peptide
  XENP021010 vhCDR2
EIRTKANSHATYYAESVKG

SEQ ID NO: 29898 - protein, 10 aa, Artificial Sequence
  Description of Artificial Sequence: Synthetic peptide
  XENP021010 vhCDR3
LANWDWYFDV

SEQ ID NO: 29899 - protein, 218 aa, Artificial Sequence; identical to SEQ ID NO: 17590
  Description of Artificial Sequence: Synthetic polypeptide
  XENP021010 7G8_H0.75_L0_Fab Light Chain

SEQ ID NO: 29900 - protein, 111 aa, Artificial Sequence; identical to SEQ ID NO: 17591
  Description of Artificial Sequence: Synthetic polypeptide
  VL of XENP021010

SEQ ID NO: 29901 - protein, 15 aa, Artificial Sequence
  Description of Artificial Sequence: Synthetic peptide
  XENP021010 vlCDR1
KASQSVDYDGDSYMN

SEQ ID NO: 29902 - protein, 7 aa, Artificial Sequence
  Description of Artificial Sequence: Synthetic peptide
  XENP021010 vlCDR2
AASNLES

SEQ ID NO: 29903 - protein, 9 aa, Artificial Sequence
  Description of Artificial Sequence: Synthetic peptide
  XENP021010 vlCDR3
QQSNEDPFT

SEQ ID NO: 29904 - protein, 226 aa, Artificial Sequence
  Description of Artificial Sequence: Synthetic polypeptide
  XENP021011 7G8_H0.76_L0_Fab Heavy Chain
EVKLEESGGGLVQPGGSMKLSCAASGFTFSDAWMDWVRQSPEKGLEWVAEIRTKANRHATYYAESVKGRFTISRDDSKSSVYLQMNSLRAEDTGIYYCTRLANWDWYFDVWGAGTTVTVSSASTKGPSVFPLAPSSKSTSGGTAALGCLVKDYFPEPVTVSWNSGALTSGVHTFPAVLQSSGLYSLSSVVTVPSSSLGTQTYICNVNHKPSNTKVDKKVEPKSCGS

SEQ ID NO: 29905 - protein, 121 aa, Artificial Sequence; identical to SEQ ID NO: 18966
  Description of Artificial Sequence: Synthetic polypeptide
  VH of XENP021011

SEQ ID NO: 29906 - protein, 5 aa, Artificial Sequence
  Description of Artificial Sequence: Synthetic peptide
  XENP021011 vhCDR1
DAWMD

SEQ ID NO: 29907 - protein, 19 aa, Artificial Sequence
  Description of Artificial Sequence: Synthetic peptide
  XENP021011 vhCDR2
EIRTKANRHATYYAESVKG

SEQ ID NO: 29908 - protein, 10 aa, Artificial Sequence
  Description of Artificial Sequence: Synthetic peptide
  XENP021011 vhCDR3
LANWDWYFDV

SEQ ID NO: 29909 - protein, 218 aa, Artificial Sequence; identical to SEQ ID NO: 17590
  Description of Artificial Sequence: Synthetic polypeptide
  XENP021011 7G8_H0.76_L0_Fab Light Chain

SEQ ID NO: 29910 - protein, 111 aa, Artificial Sequence; identical to SEQ ID NO: 17591
  Description of Artificial Sequence: Synthetic polypeptide
  VL of XENP021011

SEQ ID NO: 29911 - protein, 15 aa, Artificial Sequence
  Description of Artificial Sequence: Synthetic peptide
  XENP021011 vlCDR1
KASQSVDYDGDSYMN

SEQ ID NO: 29912 - protein, 7 aa, Artificial Sequence
  Description of Artificial Sequence: Synthetic peptide
  XENP021011 vlCDR2
AASNLES

SEQ ID NO: 29913 - protein, 9 aa, Artificial Sequence
  Description of Artificial Sequence: Synthetic peptide
  XENP021011 vlCDR3
QQSNEDPFT

SEQ ID NO: 29914 - protein, 226 aa, Artificial Sequence
  Description of Artificial Sequence: Synthetic polypeptide
  XENP021012 7G8_H0.77_L0_Fab Heavy Chain
EVKLEESGGGLVQPGGSMKLSCAASGFTFSDAWMDWVRQSPEKGLEWVAEIRTKANLHATYYAESVKGRFTISRDDSKSSVYLQMNSLRAEDTGIYYCTRLANWDWYFDVWGAGTTVTVSSASTKGPSVFPLAPSSKSTSGGTAALGCLVKDYFPEPVTVSWNSGALTSGVHTFPAVLQSSGLYSLSSVVTVPSSSLGTQTYICNVNHKPSNTKVDKKVEPKSCGS

SEQ ID NO: 29915 - protein, 121 aa, Artificial Sequence; identical to SEQ ID NO: 18976
  Description of Artificial Sequence: Synthetic polypeptide
  VH of XENP021012

SEQ ID NO: 29916 - protein, 5 aa, Artificial Sequence
  Description of Artificial Sequence: Synthetic peptide
  XENP021012 vhCDR1
DAWMD

SEQ ID NO: 29917 - protein, 19 aa, Artificial Sequence
  Description of Artificial Sequence: Synthetic peptide
  XENP021012 vhCDR2
EIRTKANLHATYYAESVKG

SEQ ID NO: 29918 - protein, 10 aa, Artificial Sequence
  Description of Artificial Sequence: Synthetic peptide
  XENP021012 vhCDR3
LANWDWYFDV

SEQ ID NO: 29919 - protein, 218 aa, Artificial Sequence; identical to SEQ ID NO: 17590
  Description of Artificial Sequence: Synthetic polypeptide
  XENP021012 7G8_H0.77_L0_Fab Light Chain

SEQ ID NO: 29920 - protein, 111 aa, Artificial Sequence; identical to SEQ ID NO: 17591
  Description of Artificial Sequence: Synthetic polypeptide
  VL of XENP021012

SEQ ID NO: 29921 - protein, 15 aa, Artificial Sequence
  Description of Artificial Sequence: Synthetic peptide
  XENP021012 vlCDR1
KASQSVDYDGDSYMN

SEQ ID NO: 29922 - protein, 7 aa, Artificial Sequence
  Description of Artificial Sequence: Synthetic peptide
  XENP021012 vlCDR2
AASNLES

SEQ ID NO: 29923 - protein, 9 aa, Artificial Sequence
  Description of Artificial Sequence: Synthetic peptide
  XENP021012 vlCDR3
QQSNEDPFT

SEQ ID NO: 29924 - protein, 226 aa, Artificial Sequence
  Description of Artificial Sequence: Synthetic polypeptide
  XENP021013 7G8_H0.78_L0_Fab Heavy Chain
EVKLEESGGGLVQPGGSMKLSCAASGFTFSDAWMDWVRQSPEKGLEWVAEIRTKANTHATYYAESVKGRFTISRDDSKSSVYLQMNSLRAEDTGIYYCTRLANWDWYFDVWGAGTTVTVSSASTKGPSVFPLAPSSKSTSGGTAALGCLVKDYFPEPVTVSWNSGALTSGVHTFPAVLQSSGLYSLSSVVTVPSSSLGTQTYICNVNHKPSNTKVDKKVEPKSCGS

SEQ ID NO: 29925 - protein, 121 aa, Artificial Sequence; identical to SEQ ID NO: 18986
  Description of Artificial Sequence: Synthetic polypeptide
  VH of XENP021013

SEQ ID NO: 29926 - protein, 5 aa, Artificial Sequence
  Description of Artificial Sequence: Synthetic peptide
  XENP021013 vhCDR1
DAWMD

SEQ ID NO: 29927 - protein, 19 aa, Artificial Sequence
  Description of Artificial Sequence: Synthetic peptide
  XENP021013 vhCDR2
EIRTKANTHATYYAESVKG

SEQ ID NO: 29928 - protein, 10 aa, Artificial Sequence
  Description of Artificial Sequence: Synthetic peptide
  XENP021013 vhCDR3
LANWDWYFDV

SEQ ID NO: 29929 - protein, 218 aa, Artificial Sequence; identical to SEQ ID NO: 17590
  Description of Artificial Sequence: Synthetic polypeptide
  XENP021013 7G8_H0.78_L0_Fab Light Chain

SEQ ID NO: 29930 - protein, 111 aa, Artificial Sequence; identical to SEQ ID NO: 17591
  Description of Artificial Sequence: Synthetic polypeptide
  VL of XENP021013

SEQ ID NO: 29931 - protein, 15 aa, Artificial Sequence
  Description of Artificial Sequence: Synthetic peptide
  XENP021013 vlCDR1
KASQSVDYDGDSYMN

SEQ ID NO: 29932 - protein, 7 aa, Artificial Sequence
  Description of Artificial Sequence: Synthetic peptide
  XENP021013 vlCDR2
AASNLES

SEQ ID NO: 29933 - protein, 9 aa, Artificial Sequence
  Description of Artificial Sequence: Synthetic peptide
  XENP021013 vlCDR3
QQSNEDPFT

SEQ ID NO: 29934 - protein, 226 aa, Artificial Sequence
  Description of Artificial Sequence: Synthetic polypeptide
  XENP021014 7G8_H0.79_L0_Fab Heavy Chain
EVKLEESGGGLVQPGGSMKLSCAASGFTFSDAWMDWVRQSPEKGLEWVAEIRTKANGHATYYAESVKGRFTISRDDSKSSVYLQMNSLRAEDTGIYYCTRLANWDWYFDVWGAGTTVTVSSASTKGPSVFPLAPSSKSTSGGTAALGCLVKDYFPEPVTVSWNSGALTSGVHTFPAVLQSSGLYSLSSVVTVPSSSLGTQTYICNVNHKPSNTKVDKKVEPKSCGS

SEQ ID NO: 29935 - protein, 121 aa, Artificial Sequence; identical to SEQ ID NO: 18996
  Description of Artificial Sequence: Synthetic polypeptide
  VH of XENP021014

SEQ ID NO: 29936 - protein, 5 aa, Artificial Sequence
  Description of Artificial Sequence: Synthetic peptide
  XENP021014 vhCDR1
DAWMD

SEQ ID NO: 29937 - protein, 19 aa, Artificial Sequence
  Description of Artificial Sequence: Synthetic peptide
  XENP021014 vhCDR2
EIRTKANGHATYYAESVKG

SEQ ID NO: 29938 - protein, 10 aa, Artificial Sequence
  Description of Artificial Sequence: Synthetic peptide
  XENP021014 vhCDR3
LANWDWYFDV

SEQ ID NO: 29939 - protein, 218 aa, Artificial Sequence; identical to SEQ ID NO: 17590
  Description of Artificial Sequence: Synthetic polypeptide
  XENP021014 7G8_H0.79_L0_Fab Light Chain

SEQ ID NO: 29940 - protein, 111 aa, Artificial Sequence; identical to SEQ ID NO: 17591
  Description of Artificial Sequence: Synthetic polypeptide
  VL of XENP021014

SEQ ID NO: 29941 - protein, 15 aa, Artificial Sequence
  Description of Artificial Sequence: Synthetic peptide
  XENP021014 vlCDR1
KASQSVDYDGDSYMN

SEQ ID NO: 29942 - protein, 7 aa, Artificial Sequence
  Description of Artificial Sequence: Synthetic peptide
  XENP021014 vlCDR2
AASNLES

SEQ ID NO: 29943 - protein, 9 aa, Artificial Sequence
  Description of Artificial Sequence: Synthetic peptide
  XENP021014 vlCDR3
QQSNEDPFT

SEQ ID NO: 29944 - protein, 226 aa, Artificial Sequence
  Description of Artificial Sequence: Synthetic polypeptide
  XENP021015 7G8_H0.80_L0_Fab Heavy Chain
EVKLEESGGGLVQPGGSMKLSCAASGFTFSDAWMDWVRQSPEKGLEWVAEIRTKANYHATYYAESVKGRFTISRDDSKSSVYLQMNSLRAEDTGIYYCTRLANWDWYFDVWGAGTTVTVSSASTKGPSVFPLAPSSKSTSGGTAALGCLVKDYFPEPVTVSWNSGALTSGVHTFPAVLQSSGLYSLSSVVTVPSSSLGTQTYICNVNHKPSNTKVDKKVEPKSCGS

SEQ ID NO: 29945 - protein, 121 aa, Artificial Sequence; identical to SEQ ID NO: 19006
  Description of Artificial Sequence: Synthetic polypeptide
  VH of XENP021015

SEQ ID NO: 29946 - protein, 5 aa, Artificial Sequence
  Description of Artificial Sequence: Synthetic peptide
  XENP021015 vhCDR1
DAWMD

SEQ ID NO: 29947 - protein, 19 aa, Artificial Sequence
  Description of Artificial Sequence: Synthetic peptide
  XENP021015 vhCDR2
EIRTKANYHATYYAESVKG

SEQ ID NO: 29948 - protein, 10 aa, Artificial Sequence
  Description of Artificial Sequence: Synthetic peptide
  XENP021015 vhCDR3
LANWDWYFDV

SEQ ID NO: 29949 - protein, 218 aa, Artificial Sequence; identical to SEQ ID NO: 17590
  Description of Artificial Sequence: Synthetic polypeptide
  XENP021015 7G8_H0.80_L0_Fab Light Chain

SEQ ID NO: 29950 - protein, 111 aa, Artificial Sequence; identical to SEQ ID NO: 17591
  Description of Artificial Sequence: Synthetic polypeptide
  VL of XENP021015

SEQ ID NO: 29951 - protein, 15 aa, Artificial Sequence
  Description of Artificial Sequence: Synthetic peptide
  XENP021015 vlCDR1
KASQSVDYDGDSYMN

SEQ ID NO: 29952 - protein, 7 aa, Artificial Sequence
  Description of Artificial Sequence: Synthetic peptide
  XENP021015 vlCDR2
AASNLES

SEQ ID NO: 29953 - protein, 9 aa, Artificial Sequence
  Description of Artificial Sequence: Synthetic peptide
  XENP021015 vlCDR3
QQSNEDPFT

SEQ ID NO: 29954 - protein, 226 aa, Artificial Sequence
  Description of Artificial Sequence: Synthetic polypeptide
  XENP021016 7G8_H0.81_L0_Fab Heavy Chain
EVKLEESGGGLVQPGGSMKLSCAASGFTFSDAWMDWVRQSPEKGLEWVAEIRTKANNYATYYAESVKGRFTISRDDSKSSVYLQMNSLRAEDTGIYYCTRLANWDWYFDVWGAGTTVTVSSASTKGPSVFPLAPSSKSTSGGTAALGCLVKDYFPEPVTVSWNSGALTSGVHTFPAVLQSSGLYSLSSVVTVPSSSLGTQTYICNVNHKPSNTKVDKKVEPKSCGS

SEQ ID NO: 29955 - protein, 121 aa, Artificial Sequence; identical to SEQ ID NO: 19016
  Description of Artificial Sequence: Synthetic polypeptide
  VH of XENP021016

SEQ ID NO: 29956 - protein, 5 aa, Artificial Sequence
  Description of Artificial Sequence: Synthetic peptide
  XENP021016 vhCDR1
DAWMD

SEQ ID NO: 29957 - protein, 19 aa, Artificial Sequence
  Description of Artificial Sequence: Synthetic peptide
  XENP021016 vhCDR2
EIRTKANNYATYYAESVKG

SEQ ID NO: 29958 - protein, 10 aa, Artificial Sequence
  Description of Artificial Sequence: Synthetic peptide
  XENP021016 vhCDR3
LANWDWYFDV

SEQ ID NO: 29959 - protein, 218 aa, Artificial Sequence; identical to SEQ ID NO: 17590
  Description of Artificial Sequence: Synthetic polypeptide
  XENP021016 7G8_H0.81_L0_Fab Light Chain

SEQ ID NO: 29960 - protein, 111 aa, Artificial Sequence; identical to SEQ ID NO: 17591
  Description of Artificial Sequence: Synthetic polypeptide
  VL of XENP021016

SEQ ID NO: 29961 - protein, 15 aa, Artificial Sequence
  Description of Artificial Sequence: Synthetic peptide
  XENP021016 vlCDR1
KASQSVDYDGDSYMN

SEQ ID NO: 29962 - protein, 7 aa, Artificial Sequence
  Description of Artificial Sequence: Synthetic peptide
  XENP021016 vlCDR2
AASNLES

SEQ ID NO: 29963 - protein, 9 aa, Artificial Sequence
  Description of Artificial Sequence: Synthetic peptide
  XENP021016 vlCDR3
QQSNEDPFT

SEQ ID NO: 29964 - protein, 226 aa, Artificial Sequence
  Description of Artificial Sequence: Synthetic polypeptide
  XENP021017 7G8_H0.82_L0_Fab Heavy Chain
EVKLEESGGGLVQPGGSMKLSCAASGFTFSDAWMDWVRQSPEKGLEWVAEIRTKANNQATYYAESVKGRFTISRDDSKSSVYLQMNSLRAEDTGIYYCTRLANWDWYFDVWGAGTTVTVSSASTKGPSVFPLAPSSKSTSGGTAALGCLVKDYFPEPVTVSWNSGALTSGVHTFPAVLQSSGLYSLSSVVTVPSSSLGTQTYICNVNHKPSNTKVDKKVEPKSCGS

SEQ ID NO: 29965 - protein, 121 aa, Artificial Sequence; identical to SEQ ID NO: 19026
  Description of Artificial Sequence: Synthetic polypeptide
  VH of XENP021017

SEQ ID NO: 29966 - protein, 5 aa, Artificial Sequence
  Description of Artificial Sequence: Synthetic peptide
  XENP021017 vhCDR1
DAWMD

SEQ ID NO: 29967 - protein, 19 aa, Artificial Sequence
  Description of Artificial Sequence: Synthetic peptide
  XENP021017 vhCDR2
EIRTKANNQATYYAESVKG

SEQ ID NO: 29968 - protein, 10 aa, Artificial Sequence
  Description of Artificial Sequence: Synthetic peptide
  XENP021017 vhCDR3
LANWDWYFDV

SEQ ID NO: 29969 - protein, 218 aa, Artificial Sequence; identical to SEQ ID NO: 17590
  Description of Artificial Sequence: Synthetic polypeptide
  XENP021017 7G8_H0.82_L0_Fab Light Chain

SEQ ID NO: 29970 - protein, 111 aa, Artificial Sequence; identical to SEQ ID NO: 17591
  Description of Artificial Sequence: Synthetic polypeptide
  VL of XENP021017

SEQ ID NO: 29971 - protein, 15 aa, Artificial Sequence
  Description of Artificial Sequence: Synthetic peptide
  XENP021017 vlCDR1
KASQSVDYDGDSYMN

SEQ ID NO: 29972 - protein, 7 aa, Artificial Sequence
  Description of Artificial Sequence: Synthetic peptide
  XENP021017 vlCDR2
AASNLES

SEQ ID NO: 29973 - protein, 9 aa, Artificial Sequence
  Description of Artificial Sequence: Synthetic peptide
  XENP021017 vlCDR3
QQSNEDPFT

SEQ ID NO: 29974 - protein, 226 aa, Artificial Sequence
  Description of Artificial Sequence: Synthetic polypeptide
  XENP021018 7G8_H0.83_L0_Fab Heavy Chain
EVKLEESGGGLVQPGGSMKLSCAASGFTFSDAWMDWVRQSPEKGLEWVAEIRTKANNDATYYAESVKGRFTISRDDSKSSVYLQMNSLRAEDTGIYYCTRLANWDWYFDVWGAGTTVTVSSASTKGPSVFPLAPSSKSTSGGTAALGCLVKDYFPEPVTVSWNSGALTSGVHTFPAVLQSSGLYSLSSVVTVPSSSLGTQTYICNVNHKPSNTKVDKKVEPKSCGS

SEQ ID NO: 29975 - protein, 121 aa, Artificial Sequence; identical to SEQ ID NO: 19036
  Description of Artificial Sequence: Synthetic polypeptide
  VH of XENP021018

SEQ ID NO: 29976 - protein, 5 aa, Artificial Sequence
  Description of Artificial Sequence: Synthetic peptide
  XENP021018 vhCDR1
DAWMD

SEQ ID NO: 29977 - protein, 19 aa, Artificial Sequence
  Description of Artificial Sequence: Synthetic peptide
  XENP021018 vhCDR2
EIRTKANNDATYYAESVKG

SEQ ID NO: 29978 - protein, 10 aa, Artificial Sequence
  Description of Artificial Sequence: Synthetic peptide
  XENP021018 vhCDR3
LANWDWYFDV

SEQ ID NO: 29979 - protein, 218 aa, Artificial Sequence; identical to SEQ ID NO: 17590
  Description of Artificial Sequence: Synthetic polypeptide
  XENP021018 7G8_H0.83_L0_Fab Light Chain

SEQ ID NO: 29980 - protein, 111 aa, Artificial Sequence; identical to SEQ ID NO: 17591
  Description of Artificial Sequence: Synthetic polypeptide
  VL of XENP021018

SEQ ID NO: 29981 - protein, 15 aa, Artificial Sequence
  Description of Artificial Sequence: Synthetic peptide
  XENP021018 vlCDR1
KASQSVDYDGDSYMN

SEQ ID NO: 29982 - protein, 7 aa, Artificial Sequence
  Description of Artificial Sequence: Synthetic peptide
  XENP021018 vlCDR2
AASNLES

SEQ ID NO: 29983 - protein, 9 aa, Artificial Sequence
  Description of Artificial Sequence: Synthetic peptide
  XENP021018 vlCDR3
QQSNEDPFT

SEQ ID NO: 29984 - protein, 226 aa, Artificial Sequence
  Description of Artificial Sequence: Synthetic polypeptide
  XENP021019 7G8_H0.84_L0_Fab Heavy Chain
EVKLEESGGGLVQPGGSMKLSCAASGFTFSDAWMDWVRQSPEKGLEWVAEIRTKANNFATYYAESVKGRFTISRDDSKSSVYLQMNSLRAEDTGIYYCTRLANWDWYFDVWGAGTTVTVSSASTKGPSVFPLAPSSKSTSGGTAALGCLVKDYFPEPVTVSWNSGALTSGVHTFPAVLQSSGLYSLSSVVTVPSSSLGTQTYICNVNHKPSNTKVDKKVEPKSCGS

SEQ ID NO: 29985 - protein, 121 aa, Artificial Sequence; identical to SEQ ID NO: 19046
  Description of Artificial Sequence: Synthetic polypeptide
  VH of XENP021019

SEQ ID NO: 29986 - protein, 5 aa, Artificial Sequence
  Description of Artificial Sequence: Synthetic peptide
  XENP021019 vhCDR1
DAWMD

SEQ ID NO: 29987 - protein, 19 aa, Artificial Sequence
  Description of Artificial Sequence: Synthetic peptide
  XENP021019 vhCDR2
EIRTKANNFATYYAESVKG

SEQ ID NO: 29988 - protein, 10 aa, Artificial Sequence
  Description of Artificial Sequence: Synthetic peptide
  XENP021019 vhCDR3
LANWDWYFDV

SEQ ID NO: 29989 - protein, 218 aa, Artificial Sequence; identical to SEQ ID NO: 17590
  Description of Artificial Sequence: Synthetic polypeptide
  XENP021019 7G8_H0.84_L0_Fab Light Chain

SEQ ID NO: 29990 - protein, 111 aa, Artificial Sequence; identical to SEQ ID NO: 17591
  Description of Artificial Sequence: Synthetic polypeptide
  VL of XENP021019

SEQ ID NO: 29991 - protein, 15 aa, Artificial Sequence
  Description of Artificial Sequence: Synthetic peptide
  XENP021019 vlCDR1
KASQSVDYDGDSYMN

SEQ ID NO: 29992 - protein, 7 aa, Artificial Sequence
  Description of Artificial Sequence: Synthetic peptide
  XENP021019 vlCDR2
AASNLES

SEQ ID NO: 29993 - protein, 9 aa, Artificial Sequence
  Description of Artificial Sequence: Synthetic peptide
  XENP021019 vlCDR3
QQSNEDPFT

SEQ ID NO: 29994 - protein, 226 aa, Artificial Sequence
  Description of Artificial Sequence: Synthetic polypeptide
  XENP021020 7G8_H0.85_L0_Fab Heavy Chain
EVKLEESGGGLVQPGGSMKLSCAASGFTFSDAWMDWVRQSPEKGLEWVAEIRTKANNAATYYAESVKGRFTISRDDSKSSVYLQMNSLRAEDTGIYYCTRLANWDWYFDVWGAGTTVTVSSASTKGPSVFPLAPSSKSTSGGTAALGCLVKDYFPEPVTVSWNSGALTSGVHTFPAVLQSSGLYSLSSVVTVPSSSLGTQTYICNVNHKPSNTKVDKKVEPKSCGS

SEQ ID NO: 29995 - protein, 121 aa, Artificial Sequence; identical to SEQ ID NO: 19056
  Description of Artificial Sequence: Synthetic polypeptide
  VH of XENP021020

SEQ ID NO: 29996 - protein, 5 aa, Artificial Sequence
  Description of Artificial Sequence: Synthetic peptide
  XENP021020 vhCDR1
DAWMD

SEQ ID NO: 29997 - protein, 19 aa, Artificial Sequence
  Description of Artificial Sequence: Synthetic peptide
  XENP021020 vhCDR2
EIRTKANNAATYYAESVKG

SEQ ID NO: 29998 - protein, 10 aa, Artificial Sequence
  Description of Artificial Sequence: Synthetic peptide
  XENP021020 vhCDR3
LANWDWYFDV

SEQ ID NO: 29999 - protein, 218 aa, Artificial Sequence; identical to SEQ ID NO: 17590
  Description of Artificial Sequence: Synthetic polypeptide
  XENP021020 7G8_H0.85_L0_Fab Light Chain

SEQ ID NO: 30000 - protein, 111 aa, Artificial Sequence; identical to SEQ ID NO: 17591
  Description of Artificial Sequence: Synthetic polypeptide
  VL of XENP021020

SEQ ID NO: 30001 - protein, 15 aa, Artificial Sequence
  Description of Artificial Sequence: Synthetic peptide
  XENP021020 vlCDR1
KASQSVDYDGDSYMN

SEQ ID NO: 30002 - protein, 7 aa, Artificial Sequence
  Description of Artificial Sequence: Synthetic peptide
  XENP021020 vlCDR2
AASNLES

SEQ ID NO: 30003 - protein, 9 aa, Artificial Sequence
  Description of Artificial Sequence: Synthetic peptide
  XENP021020 vlCDR3
QQSNEDPFT

SEQ ID NO: 30004 - protein, 226 aa, Artificial Sequence
  Description of Artificial Sequence: Synthetic polypeptide
  XENP021021 7G8_H0.86_L0_Fab Heavy Chain
EVKLEESGGGLVQPGGSMKLSCAASGFTFSDAWMDWVRQSPEKGLEWVAEIRTKANNKATYYAESVKGRFTISRDDSKSSVYLQMNSLRAEDTGIYYCTRLANWDWYFDVWGAGTTVTVSSASTKGPSVFPLAPSSKSTSGGTAALGCLVKDYFPEPVTVSWNSGALTSGVHTFPAVLQSSGLYSLSSVVTVPSSSLGTQTYICNVNHKPSNTKVDKKVEPKSCGS

SEQ ID NO: 30005 - protein, 121 aa, Artificial Sequence; identical to SEQ ID NO: 19066
  Description of Artificial Sequence: Synthetic polypeptide
  VH of XENP021021

SEQ ID NO: 30006 - protein, 5 aa, Artificial Sequence
  Description of Artificial Sequence: Synthetic peptide
  XENP021021 vhCDR1
DAWMD

SEQ ID NO: 30007 - protein, 19 aa, Artificial Sequence
  Description of Artificial Sequence: Synthetic peptide
  XENP021021 vhCDR2
EIRTKANNKATYYAESVKG

SEQ ID NO: 30008 - protein, 10 aa, Artificial Sequence
  Description of Artificial Sequence: Synthetic peptide
  XENP021021 vhCDR3
LANWDWYFDV

SEQ ID NO: 30009 - protein, 218 aa, Artificial Sequence; identical to SEQ ID NO: 17590
  Description of Artificial Sequence: Synthetic polypeptide
  XENP021021 7G8_H0.86_L0_Fab Light Chain

SEQ ID NO: 30010 - protein, 111 aa, Artificial Sequence; identical to SEQ ID NO: 17591
  Description of Artificial Sequence: Synthetic polypeptide
  VL of XENP021021

SEQ ID NO: 30011 - protein, 15 aa, Artificial Sequence
  Description of Artificial Sequence: Synthetic peptide
  XENP021021 vlCDR1
KASQSVDYDGDSYMN

SEQ ID NO: 30012 - protein, 7 aa, Artificial Sequence
  Description of Artificial Sequence: Synthetic peptide
  XENP021021 vlCDR2
AASNLES

SEQ ID NO: 30013 - protein, 9 aa, Artificial Sequence
  Description of Artificial Sequence: Synthetic peptide
  XENP021021 vlCDR3
QQSNEDPFT

SEQ ID NO: 30014 - protein, 226 aa, Artificial Sequence
  Description of Artificial Sequence: Synthetic polypeptide
  XENP021022 7G8_H0.87_L0_Fab Heavy Chain
EVKLEESGGGLVQPGGSMKLSCAASGFTFSDAWMDWVRQSPEKGLEWVAEIRTKANNGATYYAESVKGRFTISRDDSKSSVYLQMNSLRAEDTGIYYCTRLANWDWYFDVWGAGTTVTVSSASTKGPSVFPLAPSSKSTSGGTAALGCLVKDYFPEPVTVSWNSGALTSGVHTFPAVLQSSGLYSLSSVVTVPSSSLGTQTYICNVNHKPSNTKVDKKVEPKSCGS

SEQ ID NO: 30015 - protein, 121 aa, Artificial Sequence; identical to SEQ ID NO: 19076
  Description of Artificial Sequence: Synthetic polypeptide
  VH of XENP021022

SEQ ID NO: 30016 - protein, 5 aa, Artificial Sequence
  Description of Artificial Sequence: Synthetic peptide
  XENP021022 vhCDR1
DAWMD

SEQ ID NO: 30017 - protein, 19 aa, Artificial Sequence
  Description of Artificial Sequence: Synthetic peptide
  XENP021022 vhCDR2
EIRTKANNGATYYAESVKG

SEQ ID NO: 30018 - protein, 10 aa, Artificial Sequence
  Description of Artificial Sequence: Synthetic peptide
  XENP021022 vhCDR3
LANWDWYFDV

SEQ ID NO: 30019 - protein, 218 aa, Artificial Sequence; identical to SEQ ID NO: 17590
  Description of Artificial Sequence: Synthetic polypeptide
  XENP021022 7G8_H0.87_L0_Fab Light Chain

SEQ ID NO: 30020 - protein, 111 aa, Artificial Sequence; identical to SEQ ID NO: 17591
  Description of Artificial Sequence: Synthetic polypeptide
  VL of XENP021022

SEQ ID NO: 30021 - protein, 15 aa, Artificial Sequence
  Description of Artificial Sequence: Synthetic peptide
  XENP021022 vlCDR1
KASQSVDYDGDSYMN

SEQ ID NO: 30022 - protein, 7 aa, Artificial Sequence
  Description of Artificial Sequence: Synthetic peptide
  XENP021022 vlCDR2
AASNLES

SEQ ID NO: 30023 - protein, 9 aa, Artificial Sequence
  Description of Artificial Sequence: Synthetic peptide
  XENP021022 vlCDR3
QQSNEDPFT

SEQ ID NO: 30024 - protein, 226 aa, Artificial Sequence
  Description of Artificial Sequence: Synthetic polypeptide
  XENP021023 7G8_H0.88_L0_Fab Heavy Chain
EVKLEESGGGLVQPGGSMKLSCAASGFTFSDAWMDWVRQSPEKGLEWVAEIRTKANNLATYYAESVKGRFTISRDDSKSSVYLQMNSLRAEDTGIYYCTRLANWDWYFDVWGAGTTVTVSSASTKGPSVFPLAPSSKSTSGGTAALGCLVKDYFPEPVTVSWNSGALTSGVHTFPAVLQSSGLYSLSSVVTVPSSSLGTQTYICNVNHKPSNTKVDKKVEPKSCGS

SEQ ID NO: 30025 - protein, 121 aa, Artificial Sequence; identical to SEQ ID NO: 19086
  Description of Artificial Sequence: Synthetic polypeptide
  VH of XENP021023

SEQ ID NO: 30026 - protein, 5 aa, Artificial Sequence
  Description of Artificial Sequence: Synthetic peptide
  XENP021023 vhCDR1
DAWMD

SEQ ID NO: 30027 - protein, 19 aa, Artificial Sequence
  Description of Artificial Sequence: Synthetic peptide
  XENP021023 vhCDR2
EIRTKANNLATYYAESVKG

SEQ ID NO: 30028 - protein, 10 aa, Artificial Sequence
  Description of Artificial Sequence: Synthetic peptide
  XENP021023 vhCDR3
LANWDWYFDV

SEQ ID NO: 30029 - protein, 218 aa, Artificial Sequence; identical to SEQ ID NO: 17590
  Description of Artificial Sequence: Synthetic polypeptide
  XENP021023 7G8_H0.88_L0_Fab Light Chain

SEQ ID NO: 30030 - protein, 111 aa, Artificial Sequence; identical to SEQ ID NO: 17591
  Description of Artificial Sequence: Synthetic polypeptide
  VL of XENP021023

SEQ ID NO: 30031 - protein, 15 aa, Artificial Sequence
  Description of Artificial Sequence: Synthetic peptide
  XENP021023 vlCDR1
KASQSVDYDGDSYMN

SEQ ID NO: 30032 - protein, 7 aa, Artificial Sequence
  Description of Artificial Sequence: Synthetic peptide
  XENP021023 vlCDR2
AASNLES

SEQ ID NO: 30033 - protein, 9 aa, Artificial Sequence
  Description of Artificial Sequence: Synthetic peptide
  XENP021023 vlCDR3
QQSNEDPFT

SEQ ID NO: 30034 - protein, 226 aa, Artificial Sequence
  Description of Artificial Sequence: Synthetic polypeptide
  XENP021024 7G8_H0.89_L0_Fab Heavy Chain
EVKLEESGGGLVQPGGSMKLSCAASGFTFSDAWMDWVRQSPEKGLEWVAEIRTKANNHGTYYAESVKGRFTISRDDSKSSVYLQMNSLRAEDTGIYYCTRLANWDWYFDVWGAGTTVTVSSASTKGPSVFPLAPSSKSTSGGTAALGCLVKDYFPEPVTVSWNSGALTSGVHTFPAVLQSSGLYSLSSVVTVPSSSLGTQTYICNVNHKPSNTKVDKKVEPKSCGS

SEQ ID NO: 30035 - protein, 121 aa, Artificial Sequence; identical to SEQ ID NO: 19096
  Description of Artificial Sequence: Synthetic polypeptide
  VH of XENP021024

SEQ ID NO: 30036 - protein, 5 aa, Artificial Sequence
  Description of Artificial Sequence: Synthetic peptide
  XENP021024 vhCDR1
DAWMD

SEQ ID NO: 30037 - protein, 19 aa, Artificial Sequence
  Description of Artificial Sequence: Synthetic peptide
  XENP021024 vhCDR2
EIRTKANNHGTYYAESVKG

SEQ ID NO: 30038 - protein, 10 aa, Artificial Sequence
  Description of Artificial Sequence: Synthetic peptide
  XENP021024 vhCDR3
LANWDWYFDV

SEQ ID NO: 30039 - protein, 218 aa, Artificial Sequence; identical to SEQ ID NO: 17590
  Description of Artificial Sequence: Synthetic polypeptide
  XENP021024 7G8_H0.89_L0_Fab Light Chain

SEQ ID NO: 30040 - protein, 111 aa, Artificial Sequence; identical to SEQ ID NO: 17591
  Description of Artificial Sequence: Synthetic polypeptide
  VL of XENP021024

SEQ ID NO: 30041 - protein, 15 aa, Artificial Sequence
  Description of Artificial Sequence: Synthetic peptide
  XENP021024 vlCDR1
KASQSVDYDGDSYMN

SEQ ID NO: 30042 - protein, 7 aa, Artificial Sequence
  Description of Artificial Sequence: Synthetic peptide
  XENP021024 vlCDR2
AASNLES

SEQ ID NO: 30043 - protein, 9 aa, Artificial Sequence
  Description of Artificial Sequence: Synthetic peptide
  XENP021024 vlCDR3
QQSNEDPFT

SEQ ID NO: 30044 - protein, 226 aa, Artificial Sequence
  Description of Artificial Sequence: Synthetic polypeptide
  XENP021025 7G8_H0.90_L0_Fab Heavy Chain
EVKLEESGGGLVQPGGSMKLSCAASGFTFSDAWMDWVRQSPEKGLEWVAEIRTKANNHHTYYAESVKGRFTISRDDSKSSVYLQMNSLRAEDTGIYYCTRLANWDWYFDVWGAGTTVTVSSASTKGPSVFPLAPSSKSTSGGTAALGCLVKDYFPEPVTVSWNSGALTSGVHTFPAVLQSSGLYSLSSVVTVPSSSLGTQTYICNVNHKPSNTKVDKKVEPKSCGS

SEQ ID NO: 30045 - protein, 121 aa, Artificial Sequence; identical to SEQ ID NO: 19106
  Description of Artificial Sequence: Synthetic polypeptide
  VH of XENP021025

SEQ ID NO: 30046 - protein, 5 aa, Artificial Sequence
  Description of Artificial Sequence: Synthetic peptide
  XENP021025 vhCDR1
DAWMD

SEQ ID NO: 30047 - protein, 19 aa, Artificial Sequence
  Description of Artificial Sequence: Synthetic peptide
  XENP021025 vhCDR2
EIRTKANNHHTYYAESVKG

SEQ ID NO: 30048 - protein, 10 aa, Artificial Sequence
  Description of Artificial Sequence: Synthetic peptide
  XENP021025 vhCDR3
LANWDWYFDV

SEQ ID NO: 30049 - protein, 218 aa, Artificial Sequence; identical to SEQ ID NO: 17590
  Description of Artificial Sequence: Synthetic polypeptide
  XENP021025 7G8_H0.90_L0_Fab Light Chain

SEQ ID NO: 30050 - protein, 111 aa, Artificial Sequence; identical to SEQ ID NO: 17591
  Description of Artificial Sequence: Synthetic polypeptide
  VL of XENP021025

SEQ ID NO: 30051 - protein, 15 aa, Artificial Sequence
  Description of Artificial Sequence: Synthetic peptide
  XENP021025 vlCDR1
KASQSVDYDGDSYMN

SEQ ID NO: 30052 - protein, 7 aa, Artificial Sequence
  Description of Artificial Sequence: Synthetic peptide
  XENP021025 vlCDR2
AASNLES

SEQ ID NO: 30053 - protein, 9 aa, Artificial Sequence
  Description of Artificial Sequence: Synthetic peptide
  XENP021025 vlCDR3
QQSNEDPFT

SEQ ID NO: 30054 - protein, 226 aa, Artificial Sequence
  Description of Artificial Sequence: Synthetic polypeptide
  XENP021026 7G8_H0.91_L0_Fab Heavy Chain
EVKLEESGGGLVQPGGSMKLSCAASGFTFSDAWMDWVRQSPEKGLEWVAEIRTKANNHQTYYAESVKGRFTISRDDSKSSVYLQMNSLRAEDTGIYYCTRLANWDWYFDVWGAGTTVTVSSASTKGPSVFPLAPSSKSTSGGTAALGCLVKDYFPEPVTVSWNSGALTSGVHTFPAVLQSSGLYSLSSVVTVPSSSLGTQTYICNVNHKPSNTKVDKKVEPKSCGS

SEQ ID NO: 30055 - protein, 121 aa, Artificial Sequence; identical to SEQ ID NO: 19116
  Description of Artificial Sequence: Synthetic polypeptide
  VH of XENP021026

SEQ ID NO: 30056 - protein, 5 aa, Artificial Sequence
  Description of Artificial Sequence: Synthetic peptide
  XENP021026 vhCDR1
DAWMD

SEQ ID NO: 30057 - protein, 19 aa, Artificial Sequence
  Description of Artificial Sequence: Synthetic peptide
  XENP021026 vhCDR2
EIRTKANNHQTYYAESVKG

SEQ ID NO: 30058 - protein, 10 aa, Artificial Sequence
  Description of Artificial Sequence: Synthetic peptide
  XENP021026 vhCDR3
LANWDWYFDV

SEQ ID NO: 30059 - protein, 218 aa, Artificial Sequence; identical to SEQ ID NO: 17590
  Description of Artificial Sequence: Synthetic polypeptide
  XENP021026 7G8_H0.91_L0_Fab Light Chain

SEQ ID NO: 30060 - protein, 111 aa, Artificial Sequence; identical to SEQ ID NO: 17591
  Description of Artificial Sequence: Synthetic polypeptide
  VL of XENP021026

SEQ ID NO: 30061 - protein, 15 aa, Artificial Sequence
  Description of Artificial Sequence: Synthetic peptide
  XENP021026 vlCDR1
KASQSVDYDGDSYMN

SEQ ID NO: 30062 - protein, 7 aa, Artificial Sequence
  Description of Artificial Sequence: Synthetic peptide
  XENP021026 vlCDR2
AASNLES

SEQ ID NO: 30063 - protein, 9 aa, Artificial Sequence
  Description of Artificial Sequence: Synthetic peptide
  XENP021026 vlCDR3
QQSNEDPFT

SEQ ID NO: 30064 - protein, 226 aa, Artificial Sequence
  Description of Artificial Sequence: Synthetic polypeptide
  XENP021027 7G8_H0.92_L0_Fab Heavy Chain
EVKLEESGGGLVQPGGSMKLSCAASGFTFSDAWMDWVRQSPEKGLEWVAEIRTKANNHDTYYAESVKGRFTISRDDSKSSVYLQMNSLRAEDTGIYYCTRLANWDWYFDVWGAGTTVTVSSASTKGPSVFPLAPSSKSTSGGTAALGCLVKDYFPEPVTVSWNSGALTSGVHTFPAVLQSSGLYSLSSVVTVPSSSLGTQTYICNVNHKPSNTKVDKKVEPKSCGS

SEQ ID NO: 30065 - protein, 121 aa, Artificial Sequence; identical to SEQ ID NO: 19126
  Description of Artificial Sequence: Synthetic polypeptide
  VH of XENP021027

SEQ ID NO: 30066 - protein, 5 aa, Artificial Sequence
  Description of Artificial Sequence: Synthetic peptide
  XENP021027 vhCDR1
DAWMD

SEQ ID NO: 30067 - protein, 19 aa, Artificial Sequence
  Description of Artificial Sequence: Synthetic peptide
  XENP021027 vhCDR2
EIRTKANNHDTYYAESVKG

SEQ ID NO: 30068 - protein, 10 aa, Artificial Sequence
  Description of Artificial Sequence: Synthetic peptide
  XENP021027 vhCDR3
LANWDWYFDV

SEQ ID NO: 30069 - protein, 218 aa, Artificial Sequence; identical to SEQ ID NO: 17590
  Description of Artificial Sequence: Synthetic polypeptide
  XENP021027 7G8_H0.92_L0_Fab Light Chain

SEQ ID NO: 30070 - protein, 111 aa, Artificial Sequence; identical to SEQ ID NO: 17591
  Description of Artificial Sequence: Synthetic polypeptide
  VL of XENP021027

SEQ ID NO: 30071 - protein, 15 aa, Artificial Sequence
  Description of Artificial Sequence: Synthetic peptide
  XENP021027 vlCDR1
KASQSVDYDGDSYMN

SEQ ID NO: 30072 - protein, 7 aa, Artificial Sequence
  Description of Artificial Sequence: Synthetic peptide
  XENP021027 vlCDR2
AASNLES

SEQ ID NO: 30073 - protein, 9 aa, Artificial Sequence
  Description of Artificial Sequence: Synthetic peptide
  XENP021027 vlCDR3
QQSNEDPFT

SEQ ID NO: 30074 - protein, 226 aa, Artificial Sequence
  Description of Artificial Sequence: Synthetic polypeptide
  XENP021028 7G8_H0.93_L0_Fab Heavy Chain
EVKLEESGGGLVQPGGSMKLSCAASGFTFSDAWMDWVRQSPEKGLEWVAEIRTKANNHLTYYAESVKGRFTISRDDSKSSVYLQMNSLRAEDTGIYYCTRLANWDWYFDVWGAGTTVTVSSASTKGPSVFPLAPSSKSTSGGTAALGCLVKDYFPEPVTVSWNSGALTSGVHTFPAVLQSSGLYSLSSVVTVPSSSLGTQTYICNVNHKPSNTKVDKKVEPKSCGS

SEQ ID NO: 30075 - protein, 121 aa, Artificial Sequence; identical to SEQ ID NO: 19136
  Description of Artificial Sequence: Synthetic polypeptide
  VH of XENP021028

SEQ ID NO: 30076 - protein, 5 aa, Artificial Sequence
  Description of Artificial Sequence: Synthetic peptide
  XENP021028 vhCDR1
DAWMD

SEQ ID NO: 30077 - protein, 19 aa, Artificial Sequence
  Description of Artificial Sequence: Synthetic peptide
  XENP021028 vhCDR2
EIRTKANNHLTYYAESVKG

SEQ ID NO: 30078 - protein, 10 aa, Artificial Sequence
  Description of Artificial Sequence: Synthetic peptide
  XENP021028 vhCDR3
LANWDWYFDV

SEQ ID NO: 30079 - protein, 218 aa, Artificial Sequence; identical to SEQ ID NO: 17590
  Description of Artificial Sequence: Synthetic polypeptide
  XENP021028 7G8_H0.93_L0_Fab Light Chain

SEQ ID NO: 30080 - protein, 111 aa, Artificial Sequence; identical to SEQ ID NO: 17591
  Description of Artificial Sequence: Synthetic polypeptide
  VL of XENP021028

SEQ ID NO: 30081 - protein, 15 aa, Artificial Sequence
  Description of Artificial Sequence: Synthetic peptide
  XENP021028 vlCDR1
KASQSVDYDGDSYMN

SEQ ID NO: 30082 - protein, 7 aa, Artificial Sequence
  Description of Artificial Sequence: Synthetic peptide
  XENP021028 vlCDR2
AASNLES

SEQ ID NO: 30083 - protein, 9 aa, Artificial Sequence
  Description of Artificial Sequence: Synthetic peptide
  XENP021028 vlCDR3
QQSNEDPFT

SEQ ID NO: 30084 - protein, 226 aa, Artificial Sequence
  Description of Artificial Sequence: Synthetic polypeptide
  XENP021029 7G8_H0.94_L0_Fab Heavy Chain
EVKLEESGGGLVQPGGSMKLSCAASGFTFSDAWMDWVRQSPEKGLEWVAEIRTKANNHKTYYAESVKGRFTISRDDSKSSVYLQMNSLRAEDTGIYYCTRLANWDWYFDVWGAGTTVTVSSASTKGPSVFPLAPSSKSTSGGTAALGCLVKDYFPEPVTVSWNSGALTSGVHTFPAVLQSSGLYSLSSVVTVPSSSLGTQTYICNVNHKPSNTKVDKKVEPKSCGS

SEQ ID NO: 30085 - protein, 121 aa, Artificial Sequence; identical to SEQ ID NO: 19146
  Description of Artificial Sequence: Synthetic polypeptide
  VH of XENP021029

SEQ ID NO: 30086 - protein, 5 aa, Artificial Sequence
  Description of Artificial Sequence: Synthetic peptide
  XENP021029 vhCDR1
DAWMD

SEQ ID NO: 30087 - protein, 19 aa, Artificial Sequence
  Description of Artificial Sequence: Synthetic peptide
  XENP021029 vhCDR2
EIRTKANNHKTYYAESVKG

SEQ ID NO: 30088 - protein, 10 aa, Artificial Sequence
  Description of Artificial Sequence: Synthetic peptide
  XENP021029 vhCDR3
LANWDWYFDV

SEQ ID NO: 30089 - protein, 218 aa, Artificial Sequence; identical to SEQ ID NO: 17590
  Description of Artificial Sequence: Synthetic polypeptide
  XENP021029 7G8_H0.94_L0_Fab Light Chain

SEQ ID NO: 30090 - protein, 111 aa, Artificial Sequence; identical to SEQ ID NO: 17591
  Description of Artificial Sequence: Synthetic polypeptide
  VL of XENP021029

SEQ ID NO: 30091 - protein, 15 aa, Artificial Sequence
  Description of Artificial Sequence: Synthetic peptide
  XENP021029 vlCDR1
KASQSVDYDGDSYMN

SEQ ID NO: 30092 - protein, 7 aa, Artificial Sequence
  Description of Artificial Sequence: Synthetic peptide
  XENP021029 vlCDR2
AASNLES

SEQ ID NO: 30093 - protein, 9 aa, Artificial Sequence
  Description of Artificial Sequence: Synthetic peptide
  XENP021029 vlCDR3
QQSNEDPFT

SEQ ID NO: 30094 - protein, 226 aa, Artificial Sequence
  Description of Artificial Sequence: Synthetic polypeptide
  XENP021030 7G8_H0.95_L0_Fab Heavy Chain
EVKLEESGGGLVQPGGSMKLSCAASGFTFSDAWMDWVRQSPEKGLEWVAEIRTKANNHYTYYAESVKGRFTISRDDSKSSVYLQMNSLRAEDTGIYYCTRLANWDWYFDVWGAGTTVTVSSASTKGPSVFPLAPSSKSTSGGTAALGCLVKDYFPEPVTVSWNSGALTSGVHTFPAVLQSSGLYSLSSVVTVPSSSLGTQTYICNVNHKPSNTKVDKKVEPKSCGS

SEQ ID NO: 30095 - protein, 121 aa, Artificial Sequence; identical to SEQ ID NO: 19156
  Description of Artificial Sequence: Synthetic polypeptide
  VH of XENP021030

SEQ ID NO: 30096 - protein, 5 aa, Artificial Sequence
  Description of Artificial Sequence: Synthetic peptide
  XENP021030 vhCDR1
DAWMD

SEQ ID NO: 30097 - protein, 19 aa, Artificial Sequence
  Description of Artificial Sequence: Synthetic peptide
  XENP021030 vhCDR2
EIRTKANNHYTYYAESVKG

SEQ ID NO: 30098 - protein, 10 aa, Artificial Sequence
  Description of Artificial Sequence: Synthetic peptide
  XENP021030 vhCDR3
LANWDWYFDV

SEQ ID NO: 30099 - protein, 218 aa, Artificial Sequence; identical to SEQ ID NO: 17590
  Description of Artificial Sequence: Synthetic polypeptide
  XENP021030 7G8_H0.95_L0_Fab Light Chain

SEQ ID NO: 30100 - protein, 111 aa, Artificial Sequence; identical to SEQ ID NO: 17591
  Description of Artificial Sequence: Synthetic polypeptide
  VL of XENP021030

SEQ ID NO: 30101 - protein, 15 aa, Artificial Sequence
  Description of Artificial Sequence: Synthetic peptide
  XENP021030 vlCDR1
KASQSVDYDGDSYMN

SEQ ID NO: 30102 - protein, 7 aa, Artificial Sequence
  Description of Artificial Sequence: Synthetic peptide
  XENP021030 vlCDR2
AASNLES

SEQ ID NO: 30103 - protein, 9 aa, Artificial Sequence
  Description of Artificial Sequence: Synthetic peptide
  XENP021030 vlCDR3
QQSNEDPFT

SEQ ID NO: 30104 - protein, 226 aa, Artificial Sequence
  Description of Artificial Sequence: Synthetic polypeptide
  XENP021031 7G8_H0.96_L0_Fab Heavy Chain
EVKLEESGGGLVQPGGSMKLSCAASGFTFSDAWMDWVRQSPEKGLEWVAEIRTKANNHATFYAESVKGRFTISRDDSKSSVYLQMNSLRAEDTGIYYCTRLANWDWYFDVWGAGTTVTVSSASTKGPSVFPLAPSSKSTSGGTAALGCLVKDYFPEPVTVSWNSGALTSGVHTFPAVLQSSGLYSLSSVVTVPSSSLGTQTYICNVNHKPSNTKVDKKVEPKSCGS

SEQ ID NO: 30105 - protein, 121 aa, Artificial Sequence; identical to SEQ ID NO: 19166
  Description of Artificial Sequence: Synthetic polypeptide
  VH of XENP021031

SEQ ID NO: 30106 - protein, 5 aa, Artificial Sequence
  Description of Artificial Sequence: Synthetic peptide
  XENP021031 vhCDR1
DAWMD

SEQ ID NO: 30107 - protein, 19 aa, Artificial Sequence
  Description of Artificial Sequence: Synthetic peptide
  XENP021031 vhCDR2
EIRTKANNHATFYAESVKG

SEQ ID NO: 30108 - protein, 10 aa, Artificial Sequence
  Description of Artificial Sequence: Synthetic peptide
  XENP021031 vhCDR3
LANWDWYFDV

SEQ ID NO: 30109 - protein, 218 aa, Artificial Sequence; identical to SEQ ID NO: 17590
  Description of Artificial Sequence: Synthetic polypeptide
  XENP021031 7G8_H0.96_L0_Fab Light Chain

SEQ ID NO: 30110 - protein, 111 aa, Artificial Sequence; identical to SEQ ID NO: 17591
  Description of Artificial Sequence: Synthetic polypeptide
  VL of XENP021031

SEQ ID NO: 30111 - protein, 15 aa, Artificial Sequence
  Description of Artificial Sequence: Synthetic peptide
  XENP021031 vlCDR1
KASQSVDYDGDSYMN

SEQ ID NO: 30112 - protein, 7 aa, Artificial Sequence
  Description of Artificial Sequence: Synthetic peptide
  XENP021031 vlCDR2
AASNLES

SEQ ID NO: 30113 - protein, 9 aa, Artificial Sequence
  Description of Artificial Sequence: Synthetic peptide
  XENP021031 vlCDR3
QQSNEDPFT

SEQ ID NO: 30114 - protein, 226 aa, Artificial Sequence
  Description of Artificial Sequence: Synthetic polypeptide
  XENP021032 7G8_H0.97_L0_Fab Heavy Chain
EVKLEESGGGLVQPGGSMKLSCAASGFTFSDAWMDWVRQSPEKGLEWVAEIRTKANNHATHYAESVKGRFTISRDDSKSSVYLQMNSLRAEDTGIYYCTRLANWDWYFDVWGAGTTVTVSSASTKGPSVFPLAPSSKSTSGGTAALGCLVKDYFPEPVTVSWNSGALTSGVHTFPAVLQSSGLYSLSSVVTVPSSSLGTQTYICNVNHKPSNTKVDKKVEPKSCGS

SEQ ID NO: 30115 - protein, 121 aa, Artificial Sequence; identical to SEQ ID NO: 19176
  Description of Artificial Sequence: Synthetic polypeptide
  VH of XENP021032

SEQ ID NO: 30116 - protein, 5 aa, Artificial Sequence
  Description of Artificial Sequence: Synthetic peptide
  XENP021032 vhCDR1
DAWMD

SEQ ID NO: 30117 - protein, 19 aa, Artificial Sequence
  Description of Artificial Sequence: Synthetic peptide
  XENP021032 vhCDR2
EIRTKANNHATHYAESVKG

SEQ ID NO: 30118 - protein, 10 aa, Artificial Sequence
  Description of Artificial Sequence: Synthetic peptide
  XENP021032 vhCDR3
LANWDWYFDV

SEQ ID NO: 30119 - protein, 218 aa, Artificial Sequence; identical to SEQ ID NO: 17590
  Description of Artificial Sequence: Synthetic polypeptide
  XENP021032 7G8_H0.97_L0_Fab Light Chain

SEQ ID NO: 30120 - protein, 111 aa, Artificial Sequence; identical to SEQ ID NO: 17591
  Description of Artificial Sequence: Synthetic polypeptide
  VL of XENP021032

SEQ ID NO: 30121 - protein, 15 aa, Artificial Sequence
  Description of Artificial Sequence: Synthetic peptide
  XENP021032 vlCDR1
KASQSVDYDGDSYMN

SEQ ID NO: 30122 - protein, 7 aa, Artificial Sequence
  Description of Artificial Sequence: Synthetic peptide
  XENP021032 vlCDR2
AASNLES

SEQ ID NO: 30123 - protein, 9 aa, Artificial Sequence
  Description of Artificial Sequence: Synthetic peptide
  XENP021032 vlCDR3
QQSNEDPFT

SEQ ID NO: 30124 - protein, 226 aa, Artificial Sequence
  Description of Artificial Sequence: Synthetic polypeptide
  XENP021033 7G8_H0.98_L0_Fab Heavy Chain
EVKLEESGGGLVQPGGSMKLSCAASGFTFSDAWMDWVRQSPEKGLEWVAEIRTKANNHATLYAESVKGRFTISRDDSKSSVYLQMNSLRAEDTGIYYCTRLANWDWYFDVWGAGTTVTVSSASTKGPSVFPLAPSSKSTSGGTAALGCLVKDYFPEPVTVSWNSGALTSGVHTFPAVLQSSGLYSLSSVVTVPSSSLGTQTYICNVNHKPSNTKVDKKVEPKSCGS

SEQ ID NO: 30125 - protein, 121 aa, Artificial Sequence; identical to SEQ ID NO: 19186
  Description of Artificial Sequence: Synthetic polypeptide
  VH of XENP021033

SEQ ID NO: 30126 - protein, 5 aa, Artificial Sequence
  Description of Artificial Sequence: Synthetic peptide
  XENP021033 vhCDR1
DAWMD

SEQ ID NO: 30127 - protein, 19 aa, Artificial Sequence
  Description of Artificial Sequence: Synthetic peptide
  XENP021033 vhCDR2
EIRTKANNHATLYAESVKG

SEQ ID NO: 30128 - protein, 10 aa, Artificial Sequence
  Description of Artificial Sequence: Synthetic peptide
  XENP021033 vhCDR3
LANWDWYFDV

SEQ ID NO: 30129 - protein, 218 aa, Artificial Sequence; identical to SEQ ID NO: 17590
  Description of Artificial Sequence: Synthetic polypeptide
  XENP021033 7G8_H0.98_L0_Fab Light Chain

SEQ ID NO: 30130 - protein, 111 aa, Artificial Sequence; identical to SEQ ID NO: 17591
  Description of Artificial Sequence: Synthetic polypeptide
  VL of XENP021033

SEQ ID NO: 30131 - protein, 15 aa, Artificial Sequence
  Description of Artificial Sequence: Synthetic peptide
  XENP021033 vlCDR1
KASQSVDYDGDSYMN

SEQ ID NO: 30132 - protein, 7 aa, Artificial Sequence
  Description of Artificial Sequence: Synthetic peptide
  XENP021033 vlCDR2
AASNLES

SEQ ID NO: 30133 - protein, 9 aa, Artificial Sequence
  Description of Artificial Sequence: Synthetic peptide
  XENP021033 vlCDR3
QQSNEDPFT

SEQ ID NO: 30134 - protein, 226 aa, Artificial Sequence
  Description of Artificial Sequence: Synthetic polypeptide
  XENP021034 7G8_H0.99_L0_Fab Heavy Chain
EVKLEESGGGLVQPGGSMKLSCAASGFTFSDAWMDWVRQSPEKGLEWVAEIRTKANNHATWYAESVKGRFTISRDDSKSSVYLQMNSLRAEDTGIYYCTRLANWDWYFDVWGAGTTVTVSSASTKGPSVFPLAPSSKSTSGGTAALGCLVKDYFPEPVTVSWNSGALTSGVHTFPAVLQSSGLYSLSSVVTVPSSSLGTQTYICNVNHKPSNTKVDKKVEPKSCGS

SEQ ID NO: 30135 - protein, 121 aa, Artificial Sequence; identical to SEQ ID NO: 19196
  Description of Artificial Sequence: Synthetic polypeptide
  VH of XENP021034

SEQ ID NO: 30136 - protein, 5 aa, Artificial Sequence
  Description of Artificial Sequence: Synthetic peptide
  XENP021034 vhCDR1
DAWMD

SEQ ID NO: 30137 - protein, 19 aa, Artificial Sequence
  Description of Artificial Sequence: Synthetic peptide
  XENP021034 vhCDR2
EIRTKANNHATWYAESVKG

SEQ ID NO: 30138 - protein, 10 aa, Artificial Sequence
  Description of Artificial Sequence: Synthetic peptide
  XENP021034 vhCDR3
LANWDWYFDV

SEQ ID NO: 30139 - protein, 218 aa, Artificial Sequence; identical to SEQ ID NO: 17590
  Description of Artificial Sequence: Synthetic polypeptide
  XENP021034 7G8_H0.99_L0_Fab Light Chain

SEQ ID NO: 30140 - protein, 111 aa, Artificial Sequence; identical to SEQ ID NO: 17591
  Description of Artificial Sequence: Synthetic polypeptide
  VL of XENP021034

SEQ ID NO: 30141 - protein, 15 aa, Artificial Sequence
  Description of Artificial Sequence: Synthetic peptide
  XENP021034 vlCDR1
KASQSVDYDGDSYMN

SEQ ID NO: 30142 - protein, 7 aa, Artificial Sequence
  Description of Artificial Sequence: Synthetic peptide
  XENP021034 vlCDR2
AASNLES

SEQ ID NO: 30143 - protein, 9 aa, Artificial Sequence
  Description of Artificial Sequence: Synthetic peptide
  XENP021034 vlCDR3
QQSNEDPFT

SEQ ID NO: 30144 - protein, 226 aa, Artificial Sequence
  Description of Artificial Sequence: Synthetic polypeptide
  XENP021035 7G8_H0.100_L0_Fab Heavy Chain
EVKLEESGGGLVQPGGSMKLSCAASGFTFSDAWMDWVRQSPEKGLEWVAEIRTKANNHATVYAESVKGRFTISRDDSKSSVYLQMNSLRAEDTGIYYCTRLANWDWYFDVWGAGTTVTVSSASTKGPSVFPLAPSSKSTSGGTAALGCLVKDYFPEPVTVSWNSGALTSGVHTFPAVLQSSGLYSLSSVVTVPSSSLGTQTYICNVNHKPSNTKVDKKVEPKSCGS

SEQ ID NO: 30145 - protein, 121 aa, Artificial Sequence; identical to SEQ ID NO: 19206
  Description of Artificial Sequence: Synthetic polypeptide
  VH of XENP021035

SEQ ID NO: 30146 - protein, 5 aa, Artificial Sequence
  Description of Artificial Sequence: Synthetic peptide
  XENP021035 vhCDR1
DAWMD

SEQ ID NO: 30147 - protein, 19 aa, Artificial Sequence
  Description of Artificial Sequence: Synthetic peptide
  XENP021035 vhCDR2
EIRTKANNHATVYAESVKG

SEQ ID NO: 30148 - protein, 10 aa, Artificial Sequence
  Description of Artificial Sequence: Synthetic peptide
  XENP021035 vhCDR3
LANWDWYFDV

SEQ ID NO: 30149 - protein, 218 aa, Artificial Sequence; identical to SEQ ID NO: 17590
  Description of Artificial Sequence: Synthetic polypeptide
  XENP021035 7G8_H0.100_L0_Fab Light Chain

SEQ ID NO: 30150 - protein, 111 aa, Artificial Sequence; identical to SEQ ID NO: 17591
  Description of Artificial Sequence: Synthetic polypeptide
  VL of XENP021035

SEQ ID NO: 30151 - protein, 15 aa, Artificial Sequence
  Description of Artificial Sequence: Synthetic peptide
  XENP021035 vlCDR1
KASQSVDYDGDSYMN

SEQ ID NO: 30152 - protein, 7 aa, Artificial Sequence
  Description of Artificial Sequence: Synthetic peptide
  XENP021035 vlCDR2
AASNLES

SEQ ID NO: 30153 - protein, 9 aa, Artificial Sequence
  Description of Artificial Sequence: Synthetic peptide
  XENP021035 vlCDR3
QQSNEDPFT

SEQ ID NO: 30154 - protein, 226 aa, Artificial Sequence
  Description of Artificial Sequence: Synthetic polypeptide
  XENP021036 7G8_H0.101_L0_Fab Heavy Chain
EVKLEESGGGLVQPGGSMKLSCAASGFTFSDAWMDWVRQSPEKGLEWVAEIRTKANNHATAYAESVKGRFTISRDDSKSSVYLQMNSLRAEDTGIYYCTRLANWDWYFDVWGAGTTVTVSSASTKGPSVFPLAPSSKSTSGGTAALGCLVKDYFPEPVTVSWNSGALTSGVHTFPAVLQSSGLYSLSSVVTVPSSSLGTQTYICNVNHKPSNTKVDKKVEPKSCGS

SEQ ID NO: 30155 - protein, 121 aa, Artificial Sequence; identical to SEQ ID NO: 19216
  Description of Artificial Sequence: Synthetic polypeptide
  VH of XENP021036

SEQ ID NO: 30156 - protein, 5 aa, Artificial Sequence
  Description of Artificial Sequence: Synthetic peptide
  XENP021036 vhCDR1
DAWMD

SEQ ID NO: 30157 - protein, 19 aa, Artificial Sequence
  Description of Artificial Sequence: Synthetic peptide
  XENP021036 vhCDR2
EIRTKANNHATAYAESVKG

SEQ ID NO: 30158 - protein, 10 aa, Artificial Sequence
  Description of Artificial Sequence: Synthetic peptide
  XENP021036 vhCDR3
LANWDWYFDV

SEQ ID NO: 30159 - protein, 218 aa, Artificial Sequence; identical to SEQ ID NO: 17590
  Description of Artificial Sequence: Synthetic polypeptide
  XENP021036 7G8_H0.101_L0_Fab Light Chain

SEQ ID NO: 30160 - protein, 111 aa, Artificial Sequence; identical to SEQ ID NO: 17591
  Description of Artificial Sequence: Synthetic polypeptide
  VL of XENP021036

SEQ ID NO: 30161 - protein, 15 aa, Artificial Sequence
  Description of Artificial Sequence: Synthetic peptide
  XENP021036 vlCDR1
KASQSVDYDGDSYMN

SEQ ID NO: 30162 - protein, 7 aa, Artificial Sequence
  Description of Artificial Sequence: Synthetic peptide
  XENP021036 vlCDR2
AASNLES

SEQ ID NO: 30163 - protein, 9 aa, Artificial Sequence
  Description of Artificial Sequence: Synthetic peptide
  XENP021036 vlCDR3
QQSNEDPFT

SEQ ID NO: 30164 - protein, 226 aa, Artificial Sequence
  Description of Artificial Sequence: Synthetic polypeptide
  XENP021037 7G8_H0.102_L0_Fab Heavy Chain
EVKLEESGGGLVQPGGSMKLSCAASGFTFSDAWMDWVRQSPEKGLEWVAEIRTKANNHATQYAESVKGRFTISRDDSKSSVYLQMNSLRAEDTGIYYCTRLANWDWYFDVWGAGTTVTVSSASTKGPSVFPLAPSSKSTSGGTAALGCLVKDYFPEPVTVSWNSGALTSGVHTFPAVLQSSGLYSLSSVVTVPSSSLGTQTYICNVNHKPSNTKVDKKVEPKSCGS

SEQ ID NO: 30165 - protein, 121 aa, Artificial Sequence; identical to SEQ ID NO: 19226
  Description of Artificial Sequence: Synthetic polypeptide
  VH of XENP021037

SEQ ID NO: 30166 - protein, 5 aa, Artificial Sequence
  Description of Artificial Sequence: Synthetic peptide
  XENP021037 vhCDR1
DAWMD

SEQ ID NO: 30167 - protein, 19 aa, Artificial Sequence
  Description of Artificial Sequence: Synthetic peptide
  XENP021037 vhCDR2
EIRTKANNHATQYAESVKG

SEQ ID NO: 30168 - protein, 10 aa, Artificial Sequence
  Description of Artificial Sequence: Synthetic peptide
  XENP021037 vhCDR3
LANWDWYFDV

SEQ ID NO: 30169 - protein, 218 aa, Artificial Sequence; identical to SEQ ID NO: 17590
  Description of Artificial Sequence: Synthetic polypeptide
  XENP021037 7G8_H0.102_L0_Fab Light Chain

SEQ ID NO: 30170 - protein, 111 aa, Artificial Sequence; identical to SEQ ID NO: 17591
  Description of Artificial Sequence: Synthetic polypeptide
  VL of XENP021037

SEQ ID NO: 30171 - protein, 15 aa, Artificial Sequence
  Description of Artificial Sequence: Synthetic peptide
  XENP021037 vlCDR1
KASQSVDYDGDSYMN

SEQ ID NO: 30172 - protein, 7 aa, Artificial Sequence
  Description of Artificial Sequence: Synthetic peptide
  XENP021037 vlCDR2
AASNLES

SEQ ID NO: 30173 - protein, 9 aa, Artificial Sequence
  Description of Artificial Sequence: Synthetic peptide
  XENP021037 vlCDR3
QQSNEDPFT

SEQ ID NO: 30174 - protein, 226 aa, Artificial Sequence
  Description of Artificial Sequence: Synthetic polypeptide
  XENP021038 7G8_H0.103_L0_Fab Heavy Chain
EVKLEESGGGLVQPGGSMKLSCAASGFTFSDAWMDWVRQSPEKGLEWVAEIRTKANNHATDYAESVKGRFTISRDDSKSSVYLQMNSLRAEDTGIYYCTRLANWDWYFDVWGAGTTVTVSSASTKGPSVFPLAPSSKSTSGGTAALGCLVKDYFPEPVTVSWNSGALTSGVHTFPAVLQSSGLYSLSSVVTVPSSSLGTQTYICNVNHKPSNTKVDKKVEPKSCGS

SEQ ID NO: 30175 - protein, 121 aa, Artificial Sequence; identical to SEQ ID NO: 19236
  Description of Artificial Sequence: Synthetic polypeptide
  VH of XENP021038

SEQ ID NO: 30176 - protein, 5 aa, Artificial Sequence
  Description of Artificial Sequence: Synthetic peptide
  XENP021038 vhCDR1
DAWMD

SEQ ID NO: 30177 - protein, 19 aa, Artificial Sequence
  Description of Artificial Sequence: Synthetic peptide
  XENP021038 vhCDR2
EIRTKANNHATDYAESVKG

SEQ ID NO: 30178 - protein, 10 aa, Artificial Sequence
  Description of Artificial Sequence: Synthetic peptide
  XENP021038 vhCDR3
LANWDWYFDV

SEQ ID NO: 30179 - protein, 218 aa, Artificial Sequence; identical to SEQ ID NO: 17590
  Description of Artificial Sequence: Synthetic polypeptide
  XENP021038 7G8_H0.103_L0_Fab Light Chain

SEQ ID NO: 30180 - protein, 111 aa, Artificial Sequence; identical to SEQ ID NO: 17591
  Description of Artificial Sequence: Synthetic polypeptide
  VL of XENP021038

SEQ ID NO: 30181 - protein, 15 aa, Artificial Sequence
  Description of Artificial Sequence: Synthetic peptide
  XENP021038 vlCDR1
KASQSVDYDGDSYMN

SEQ ID NO: 30182 - protein, 7 aa, Artificial Sequence
  Description of Artificial Sequence: Synthetic peptide
  XENP021038 vlCDR2
AASNLES

SEQ ID NO: 30183 - protein, 9 aa, Artificial Sequence
  Description of Artificial Sequence: Synthetic peptide
  XENP021038 vlCDR3
QQSNEDPFT

SEQ ID NO: 30184 - protein, 226 aa, Artificial Sequence
  Description of Artificial Sequence: Synthetic polypeptide
  XENP021039 7G8_H0.104_L0_Fab Heavy Chain
EVKLEESGGGLVQPGGSMKLSCAASGFTFSDAWMDWVRQSPEKGLEWVAEIRTKANNHATKYAESVKGRFTISRDDSKSSVYLQMNSLRAEDTGIYYCTRLANWDWYFDVWGAGTTVTVSSASTKGPSVFPLAPSSKSTSGGTAALGCLVKDYFPEPVTVSWNSGALTSGVHTFPAVLQSSGLYSLSSVVTVPSSSLGTQTYICNVNHKPSNTKVDKKVEPKSCGS

SEQ ID NO: 30185 - protein, 121 aa, Artificial Sequence; identical to SEQ ID NO: 19246
  Description of Artificial Sequence: Synthetic polypeptide
  VH of XENP021039

SEQ ID NO: 30186 - protein, 5 aa, Artificial Sequence
  Description of Artificial Sequence: Synthetic peptide
  XENP021039 vhCDR1
DAWMD

SEQ ID NO: 30187 - protein, 19 aa, Artificial Sequence
  Description of Artificial Sequence: Synthetic peptide
  XENP021039 vhCDR2
EIRTKANNHATKYAESVKG

SEQ ID NO: 30188 - protein, 10 aa, Artificial Sequence
  Description of Artificial Sequence: Synthetic peptide
  XENP021039 vhCDR3
LANWDWYFDV

SEQ ID NO: 30189 - protein, 218 aa, Artificial Sequence; identical to SEQ ID NO: 17590
  Description of Artificial Sequence: Synthetic polypeptide
  XENP021039 7G8_H0.104_L0_Fab Light Chain

SEQ ID NO: 30190 - protein, 111 aa, Artificial Sequence; identical to SEQ ID NO: 17591
  Description of Artificial Sequence: Synthetic polypeptide
  VL of XENP021039

SEQ ID NO: 30191 - protein, 15 aa, Artificial Sequence
  Description of Artificial Sequence: Synthetic peptide
  XENP021039 vlCDR1
KASQSVDYDGDSYMN

SEQ ID NO: 30192 - protein, 7 aa, Artificial Sequence
  Description of Artificial Sequence: Synthetic peptide
  XENP021039 vlCDR2
AASNLES

SEQ ID NO: 30193 - protein, 9 aa, Artificial Sequence
  Description of Artificial Sequence: Synthetic peptide
  XENP021039 vlCDR3
QQSNEDPFT

SEQ ID NO: 30194 - protein, 226 aa, Artificial Sequence
  Description of Artificial Sequence: Synthetic polypeptide
  XENP021040 7G8_H0.105_L0_Fab Heavy Chain
EVKLEESGGGLVQPGGSMKLSCAASGFTFSDAWMDWVRQSPEKGLEWVAEIRTKANNHATYYAESVKGRFTISRDDSKSSVYLQMNSLRAEDTGIYYCTRIANWDWYFDVWGAGTTVTVSSASTKGPSVFPLAPSSKSTSGGTAALGCLVKDYFPEPVTVSWNSGALTSGVHTFPAVLQSSGLYSLSSVVTVPSSSLGTQTYICNVNHKPSNTKVDKKVEPKSCGS

SEQ ID NO: 30195 - protein, 121 aa, Artificial Sequence; identical to SEQ ID NO: 19256
  Description of Artificial Sequence: Synthetic polypeptide
  VH of XENP021040

SEQ ID NO: 30196 - protein, 5 aa, Artificial Sequence
  Description of Artificial Sequence: Synthetic peptide
  XENP021040 vhCDR1
DAWMD

SEQ ID NO: 30197 - protein, 19 aa, Artificial Sequence
  Description of Artificial Sequence: Synthetic peptide
  XENP021040 vhCDR2
EIRTKANNHATYYAESVKG

SEQ ID NO: 30198 - protein, 10 aa, Artificial Sequence
  Description of Artificial Sequence: Synthetic peptide
  XENP021040 vhCDR3
IANWDWYFDV

SEQ ID NO: 30199 - protein, 218 aa, Artificial Sequence; identical to SEQ ID NO: 17590
  Description of Artificial Sequence: Synthetic polypeptide
  XENP021040 7G8_H0.105_L0_Fab Light Chain

SEQ ID NO: 30200 - protein, 111 aa, Artificial Sequence; identical to SEQ ID NO: 17591
  Description of Artificial Sequence: Synthetic polypeptide
  VL of XENP021040

SEQ ID NO: 30201 - protein, 15 aa, Artificial Sequence
  Description of Artificial Sequence: Synthetic peptide
  XENP021040 vlCDR1
KASQSVDYDGDSYMN

SEQ ID NO: 30202 - protein, 7 aa, Artificial Sequence
  Description of Artificial Sequence: Synthetic peptide
  XENP021040 vlCDR2
AASNLES

SEQ ID NO: 30203 - protein, 9 aa, Artificial Sequence
  Description of Artificial Sequence: Synthetic peptide
  XENP021040 vlCDR3
QQSNEDPFT

SEQ ID NO: 30204 - protein, 226 aa, Artificial Sequence
  Description of Artificial Sequence: Synthetic polypeptide
  XENP021041 7G8_H0.106_L0_Fab Heavy Chain
EVKLEESGGGLVQPGGSMKLSCAASGFTFSDAWMDWVRQSPEKGLEWVAEIRTKANNHATYYAESVKGRFTISRDDSKSSVYLQMNSLRAEDTGIYYCTRFANWDWYFDVWGAGTTVTVSSASTKGPSVFPLAPSSKSTSGGTAALGCLVKDYFPEPVTVSWNSGALTSGVHTFPAVLQSSGLYSLSSVVTVPSSSLGTQTYICNVNHKPSNTKVDKKVEPKSCGS

SEQ ID NO: 30205 - protein, 121 aa, Artificial Sequence; identical to SEQ ID NO: 19266
  Description of Artificial Sequence: Synthetic polypeptide
  VH of XENP021041

SEQ ID NO: 30206 - protein, 5 aa, Artificial Sequence
  Description of Artificial Sequence: Synthetic peptide
  XENP021041 vhCDR1
DAWMD

SEQ ID NO: 30207 - protein, 19 aa, Artificial Sequence
  Description of Artificial Sequence: Synthetic peptide
  XENP021041 vhCDR2
EIRTKANNHATYYAESVKG

SEQ ID NO: 30208 - protein, 10 aa, Artificial Sequence
  Description of Artificial Sequence: Synthetic peptide
  XENP021041 vhCDR3
FANWDWYFDV

SEQ ID NO: 30209 - protein, 218 aa, Artificial Sequence; identical to SEQ ID NO: 17590
  Description of Artificial Sequence: Synthetic polypeptide
  XENP021041 7G8_H0.106_L0_Fab Light Chain

SEQ ID NO: 30210 - protein, 111 aa, Artificial Sequence; identical to SEQ ID NO: 17591
  Description of Artificial Sequence: Synthetic polypeptide
  VL of XENP021041

SEQ ID NO: 30211 - protein, 15 aa, Artificial Sequence
  Description of Artificial Sequence: Synthetic peptide
  XENP021041 vlCDR1
KASQSVDYDGDSYMN

SEQ ID NO: 30212 - protein, 7 aa, Artificial Sequence
  Description of Artificial Sequence: Synthetic peptide
  XENP021041 vlCDR2
AASNLES

SEQ ID NO: 30213 - protein, 9 aa, Artificial Sequence
  Description of Artificial Sequence: Synthetic peptide
  XENP021041 vlCDR3
QQSNEDPFT

SEQ ID NO: 30214 - protein, 226 aa, Artificial Sequence
  Description of Artificial Sequence: Synthetic polypeptide
  XENP021042 7G8_H0.107_L0_Fab Heavy Chain
EVKLEESGGGLVQPGGSMKLSCAASGFTFSDAWMDWVRQSPEKGLEWVAEIRTKANNHATYYAESVKGRFTISRDDSKSSVYLQMNSLRAEDTGIYYCTRVANWDWYFDVWGAGTTVTVSSASTKGPSVFPLAPSSKSTSGGTAALGCLVKDYFPEPVTVSWNSGALTSGVHTFPAVLQSSGLYSLSSVVTVPSSSLGTQTYICNVNHKPSNTKVDKKVEPKSCGS

SEQ ID NO: 30215 - protein, 121 aa, Artificial Sequence; identical to SEQ ID NO: 19276
  Description of Artificial Sequence: Synthetic polypeptide
  VH of XENP021042

SEQ ID NO: 30216 - protein, 5 aa, Artificial Sequence
  Description of Artificial Sequence: Synthetic peptide
  XENP021042 vhCDR1
DAWMD

SEQ ID NO: 30217 - protein, 19 aa, Artificial Sequence
  Description of Artificial Sequence: Synthetic peptide
  XENP021042 vhCDR2
EIRTKANNHATYYAESVKG

SEQ ID NO: 30218 - protein, 10 aa, Artificial Sequence
  Description of Artificial Sequence: Synthetic peptide
  XENP021042 vhCDR3
VANWDWYFDV

SEQ ID NO: 30219 - protein, 218 aa, Artificial Sequence; identical to SEQ ID NO: 17590
  Description of Artificial Sequence: Synthetic polypeptide
  XENP021042 7G8_H0.107_L0_Fab Light Chain

SEQ ID NO: 30220 - protein, 111 aa, Artificial Sequence; identical to SEQ ID NO: 17591
  Description of Artificial Sequence: Synthetic polypeptide
  VL of XENP021042

SEQ ID NO: 30221 - protein, 15 aa, Artificial Sequence
  Description of Artificial Sequence: Synthetic peptide
  XENP021042 vlCDR1
KASQSVDYDGDSYMN

SEQ ID NO: 30222 - protein, 7 aa, Artificial Sequence
  Description of Artificial Sequence: Synthetic peptide
  XENP021042 vlCDR2
AASNLES

SEQ ID NO: 30223 - protein, 9 aa, Artificial Sequence
  Description of Artificial Sequence: Synthetic peptide
  XENP021042 vlCDR3
QQSNEDPFT

SEQ ID NO: 30224 - protein, 226 aa, Artificial Sequence
  Description of Artificial Sequence: Synthetic polypeptide
  XENP021043 7G8_H0.110_L0_Fab Heavy Chain
EVKLEESGGGLVQPGGSMKLSCAASGFTFSDAWMDWVRQSPEKGLEWVAEIRTKANNHATYYAESVKGRFTISRDDSKSSVYLQMNSLRAEDTGIYYCTRDANWDWYFDVWGAGTTVTVSSASTKGPSVFPLAPSSKSTSGGTAALGCLVKDYFPEPVTVSWNSGALTSGVHTFPAVLQSSGLYSLSSVVTVPSSSLGTQTYICNVNHKPSNTKVDKKVEPKSCGS

SEQ ID NO: 30225 - protein, 121 aa, Artificial Sequence; identical to SEQ ID NO: 19306
  Description of Artificial Sequence: Synthetic polypeptide
  VH of XENP021043

SEQ ID NO: 30226 - protein, 5 aa, Artificial Sequence
  Description of Artificial Sequence: Synthetic peptide
  XENP021043 vhCDR1
DAWMD

SEQ ID NO: 30227 - protein, 19 aa, Artificial Sequence
  Description of Artificial Sequence: Synthetic peptide
  XENP021043 vhCDR2
EIRTKANNHATYYAESVKG

SEQ ID NO: 30228 - protein, 10 aa, Artificial Sequence
  Description of Artificial Sequence: Synthetic peptide
  XENP021043 vhCDR3
DANWDWYFDV

SEQ ID NO: 30229 - protein, 218 aa, Artificial Sequence; identical to SEQ ID NO: 17590
  Description of Artificial Sequence: Synthetic polypeptide
  XENP021043 7G8_H0.110_L0_Fab Light Chain

SEQ ID NO: 30230 - protein, 111 aa, Artificial Sequence; identical to SEQ ID NO: 17591
  Description of Artificial Sequence: Synthetic polypeptide
  VL of XENP021043

SEQ ID NO: 30231 - protein, 15 aa, Artificial Sequence
  Description of Artificial Sequence: Synthetic peptide
  XENP021043 vlCDR1
KASQSVDYDGDSYMN

SEQ ID NO: 30232 - protein, 7 aa, Artificial Sequence
  Description of Artificial Sequence: Synthetic peptide
  XENP021043 vlCDR2
AASNLES

SEQ ID NO: 30233 - protein, 9 aa, Artificial Sequence
  Description of Artificial Sequence: Synthetic peptide
  XENP021043 vlCDR3
QQSNEDPFT

SEQ ID NO: 30234 - protein, 226 aa, Artificial Sequence
  Description of Artificial Sequence: Synthetic polypeptide
  XENP021044 7G8_H0.111_L0_Fab Heavy Chain
EVKLEESGGGLVQPGGSMKLSCAASGFTFSDAWMDWVRQSPEKGLEWVAEIRTKANNHATYYAESVKGRFTISRDDSKSSVYLQMNSLRAEDTGIYYCTRAANWDWYFDVWGAGTTVTVSSASTKGPSVFPLAPSSKSTSGGTAALGCLVKDYFPEPVTVSWNSGALTSGVHTFPAVLQSSGLYSLSSVVTVPSSSLGTQTYICNVNHKPSNTKVDKKVEPKSCGS

SEQ ID NO: 30235 - protein, 121 aa, Artificial Sequence; identical to SEQ ID NO: 19316
  Description of Artificial Sequence: Synthetic polypeptide
  VH of XENP021044

SEQ ID NO: 30236 - protein, 5 aa, Artificial Sequence
  Description of Artificial Sequence: Synthetic peptide
  XENP021044 vhCDR1
DAWMD

SEQ ID NO: 30237 - protein, 19 aa, Artificial Sequence
  Description of Artificial Sequence: Synthetic peptide
  XENP021044 vhCDR2
EIRTKANNHATYYAESVKG

SEQ ID NO: 30238 - protein, 10 aa, Artificial Sequence
  Description of Artificial Sequence: Synthetic peptide
  XENP021044 vhCDR3
AANWDWYFDV

SEQ ID NO: 30239 - protein, 218 aa, Artificial Sequence; identical to SEQ ID NO: 17590
  Description of Artificial Sequence: Synthetic polypeptide
  XENP021044 7G8_H0.111_L0_Fab Light Chain

SEQ ID NO: 30240 - protein, 111 aa, Artificial Sequence; identical to SEQ ID NO: 17591
  Description of Artificial Sequence: Synthetic polypeptide
  VL of XENP021044

SEQ ID NO: 30241 - protein, 15 aa, Artificial Sequence
  Description of Artificial Sequence: Synthetic peptide
  XENP021044 vlCDR1
KASQSVDYDGDSYMN

SEQ ID NO: 30242 - protein, 7 aa, Artificial Sequence
  Description of Artificial Sequence: Synthetic peptide
  XENP021044 vlCDR2
AASNLES

SEQ ID NO: 30243 - protein, 9 aa, Artificial Sequence
  Description of Artificial Sequence: Synthetic peptide
  XENP021044 vlCDR3
QQSNEDPFT

SEQ ID NO: 30244 - protein, 226 aa, Artificial Sequence
  Description of Artificial Sequence: Synthetic polypeptide
  XENP021045 7G8_H0.112_L0_Fab Heavy Chain
EVKLEESGGGLVQPGGSMKLSCAASGFTFSDAWMDWVRQSPEKGLEWVAEIRTKANNHATYYAESVKGRFTISRDDSKSSVYLQMNSLRAEDTGIYYCTRQANWDWYFDVWGAGTTVTVSSASTKGPSVFPLAPSSKSTSGGTAALGCLVKDYFPEPVTVSWNSGALTSGVHTFPAVLQSSGLYSLSSVVTVPSSSLGTQTYICNVNHKPSNTKVDKKVEPKSCGS

SEQ ID NO: 30245 - protein, 121 aa, Artificial Sequence; identical to SEQ ID NO: 19326
  Description of Artificial Sequence: Synthetic polypeptide
  VH of XENP021045

SEQ ID NO: 30246 - protein, 5 aa, Artificial Sequence
  Description of Artificial Sequence: Synthetic peptide
  XENP021045 vhCDR1
DAWMD

SEQ ID NO: 30247 - protein, 19 aa, Artificial Sequence
  Description of Artificial Sequence: Synthetic peptide
  XENP021045 vhCDR2
EIRTKANNHATYYAESVKG

SEQ ID NO: 30248 - protein, 10 aa, Artificial Sequence
  Description of Artificial Sequence: Synthetic peptide
  XENP021045 vhCDR3
QANWDWYFDV

SEQ ID NO: 30249 - protein, 218 aa, Artificial Sequence; identical to SEQ ID NO: 17590
  Description of Artificial Sequence: Synthetic polypeptide
  XENP021045 7G8_H0.112_L0_Fab Light Chain

SEQ ID NO: 30250 - protein, 111 aa, Artificial Sequence; identical to SEQ ID NO: 17591
  Description of Artificial Sequence: Synthetic polypeptide
  VL of XENP021045

SEQ ID NO: 30251 - protein, 15 aa, Artificial Sequence
  Description of Artificial Sequence: Synthetic peptide
  XENP021045 vlCDR1
KASQSVDYDGDSYMN

SEQ ID NO: 30252 - protein, 7 aa, Artificial Sequence
  Description of Artificial Sequence: Synthetic peptide
  XENP021045 vlCDR2
AASNLES

SEQ ID NO: 30253 - protein, 9 aa, Artificial Sequence
  Description of Artificial Sequence: Synthetic peptide
  XENP021045 vlCDR3
QQSNEDPFT

SEQ ID NO: 30254 - protein, 226 aa, Artificial Sequence
  Description of Artificial Sequence: Synthetic polypeptide
  XENP021046 7G8_H0.114_L0_Fab Heavy Chain
EVKLEESGGGLVQPGGSMKLSCAASGFTFSDAWMDWVRQSPEKGLEWVAEIRTKANNHATYYAESVKGRFTISRDDSKSSVYLQMNSLRAEDTGIYYCTRLSNWDWYFDVWGAGTTVTVSSASTKGPSVFPLAPSSKSTSGGTAALGCLVKDYFPEPVTVSWNSGALTSGVHTFPAVLQSSGLYSLSSVVTVPSSSLGTQTYICNVNHKPSNTKVDKKVEPKSCGS

SEQ ID NO: 30255 - protein, 121 aa, Artificial Sequence; identical to SEQ ID NO: 19346
  Description of Artificial Sequence: Synthetic polypeptide
  VH of XENP021046

SEQ ID NO: 30256 - protein, 5 aa, Artificial Sequence
  Description of Artificial Sequence: Synthetic peptide
  XENP021046 vhCDR1
DAWMD

SEQ ID NO: 30257 - protein, 19 aa, Artificial Sequence
  Description of Artificial Sequence: Synthetic peptide
  XENP021046 vhCDR2
EIRTKANNHATYYAESVKG

SEQ ID NO: 30258 - protein, 10 aa, Artificial Sequence
  Description of Artificial Sequence: Synthetic peptide
  XENP021046 vhCDR3
LSNWDWYFDV

SEQ ID NO: 30259 - protein, 218 aa, Artificial Sequence; identical to SEQ ID NO: 17590
  Description of Artificial Sequence: Synthetic polypeptide
  XENP021046 7G8_H0.114_L0_Fab Light Chain

SEQ ID NO: 30260 - protein, 111 aa, Artificial Sequence; identical to SEQ ID NO: 17591
  Description of Artificial Sequence: Synthetic polypeptide
  VL of XENP021046

SEQ ID NO: 30261 - protein, 15 aa, Artificial Sequence
  Description of Artificial Sequence: Synthetic peptide
  XENP021046 vlCDR1
KASQSVDYDGDSYMN

SEQ ID NO: 30262 - protein, 7 aa, Artificial Sequence
  Description of Artificial Sequence: Synthetic peptide
  XENP021046 vlCDR2
AASNLES

SEQ ID NO: 30263 - protein, 9 aa, Artificial Sequence
  Description of Artificial Sequence: Synthetic peptide
  XENP021046 vlCDR3
QQSNEDPFT

SEQ ID NO: 30264 - protein, 226 aa, Artificial Sequence
  Description of Artificial Sequence: Synthetic polypeptide
  XENP021047 7G8_H0.115_L0_Fab Heavy Chain
EVKLEESGGGLVQPGGSMKLSCAASGFTFSDAWMDWVRQSPEKGLEWVAEIRTKANNHATYYAESVKGRFTISRDDSKSSVYLQMNSLRAEDTGIYYCTRLTNWDWYFDVWGAGTTVTVSSASTKGPSVFPLAPSSKSTSGGTAALGCLVKDYFPEPVTVSWNSGALTSGVHTFPAVLQSSGLYSLSSVVTVPSSSLGTQTYICNVNHKPSNTKVDKKVEPKSCGS

SEQ ID NO: 30265 - protein, 121 aa, Artificial Sequence; identical to SEQ ID NO: 19356
  Description of Artificial Sequence: Synthetic polypeptide
  VH of XENP021047

SEQ ID NO: 30266 - protein, 5 aa, Artificial Sequence
  Description of Artificial Sequence: Synthetic peptide
  XENP021047 vhCDR1
DAWMD

SEQ ID NO: 30267 - protein, 19 aa, Artificial Sequence
  Description of Artificial Sequence: Synthetic peptide
  XENP021047 vhCDR2
EIRTKANNHATYYAESVKG

SEQ ID NO: 30268 - protein, 10 aa, Artificial Sequence
  Description of Artificial Sequence: Synthetic peptide
  XENP021047 vhCDR3
LTNWDWYFDV

SEQ ID NO: 30269 - protein, 218 aa, Artificial Sequence; identical to SEQ ID NO: 17590
  Description of Artificial Sequence: Synthetic polypeptide
  XENP021047 7G8_H0.115_L0_Fab Light Chain

SEQ ID NO: 30270 - protein, 111 aa, Artificial Sequence; identical to SEQ ID NO: 17591
  Description of Artificial Sequence: Synthetic polypeptide
  VL of XENP021047

SEQ ID NO: 30271 - protein, 15 aa, Artificial Sequence
  Description of Artificial Sequence: Synthetic peptide
  XENP021047 vlCDR1
KASQSVDYDGDSYMN

SEQ ID NO: 30272 - protein, 7 aa, Artificial Sequence
  Description of Artificial Sequence: Synthetic peptide
  XENP021047 vlCDR2
AASNLES

SEQ ID NO: 30273 - protein, 9 aa, Artificial Sequence
  Description of Artificial Sequence: Synthetic peptide
  XENP021047 vlCDR3
QQSNEDPFT

SEQ ID NO: 30274 - protein, 226 aa, Artificial Sequence
  Description of Artificial Sequence: Synthetic polypeptide
  XENP021048 7G8_H0.116_L0_Fab Heavy Chain
EVKLEESGGGLVQPGGSMKLSCAASGFTFSDAWMDWVRQSPEKGLEWVAEIRTKANNHATYYAESVKGRFTISRDDSKSSVYLQMNSLRAEDTGIYYCTRLGNWDWYFDVWGAGTTVTVSSASTKGPSVFPLAPSSKSTSGGTAALGCLVKDYFPEPVTVSWNSGALTSGVHTFPAVLQSSGLYSLSSVVTVPSSSLGTQTYICNVNHKPSNTKVDKKVEPKSCGS

SEQ ID NO: 30275 - protein, 121 aa, Artificial Sequence; identical to SEQ ID NO: 19366
  Description of Artificial Sequence: Synthetic polypeptide
  VH of XENP021048

SEQ ID NO: 30276 - protein, 5 aa, Artificial Sequence
  Description of Artificial Sequence: Synthetic peptide
  XENP021048 vhCDR1
DAWMD

SEQ ID NO: 30277 - protein, 19 aa, Artificial Sequence
  Description of Artificial Sequence: Synthetic peptide
  XENP021048 vhCDR2
EIRTKANNHATYYAESVKG

SEQ ID NO: 30278 - protein, 10 aa, Artificial Sequence
  Description of Artificial Sequence: Synthetic peptide
  XENP021048 vhCDR3
LGNWDWYFDV

SEQ ID NO: 30279 - protein, 218 aa, Artificial Sequence; identical to SEQ ID NO: 17590
  Description of Artificial Sequence: Synthetic polypeptide
  XENP021048 7G8_H0.116_L0_Fab Light Chain

SEQ ID NO: 30280 - protein, 111 aa, Artificial Sequence; identical to SEQ ID NO: 17591
  Description of Artificial Sequence: Synthetic polypeptide
  VL of XENP021048

SEQ ID NO: 30281 - protein, 15 aa, Artificial Sequence
  Description of Artificial Sequence: Synthetic peptide
  XENP021048 vlCDR1
KASQSVDYDGDSYMN

SEQ ID NO: 30282 - protein, 7 aa, Artificial Sequence
  Description of Artificial Sequence: Synthetic peptide
  XENP021048 vlCDR2
AASNLES

SEQ ID NO: 30283 - protein, 9 aa, Artificial Sequence
  Description of Artificial Sequence: Synthetic peptide
  XENP021048 vlCDR3
QQSNEDPFT

SEQ ID NO: 30284 - protein, 226 aa, Artificial Sequence
  Description of Artificial Sequence: Synthetic polypeptide
  XENP021049 7G8_H0.117_L0_Fab Heavy Chain
EVKLEESGGGLVQPGGSMKLSCAASGFTFSDAWMDWVRQSPEKGLEWVAEIRTKANNHATYYAESVKGRFTISRDDSKSSVYLQMNSLRAEDTGIYYCTRLHNWDWYFDVWGAGTTVTVSSASTKGPSVFPLAPSSKSTSGGTAALGCLVKDYFPEPVTVSWNSGALTSGVHTFPAVLQSSGLYSLSSVVTVPSSSLGTQTYICNVNHKPSNTKVDKKVEPKSCGS

SEQ ID NO: 30285 - protein, 121 aa, Artificial Sequence; identical to SEQ ID NO: 19376
  Description of Artificial Sequence: Synthetic polypeptide
  VH of XENP021049

SEQ ID NO: 30286 - protein, 5 aa, Artificial Sequence
  Description of Artificial Sequence: Synthetic peptide
  XENP021049 vhCDR1
DAWMD

SEQ ID NO: 30287 - protein, 19 aa, Artificial Sequence
  Description of Artificial Sequence: Synthetic peptide
  XENP021049 vhCDR2
EIRTKANNHATYYAESVKG

SEQ ID NO: 30288 - protein, 10 aa, Artificial Sequence
  Description of Artificial Sequence: Synthetic peptide
  XENP021049 vhCDR3
LHNWDWYFDV

SEQ ID NO: 30289 - protein, 218 aa, Artificial Sequence; identical to SEQ ID NO: 17590
  Description of Artificial Sequence: Synthetic polypeptide
  XENP021049 7G8_H0.117_L0_Fab Light Chain

SEQ ID NO: 30290 - protein, 111 aa, Artificial Sequence; identical to SEQ ID NO: 17591
  Description of Artificial Sequence: Synthetic polypeptide
  VL of XENP021049

SEQ ID NO: 30291 - protein, 15 aa, Artificial Sequence
  Description of Artificial Sequence: Synthetic peptide
  XENP021049 vlCDR1
KASQSVDYDGDSYMN

SEQ ID NO: 30292 - protein, 7 aa, Artificial Sequence
  Description of Artificial Sequence: Synthetic peptide
  XENP021049 vlCDR2
AASNLES

SEQ ID NO: 30293 - protein, 9 aa, Artificial Sequence
  Description of Artificial Sequence: Synthetic peptide
  XENP021049 vlCDR3
QQSNEDPFT

SEQ ID NO: 30294 - protein, 226 aa, Artificial Sequence
  Description of Artificial Sequence: Synthetic polypeptide
  XENP021050 7G8_H0.118_L0_Fab Heavy Chain
EVKLEESGGGLVQPGGSMKLSCAASGFTFSDAWMDWVRQSPEKGLEWVAEIRTKANNHATYYAESVKGRFTISRDDSKSSVYLQMNSLRAEDTGIYYCTRLQNWDWYFDVWGAGTTVTVSSASTKGPSVFPLAPSSKSTSGGTAALGCLVKDYFPEPVTVSWNSGALTSGVHTFPAVLQSSGLYSLSSVVTVPSSSLGTQTYICNVNHKPSNTKVDKKVEPKSCGS

SEQ ID NO: 30295 - protein, 121 aa, Artificial Sequence; identical to SEQ ID NO: 19386
  Description of Artificial Sequence: Synthetic polypeptide
  VH of XENP021050

SEQ ID NO: 30296 - protein, 5 aa, Artificial Sequence
  Description of Artificial Sequence: Synthetic peptide
  XENP021050 vhCDR1
DAWMD

SEQ ID NO: 30297 - protein, 19 aa, Artificial Sequence
  Description of Artificial Sequence: Synthetic peptide
  XENP021050 vhCDR2
EIRTKANNHATYYAESVKG

SEQ ID NO: 30298 - protein, 10 aa, Artificial Sequence
  Description of Artificial Sequence: Synthetic peptide
  XENP021050 vhCDR3
LQNWDWYFDV

SEQ ID NO: 30299 - protein, 218 aa, Artificial Sequence; identical to SEQ ID NO: 17590
  Description of Artificial Sequence: Synthetic polypeptide
  XENP021050 7G8_H0.118_L0_Fab Light Chain

SEQ ID NO: 30300 - protein, 111 aa, Artificial Sequence; identical to SEQ ID NO: 17591
  Description of Artificial Sequence: Synthetic polypeptide
  VL of XENP021050

SEQ ID NO: 30301 - protein, 15 aa, Artificial Sequence
  Description of Artificial Sequence: Synthetic peptide
  XENP021050 vlCDR1
KASQSVDYDGDSYMN

SEQ ID NO: 30302 - protein, 7 aa, Artificial Sequence
  Description of Artificial Sequence: Synthetic peptide
  XENP021050 vlCDR2
AASNLES

SEQ ID NO: 30303 - protein, 9 aa, Artificial Sequence
  Description of Artificial Sequence: Synthetic peptide
  XENP021050 vlCDR3
QQSNEDPFT

SEQ ID NO: 30304 - protein, 226 aa, Artificial Sequence
  Description of Artificial Sequence: Synthetic polypeptide
  XENP021051 7G8_H0.119_L0_Fab Heavy Chain
EVKLEESGGGLVQPGGSMKLSCAASGFTFSDAWMDWVRQSPEKGLEWVAEIRTKANNHATYYAESVKGRFTISRDDSKSSVYLQMNSLRAEDTGIYYCTRLDNWDWYFDVWGAGTTVTVSSASTKGPSVFPLAPSSKSTSGGTAALGCLVKDYFPEPVTVSWNSGALTSGVHTFPAVLQSSGLYSLSSVVTVPSSSLGTQTYICNVNHKPSNTKVDKKVEPKSCGS

SEQ ID NO: 30305 - protein, 121 aa, Artificial Sequence; identical to SEQ ID NO: 19396
  Description of Artificial Sequence: Synthetic polypeptide
  VH of XENP021051

SEQ ID NO: 30306 - protein, 5 aa, Artificial Sequence
  Description of Artificial Sequence: Synthetic peptide
  XENP021051 vhCDR1
DAWMD

SEQ ID NO: 30307 - protein, 19 aa, Artificial Sequence
  Description of Artificial Sequence: Synthetic peptide
  XENP021051 vhCDR2
EIRTKANNHATYYAESVKG

SEQ ID NO: 30308 - protein, 10 aa, Artificial Sequence
  Description of Artificial Sequence: Synthetic peptide
  XENP021051 vhCDR3
LDNWDWYFDV

SEQ ID NO: 30309 - protein, 218 aa, Artificial Sequence; identical to SEQ ID NO: 17590
  Description of Artificial Sequence: Synthetic polypeptide
  XENP021051 7G8_H0.119_L0_Fab Light Chain

SEQ ID NO: 30310 - protein, 111 aa, Artificial Sequence; identical to SEQ ID NO: 17591
  Description of Artificial Sequence: Synthetic polypeptide
  VL of XENP021051

SEQ ID NO: 30311 - protein, 15 aa, Artificial Sequence
  Description of Artificial Sequence: Synthetic peptide
  XENP021051 vlCDR1
KASQSVDYDGDSYMN

SEQ ID NO: 30312 - protein, 7 aa, Artificial Sequence
  Description of Artificial Sequence: Synthetic peptide
  XENP021051 vlCDR2
AASNLES

SEQ ID NO: 30313 - protein, 9 aa, Artificial Sequence
  Description of Artificial Sequence: Synthetic peptide
  XENP021051 vlCDR3
QQSNEDPFT

SEQ ID NO: 30314 - protein, 226 aa, Artificial Sequence
  Description of Artificial Sequence: Synthetic polypeptide
  XENP021052 7G8_H0.120_L0_Fab Heavy Chain
EVKLEESGGGLVQPGGSMKLSCAASGFTFSDAWMDWVRQSPEKGLEWVAEIRTKANNHATYYAESVKGRFTISRDDSKSSVYLQMNSLRAEDTGIYYCTRLLNWDWYFDVWGAGTTVTVSSASTKGPSVFPLAPSSKSTSGGTAALGCLVKDYFPEPVTVSWNSGALTSGVHTFPAVLQSSGLYSLSSVVTVPSSSLGTQTYICNVNHKPSNTKVDKKVEPKSCGS

SEQ ID NO: 30315 - protein, 121 aa, Artificial Sequence; identical to SEQ ID NO: 19406
  Description of Artificial Sequence: Synthetic polypeptide
  VH of XENP021052

SEQ ID NO: 30316 - protein, 5 aa, Artificial Sequence
  Description of Artificial Sequence: Synthetic peptide
  XENP021052 vhCDR1
DAWMD

SEQ ID NO: 30317 - protein, 19 aa, Artificial Sequence
  Description of Artificial Sequence: Synthetic peptide
  XENP021052 vhCDR2
EIRTKANNHATYYAESVKG

SEQ ID NO: 30318 - protein, 10 aa, Artificial Sequence
  Description of Artificial Sequence: Synthetic peptide
  XENP021052 vhCDR3
LLNWDWYFDV

SEQ ID NO: 30319 - protein, 218 aa, Artificial Sequence; identical to SEQ ID NO: 17590
  Description of Artificial Sequence: Synthetic polypeptide
  XENP021052 7G8_H0.120_L0_Fab Light Chain

SEQ ID NO: 30320 - protein, 111 aa, Artificial Sequence; identical to SEQ ID NO: 17591
  Description of Artificial Sequence: Synthetic polypeptide
  VL of XENP021052

SEQ ID NO: 30321 - protein, 15 aa, Artificial Sequence
  Description of Artificial Sequence: Synthetic peptide
  XENP021052 vlCDR1
KASQSVDYDGDSYMN

SEQ ID NO: 30322 - protein, 7 aa, Artificial Sequence
  Description of Artificial Sequence: Synthetic peptide
  XENP021052 vlCDR2
AASNLES

SEQ ID NO: 30323 - protein, 9 aa, Artificial Sequence
  Description of Artificial Sequence: Synthetic peptide
  XENP021052 vlCDR3
QQSNEDPFT

SEQ ID NO: 30324 - protein, 226 aa, Artificial Sequence
  Description of Artificial Sequence: Synthetic polypeptide
  XENP021053 7G8_H0.121_L0_Fab Heavy Chain
EVKLEESGGGLVQPGGSMKLSCAASGFTFSDAWMDWVRQSPEKGLEWVAEIRTKANNHATYYAESVKGRFTISRDDSKSSVYLQMNSLRAEDTGIYYCTRLKNWDWYFDVWGAGTTVTVSSASTKGPSVFPLAPSSKSTSGGTAALGCLVKDYFPEPVTVSWNSGALTSGVHTFPAVLQSSGLYSLSSVVTVPSSSLGTQTYICNVNHKPSNTKVDKKVEPKSCGS

SEQ ID NO: 30325 - protein, 121 aa, Artificial Sequence; identical to SEQ ID NO: 19416
  Description of Artificial Sequence: Synthetic polypeptide
  VH of XENP021053

SEQ ID NO: 30326 - protein, 5 aa, Artificial Sequence
  Description of Artificial Sequence: Synthetic peptide
  XENP021053 vhCDR1
DAWMD

SEQ ID NO: 30327 - protein, 19 aa, Artificial Sequence
  Description of Artificial Sequence: Synthetic peptide
  XENP021053 vhCDR2
EIRTKANNHATYYAESVKG

SEQ ID NO: 30328 - protein, 10 aa, Artificial Sequence
  Description of Artificial Sequence: Synthetic peptide
  XENP021053 vhCDR3
LKNWDWYFDV

SEQ ID NO: 30329 - protein, 218 aa, Artificial Sequence; identical to SEQ ID NO: 17590
  Description of Artificial Sequence: Synthetic polypeptide
  XENP021053 7G8_H0.121_L0_Fab Light Chain

SEQ ID NO: 30330 - protein, 111 aa, Artificial Sequence; identical to SEQ ID NO: 17591
  Description of Artificial Sequence: Synthetic polypeptide
  VL of XENP021053

SEQ ID NO: 30331 - protein, 15 aa, Artificial Sequence
  Description of Artificial Sequence: Synthetic peptide
  XENP021053 vlCDR1
KASQSVDYDGDSYMN

SEQ ID NO: 30332 - protein, 7 aa, Artificial Sequence
  Description of Artificial Sequence: Synthetic peptide
  XENP021053 vlCDR2
AASNLES

SEQ ID NO: 30333 - protein, 9 aa, Artificial Sequence
  Description of Artificial Sequence: Synthetic peptide
  XENP021053 vlCDR3
QQSNEDPFT

SEQ ID NO: 30334 - protein, 226 aa, Artificial Sequence
  Description of Artificial Sequence: Synthetic polypeptide
  XENP021054 7G8_H0.122_L0_Fab Heavy Chain
EVKLEESGGGLVQPGGSMKLSCAASGFTFSDAWMDWVRQSPEKGLEWVAEIRTKANNHATYYAESVKGRFTISRDDSKSSVYLQMNSLRAEDTGIYYCTRLYNWDWYFDVWGAGTTVTVSSASTKGPSVFPLAPSSKSTSGGTAALGCLVKDYFPEPVTVSWNSGALTSGVHTFPAVLQSSGLYSLSSVVTVPSSSLGTQTYICNVNHKPSNTKVDKKVEPKSCGS

SEQ ID NO: 30335 - protein, 121 aa, Artificial Sequence; identical to SEQ ID NO: 19426
  Description of Artificial Sequence: Synthetic polypeptide
  VH of XENP021054

SEQ ID NO: 30336 - protein, 5 aa, Artificial Sequence
  Description of Artificial Sequence: Synthetic peptide
  XENP021054 vhCDR1
DAWMD

SEQ ID NO: 30337 - protein, 19 aa, Artificial Sequence
  Description of Artificial Sequence: Synthetic peptide
  XENP021054 vhCDR2
EIRTKANNHATYYAESVKG

SEQ ID NO: 30338 - protein, 10 aa, Artificial Sequence
  Description of Artificial Sequence: Synthetic peptide
  XENP021054 vhCDR3
LYNWDWYFDV

SEQ ID NO: 30339 - protein, 218 aa, Artificial Sequence; identical to SEQ ID NO: 17590
  Description of Artificial Sequence: Synthetic polypeptide
  XENP021054 7G8_H0.122_L0_Fab Light Chain

SEQ ID NO: 30340 - protein, 111 aa, Artificial Sequence; identical to SEQ ID NO: 17591
  Description of Artificial Sequence: Synthetic polypeptide
  VL of XENP021054

SEQ ID NO: 30341 - protein, 15 aa, Artificial Sequence
  Description of Artificial Sequence: Synthetic peptide
  XENP021054 vlCDR1
KASQSVDYDGDSYMN

SEQ ID NO: 30342 - protein, 7 aa, Artificial Sequence
  Description of Artificial Sequence: Synthetic peptide
  XENP021054 vlCDR2
AASNLES

SEQ ID NO: 30343 - protein, 9 aa, Artificial Sequence
  Description of Artificial Sequence: Synthetic peptide
  XENP021054 vlCDR3
QQSNEDPFT

SEQ ID NO: 30344 - protein, 226 aa, Artificial Sequence
  Description of Artificial Sequence: Synthetic polypeptide
  XENP021055 7G8_H0.123_L0_Fab Heavy Chain
EVKLEESGGGLVQPGGSMKLSCAASGFTFSDAWMDWVRQSPEKGLEWVAEIRTKANNHATYYAESVKGRFTISRDDSKSSVYLQMNSLRAEDTGIYYCTRLADWDWYFDVWGAGTTVTVSSASTKGPSVFPLAPSSKSTSGGTAALGCLVKDYFPEPVTVSWNSGALTSGVHTFPAVLQSSGLYSLSSVVTVPSSSLGTQTYICNVNHKPSNTKVDKKVEPKSCGS

SEQ ID NO: 30345 - protein, 121 aa, Artificial Sequence; identical to SEQ ID NO: 19436
  Description of Artificial Sequence: Synthetic polypeptide
  VH of XENP021055

SEQ ID NO: 30346 - protein, 5 aa, Artificial Sequence
  Description of Artificial Sequence: Synthetic peptide
  XENP021055 vhCDR1
DAWMD

SEQ ID NO: 30347 - protein, 19 aa, Artificial Sequence
  Description of Artificial Sequence: Synthetic peptide
  XENP021055 vhCDR2
EIRTKANNHATYYAESVKG

SEQ ID NO: 30348 - protein, 10 aa, Artificial Sequence
  Description of Artificial Sequence: Synthetic peptide
  XENP021055 vhCDR3
LADWDWYFDV

SEQ ID NO: 30349 - protein, 218 aa, Artificial Sequence; identical to SEQ ID NO: 17590
  Description of Artificial Sequence: Synthetic polypeptide
  XENP021055 7G8_H0.123_L0_Fab Light Chain

SEQ ID NO: 30350 - protein, 111 aa, Artificial Sequence; identical to SEQ ID NO: 17591
  Description of Artificial Sequence: Synthetic polypeptide
  VL of XENP021055

SEQ ID NO: 30351 - protein, 15 aa, Artificial Sequence
  Description of Artificial Sequence: Synthetic peptide
  XENP021055 vlCDR1
KASQSVDYDGDSYMN

SEQ ID NO: 30352 - protein, 7 aa, Artificial Sequence
  Description of Artificial Sequence: Synthetic peptide
  XENP021055 vlCDR2
AASNLES

SEQ ID NO: 30353 - protein, 9 aa, Artificial Sequence
  Description of Artificial Sequence: Synthetic peptide
  XENP021055 vlCDR3
QQSNEDPFT

SEQ ID NO: 30354 - protein, 226 aa, Artificial Sequence
  Description of Artificial Sequence: Synthetic polypeptide
  XENP021056 7G8_H0.124_L0_Fab Heavy Chain
EVKLEESGGGLVQPGGSMKLSCAASGFTFSDAWMDWVRQSPEKGLEWVAEIRTKANNHATYYAESVKGRFTISRDDSKSSVYLQMNSLRAEDTGIYYCTRLAHWDWYFDVWGAGTTVTVSSASTKGPSVFPLAPSSKSTSGGTAALGCLVKDYFPEPVTVSWNSGALTSGVHTFPAVLQSSGLYSLSSVVTVPSSSLGTQTYICNVNHKPSNTKVDKKVEPKSCGS

SEQ ID NO: 30355 - protein, 121 aa, Artificial Sequence; identical to SEQ ID NO: 19446
  Description of Artificial Sequence: Synthetic polypeptide
  VH of XENP021056

SEQ ID NO: 30356 - protein, 5 aa, Artificial Sequence
  Description of Artificial Sequence: Synthetic peptide
  XENP021056 vhCDR1
DAWMD

SEQ ID NO: 30357 - protein, 19 aa, Artificial Sequence
  Description of Artificial Sequence: Synthetic peptide
  XENP021056 vhCDR2
EIRTKANNHATYYAESVKG

SEQ ID NO: 30358 - protein, 10 aa, Artificial Sequence
  Description of Artificial Sequence: Synthetic peptide
  XENP021056 vhCDR3
LAHWDWYFDV

SEQ ID NO: 30359 - protein, 218 aa, Artificial Sequence; identical to SEQ ID NO: 17590
  Description of Artificial Sequence: Synthetic polypeptide
  XENP021056 7G8_H0.124_L0_Fab Light Chain

SEQ ID NO: 30360 - protein, 111 aa, Artificial Sequence; identical to SEQ ID NO: 17591
  Description of Artificial Sequence: Synthetic polypeptide
  VL of XENP021056

SEQ ID NO: 30361 - protein, 15 aa, Artificial Sequence
  Description of Artificial Sequence: Synthetic peptide
  XENP021056 vlCDR1
KASQSVDYDGDSYMN

SEQ ID NO: 30362 - protein, 7 aa, Artificial Sequence
  Description of Artificial Sequence: Synthetic peptide
  XENP021056 vlCDR2
AASNLES

SEQ ID NO: 30363 - protein, 9 aa, Artificial Sequence
  Description of Artificial Sequence: Synthetic peptide
  XENP021056 vlCDR3
QQSNEDPFT

SEQ ID NO: 30364 - protein, 226 aa, Artificial Sequence
  Description of Artificial Sequence: Synthetic polypeptide
  XENP021057 7G8_H0.125_L0_Fab Heavy Chain
EVKLEESGGGLVQPGGSMKLSCAASGFTFSDAWMDWVRQSPEKGLEWVAEIRTKANNHATYYAESVKGRFTISRDDSKSSVYLQMNSLRAEDTGIYYCTRLAEWDWYFDVWGAGTTVTVSSASTKGPSVFPLAPSSKSTSGGTAALGCLVKDYFPEPVTVSWNSGALTSGVHTFPAVLQSSGLYSLSSVVTVPSSSLGTQTYICNVNHKPSNTKVDKKVEPKSCGS

SEQ ID NO: 30365 - protein, 121 aa, Artificial Sequence; identical to SEQ ID NO: 19456
  Description of Artificial Sequence: Synthetic polypeptide
  VH of XENP021057

SEQ ID NO: 30366 - protein, 5 aa, Artificial Sequence
  Description of Artificial Sequence: Synthetic peptide
  XENP021057 vhCDR1
DAWMD

SEQ ID NO: 30367 - protein, 19 aa, Artificial Sequence
  Description of Artificial Sequence: Synthetic peptide
  XENP021057 vhCDR2
EIRTKANNHATYYAESVKG

SEQ ID NO: 30368 - protein, 10 aa, Artificial Sequence
  Description of Artificial Sequence: Synthetic peptide
  XENP021057 vhCDR3
LAEWDWYFDV

SEQ ID NO: 30369 - protein, 218 aa, Artificial Sequence; identical to SEQ ID NO: 17590
  Description of Artificial Sequence: Synthetic polypeptide
  XENP021057 7G8_H0.125_L0_Fab Light Chain

SEQ ID NO: 30370 - protein, 111 aa, Artificial Sequence; identical to SEQ ID NO: 17591
  Description of Artificial Sequence: Synthetic polypeptide
  VL of XENP021057

SEQ ID NO: 30371 - protein, 15 aa, Artificial Sequence
  Description of Artificial Sequence: Synthetic peptide
  XENP021057 vlCDR1
KASQSVDYDGDSYMN

SEQ ID NO: 30372 - protein, 7 aa, Artificial Sequence
  Description of Artificial Sequence: Synthetic peptide
  XENP021057 vlCDR2
AASNLES

SEQ ID NO: 30373 - protein, 9 aa, Artificial Sequence
  Description of Artificial Sequence: Synthetic peptide
  XENP021057 vlCDR3
QQSNEDPFT

SEQ ID NO: 30374 - protein, 226 aa, Artificial Sequence
  Description of Artificial Sequence: Synthetic polypeptide
  XENP021058 7G8_H0.126_L0_Fab Heavy Chain
EVKLEESGGGLVQPGGSMKLSCAASGFTFSDAWMDWVRQSPEKGLEWVAEIRTKANNHATYYAESVKGRFTISRDDSKSSVYLQMNSLRAEDTGIYYCTRLASWDWYFDVWGAGTTVTVSSASTKGPSVFPLAPSSKSTSGGTAALGCLVKDYFPEPVTVSWNSGALTSGVHTFPAVLQSSGLYSLSSVVTVPSSSLGTQTYICNVNHKPSNTKVDKKVEPKSCGS

SEQ ID NO: 30375 - protein, 121 aa, Artificial Sequence; identical to SEQ ID NO: 19466
  Description of Artificial Sequence: Synthetic polypeptide
  VH of XENP021058

SEQ ID NO: 30376 - protein, 5 aa, Artificial Sequence
  Description of Artificial Sequence: Synthetic peptide
  XENP021058 vhCDR1
DAWMD

SEQ ID NO: 30377 - protein, 19 aa, Artificial Sequence
  Description of Artificial Sequence: Synthetic peptide
  XENP021058 vhCDR2
EIRTKANNHATYYAESVKG

SEQ ID NO: 30378 - protein, 10 aa, Artificial Sequence
  Description of Artificial Sequence: Synthetic peptide
  XENP021058 vhCDR3
LASWDWYFDV

SEQ ID NO: 30379 - protein, 218 aa, Artificial Sequence; identical to SEQ ID NO: 17590
  Description of Artificial Sequence: Synthetic polypeptide
  XENP021058 7G8_H0.126_L0_Fab Light Chain

SEQ ID NO: 30380 - protein, 111 aa, Artificial Sequence; identical to SEQ ID NO: 17591
  Description of Artificial Sequence: Synthetic polypeptide
  VL of XENP021058

SEQ ID NO: 30381 - protein, 15 aa, Artificial Sequence
  Description of Artificial Sequence: Synthetic peptide
  XENP021058 vlCDR1
KASQSVDYDGDSYMN

SEQ ID NO: 30382 - protein, 7 aa, Artificial Sequence
  Description of Artificial Sequence: Synthetic peptide
  XENP021058 vlCDR2
AASNLES

SEQ ID NO: 30383 - protein, 9 aa, Artificial Sequence
  Description of Artificial Sequence: Synthetic peptide
  XENP021058 vlCDR3
QQSNEDPFT

SEQ ID NO: 30384 - protein, 226 aa, Artificial Sequence
  Description of Artificial Sequence: Synthetic polypeptide
  XENP021059 7G8_H0.127_L0_Fab Heavy Chain
EVKLEESGGGLVQPGGSMKLSCAASGFTFSDAWMDWVRQSPEKGLEWVAEIRTKANNHATYYAESVKGRFTISRDDSKSSVYLQMNSLRAEDTGIYYCTRLARWDWYFDVWGAGTTVTVSSASTKGPSVFPLAPSSKSTSGGTAALGCLVKDYFPEPVTVSWNSGALTSGVHTFPAVLQSSGLYSLSSVVTVPSSSLGTQTYICNVNHKPSNTKVDKKVEPKSCGS

SEQ ID NO: 30385 - protein, 121 aa, Artificial Sequence; identical to SEQ ID NO: 19476
  Description of Artificial Sequence: Synthetic polypeptide
  VH of XENP021059

SEQ ID NO: 30386 - protein, 5 aa, Artificial Sequence
  Description of Artificial Sequence: Synthetic peptide
  XENP021059 vhCDR1
DAWMD

SEQ ID NO: 30387 - protein, 19 aa, Artificial Sequence
  Description of Artificial Sequence: Synthetic peptide
  XENP021059 vhCDR2
EIRTKANNHATYYAESVKG

SEQ ID NO: 30388 - protein, 10 aa, Artificial Sequence
  Description of Artificial Sequence: Synthetic peptide
  XENP021059 vhCDR3
LARWDWYFDV

SEQ ID NO: 30389 - protein, 218 aa, Artificial Sequence; identical to SEQ ID NO: 17590
  Description of Artificial Sequence: Synthetic polypeptide
  XENP021059 7G8_H0.127_L0_Fab Light Chain

SEQ ID NO: 30390 - protein, 111 aa, Artificial Sequence; identical to SEQ ID NO: 17591
  Description of Artificial Sequence: Synthetic polypeptide
  VL of XENP021059

SEQ ID NO: 30391 - protein, 15 aa, Artificial Sequence
  Description of Artificial Sequence: Synthetic peptide
  XENP021059 vlCDR1
KASQSVDYDGDSYMN

SEQ ID NO: 30392 - protein, 7 aa, Artificial Sequence
  Description of Artificial Sequence: Synthetic peptide
  XENP021059 vlCDR2
AASNLES

SEQ ID NO: 30393 - protein, 9 aa, Artificial Sequence
  Description of Artificial Sequence: Synthetic peptide
  XENP021059 vlCDR3
QQSNEDPFT

SEQ ID NO: 30394 - protein, 226 aa, Artificial Sequence
  Description of Artificial Sequence: Synthetic polypeptide
  XENP021060 7G8_H0.128_L0_Fab Heavy Chain
EVKLEESGGGLVQPGGSMKLSCAASGFTFSDAWMDWVRQSPEKGLEWVAEIRTKANNHATYYAESVKGRFTISRDDSKSSVYLQMNSLRAEDTGIYYCTRLALWDWYFDVWGAGTTVTVSSASTKGPSVFPLAPSSKSTSGGTAALGCLVKDYFPEPVTVSWNSGALTSGVHTFPAVLQSSGLYSLSSVVTVPSSSLGTQTYICNVNHKPSNTKVDKKVEPKSCGS

SEQ ID NO: 30395 - protein, 121 aa, Artificial Sequence; identical to SEQ ID NO: 19486
  Description of Artificial Sequence: Synthetic polypeptide
  VH of XENP021060

SEQ ID NO: 30396 - protein, 5 aa, Artificial Sequence
  Description of Artificial Sequence: Synthetic peptide
  XENP021060 vhCDR1
DAWMD

SEQ ID NO: 30397 - protein, 19 aa, Artificial Sequence
  Description of Artificial Sequence: Synthetic peptide
  XENP021060 vhCDR2
EIRTKANNHATYYAESVKG

SEQ ID NO: 30398 - protein, 10 aa, Artificial Sequence
  Description of Artificial Sequence: Synthetic peptide
  XENP021060 vhCDR3
LALWDWYFDV

SEQ ID NO: 30399 - protein, 218 aa, Artificial Sequence; identical to SEQ ID NO: 17590
  Description of Artificial Sequence: Synthetic polypeptide
  XENP021060 7G8_H0.128_L0_Fab Light Chain

SEQ ID NO: 30400 - protein, 111 aa, Artificial Sequence; identical to SEQ ID NO: 17591
  Description of Artificial Sequence: Synthetic polypeptide
  VL of XENP021060

SEQ ID NO: 30401 - protein, 15 aa, Artificial Sequence
  Description of Artificial Sequence: Synthetic peptide
  XENP021060 vlCDR1
KASQSVDYDGDSYMN

SEQ ID NO: 30402 - protein, 7 aa, Artificial Sequence
  Description of Artificial Sequence: Synthetic peptide
  XENP021060 vlCDR2
AASNLES

SEQ ID NO: 30403 - protein, 9 aa, Artificial Sequence
  Description of Artificial Sequence: Synthetic peptide
  XENP021060 vlCDR3
QQSNEDPFT

SEQ ID NO: 30404 - protein, 226 aa, Artificial Sequence
  Description of Artificial Sequence: Synthetic polypeptide
  XENP021061 7G8_H0.129_L0_Fab Heavy Chain
EVKLEESGGGLVQPGGSMKLSCAASGFTFSDAWMDWVRQSPEKGLEWVAEIRTKANNHATYYAESVKGRFTISRDDSKSSVYLQMNSLRAEDTGIYYCTRLATWDWYFDVWGAGTTVTVSSASTKGPSVFPLAPSSKSTSGGTAALGCLVKDYFPEPVTVSWNSGALTSGVHTFPAVLQSSGLYSLSSVVTVPSSSLGTQTYICNVNHKPSNTKVDKKVEPKSCGS

SEQ ID NO: 30405 - protein, 121 aa, Artificial Sequence; identical to SEQ ID NO: 19496
  Description of Artificial Sequence: Synthetic polypeptide
  VH of XENP021061

SEQ ID NO: 30406 - protein, 5 aa, Artificial Sequence
  Description of Artificial Sequence: Synthetic peptide
  XENP021061 vhCDR1
DAWMD

SEQ ID NO: 30407 - protein, 19 aa, Artificial Sequence
  Description of Artificial Sequence: Synthetic peptide
  XENP021061 vhCDR2
EIRTKANNHATYYAESVKG

SEQ ID NO: 30408 - protein, 10 aa, Artificial Sequence
  Description of Artificial Sequence: Synthetic peptide
  XENP021061 vhCDR3
LATWDWYFDV

SEQ ID NO: 30409 - protein, 218 aa, Artificial Sequence; identical to SEQ ID NO: 17590
  Description of Artificial Sequence: Synthetic polypeptide
  XENP021061 7G8_H0.129_L0_Fab Light Chain

SEQ ID NO: 30410 - protein, 111 aa, Artificial Sequence; identical to SEQ ID NO: 17591
  Description of Artificial Sequence: Synthetic polypeptide
  VL of XENP021061

SEQ ID NO: 30411 - protein, 15 aa, Artificial Sequence
  Description of Artificial Sequence: Synthetic peptide
  XENP021061 vlCDR1
KASQSVDYDGDSYMN

SEQ ID NO: 30412 - protein, 7 aa, Artificial Sequence
  Description of Artificial Sequence: Synthetic peptide
  XENP021061 vlCDR2
AASNLES

SEQ ID NO: 30413 - protein, 9 aa, Artificial Sequence
  Description of Artificial Sequence: Synthetic peptide
  XENP021061 vlCDR3
QQSNEDPFT

SEQ ID NO: 30414 - protein, 226 aa, Artificial Sequence
  Description of Artificial Sequence: Synthetic polypeptide
  XENP021062 7G8_H0.130_L0_Fab Heavy Chain
EVKLEESGGGLVQPGGSMKLSCAASGFTFSDAWMDWVRQSPEKGLEWVAEIRTKANNHATYYAESVKGRFTISRDDSKSSVYLQMNSLRAEDTGIYYCTRLAGWDWYFDVWGAGTTVTVSSASTKGPSVFPLAPSSKSTSGGTAALGCLVKDYFPEPVTVSWNSGALTSGVHTFPAVLQSSGLYSLSSVVTVPSSSLGTQTYICNVNHKPSNTKVDKKVEPKSCGS

SEQ ID NO: 30415 - protein, 121 aa, Artificial Sequence; identical to SEQ ID NO: 19506
  Description of Artificial Sequence: Synthetic polypeptide
  VH of XENP021062

SEQ ID NO: 30416 - protein, 5 aa, Artificial Sequence
  Description of Artificial Sequence: Synthetic peptide
  XENP021062 vhCDR1
DAWMD

SEQ ID NO: 30417 - protein, 19 aa, Artificial Sequence
  Description of Artificial Sequence: Synthetic peptide
  XENP021062 vhCDR2
EIRTKANNHATYYAESVKG

SEQ ID NO: 30418 - protein, 10 aa, Artificial Sequence
  Description of Artificial Sequence: Synthetic peptide
  XENP021062 vhCDR3
LAGWDWYFDV

SEQ ID NO: 30419 - protein, 218 aa, Artificial Sequence; identical to SEQ ID NO: 17590
  Description of Artificial Sequence: Synthetic polypeptide
  XENP021062 7G8_H0.130_L0_Fab Light Chain

SEQ ID NO: 30420 - protein, 111 aa, Artificial Sequence; identical to SEQ ID NO: 17591
  Description of Artificial Sequence: Synthetic polypeptide
  VL of XENP021062

SEQ ID NO: 30421 - protein, 15 aa, Artificial Sequence
  Description of Artificial Sequence: Synthetic peptide
  XENP021062 vlCDR1
KASQSVDYDGDSYMN

SEQ ID NO: 30422 - protein, 7 aa, Artificial Sequence
  Description of Artificial Sequence: Synthetic peptide
  XENP021062 vlCDR2
AASNLES

SEQ ID NO: 30423 - protein, 9 aa, Artificial Sequence
  Description of Artificial Sequence: Synthetic peptide
  XENP021062 vlCDR3
QQSNEDPFT

SEQ ID NO: 30424 - protein, 226 aa, Artificial Sequence
  Description of Artificial Sequence: Synthetic polypeptide
  XENP021063 7G8_H0.131_L0_Fab Heavy Chain
EVKLEESGGGLVQPGGSMKLSCAASGFTFSDAWMDWVRQSPEKGLEWVAEIRTKANNHATYYAESVKGRFTISRDDSKSSVYLQMNSLRAEDTGIYYCTRLAYWDWYFDVWGAGTTVTVSSASTKGPSVFPLAPSSKSTSGGTAALGCLVKDYFPEPVTVSWNSGALTSGVHTFPAVLQSSGLYSLSSVVTVPSSSLGTQTYICNVNHKPSNTKVDKKVEPKSCGS

SEQ ID NO: 30425 - protein, 121 aa, Artificial Sequence; identical to SEQ ID NO: 19516
  Description of Artificial Sequence: Synthetic polypeptide
  VH of XENP021063

SEQ ID NO: 30426 - protein, 5 aa, Artificial Sequence
  Description of Artificial Sequence: Synthetic peptide
  XENP021063 vhCDR1
DAWMD

SEQ ID NO: 30427 - protein, 19 aa, Artificial Sequence
  Description of Artificial Sequence: Synthetic peptide
  XENP021063 vhCDR2
EIRTKANNHATYYAESVKG

SEQ ID NO: 30428 - protein, 10 aa, Artificial Sequence
  Description of Artificial Sequence: Synthetic peptide
  XENP021063 vhCDR3
LAYWDWYFDV

SEQ ID NO: 30429 - protein, 218 aa, Artificial Sequence; identical to SEQ ID NO: 17590
  Description of Artificial Sequence: Synthetic polypeptide
  XENP021063 7G8_H0.131_L0_Fab Light Chain

SEQ ID NO: 30430 - protein, 111 aa, Artificial Sequence; identical to SEQ ID NO: 17591
  Description of Artificial Sequence: Synthetic polypeptide
  VL of XENP021063

SEQ ID NO: 30431 - protein, 15 aa, Artificial Sequence
  Description of Artificial Sequence: Synthetic peptide
  XENP021063 vlCDR1
KASQSVDYDGDSYMN

SEQ ID NO: 30432 - protein, 7 aa, Artificial Sequence
  Description of Artificial Sequence: Synthetic peptide
  XENP021063 vlCDR2
AASNLES

SEQ ID NO: 30433 - protein, 9 aa, Artificial Sequence
  Description of Artificial Sequence: Synthetic peptide
  XENP021063 vlCDR3
QQSNEDPFT

SEQ ID NO: 30434 - protein, 226 aa, Artificial Sequence
  Description of Artificial Sequence: Synthetic polypeptide
  XENP021064 7G8_H0.132_L0_Fab Heavy Chain
EVKLEESGGGLVQPGGSMKLSCAASGFTFSDAWMDWVRQSPEKGLEWVAEIRTKANNHATYYAESVKGRFTISRDDSKSSVYLQMNSLRAEDTGIYYCTRLANFDWYFDVWGAGTTVTVSSASTKGPSVFPLAPSSKSTSGGTAALGCLVKDYFPEPVTVSWNSGALTSGVHTFPAVLQSSGLYSLSSVVTVPSSSLGTQTYICNVNHKPSNTKVDKKVEPKSCGS

SEQ ID NO: 30435 - protein, 121 aa, Artificial Sequence; identical to SEQ ID NO: 19526
  Description of Artificial Sequence: Synthetic polypeptide
  VH of XENP021064

SEQ ID NO: 30436 - protein, 5 aa, Artificial Sequence
  Description of Artificial Sequence: Synthetic peptide
  XENP021064 vhCDR1
DAWMD

SEQ ID NO: 30437 - protein, 19 aa, Artificial Sequence
  Description of Artificial Sequence: Synthetic peptide
  XENP021064 vhCDR2
EIRTKANNHATYYAESVKG

SEQ ID NO: 30438 - protein, 10 aa, Artificial Sequence
  Description of Artificial Sequence: Synthetic peptide
  XENP021064 vhCDR3
LANFDWYFDV

SEQ ID NO: 30439 - protein, 218 aa, Artificial Sequence; identical to SEQ ID NO: 17590
  Description of Artificial Sequence: Synthetic polypeptide
  XENP021064 7G8_H0.132_L0_Fab Light Chain

SEQ ID NO: 30440 - protein, 111 aa, Artificial Sequence; identical to SEQ ID NO: 17591
  Description of Artificial Sequence: Synthetic polypeptide
  VL of XENP021064

SEQ ID NO: 30441 - protein, 15 aa, Artificial Sequence
  Description of Artificial Sequence: Synthetic peptide
  XENP021064 vlCDR1
KASQSVDYDGDSYMN

SEQ ID NO: 30442 - protein, 7 aa, Artificial Sequence
  Description of Artificial Sequence: Synthetic peptide
  XENP021064 vlCDR2
AASNLES

SEQ ID NO: 30443 - protein, 9 aa, Artificial Sequence
  Description of Artificial Sequence: Synthetic peptide
  XENP021064 vlCDR3
QQSNEDPFT

SEQ ID NO: 30444 - protein, 226 aa, Artificial Sequence
  Description of Artificial Sequence: Synthetic polypeptide
  XENP021065 7G8_H0.134_L0_Fab Heavy Chain
EVKLEESGGGLVQPGGSMKLSCAASGFTFSDAWMDWVRQSPEKGLEWVAEIRTKANNHATYYAESVKGRFTISRDDSKSSVYLQMNSLRAEDTGIYYCTRLANYDWYFDVWGAGTTVTVSSASTKGPSVFPLAPSSKSTSGGTAALGCLVKDYFPEPVTVSWNSGALTSGVHTFPAVLQSSGLYSLSSVVTVPSSSLGTQTYICNVNHKPSNTKVDKKVEPKSCGS

SEQ ID NO: 30445 - protein, 121 aa, Artificial Sequence; identical to SEQ ID NO: 19546
  Description of Artificial Sequence: Synthetic polypeptide
  VH of XENP021065

SEQ ID NO: 30446 - protein, 5 aa, Artificial Sequence
  Description of Artificial Sequence: Synthetic peptide
  XENP021065 vhCDR1
DAWMD

SEQ ID NO: 30447 - protein, 19 aa, Artificial Sequence
  Description of Artificial Sequence: Synthetic peptide
  XENP021065 vhCDR2
EIRTKANNHATYYAESVKG

SEQ ID NO: 30448 - protein, 10 aa, Artificial Sequence
  Description of Artificial Sequence: Synthetic peptide
  XENP021065 vhCDR3
LANYDWYFDV

SEQ ID NO: 30449 - protein, 218 aa, Artificial Sequence; identical to SEQ ID NO: 17590
  Description of Artificial Sequence: Synthetic polypeptide
  XENP021065 7G8_H0.134_L0_Fab Light Chain

SEQ ID NO: 30450 - protein, 111 aa, Artificial Sequence; identical to SEQ ID NO: 17591
  Description of Artificial Sequence: Synthetic polypeptide
  VL of XENP021065

SEQ ID NO: 30451 - protein, 15 aa, Artificial Sequence
  Description of Artificial Sequence: Synthetic peptide
  XENP021065 vlCDR1
KASQSVDYDGDSYMN

SEQ ID NO: 30452 - protein, 7 aa, Artificial Sequence
  Description of Artificial Sequence: Synthetic peptide
  XENP021065 vlCDR2
AASNLES

SEQ ID NO: 30453 - protein, 9 aa, Artificial Sequence
  Description of Artificial Sequence: Synthetic peptide
  XENP021065 vlCDR3
QQSNEDPFT

SEQ ID NO: 30454 - protein, 226 aa, Artificial Sequence
  Description of Artificial Sequence: Synthetic polypeptide
  XENP021066 7G8_H0.141_L0_Fab Heavy Chain
EVKLEESGGGLVQPGGSMKLSCAASGFTFSDAWMDWVRQSPEKGLEWVAEIRTKANNHATYYAESVKGRFTISRDDSKSSVYLQMNSLRAEDTGIYYCTRLANWNWYFDVWGAGTTVTVSSASTKGPSVFPLAPSSKSTSGGTAALGCLVKDYFPEPVTVSWNSGALTSGVHTFPAVLQSSGLYSLSSVVTVPSSSLGTQTYICNVNHKPSNTKVDKKVEPKSCGS

SEQ ID NO: 30455 - protein, 121 aa, Artificial Sequence; identical to SEQ ID NO: 19616
  Description of Artificial Sequence: Synthetic polypeptide
  VH of XENP021066

SEQ ID NO: 30456 - protein, 5 aa, Artificial Sequence
  Description of Artificial Sequence: Synthetic peptide
  XENP021066 vhCDR1
DAWMD

SEQ ID NO: 30457 - protein, 19 aa, Artificial Sequence
  Description of Artificial Sequence: Synthetic peptide
  XENP021066 vhCDR2
EIRTKANNHATYYAESVKG

SEQ ID NO: 30458 - protein, 10 aa, Artificial Sequence
  Description of Artificial Sequence: Synthetic peptide
  XENP021066 vhCDR3
LANWNWYFDV

SEQ ID NO: 30459 - protein, 218 aa, Artificial Sequence; identical to SEQ ID NO: 17590
  Description of Artificial Sequence: Synthetic polypeptide
  XENP021066 7G8_H0.141_L0_Fab Light Chain

SEQ ID NO: 30460 - protein, 111 aa, Artificial Sequence; identical to SEQ ID NO: 17591
  Description of Artificial Sequence: Synthetic polypeptide
  VL of XENP021066

SEQ ID NO: 30461 - protein, 15 aa, Artificial Sequence
  Description of Artificial Sequence: Synthetic peptide
  XENP021066 vlCDR1
KASQSVDYDGDSYMN

SEQ ID NO: 30462 - protein, 7 aa, Artificial Sequence
  Description of Artificial Sequence: Synthetic peptide
  XENP021066 vlCDR2
AASNLES

SEQ ID NO: 30463 - protein, 9 aa, Artificial Sequence
  Description of Artificial Sequence: Synthetic peptide
  XENP021066 vlCDR3
QQSNEDPFT

SEQ ID NO: 30464 - protein, 226 aa, Artificial Sequence
  Description of Artificial Sequence: Synthetic polypeptide
  XENP021067 7G8_H0.142_L0_Fab Heavy Chain
EVKLEESGGGLVQPGGSMKLSCAASGFTFSDAWMDWVRQSPEKGLEWVAEIRTKANNHATYYAESVKGRFTISRDDSKSSVYLQMNSLRAEDTGIYYCTRLANWEWYFDVWGAGTTVTVSSASTKGPSVFPLAPSSKSTSGGTAALGCLVKDYFPEPVTVSWNSGALTSGVHTFPAVLQSSGLYSLSSVVTVPSSSLGTQTYICNVNHKPSNTKVDKKVEPKSCGS

SEQ ID NO: 30465 - protein, 121 aa, Artificial Sequence; identical to SEQ ID NO: 19626
  Description of Artificial Sequence: Synthetic polypeptide
  VH of XENP021067

SEQ ID NO: 30466 - protein, 5 aa, Artificial Sequence
  Description of Artificial Sequence: Synthetic peptide
  XENP021067 vhCDR1
DAWMD

SEQ ID NO: 30467 - protein, 19 aa, Artificial Sequence
  Description of Artificial Sequence: Synthetic peptide
  XENP021067 vhCDR2
EIRTKANNHATYYAESVKG

SEQ ID NO: 30468 - protein, 10 aa, Artificial Sequence
  Description of Artificial Sequence: Synthetic peptide
  XENP021067 vhCDR3
LANWEWYFDV

SEQ ID NO: 30469 - protein, 218 aa, Artificial Sequence; identical to SEQ ID NO: 17590
  Description of Artificial Sequence: Synthetic polypeptide
  XENP021067 7G8_H0.142_L0_Fab Light Chain

SEQ ID NO: 30470 - protein, 111 aa, Artificial Sequence; identical to SEQ ID NO: 17591
  Description of Artificial Sequence: Synthetic polypeptide
  VL of XENP021067

SEQ ID NO: 30471 - protein, 15 aa, Artificial Sequence
  Description of Artificial Sequence: Synthetic peptide
  XENP021067 vlCDR1
KASQSVDYDGDSYMN

SEQ ID NO: 30472 - protein, 7 aa, Artificial Sequence
  Description of Artificial Sequence: Synthetic peptide
  XENP021067 vlCDR2
AASNLES

SEQ ID NO: 30473 - protein, 9 aa, Artificial Sequence
  Description of Artificial Sequence: Synthetic peptide
  XENP021067 vlCDR3
QQSNEDPFT

SEQ ID NO: 30474 - protein, 226 aa, Artificial Sequence
  Description of Artificial Sequence: Synthetic polypeptide
  XENP021068 7G8_H0.143_L0_Fab Heavy Chain
EVKLEESGGGLVQPGGSMKLSCAASGFTFSDAWMDWVRQSPEKGLEWVAEIRTKANNHATYYAESVKGRFTISRDDSKSSVYLQMNSLRAEDTGIYYCTRLANWHWYFDVWGAGTTVTVSSASTKGPSVFPLAPSSKSTSGGTAALGCLVKDYFPEPVTVSWNSGALTSGVHTFPAVLQSSGLYSLSSVVTVPSSSLGTQTYICNVNHKPSNTKVDKKVEPKSCGS

SEQ ID NO: 30475 - protein, 121 aa, Artificial Sequence; identical to SEQ ID NO: 19636
  Description of Artificial Sequence: Synthetic polypeptide
  VH of XENP021068

SEQ ID NO: 30476 - protein, 5 aa, Artificial Sequence
  Description of Artificial Sequence: Synthetic peptide
  XENP021068 vhCDR1
DAWMD

SEQ ID NO: 30477 - protein, 19 aa, Artificial Sequence
  Description of Artificial Sequence: Synthetic peptide
  XENP021068 vhCDR2
EIRTKANNHATYYAESVKG

SEQ ID NO: 30478 - protein, 10 aa, Artificial Sequence
  Description of Artificial Sequence: Synthetic peptide
  XENP021068 vhCDR3
LANWHWYFDV

SEQ ID NO: 30479 - protein, 218 aa, Artificial Sequence; identical to SEQ ID NO: 17590
  Description of Artificial Sequence: Synthetic polypeptide
  XENP021068 7G8_H0.143_L0_Fab Light Chain

SEQ ID NO: 30480 - protein, 111 aa, Artificial Sequence; identical to SEQ ID NO: 17591
  Description of Artificial Sequence: Synthetic polypeptide
  VL of XENP021068

SEQ ID NO: 30481 - protein, 15 aa, Artificial Sequence
  Description of Artificial Sequence: Synthetic peptide
  XENP021068 vlCDR1
KASQSVDYDGDSYMN

SEQ ID NO: 30482 - protein, 7 aa, Artificial Sequence
  Description of Artificial Sequence: Synthetic peptide
  XENP021068 vlCDR2
AASNLES

SEQ ID NO: 30483 - protein, 9 aa, Artificial Sequence
  Description of Artificial Sequence: Synthetic peptide
  XENP021068 vlCDR3
QQSNEDPFT

SEQ ID NO: 30484 - protein, 226 aa, Artificial Sequence
  Description of Artificial Sequence: Synthetic polypeptide
  XENP021069 7G8_H0.145_L0_Fab Heavy Chain
EVKLEESGGGLVQPGGSMKLSCAASGFTFSDAWMDWVRQSPEKGLEWVAEIRTKANNHATYYAESVKGRFTISRDDSKSSVYLQMNSLRAEDTGIYYCTRLANWLWYFDVWGAGTTVTVSSASTKGPSVFPLAPSSKSTSGGTAALGCLVKDYFPEPVTVSWNSGALTSGVHTFPAVLQSSGLYSLSSVVTVPSSSLGTQTYICNVNHKPSNTKVDKKVEPKSCGS

SEQ ID NO: 30485 - protein, 121 aa, Artificial Sequence; identical to SEQ ID NO: 19656
  Description of Artificial Sequence: Synthetic polypeptide
  VH of XENP021069

SEQ ID NO: 30486 - protein, 5 aa, Artificial Sequence
  Description of Artificial Sequence: Synthetic peptide
  XENP021069 vhCDR1
DAWMD

SEQ ID NO: 30487 - protein, 19 aa, Artificial Sequence
  Description of Artificial Sequence: Synthetic peptide
  XENP021069 vhCDR2
EIRTKANNHATYYAESVKG

SEQ ID NO: 30488 - protein, 10 aa, Artificial Sequence
  Description of Artificial Sequence: Synthetic peptide
  XENP021069 vhCDR3
LANWLWYFDV

SEQ ID NO: 30489 - protein, 218 aa, Artificial Sequence; identical to SEQ ID NO: 17590
  Description of Artificial Sequence: Synthetic polypeptide
  XENP021069 7G8_H0.145_L0_Fab Light Chain

SEQ ID NO: 30490 - protein, 111 aa, Artificial Sequence; identical to SEQ ID NO: 17591
  Description of Artificial Sequence: Synthetic polypeptide
  VL of XENP021069

SEQ ID NO: 30491 - protein, 15 aa, Artificial Sequence
  Description of Artificial Sequence: Synthetic peptide
  XENP021069 vlCDR1
KASQSVDYDGDSYMN

SEQ ID NO: 30492 - protein, 7 aa, Artificial Sequence
  Description of Artificial Sequence: Synthetic peptide
  XENP021069 vlCDR2
AASNLES

SEQ ID NO: 30493 - protein, 9 aa, Artificial Sequence
  Description of Artificial Sequence: Synthetic peptide
  XENP021069 vlCDR3
QQSNEDPFT

SEQ ID NO: 30494 - protein, 226 aa, Artificial Sequence
  Description of Artificial Sequence: Synthetic polypeptide
  XENP021070 7G8_H0.146_L0_Fab Heavy Chain
EVKLEESGGGLVQPGGSMKLSCAASGFTFSDAWMDWVRQSPEKGLEWVAEIRTKANNHATYYAESVKGRFTISRDDSKSSVYLQMNSLRAEDTGIYYCTRLANWGWYFDVWGAGTTVTVSSASTKGPSVFPLAPSSKSTSGGTAALGCLVKDYFPEPVTVSWNSGALTSGVHTFPAVLQSSGLYSLSSVVTVPSSSLGTQTYICNVNHKPSNTKVDKKVEPKSCGS

SEQ ID NO: 30495 - protein, 121 aa, Artificial Sequence; identical to SEQ ID NO: 19666
  Description of Artificial Sequence: Synthetic polypeptide
  VH of XENP021070

SEQ ID NO: 30496 - protein, 5 aa, Artificial Sequence
  Description of Artificial Sequence: Synthetic peptide
  XENP021070 vhCDR1
DAWMD

SEQ ID NO: 30497 - protein, 19 aa, Artificial Sequence
  Description of Artificial Sequence: Synthetic peptide
  XENP021070 vhCDR2
EIRTKANNHATYYAESVKG

SEQ ID NO: 30498 - protein, 10 aa, Artificial Sequence
  Description of Artificial Sequence: Synthetic peptide
  XENP021070 vhCDR3
LANWGWYFDV

SEQ ID NO: 30499 - protein, 218 aa, Artificial Sequence; identical to SEQ ID NO: 17590
  Description of Artificial Sequence: Synthetic polypeptide
  XENP021070 7G8_H0.146_L0_Fab Light Chain

SEQ ID NO: 30500 - protein, 111 aa, Artificial Sequence; identical to SEQ ID NO: 17591
  Description of Artificial Sequence: Synthetic polypeptide
  VL of XENP021070

SEQ ID NO: 30501 - protein, 15 aa, Artificial Sequence
  Description of Artificial Sequence: Synthetic peptide
  XENP021070 vlCDR1
KASQSVDYDGDSYMN

SEQ ID NO: 30502 - protein, 7 aa, Artificial Sequence
  Description of Artificial Sequence: Synthetic peptide
  XENP021070 vlCDR2
AASNLES

SEQ ID NO: 30503 - protein, 9 aa, Artificial Sequence
  Description of Artificial Sequence: Synthetic peptide
  XENP021070 vlCDR3
QQSNEDPFT

SEQ ID NO: 30504 - protein, 226 aa, Artificial Sequence
  Description of Artificial Sequence: Synthetic polypeptide
  XENP021071 7G8_H0.147_L0_Fab Heavy Chain
EVKLEESGGGLVQPGGSMKLSCAASGFTFSDAWMDWVRQSPEKGLEWVAEIRTKANNHATYYAESVKGRFTISRDDSKSSVYLQMNSLRAEDTGIYYCTRLANWYWYFDVWGAGTTVTVSSASTKGPSVFPLAPSSKSTSGGTAALGCLVKDYFPEPVTVSWNSGALTSGVHTFPAVLQSSGLYSLSSVVTVPSSSLGTQTYICNVNHKPSNTKVDKKVEPKSCGS

SEQ ID NO: 30505 - protein, 121 aa, Artificial Sequence; identical to SEQ ID NO: 19676
  Description of Artificial Sequence: Synthetic polypeptide
  VH of XENP021071

SEQ ID NO: 30506 - protein, 5 aa, Artificial Sequence
  Description of Artificial Sequence: Synthetic peptide
  XENP021071 vhCDR1
DAWMD

SEQ ID NO: 30507 - protein, 19 aa, Artificial Sequence
  Description of Artificial Sequence: Synthetic peptide
  XENP021071 vhCDR2
EIRTKANNHATYYAESVKG

SEQ ID NO: 30508 - protein, 10 aa, Artificial Sequence
  Description of Artificial Sequence: Synthetic peptide
  XENP021071 vhCDR3
LANWYWYFDV

SEQ ID NO: 30509 - protein, 218 aa, Artificial Sequence; identical to SEQ ID NO: 17590
  Description of Artificial Sequence: Synthetic polypeptide
  XENP021071 7G8_H0.147_L0_Fab Light Chain

SEQ ID NO: 30510 - protein, 111 aa, Artificial Sequence; identical to SEQ ID NO: 17591
  Description of Artificial Sequence: Synthetic polypeptide
  VL of XENP021071

SEQ ID NO: 30511 - protein, 15 aa, Artificial Sequence
  Description of Artificial Sequence: Synthetic peptide
  XENP021071 vlCDR1
KASQSVDYDGDSYMN

SEQ ID NO: 30512 - protein, 7 aa, Artificial Sequence
  Description of Artificial Sequence: Synthetic peptide
  XENP021071 vlCDR2
AASNLES

SEQ ID NO: 30513 - protein, 9 aa, Artificial Sequence
  Description of Artificial Sequence: Synthetic peptide
  XENP021071 vlCDR3
QQSNEDPFT

SEQ ID NO: 30514 - protein, 226 aa, Artificial Sequence
  Description of Artificial Sequence: Synthetic polypeptide
  XENP021072 7G8_H0.148_L0_Fab Heavy Chain
EVKLEESGGGLVQPGGSMKLSCAASGFTFSDAWMDWVRQSPEKGLEWVAEIRTKANNHATYYAESVKGRFTISRDDSKSSVYLQMNSLRAEDTGIYYCTRLANWDYYFDVWGAGTTVTVSSASTKGPSVFPLAPSSKSTSGGTAALGCLVKDYFPEPVTVSWNSGALTSGVHTFPAVLQSSGLYSLSSVVTVPSSSLGTQTYICNVNHKPSNTKVDKKVEPKSCGS

SEQ ID NO: 30515 - protein, 121 aa, Artificial Sequence; identical to SEQ ID NO: 19686
  Description of Artificial Sequence: Synthetic polypeptide
  VH of XENP021072

SEQ ID NO: 30516 - protein, 5 aa, Artificial Sequence
  Description of Artificial Sequence: Synthetic peptide
  XENP021072 vhCDR1
DAWMD

SEQ ID NO: 30517 - protein, 19 aa, Artificial Sequence
  Description of Artificial Sequence: Synthetic peptide
  XENP021072 vhCDR2
EIRTKANNHATYYAESVKG

SEQ ID NO: 30518 - protein, 10 aa, Artificial Sequence
  Description of Artificial Sequence: Synthetic peptide
  XENP021072 vhCDR3
LANWDYYFDV

SEQ ID NO: 30519 - protein, 218 aa, Artificial Sequence; identical to SEQ ID NO: 17590
  Description of Artificial Sequence: Synthetic polypeptide
  XENP021072 7G8_H0.148_L0_Fab Light Chain

SEQ ID NO: 30520 - protein, 111 aa, Artificial Sequence; identical to SEQ ID NO: 17591
  Description of Artificial Sequence: Synthetic polypeptide
  VL of XENP021072

SEQ ID NO: 30521 - protein, 15 aa, Artificial Sequence
  Description of Artificial Sequence: Synthetic peptide
  XENP021072 vlCDR1
KASQSVDYDGDSYMN

SEQ ID NO: 30522 - protein, 7 aa, Artificial Sequence
  Description of Artificial Sequence: Synthetic peptide
  XENP021072 vlCDR2
AASNLES

SEQ ID NO: 30523 - protein, 9 aa, Artificial Sequence
  Description of Artificial Sequence: Synthetic peptide
  XENP021072 vlCDR3
QQSNEDPFT

SEQ ID NO: 30524 - protein, 226 aa, Artificial Sequence; identical to SEQ ID NO: 29134
  Description of Artificial Sequence: Synthetic polypeptide
  XENP021074 7G8_H0_L0.1_Fab Heavy Chain

SEQ ID NO: 30525 - protein, 121 aa, Artificial Sequence; identical to SEQ ID NO: 17586
  Description of Artificial Sequence: Synthetic polypeptide
  VH of XENP021074

SEQ ID NO: 30526 - protein, 5 aa, Artificial Sequence
  Description of Artificial Sequence: Synthetic peptide
  XENP021074 vhCDR1
DAWMD

SEQ ID NO: 30527 - protein, 19 aa, Artificial Sequence
  Description of Artificial Sequence: Synthetic peptide
  XENP021074 vhCDR2
EIRTKANNHATYYAESVKG

SEQ ID NO: 30528 - protein, 10 aa, Artificial Sequence
  Description of Artificial Sequence: Synthetic peptide
  XENP021074 vhCDR3
LANWDWYFDV

SEQ ID NO: 30529 - protein, 218 aa, Artificial Sequence; identical to SEQ ID NO: 19700
  Description of Artificial Sequence: Synthetic polypeptide
  XENP021074 7G8_H0_L0.1_Fab Light Chain

SEQ ID NO: 30530 - protein, 111 aa, Artificial Sequence; identical to SEQ ID NO: 19701
  Description of Artificial Sequence: Synthetic polypeptide
  VL of XENP021074

SEQ ID NO: 30531 - protein, 15 aa, Artificial Sequence
  Description of Artificial Sequence: Synthetic peptide
  XENP021074 vlCDR1
KASQSVNYDGDSYMN

SEQ ID NO: 30532 - protein, 7 aa, Artificial Sequence
  Description of Artificial Sequence: Synthetic peptide
  XENP021074 vlCDR2
AASNLES

SEQ ID NO: 30533 - protein, 9 aa, Artificial Sequence
  Description of Artificial Sequence: Synthetic peptide
  XENP021074 vlCDR3
QQSNEDPFT

SEQ ID NO: 30534 - protein, 226 aa, Artificial Sequence; identical to SEQ ID NO: 29134
  Description of Artificial Sequence: Synthetic polypeptide
  XENP021075 7G8_H0_L0.2_Fab Heavy Chain

SEQ ID NO: 30535 - protein, 121 aa, Artificial Sequence; identical to SEQ ID NO: 17586
  Description of Artificial Sequence: Synthetic polypeptide
  VH of XENP021075

SEQ ID NO: 30536 - protein, 5 aa, Artificial Sequence
  Description of Artificial Sequence: Synthetic peptide
  XENP021075 vhCDR1
DAWMD

SEQ ID NO: 30537 - protein, 19 aa, Artificial Sequence
  Description of Artificial Sequence: Synthetic peptide
  XENP021075 vhCDR2
EIRTKANNHATYYAESVKG

SEQ ID NO: 30538 - protein, 10 aa, Artificial Sequence
  Description of Artificial Sequence: Synthetic peptide
  XENP021075 vhCDR3
LANWDWYFDV

SEQ ID NO: 30539 - protein, 218 aa, Artificial Sequence; identical to SEQ ID NO: 19710
  Description of Artificial Sequence: Synthetic polypeptide
  XENP021075 7G8_H0_L0.2_Fab Light Chain

SEQ ID NO: 30540 - protein, 111 aa, Artificial Sequence; identical to SEQ ID NO: 19711
  Description of Artificial Sequence: Synthetic polypeptide
  VL of XENP021075

SEQ ID NO: 30541 - protein, 15 aa, Artificial Sequence
  Description of Artificial Sequence: Synthetic peptide
  XENP021075 vlCDR1
KASQSVEYDGDSYMN

SEQ ID NO: 30542 - protein, 7 aa, Artificial Sequence
  Description of Artificial Sequence: Synthetic peptide
  XENP021075 vlCDR2
AASNLES

SEQ ID NO: 30543 - protein, 9 aa, Artificial Sequence
  Description of Artificial Sequence: Synthetic peptide
  XENP021075 vlCDR3
QQSNEDPFT

SEQ ID NO: 30544 - protein, 226 aa, Artificial Sequence; identical to SEQ ID NO: 29134
  Description of Artificial Sequence: Synthetic polypeptide
  XENP021076 7G8_H0_L0.3_Fab Heavy Chain

SEQ ID NO: 30545 - protein, 121 aa, Artificial Sequence; identical to SEQ ID NO: 17586
  Description of Artificial Sequence: Synthetic polypeptide
  VH of XENP021076

SEQ ID NO: 30546 - protein, 5 aa, Artificial Sequence
  Description of Artificial Sequence: Synthetic peptide
  XENP021076 vhCDR1
DAWMD

SEQ ID NO: 30547 - protein, 19 aa, Artificial Sequence
  Description of Artificial Sequence: Synthetic peptide
  XENP021076 vhCDR2
EIRTKANNHATYYAESVKG

SEQ ID NO: 30548 - protein, 10 aa, Artificial Sequence
  Description of Artificial Sequence: Synthetic peptide
  XENP021076 vhCDR3
LANWDWYFDV

SEQ ID NO: 30549 - protein, 218 aa, Artificial Sequence; identical to SEQ ID NO: 19720
  Description of Artificial Sequence: Synthetic polypeptide
  XENP021076 7G8_H0_L0.3_Fab Light Chain

SEQ ID NO: 30550 - protein, 111 aa, Artificial Sequence; identical to SEQ ID NO: 19721
  Description of Artificial Sequence: Synthetic polypeptide
  VL of XENP021076

SEQ ID NO: 30551 - protein, 15 aa, Artificial Sequence
  Description of Artificial Sequence: Synthetic peptide
  XENP021076 vlCDR1
KASQSVHYDGDSYMN

SEQ ID NO: 30552 - protein, 7 aa, Artificial Sequence
  Description of Artificial Sequence: Synthetic peptide
  XENP021076 vlCDR2
AASNLES

SEQ ID NO: 30553 - protein, 9 aa, Artificial Sequence
  Description of Artificial Sequence: Synthetic peptide
  XENP021076 vlCDR3
QQSNEDPFT

SEQ ID NO: 30554 - protein, 226 aa, Artificial Sequence; identical to SEQ ID NO: 29134
  Description of Artificial Sequence: Synthetic polypeptide
  XENP021077 7G8_H0_L0.4_Fab Heavy Chain

SEQ ID NO: 30555 - protein, 121 aa, Artificial Sequence; identical to SEQ ID NO: 17586
  Description of Artificial Sequence: Synthetic polypeptide
  VH of XENP021077

SEQ ID NO: 30556 - protein, 5 aa, Artificial Sequence
  Description of Artificial Sequence: Synthetic peptide
  XENP021077 vhCDR1
DAWMD

SEQ ID NO: 30557 - protein, 19 aa, Artificial Sequence
  Description of Artificial Sequence: Synthetic peptide
  XENP021077 vhCDR2
EIRTKANNHATYYAESVKG

SEQ ID NO: 30558 - protein, 10 aa, Artificial Sequence
  Description of Artificial Sequence: Synthetic peptide
  XENP021077 vhCDR3
LANWDWYFDV

SEQ ID NO: 30559 - protein, 218 aa, Artificial Sequence; identical to SEQ ID NO: 19730
  Description of Artificial Sequence: Synthetic polypeptide
  XENP021077 7G8_H0_L0.4_Fab Light Chain

SEQ ID NO: 30560 - protein, 111 aa, Artificial Sequence; identical to SEQ ID NO: 19731
  Description of Artificial Sequence: Synthetic polypeptide
  VL of XENP021077

SEQ ID NO: 30561 - protein, 15 aa, Artificial Sequence
  Description of Artificial Sequence: Synthetic peptide
  XENP021077 vlCDR1
KASQSVSYDGDSYMN

SEQ ID NO: 30562 - protein, 7 aa, Artificial Sequence
  Description of Artificial Sequence: Synthetic peptide
  XENP021077 vlCDR2
AASNLES

SEQ ID NO: 30563 - protein, 9 aa, Artificial Sequence
  Description of Artificial Sequence: Synthetic peptide
  XENP021077 vlCDR3
QQSNEDPFT

SEQ ID NO: 30564 - protein, 226 aa, Artificial Sequence; identical to SEQ ID NO: 29134
  Description of Artificial Sequence: Synthetic polypeptide
  XENP021078 7G8_H0_L0.5_Fab Heavy Chain

SEQ ID NO: 30565 - protein, 121 aa, Artificial Sequence; identical to SEQ ID NO: 17586
  Description of Artificial Sequence: Synthetic polypeptide
  VH of XENP021078

SEQ ID NO: 30566 - protein, 5 aa, Artificial Sequence
  Description of Artificial Sequence: Synthetic peptide
  XENP021078 vhCDR1
DAWMD

SEQ ID NO: 30567 - protein, 19 aa, Artificial Sequence
  Description of Artificial Sequence: Synthetic peptide
  XENP021078 vhCDR2
EIRTKANNHATYYAESVKG

SEQ ID NO: 30568 - protein, 10 aa, Artificial Sequence
  Description of Artificial Sequence: Synthetic peptide
  XENP021078 vhCDR3
LANWDWYFDV

SEQ ID NO: 30569 - protein, 218 aa, Artificial Sequence; identical to SEQ ID NO: 19740
  Description of Artificial Sequence: Synthetic polypeptide
  XENP021078 7G8_H0_L0.5_Fab Light Chain

SEQ ID NO: 30570 - protein, 111 aa, Artificial Sequence; identical to SEQ ID NO: 19741
  Description of Artificial Sequence: Synthetic polypeptide
  VL of XENP021078

SEQ ID NO: 30571 - protein, 15 aa, Artificial Sequence
  Description of Artificial Sequence: Synthetic peptide
  XENP021078 vlCDR1
KASQSVRYDGDSYMN

SEQ ID NO: 30572 - protein, 7 aa, Artificial Sequence
  Description of Artificial Sequence: Synthetic peptide
  XENP021078 vlCDR2
AASNLES

SEQ ID NO: 30573 - protein, 9 aa, Artificial Sequence
  Description of Artificial Sequence: Synthetic peptide
  XENP021078 vlCDR3
QQSNEDPFT

SEQ ID NO: 30574 - protein, 226 aa, Artificial Sequence; identical to SEQ ID NO: 29134
  Description of Artificial Sequence: Synthetic polypeptide
  XENP021079 7G8_H0_L0.6_Fab Heavy Chain

SEQ ID NO: 30575 - protein, 121 aa, Artificial Sequence; identical to SEQ ID NO: 17586
  Description of Artificial Sequence: Synthetic polypeptide
  VH of XENP021079

SEQ ID NO: 30576 - protein, 5 aa, Artificial Sequence
  Description of Artificial Sequence: Synthetic peptide
  XENP021079 vhCDR1
DAWMD

SEQ ID NO: 30577 - protein, 19 aa, Artificial Sequence
  Description of Artificial Sequence: Synthetic peptide
  XENP021079 vhCDR2
EIRTKANNHATYYAESVKG

SEQ ID NO: 30578 - protein, 10 aa, Artificial Sequence
  Description of Artificial Sequence: Synthetic peptide
  XENP021079 vhCDR3
LANWDWYFDV

SEQ ID NO: 30579 - protein, 218 aa, Artificial Sequence; identical to SEQ ID NO: 19750
  Description of Artificial Sequence: Synthetic polypeptide
  XENP021079 7G8_H0_L0.6_Fab Light Chain

SEQ ID NO: 30580 - protein, 111 aa, Artificial Sequence; identical to SEQ ID NO: 19751
  Description of Artificial Sequence: Synthetic polypeptide
  VL of XENP021079

SEQ ID NO: 30581 - protein, 15 aa, Artificial Sequence
  Description of Artificial Sequence: Synthetic peptide
  XENP021079 vlCDR1
KASQSVLYDGDSYMN

SEQ ID NO: 30582 - protein, 7 aa, Artificial Sequence
  Description of Artificial Sequence: Synthetic peptide
  XENP021079 vlCDR2
AASNLES

SEQ ID NO: 30583 - protein, 9 aa, Artificial Sequence
  Description of Artificial Sequence: Synthetic peptide
  XENP021079 vlCDR3
QQSNEDPFT

SEQ ID NO: 30584 - protein, 226 aa, Artificial Sequence; identical to SEQ ID NO: 29134
  Description of Artificial Sequence: Synthetic polypeptide
  XENP021080 7G8_H0_L0.7_Fab Heavy Chain

SEQ ID NO: 30585 - protein, 121 aa, Artificial Sequence; identical to SEQ ID NO: 17586
  Description of Artificial Sequence: Synthetic polypeptide
  VH of XENP021080

SEQ ID NO: 30586 - protein, 5 aa, Artificial Sequence
  Description of Artificial Sequence: Synthetic peptide
  XENP021080 vhCDR1
DAWMD

SEQ ID NO: 30587 - protein, 19 aa, Artificial Sequence
  Description of Artificial Sequence: Synthetic peptide
  XENP021080 vhCDR2
EIRTKANNHATYYAESVKG

SEQ ID NO: 30588 - protein, 10 aa, Artificial Sequence
  Description of Artificial Sequence: Synthetic peptide
  XENP021080 vhCDR3
LANWDWYFDV

SEQ ID NO: 30589 - protein, 218 aa, Artificial Sequence; identical to SEQ ID NO: 19760
  Description of Artificial Sequence: Synthetic polypeptide
  XENP021080 7G8_H0_L0.7_Fab Light Chain

SEQ ID NO: 30590 - protein, 111 aa, Artificial Sequence; identical to SEQ ID NO: 19761
  Description of Artificial Sequence: Synthetic polypeptide
  VL of XENP021080

SEQ ID NO: 30591 - protein, 15 aa, Artificial Sequence
  Description of Artificial Sequence: Synthetic peptide
  XENP021080 vlCDR1
KASQSVTYDGDSYMN

SEQ ID NO: 30592 - protein, 7 aa, Artificial Sequence
  Description of Artificial Sequence: Synthetic peptide
  XENP021080 vlCDR2
AASNLES

SEQ ID NO: 30593 - protein, 9 aa, Artificial Sequence
  Description of Artificial Sequence: Synthetic peptide
  XENP021080 vlCDR3
QQSNEDPFT

SEQ ID NO: 30594 - protein, 226 aa, Artificial Sequence; identical to SEQ ID NO: 29134
  Description of Artificial Sequence: Synthetic polypeptide
  XENP021081 7G8_H0_L0.8_Fab Heavy Chain

SEQ ID NO: 30595 - protein, 121 aa, Artificial Sequence; identical to SEQ ID NO: 17586
  Description of Artificial Sequence: Synthetic polypeptide
  VH of XENP021081

SEQ ID NO: 30596 - protein, 5 aa, Artificial Sequence
  Description of Artificial Sequence: Synthetic peptide
  XENP021081 vhCDR1
DAWMD

SEQ ID NO: 30597 - protein, 19 aa, Artificial Sequence
  Description of Artificial Sequence: Synthetic peptide
  XENP021081 vhCDR2
EIRTKANNHATYYAESVKG

SEQ ID NO: 30598 - protein, 10 aa, Artificial Sequence
  Description of Artificial Sequence: Synthetic peptide
  XENP021081 vhCDR3
LANWDWYFDV

SEQ ID NO: 30599 - protein, 218 aa, Artificial Sequence; identical to SEQ ID NO: 19770
  Description of Artificial Sequence: Synthetic polypeptide
  XENP021081 7G8_H0_L0.8_Fab Light Chain

SEQ ID NO: 30600 - protein, 111 aa, Artificial Sequence; identical to SEQ ID NO: 19771
  Description of Artificial Sequence: Synthetic polypeptide
  VL of XENP021081

SEQ ID NO: 30601 - protein, 15 aa, Artificial Sequence
  Description of Artificial Sequence: Synthetic peptide
  XENP021081 vlCDR1
KASQSVGYDGDSYMN

SEQ ID NO: 30602 - protein, 7 aa, Artificial Sequence
  Description of Artificial Sequence: Synthetic peptide
  XENP021081 vlCDR2
AASNLES

SEQ ID NO: 30603 - protein, 9 aa, Artificial Sequence
  Description of Artificial Sequence: Synthetic peptide
  XENP021081 vlCDR3
QQSNEDPFT

SEQ ID NO: 30604 - protein, 226 aa, Artificial Sequence; identical to SEQ ID NO: 29134
  Description of Artificial Sequence: Synthetic polypeptide
  XENP021082 7G8_H0_L0.9_Fab Heavy Chain

SEQ ID NO: 30605 - protein, 121 aa, Artificial Sequence; identical to SEQ ID NO: 17586
  Description of Artificial Sequence: Synthetic polypeptide
  VH of XENP021082

SEQ ID NO: 30606 - protein, 5 aa, Artificial Sequence
  Description of Artificial Sequence: Synthetic peptide
  XENP021082 vhCDR1
DAWMD

SEQ ID NO: 30607 - protein, 19 aa, Artificial Sequence
  Description of Artificial Sequence: Synthetic peptide
  XENP021082 vhCDR2
EIRTKANNHATYYAESVKG

SEQ ID NO: 30608 - protein, 10 aa, Artificial Sequence
  Description of Artificial Sequence: Synthetic peptide
  XENP021082 vhCDR3
LANWDWYFDV

SEQ ID NO: 30609 - protein, 218 aa, Artificial Sequence; identical to SEQ ID NO: 19780
  Description of Artificial Sequence: Synthetic polypeptide
  XENP021082 7G8_H0_L0.9_Fab Light Chain

SEQ ID NO: 30610 - protein, 111 aa, Artificial Sequence; identical to SEQ ID NO: 19781
  Description of Artificial Sequence: Synthetic polypeptide
  VL of XENP021082

SEQ ID NO: 30611 - protein, 15 aa, Artificial Sequence
  Description of Artificial Sequence: Synthetic peptide
  XENP021082 vlCDR1
KASQSVYYDGDSYMN

SEQ ID NO: 30612 - protein, 7 aa, Artificial Sequence
  Description of Artificial Sequence: Synthetic peptide
  XENP021082 vlCDR2
AASNLES

SEQ ID NO: 30613 - protein, 9 aa, Artificial Sequence
  Description of Artificial Sequence: Synthetic peptide
  XENP021082 vlCDR3
QQSNEDPFT

SEQ ID NO: 30614 - protein, 226 aa, Artificial Sequence; identical to SEQ ID NO: 29134
  Description of Artificial Sequence: Synthetic polypeptide
  XENP021083 7G8_H0_L0.10_Fab Heavy Chain

SEQ ID NO: 30615 - protein, 121 aa, Artificial Sequence; identical to SEQ ID NO: 17586
  Description of Artificial Sequence: Synthetic polypeptide
  VH of XENP021083

SEQ ID NO: 30616 - protein, 5 aa, Artificial Sequence
  Description of Artificial Sequence: Synthetic peptide
  XENP021083 vhCDR1
DAWMD

SEQ ID NO: 30617 - protein, 19 aa, Artificial Sequence
  Description of Artificial Sequence: Synthetic peptide
  XENP021083 vhCDR2
EIRTKANNHATYYAESVKG

SEQ ID NO: 30618 - protein, 10 aa, Artificial Sequence
  Description of Artificial Sequence: Synthetic peptide
  XENP021083 vhCDR3
LANWDWYFDV

SEQ ID NO: 30619 - protein, 218 aa, Artificial Sequence; identical to SEQ ID NO: 19790
  Description of Artificial Sequence: Synthetic polypeptide
  XENP021083 7G8_H0_L0.10_Fab Light Chain

SEQ ID NO: 30620 - protein, 111 aa, Artificial Sequence; identical to SEQ ID NO: 19791
  Description of Artificial Sequence: Synthetic polypeptide
  VL of XENP021083

SEQ ID NO: 30621 - protein, 15 aa, Artificial Sequence
  Description of Artificial Sequence: Synthetic peptide
  XENP021083 vlCDR1
KASQSVDFDGDSYMN

SEQ ID NO: 30622 - protein, 7 aa, Artificial Sequence
  Description of Artificial Sequence: Synthetic peptide
  XENP021083 vlCDR2
AASNLES

SEQ ID NO: 30623 - protein, 9 aa, Artificial Sequence
  Description of Artificial Sequence: Synthetic peptide
  XENP021083 vlCDR3
QQSNEDPFT

SEQ ID NO: 30624 - protein, 226 aa, Artificial Sequence; identical to SEQ ID NO: 29134
  Description of Artificial Sequence: Synthetic polypeptide
  XENP021084 7G8_H0_L0.11_Fab Heavy Chain

SEQ ID NO: 30625 - protein, 121 aa, Artificial Sequence; identical to SEQ ID NO: 17586
  Description of Artificial Sequence: Synthetic polypeptide
  VH of XENP021084

SEQ ID NO: 30626 - protein, 5 aa, Artificial Sequence
  Description of Artificial Sequence: Synthetic peptide
  XENP021084 vhCDR1
DAWMD

SEQ ID NO: 30627 - protein, 19 aa, Artificial Sequence
  Description of Artificial Sequence: Synthetic peptide
  XENP021084 vhCDR2
EIRTKANNHATYYAESVKG

SEQ ID NO: 30628 - protein, 10 aa, Artificial Sequence
  Description of Artificial Sequence: Synthetic peptide
  XENP021084 vhCDR3
LANWDWYFDV

SEQ ID NO: 30629 - protein, 218 aa, Artificial Sequence; identical to SEQ ID NO: 19800
  Description of Artificial Sequence: Synthetic polypeptide
  XENP021084 7G8_H0_L0.11_Fab Light Chain

SEQ ID NO: 30630 - protein, 111 aa, Artificial Sequence; identical to SEQ ID NO: 19801
  Description of Artificial Sequence: Synthetic polypeptide
  VL of XENP021084

SEQ ID NO: 30631 - protein, 15 aa, Artificial Sequence
  Description of Artificial Sequence: Synthetic peptide
  XENP021084 vlCDR1
KASQSVDHDGDSYMN

SEQ ID NO: 30632 - protein, 7 aa, Artificial Sequence
  Description of Artificial Sequence: Synthetic peptide
  XENP021084 vlCDR2
AASNLES

SEQ ID NO: 30633 - protein, 9 aa, Artificial Sequence
  Description of Artificial Sequence: Synthetic peptide
  XENP021084 vlCDR3
QQSNEDPFT

SEQ ID NO: 30634 - protein, 226 aa, Artificial Sequence; identical to SEQ ID NO: 29134
  Description of Artificial Sequence: Synthetic polypeptide
  XENP021085 7G8_H0_L0.12_Fab Heavy Chain

SEQ ID NO: 30635 - protein, 121 aa, Artificial Sequence; identical to SEQ ID NO: 17586
  Description of Artificial Sequence: Synthetic polypeptide
  VH of XENP021085

SEQ ID NO: 30636 - protein, 5 aa, Artificial Sequence
  Description of Artificial Sequence: Synthetic peptide
  XENP021085 vhCDR1
DAWMD

SEQ ID NO: 30637 - protein, 19 aa, Artificial Sequence
  Description of Artificial Sequence: Synthetic peptide
  XENP021085 vhCDR2
EIRTKANNHATYYAESVKG

SEQ ID NO: 30638 - protein, 10 aa, Artificial Sequence
  Description of Artificial Sequence: Synthetic peptide
  XENP021085 vhCDR3
LANWDWYFDV

SEQ ID NO: 30639 - protein, 218 aa, Artificial Sequence; identical to SEQ ID NO: 19810
  Description of Artificial Sequence: Synthetic polypeptide
  XENP021085 7G8_H0_L0.12_Fab Light Chain

SEQ ID NO: 30640 - protein, 111 aa, Artificial Sequence; identical to SEQ ID NO: 19811
  Description of Artificial Sequence: Synthetic polypeptide
  VL of XENP021085

SEQ ID NO: 30641 - protein, 15 aa, Artificial Sequence
  Description of Artificial Sequence: Synthetic peptide
  XENP021085 vlCDR1
KASQSVDLDGDSYMN

SEQ ID NO: 30642 - protein, 7 aa, Artificial Sequence
  Description of Artificial Sequence: Synthetic peptide
  XENP021085 vlCDR2
AASNLES

SEQ ID NO: 30643 - protein, 9 aa, Artificial Sequence
  Description of Artificial Sequence: Synthetic peptide
  XENP021085 vlCDR3
QQSNEDPFT

SEQ ID NO: 30644 - protein, 226 aa, Artificial Sequence; identical to SEQ ID NO: 29134
  Description of Artificial Sequence: Synthetic polypeptide
  XENP021086 7G8_H0_L0.13_Fab Heavy Chain

SEQ ID NO: 30645 - protein, 121 aa, Artificial Sequence; identical to SEQ ID NO: 17586
  Description of Artificial Sequence: Synthetic polypeptide
  VH of XENP021086

SEQ ID NO: 30646 - protein, 5 aa, Artificial Sequence
  Description of Artificial Sequence: Synthetic peptide
  XENP021086 vhCDR1
DAWMD

SEQ ID NO: 30647 - protein, 19 aa, Artificial Sequence
  Description of Artificial Sequence: Synthetic peptide
  XENP021086 vhCDR2
EIRTKANNHATYYAESVKG

SEQ ID NO: 30648 - protein, 10 aa, Artificial Sequence
  Description of Artificial Sequence: Synthetic peptide
  XENP021086 vhCDR3
LANWDWYFDV

SEQ ID NO: 30649 - protein, 218 aa, Artificial Sequence; identical to SEQ ID NO: 19820
  Description of Artificial Sequence: Synthetic polypeptide
  XENP021086 7G8_H0_L0.13_Fab Light Chain

SEQ ID NO: 30650 - protein, 111 aa, Artificial Sequence; identical to SEQ ID NO: 19821
  Description of Artificial Sequence: Synthetic polypeptide
  VL of XENP021086

SEQ ID NO: 30651 - protein, 15 aa, Artificial Sequence
  Description of Artificial Sequence: Synthetic peptide
  XENP021086 vlCDR1
KASQSVDWDGDSYMN

SEQ ID NO: 30652 - protein, 7 aa, Artificial Sequence
  Description of Artificial Sequence: Synthetic peptide
  XENP021086 vlCDR2
AASNLES

SEQ ID NO: 30653 - protein, 9 aa, Artificial Sequence
  Description of Artificial Sequence: Synthetic peptide
  XENP021086 vlCDR3
QQSNEDPFT

SEQ ID NO: 30654 - protein, 226 aa, Artificial Sequence; identical to SEQ ID NO: 29134
  Description of Artificial Sequence: Synthetic polypeptide
  XENP021087 7G8_H0_L0.14_Fab Heavy Chain

SEQ ID NO: 30655 - protein, 121 aa, Artificial Sequence; identical to SEQ ID NO: 17586
  Description of Artificial Sequence: Synthetic polypeptide
  VH of XENP021087

SEQ ID NO: 30656 - protein, 5 aa, Artificial Sequence
  Description of Artificial Sequence: Synthetic peptide
  XENP021087 vhCDR1
DAWMD

SEQ ID NO: 30657 - protein, 19 aa, Artificial Sequence
  Description of Artificial Sequence: Synthetic peptide
  XENP021087 vhCDR2
EIRTKANNHATYYAESVKG

SEQ ID NO: 30658 - protein, 10 aa, Artificial Sequence
  Description of Artificial Sequence: Synthetic peptide
  XENP021087 vhCDR3
LANWDWYFDV

SEQ ID NO: 30659 - protein, 218 aa, Artificial Sequence; identical to SEQ ID NO: 19830
  Description of Artificial Sequence: Synthetic polypeptide
  XENP021087 7G8_H0_L0.14_Fab Light Chain

SEQ ID NO: 30660 - protein, 111 aa, Artificial Sequence; identical to SEQ ID NO: 19831
  Description of Artificial Sequence: Synthetic polypeptide
  VL of XENP021087

SEQ ID NO: 30661 - protein, 15 aa, Artificial Sequence
  Description of Artificial Sequence: Synthetic peptide
  XENP021087 vlCDR1
KASQSVDVDGDSYMN

SEQ ID NO: 30662 - protein, 7 aa, Artificial Sequence
  Description of Artificial Sequence: Synthetic peptide
  XENP021087 vlCDR2
AASNLES

SEQ ID NO: 30663 - protein, 9 aa, Artificial Sequence
  Description of Artificial Sequence: Synthetic peptide
  XENP021087 vlCDR3
QQSNEDPFT

SEQ ID NO: 30664 - protein, 226 aa, Artificial Sequence; identical to SEQ ID NO: 29134
  Description of Artificial Sequence: Synthetic polypeptide
  XENP021088 7G8_H0_L0.15_Fab Heavy Chain

SEQ ID NO: 30665 - protein, 121 aa, Artificial Sequence; identical to SEQ ID NO: 17586
  Description of Artificial Sequence: Synthetic polypeptide
  VH of XENP021088

SEQ ID NO: 30666 - protein, 5 aa, Artificial Sequence
  Description of Artificial Sequence: Synthetic peptide
  XENP021088 vhCDR1
DAWMD

SEQ ID NO: 30667 - protein, 19 aa, Artificial Sequence
  Description of Artificial Sequence: Synthetic peptide
  XENP021088 vhCDR2
EIRTKANNHATYYAESVKG

SEQ ID NO: 30668 - protein, 10 aa, Artificial Sequence
  Description of Artificial Sequence: Synthetic peptide
  XENP021088 vhCDR3
LANWDWYFDV

SEQ ID NO: 30669 - protein, 218 aa, Artificial Sequence; identical to SEQ ID NO: 19840
  Description of Artificial Sequence: Synthetic polypeptide
  XENP021088 7G8_H0_L0.15_Fab Light Chain

SEQ ID NO: 30670 - protein, 111 aa, Artificial Sequence; identical to SEQ ID NO: 19841
  Description of Artificial Sequence: Synthetic polypeptide
  VL of XENP021088

SEQ ID NO: 30671 - protein, 15 aa, Artificial Sequence
  Description of Artificial Sequence: Synthetic peptide
  XENP021088 vlCDR1
KASQSVDADGDSYMN

SEQ ID NO: 30672 - protein, 7 aa, Artificial Sequence
  Description of Artificial Sequence: Synthetic peptide
  XENP021088 vlCDR2
AASNLES

SEQ ID NO: 30673 - protein, 9 aa, Artificial Sequence
  Description of Artificial Sequence: Synthetic peptide
  XENP021088 vlCDR3
QQSNEDPFT

SEQ ID NO: 30674 - protein, 226 aa, Artificial Sequence; identical to SEQ ID NO: 29134
  Description of Artificial Sequence: Synthetic polypeptide
  XENP021089 7G8_H0_L0.16_Fab Heavy Chain

SEQ ID NO: 30675 - protein, 121 aa, Artificial Sequence; identical to SEQ ID NO: 17586
  Description of Artificial Sequence: Synthetic polypeptide
  VH of XENP021089

SEQ ID NO: 30676 - protein, 5 aa, Artificial Sequence
  Description of Artificial Sequence: Synthetic peptide
  XENP021089 vhCDR1
DAWMD

SEQ ID NO: 30677 - protein, 19 aa, Artificial Sequence
  Description of Artificial Sequence: Synthetic peptide
  XENP021089 vhCDR2
EIRTKANNHATYYAESVKG

SEQ ID NO: 30678 - protein, 10 aa, Artificial Sequence
  Description of Artificial Sequence: Synthetic peptide
  XENP021089 vhCDR3
LANWDWYFDV

SEQ ID NO: 30679 - protein, 218 aa, Artificial Sequence; identical to SEQ ID NO: 19850
  Description of Artificial Sequence: Synthetic polypeptide
  XENP021089 7G8_H0_L0.16_Fab Light Chain

SEQ ID NO: 30680 - protein, 111 aa, Artificial Sequence; identical to SEQ ID NO: 19851
  Description of Artificial Sequence: Synthetic polypeptide
  VL of XENP021089

SEQ ID NO: 30681 - protein, 15 aa, Artificial Sequence
  Description of Artificial Sequence: Synthetic peptide
  XENP021089 vlCDR1
KASQSVDQDGDSYMN

SEQ ID NO: 30682 - protein, 7 aa, Artificial Sequence
  Description of Artificial Sequence: Synthetic peptide
  XENP021089 vlCDR2
AASNLES

SEQ ID NO: 30683 - protein, 9 aa, Artificial Sequence
  Description of Artificial Sequence: Synthetic peptide
  XENP021089 vlCDR3
QQSNEDPFT

SEQ ID NO: 30684 - protein, 226 aa, Artificial Sequence; identical to SEQ ID NO: 29134
  Description of Artificial Sequence: Synthetic polypeptide
  XENP021090 7G8_H0_L0.17_Fab Heavy Chain

SEQ ID NO: 30685 - protein, 121 aa, Artificial Sequence; identical to SEQ ID NO: 17586
  Description of Artificial Sequence: Synthetic polypeptide
  VH of XENP021090

SEQ ID NO: 30686 - protein, 5 aa, Artificial Sequence
  Description of Artificial Sequence: Synthetic peptide
  XENP021090 vhCDR1
DAWMD

SEQ ID NO: 30687 - protein, 19 aa, Artificial Sequence
  Description of Artificial Sequence: Synthetic peptide
  XENP021090 vhCDR2
EIRTKANNHATYYAESVKG

SEQ ID NO: 30688 - protein, 10 aa, Artificial Sequence
  Description of Artificial Sequence: Synthetic peptide
  XENP021090 vhCDR3
LANWDWYFDV

SEQ ID NO: 30689 - protein, 218 aa, Artificial Sequence; identical to SEQ ID NO: 19860
  Description of Artificial Sequence: Synthetic polypeptide
  XENP021090 7G8_H0_L0.17_Fab Light Chain

SEQ ID NO: 30690 - protein, 111 aa, Artificial Sequence; identical to SEQ ID NO: 19861
  Description of Artificial Sequence: Synthetic polypeptide
  VL of XENP021090

SEQ ID NO: 30691 - protein, 15 aa, Artificial Sequence
  Description of Artificial Sequence: Synthetic peptide
  XENP021090 vlCDR1
KASQSVDDDGDSYMN

SEQ ID NO: 30692 - protein, 7 aa, Artificial Sequence
  Description of Artificial Sequence: Synthetic peptide
  XENP021090 vlCDR2
AASNLES

SEQ ID NO: 30693 - protein, 9 aa, Artificial Sequence
  Description of Artificial Sequence: Synthetic peptide
  XENP021090 vlCDR3
QQSNEDPFT

SEQ ID NO: 30694 - protein, 226 aa, Artificial Sequence; identical to SEQ ID NO: 29134
  Description of Artificial Sequence: Synthetic polypeptide
  XENP021091 7G8_H0_L0.18_Fab Heavy Chain

SEQ ID NO: 30695 - protein, 121 aa, Artificial Sequence; identical to SEQ ID NO: 17586
  Description of Artificial Sequence: Synthetic polypeptide
  VH of XENP021091

SEQ ID NO: 30696 - protein, 5 aa, Artificial Sequence
  Description of Artificial Sequence: Synthetic peptide
  XENP021091 vhCDR1
DAWMD

SEQ ID NO: 30697 - protein, 19 aa, Artificial Sequence
  Description of Artificial Sequence: Synthetic peptide
  XENP021091 vhCDR2
EIRTKANNHATYYAESVKG

SEQ ID NO: 30698 - protein, 10 aa, Artificial Sequence
  Description of Artificial Sequence: Synthetic peptide
  XENP021091 vhCDR3
LANWDWYFDV

SEQ ID NO: 30699 - protein, 218 aa, Artificial Sequence; identical to SEQ ID NO: 19870
  Description of Artificial Sequence: Synthetic polypeptide
  XENP021091 7G8_H0_L0.18_Fab Light Chain

SEQ ID NO: 30700 - protein, 111 aa, Artificial Sequence; identical to SEQ ID NO: 19871
  Description of Artificial Sequence: Synthetic polypeptide
  VL of XENP021091

SEQ ID NO: 30701 - protein, 15 aa, Artificial Sequence
  Description of Artificial Sequence: Synthetic peptide
  XENP021091 vlCDR1
KASQSVDKDGDSYMN

SEQ ID NO: 30702 - protein, 7 aa, Artificial Sequence
  Description of Artificial Sequence: Synthetic peptide
  XENP021091 vlCDR2
AASNLES

SEQ ID NO: 30703 - protein, 9 aa, Artificial Sequence
  Description of Artificial Sequence: Synthetic peptide
  XENP021091 vlCDR3
QQSNEDPFT

SEQ ID NO: 30704 - protein, 226 aa, Artificial Sequence; identical to SEQ ID NO: 29134
  Description of Artificial Sequence: Synthetic polypeptide
  XENP021092 7G8_H0_L0.19_Fab Heavy Chain

SEQ ID NO: 30705 - protein, 121 aa, Artificial Sequence; identical to SEQ ID NO: 17586
  Description of Artificial Sequence: Synthetic polypeptide
  VH of XENP021092

SEQ ID NO: 30706 - protein, 5 aa, Artificial Sequence
  Description of Artificial Sequence: Synthetic peptide
  XENP021092 vhCDR1
DAWMD

SEQ ID NO: 30707 - protein, 19 aa, Artificial Sequence
  Description of Artificial Sequence: Synthetic peptide
  XENP021092 vhCDR2
EIRTKANNHATYYAESVKG

SEQ ID NO: 30708 - protein, 10 aa, Artificial Sequence
  Description of Artificial Sequence: Synthetic peptide
  XENP021092 vhCDR3
LANWDWYFDV

SEQ ID NO: 30709 - protein, 218 aa, Artificial Sequence; identical to SEQ ID NO: 19880
  Description of Artificial Sequence: Synthetic polypeptide
  XENP021092 7G8_H0_L0.19_Fab Light Chain

SEQ ID NO: 30710 - protein, 111 aa, Artificial Sequence; identical to SEQ ID NO: 19881
  Description of Artificial Sequence: Synthetic polypeptide
  VL of XENP021092

SEQ ID NO: 30711 - protein, 15 aa, Artificial Sequence
  Description of Artificial Sequence: Synthetic peptide
  XENP021092 vlCDR1
KASQSVDNDGDSYMN

SEQ ID NO: 30712 - protein, 7 aa, Artificial Sequence
  Description of Artificial Sequence: Synthetic peptide
  XENP021092 vlCDR2
AASNLES

SEQ ID NO: 30713 - protein, 9 aa, Artificial Sequence
  Description of Artificial Sequence: Synthetic peptide
  XENP021092 vlCDR3
QQSNEDPFT

SEQ ID NO: 30714 - protein, 226 aa, Artificial Sequence; identical to SEQ ID NO: 29134
  Description of Artificial Sequence: Synthetic polypeptide
  XENP021093 7G8_H0_L0.20_Fab Heavy Chain

SEQ ID NO: 30715 - protein, 121 aa, Artificial Sequence; identical to SEQ ID NO: 17586
  Description of Artificial Sequence: Synthetic polypeptide
  VH of XENP021093

SEQ ID NO: 30716 - protein, 5 aa, Artificial Sequence
  Description of Artificial Sequence: Synthetic peptide
  XENP021093 vhCDR1
DAWMD

SEQ ID NO: 30717 - protein, 19 aa, Artificial Sequence
  Description of Artificial Sequence: Synthetic peptide
  XENP021093 vhCDR2
EIRTKANNHATYYAESVKG

SEQ ID NO: 30718 - protein, 10 aa, Artificial Sequence
  Description of Artificial Sequence: Synthetic peptide
  XENP021093 vhCDR3
LANWDWYFDV

SEQ ID NO: 30719 - protein, 218 aa, Artificial Sequence; identical to SEQ ID NO: 19890
  Description of Artificial Sequence: Synthetic polypeptide
  XENP021093 7G8_H0_L0.20_Fab Light Chain

SEQ ID NO: 30720 - protein, 111 aa, Artificial Sequence; identical to SEQ ID NO: 19891
  Description of Artificial Sequence: Synthetic polypeptide
  VL of XENP021093

SEQ ID NO: 30721 - protein, 15 aa, Artificial Sequence
  Description of Artificial Sequence: Synthetic peptide
  XENP021093 vlCDR1
KASQSVDYNGDSYMN

SEQ ID NO: 30722 - protein, 7 aa, Artificial Sequence
  Description of Artificial Sequence: Synthetic peptide
  XENP021093 vlCDR2
AASNLES

SEQ ID NO: 30723 - protein, 9 aa, Artificial Sequence
  Description of Artificial Sequence: Synthetic peptide
  XENP021093 vlCDR3
QQSNEDPFT

SEQ ID NO: 30724 - protein, 226 aa, Artificial Sequence; identical to SEQ ID NO: 29134
  Description of Artificial Sequence: Synthetic polypeptide
  XENP021094 7G8_H0_L0.21_Fab Heavy Chain

SEQ ID NO: 30725 - protein, 121 aa, Artificial Sequence; identical to SEQ ID NO: 17586
  Description of Artificial Sequence: Synthetic polypeptide
  VH of XENP021094

SEQ ID NO: 30726 - protein, 5 aa, Artificial Sequence
  Description of Artificial Sequence: Synthetic peptide
  XENP021094 vhCDR1
DAWMD

SEQ ID NO: 30727 - protein, 19 aa, Artificial Sequence
  Description of Artificial Sequence: Synthetic peptide
  XENP021094 vhCDR2
EIRTKANNHATYYAESVKG

SEQ ID NO: 30728 - protein, 10 aa, Artificial Sequence
  Description of Artificial Sequence: Synthetic peptide
  XENP021094 vhCDR3
LANWDWYFDV

SEQ ID NO: 30729 - protein, 218 aa, Artificial Sequence; identical to SEQ ID NO: 19900
  Description of Artificial Sequence: Synthetic polypeptide
  XENP021094 7G8_H0_L0.21_Fab Light Chain

SEQ ID NO: 30730 - protein, 111 aa, Artificial Sequence; identical to SEQ ID NO: 19901
  Description of Artificial Sequence: Synthetic polypeptide
  VL of XENP021094

SEQ ID NO: 30731 - protein, 15 aa, Artificial Sequence
  Description of Artificial Sequence: Synthetic peptide
  XENP021094 vlCDR1
KASQSVDYEGDSYMN

SEQ ID NO: 30732 - protein, 7 aa, Artificial Sequence
  Description of Artificial Sequence: Synthetic peptide
  XENP021094 vlCDR2
AASNLES

SEQ ID NO: 30733 - protein, 9 aa, Artificial Sequence
  Description of Artificial Sequence: Synthetic peptide
  XENP021094 vlCDR3
QQSNEDPFT

SEQ ID NO: 30734 - protein, 226 aa, Artificial Sequence; identical to SEQ ID NO: 29134
  Description of Artificial Sequence: Synthetic polypeptide
  XENP021095 7G8_H0_L0.22_Fab Heavy Chain

SEQ ID NO: 30735 - protein, 121 aa, Artificial Sequence; identical to SEQ ID NO: 17586
  Description of Artificial Sequence: Synthetic polypeptide
  VH of XENP021095

SEQ ID NO: 30736 - protein, 5 aa, Artificial Sequence
  Description of Artificial Sequence: Synthetic peptide
  XENP021095 vhCDR1
DAWMD

SEQ ID NO: 30737 - protein, 19 aa, Artificial Sequence
  Description of Artificial Sequence: Synthetic peptide
  XENP021095 vhCDR2
EIRTKANNHATYYAESVKG

SEQ ID NO: 30738 - protein, 10 aa, Artificial Sequence
  Description of Artificial Sequence: Synthetic peptide
  XENP021095 vhCDR3
LANWDWYFDV

SEQ ID NO: 30739 - protein, 218 aa, Artificial Sequence; identical to SEQ ID NO: 19910
  Description of Artificial Sequence: Synthetic polypeptide
  XENP021095 7G8_H0_L0.22_Fab Light Chain

SEQ ID NO: 30740 - protein, 111 aa, Artificial Sequence; identical to SEQ ID NO: 19911
  Description of Artificial Sequence: Synthetic polypeptide
  VL of XENP021095

SEQ ID NO: 30741 - protein, 15 aa, Artificial Sequence
  Description of Artificial Sequence: Synthetic peptide
  XENP021095 vlCDR1
KASQSVDYHGDSYMN

SEQ ID NO: 30742 - protein, 7 aa, Artificial Sequence
  Description of Artificial Sequence: Synthetic peptide
  XENP021095 vlCDR2
AASNLES

SEQ ID NO: 30743 - protein, 9 aa, Artificial Sequence
  Description of Artificial Sequence: Synthetic peptide
  XENP021095 vlCDR3
QQSNEDPFT

SEQ ID NO: 30744 - protein, 226 aa, Artificial Sequence; identical to SEQ ID NO: 29134
  Description of Artificial Sequence: Synthetic polypeptide
  XENP021096 7G8_H0_L0.23_Fab Heavy Chain

SEQ ID NO: 30745 - protein, 121 aa, Artificial Sequence; identical to SEQ ID NO: 17586
  Description of Artificial Sequence: Synthetic polypeptide
  VH of XENP021096

SEQ ID NO: 30746 - protein, 5 aa, Artificial Sequence
  Description of Artificial Sequence: Synthetic peptide
  XENP021096 vhCDR1
DAWMD

SEQ ID NO: 30747 - protein, 19 aa, Artificial Sequence
  Description of Artificial Sequence: Synthetic peptide
  XENP021096 vhCDR2
EIRTKANNHATYYAESVKG

SEQ ID NO: 30748 - protein, 10 aa, Artificial Sequence
  Description of Artificial Sequence: Synthetic peptide
  XENP021096 vhCDR3
LANWDWYFDV

SEQ ID NO: 30749 - protein, 218 aa, Artificial Sequence; identical to SEQ ID NO: 19920
  Description of Artificial Sequence: Synthetic polypeptide
  XENP021096 7G8_H0_L0.23_Fab Light Chain

SEQ ID NO: 30750 - protein, 111 aa, Artificial Sequence; identical to SEQ ID NO: 19921
  Description of Artificial Sequence: Synthetic polypeptide
  VL of XENP021096

SEQ ID NO: 30751 - protein, 15 aa, Artificial Sequence
  Description of Artificial Sequence: Synthetic peptide
  XENP021096 vlCDR1
KASQSVDYSGDSYMN

SEQ ID NO: 30752 - protein, 7 aa, Artificial Sequence
  Description of Artificial Sequence: Synthetic peptide
  XENP021096 vlCDR2
AASNLES

SEQ ID NO: 30753 - protein, 9 aa, Artificial Sequence
  Description of Artificial Sequence: Synthetic peptide
  XENP021096 vlCDR3
QQSNEDPFT

SEQ ID NO: 30754 - protein, 226 aa, Artificial Sequence; identical to SEQ ID NO: 29134
  Description of Artificial Sequence: Synthetic polypeptide
  XENP021101 7G8_H0_L0.24_Fab Heavy Chain

SEQ ID NO: 30755 - protein, 121 aa, Artificial Sequence; identical to SEQ ID NO: 17586
  Description of Artificial Sequence: Synthetic polypeptide
  VH of XENP021101

SEQ ID NO: 30756 - protein, 5 aa, Artificial Sequence
  Description of Artificial Sequence: Synthetic peptide
  XENP021101 vhCDR1
DAWMD

SEQ ID NO: 30757 - protein, 19 aa, Artificial Sequence
  Description of Artificial Sequence: Synthetic peptide
  XENP021101 vhCDR2
EIRTKANNHATYYAESVKG

SEQ ID NO: 30758 - protein, 10 aa, Artificial Sequence
  Description of Artificial Sequence: Synthetic peptide
  XENP021101 vhCDR3
LANWDWYFDV

SEQ ID NO: 30759 - protein, 218 aa, Artificial Sequence; identical to SEQ ID NO: 19930
  Description of Artificial Sequence: Synthetic polypeptide
  XENP021101 7G8_H0_L0.24_Fab Light Chain

SEQ ID NO: 30760 - protein, 111 aa, Artificial Sequence; identical to SEQ ID NO: 19931
  Description of Artificial Sequence: Synthetic polypeptide
  VL of XENP021101

SEQ ID NO: 30761 - protein, 15 aa, Artificial Sequence
  Description of Artificial Sequence: Synthetic peptide
  XENP021101 vlCDR1
KASQSVDYRGDSYMN

SEQ ID NO: 30762 - protein, 7 aa, Artificial Sequence
  Description of Artificial Sequence: Synthetic peptide
  XENP021101 vlCDR2
AASNLES

SEQ ID NO: 30763 - protein, 9 aa, Artificial Sequence
  Description of Artificial Sequence: Synthetic peptide
  XENP021101 vlCDR3
QQSNEDPFT

SEQ ID NO: 30764 - protein, 226 aa, Artificial Sequence; identical to SEQ ID NO: 29134
  Description of Artificial Sequence: Synthetic polypeptide
  XENP021102 7G8_H0_L0.25_Fab Heavy Chain

SEQ ID NO: 30765 - protein, 121 aa, Artificial Sequence; identical to SEQ ID NO: 17586
  Description of Artificial Sequence: Synthetic polypeptide
  VH of XENP021102

SEQ ID NO: 30766 - protein, 5 aa, Artificial Sequence
  Description of Artificial Sequence: Synthetic peptide
  XENP021102 vhCDR1
DAWMD

SEQ ID NO: 30767 - protein, 19 aa, Artificial Sequence
  Description of Artificial Sequence: Synthetic peptide
  XENP021102 vhCDR2
EIRTKANNHATYYAESVKG

SEQ ID NO: 30768 - protein, 10 aa, Artificial Sequence
  Description of Artificial Sequence: Synthetic peptide
  XENP021102 vhCDR3
LANWDWYFDV

SEQ ID NO: 30769 - protein, 218 aa, Artificial Sequence; identical to SEQ ID NO: 19940
  Description of Artificial Sequence: Synthetic polypeptide
  XENP021102 7G8_H0_L0.25_Fab Light Chain

SEQ ID NO: 30770 - protein, 111 aa, Artificial Sequence; identical to SEQ ID NO: 19941
  Description of Artificial Sequence: Synthetic polypeptide
  VL of XENP021102

SEQ ID NO: 30771 - protein, 15 aa, Artificial Sequence
  Description of Artificial Sequence: Synthetic peptide
  XENP021102 vlCDR1
KASQSVDYLGDSYMN

SEQ ID NO: 30772 - protein, 7 aa, Artificial Sequence
  Description of Artificial Sequence: Synthetic peptide
  XENP021102 vlCDR2
AASNLES

SEQ ID NO: 30773 - protein, 9 aa, Artificial Sequence
  Description of Artificial Sequence: Synthetic peptide
  XENP021102 vlCDR3
QQSNEDPFT

SEQ ID NO: 30774 - protein, 226 aa, Artificial Sequence; identical to SEQ ID NO: 29134
  Description of Artificial Sequence: Synthetic polypeptide
  XENP021103 7G8_H0_L0.26_Fab Heavy Chain

SEQ ID NO: 30775 - protein, 121 aa, Artificial Sequence; identical to SEQ ID NO: 17586
  Description of Artificial Sequence: Synthetic polypeptide
  VH of XENP021103

SEQ ID NO: 30776 - protein, 5 aa, Artificial Sequence
  Description of Artificial Sequence: Synthetic peptide
  XENP021103 vhCDR1
DAWMD

SEQ ID NO: 30777 - protein, 19 aa, Artificial Sequence
  Description of Artificial Sequence: Synthetic peptide
  XENP021103 vhCDR2
EIRTKANNHATYYAESVKG

SEQ ID NO: 30778 - protein, 10 aa, Artificial Sequence
  Description of Artificial Sequence: Synthetic peptide
  XENP021103 vhCDR3
LANWDWYFDV

SEQ ID NO: 30779 - protein, 218 aa, Artificial Sequence; identical to SEQ ID NO: 19950
  Description of Artificial Sequence: Synthetic polypeptide
  XENP021103 7G8_H0_L0.26_Fab Light Chain

SEQ ID NO: 30780 - protein, 111 aa, Artificial Sequence; identical to SEQ ID NO: 19951
  Description of Artificial Sequence: Synthetic polypeptide
  VL of XENP021103

SEQ ID NO: 30781 - protein, 15 aa, Artificial Sequence
  Description of Artificial Sequence: Synthetic peptide
  XENP021103 vlCDR1
KASQSVDYTGDSYMN

SEQ ID NO: 30782 - protein, 7 aa, Artificial Sequence
  Description of Artificial Sequence: Synthetic peptide
  XENP021103 vlCDR2
AASNLES

SEQ ID NO: 30783 - protein, 9 aa, Artificial Sequence
  Description of Artificial Sequence: Synthetic peptide
  XENP021103 vlCDR3
QQSNEDPFT

SEQ ID NO: 30784 - protein, 226 aa, Artificial Sequence; identical to SEQ ID NO: 29134
  Description of Artificial Sequence: Synthetic polypeptide
  XENP021104 7G8_H0_L0.27_Fab Heavy Chain

SEQ ID NO: 30785 - protein, 121 aa, Artificial Sequence; identical to SEQ ID NO: 17586
  Description of Artificial Sequence: Synthetic polypeptide
  VH of XENP021104

SEQ ID NO: 30786 - protein, 5 aa, Artificial Sequence
  Description of Artificial Sequence: Synthetic peptide
  XENP021104 vhCDR1
DAWMD

SEQ ID NO: 30787 - protein, 19 aa, Artificial Sequence
  Description of Artificial Sequence: Synthetic peptide
  XENP021104 vhCDR2
EIRTKANNHATYYAESVKG

SEQ ID NO: 30788 - protein, 10 aa, Artificial Sequence
  Description of Artificial Sequence: Synthetic peptide
  XENP021104 vhCDR3
LANWDWYFDV

SEQ ID NO: 30789 - protein, 218 aa, Artificial Sequence; identical to SEQ ID NO: 19960
  Description of Artificial Sequence: Synthetic polypeptide
  XENP021104 7G8_H0_L0.27_Fab Light Chain

SEQ ID NO: 30790 - protein, 111 aa, Artificial Sequence; identical to SEQ ID NO: 19961
  Description of Artificial Sequence: Synthetic polypeptide
  VL of XENP021104

SEQ ID NO: 30791 - protein, 15 aa, Artificial Sequence
  Description of Artificial Sequence: Synthetic peptide
  XENP021104 vlCDR1
KASQSVDYGGDSYMN

SEQ ID NO: 30792 - protein, 7 aa, Artificial Sequence
  Description of Artificial Sequence: Synthetic peptide
  XENP021104 vlCDR2
AASNLES

SEQ ID NO: 30793 - protein, 9 aa, Artificial Sequence
  Description of Artificial Sequence: Synthetic peptide
  XENP021104 vlCDR3
QQSNEDPFT

SEQ ID NO: 30794 - protein, 226 aa, Artificial Sequence; identical to SEQ ID NO: 29134
  Description of Artificial Sequence: Synthetic polypeptide
  XENP021105 7G8_H0_L0.28_Fab Heavy Chain

SEQ ID NO: 30795 - protein, 121 aa, Artificial Sequence; identical to SEQ ID NO: 17586
  Description of Artificial Sequence: Synthetic polypeptide
  VH of XENP021105

SEQ ID NO: 30796 - protein, 5 aa, Artificial Sequence
  Description of Artificial Sequence: Synthetic peptide
  XENP021105 vhCDR1
DAWMD

SEQ ID NO: 30797 - protein, 19 aa, Artificial Sequence
  Description of Artificial Sequence: Synthetic peptide
  XENP021105 vhCDR2
EIRTKANNHATYYAESVKG

SEQ ID NO: 30798 - protein, 10 aa, Artificial Sequence
  Description of Artificial Sequence: Synthetic peptide
  XENP021105 vhCDR3
LANWDWYFDV

SEQ ID NO: 30799 - protein, 218 aa, Artificial Sequence; identical to SEQ ID NO: 19970
  Description of Artificial Sequence: Synthetic polypeptide
  XENP021105 7G8_H0_L0.28_Fab Light Chain

SEQ ID NO: 30800 - protein, 111 aa, Artificial Sequence; identical to SEQ ID NO: 19971
  Description of Artificial Sequence: Synthetic polypeptide
  VL of XENP021105

SEQ ID NO: 30801 - protein, 15 aa, Artificial Sequence
  Description of Artificial Sequence: Synthetic peptide
  XENP021105 vlCDR1
KASQSVDYYGDSYMN

SEQ ID NO: 30802 - protein, 7 aa, Artificial Sequence
  Description of Artificial Sequence: Synthetic peptide
  XENP021105 vlCDR2
AASNLES

SEQ ID NO: 30803 - protein, 9 aa, Artificial Sequence
  Description of Artificial Sequence: Synthetic peptide
  XENP021105 vlCDR3
QQSNEDPFT

SEQ ID NO: 30804 - protein, 226 aa, Artificial Sequence; identical to SEQ ID NO: 29134
  Description of Artificial Sequence: Synthetic polypeptide
  XENP021106 7G8_H0_L0.29_Fab Heavy Chain

SEQ ID NO: 30805 - protein, 121 aa, Artificial Sequence; identical to SEQ ID NO: 17586
  Description of Artificial Sequence: Synthetic polypeptide
  VH of XENP021106

SEQ ID NO: 30806 - protein, 5 aa, Artificial Sequence
  Description of Artificial Sequence: Synthetic peptide
  XENP021106 vhCDR1
DAWMD

SEQ ID NO: 30807 - protein, 19 aa, Artificial Sequence
  Description of Artificial Sequence: Synthetic peptide
  XENP021106 vhCDR2
EIRTKANNHATYYAESVKG

SEQ ID NO: 30808 - protein, 10 aa, Artificial Sequence
  Description of Artificial Sequence: Synthetic peptide
  XENP021106 vhCDR3
LANWDWYFDV

SEQ ID NO: 30809 - protein, 218 aa, Artificial Sequence; identical to SEQ ID NO: 19980
  Description of Artificial Sequence: Synthetic polypeptide
  XENP021106 7G8_H0_L0.29_Fab Light Chain

SEQ ID NO: 30810 - protein, 111 aa, Artificial Sequence; identical to SEQ ID NO: 19981
  Description of Artificial Sequence: Synthetic polypeptide
  VL of XENP021106

SEQ ID NO: 30811 - protein, 15 aa, Artificial Sequence
  Description of Artificial Sequence: Synthetic peptide
  XENP021106 vlCDR1
KASQSVDYDADSYMN

SEQ ID NO: 30812 - protein, 7 aa, Artificial Sequence
  Description of Artificial Sequence: Synthetic peptide
  XENP021106 vlCDR2
AASNLES

SEQ ID NO: 30813 - protein, 9 aa, Artificial Sequence
  Description of Artificial Sequence: Synthetic peptide
  XENP021106 vlCDR3
QQSNEDPFT

SEQ ID NO: 30814 - protein, 226 aa, Artificial Sequence; identical to SEQ ID NO: 29134
  Description of Artificial Sequence: Synthetic polypeptide
  XENP021107 7G8_H0_L0.30_Fab Heavy Chain

SEQ ID NO: 30815 - protein, 121 aa, Artificial Sequence; identical to SEQ ID NO: 17586
  Description of Artificial Sequence: Synthetic polypeptide
  VH of XENP021107

SEQ ID NO: 30816 - protein, 5 aa, Artificial Sequence
  Description of Artificial Sequence: Synthetic peptide
  XENP021107 vhCDR1
DAWMD

SEQ ID NO: 30817 - protein, 19 aa, Artificial Sequence
  Description of Artificial Sequence: Synthetic peptide
  XENP021107 vhCDR2
EIRTKANNHATYYAESVKG

SEQ ID NO: 30818 - protein, 10 aa, Artificial Sequence
  Description of Artificial Sequence: Synthetic peptide
  XENP021107 vhCDR3
LANWDWYFDV

SEQ ID NO: 30819 - protein, 218 aa, Artificial Sequence; identical to SEQ ID NO: 19990
  Description of Artificial Sequence: Synthetic polypeptide
  XENP021107 7G8_H0_L0.30_Fab Light Chain

SEQ ID NO: 30820 - protein, 111 aa, Artificial Sequence; identical to SEQ ID NO: 19991
  Description of Artificial Sequence: Synthetic polypeptide
  VL of XENP021107

SEQ ID NO: 30821 - protein, 15 aa, Artificial Sequence
  Description of Artificial Sequence: Synthetic peptide
  XENP021107 vlCDR1
KASQSVDYDSDSYMN

SEQ ID NO: 30822 - protein, 7 aa, Artificial Sequence
  Description of Artificial Sequence: Synthetic peptide
  XENP021107 vlCDR2
AASNLES

SEQ ID NO: 30823 - protein, 9 aa, Artificial Sequence
  Description of Artificial Sequence: Synthetic peptide
  XENP021107 vlCDR3
QQSNEDPFT

SEQ ID NO: 30824 - protein, 226 aa, Artificial Sequence; identical to SEQ ID NO: 29134
  Description of Artificial Sequence: Synthetic polypeptide
  XENP021108 7G8_H0_L0.31_Fab Heavy Chain

SEQ ID NO: 30825 - protein, 121 aa, Artificial Sequence; identical to SEQ ID NO: 17586
  Description of Artificial Sequence: Synthetic polypeptide
  VH of XENP021108

SEQ ID NO: 30826 - protein, 5 aa, Artificial Sequence
  Description of Artificial Sequence: Synthetic peptide
  XENP021108 vhCDR1
DAWMD

SEQ ID NO: 30827 - protein, 19 aa, Artificial Sequence
  Description of Artificial Sequence: Synthetic peptide
  XENP021108 vhCDR2
EIRTKANNHATYYAESVKG

SEQ ID NO: 30828 - protein, 10 aa, Artificial Sequence
  Description of Artificial Sequence: Synthetic peptide
  XENP021108 vhCDR3
LANWDWYFDV

SEQ ID NO: 30829 - protein, 218 aa, Artificial Sequence; identical to SEQ ID NO: 20000
  Description of Artificial Sequence: Synthetic polypeptide
  XENP021108 7G8_H0_L0.31_Fab Light Chain

SEQ ID NO: 30830 - protein, 111 aa, Artificial Sequence; identical to SEQ ID NO: 20001
  Description of Artificial Sequence: Synthetic polypeptide
  VL of XENP021108

SEQ ID NO: 30831 - protein, 15 aa, Artificial Sequence
  Description of Artificial Sequence: Synthetic peptide
  XENP021108 vlCDR1
KASQSVDYDTDSYMN

SEQ ID NO: 30832 - protein, 7 aa, Artificial Sequence
  Description of Artificial Sequence: Synthetic peptide
  XENP021108 vlCDR2
AASNLES

SEQ ID NO: 30833 - protein, 9 aa, Artificial Sequence
  Description of Artificial Sequence: Synthetic peptide
  XENP021108 vlCDR3
QQSNEDPFT

SEQ ID NO: 30834 - protein, 226 aa, Artificial Sequence; identical to SEQ ID NO: 29134
  Description of Artificial Sequence: Synthetic polypeptide
  XENP021109 7G8_H0_L0.32_Fab Heavy Chain

SEQ ID NO: 30835 - protein, 121 aa, Artificial Sequence; identical to SEQ ID NO: 17586
  Description of Artificial Sequence: Synthetic polypeptide
  VH of XENP021109

SEQ ID NO: 30836 - protein, 5 aa, Artificial Sequence
  Description of Artificial Sequence: Synthetic peptide
  XENP021109 vhCDR1
DAWMD

SEQ ID NO: 30837 - protein, 19 aa, Artificial Sequence
  Description of Artificial Sequence: Synthetic peptide
  XENP021109 vhCDR2
EIRTKANNHATYYAESVKG

SEQ ID NO: 30838 - protein, 10 aa, Artificial Sequence
  Description of Artificial Sequence: Synthetic peptide
  XENP021109 vhCDR3
LANWDWYFDV

SEQ ID NO: 30839 - protein, 218 aa, Artificial Sequence; identical to SEQ ID NO: 20010
  Description of Artificial Sequence: Synthetic polypeptide
  XENP021109 7G8_H0_L0.32_Fab Light Chain

SEQ ID NO: 30840 - protein, 111 aa, Artificial Sequence; identical to SEQ ID NO: 20011
  Description of Artificial Sequence: Synthetic polypeptide
  VL of XENP021109

SEQ ID NO: 30841 - protein, 15 aa, Artificial Sequence
  Description of Artificial Sequence: Synthetic peptide
  XENP021109 vlCDR1
KASQSVDYDQDSYMN

SEQ ID NO: 30842 - protein, 7 aa, Artificial Sequence
  Description of Artificial Sequence: Synthetic peptide
  XENP021109 vlCDR2
AASNLES

SEQ ID NO: 30843 - protein, 9 aa, Artificial Sequence
  Description of Artificial Sequence: Synthetic peptide
  XENP021109 vlCDR3
QQSNEDPFT

SEQ ID NO: 30844 - protein, 226 aa, Artificial Sequence; identical to SEQ ID NO: 29134
  Description of Artificial Sequence: Synthetic polypeptide
  XENP021110 7G8_H0_L0.33_Fab Heavy Chain

SEQ ID NO: 30845 - protein, 121 aa, Artificial Sequence; identical to SEQ ID NO: 17586
  Description of Artificial Sequence: Synthetic polypeptide
  VH of XENP021110

SEQ ID NO: 30846 - protein, 5 aa, Artificial Sequence
  Description of Artificial Sequence: Synthetic peptide
  XENP021110 vhCDR1
DAWMD

SEQ ID NO: 30847 - protein, 19 aa, Artificial Sequence
  Description of Artificial Sequence: Synthetic peptide
  XENP021110 vhCDR2
EIRTKANNHATYYAESVKG

SEQ ID NO: 30848 - protein, 10 aa, Artificial Sequence
  Description of Artificial Sequence: Synthetic peptide
  XENP021110 vhCDR3
LANWDWYFDV

SEQ ID NO: 30849 - protein, 218 aa, Artificial Sequence; identical to SEQ ID NO: 20020
  Description of Artificial Sequence: Synthetic polypeptide
  XENP021110 7G8_H0_L0.33_Fab Light Chain

SEQ ID NO: 30850 - protein, 111 aa, Artificial Sequence; identical to SEQ ID NO: 20021
  Description of Artificial Sequence: Synthetic polypeptide
  VL of XENP021110

SEQ ID NO: 30851 - protein, 15 aa, Artificial Sequence
  Description of Artificial Sequence: Synthetic peptide
  XENP021110 vlCDR1
KASQSVDYDHDSYMN

SEQ ID NO: 30852 - protein, 7 aa, Artificial Sequence
  Description of Artificial Sequence: Synthetic peptide
  XENP021110 vlCDR2
AASNLES

SEQ ID NO: 30853 - protein, 9 aa, Artificial Sequence
  Description of Artificial Sequence: Synthetic peptide
  XENP021110 vlCDR3
QQSNEDPFT

SEQ ID NO: 30854 - protein, 226 aa, Artificial Sequence; identical to SEQ ID NO: 29134
  Description of Artificial Sequence: Synthetic polypeptide
  XENP021111 7G8_H0_L0.34_Fab Heavy Chain

SEQ ID NO: 30855 - protein, 121 aa, Artificial Sequence; identical to SEQ ID NO: 17586
  Description of Artificial Sequence: Synthetic polypeptide
  VH of XENP021111

SEQ ID NO: 30856 - protein, 5 aa, Artificial Sequence
  Description of Artificial Sequence: Synthetic peptide
  XENP021111 vhCDR1
DAWMD

SEQ ID NO: 30857 - protein, 19 aa, Artificial Sequence
  Description of Artificial Sequence: Synthetic peptide
  XENP021111 vhCDR2
EIRTKANNHATYYAESVKG

SEQ ID NO: 30858 - protein, 10 aa, Artificial Sequence
  Description of Artificial Sequence: Synthetic peptide
  XENP021111 vhCDR3
LANWDWYFDV

SEQ ID NO: 30859 - protein, 218 aa, Artificial Sequence; identical to SEQ ID NO: 20030
  Description of Artificial Sequence: Synthetic polypeptide
  XENP021111 7G8_H0_L0.34_Fab Light Chain

SEQ ID NO: 30860 - protein, 111 aa, Artificial Sequence; identical to SEQ ID NO: 20031
  Description of Artificial Sequence: Synthetic polypeptide
  VL of XENP021111

SEQ ID NO: 30861 - protein, 15 aa, Artificial Sequence
  Description of Artificial Sequence: Synthetic peptide
  XENP021111 vlCDR1
KASQSVDYDDDSYMN

SEQ ID NO: 30862 - protein, 7 aa, Artificial Sequence
  Description of Artificial Sequence: Synthetic peptide
  XENP021111 vlCDR2
AASNLES

SEQ ID NO: 30863 - protein, 9 aa, Artificial Sequence
  Description of Artificial Sequence: Synthetic peptide
  XENP021111 vlCDR3
QQSNEDPFT

SEQ ID NO: 30864 - protein, 226 aa, Artificial Sequence; identical to SEQ ID NO: 29134
  Description of Artificial Sequence: Synthetic polypeptide
  XENP021112 7G8_H0_L0.35_Fab Heavy Chain

SEQ ID NO: 30865 - protein, 121 aa, Artificial Sequence; identical to SEQ ID NO: 17586
  Description of Artificial Sequence: Synthetic polypeptide
  VH of XENP021112

SEQ ID NO: 30866 - protein, 5 aa, Artificial Sequence
  Description of Artificial Sequence: Synthetic peptide
  XENP021112 vhCDR1
DAWMD

SEQ ID NO: 30867 - protein, 19 aa, Artificial Sequence
  Description of Artificial Sequence: Synthetic peptide
  XENP021112 vhCDR2
EIRTKANNHATYYAESVKG

SEQ ID NO: 30868 - protein, 10 aa, Artificial Sequence
  Description of Artificial Sequence: Synthetic peptide
  XENP021112 vhCDR3
LANWDWYFDV

SEQ ID NO: 30869 - protein, 218 aa, Artificial Sequence; identical to SEQ ID NO: 20040
  Description of Artificial Sequence: Synthetic polypeptide
  XENP021112 7G8_H0_L0.35_Fab Light Chain

SEQ ID NO: 30870 - protein, 111 aa, Artificial Sequence; identical to SEQ ID NO: 20041
  Description of Artificial Sequence: Synthetic polypeptide
  VL of XENP021112

SEQ ID NO: 30871 - protein, 15 aa, Artificial Sequence
  Description of Artificial Sequence: Synthetic peptide
  XENP021112 vlCDR1
KASQSVDYDKDSYMN

SEQ ID NO: 30872 - protein, 7 aa, Artificial Sequence
  Description of Artificial Sequence: Synthetic peptide
  XENP021112 vlCDR2
AASNLES

SEQ ID NO: 30873 - protein, 9 aa, Artificial Sequence
  Description of Artificial Sequence: Synthetic peptide
  XENP021112 vlCDR3
QQSNEDPFT

SEQ ID NO: 30874 - protein, 226 aa, Artificial Sequence; identical to SEQ ID NO: 29134
  Description of Artificial Sequence: Synthetic polypeptide
  XENP021113 7G8_H0_L0.36_Fab Heavy Chain

SEQ ID NO: 30875 - protein, 121 aa, Artificial Sequence; identical to SEQ ID NO: 17586
  Description of Artificial Sequence: Synthetic polypeptide
  VH of XENP021113

SEQ ID NO: 30876 - protein, 5 aa, Artificial Sequence
  Description of Artificial Sequence: Synthetic peptide
  XENP021113 vhCDR1
DAWMD

SEQ ID NO: 30877 - protein, 19 aa, Artificial Sequence
  Description of Artificial Sequence: Synthetic peptide
  XENP021113 vhCDR2
EIRTKANNHATYYAESVKG

SEQ ID NO: 30878 - protein, 10 aa, Artificial Sequence
  Description of Artificial Sequence: Synthetic peptide
  XENP021113 vhCDR3
LANWDWYFDV

SEQ ID NO: 30879 - protein, 218 aa, Artificial Sequence; identical to SEQ ID NO: 20050
  Description of Artificial Sequence: Synthetic polypeptide
  XENP021113 7G8_H0_L0.36_Fab Light Chain

SEQ ID NO: 30880 - protein, 111 aa, Artificial Sequence; identical to SEQ ID NO: 20051
  Description of Artificial Sequence: Synthetic polypeptide
  VL of XENP021113

SEQ ID NO: 30881 - protein, 15 aa, Artificial Sequence
  Description of Artificial Sequence: Synthetic peptide
  XENP021113 vlCDR1
KASQSVDYDLDSYMN

SEQ ID NO: 30882 - protein, 7 aa, Artificial Sequence
  Description of Artificial Sequence: Synthetic peptide
  XENP021113 vlCDR2
AASNLES

SEQ ID NO: 30883 - protein, 9 aa, Artificial Sequence
  Description of Artificial Sequence: Synthetic peptide
  XENP021113 vlCDR3
QQSNEDPFT

SEQ ID NO: 30884 - protein, 226 aa, Artificial Sequence; identical to SEQ ID NO: 29134
  Description of Artificial Sequence: Synthetic polypeptide
  XENP021114 7G8_H0_L0.37_Fab Heavy Chain

SEQ ID NO: 30885 - protein, 121 aa, Artificial Sequence; identical to SEQ ID NO: 17586
  Description of Artificial Sequence: Synthetic polypeptide
  VH of XENP021114

SEQ ID NO: 30886 - protein, 5 aa, Artificial Sequence
  Description of Artificial Sequence: Synthetic peptide
  XENP021114 vhCDR1
DAWMD

SEQ ID NO: 30887 - protein, 19 aa, Artificial Sequence
  Description of Artificial Sequence: Synthetic peptide
  XENP021114 vhCDR2
EIRTKANNHATYYAESVKG

SEQ ID NO: 30888 - protein, 10 aa, Artificial Sequence
  Description of Artificial Sequence: Synthetic peptide
  XENP021114 vhCDR3
LANWDWYFDV

SEQ ID NO: 30889 - protein, 218 aa, Artificial Sequence; identical to SEQ ID NO: 20060
  Description of Artificial Sequence: Synthetic polypeptide
  XENP021114 7G8_H0_L0.37_Fab Light Chain

SEQ ID NO: 30890 - protein, 111 aa, Artificial Sequence; identical to SEQ ID NO: 20061
  Description of Artificial Sequence: Synthetic polypeptide
  VL of XENP021114

SEQ ID NO: 30891 - protein, 15 aa, Artificial Sequence
  Description of Artificial Sequence: Synthetic peptide
  XENP021114 vlCDR1
KASQSVDYDYDSYMN

SEQ ID NO: 30892 - protein, 7 aa, Artificial Sequence
  Description of Artificial Sequence: Synthetic peptide
  XENP021114 vlCDR2
AASNLES

SEQ ID NO: 30893 - protein, 9 aa, Artificial Sequence
  Description of Artificial Sequence: Synthetic peptide
  XENP021114 vlCDR3
QQSNEDPFT

SEQ ID NO: 30894 - protein, 226 aa, Artificial Sequence; identical to SEQ ID NO: 29134
  Description of Artificial Sequence: Synthetic polypeptide
  XENP021115 7G8_H0_L0.38_Fab Heavy Chain

SEQ ID NO: 30895 - protein, 121 aa, Artificial Sequence; identical to SEQ ID NO: 17586
  Description of Artificial Sequence: Synthetic polypeptide
  VH of XENP021115

SEQ ID NO: 30896 - protein, 5 aa, Artificial Sequence
  Description of Artificial Sequence: Synthetic peptide
  XENP021115 vhCDR1
DAWMD

SEQ ID NO: 30897 - protein, 19 aa, Artificial Sequence
  Description of Artificial Sequence: Synthetic peptide
  XENP021115 vhCDR2
EIRTKANNHATYYAESVKG

SEQ ID NO: 30898 - protein, 10 aa, Artificial Sequence
  Description of Artificial Sequence: Synthetic peptide
  XENP021115 vhCDR3
LANWDWYFDV

SEQ ID NO: 30899 - protein, 218 aa, Artificial Sequence; identical to SEQ ID NO: 20070
  Description of Artificial Sequence: Synthetic polypeptide
  XENP021115 7G8_H0_L0.38_Fab Light Chain

SEQ ID NO: 30900 - protein, 111 aa, Artificial Sequence; identical to SEQ ID NO: 20071
  Description of Artificial Sequence: Synthetic polypeptide
  VL of XENP021115

SEQ ID NO: 30901 - protein, 15 aa, Artificial Sequence
  Description of Artificial Sequence: Synthetic peptide
  XENP021115 vlCDR1
KASQSVDYDGNSYMN

SEQ ID NO: 30902 - protein, 7 aa, Artificial Sequence
  Description of Artificial Sequence: Synthetic peptide
  XENP021115 vlCDR2
AASNLES

SEQ ID NO: 30903 - protein, 9 aa, Artificial Sequence
  Description of Artificial Sequence: Synthetic peptide
  XENP021115 vlCDR3
QQSNEDPFT

SEQ ID NO: 30904 - protein, 226 aa, Artificial Sequence; identical to SEQ ID NO: 29134
  Description of Artificial Sequence: Synthetic polypeptide
  XENP021116 7G8_H0_L0.39_Fab Heavy Chain

SEQ ID NO: 30905 - protein, 121 aa, Artificial Sequence; identical to SEQ ID NO: 17586
  Description of Artificial Sequence: Synthetic polypeptide
  VH of XENP021116

SEQ ID NO: 30906 - protein, 5 aa, Artificial Sequence
  Description of Artificial Sequence: Synthetic peptide
  XENP021116 vhCDR1
DAWMD

SEQ ID NO: 30907 - protein, 19 aa, Artificial Sequence
  Description of Artificial Sequence: Synthetic peptide
  XENP021116 vhCDR2
EIRTKANNHATYYAESVKG

SEQ ID NO: 30908 - protein, 10 aa, Artificial Sequence
  Description of Artificial Sequence: Synthetic peptide
  XENP021116 vhCDR3
LANWDWYFDV

SEQ ID NO: 30909 - protein, 218 aa, Artificial Sequence; identical to SEQ ID NO: 20080
  Description of Artificial Sequence: Synthetic polypeptide
  XENP021116 7G8_H0_L0.39_Fab Light Chain

SEQ ID NO: 30910 - protein, 111 aa, Artificial Sequence; identical to SEQ ID NO: 20081
  Description of Artificial Sequence: Synthetic polypeptide
  VL of XENP021116

SEQ ID NO: 30911 - protein, 15 aa, Artificial Sequence
  Description of Artificial Sequence: Synthetic peptide
  XENP021116 vlCDR1
KASQSVDYDGESYMN

SEQ ID NO: 30912 - protein, 7 aa, Artificial Sequence
  Description of Artificial Sequence: Synthetic peptide
  XENP021116 vlCDR2
AASNLES

SEQ ID NO: 30913 - protein, 9 aa, Artificial Sequence
  Description of Artificial Sequence: Synthetic peptide
  XENP021116 vlCDR3
QQSNEDPFT

SEQ ID NO: 30914 - protein, 226 aa, Artificial Sequence; identical to SEQ ID NO: 29134
  Description of Artificial Sequence: Synthetic polypeptide
  XENP021117 7G8_H0_L0.40_Fab Heavy Chain

SEQ ID NO: 30915 - protein, 121 aa, Artificial Sequence; identical to SEQ ID NO: 17586
  Description of Artificial Sequence: Synthetic polypeptide
  VH of XENP021117

SEQ ID NO: 30916 - protein, 5 aa, Artificial Sequence
  Description of Artificial Sequence: Synthetic peptide
  XENP021117 vhCDR1
DAWMD

SEQ ID NO: 30917 - protein, 19 aa, Artificial Sequence
  Description of Artificial Sequence: Synthetic peptide
  XENP021117 vhCDR2
EIRTKANNHATYYAESVKG

SEQ ID NO: 30918 - protein, 10 aa, Artificial Sequence
  Description of Artificial Sequence: Synthetic peptide
  XENP021117 vhCDR3
LANWDWYFDV

SEQ ID NO: 30919 - protein, 218 aa, Artificial Sequence; identical to SEQ ID NO: 20090
  Description of Artificial Sequence: Synthetic polypeptide
  XENP021117 7G8_H0_L0.40_Fab Light Chain

SEQ ID NO: 30920 - protein, 111 aa, Artificial Sequence; identical to SEQ ID NO: 20091
  Description of Artificial Sequence: Synthetic polypeptide
  VL of XENP021117

SEQ ID NO: 30921 - protein, 15 aa, Artificial Sequence
  Description of Artificial Sequence: Synthetic peptide
  XENP021117 vlCDR1
KASQSVDYDGHSYMN

SEQ ID NO: 30922 - protein, 7 aa, Artificial Sequence
  Description of Artificial Sequence: Synthetic peptide
  XENP021117 vlCDR2
AASNLES

SEQ ID NO: 30923 - protein, 9 aa, Artificial Sequence
  Description of Artificial Sequence: Synthetic peptide
  XENP021117 vlCDR3
QQSNEDPFT

SEQ ID NO: 30924 - protein, 226 aa, Artificial Sequence; identical to SEQ ID NO: 29134
  Description of Artificial Sequence: Synthetic polypeptide
  XENP021118 7G8_H0_L0.41_Fab Heavy Chain

SEQ ID NO: 30925 - protein, 121 aa, Artificial Sequence; identical to SEQ ID NO: 17586
  Description of Artificial Sequence: Synthetic polypeptide
  VH of XENP021118

SEQ ID NO: 30926 - protein, 5 aa, Artificial Sequence
  Description of Artificial Sequence: Synthetic peptide
  XENP021118 vhCDR1
DAWMD

SEQ ID NO: 30927 - protein, 19 aa, Artificial Sequence
  Description of Artificial Sequence: Synthetic peptide
  XENP021118 vhCDR2
EIRTKANNHATYYAESVKG

SEQ ID NO: 30928 - protein, 10 aa, Artificial Sequence
  Description of Artificial Sequence: Synthetic peptide
  XENP021118 vhCDR3
LANWDWYFDV

SEQ ID NO: 30929 - protein, 218 aa, Artificial Sequence; identical to SEQ ID NO: 20100
  Description of Artificial Sequence: Synthetic polypeptide
  XENP021118 7G8_H0_L0.41_Fab Light Chain

SEQ ID NO: 30930 - protein, 111 aa, Artificial Sequence; identical to SEQ ID NO: 20101
  Description of Artificial Sequence: Synthetic polypeptide
  VL of XENP021118

SEQ ID NO: 30931 - protein, 15 aa, Artificial Sequence
  Description of Artificial Sequence: Synthetic peptide
  XENP021118 vlCDR1
KASQSVDYDGSSYMN

SEQ ID NO: 30932 - protein, 7 aa, Artificial Sequence
  Description of Artificial Sequence: Synthetic peptide
  XENP021118 vlCDR2
AASNLES

SEQ ID NO: 30933 - protein, 9 aa, Artificial Sequence
  Description of Artificial Sequence: Synthetic peptide
  XENP021118 vlCDR3
QQSNEDPFT

SEQ ID NO: 30934 - protein, 226 aa, Artificial Sequence; identical to SEQ ID NO: 29134
  Description of Artificial Sequence: Synthetic polypeptide
  XENP021119 7G8_H0_L0.42_Fab Heavy Chain

SEQ ID NO: 30935 - protein, 121 aa, Artificial Sequence; identical to SEQ ID NO: 17586
  Description of Artificial Sequence: Synthetic polypeptide
  VH of XENP021119

SEQ ID NO: 30936 - protein, 5 aa, Artificial Sequence
  Description of Artificial Sequence: Synthetic peptide
  XENP021119 vhCDR1
DAWMD

SEQ ID NO: 30937 - protein, 19 aa, Artificial Sequence
  Description of Artificial Sequence: Synthetic peptide
  XENP021119 vhCDR2
EIRTKANNHATYYAESVKG

SEQ ID NO: 30938 - protein, 10 aa, Artificial Sequence
  Description of Artificial Sequence: Synthetic peptide
  XENP021119 vhCDR3
LANWDWYFDV

SEQ ID NO: 30939 - protein, 218 aa, Artificial Sequence; identical to SEQ ID NO: 20110
  Description of Artificial Sequence: Synthetic polypeptide
  XENP021119 7G8_H0_L0.42_Fab Light Chain

SEQ ID NO: 30940 - protein, 111 aa, Artificial Sequence; identical to SEQ ID NO: 20111
  Description of Artificial Sequence: Synthetic polypeptide
  VL of XENP021119

SEQ ID NO: 30941 - protein, 15 aa, Artificial Sequence
  Description of Artificial Sequence: Synthetic peptide
  XENP021119 vlCDR1
KASQSVDYDGRSYMN

SEQ ID NO: 30942 - protein, 7 aa, Artificial Sequence
  Description of Artificial Sequence: Synthetic peptide
  XENP021119 vlCDR2
AASNLES

SEQ ID NO: 30943 - protein, 9 aa, Artificial Sequence
  Description of Artificial Sequence: Synthetic peptide
  XENP021119 vlCDR3
QQSNEDPFT

SEQ ID NO: 30944 - protein, 226 aa, Artificial Sequence; identical to SEQ ID NO: 29134
  Description of Artificial Sequence: Synthetic polypeptide
  XENP021120 7G8_H0_L0.43_Fab Heavy Chain

SEQ ID NO: 30945 - protein, 121 aa, Artificial Sequence; identical to SEQ ID NO: 17586
  Description of Artificial Sequence: Synthetic polypeptide
  VH of XENP021120

SEQ ID NO: 30946 - protein, 5 aa, Artificial Sequence
  Description of Artificial Sequence: Synthetic peptide
  XENP021120 vhCDR1
DAWMD

SEQ ID NO: 30947 - protein, 19 aa, Artificial Sequence
  Description of Artificial Sequence: Synthetic peptide
  XENP021120 vhCDR2
EIRTKANNHATYYAESVKG

SEQ ID NO: 30948 - protein, 10 aa, Artificial Sequence
  Description of Artificial Sequence: Synthetic peptide
  XENP021120 vhCDR3
LANWDWYFDV

SEQ ID NO: 30949 - protein, 218 aa, Artificial Sequence; identical to SEQ ID NO: 20120
  Description of Artificial Sequence: Synthetic polypeptide
  XENP021120 7G8_H0_L0.43_Fab Light Chain

SEQ ID NO: 30950 - protein, 111 aa, Artificial Sequence; identical to SEQ ID NO: 20121
  Description of Artificial Sequence: Synthetic polypeptide
  VL of XENP021120

SEQ ID NO: 30951 - protein, 15 aa, Artificial Sequence
  Description of Artificial Sequence: Synthetic peptide
  XENP021120 vlCDR1
KASQSVDYDGLSYMN

SEQ ID NO: 30952 - protein, 7 aa, Artificial Sequence
  Description of Artificial Sequence: Synthetic peptide
  XENP021120 vlCDR2
AASNLES

SEQ ID NO: 30953 - protein, 9 aa, Artificial Sequence
  Description of Artificial Sequence: Synthetic peptide
  XENP021120 vlCDR3
QQSNEDPFT

SEQ ID NO: 30954 - protein, 226 aa, Artificial Sequence; identical to SEQ ID NO: 29134
  Description of Artificial Sequence: Synthetic polypeptide
  XENP021121 7G8_H0_L0.44_Fab Heavy Chain

SEQ ID NO: 30955 - protein, 121 aa, Artificial Sequence; identical to SEQ ID NO: 17586
  Description of Artificial Sequence: Synthetic polypeptide
  VH of XENP021121

SEQ ID NO: 30956 - protein, 5 aa, Artificial Sequence
  Description of Artificial Sequence: Synthetic peptide
  XENP021121 vhCDR1
DAWMD

SEQ ID NO: 30957 - protein, 19 aa, Artificial Sequence
  Description of Artificial Sequence: Synthetic peptide
  XENP021121 vhCDR2
EIRTKANNHATYYAESVKG

SEQ ID NO: 30958 - protein, 10 aa, Artificial Sequence
  Description of Artificial Sequence: Synthetic peptide
  XENP021121 vhCDR3
LANWDWYFDV

SEQ ID NO: 30959 - protein, 218 aa, Artificial Sequence; identical to SEQ ID NO: 20130
  Description of Artificial Sequence: Synthetic polypeptide
  XENP021121 7G8_H0_L0.44_Fab Light Chain

SEQ ID NO: 30960 - protein, 111 aa, Artificial Sequence; identical to SEQ ID NO: 20131
  Description of Artificial Sequence: Synthetic polypeptide
  VL of XENP021121

SEQ ID NO: 30961 - protein, 15 aa, Artificial Sequence
  Description of Artificial Sequence: Synthetic peptide
  XENP021121 vlCDR1
KASQSVDYDGTSYMN

SEQ ID NO: 30962 - protein, 7 aa, Artificial Sequence
  Description of Artificial Sequence: Synthetic peptide
  XENP021121 vlCDR2
AASNLES

SEQ ID NO: 30963 - protein, 9 aa, Artificial Sequence
  Description of Artificial Sequence: Synthetic peptide
  XENP021121 vlCDR3
QQSNEDPFT

SEQ ID NO: 30964 - protein, 226 aa, Artificial Sequence; identical to SEQ ID NO: 29134
  Description of Artificial Sequence: Synthetic polypeptide
  XENP021122 7G8_H0_L0.45_Fab Heavy Chain

SEQ ID NO: 30965 - protein, 121 aa, Artificial Sequence; identical to SEQ ID NO: 17586
  Description of Artificial Sequence: Synthetic polypeptide
  VH of XENP021122

SEQ ID NO: 30966 - protein, 5 aa, Artificial Sequence
  Description of Artificial Sequence: Synthetic peptide
  XENP021122 vhCDR1
DAWMD

SEQ ID NO: 30967 - protein, 19 aa, Artificial Sequence
  Description of Artificial Sequence: Synthetic peptide
  XENP021122 vhCDR2
EIRTKANNHATYYAESVKG

SEQ ID NO: 30968 - protein, 10 aa, Artificial Sequence
  Description of Artificial Sequence: Synthetic peptide
  XENP021122 vhCDR3
LANWDWYFDV

SEQ ID NO: 30969 - protein, 218 aa, Artificial Sequence; identical to SEQ ID NO: 20140
  Description of Artificial Sequence: Synthetic polypeptide
  XENP021122 7G8_H0_L0.45_Fab Light Chain

SEQ ID NO: 30970 - protein, 111 aa, Artificial Sequence; identical to SEQ ID NO: 20141
  Description of Artificial Sequence: Synthetic polypeptide
  VL of XENP021122

SEQ ID NO: 30971 - protein, 15 aa, Artificial Sequence
  Description of Artificial Sequence: Synthetic peptide
  XENP021122 vlCDR1
KASQSVDYDGGSYMN

SEQ ID NO: 30972 - protein, 7 aa, Artificial Sequence
  Description of Artificial Sequence: Synthetic peptide
  XENP021122 vlCDR2
AASNLES

SEQ ID NO: 30973 - protein, 9 aa, Artificial Sequence
  Description of Artificial Sequence: Synthetic peptide
  XENP021122 vlCDR3
QQSNEDPFT

SEQ ID NO: 30974 - protein, 226 aa, Artificial Sequence; identical to SEQ ID NO: 29134
  Description of Artificial Sequence: Synthetic polypeptide
  XENP021123 7G8_H0_L0.46_Fab Heavy Chain

SEQ ID NO: 30975 - protein, 121 aa, Artificial Sequence; identical to SEQ ID NO: 17586
  Description of Artificial Sequence: Synthetic polypeptide
  VH of XENP021123

SEQ ID NO: 30976 - protein, 5 aa, Artificial Sequence
  Description of Artificial Sequence: Synthetic peptide
  XENP021123 vhCDR1
DAWMD

SEQ ID NO: 30977 - protein, 19 aa, Artificial Sequence
  Description of Artificial Sequence: Synthetic peptide
  XENP021123 vhCDR2
EIRTKANNHATYYAESVKG

SEQ ID NO: 30978 - protein, 10 aa, Artificial Sequence
  Description of Artificial Sequence: Synthetic peptide
  XENP021123 vhCDR3
LANWDWYFDV

SEQ ID NO: 30979 - protein, 218 aa, Artificial Sequence; identical to SEQ ID NO: 20150
  Description of Artificial Sequence: Synthetic polypeptide
  XENP021123 7G8_H0_L0.46_Fab Light Chain

SEQ ID NO: 30980 - protein, 111 aa, Artificial Sequence; identical to SEQ ID NO: 20151
  Description of Artificial Sequence: Synthetic polypeptide
  VL of XENP021123

SEQ ID NO: 30981 - protein, 15 aa, Artificial Sequence
  Description of Artificial Sequence: Synthetic peptide
  XENP021123 vlCDR1
KASQSVDYDGYSYMN

SEQ ID NO: 30982 - protein, 7 aa, Artificial Sequence
  Description of Artificial Sequence: Synthetic peptide
  XENP021123 vlCDR2
AASNLES

SEQ ID NO: 30983 - protein, 9 aa, Artificial Sequence
  Description of Artificial Sequence: Synthetic peptide
  XENP021123 vlCDR3
QQSNEDPFT

SEQ ID NO: 30984 - protein, 226 aa, Artificial Sequence; identical to SEQ ID NO: 29134
  Description of Artificial Sequence: Synthetic polypeptide
  XENP021124 7G8_H0_L0.47_Fab Heavy Chain

SEQ ID NO: 30985 - protein, 121 aa, Artificial Sequence; identical to SEQ ID NO: 17586
  Description of Artificial Sequence: Synthetic polypeptide
  VH of XENP021124

SEQ ID NO: 30986 - protein, 5 aa, Artificial Sequence
  Description of Artificial Sequence: Synthetic peptide
  XENP021124 vhCDR1
DAWMD

SEQ ID NO: 30987 - protein, 19 aa, Artificial Sequence
  Description of Artificial Sequence: Synthetic peptide
  XENP021124 vhCDR2
EIRTKANNHATYYAESVKG

SEQ ID NO: 30988 - protein, 10 aa, Artificial Sequence
  Description of Artificial Sequence: Synthetic peptide
  XENP021124 vhCDR3
LANWDWYFDV

SEQ ID NO: 30989 - protein, 218 aa, Artificial Sequence; identical to SEQ ID NO: 20160
  Description of Artificial Sequence: Synthetic polypeptide
  XENP021124 7G8_H0_L0.47_Fab Light Chain

SEQ ID NO: 30990 - protein, 111 aa, Artificial Sequence; identical to SEQ ID NO: 20161
  Description of Artificial Sequence: Synthetic polypeptide
  VL of XENP021124

SEQ ID NO: 30991 - protein, 15 aa, Artificial Sequence
  Description of Artificial Sequence: Synthetic peptide
  XENP021124 vlCDR1
KASQSVDYDGDSYMN

SEQ ID NO: 30992 - protein, 7 aa, Artificial Sequence
  Description of Artificial Sequence: Synthetic peptide
  XENP021124 vlCDR2
AASNLES

SEQ ID NO: 30993 - protein, 9 aa, Artificial Sequence
  Description of Artificial Sequence: Synthetic peptide
  XENP021124 vlCDR3
QQSNEDPFT

SEQ ID NO: 30994 - protein, 226 aa, Artificial Sequence; identical to SEQ ID NO: 29134
  Description of Artificial Sequence: Synthetic polypeptide
  XENP021125 7G8_H0_L0.48_Fab Heavy Chain

SEQ ID NO: 30995 - protein, 121 aa, Artificial Sequence; identical to SEQ ID NO: 17586
  Description of Artificial Sequence: Synthetic polypeptide
  VH of XENP021125

SEQ ID NO: 30996 - protein, 5 aa, Artificial Sequence
  Description of Artificial Sequence: Synthetic peptide
  XENP021125 vhCDR1
DAWMD

SEQ ID NO: 30997 - protein, 19 aa, Artificial Sequence
  Description of Artificial Sequence: Synthetic peptide
  XENP021125 vhCDR2
EIRTKANNHATYYAESVKG

SEQ ID NO: 30998 - protein, 10 aa, Artificial Sequence
  Description of Artificial Sequence: Synthetic peptide
  XENP021125 vhCDR3
LANWDWYFDV

SEQ ID NO: 30999 - protein, 218 aa, Artificial Sequence; identical to SEQ ID NO: 20170
  Description of Artificial Sequence: Synthetic polypeptide
  XENP021125 7G8_H0_L0.48_Fab Light Chain

SEQ ID NO: 31000 - protein, 111 aa, Artificial Sequence; identical to SEQ ID NO: 20171
  Description of Artificial Sequence: Synthetic polypeptide
  VL of XENP021125

SEQ ID NO: 31001 - protein, 15 aa, Artificial Sequence
  Description of Artificial Sequence: Synthetic peptide
  XENP021125 vlCDR1
KASQSVDYDGDSYMN

SEQ ID NO: 31002 - protein, 7 aa, Artificial Sequence
  Description of Artificial Sequence: Synthetic peptide
  XENP021125 vlCDR2
SASNLES

SEQ ID NO: 31003 - protein, 9 aa, Artificial Sequence
  Description of Artificial Sequence: Synthetic peptide
  XENP021125 vlCDR3
QQSNEDPFT

SEQ ID NO: 31004 - protein, 226 aa, Artificial Sequence; identical to SEQ ID NO: 29134
  Description of Artificial Sequence: Synthetic polypeptide
  XENP021126 7G8_H0_L0.49_Fab Heavy Chain

SEQ ID NO: 31005 - protein, 121 aa, Artificial Sequence; identical to SEQ ID NO: 17586
  Description of Artificial Sequence: Synthetic polypeptide
  VH of XENP021126

SEQ ID NO: 31006 - protein, 5 aa, Artificial Sequence
  Description of Artificial Sequence: Synthetic peptide
  XENP021126 vhCDR1
DAWMD

SEQ ID NO: 31007 - protein, 19 aa, Artificial Sequence
  Description of Artificial Sequence: Synthetic peptide
  XENP021126 vhCDR2
EIRTKANNHATYYAESVKG

SEQ ID NO: 31008 - protein, 10 aa, Artificial Sequence
  Description of Artificial Sequence: Synthetic peptide
  XENP021126 vhCDR3
LANWDWYFDV

SEQ ID NO: 31009 - protein, 218 aa, Artificial Sequence; identical to SEQ ID NO: 20180
  Description of Artificial Sequence: Synthetic polypeptide
  XENP021126 7G8_H0_L0.49_Fab Light Chain

SEQ ID NO: 31010 - protein, 111 aa, Artificial Sequence; identical to SEQ ID NO: 20181
  Description of Artificial Sequence: Synthetic polypeptide
  VL of XENP021126

SEQ ID NO: 31011 - protein, 15 aa, Artificial Sequence
  Description of Artificial Sequence: Synthetic peptide
  XENP021126 vlCDR1
KASQSVDYDGDSYMN

SEQ ID NO: 31012 - protein, 7 aa, Artificial Sequence
  Description of Artificial Sequence: Synthetic peptide
  XENP021126 vlCDR2
TASNLES

SEQ ID NO: 31013 - protein, 9 aa, Artificial Sequence
  Description of Artificial Sequence: Synthetic peptide
  XENP021126 vlCDR3
QQSNEDPFT

SEQ ID NO: 31014 - protein, 226 aa, Artificial Sequence; identical to SEQ ID NO: 29134
  Description of Artificial Sequence: Synthetic polypeptide
  XENP021127 7G8_H0_L0.50_Fab Heavy Chain

SEQ ID NO: 31015 - protein, 121 aa, Artificial Sequence; identical to SEQ ID NO: 17586
  Description of Artificial Sequence: Synthetic polypeptide
  VH of XENP021127

SEQ ID NO: 31016 - protein, 5 aa, Artificial Sequence
  Description of Artificial Sequence: Synthetic peptide
  XENP021127 vhCDR1
DAWMD

SEQ ID NO: 31017 - protein, 19 aa, Artificial Sequence
  Description of Artificial Sequence: Synthetic peptide
  XENP021127 vhCDR2
EIRTKANNHATYYAESVKG

SEQ ID NO: 31018 - protein, 10 aa, Artificial Sequence
  Description of Artificial Sequence: Synthetic peptide
  XENP021127 vhCDR3
LANWDWYFDV

SEQ ID NO: 31019 - protein, 218 aa, Artificial Sequence; identical to SEQ ID NO: 20190
  Description of Artificial Sequence: Synthetic polypeptide
  XENP021127 7G8_H0_L0.50_Fab Light Chain

SEQ ID NO: 31020 - protein, 111 aa, Artificial Sequence; identical to SEQ ID NO: 20191
  Description of Artificial Sequence: Synthetic polypeptide
  VL of XENP021127

SEQ ID NO: 31021 - protein, 15 aa, Artificial Sequence
  Description of Artificial Sequence: Synthetic peptide
  XENP021127 vlCDR1
KASQSVDYDGDSYMN

SEQ ID NO: 31022 - protein, 7 aa, Artificial Sequence
  Description of Artificial Sequence: Synthetic peptide
  XENP021127 vlCDR2
GASNLES

SEQ ID NO: 31023 - protein, 9 aa, Artificial Sequence
  Description of Artificial Sequence: Synthetic peptide
  XENP021127 vlCDR3
QQSNEDPFT

SEQ ID NO: 31024 - protein, 226 aa, Artificial Sequence; identical to SEQ ID NO: 29134
  Description of Artificial Sequence: Synthetic polypeptide
  XENP021128 7G8_H0_L0.51_Fab Heavy Chain

SEQ ID NO: 31025 - protein, 121 aa, Artificial Sequence; identical to SEQ ID NO: 17586
  Description of Artificial Sequence: Synthetic polypeptide
  VH of XENP021128

SEQ ID NO: 31026 - protein, 5 aa, Artificial Sequence
  Description of Artificial Sequence: Synthetic peptide
  XENP021128 vhCDR1
DAWMD

SEQ ID NO: 31027 - protein, 19 aa, Artificial Sequence
  Description of Artificial Sequence: Synthetic peptide
  XENP021128 vhCDR2
EIRTKANNHATYYAESVKG

SEQ ID NO: 31028 - protein, 10 aa, Artificial Sequence
  Description of Artificial Sequence: Synthetic peptide
  XENP021128 vhCDR3
LANWDWYFDV

SEQ ID NO: 31029 - protein, 218 aa, Artificial Sequence; identical to SEQ ID NO: 20200
  Description of Artificial Sequence: Synthetic polypeptide
  XENP021128 7G8_H0_L0.51_Fab Light Chain

SEQ ID NO: 31030 - protein, 111 aa, Artificial Sequence; identical to SEQ ID NO: 20201
  Description of Artificial Sequence: Synthetic polypeptide
  VL of XENP021128

SEQ ID NO: 31031 - protein, 15 aa, Artificial Sequence
  Description of Artificial Sequence: Synthetic peptide
  XENP021128 vlCDR1
KASQSVDYDGDSYMN

SEQ ID NO: 31032 - protein, 7 aa, Artificial Sequence
  Description of Artificial Sequence: Synthetic peptide
  XENP021128 vlCDR2
HASNLES

SEQ ID NO: 31033 - protein, 9 aa, Artificial Sequence
  Description of Artificial Sequence: Synthetic peptide
  XENP021128 vlCDR3
QQSNEDPFT

SEQ ID NO: 31034 - protein, 226 aa, Artificial Sequence; identical to SEQ ID NO: 29134
  Description of Artificial Sequence: Synthetic polypeptide
  XENP021129 7G8_H0_L0.52_Fab Heavy Chain

SEQ ID NO: 31035 - protein, 121 aa, Artificial Sequence; identical to SEQ ID NO: 17586
  Description of Artificial Sequence: Synthetic polypeptide
  VH of XENP021129

SEQ ID NO: 31036 - protein, 5 aa, Artificial Sequence
  Description of Artificial Sequence: Synthetic peptide
  XENP021129 vhCDR1
DAWMD

SEQ ID NO: 31037 - protein, 19 aa, Artificial Sequence
  Description of Artificial Sequence: Synthetic peptide
  XENP021129 vhCDR2
EIRTKANNHATYYAESVKG

SEQ ID NO: 31038 - protein, 10 aa, Artificial Sequence
  Description of Artificial Sequence: Synthetic peptide
  XENP021129 vhCDR3
LANWDWYFDV

SEQ ID NO: 31039 - protein, 218 aa, Artificial Sequence; identical to SEQ ID NO: 20210
  Description of Artificial Sequence: Synthetic polypeptide
  XENP021129 7G8_H0_L0.52_Fab Light Chain

SEQ ID NO: 31040 - protein, 111 aa, Artificial Sequence; identical to SEQ ID NO: 20211
  Description of Artificial Sequence: Synthetic polypeptide
  VL of XENP021129

SEQ ID NO: 31041 - protein, 15 aa, Artificial Sequence
  Description of Artificial Sequence: Synthetic peptide
  XENP021129 vlCDR1
KASQSVDYDGDSYMN

SEQ ID NO: 31042 - protein, 7 aa, Artificial Sequence
  Description of Artificial Sequence: Synthetic peptide
  XENP021129 vlCDR2
QASNLES

SEQ ID NO: 31043 - protein, 9 aa, Artificial Sequence
  Description of Artificial Sequence: Synthetic peptide
  XENP021129 vlCDR3
QQSNEDPFT

SEQ ID NO: 31044 - protein, 226 aa, Artificial Sequence; identical to SEQ ID NO: 29134
  Description of Artificial Sequence: Synthetic polypeptide
  XENP021130 7G8_H0_L0.53_Fab Heavy Chain

SEQ ID NO: 31045 - protein, 121 aa, Artificial Sequence; identical to SEQ ID NO: 17586
  Description of Artificial Sequence: Synthetic polypeptide
  VH of XENP021130

SEQ ID NO: 31046 - protein, 5 aa, Artificial Sequence
  Description of Artificial Sequence: Synthetic peptide
  XENP021130 vhCDR1
DAWMD

SEQ ID NO: 31047 - protein, 19 aa, Artificial Sequence
  Description of Artificial Sequence: Synthetic peptide
  XENP021130 vhCDR2
EIRTKANNHATYYAESVKG

SEQ ID NO: 31048 - protein, 10 aa, Artificial Sequence
  Description of Artificial Sequence: Synthetic peptide
  XENP021130 vhCDR3
LANWDWYFDV

SEQ ID NO: 31049 - protein, 218 aa, Artificial Sequence; identical to SEQ ID NO: 20220
  Description of Artificial Sequence: Synthetic polypeptide
  XENP021130 7G8_H0_L0.53_Fab Light Chain

SEQ ID NO: 31050 - protein, 111 aa, Artificial Sequence; identical to SEQ ID NO: 20221
  Description of Artificial Sequence: Synthetic polypeptide
  VL of XENP021130

SEQ ID NO: 31051 - protein, 15 aa, Artificial Sequence
  Description of Artificial Sequence: Synthetic peptide
  XENP021130 vlCDR1
KASQSVDYDGDSYMN

SEQ ID NO: 31052 - protein, 7 aa, Artificial Sequence
  Description of Artificial Sequence: Synthetic peptide
  XENP021130 vlCDR2
DASNLES

SEQ ID NO: 31053 - protein, 9 aa, Artificial Sequence
  Description of Artificial Sequence: Synthetic peptide
  XENP021130 vlCDR3
QQSNEDPFT

SEQ ID NO: 31054 - protein, 226 aa, Artificial Sequence; identical to SEQ ID NO: 29134
  Description of Artificial Sequence: Synthetic polypeptide
  XENP021131 7G8_H0_L0.54_Fab Heavy Chain

SEQ ID NO: 31055 - protein, 121 aa, Artificial Sequence; identical to SEQ ID NO: 17586
  Description of Artificial Sequence: Synthetic polypeptide
  VH of XENP021131

SEQ ID NO: 31056 - protein, 5 aa, Artificial Sequence
  Description of Artificial Sequence: Synthetic peptide
  XENP021131 vhCDR1
DAWMD

SEQ ID NO: 31057 - protein, 19 aa, Artificial Sequence
  Description of Artificial Sequence: Synthetic peptide
  XENP021131 vhCDR2
EIRTKANNHATYYAESVKG

SEQ ID NO: 31058 - protein, 10 aa, Artificial Sequence
  Description of Artificial Sequence: Synthetic peptide
  XENP021131 vhCDR3
LANWDWYFDV

SEQ ID NO: 31059 - protein, 218 aa, Artificial Sequence; identical to SEQ ID NO: 20230
  Description of Artificial Sequence: Synthetic polypeptide
  XENP021131 7G8_H0_L0.54_Fab Light Chain

SEQ ID NO: 31060 - protein, 111 aa, Artificial Sequence; identical to SEQ ID NO: 20231
  Description of Artificial Sequence: Synthetic polypeptide
  VL of XENP021131

SEQ ID NO: 31061 - protein, 15 aa, Artificial Sequence
  Description of Artificial Sequence: Synthetic peptide
  XENP021131 vlCDR1
KASQSVDYDGDSYMN

SEQ ID NO: 31062 - protein, 7 aa, Artificial Sequence
  Description of Artificial Sequence: Synthetic peptide
  XENP021131 vlCDR2
LASNLES

SEQ ID NO: 31063 - protein, 9 aa, Artificial Sequence
  Description of Artificial Sequence: Synthetic peptide
  XENP021131 vlCDR3
QQSNEDPFT

SEQ ID NO: 31064 - protein, 226 aa, Artificial Sequence; identical to SEQ ID NO: 29134
  Description of Artificial Sequence: Synthetic polypeptide
  XENP021132 7G8_H0_L0.55_Fab Heavy Chain

SEQ ID NO: 31065 - protein, 121 aa, Artificial Sequence; identical to SEQ ID NO: 17586
  Description of Artificial Sequence: Synthetic polypeptide
  VH of XENP021132

SEQ ID NO: 31066 - protein, 5 aa, Artificial Sequence
  Description of Artificial Sequence: Synthetic peptide
  XENP021132 vhCDR1
DAWMD

SEQ ID NO: 31067 - protein, 19 aa, Artificial Sequence
  Description of Artificial Sequence: Synthetic peptide
  XENP021132 vhCDR2
EIRTKANNHATYYAESVKG

SEQ ID NO: 31068 - protein, 10 aa, Artificial Sequence
  Description of Artificial Sequence: Synthetic peptide
  XENP021132 vhCDR3
LANWDWYFDV

SEQ ID NO: 31069 - protein, 218 aa, Artificial Sequence; identical to SEQ ID NO: 20240
  Description of Artificial Sequence: Synthetic polypeptide
  XENP021132 7G8_H0_L0.55_Fab Light Chain

SEQ ID NO: 31070 - protein, 111 aa, Artificial Sequence; identical to SEQ ID NO: 20241
  Description of Artificial Sequence: Synthetic polypeptide
  VL of XENP021132

SEQ ID NO: 31071 - protein, 15 aa, Artificial Sequence
  Description of Artificial Sequence: Synthetic peptide
  XENP021132 vlCDR1
KASQSVDYDGDSYMN

SEQ ID NO: 31072 - protein, 7 aa, Artificial Sequence
  Description of Artificial Sequence: Synthetic peptide
  XENP021132 vlCDR2
KASNLES

SEQ ID NO: 31073 - protein, 9 aa, Artificial Sequence
  Description of Artificial Sequence: Synthetic peptide
  XENP021132 vlCDR3
QQSNEDPFT

SEQ ID NO: 31074 - protein, 226 aa, Artificial Sequence; identical to SEQ ID NO: 29134
  Description of Artificial Sequence: Synthetic polypeptide
  XENP021133 7G8_H0_L0.56_Fab Heavy Chain

SEQ ID NO: 31075 - protein, 121 aa, Artificial Sequence; identical to SEQ ID NO: 17586
  Description of Artificial Sequence: Synthetic polypeptide
  VH of XENP021133

SEQ ID NO: 31076 - protein, 5 aa, Artificial Sequence
  Description of Artificial Sequence: Synthetic peptide
  XENP021133 vhCDR1
DAWMD

SEQ ID NO: 31077 - protein, 19 aa, Artificial Sequence
  Description of Artificial Sequence: Synthetic peptide
  XENP021133 vhCDR2
EIRTKANNHATYYAESVKG

SEQ ID NO: 31078 - protein, 10 aa, Artificial Sequence
  Description of Artificial Sequence: Synthetic peptide
  XENP021133 vhCDR3
LANWDWYFDV

SEQ ID NO: 31079 - protein, 218 aa, Artificial Sequence; identical to SEQ ID NO: 20250
  Description of Artificial Sequence: Synthetic polypeptide
  XENP021133 7G8_H0_L0.56_Fab Light Chain

SEQ ID NO: 31080 - protein, 111 aa, Artificial Sequence; identical to SEQ ID NO: 20251
  Description of Artificial Sequence: Synthetic polypeptide
  VL of XENP021133

SEQ ID NO: 31081 - protein, 15 aa, Artificial Sequence
  Description of Artificial Sequence: Synthetic peptide
  XENP021133 vlCDR1
KASQSVDYDGDSYMN

SEQ ID NO: 31082 - protein, 7 aa, Artificial Sequence
  Description of Artificial Sequence: Synthetic peptide
  XENP021133 vlCDR2
YASNLES

SEQ ID NO: 31083 - protein, 9 aa, Artificial Sequence
  Description of Artificial Sequence: Synthetic peptide
  XENP021133 vlCDR3
QQSNEDPFT

SEQ ID NO: 31084 - protein, 226 aa, Artificial Sequence; identical to SEQ ID NO: 29134
  Description of Artificial Sequence: Synthetic polypeptide
  XENP021134 7G8_H0_L0.57_Fab Heavy Chain

SEQ ID NO: 31085 - protein, 121 aa, Artificial Sequence; identical to SEQ ID NO: 17586
  Description of Artificial Sequence: Synthetic polypeptide
  VH of XENP021134

SEQ ID NO: 31086 - protein, 5 aa, Artificial Sequence
  Description of Artificial Sequence: Synthetic peptide
  XENP021134 vhCDR1
DAWMD

SEQ ID NO: 31087 - protein, 19 aa, Artificial Sequence
  Description of Artificial Sequence: Synthetic peptide
  XENP021134 vhCDR2
EIRTKANNHATYYAESVKG

SEQ ID NO: 31088 - protein, 10 aa, Artificial Sequence
  Description of Artificial Sequence: Synthetic peptide
  XENP021134 vhCDR3
LANWDWYFDV

SEQ ID NO: 31089 - protein, 218 aa, Artificial Sequence; identical to SEQ ID NO: 20260
  Description of Artificial Sequence: Synthetic polypeptide
  XENP021134 7G8_H0_L0.57_Fab Light Chain

SEQ ID NO: 31090 - protein, 111 aa, Artificial Sequence; identical to SEQ ID NO: 20261
  Description of Artificial Sequence: Synthetic polypeptide
  VL of XENP021134

SEQ ID NO: 31091 - protein, 15 aa, Artificial Sequence
  Description of Artificial Sequence: Synthetic peptide
  XENP021134 vlCDR1
KASQSVDYDGDSYMN

SEQ ID NO: 31092 - protein, 7 aa, Artificial Sequence
  Description of Artificial Sequence: Synthetic peptide
  XENP021134 vlCDR2
AASDLES

SEQ ID NO: 31093 - protein, 9 aa, Artificial Sequence
  Description of Artificial Sequence: Synthetic peptide
  XENP021134 vlCDR3
QQSNEDPFT

SEQ ID NO: 31094 - protein, 226 aa, Artificial Sequence; identical to SEQ ID NO: 29134
  Description of Artificial Sequence: Synthetic polypeptide
  XENP021135 7G8_H0_L0.58_Fab Heavy Chain

SEQ ID NO: 31095 - protein, 121 aa, Artificial Sequence; identical to SEQ ID NO: 17586
  Description of Artificial Sequence: Synthetic polypeptide
  VH of XENP021135

SEQ ID NO: 31096 - protein, 5 aa, Artificial Sequence
  Description of Artificial Sequence: Synthetic peptide
  XENP021135 vhCDR1
DAWMD

SEQ ID NO: 31097 - protein, 19 aa, Artificial Sequence
  Description of Artificial Sequence: Synthetic peptide
  XENP021135 vhCDR2
EIRTKANNHATYYAESVKG

SEQ ID NO: 31098 - protein, 10 aa, Artificial Sequence
  Description of Artificial Sequence: Synthetic peptide
  XENP021135 vhCDR3
LANWDWYFDV

SEQ ID NO: 31099 - protein, 218 aa, Artificial Sequence; identical to SEQ ID NO: 20270
  Description of Artificial Sequence: Synthetic polypeptide
  XENP021135 7G8_H0_L0.58_Fab Light Chain

SEQ ID NO: 31100 - protein, 111 aa, Artificial Sequence; identical to SEQ ID NO: 20271
  Description of Artificial Sequence: Synthetic polypeptide
  VL of XENP021135

SEQ ID NO: 31101 - protein, 15 aa, Artificial Sequence
  Description of Artificial Sequence: Synthetic peptide
  XENP021135 vlCDR1
KASQSVDYDGDSYMN

SEQ ID NO: 31102 - protein, 7 aa, Artificial Sequence
  Description of Artificial Sequence: Synthetic peptide
  XENP021135 vlCDR2
AASHLES

SEQ ID NO: 31103 - protein, 9 aa, Artificial Sequence
  Description of Artificial Sequence: Synthetic peptide
  XENP021135 vlCDR3
QQSNEDPFT

SEQ ID NO: 31104 - protein, 226 aa, Artificial Sequence; identical to SEQ ID NO: 29134
  Description of Artificial Sequence: Synthetic polypeptide
  XENP021136 7G8_H0_L0.59_Fab Heavy Chain

SEQ ID NO: 31105 - protein, 121 aa, Artificial Sequence; identical to SEQ ID NO: 17586
  Description of Artificial Sequence: Synthetic polypeptide
  VH of XENP021136

SEQ ID NO: 31106 - protein, 5 aa, Artificial Sequence
  Description of Artificial Sequence: Synthetic peptide
  XENP021136 vhCDR1
DAWMD

SEQ ID NO: 31107 - protein, 19 aa, Artificial Sequence
  Description of Artificial Sequence: Synthetic peptide
  XENP021136 vhCDR2
EIRTKANNHATYYAESVKG

SEQ ID NO: 31108 - protein, 10 aa, Artificial Sequence
  Description of Artificial Sequence: Synthetic peptide
  XENP021136 vhCDR3
LANWDWYFDV

SEQ ID NO: 31109 - protein, 218 aa, Artificial Sequence; identical to SEQ ID NO: 20280
  Description of Artificial Sequence: Synthetic polypeptide
  XENP021136 7G8_H0_L0.59_Fab Light Chain

SEQ ID NO: 31110 - protein, 111 aa, Artificial Sequence; identical to SEQ ID NO: 20281
  Description of Artificial Sequence: Synthetic polypeptide
  VL of XENP021136

SEQ ID NO: 31111 - protein, 15 aa, Artificial Sequence
  Description of Artificial Sequence: Synthetic peptide
  XENP021136 vlCDR1
KASQSVDYDGDSYMN

SEQ ID NO: 31112 - protein, 7 aa, Artificial Sequence
  Description of Artificial Sequence: Synthetic peptide
  XENP021136 vlCDR2
AASELES

SEQ ID NO: 31113 - protein, 9 aa, Artificial Sequence
  Description of Artificial Sequence: Synthetic peptide
  XENP021136 vlCDR3
QQSNEDPFT

SEQ ID NO: 31114 - protein, 226 aa, Artificial Sequence; identical to SEQ ID NO: 29134
  Description of Artificial Sequence: Synthetic polypeptide
  XENP021137 7G8_H0_L0.60_Fab Heavy Chain

SEQ ID NO: 31115 - protein, 121 aa, Artificial Sequence; identical to SEQ ID NO: 17586
  Description of Artificial Sequence: Synthetic polypeptide
  VH of XENP021137

SEQ ID NO: 31116 - protein, 5 aa, Artificial Sequence
  Description of Artificial Sequence: Synthetic peptide
  XENP021137 vhCDR1
DAWMD

SEQ ID NO: 31117 - protein, 19 aa, Artificial Sequence
  Description of Artificial Sequence: Synthetic peptide
  XENP021137 vhCDR2
EIRTKANNHATYYAESVKG

SEQ ID NO: 31118 - protein, 10 aa, Artificial Sequence
  Description of Artificial Sequence: Synthetic peptide
  XENP021137 vhCDR3
LANWDWYFDV

SEQ ID NO: 31119 - protein, 218 aa, Artificial Sequence; identical to SEQ ID NO: 20290
  Description of Artificial Sequence: Synthetic polypeptide
  XENP021137 7G8_H0_L0.60_Fab Light Chain

SEQ ID NO: 31120 - protein, 111 aa, Artificial Sequence; identical to SEQ ID NO: 20291
  Description of Artificial Sequence: Synthetic polypeptide
  VL of XENP021137

SEQ ID NO: 31121 - protein, 15 aa, Artificial Sequence
  Description of Artificial Sequence: Synthetic peptide
  XENP021137 vlCDR1
KASQSVDYDGDSYMN

SEQ ID NO: 31122 - protein, 7 aa, Artificial Sequence
  Description of Artificial Sequence: Synthetic peptide
  XENP021137 vlCDR2
AASSLES

SEQ ID NO: 31123 - protein, 9 aa, Artificial Sequence
  Description of Artificial Sequence: Synthetic peptide
  XENP021137 vlCDR3
QQSNEDPFT

SEQ ID NO: 31124 - protein, 226 aa, Artificial Sequence; identical to SEQ ID NO: 29134
  Description of Artificial Sequence: Synthetic polypeptide
  XENP021138 7G8_H0_L0.61_Fab Heavy Chain

SEQ ID NO: 31125 - protein, 121 aa, Artificial Sequence; identical to SEQ ID NO: 17586
  Description of Artificial Sequence: Synthetic polypeptide
  VH of XENP021138

SEQ ID NO: 31126 - protein, 5 aa, Artificial Sequence
  Description of Artificial Sequence: Synthetic peptide
  XENP021138 vhCDR1
DAWMD

SEQ ID NO: 31127 - protein, 19 aa, Artificial Sequence
  Description of Artificial Sequence: Synthetic peptide
  XENP021138 vhCDR2
EIRTKANNHATYYAESVKG

SEQ ID NO: 31128 - protein, 10 aa, Artificial Sequence
  Description of Artificial Sequence: Synthetic peptide
  XENP021138 vhCDR3
LANWDWYFDV

SEQ ID NO: 31129 - protein, 218 aa, Artificial Sequence; identical to SEQ ID NO: 20300
  Description of Artificial Sequence: Synthetic polypeptide
  XENP021138 7G8_H0_L0.61_Fab Light Chain

SEQ ID NO: 31130 - protein, 111 aa, Artificial Sequence; identical to SEQ ID NO: 20301
  Description of Artificial Sequence: Synthetic polypeptide
  VL of XENP021138

SEQ ID NO: 31131 - protein, 15 aa, Artificial Sequence
  Description of Artificial Sequence: Synthetic peptide
  XENP021138 vlCDR1
KASQSVDYDGDSYMN

SEQ ID NO: 31132 - protein, 7 aa, Artificial Sequence
  Description of Artificial Sequence: Synthetic peptide
  XENP021138 vlCDR2
AASRLES

SEQ ID NO: 31133 - protein, 9 aa, Artificial Sequence
  Description of Artificial Sequence: Synthetic peptide
  XENP021138 vlCDR3
QQSNEDPFT

SEQ ID NO: 31134 - protein, 226 aa, Artificial Sequence; identical to SEQ ID NO: 29134
  Description of Artificial Sequence: Synthetic polypeptide
  XENP021139 7G8_H0_L0.62_Fab Heavy Chain

SEQ ID NO: 31135 - protein, 121 aa, Artificial Sequence; identical to SEQ ID NO: 17586
  Description of Artificial Sequence: Synthetic polypeptide
  VH of XENP021139

SEQ ID NO: 31136 - protein, 5 aa, Artificial Sequence
  Description of Artificial Sequence: Synthetic peptide
  XENP021139 vhCDR1
DAWMD

SEQ ID NO: 31137 - protein, 19 aa, Artificial Sequence
  Description of Artificial Sequence: Synthetic peptide
  XENP021139 vhCDR2
EIRTKANNHATYYAESVKG

SEQ ID NO: 31138 - protein, 10 aa, Artificial Sequence
  Description of Artificial Sequence: Synthetic peptide
  XENP021139 vhCDR3
LANWDWYFDV

SEQ ID NO: 31139 - protein, 218 aa, Artificial Sequence; identical to SEQ ID NO: 20310
  Description of Artificial Sequence: Synthetic polypeptide
  XENP021139 7G8_H0_L0.62_Fab Light Chain

SEQ ID NO: 31140 - protein, 111 aa, Artificial Sequence; identical to SEQ ID NO: 20311
  Description of Artificial Sequence: Synthetic polypeptide
  VL of XENP021139

SEQ ID NO: 31141 - protein, 15 aa, Artificial Sequence
  Description of Artificial Sequence: Synthetic peptide
  XENP021139 vlCDR1
KASQSVDYDGDSYMN

SEQ ID NO: 31142 - protein, 7 aa, Artificial Sequence
  Description of Artificial Sequence: Synthetic peptide
  XENP021139 vlCDR2
AASLLES

SEQ ID NO: 31143 - protein, 9 aa, Artificial Sequence
  Description of Artificial Sequence: Synthetic peptide
  XENP021139 vlCDR3
QQSNEDPFT

SEQ ID NO: 31144 - protein, 226 aa, Artificial Sequence; identical to SEQ ID NO: 29134
  Description of Artificial Sequence: Synthetic polypeptide
  XENP021140 7G8_H0_L0.63_Fab Heavy Chain

SEQ ID NO: 31145 - protein, 121 aa, Artificial Sequence; identical to SEQ ID NO: 17586
  Description of Artificial Sequence: Synthetic polypeptide
  VH of XENP021140

SEQ ID NO: 31146 - protein, 5 aa, Artificial Sequence
  Description of Artificial Sequence: Synthetic peptide
  XENP021140 vhCDR1
DAWMD

SEQ ID NO: 31147 - protein, 19 aa, Artificial Sequence
  Description of Artificial Sequence: Synthetic peptide
  XENP021140 vhCDR2
EIRTKANNHATYYAESVKG

SEQ ID NO: 31148 - protein, 10 aa, Artificial Sequence
  Description of Artificial Sequence: Synthetic peptide
  XENP021140 vhCDR3
LANWDWYFDV

SEQ ID NO: 31149 - protein, 218 aa, Artificial Sequence; identical to SEQ ID NO: 20320
  Description of Artificial Sequence: Synthetic polypeptide
  XENP021140 7G8_H0_L0.63_Fab Light Chain

SEQ ID NO: 31150 - protein, 111 aa, Artificial Sequence; identical to SEQ ID NO: 20321
  Description of Artificial Sequence: Synthetic polypeptide
  VL of XENP021140

SEQ ID NO: 31151 - protein, 15 aa, Artificial Sequence
  Description of Artificial Sequence: Synthetic peptide
  XENP021140 vlCDR1
KASQSVDYDGDSYMN

SEQ ID NO: 31152 - protein, 7 aa, Artificial Sequence
  Description of Artificial Sequence: Synthetic peptide
  XENP021140 vlCDR2
AASTLES

SEQ ID NO: 31153 - protein, 9 aa, Artificial Sequence
  Description of Artificial Sequence: Synthetic peptide
  XENP021140 vlCDR3
QQSNEDPFT

SEQ ID NO: 31154 - protein, 226 aa, Artificial Sequence; identical to SEQ ID NO: 29134
  Description of Artificial Sequence: Synthetic polypeptide
  XENP021141 7G8_H0_L0.64_Fab Heavy Chain

SEQ ID NO: 31155 - protein, 121 aa, Artificial Sequence; identical to SEQ ID NO: 17586
  Description of Artificial Sequence: Synthetic polypeptide
  VH of XENP021141

SEQ ID NO: 31156 - protein, 5 aa, Artificial Sequence
  Description of Artificial Sequence: Synthetic peptide
  XENP021141 vhCDR1
DAWMD

SEQ ID NO: 31157 - protein, 19 aa, Artificial Sequence
  Description of Artificial Sequence: Synthetic peptide
  XENP021141 vhCDR2
EIRTKANNHATYYAESVKG

SEQ ID NO: 31158 - protein, 10 aa, Artificial Sequence
  Description of Artificial Sequence: Synthetic peptide
  XENP021141 vhCDR3
LANWDWYFDV

SEQ ID NO: 31159 - protein, 218 aa, Artificial Sequence; identical to SEQ ID NO: 20330
  Description of Artificial Sequence: Synthetic polypeptide
  XENP021141 7G8_H0_L0.64_Fab Light Chain

SEQ ID NO: 31160 - protein, 111 aa, Artificial Sequence; identical to SEQ ID NO: 20331
  Description of Artificial Sequence: Synthetic polypeptide
  VL of XENP021141

SEQ ID NO: 31161 - protein, 15 aa, Artificial Sequence
  Description of Artificial Sequence: Synthetic peptide
  XENP021141 vlCDR1
KASQSVDYDGDSYMN

SEQ ID NO: 31162 - protein, 7 aa, Artificial Sequence
  Description of Artificial Sequence: Synthetic peptide
  XENP021141 vlCDR2
AASGLES

SEQ ID NO: 31163 - protein, 9 aa, Artificial Sequence
  Description of Artificial Sequence: Synthetic peptide
  XENP021141 vlCDR3
QQSNEDPFT

SEQ ID NO: 31164 - protein, 226 aa, Artificial Sequence; identical to SEQ ID NO: 29134
  Description of Artificial Sequence: Synthetic polypeptide
  XENP021142 7G8_H0_L0.65_Fab Heavy Chain

SEQ ID NO: 31165 - protein, 121 aa, Artificial Sequence; identical to SEQ ID NO: 17586
  Description of Artificial Sequence: Synthetic polypeptide
  VH of XENP021142

SEQ ID NO: 31166 - protein, 5 aa, Artificial Sequence
  Description of Artificial Sequence: Synthetic peptide
  XENP021142 vhCDR1
DAWMD

SEQ ID NO: 31167 - protein, 19 aa, Artificial Sequence
  Description of Artificial Sequence: Synthetic peptide
  XENP021142 vhCDR2
EIRTKANNHATYYAESVKG

SEQ ID NO: 31168 - protein, 10 aa, Artificial Sequence
  Description of Artificial Sequence: Synthetic peptide
  XENP021142 vhCDR3
LANWDWYFDV

SEQ ID NO: 31169 - protein, 218 aa, Artificial Sequence; identical to SEQ ID NO: 20340
  Description of Artificial Sequence: Synthetic polypeptide
  XENP021142 7G8_H0_L0.65_Fab Light Chain

SEQ ID NO: 31170 - protein, 111 aa, Artificial Sequence; identical to SEQ ID NO: 20341
  Description of Artificial Sequence: Synthetic polypeptide
  VL of XENP021142

SEQ ID NO: 31171 - protein, 15 aa, Artificial Sequence
  Description of Artificial Sequence: Synthetic peptide
  XENP021142 vlCDR1
KASQSVDYDGDSYMN

SEQ ID NO: 31172 - protein, 7 aa, Artificial Sequence
  Description of Artificial Sequence: Synthetic peptide
  XENP021142 vlCDR2
AASYLES

SEQ ID NO: 31173 - protein, 9 aa, Artificial Sequence
  Description of Artificial Sequence: Synthetic peptide
  XENP021142 vlCDR3
QQSNEDPFT

SEQ ID NO: 31174 - protein, 226 aa, Artificial Sequence; identical to SEQ ID NO: 29134
  Description of Artificial Sequence: Synthetic polypeptide
  XENP021143 7G8_H0_L0.66_Fab Heavy Chain

SEQ ID NO: 31175 - protein, 121 aa, Artificial Sequence; identical to SEQ ID NO: 17586
  Description of Artificial Sequence: Synthetic polypeptide
  VH of XENP021143

SEQ ID NO: 31176 - protein, 5 aa, Artificial Sequence
  Description of Artificial Sequence: Synthetic peptide
  XENP021143 vhCDR1
DAWMD

SEQ ID NO: 31177 - protein, 19 aa, Artificial Sequence
  Description of Artificial Sequence: Synthetic peptide
  XENP021143 vhCDR2
EIRTKANNHATYYAESVKG

SEQ ID NO: 31178 - protein, 10 aa, Artificial Sequence
  Description of Artificial Sequence: Synthetic peptide
  XENP021143 vhCDR3
LANWDWYFDV

SEQ ID NO: 31179 - protein, 218 aa, Artificial Sequence; identical to SEQ ID NO: 20350
  Description of Artificial Sequence: Synthetic polypeptide
  XENP021143 7G8_H0_L0.66_Fab Light Chain

SEQ ID NO: 31180 - protein, 111 aa, Artificial Sequence; identical to SEQ ID NO: 20351
  Description of Artificial Sequence: Synthetic polypeptide
  VL of XENP021143

SEQ ID NO: 31181 - protein, 15 aa, Artificial Sequence
  Description of Artificial Sequence: Synthetic peptide
  XENP021143 vlCDR1
KASQSVDYDGDSYMN

SEQ ID NO: 31182 - protein, 7 aa, Artificial Sequence
  Description of Artificial Sequence: Synthetic peptide
  XENP021143 vlCDR2
AASNLQS

SEQ ID NO: 31183 - protein, 9 aa, Artificial Sequence
  Description of Artificial Sequence: Synthetic peptide
  XENP021143 vlCDR3
QQSNEDPFT

SEQ ID NO: 31184 - protein, 226 aa, Artificial Sequence; identical to SEQ ID NO: 29134
  Description of Artificial Sequence: Synthetic polypeptide
  XENP021144 7G8_H0_L0.67_Fab Heavy Chain

SEQ ID NO: 31185 - protein, 121 aa, Artificial Sequence; identical to SEQ ID NO: 17586
  Description of Artificial Sequence: Synthetic polypeptide
  VH of XENP021144

SEQ ID NO: 31186 - protein, 5 aa, Artificial Sequence
  Description of Artificial Sequence: Synthetic peptide
  XENP021144 vhCDR1
DAWMD

SEQ ID NO: 31187 - protein, 19 aa, Artificial Sequence
  Description of Artificial Sequence: Synthetic peptide
  XENP021144 vhCDR2
EIRTKANNHATYYAESVKG

SEQ ID NO: 31188 - protein, 10 aa, Artificial Sequence
  Description of Artificial Sequence: Synthetic peptide
  XENP021144 vhCDR3
LANWDWYFDV

SEQ ID NO: 31189 - protein, 218 aa, Artificial Sequence; identical to SEQ ID NO: 20360
  Description of Artificial Sequence: Synthetic polypeptide
  XENP021144 7G8_H0_L0.67_Fab Light Chain

SEQ ID NO: 31190 - protein, 111 aa, Artificial Sequence; identical to SEQ ID NO: 20361
  Description of Artificial Sequence: Synthetic polypeptide
  VL of XENP021144

SEQ ID NO: 31191 - protein, 15 aa, Artificial Sequence
  Description of Artificial Sequence: Synthetic peptide
  XENP021144 vlCDR1
KASQSVDYDGDSYMN

SEQ ID NO: 31192 - protein, 7 aa, Artificial Sequence
  Description of Artificial Sequence: Synthetic peptide
  XENP021144 vlCDR2
AASNLDS

SEQ ID NO: 31193 - protein, 9 aa, Artificial Sequence
  Description of Artificial Sequence: Synthetic peptide
  XENP021144 vlCDR3
QQSNEDPFT

SEQ ID NO: 31194 - protein, 226 aa, Artificial Sequence; identical to SEQ ID NO: 29134
  Description of Artificial Sequence: Synthetic polypeptide
  XENP021145 7G8_H0_L0.68_Fab Heavy Chain

SEQ ID NO: 31195 - protein, 121 aa, Artificial Sequence; identical to SEQ ID NO: 17586
  Description of Artificial Sequence: Synthetic polypeptide
  VH of XENP021145

SEQ ID NO: 31196 - protein, 5 aa, Artificial Sequence
  Description of Artificial Sequence: Synthetic peptide
  XENP021145 vhCDR1
DAWMD

SEQ ID NO: 31197 - protein, 19 aa, Artificial Sequence
  Description of Artificial Sequence: Synthetic peptide
  XENP021145 vhCDR2
EIRTKANNHATYYAESVKG

SEQ ID NO: 31198 - protein, 10 aa, Artificial Sequence
  Description of Artificial Sequence: Synthetic peptide
  XENP021145 vhCDR3
LANWDWYFDV

SEQ ID NO: 31199 - protein, 218 aa, Artificial Sequence; identical to SEQ ID NO: 20370
  Description of Artificial Sequence: Synthetic polypeptide
  XENP021145 7G8_H0_L0.68_Fab Light Chain

SEQ ID NO: 31200 - protein, 111 aa, Artificial Sequence; identical to SEQ ID NO: 20371
  Description of Artificial Sequence: Synthetic polypeptide
  VL of XENP021145

SEQ ID NO: 31201 - protein, 15 aa, Artificial Sequence
  Description of Artificial Sequence: Synthetic peptide
  XENP021145 vlCDR1
KASQSVDYDGDSYMN

SEQ ID NO: 31202 - protein, 7 aa, Artificial Sequence
  Description of Artificial Sequence: Synthetic peptide
  XENP021145 vlCDR2
AASNLKS

SEQ ID NO: 31203 - protein, 9 aa, Artificial Sequence
  Description of Artificial Sequence: Synthetic peptide
  XENP021145 vlCDR3
QQSNEDPFT

SEQ ID NO: 31204 - protein, 226 aa, Artificial Sequence; identical to SEQ ID NO: 29134
  Description of Artificial Sequence: Synthetic polypeptide
  XENP021146 7G8_H0_L0.69_Fab Heavy Chain

SEQ ID NO: 31205 - protein, 121 aa, Artificial Sequence; identical to SEQ ID NO: 17586
  Description of Artificial Sequence: Synthetic polypeptide
  VH of XENP021146

SEQ ID NO: 31206 - protein, 5 aa, Artificial Sequence
  Description of Artificial Sequence: Synthetic peptide
  XENP021146 vhCDR1
DAWMD

SEQ ID NO: 31207 - protein, 19 aa, Artificial Sequence
  Description of Artificial Sequence: Synthetic peptide
  XENP021146 vhCDR2
EIRTKANNHATYYAESVKG

SEQ ID NO: 31208 - protein, 10 aa, Artificial Sequence
  Description of Artificial Sequence: Synthetic peptide
  XENP021146 vhCDR3
LANWDWYFDV

SEQ ID NO: 31209 - protein, 218 aa, Artificial Sequence; identical to SEQ ID NO: 20380
  Description of Artificial Sequence: Synthetic polypeptide
  XENP021146 7G8_H0_L0.69_Fab Light Chain

SEQ ID NO: 31210 - protein, 111 aa, Artificial Sequence; identical to SEQ ID NO: 20381
  Description of Artificial Sequence: Synthetic polypeptide
  VL of XENP021146

SEQ ID NO: 31211 - protein, 15 aa, Artificial Sequence
  Description of Artificial Sequence: Synthetic peptide
  XENP021146 vlCDR1
KASQSVDYDGDSYMN

SEQ ID NO: 31212 - protein, 7 aa, Artificial Sequence
  Description of Artificial Sequence: Synthetic peptide
  XENP021146 vlCDR2
AASNLHS

SEQ ID NO: 31213 - protein, 9 aa, Artificial Sequence
  Description of Artificial Sequence: Synthetic peptide
  XENP021146 vlCDR3
QQSNEDPFT

SEQ ID NO: 31214 - protein, 226 aa, Artificial Sequence; identical to SEQ ID NO: 29134
  Description of Artificial Sequence: Synthetic polypeptide
  XENP021147 7G8_H0_L0.70_Fab Heavy Chain

SEQ ID NO: 31215 - protein, 121 aa, Artificial Sequence; identical to SEQ ID NO: 17586
  Description of Artificial Sequence: Synthetic polypeptide
  VH of XENP021147

SEQ ID NO: 31216 - protein, 5 aa, Artificial Sequence
  Description of Artificial Sequence: Synthetic peptide
  XENP021147 vhCDR1
DAWMD

SEQ ID NO: 31217 - protein, 19 aa, Artificial Sequence
  Description of Artificial Sequence: Synthetic peptide
  XENP021147 vhCDR2
EIRTKANNHATYYAESVKG

SEQ ID NO: 31218 - protein, 10 aa, Artificial Sequence
  Description of Artificial Sequence: Synthetic peptide
  XENP021147 vhCDR3
LANWDWYFDV

SEQ ID NO: 31219 - protein, 218 aa, Artificial Sequence; identical to SEQ ID NO: 20390
  Description of Artificial Sequence: Synthetic polypeptide
  XENP021147 7G8_H0_L0.70_Fab Light Chain

SEQ ID NO: 31220 - protein, 111 aa, Artificial Sequence; identical to SEQ ID NO: 20391
  Description of Artificial Sequence: Synthetic polypeptide
  VL of XENP021147

SEQ ID NO: 31221 - protein, 15 aa, Artificial Sequence
  Description of Artificial Sequence: Synthetic peptide
  XENP021147 vlCDR1
KASQSVDYDGDSYMN

SEQ ID NO: 31222 - protein, 7 aa, Artificial Sequence
  Description of Artificial Sequence: Synthetic peptide
  XENP021147 vlCDR2
AASNLAS

SEQ ID NO: 31223 - protein, 9 aa, Artificial Sequence
  Description of Artificial Sequence: Synthetic peptide
  XENP021147 vlCDR3
QQSNEDPFT

SEQ ID NO: 31224 - protein, 226 aa, Artificial Sequence; identical to SEQ ID NO: 29134
  Description of Artificial Sequence: Synthetic polypeptide
  XENP021148 7G8_H0_L0.71_Fab Heavy Chain

SEQ ID NO: 31225 - protein, 121 aa, Artificial Sequence; identical to SEQ ID NO: 17586
  Description of Artificial Sequence: Synthetic polypeptide
  VH of XENP021148

SEQ ID NO: 31226 - protein, 5 aa, Artificial Sequence
  Description of Artificial Sequence: Synthetic peptide
  XENP021148 vhCDR1
DAWMD

SEQ ID NO: 31227 - protein, 19 aa, Artificial Sequence
  Description of Artificial Sequence: Synthetic peptide
  XENP021148 vhCDR2
EIRTKANNHATYYAESVKG

SEQ ID NO: 31228 - protein, 10 aa, Artificial Sequence
  Description of Artificial Sequence: Synthetic peptide
  XENP021148 vhCDR3
LANWDWYFDV

SEQ ID NO: 31229 - protein, 218 aa, Artificial Sequence; identical to SEQ ID NO: 20400
  Description of Artificial Sequence: Synthetic polypeptide
  XENP021148 7G8_H0_L0.71_Fab Light Chain

SEQ ID NO: 31230 - protein, 111 aa, Artificial Sequence; identical to SEQ ID NO: 20401
  Description of Artificial Sequence: Synthetic polypeptide
  VL of XENP021148

SEQ ID NO: 31231 - protein, 15 aa, Artificial Sequence
  Description of Artificial Sequence: Synthetic peptide
  XENP021148 vlCDR1
KASQSVDYDGDSYMN

SEQ ID NO: 31232 - protein, 7 aa, Artificial Sequence
  Description of Artificial Sequence: Synthetic peptide
  XENP021148 vlCDR2
AASNLGS

SEQ ID NO: 31233 - protein, 9 aa, Artificial Sequence
  Description of Artificial Sequence: Synthetic peptide
  XENP021148 vlCDR3
QQSNEDPFT

SEQ ID NO: 31234 - protein, 226 aa, Artificial Sequence; identical to SEQ ID NO: 29134
  Description of Artificial Sequence: Synthetic polypeptide
  XENP021149 7G8_H0_L0.72_Fab Heavy Chain

SEQ ID NO: 31235 - protein, 121 aa, Artificial Sequence; identical to SEQ ID NO: 17586
  Description of Artificial Sequence: Synthetic polypeptide
  VH of XENP021149

SEQ ID NO: 31236 - protein, 5 aa, Artificial Sequence
  Description of Artificial Sequence: Synthetic peptide
  XENP021149 vhCDR1
DAWMD

SEQ ID NO: 31237 - protein, 19 aa, Artificial Sequence
  Description of Artificial Sequence: Synthetic peptide
  XENP021149 vhCDR2
EIRTKANNHATYYAESVKG

SEQ ID NO: 31238 - protein, 10 aa, Artificial Sequence
  Description of Artificial Sequence: Synthetic peptide
  XENP021149 vhCDR3
LANWDWYFDV

SEQ ID NO: 31239 - protein, 218 aa, Artificial Sequence; identical to SEQ ID NO: 20410
  Description of Artificial Sequence: Synthetic polypeptide
  XENP021149 7G8_H0_L0.72_Fab Light Chain

SEQ ID NO: 31240 - protein, 111 aa, Artificial Sequence; identical to SEQ ID NO: 20411
  Description of Artificial Sequence: Synthetic polypeptide
  VL of XENP021149

SEQ ID NO: 31241 - protein, 15 aa, Artificial Sequence
  Description of Artificial Sequence: Synthetic peptide
  XENP021149 vlCDR1
KASQSVDYDGDSYMN

SEQ ID NO: 31242 - protein, 7 aa, Artificial Sequence
  Description of Artificial Sequence: Synthetic peptide
  XENP021149 vlCDR2
AASNLYS

SEQ ID NO: 31243 - protein, 9 aa, Artificial Sequence
  Description of Artificial Sequence: Synthetic peptide
  XENP021149 vlCDR3
QQSNEDPFT

SEQ ID NO: 31244 - protein, 226 aa, Artificial Sequence; identical to SEQ ID NO: 29134
  Description of Artificial Sequence: Synthetic polypeptide
  XENP021150 7G8_H0_L0.73_Fab Heavy Chain

SEQ ID NO: 31245 - protein, 121 aa, Artificial Sequence; identical to SEQ ID NO: 17586
  Description of Artificial Sequence: Synthetic polypeptide
  VH of XENP021150

SEQ ID NO: 31246 - protein, 5 aa, Artificial Sequence
  Description of Artificial Sequence: Synthetic peptide
  XENP021150 vhCDR1
DAWMD

SEQ ID NO: 31247 - protein, 19 aa, Artificial Sequence
  Description of Artificial Sequence: Synthetic peptide
  XENP021150 vhCDR2
EIRTKANNHATYYAESVKG

SEQ ID NO: 31248 - protein, 10 aa, Artificial Sequence
  Description of Artificial Sequence: Synthetic peptide
  XENP021150 vhCDR3
LANWDWYFDV

SEQ ID NO: 31249 - protein, 218 aa, Artificial Sequence; identical to SEQ ID NO: 20420
  Description of Artificial Sequence: Synthetic polypeptide
  XENP021150 7G8_H0_L0.73_Fab Light Chain

SEQ ID NO: 31250 - protein, 111 aa, Artificial Sequence; identical to SEQ ID NO: 20421
  Description of Artificial Sequence: Synthetic polypeptide
  VL of XENP021150

SEQ ID NO: 31251 - protein, 15 aa, Artificial Sequence
  Description of Artificial Sequence: Synthetic peptide
  XENP021150 vlCDR1
KASQSVDYDGDSYMN

SEQ ID NO: 31252 - protein, 7 aa, Artificial Sequence
  Description of Artificial Sequence: Synthetic peptide
  XENP021150 vlCDR2
AASNLIS

SEQ ID NO: 31253 - protein, 9 aa, Artificial Sequence
  Description of Artificial Sequence: Synthetic peptide
  XENP021150 vlCDR3
QQSNEDPFT

SEQ ID NO: 31254 - protein, 226 aa, Artificial Sequence; identical to SEQ ID NO: 29134
  Description of Artificial Sequence: Synthetic polypeptide
  XENP021151 7G8_H0_L0.74_Fab Heavy Chain

SEQ ID NO: 31255 - protein, 121 aa, Artificial Sequence; identical to SEQ ID NO: 17586
  Description of Artificial Sequence: Synthetic polypeptide
  VH of XENP021151

SEQ ID NO: 31256 - protein, 5 aa, Artificial Sequence
  Description of Artificial Sequence: Synthetic peptide
  XENP021151 vhCDR1
DAWMD

SEQ ID NO: 31257 - protein, 19 aa, Artificial Sequence
  Description of Artificial Sequence: Synthetic peptide
  XENP021151 vhCDR2
EIRTKANNHATYYAESVKG

SEQ ID NO: 31258 - protein, 10 aa, Artificial Sequence
  Description of Artificial Sequence: Synthetic peptide
  XENP021151 vhCDR3
LANWDWYFDV

SEQ ID NO: 31259 - protein, 218 aa, Artificial Sequence; identical to SEQ ID NO: 20430
  Description of Artificial Sequence: Synthetic polypeptide
  XENP021151 7G8_H0_L0.74_Fab Light Chain

SEQ ID NO: 31260 - protein, 111 aa, Artificial Sequence; identical to SEQ ID NO: 20431
  Description of Artificial Sequence: Synthetic polypeptide
  VL of XENP021151

SEQ ID NO: 31261 - protein, 15 aa, Artificial Sequence
  Description of Artificial Sequence: Synthetic peptide
  XENP021151 vlCDR1
KASQSVDYDGDSYMN

SEQ ID NO: 31262 - protein, 7 aa, Artificial Sequence
  Description of Artificial Sequence: Synthetic peptide
  XENP021151 vlCDR2
AASNLES

SEQ ID NO: 31263 - protein, 9 aa, Artificial Sequence
  Description of Artificial Sequence: Synthetic peptide
  XENP021151 vlCDR3
QQTNEDPFT

SEQ ID NO: 31264 - protein, 226 aa, Artificial Sequence; identical to SEQ ID NO: 29134
  Description of Artificial Sequence: Synthetic polypeptide
  XENP021152 7G8_H0_L0.75_Fab Heavy Chain

SEQ ID NO: 31265 - protein, 121 aa, Artificial Sequence; identical to SEQ ID NO: 17586
  Description of Artificial Sequence: Synthetic polypeptide
  VH of XENP021152

SEQ ID NO: 31266 - protein, 5 aa, Artificial Sequence
  Description of Artificial Sequence: Synthetic peptide
  XENP021152 vhCDR1
DAWMD

SEQ ID NO: 31267 - protein, 19 aa, Artificial Sequence
  Description of Artificial Sequence: Synthetic peptide
  XENP021152 vhCDR2
EIRTKANNHATYYAESVKG

SEQ ID NO: 31268 - protein, 10 aa, Artificial Sequence
  Description of Artificial Sequence: Synthetic peptide
  XENP021152 vhCDR3
LANWDWYFDV

SEQ ID NO: 31269 - protein, 218 aa, Artificial Sequence; identical to SEQ ID NO: 20440
  Description of Artificial Sequence: Synthetic polypeptide
  XENP021152 7G8_H0_L0.75_Fab Light Chain

SEQ ID NO: 31270 - protein, 111 aa, Artificial Sequence; identical to SEQ ID NO: 20441
  Description of Artificial Sequence: Synthetic polypeptide
  VL of XENP021152

SEQ ID NO: 31271 - protein, 15 aa, Artificial Sequence
  Description of Artificial Sequence: Synthetic peptide
  XENP021152 vlCDR1
KASQSVDYDGDSYMN

SEQ ID NO: 31272 - protein, 7 aa, Artificial Sequence
  Description of Artificial Sequence: Synthetic peptide
  XENP021152 vlCDR2
AASNLES

SEQ ID NO: 31273 - protein, 9 aa, Artificial Sequence
  Description of Artificial Sequence: Synthetic peptide
  XENP021152 vlCDR3
QQANEDPFT

SEQ ID NO: 31274 - protein, 226 aa, Artificial Sequence; identical to SEQ ID NO: 29134
  Description of Artificial Sequence: Synthetic polypeptide
  XENP021153 7G8_H0_L0.76_Fab Heavy Chain

SEQ ID NO: 31275 - protein, 121 aa, Artificial Sequence; identical to SEQ ID NO: 17586
  Description of Artificial Sequence: Synthetic polypeptide
  VH of XENP021153

SEQ ID NO: 31276 - protein, 5 aa, Artificial Sequence
  Description of Artificial Sequence: Synthetic peptide
  XENP021153 vhCDR1
DAWMD

SEQ ID NO: 31277 - protein, 19 aa, Artificial Sequence
  Description of Artificial Sequence: Synthetic peptide
  XENP021153 vhCDR2
EIRTKANNHATYYAESVKG

SEQ ID NO: 31278 - protein, 10 aa, Artificial Sequence
  Description of Artificial Sequence: Synthetic peptide
  XENP021153 vhCDR3
LANWDWYFDV

SEQ ID NO: 31279 - protein, 218 aa, Artificial Sequence; identical to SEQ ID NO: 20450
  Description of Artificial Sequence: Synthetic polypeptide
  XENP021153 7G8_H0_L0.76_Fab Light Chain

SEQ ID NO: 31280 - protein, 111 aa, Artificial Sequence; identical to SEQ ID NO: 20451
  Description of Artificial Sequence: Synthetic polypeptide
  VL of XENP021153

SEQ ID NO: 31281 - protein, 15 aa, Artificial Sequence
  Description of Artificial Sequence: Synthetic peptide
  XENP021153 vlCDR1
KASQSVDYDGDSYMN

SEQ ID NO: 31282 - protein, 7 aa, Artificial Sequence
  Description of Artificial Sequence: Synthetic peptide
  XENP021153 vlCDR2
AASNLES

SEQ ID NO: 31283 - protein, 9 aa, Artificial Sequence
  Description of Artificial Sequence: Synthetic peptide
  XENP021153 vlCDR3
QQQNEDPFT

SEQ ID NO: 31284 - protein, 226 aa, Artificial Sequence; identical to SEQ ID NO: 29134
  Description of Artificial Sequence: Synthetic polypeptide
  XENP021154 7G8_H0_L0.77_Fab Heavy Chain

SEQ ID NO: 31285 - protein, 121 aa, Artificial Sequence; identical to SEQ ID NO: 17586
  Description of Artificial Sequence: Synthetic polypeptide
  VH of XENP021154

SEQ ID NO: 31286 - protein, 5 aa, Artificial Sequence
  Description of Artificial Sequence: Synthetic peptide
  XENP021154 vhCDR1
DAWMD

SEQ ID NO: 31287 - protein, 19 aa, Artificial Sequence
  Description of Artificial Sequence: Synthetic peptide
  XENP021154 vhCDR2
EIRTKANNHATYYAESVKG

SEQ ID NO: 31288 - protein, 10 aa, Artificial Sequence
  Description of Artificial Sequence: Synthetic peptide
  XENP021154 vhCDR3
LANWDWYFDV

SEQ ID NO: 31289 - protein, 218 aa, Artificial Sequence; identical to SEQ ID NO: 20460
  Description of Artificial Sequence: Synthetic polypeptide
  XENP021154 7G8_H0_L0.77_Fab Light Chain

SEQ ID NO: 31290 - protein, 111 aa, Artificial Sequence; identical to SEQ ID NO: 20461
  Description of Artificial Sequence: Synthetic polypeptide
  VL of XENP021154

SEQ ID NO: 31291 - protein, 15 aa, Artificial Sequence
  Description of Artificial Sequence: Synthetic peptide
  XENP021154 vlCDR1
KASQSVDYDGDSYMN

SEQ ID NO: 31292 - protein, 7 aa, Artificial Sequence
  Description of Artificial Sequence: Synthetic peptide
  XENP021154 vlCDR2
AASNLES

SEQ ID NO: 31293 - protein, 9 aa, Artificial Sequence
  Description of Artificial Sequence: Synthetic peptide
  XENP021154 vlCDR3
QQGNEDPFT

SEQ ID NO: 31294 - protein, 226 aa, Artificial Sequence; identical to SEQ ID NO: 29134
  Description of Artificial Sequence: Synthetic polypeptide
  XENP021155 7G8_H0_L0.78_Fab Heavy Chain

SEQ ID NO: 31295 - protein, 121 aa, Artificial Sequence; identical to SEQ ID NO: 17586
  Description of Artificial Sequence: Synthetic polypeptide
  VH of XENP021155

SEQ ID NO: 31296 - protein, 5 aa, Artificial Sequence
  Description of Artificial Sequence: Synthetic peptide
  XENP021155 vhCDR1
DAWMD

SEQ ID NO: 31297 - protein, 19 aa, Artificial Sequence
  Description of Artificial Sequence: Synthetic peptide
  XENP021155 vhCDR2
EIRTKANNHATYYAESVKG

SEQ ID NO: 31298 - protein, 10 aa, Artificial Sequence
  Description of Artificial Sequence: Synthetic peptide
  XENP021155 vhCDR3
LANWDWYFDV

SEQ ID NO: 31299 - protein, 218 aa, Artificial Sequence; identical to SEQ ID NO: 20470
  Description of Artificial Sequence: Synthetic polypeptide
  XENP021155 7G8_H0_L0.78_Fab Light Chain

SEQ ID NO: 31300 - protein, 111 aa, Artificial Sequence; identical to SEQ ID NO: 20471
  Description of Artificial Sequence: Synthetic polypeptide
  VL of XENP021155

SEQ ID NO: 31301 - protein, 15 aa, Artificial Sequence
  Description of Artificial Sequence: Synthetic peptide
  XENP021155 vlCDR1
KASQSVDYDGDSYMN

SEQ ID NO: 31302 - protein, 7 aa, Artificial Sequence
  Description of Artificial Sequence: Synthetic peptide
  XENP021155 vlCDR2
AASNLES

SEQ ID NO: 31303 - protein, 9 aa, Artificial Sequence
  Description of Artificial Sequence: Synthetic peptide
  XENP021155 vlCDR3
QQVNEDPFT

SEQ ID NO: 31304 - protein, 226 aa, Artificial Sequence; identical to SEQ ID NO: 29134
  Description of Artificial Sequence: Synthetic polypeptide
  XENP021156 7G8_H0_L0.79_Fab Heavy Chain

SEQ ID NO: 31305 - protein, 121 aa, Artificial Sequence; identical to SEQ ID NO: 17586
  Description of Artificial Sequence: Synthetic polypeptide
  VH of XENP021156

SEQ ID NO: 31306 - protein, 5 aa, Artificial Sequence
  Description of Artificial Sequence: Synthetic peptide
  XENP021156 vhCDR1
DAWMD

SEQ ID NO: 31307 - protein, 19 aa, Artificial Sequence
  Description of Artificial Sequence: Synthetic peptide
  XENP021156 vhCDR2
EIRTKANNHATYYAESVKG

SEQ ID NO: 31308 - protein, 10 aa, Artificial Sequence
  Description of Artificial Sequence: Synthetic peptide
  XENP021156 vhCDR3
LANWDWYFDV

SEQ ID NO: 31309 - protein, 218 aa, Artificial Sequence; identical to SEQ ID NO: 20480
  Description of Artificial Sequence: Synthetic polypeptide
  XENP021156 7G8_H0_L0.79_Fab Light Chain

SEQ ID NO: 31310 - protein, 111 aa, Artificial Sequence; identical to SEQ ID NO: 20481
  Description of Artificial Sequence: Synthetic polypeptide
  VL of XENP021156

SEQ ID NO: 31311 - protein, 15 aa, Artificial Sequence
  Description of Artificial Sequence: Synthetic peptide
  XENP021156 vlCDR1
KASQSVDYDGDSYMN

SEQ ID NO: 31312 - protein, 7 aa, Artificial Sequence
  Description of Artificial Sequence: Synthetic peptide
  XENP021156 vlCDR2
AASNLES

SEQ ID NO: 31313 - protein, 9 aa, Artificial Sequence
  Description of Artificial Sequence: Synthetic peptide
  XENP021156 vlCDR3
QQHNEDPFT

SEQ ID NO: 31314 - protein, 226 aa, Artificial Sequence; identical to SEQ ID NO: 29134
  Description of Artificial Sequence: Synthetic polypeptide
  XENP021157 7G8_H0_L0.80_Fab Heavy Chain

SEQ ID NO: 31315 - protein, 121 aa, Artificial Sequence; identical to SEQ ID NO: 17586
  Description of Artificial Sequence: Synthetic polypeptide
  VH of XENP021157

SEQ ID NO: 31316 - protein, 5 aa, Artificial Sequence
  Description of Artificial Sequence: Synthetic peptide
  XENP021157 vhCDR1
DAWMD

SEQ ID NO: 31317 - protein, 19 aa, Artificial Sequence
  Description of Artificial Sequence: Synthetic peptide
  XENP021157 vhCDR2
EIRTKANNHATYYAESVKG

SEQ ID NO: 31318 - protein, 10 aa, Artificial Sequence
  Description of Artificial Sequence: Synthetic peptide
  XENP021157 vhCDR3
LANWDWYFDV

SEQ ID NO: 31319 - protein, 218 aa, Artificial Sequence; identical to SEQ ID NO: 20490
  Description of Artificial Sequence: Synthetic polypeptide
  XENP021157 7G8_H0_L0.80_Fab Light Chain

SEQ ID NO: 31320 - protein, 111 aa, Artificial Sequence; identical to SEQ ID NO: 20491
  Description of Artificial Sequence: Synthetic polypeptide
  VL of XENP021157

SEQ ID NO: 31321 - protein, 15 aa, Artificial Sequence
  Description of Artificial Sequence: Synthetic peptide
  XENP021157 vlCDR1
KASQSVDYDGDSYMN

SEQ ID NO: 31322 - protein, 7 aa, Artificial Sequence
  Description of Artificial Sequence: Synthetic peptide
  XENP021157 vlCDR2
AASNLES

SEQ ID NO: 31323 - protein, 9 aa, Artificial Sequence
  Description of Artificial Sequence: Synthetic peptide
  XENP021157 vlCDR3
QQDNEDPFT

SEQ ID NO: 31324 - protein, 226 aa, Artificial Sequence; identical to SEQ ID NO: 29134
  Description of Artificial Sequence: Synthetic polypeptide
  XENP021158 7G8_H0_L0.81_Fab Heavy Chain

SEQ ID NO: 31325 - protein, 121 aa, Artificial Sequence; identical to SEQ ID NO: 17586
  Description of Artificial Sequence: Synthetic polypeptide
  VH of XENP021158

SEQ ID NO: 31326 - protein, 5 aa, Artificial Sequence
  Description of Artificial Sequence: Synthetic peptide
  XENP021158 vhCDR1
DAWMD

SEQ ID NO: 31327 - protein, 19 aa, Artificial Sequence
  Description of Artificial Sequence: Synthetic peptide
  XENP021158 vhCDR2
EIRTKANNHATYYAESVKG

SEQ ID NO: 31328 - protein, 10 aa, Artificial Sequence
  Description of Artificial Sequence: Synthetic peptide
  XENP021158 vhCDR3
LANWDWYFDV

SEQ ID NO: 31329 - protein, 218 aa, Artificial Sequence; identical to SEQ ID NO: 20500
  Description of Artificial Sequence: Synthetic polypeptide
  XENP021158 7G8_H0_L0.81_Fab Light Chain

SEQ ID NO: 31330 - protein, 111 aa, Artificial Sequence; identical to SEQ ID NO: 20501
  Description of Artificial Sequence: Synthetic polypeptide
  VL of XENP021158

SEQ ID NO: 31331 - protein, 15 aa, Artificial Sequence
  Description of Artificial Sequence: Synthetic peptide
  XENP021158 vlCDR1
KASQSVDYDGDSYMN

SEQ ID NO: 31332 - protein, 7 aa, Artificial Sequence
  Description of Artificial Sequence: Synthetic peptide
  XENP021158 vlCDR2
AASNLES

SEQ ID NO: 31333 - protein, 9 aa, Artificial Sequence
  Description of Artificial Sequence: Synthetic peptide
  XENP021158 vlCDR3
QQKNEDPFT

SEQ ID NO: 31334 - protein, 226 aa, Artificial Sequence; identical to SEQ ID NO: 29134
  Description of Artificial Sequence: Synthetic polypeptide
  XENP021159 7G8_H0_L0.82_Fab Heavy Chain

SEQ ID NO: 31335 - protein, 121 aa, Artificial Sequence; identical to SEQ ID NO: 17586
  Description of Artificial Sequence: Synthetic polypeptide
  VH of XENP021159

SEQ ID NO: 31336 - protein, 5 aa, Artificial Sequence
  Description of Artificial Sequence: Synthetic peptide
  XENP021159 vhCDR1
DAWMD

SEQ ID NO: 31337 - protein, 19 aa, Artificial Sequence
  Description of Artificial Sequence: Synthetic peptide
  XENP021159 vhCDR2
EIRTKANNHATYYAESVKG

SEQ ID NO: 31338 - protein, 10 aa, Artificial Sequence
  Description of Artificial Sequence: Synthetic peptide
  XENP021159 vhCDR3
LANWDWYFDV

SEQ ID NO: 31339 - protein, 218 aa, Artificial Sequence; identical to SEQ ID NO: 20510
  Description of Artificial Sequence: Synthetic polypeptide
  XENP021159 7G8_H0_L0.82_Fab Light Chain

SEQ ID NO: 31340 - protein, 111 aa, Artificial Sequence; identical to SEQ ID NO: 20511
  Description of Artificial Sequence: Synthetic polypeptide
  VL of XENP021159

SEQ ID NO: 31341 - protein, 15 aa, Artificial Sequence
  Description of Artificial Sequence: Synthetic peptide
  XENP021159 vlCDR1
KASQSVDYDGDSYMN

SEQ ID NO: 31342 - protein, 7 aa, Artificial Sequence
  Description of Artificial Sequence: Synthetic peptide
  XENP021159 vlCDR2
AASNLES

SEQ ID NO: 31343 - protein, 9 aa, Artificial Sequence
  Description of Artificial Sequence: Synthetic peptide
  XENP021159 vlCDR3
QQYNEDPFT

SEQ ID NO: 31344 - protein, 226 aa, Artificial Sequence; identical to SEQ ID NO: 29134
  Description of Artificial Sequence: Synthetic polypeptide
  XENP021160 7G8_H0_L0.83_Fab Heavy Chain

SEQ ID NO: 31345 - protein, 121 aa, Artificial Sequence; identical to SEQ ID NO: 17586
  Description of Artificial Sequence: Synthetic polypeptide
  VH of XENP021160

SEQ ID NO: 31346 - protein, 5 aa, Artificial Sequence
  Description of Artificial Sequence: Synthetic peptide
  XENP021160 vhCDR1
DAWMD

SEQ ID NO: 31347 - protein, 19 aa, Artificial Sequence
  Description of Artificial Sequence: Synthetic peptide
  XENP021160 vhCDR2
EIRTKANNHATYYAESVKG

SEQ ID NO: 31348 - protein, 10 aa, Artificial Sequence
  Description of Artificial Sequence: Synthetic peptide
  XENP021160 vhCDR3
LANWDWYFDV

SEQ ID NO: 31349 - protein, 218 aa, Artificial Sequence; identical to SEQ ID NO: 20520
  Description of Artificial Sequence: Synthetic polypeptide
  XENP021160 7G8_H0_L0.83_Fab Light Chain

SEQ ID NO: 31350 - protein, 111 aa, Artificial Sequence; identical to SEQ ID NO: 20521
  Description of Artificial Sequence: Synthetic polypeptide
  VL of XENP021160

SEQ ID NO: 31351 - protein, 15 aa, Artificial Sequence
  Description of Artificial Sequence: Synthetic peptide
  XENP021160 vlCDR1
KASQSVDYDGDSYMN

SEQ ID NO: 31352 - protein, 7 aa, Artificial Sequence
  Description of Artificial Sequence: Synthetic peptide
  XENP021160 vlCDR2
AASNLES

SEQ ID NO: 31353 - protein, 9 aa, Artificial Sequence
  Description of Artificial Sequence: Synthetic peptide
  XENP021160 vlCDR3
QQSDEDPFT

SEQ ID NO: 31354 - protein, 226 aa, Artificial Sequence; identical to SEQ ID NO: 29134
  Description of Artificial Sequence: Synthetic polypeptide
  XENP021161 7G8_H0_L0.84_Fab Heavy Chain

SEQ ID NO: 31355 - protein, 121 aa, Artificial Sequence; identical to SEQ ID NO: 17586
  Description of Artificial Sequence: Synthetic polypeptide
  VH of XENP021161

SEQ ID NO: 31356 - protein, 5 aa, Artificial Sequence
  Description of Artificial Sequence: Synthetic peptide
  XENP021161 vhCDR1
DAWMD

SEQ ID NO: 31357 - protein, 19 aa, Artificial Sequence
  Description of Artificial Sequence: Synthetic peptide
  XENP021161 vhCDR2
EIRTKANNHATYYAESVKG

SEQ ID NO: 31358 - protein, 10 aa, Artificial Sequence
  Description of Artificial Sequence: Synthetic peptide
  XENP021161 vhCDR3
LANWDWYFDV

SEQ ID NO: 31359 - protein, 218 aa, Artificial Sequence; identical to SEQ ID NO: 20530
  Description of Artificial Sequence: Synthetic polypeptide
  XENP021161 7G8_H0_L0.84_Fab Light Chain

SEQ ID NO: 31360 - protein, 111 aa, Artificial Sequence; identical to SEQ ID NO: 20531
  Description of Artificial Sequence: Synthetic polypeptide
  VL of XENP021161

SEQ ID NO: 31361 - protein, 15 aa, Artificial Sequence
  Description of Artificial Sequence: Synthetic peptide
  XENP021161 vlCDR1
KASQSVDYDGDSYMN

SEQ ID NO: 31362 - protein, 7 aa, Artificial Sequence
  Description of Artificial Sequence: Synthetic peptide
  XENP021161 vlCDR2
AASNLES

SEQ ID NO: 31363 - protein, 9 aa, Artificial Sequence
  Description of Artificial Sequence: Synthetic peptide
  XENP021161 vlCDR3
QQSHEDPFT

SEQ ID NO: 31364 - protein, 226 aa, Artificial Sequence; identical to SEQ ID NO: 29134
  Description of Artificial Sequence: Synthetic polypeptide
  XENP021162 7G8_H0_L0.85_Fab Heavy Chain

SEQ ID NO: 31365 - protein, 121 aa, Artificial Sequence; identical to SEQ ID NO: 17586
  Description of Artificial Sequence: Synthetic polypeptide
  VH of XENP021162

SEQ ID NO: 31366 - protein, 5 aa, Artificial Sequence
  Description of Artificial Sequence: Synthetic peptide
  XENP021162 vhCDR1
DAWMD

SEQ ID NO: 31367 - protein, 19 aa, Artificial Sequence
  Description of Artificial Sequence: Synthetic peptide
  XENP021162 vhCDR2
EIRTKANNHATYYAESVKG

SEQ ID NO: 31368 - protein, 10 aa, Artificial Sequence
  Description of Artificial Sequence: Synthetic peptide
  XENP021162 vhCDR3
LANWDWYFDV

SEQ ID NO: 31369 - protein, 218 aa, Artificial Sequence; identical to SEQ ID NO: 20540
  Description of Artificial Sequence: Synthetic polypeptide
  XENP021162 7G8_H0_L0.85_Fab Light Chain

SEQ ID NO: 31370 - protein, 111 aa, Artificial Sequence; identical to SEQ ID NO: 20541
  Description of Artificial Sequence: Synthetic polypeptide
  VL of XENP021162

SEQ ID NO: 31371 - protein, 15 aa, Artificial Sequence
  Description of Artificial Sequence: Synthetic peptide
  XENP021162 vlCDR1
KASQSVDYDGDSYMN

SEQ ID NO: 31372 - protein, 7 aa, Artificial Sequence
  Description of Artificial Sequence: Synthetic peptide
  XENP021162 vlCDR2
AASNLES

SEQ ID NO: 31373 - protein, 9 aa, Artificial Sequence
  Description of Artificial Sequence: Synthetic peptide
  XENP021162 vlCDR3
QQSEEDPFT

SEQ ID NO: 31374 - protein, 226 aa, Artificial Sequence; identical to SEQ ID NO: 29134
  Description of Artificial Sequence: Synthetic polypeptide
  XENP021163 7G8_H0_L0.86_Fab Heavy Chain

SEQ ID NO: 31375 - protein, 121 aa, Artificial Sequence; identical to SEQ ID NO: 17586
  Description of Artificial Sequence: Synthetic polypeptide
  VH of XENP021163

SEQ ID NO: 31376 - protein, 5 aa, Artificial Sequence
  Description of Artificial Sequence: Synthetic peptide
  XENP021163 vhCDR1
DAWMD

SEQ ID NO: 31377 - protein, 19 aa, Artificial Sequence
  Description of Artificial Sequence: Synthetic peptide
  XENP021163 vhCDR2
EIRTKANNHATYYAESVKG

SEQ ID NO: 31378 - protein, 10 aa, Artificial Sequence
  Description of Artificial Sequence: Synthetic peptide
  XENP021163 vhCDR3
LANWDWYFDV

SEQ ID NO: 31379 - protein, 218 aa, Artificial Sequence; identical to SEQ ID NO: 20550
  Description of Artificial Sequence: Synthetic polypeptide
  XENP021163 7G8_H0_L0.86_Fab Light Chain

SEQ ID NO: 31380 - protein, 111 aa, Artificial Sequence; identical to SEQ ID NO: 20551
  Description of Artificial Sequence: Synthetic polypeptide
  VL of XENP021163

SEQ ID NO: 31381 - protein, 15 aa, Artificial Sequence
  Description of Artificial Sequence: Synthetic peptide
  XENP021163 vlCDR1
KASQSVDYDGDSYMN

SEQ ID NO: 31382 - protein, 7 aa, Artificial Sequence
  Description of Artificial Sequence: Synthetic peptide
  XENP021163 vlCDR2
AASNLES

SEQ ID NO: 31383 - protein, 9 aa, Artificial Sequence
  Description of Artificial Sequence: Synthetic peptide
  XENP021163 vlCDR3
QQSSEDPFT

SEQ ID NO: 31384 - protein, 226 aa, Artificial Sequence; identical to SEQ ID NO: 29134
  Description of Artificial Sequence: Synthetic polypeptide
  XENP021164 7G8_H0_L0.87_Fab Heavy Chain

SEQ ID NO: 31385 - protein, 121 aa, Artificial Sequence; identical to SEQ ID NO: 17586
  Description of Artificial Sequence: Synthetic polypeptide
  VH of XENP021164

SEQ ID NO: 31386 - protein, 5 aa, Artificial Sequence
  Description of Artificial Sequence: Synthetic peptide
  XENP021164 vhCDR1
DAWMD

SEQ ID NO: 31387 - protein, 19 aa, Artificial Sequence
  Description of Artificial Sequence: Synthetic peptide
  XENP021164 vhCDR2
EIRTKANNHATYYAESVKG

SEQ ID NO: 31388 - protein, 10 aa, Artificial Sequence
  Description of Artificial Sequence: Synthetic peptide
  XENP021164 vhCDR3
LANWDWYFDV

SEQ ID NO: 31389 - protein, 218 aa, Artificial Sequence; identical to SEQ ID NO: 20560
  Description of Artificial Sequence: Synthetic polypeptide
  XENP021164 7G8_H0_L0.87_Fab Light Chain

SEQ ID NO: 31390 - protein, 111 aa, Artificial Sequence; identical to SEQ ID NO: 20561
  Description of Artificial Sequence: Synthetic polypeptide
  VL of XENP021164

SEQ ID NO: 31391 - protein, 15 aa, Artificial Sequence
  Description of Artificial Sequence: Synthetic peptide
  XENP021164 vlCDR1
KASQSVDYDGDSYMN

SEQ ID NO: 31392 - protein, 7 aa, Artificial Sequence
  Description of Artificial Sequence: Synthetic peptide
  XENP021164 vlCDR2
AASNLES

SEQ ID NO: 31393 - protein, 9 aa, Artificial Sequence
  Description of Artificial Sequence: Synthetic peptide
  XENP021164 vlCDR3
QQSREDPFT

SEQ ID NO: 31394 - protein, 226 aa, Artificial Sequence; identical to SEQ ID NO: 29134
  Description of Artificial Sequence: Synthetic polypeptide
  XENP021165 7G8_H0_L0.88_Fab Heavy Chain

SEQ ID NO: 31395 - protein, 121 aa, Artificial Sequence; identical to SEQ ID NO: 17586
  Description of Artificial Sequence: Synthetic polypeptide
  VH of XENP021165

SEQ ID NO: 31396 - protein, 5 aa, Artificial Sequence
  Description of Artificial Sequence: Synthetic peptide
  XENP021165 vhCDR1
DAWMD

SEQ ID NO: 31397 - protein, 19 aa, Artificial Sequence
  Description of Artificial Sequence: Synthetic peptide
  XENP021165 vhCDR2
EIRTKANNHATYYAESVKG

SEQ ID NO: 31398 - protein, 10 aa, Artificial Sequence
  Description of Artificial Sequence: Synthetic peptide
  XENP021165 vhCDR3
LANWDWYFDV

SEQ ID NO: 31399 - protein, 218 aa, Artificial Sequence; identical to SEQ ID NO: 20570
  Description of Artificial Sequence: Synthetic polypeptide
  XENP021165 7G8_H0_L0.88_Fab Light Chain

SEQ ID NO: 31400 - protein, 111 aa, Artificial Sequence; identical to SEQ ID NO: 20571
  Description of Artificial Sequence: Synthetic polypeptide
  VL of XENP021165

SEQ ID NO: 31401 - protein, 15 aa, Artificial Sequence
  Description of Artificial Sequence: Synthetic peptide
  XENP021165 vlCDR1
KASQSVDYDGDSYMN

SEQ ID NO: 31402 - protein, 7 aa, Artificial Sequence
  Description of Artificial Sequence: Synthetic peptide
  XENP021165 vlCDR2
AASNLES

SEQ ID NO: 31403 - protein, 9 aa, Artificial Sequence
  Description of Artificial Sequence: Synthetic peptide
  XENP021165 vlCDR3
QQSLEDPFT

SEQ ID NO: 31404 - protein, 226 aa, Artificial Sequence; identical to SEQ ID NO: 29134
  Description of Artificial Sequence: Synthetic polypeptide
  XENP021166 7G8_H0_L0.89_Fab Heavy Chain

SEQ ID NO: 31405 - protein, 121 aa, Artificial Sequence; identical to SEQ ID NO: 17586
  Description of Artificial Sequence: Synthetic polypeptide
  VH of XENP021166

SEQ ID NO: 31406 - protein, 5 aa, Artificial Sequence
  Description of Artificial Sequence: Synthetic peptide
  XENP021166 vhCDR1
DAWMD

SEQ ID NO: 31407 - protein, 19 aa, Artificial Sequence
  Description of Artificial Sequence: Synthetic peptide
  XENP021166 vhCDR2
EIRTKANNHATYYAESVKG

SEQ ID NO: 31408 - protein, 10 aa, Artificial Sequence
  Description of Artificial Sequence: Synthetic peptide
  XENP021166 vhCDR3
LANWDWYFDV

SEQ ID NO: 31409 - protein, 218 aa, Artificial Sequence; identical to SEQ ID NO: 20580
  Description of Artificial Sequence: Synthetic polypeptide
  XENP021166 7G8_H0_L0.89_Fab Light Chain

SEQ ID NO: 31410 - protein, 111 aa, Artificial Sequence; identical to SEQ ID NO: 20581
  Description of Artificial Sequence: Synthetic polypeptide
  VL of XENP021166

SEQ ID NO: 31411 - protein, 15 aa, Artificial Sequence
  Description of Artificial Sequence: Synthetic peptide
  XENP021166 vlCDR1
KASQSVDYDGDSYMN

SEQ ID NO: 31412 - protein, 7 aa, Artificial Sequence
  Description of Artificial Sequence: Synthetic peptide
  XENP021166 vlCDR2
AASNLES

SEQ ID NO: 31413 - protein, 9 aa, Artificial Sequence
  Description of Artificial Sequence: Synthetic peptide
  XENP021166 vlCDR3
QQSTEDPFT

SEQ ID NO: 31414 - protein, 226 aa, Artificial Sequence; identical to SEQ ID NO: 29134
  Description of Artificial Sequence: Synthetic polypeptide
  XENP021167 7G8_H0_L0.90_Fab Heavy Chain

SEQ ID NO: 31415 - protein, 121 aa, Artificial Sequence; identical to SEQ ID NO: 17586
  Description of Artificial Sequence: Synthetic polypeptide
  VH of XENP021167

SEQ ID NO: 31416 - protein, 5 aa, Artificial Sequence
  Description of Artificial Sequence: Synthetic peptide
  XENP021167 vhCDR1
DAWMD

SEQ ID NO: 31417 - protein, 19 aa, Artificial Sequence
  Description of Artificial Sequence: Synthetic peptide
  XENP021167 vhCDR2
EIRTKANNHATYYAESVKG

SEQ ID NO: 31418 - protein, 10 aa, Artificial Sequence
  Description of Artificial Sequence: Synthetic peptide
  XENP021167 vhCDR3
LANWDWYFDV

SEQ ID NO: 31419 - protein, 218 aa, Artificial Sequence; identical to SEQ ID NO: 20590
  Description of Artificial Sequence: Synthetic polypeptide
  XENP021167 7G8_H0_L0.90_Fab Light Chain

SEQ ID NO: 31420 - protein, 111 aa, Artificial Sequence; identical to SEQ ID NO: 20591
  Description of Artificial Sequence: Synthetic polypeptide
  VL of XENP021167

SEQ ID NO: 31421 - protein, 15 aa, Artificial Sequence
  Description of Artificial Sequence: Synthetic peptide
  XENP021167 vlCDR1
KASQSVDYDGDSYMN

SEQ ID NO: 31422 - protein, 7 aa, Artificial Sequence
  Description of Artificial Sequence: Synthetic peptide
  XENP021167 vlCDR2
AASNLES

SEQ ID NO: 31423 - protein, 9 aa, Artificial Sequence
  Description of Artificial Sequence: Synthetic peptide
  XENP021167 vlCDR3
QQSGEDPFT

SEQ ID NO: 31424 - protein, 226 aa, Artificial Sequence; identical to SEQ ID NO: 29134
  Description of Artificial Sequence: Synthetic polypeptide
  XENP021168 7G8_H0_L0.91_Fab Heavy Chain

SEQ ID NO: 31425 - protein, 121 aa, Artificial Sequence; identical to SEQ ID NO: 17586
  Description of Artificial Sequence: Synthetic polypeptide
  VH of XENP021168

SEQ ID NO: 31426 - protein, 5 aa, Artificial Sequence
  Description of Artificial Sequence: Synthetic peptide
  XENP021168 vhCDR1
DAWMD

SEQ ID NO: 31427 - protein, 19 aa, Artificial Sequence
  Description of Artificial Sequence: Synthetic peptide
  XENP021168 vhCDR2
EIRTKANNHATYYAESVKG

SEQ ID NO: 31428 - protein, 10 aa, Artificial Sequence
  Description of Artificial Sequence: Synthetic peptide
  XENP021168 vhCDR3
LANWDWYFDV

SEQ ID NO: 31429 - protein, 218 aa, Artificial Sequence; identical to SEQ ID NO: 20600
  Description of Artificial Sequence: Synthetic polypeptide
  XENP021168 7G8_H0_L0.91_Fab Light Chain

SEQ ID NO: 31430 - protein, 111 aa, Artificial Sequence; identical to SEQ ID NO: 20601
  Description of Artificial Sequence: Synthetic polypeptide
  VL of XENP021168

SEQ ID NO: 31431 - protein, 15 aa, Artificial Sequence
  Description of Artificial Sequence: Synthetic peptide
  XENP021168 vlCDR1
KASQSVDYDGDSYMN

SEQ ID NO: 31432 - protein, 7 aa, Artificial Sequence
  Description of Artificial Sequence: Synthetic peptide
  XENP021168 vlCDR2
AASNLES

SEQ ID NO: 31433 - protein, 9 aa, Artificial Sequence
  Description of Artificial Sequence: Synthetic peptide
  XENP021168 vlCDR3
QQSYEDPFT

SEQ ID NO: 31434 - protein, 226 aa, Artificial Sequence; identical to SEQ ID NO: 29134
  Description of Artificial Sequence: Synthetic polypeptide
  XENP021169 7G8_H0_L0.92_Fab Heavy Chain

SEQ ID NO: 31435 - protein, 121 aa, Artificial Sequence; identical to SEQ ID NO: 17586
  Description of Artificial Sequence: Synthetic polypeptide
  VH of XENP021169

SEQ ID NO: 31436 - protein, 5 aa, Artificial Sequence
  Description of Artificial Sequence: Synthetic peptide
  XENP021169 vhCDR1
DAWMD

SEQ ID NO: 31437 - protein, 19 aa, Artificial Sequence
  Description of Artificial Sequence: Synthetic peptide
  XENP021169 vhCDR2
EIRTKANNHATYYAESVKG

SEQ ID NO: 31438 - protein, 10 aa, Artificial Sequence
  Description of Artificial Sequence: Synthetic peptide
  XENP021169 vhCDR3
LANWDWYFDV

SEQ ID NO: 31439 - protein, 218 aa, Artificial Sequence; identical to SEQ ID NO: 20610
  Description of Artificial Sequence: Synthetic polypeptide
  XENP021169 7G8_H0_L0.92_Fab Light Chain

SEQ ID NO: 31440 - protein, 111 aa, Artificial Sequence; identical to SEQ ID NO: 20611
  Description of Artificial Sequence: Synthetic polypeptide
  VL of XENP021169

SEQ ID NO: 31441 - protein, 15 aa, Artificial Sequence
  Description of Artificial Sequence: Synthetic peptide
  XENP021169 vlCDR1
KASQSVDYDGDSYMN

SEQ ID NO: 31442 - protein, 7 aa, Artificial Sequence
  Description of Artificial Sequence: Synthetic peptide
  XENP021169 vlCDR2
AASNLES

SEQ ID NO: 31443 - protein, 9 aa, Artificial Sequence
  Description of Artificial Sequence: Synthetic peptide
  XENP021169 vlCDR3
QQSNQDPFT

SEQ ID NO: 31444 - protein, 226 aa, Artificial Sequence; identical to SEQ ID NO: 29134
  Description of Artificial Sequence: Synthetic polypeptide
  XENP021170 7G8_H0_L0.93_Fab Heavy Chain

SEQ ID NO: 31445 - protein, 121 aa, Artificial Sequence; identical to SEQ ID NO: 17586
  Description of Artificial Sequence: Synthetic polypeptide
  VH of XENP021170

SEQ ID NO: 31446 - protein, 5 aa, Artificial Sequence
  Description of Artificial Sequence: Synthetic peptide
  XENP021170 vhCDR1
DAWMD

SEQ ID NO: 31447 - protein, 19 aa, Artificial Sequence
  Description of Artificial Sequence: Synthetic peptide
  XENP021170 vhCDR2
EIRTKANNHATYYAESVKG

SEQ ID NO: 31448 - protein, 10 aa, Artificial Sequence
  Description of Artificial Sequence: Synthetic peptide
  XENP021170 vhCDR3
LANWDWYFDV

SEQ ID NO: 31449 - protein, 218 aa, Artificial Sequence; identical to SEQ ID NO: 20620
  Description of Artificial Sequence: Synthetic polypeptide
  XENP021170 7G8_H0_L0.93_Fab Light Chain

SEQ ID NO: 31450 - protein, 111 aa, Artificial Sequence; identical to SEQ ID NO: 20621
  Description of Artificial Sequence: Synthetic polypeptide
  VL of XENP021170

SEQ ID NO: 31451 - protein, 15 aa, Artificial Sequence
  Description of Artificial Sequence: Synthetic peptide
  XENP021170 vlCDR1
KASQSVDYDGDSYMN

SEQ ID NO: 31452 - protein, 7 aa, Artificial Sequence
  Description of Artificial Sequence: Synthetic peptide
  XENP021170 vlCDR2
AASNLES

SEQ ID NO: 31453 - protein, 9 aa, Artificial Sequence
  Description of Artificial Sequence: Synthetic peptide
  XENP021170 vlCDR3
QQSNDDPFT

SEQ ID NO: 31454 - protein, 226 aa, Artificial Sequence; identical to SEQ ID NO: 29134
  Description of Artificial Sequence: Synthetic polypeptide
  XENP021171 7G8_H0_L0.94_Fab Heavy Chain

SEQ ID NO: 31455 - protein, 121 aa, Artificial Sequence; identical to SEQ ID NO: 17586
  Description of Artificial Sequence: Synthetic polypeptide
  VH of XENP021171

SEQ ID NO: 31456 - protein, 5 aa, Artificial Sequence
  Description of Artificial Sequence: Synthetic peptide
  XENP021171 vhCDR1
DAWMD

SEQ ID NO: 31457 - protein, 19 aa, Artificial Sequence
  Description of Artificial Sequence: Synthetic peptide
  XENP021171 vhCDR2
EIRTKANNHATYYAESVKG

SEQ ID NO: 31458 - protein, 10 aa, Artificial Sequence
  Description of Artificial Sequence: Synthetic peptide
  XENP021171 vhCDR3
LANWDWYFDV

SEQ ID NO: 31459 - protein, 218 aa, Artificial Sequence; identical to SEQ ID NO: 20630
  Description of Artificial Sequence: Synthetic polypeptide
  XENP021171 7G8_H0_L0.94_Fab Light Chain

SEQ ID NO: 31460 - protein, 111 aa, Artificial Sequence; identical to SEQ ID NO: 20631
  Description of Artificial Sequence: Synthetic polypeptide
  VL of XENP021171

SEQ ID NO: 31461 - protein, 15 aa, Artificial Sequence
  Description of Artificial Sequence: Synthetic peptide
  XENP021171 vlCDR1
KASQSVDYDGDSYMN

SEQ ID NO: 31462 - protein, 7 aa, Artificial Sequence
  Description of Artificial Sequence: Synthetic peptide
  XENP021171 vlCDR2
AASNLES

SEQ ID NO: 31463 - protein, 9 aa, Artificial Sequence
  Description of Artificial Sequence: Synthetic peptide
  XENP021171 vlCDR3
QQSNKDPFT

SEQ ID NO: 31464 - protein, 226 aa, Artificial Sequence; identical to SEQ ID NO: 29134
  Description of Artificial Sequence: Synthetic polypeptide
  XENP021172 7G8_H0_L0.95_Fab Heavy Chain

SEQ ID NO: 31465 - protein, 121 aa, Artificial Sequence; identical to SEQ ID NO: 17586
  Description of Artificial Sequence: Synthetic polypeptide
  VH of XENP021172

SEQ ID NO: 31466 - protein, 5 aa, Artificial Sequence
  Description of Artificial Sequence: Synthetic peptide
  XENP021172 vhCDR1
DAWMD

SEQ ID NO: 31467 - protein, 19 aa, Artificial Sequence
  Description of Artificial Sequence: Synthetic peptide
  XENP021172 vhCDR2
EIRTKANNHATYYAESVKG

SEQ ID NO: 31468 - protein, 10 aa, Artificial Sequence
  Description of Artificial Sequence: Synthetic peptide
  XENP021172 vhCDR3
LANWDWYFDV

SEQ ID NO: 31469 - protein, 218 aa, Artificial Sequence; identical to SEQ ID NO: 20640
  Description of Artificial Sequence: Synthetic polypeptide
  XENP021172 7G8_H0_L0.95_Fab Light Chain

SEQ ID NO: 31470 - protein, 111 aa, Artificial Sequence; identical to SEQ ID NO: 20641
  Description of Artificial Sequence: Synthetic polypeptide
  VL of XENP021172

SEQ ID NO: 31471 - protein, 15 aa, Artificial Sequence
  Description of Artificial Sequence: Synthetic peptide
  XENP021172 vlCDR1
KASQSVDYDGDSYMN

SEQ ID NO: 31472 - protein, 7 aa, Artificial Sequence
  Description of Artificial Sequence: Synthetic peptide
  XENP021172 vlCDR2
AASNLES

SEQ ID NO: 31473 - protein, 9 aa, Artificial Sequence
  Description of Artificial Sequence: Synthetic peptide
  XENP021172 vlCDR3
QQSNSDPFT

SEQ ID NO: 31474 - protein, 226 aa, Artificial Sequence; identical to SEQ ID NO: 29134
  Description of Artificial Sequence: Synthetic polypeptide
  XENP021173 7G8_H0_L0.96_Fab Heavy Chain

SEQ ID NO: 31475 - protein, 121 aa, Artificial Sequence; identical to SEQ ID NO: 17586
  Description of Artificial Sequence: Synthetic polypeptide
  VH of XENP021173

SEQ ID NO: 31476 - protein, 5 aa, Artificial Sequence
  Description of Artificial Sequence: Synthetic peptide
  XENP021173 vhCDR1
DAWMD

SEQ ID NO: 31477 - protein, 19 aa, Artificial Sequence
  Description of Artificial Sequence: Synthetic peptide
  XENP021173 vhCDR2
EIRTKANNHATYYAESVKG

SEQ ID NO: 31478 - protein, 10 aa, Artificial Sequence
  Description of Artificial Sequence: Synthetic peptide
  XENP021173 vhCDR3
LANWDWYFDV

SEQ ID NO: 31479 - protein, 218 aa, Artificial Sequence; identical to SEQ ID NO: 20650
  Description of Artificial Sequence: Synthetic polypeptide
  XENP021173 7G8_H0_L0.96_Fab Light Chain

SEQ ID NO: 31480 - protein, 111 aa, Artificial Sequence; identical to SEQ ID NO: 20651
  Description of Artificial Sequence: Synthetic polypeptide
  VL of XENP021173

SEQ ID NO: 31481 - protein, 15 aa, Artificial Sequence
  Description of Artificial Sequence: Synthetic peptide
  XENP021173 vlCDR1
KASQSVDYDGDSYMN

SEQ ID NO: 31482 - protein, 7 aa, Artificial Sequence
  Description of Artificial Sequence: Synthetic peptide
  XENP021173 vlCDR2
AASNLES

SEQ ID NO: 31483 - protein, 9 aa, Artificial Sequence
  Description of Artificial Sequence: Synthetic peptide
  XENP021173 vlCDR3
QQSNHDPFT

SEQ ID NO: 31484 - protein, 226 aa, Artificial Sequence; identical to SEQ ID NO: 29134
  Description of Artificial Sequence: Synthetic polypeptide
  XENP021174 7G8_H0_L0.97_Fab Heavy Chain

SEQ ID NO: 31485 - protein, 121 aa, Artificial Sequence; identical to SEQ ID NO: 17586
  Description of Artificial Sequence: Synthetic polypeptide
  VH of XENP021174

SEQ ID NO: 31486 - protein, 5 aa, Artificial Sequence
  Description of Artificial Sequence: Synthetic peptide
  XENP021174 vhCDR1
DAWMD

SEQ ID NO: 31487 - protein, 19 aa, Artificial Sequence
  Description of Artificial Sequence: Synthetic peptide
  XENP021174 vhCDR2
EIRTKANNHATYYAESVKG

SEQ ID NO: 31488 - protein, 10 aa, Artificial Sequence
  Description of Artificial Sequence: Synthetic peptide
  XENP021174 vhCDR3
LANWDWYFDV

SEQ ID NO: 31489 - protein, 218 aa, Artificial Sequence; identical to SEQ ID NO: 20660
  Description of Artificial Sequence: Synthetic polypeptide
  XENP021174 7G8_H0_L0.97_Fab Light Chain

SEQ ID NO: 31490 - protein, 111 aa, Artificial Sequence; identical to SEQ ID NO: 20661
  Description of Artificial Sequence: Synthetic polypeptide
  VL of XENP021174

SEQ ID NO: 31491 - protein, 15 aa, Artificial Sequence
  Description of Artificial Sequence: Synthetic peptide
  XENP021174 vlCDR1
KASQSVDYDGDSYMN

SEQ ID NO: 31492 - protein, 7 aa, Artificial Sequence
  Description of Artificial Sequence: Synthetic peptide
  XENP021174 vlCDR2
AASNLES

SEQ ID NO: 31493 - protein, 9 aa, Artificial Sequence
  Description of Artificial Sequence: Synthetic peptide
  XENP021174 vlCDR3
QQSNADPFT

SEQ ID NO: 31494 - protein, 226 aa, Artificial Sequence; identical to SEQ ID NO: 29134
  Description of Artificial Sequence: Synthetic polypeptide
  XENP021175 7G8_H0_L0.98_Fab Heavy Chain

SEQ ID NO: 31495 - protein, 121 aa, Artificial Sequence; identical to SEQ ID NO: 17586
  Description of Artificial Sequence: Synthetic polypeptide
  VH of XENP021175

SEQ ID NO: 31496 - protein, 5 aa, Artificial Sequence
  Description of Artificial Sequence: Synthetic peptide
  XENP021175 vhCDR1
DAWMD

SEQ ID NO: 31497 - protein, 19 aa, Artificial Sequence
  Description of Artificial Sequence: Synthetic peptide
  XENP021175 vhCDR2
EIRTKANNHATYYAESVKG

SEQ ID NO: 31498 - protein, 10 aa, Artificial Sequence
  Description of Artificial Sequence: Synthetic peptide
  XENP021175 vhCDR3
LANWDWYFDV

SEQ ID NO: 31499 - protein, 218 aa, Artificial Sequence; identical to SEQ ID NO: 20670
  Description of Artificial Sequence: Synthetic polypeptide
  XENP021175 7G8_H0_L0.98_Fab Light Chain

SEQ ID NO: 31500 - protein, 111 aa, Artificial Sequence; identical to SEQ ID NO: 20671
  Description of Artificial Sequence: Synthetic polypeptide
  VL of XENP021175

SEQ ID NO: 31501 - protein, 15 aa, Artificial Sequence
  Description of Artificial Sequence: Synthetic peptide
  XENP021175 vlCDR1
KASQSVDYDGDSYMN

SEQ ID NO: 31502 - protein, 7 aa, Artificial Sequence
  Description of Artificial Sequence: Synthetic peptide
  XENP021175 vlCDR2
AASNLES

SEQ ID NO: 31503 - protein, 9 aa, Artificial Sequence
  Description of Artificial Sequence: Synthetic peptide
  XENP021175 vlCDR3
QQSNGDPFT

SEQ ID NO: 31504 - protein, 226 aa, Artificial Sequence; identical to SEQ ID NO: 29134
  Description of Artificial Sequence: Synthetic polypeptide
  XENP021176 7G8_H0_L0.99_Fab Heavy Chain

SEQ ID NO: 31505 - protein, 121 aa, Artificial Sequence; identical to SEQ ID NO: 17586
  Description of Artificial Sequence: Synthetic polypeptide
  VH of XENP021176

SEQ ID NO: 31506 - protein, 5 aa, Artificial Sequence
  Description of Artificial Sequence: Synthetic peptide
  XENP021176 vhCDR1
DAWMD

SEQ ID NO: 31507 - protein, 19 aa, Artificial Sequence
  Description of Artificial Sequence: Synthetic peptide
  XENP021176 vhCDR2
EIRTKANNHATYYAESVKG

SEQ ID NO: 31508 - protein, 10 aa, Artificial Sequence
  Description of Artificial Sequence: Synthetic peptide
  XENP021176 vhCDR3
LANWDWYFDV

SEQ ID NO: 31509 - protein, 218 aa, Artificial Sequence; identical to SEQ ID NO: 20680
  Description of Artificial Sequence: Synthetic polypeptide
  XENP021176 7G8_H0_L0.99_Fab Light Chain

SEQ ID NO: 31510 - protein, 111 aa, Artificial Sequence; identical to SEQ ID NO: 20681
  Description of Artificial Sequence: Synthetic polypeptide
  VL of XENP021176

SEQ ID NO: 31511 - protein, 15 aa, Artificial Sequence
  Description of Artificial Sequence: Synthetic peptide
  XENP021176 vlCDR1
KASQSVDYDGDSYMN

SEQ ID NO: 31512 - protein, 7 aa, Artificial Sequence
  Description of Artificial Sequence: Synthetic peptide
  XENP021176 vlCDR2
AASNLES

SEQ ID NO: 31513 - protein, 9 aa, Artificial Sequence
  Description of Artificial Sequence: Synthetic peptide
  XENP021176 vlCDR3
QQSNYDPFT

SEQ ID NO: 31514 - protein, 226 aa, Artificial Sequence; identical to SEQ ID NO: 29134
  Description of Artificial Sequence: Synthetic polypeptide
  XENP021177 7G8_H0_L0.100_Fab Heavy Chain

SEQ ID NO: 31515 - protein, 121 aa, Artificial Sequence; identical to SEQ ID NO: 17586
  Description of Artificial Sequence: Synthetic polypeptide
  VH of XENP021177

SEQ ID NO: 31516 - protein, 5 aa, Artificial Sequence
  Description of Artificial Sequence: Synthetic peptide
  XENP021177 vhCDR1
DAWMD

SEQ ID NO: 31517 - protein, 19 aa, Artificial Sequence
  Description of Artificial Sequence: Synthetic peptide
  XENP021177 vhCDR2
EIRTKANNHATYYAESVKG

SEQ ID NO: 31518 - protein, 10 aa, Artificial Sequence
  Description of Artificial Sequence: Synthetic peptide
  XENP021177 vhCDR3
LANWDWYFDV

SEQ ID NO: 31519 - protein, 218 aa, Artificial Sequence; identical to SEQ ID NO: 20690
  Description of Artificial Sequence: Synthetic polypeptide
  XENP021177 7G8_H0_L0.100_Fab Light Chain

SEQ ID NO: 31520 - protein, 111 aa, Artificial Sequence; identical to SEQ ID NO: 20691
  Description of Artificial Sequence: Synthetic polypeptide
  VL of XENP021177

SEQ ID NO: 31521 - protein, 15 aa, Artificial Sequence
  Description of Artificial Sequence: Synthetic peptide
  XENP021177 vlCDR1
KASQSVDYDGDSYMN

SEQ ID NO: 31522 - protein, 7 aa, Artificial Sequence
  Description of Artificial Sequence: Synthetic peptide
  XENP021177 vlCDR2
AASNLES

SEQ ID NO: 31523 - protein, 9 aa, Artificial Sequence
  Description of Artificial Sequence: Synthetic peptide
  XENP021177 vlCDR3
QQSNIDPFT

SEQ ID NO: 31524 - protein, 226 aa, Artificial Sequence; identical to SEQ ID NO: 29134
  Description of Artificial Sequence: Synthetic polypeptide
  XENP021178 7G8_H0_L0.101_Fab Heavy Chain

SEQ ID NO: 31525 - protein, 121 aa, Artificial Sequence; identical to SEQ ID NO: 17586
  Description of Artificial Sequence: Synthetic polypeptide
  VH of XENP021178

SEQ ID NO: 31526 - protein, 5 aa, Artificial Sequence
  Description of Artificial Sequence: Synthetic peptide
  XENP021178 vhCDR1
DAWMD

SEQ ID NO: 31527 - protein, 19 aa, Artificial Sequence
  Description of Artificial Sequence: Synthetic peptide
  XENP021178 vhCDR2
EIRTKANNHATYYAESVKG

SEQ ID NO: 31528 - protein, 10 aa, Artificial Sequence
  Description of Artificial Sequence: Synthetic peptide
  XENP021178 vhCDR3
LANWDWYFDV

SEQ ID NO: 31529 - protein, 218 aa, Artificial Sequence; identical to SEQ ID NO: 20700
  Description of Artificial Sequence: Synthetic polypeptide
  XENP021178 7G8_H0_L0.101_Fab Light Chain

SEQ ID NO: 31530 - protein, 111 aa, Artificial Sequence; identical to SEQ ID NO: 20701
  Description of Artificial Sequence: Synthetic polypeptide
  VL of XENP021178

SEQ ID NO: 31531 - protein, 15 aa, Artificial Sequence
  Description of Artificial Sequence: Synthetic peptide
  XENP021178 vlCDR1
KASQSVDYDGDSYMN

SEQ ID NO: 31532 - protein, 7 aa, Artificial Sequence
  Description of Artificial Sequence: Synthetic peptide
  XENP021178 vlCDR2
AASNLES

SEQ ID NO: 31533 - protein, 9 aa, Artificial Sequence
  Description of Artificial Sequence: Synthetic peptide
  XENP021178 vlCDR3
QQSNENPFT

SEQ ID NO: 31534 - protein, 226 aa, Artificial Sequence; identical to SEQ ID NO: 29134
  Description of Artificial Sequence: Synthetic polypeptide
  XENP021179 7G8_H0_L0.102_Fab Heavy Chain

SEQ ID NO: 31535 - protein, 121 aa, Artificial Sequence; identical to SEQ ID NO: 17586
  Description of Artificial Sequence: Synthetic polypeptide
  VH of XENP021179

SEQ ID NO: 31536 - protein, 5 aa, Artificial Sequence
  Description of Artificial Sequence: Synthetic peptide
  XENP021179 vhCDR1
DAWMD

SEQ ID NO: 31537 - protein, 19 aa, Artificial Sequence
  Description of Artificial Sequence: Synthetic peptide
  XENP021179 vhCDR2
EIRTKANNHATYYAESVKG

SEQ ID NO: 31538 - protein, 10 aa, Artificial Sequence
  Description of Artificial Sequence: Synthetic peptide
  XENP021179 vhCDR3
LANWDWYFDV

SEQ ID NO: 31539 - protein, 218 aa, Artificial Sequence; identical to SEQ ID NO: 20710
  Description of Artificial Sequence: Synthetic polypeptide
  XENP021179 7G8_H0_L0.102_Fab Light Chain

SEQ ID NO: 31540 - protein, 111 aa, Artificial Sequence; identical to SEQ ID NO: 20711
  Description of Artificial Sequence: Synthetic polypeptide
  VL of XENP021179

SEQ ID NO: 31541 - protein, 15 aa, Artificial Sequence
  Description of Artificial Sequence: Synthetic peptide
  XENP021179 vlCDR1
KASQSVDYDGDSYMN

SEQ ID NO: 31542 - protein, 7 aa, Artificial Sequence
  Description of Artificial Sequence: Synthetic peptide
  XENP021179 vlCDR2
AASNLES

SEQ ID NO: 31543 - protein, 9 aa, Artificial Sequence
  Description of Artificial Sequence: Synthetic peptide
  XENP021179 vlCDR3
QQSNEEPFT

SEQ ID NO: 31544 - protein, 226 aa, Artificial Sequence; identical to SEQ ID NO: 29134
  Description of Artificial Sequence: Synthetic polypeptide
  XENP021180 7G8_H0_L0.103_Fab Heavy Chain

SEQ ID NO: 31545 - protein, 121 aa, Artificial Sequence; identical to SEQ ID NO: 17586
  Description of Artificial Sequence: Synthetic polypeptide
  VH of XENP021180

SEQ ID NO: 31546 - protein, 5 aa, Artificial Sequence
  Description of Artificial Sequence: Synthetic peptide
  XENP021180 vhCDR1
DAWMD

SEQ ID NO: 31547 - protein, 19 aa, Artificial Sequence
  Description of Artificial Sequence: Synthetic peptide
  XENP021180 vhCDR2
EIRTKANNHATYYAESVKG

SEQ ID NO: 31548 - protein, 10 aa, Artificial Sequence
  Description of Artificial Sequence: Synthetic peptide
  XENP021180 vhCDR3
LANWDWYFDV

SEQ ID NO: 31549 - protein, 218 aa, Artificial Sequence; identical to SEQ ID NO: 20720
  Description of Artificial Sequence: Synthetic polypeptide
  XENP021180 7G8_H0_L0.103_Fab Light Chain

SEQ ID NO: 31550 - protein, 111 aa, Artificial Sequence; identical to SEQ ID NO: 20721
  Description of Artificial Sequence: Synthetic polypeptide
  VL of XENP021180

SEQ ID NO: 31551 - protein, 15 aa, Artificial Sequence
  Description of Artificial Sequence: Synthetic peptide
  XENP021180 vlCDR1
KASQSVDYDGDSYMN

SEQ ID NO: 31552 - protein, 7 aa, Artificial Sequence
  Description of Artificial Sequence: Synthetic peptide
  XENP021180 vlCDR2
AASNLES

SEQ ID NO: 31553 - protein, 9 aa, Artificial Sequence
  Description of Artificial Sequence: Synthetic peptide
  XENP021180 vlCDR3
QQSNEHPFT

SEQ ID NO: 31554 - protein, 226 aa, Artificial Sequence; identical to SEQ ID NO: 29134
  Description of Artificial Sequence: Synthetic polypeptide
  XENP021181 7G8_H0_L0.104_Fab Heavy Chain

SEQ ID NO: 31555 - protein, 121 aa, Artificial Sequence; identical to SEQ ID NO: 17586
  Description of Artificial Sequence: Synthetic polypeptide
  VH of XENP021181

SEQ ID NO: 31556 - protein, 5 aa, Artificial Sequence
  Description of Artificial Sequence: Synthetic peptide
  XENP021181 vhCDR1
DAWMD

SEQ ID NO: 31557 - protein, 19 aa, Artificial Sequence
  Description of Artificial Sequence: Synthetic peptide
  XENP021181 vhCDR2
EIRTKANNHATYYAESVKG

SEQ ID NO: 31558 - protein, 10 aa, Artificial Sequence
  Description of Artificial Sequence: Synthetic peptide
  XENP021181 vhCDR3
LANWDWYFDV

SEQ ID NO: 31559 - protein, 218 aa, Artificial Sequence; identical to SEQ ID NO: 20730
  Description of Artificial Sequence: Synthetic polypeptide
  XENP021181 7G8_H0_L0.104_Fab Light Chain

SEQ ID NO: 31560 - protein, 111 aa, Artificial Sequence; identical to SEQ ID NO: 20731
  Description of Artificial Sequence: Synthetic polypeptide
  VL of XENP021181

SEQ ID NO: 31561 - protein, 15 aa, Artificial Sequence
  Description of Artificial Sequence: Synthetic peptide
  XENP021181 vlCDR1
KASQSVDYDGDSYMN

SEQ ID NO: 31562 - protein, 7 aa, Artificial Sequence
  Description of Artificial Sequence: Synthetic peptide
  XENP021181 vlCDR2
AASNLES

SEQ ID NO: 31563 - protein, 9 aa, Artificial Sequence
  Description of Artificial Sequence: Synthetic peptide
  XENP021181 vlCDR3
QQSNERPFT

SEQ ID NO: 31564 - protein, 226 aa, Artificial Sequence; identical to SEQ ID NO: 29134
  Description of Artificial Sequence: Synthetic polypeptide
  XENP021182 7G8_H0_L0.105_Fab Heavy Chain

SEQ ID NO: 31565 - protein, 121 aa, Artificial Sequence; identical to SEQ ID NO: 17586
  Description of Artificial Sequence: Synthetic polypeptide
  VH of XENP021182

SEQ ID NO: 31566 - protein, 5 aa, Artificial Sequence
  Description of Artificial Sequence: Synthetic peptide
  XENP021182 vhCDR1
DAWMD

SEQ ID NO: 31567 - protein, 19 aa, Artificial Sequence
  Description of Artificial Sequence: Synthetic peptide
  XENP021182 vhCDR2
EIRTKANNHATYYAESVKG

SEQ ID NO: 31568 - protein, 10 aa, Artificial Sequence
  Description of Artificial Sequence: Synthetic peptide
  XENP021182 vhCDR3
LANWDWYFDV

SEQ ID NO: 31569 - protein, 218 aa, Artificial Sequence; identical to SEQ ID NO: 20740
  Description of Artificial Sequence: Synthetic polypeptide
  XENP021182 7G8_H0_L0.105_Fab Light Chain

SEQ ID NO: 31570 - protein, 111 aa, Artificial Sequence; identical to SEQ ID NO: 20741
  Description of Artificial Sequence: Synthetic polypeptide
  VL of XENP021182

SEQ ID NO: 31571 - protein, 15 aa, Artificial Sequence
  Description of Artificial Sequence: Synthetic peptide
  XENP021182 vlCDR1
KASQSVDYDGDSYMN

SEQ ID NO: 31572 - protein, 7 aa, Artificial Sequence
  Description of Artificial Sequence: Synthetic peptide
  XENP021182 vlCDR2
AASNLES

SEQ ID NO: 31573 - protein, 9 aa, Artificial Sequence
  Description of Artificial Sequence: Synthetic peptide
  XENP021182 vlCDR3
QQSNELPFT

SEQ ID NO: 31574 - protein, 226 aa, Artificial Sequence; identical to SEQ ID NO: 29134
  Description of Artificial Sequence: Synthetic polypeptide
  XENP021183 7G8_H0_L0.106_Fab Heavy Chain

SEQ ID NO: 31575 - protein, 121 aa, Artificial Sequence; identical to SEQ ID NO: 17586
  Description of Artificial Sequence: Synthetic polypeptide
  VH of XENP021183

SEQ ID NO: 31576 - protein, 5 aa, Artificial Sequence
  Description of Artificial Sequence: Synthetic peptide
  XENP021183 vhCDR1
DAWMD

SEQ ID NO: 31577 - protein, 19 aa, Artificial Sequence
  Description of Artificial Sequence: Synthetic peptide
  XENP021183 vhCDR2
EIRTKANNHATYYAESVKG

SEQ ID NO: 31578 - protein, 10 aa, Artificial Sequence
  Description of Artificial Sequence: Synthetic peptide
  XENP021183 vhCDR3
LANWDWYFDV

SEQ ID NO: 31579 - protein, 218 aa, Artificial Sequence; identical to SEQ ID NO: 20750
  Description of Artificial Sequence: Synthetic polypeptide
  XENP021183 7G8_H0_L0.106_Fab Light Chain

SEQ ID NO: 31580 - protein, 111 aa, Artificial Sequence; identical to SEQ ID NO: 20751
  Description of Artificial Sequence: Synthetic polypeptide
  VL of XENP021183

SEQ ID NO: 31581 - protein, 15 aa, Artificial Sequence
  Description of Artificial Sequence: Synthetic peptide
  XENP021183 vlCDR1
KASQSVDYDGDSYMN

SEQ ID NO: 31582 - protein, 7 aa, Artificial Sequence
  Description of Artificial Sequence: Synthetic peptide
  XENP021183 vlCDR2
AASNLES

SEQ ID NO: 31583 - protein, 9 aa, Artificial Sequence
  Description of Artificial Sequence: Synthetic peptide
  XENP021183 vlCDR3
QQSNEGPFT

SEQ ID NO: 31584 - protein, 226 aa, Artificial Sequence; identical to SEQ ID NO: 29134
  Description of Artificial Sequence: Synthetic polypeptide
  XENP021184 7G8_H0_L0.107_Fab Heavy Chain

SEQ ID NO: 31585 - protein, 121 aa, Artificial Sequence; identical to SEQ ID NO: 17586
  Description of Artificial Sequence: Synthetic polypeptide
  VH of XENP021184

SEQ ID NO: 31586 - protein, 5 aa, Artificial Sequence
  Description of Artificial Sequence: Synthetic peptide
  XENP021184 vhCDR1
DAWMD

SEQ ID NO: 31587 - protein, 19 aa, Artificial Sequence
  Description of Artificial Sequence: Synthetic peptide
  XENP021184 vhCDR2
EIRTKANNHATYYAESVKG

SEQ ID NO: 31588 - protein, 10 aa, Artificial Sequence
  Description of Artificial Sequence: Synthetic peptide
  XENP021184 vhCDR3
LANWDWYFDV

SEQ ID NO: 31589 - protein, 218 aa, Artificial Sequence; identical to SEQ ID NO: 20760
  Description of Artificial Sequence: Synthetic polypeptide
  XENP021184 7G8_H0_L0.107_Fab Light Chain

SEQ ID NO: 31590 - protein, 111 aa, Artificial Sequence; identical to SEQ ID NO: 20761
  Description of Artificial Sequence: Synthetic polypeptide
  VL of XENP021184

SEQ ID NO: 31591 - protein, 15 aa, Artificial Sequence
  Description of Artificial Sequence: Synthetic peptide
  XENP021184 vlCDR1
KASQSVDYDGDSYMN

SEQ ID NO: 31592 - protein, 7 aa, Artificial Sequence
  Description of Artificial Sequence: Synthetic peptide
  XENP021184 vlCDR2
AASNLES

SEQ ID NO: 31593 - protein, 9 aa, Artificial Sequence
  Description of Artificial Sequence: Synthetic peptide
  XENP021184 vlCDR3
QQSNEYPFT

SEQ ID NO: 31594 - protein, 226 aa, Artificial Sequence; identical to SEQ ID NO: 28944
  Description of Artificial Sequence: Synthetic polypeptide
  XENP021558 7G8_H3.1_L0.59_Fab Heavy Chain

SEQ ID NO: 31595 - protein, 121 aa, Artificial Sequence; identical to SEQ ID NO: 28945
  Description of Artificial Sequence: Synthetic polypeptide
  VH of XENP021558

SEQ ID NO: 31596 - protein, 5 aa, Artificial Sequence
  Description of Artificial Sequence: Synthetic peptide
  XENP021558 vhCDR1
DAWMD

SEQ ID NO: 31597 - protein, 19 aa, Artificial Sequence
  Description of Artificial Sequence: Synthetic peptide
  XENP021558 vhCDR2
EIRTKANNHATYYAESVKG

SEQ ID NO: 31598 - protein, 10 aa, Artificial Sequence
  Description of Artificial Sequence: Synthetic peptide
  XENP021558 vhCDR3
LATWDWYFDV

SEQ ID NO: 31599 - protein, 218 aa, Artificial Sequence; identical to SEQ ID NO: 20280
  Description of Artificial Sequence: Synthetic polypeptide
  XENP021558 7G8_H3.1_L0.59_Fab Light Chain

SEQ ID NO: 31600 - protein, 111 aa, Artificial Sequence; identical to SEQ ID NO: 20281
  Description of Artificial Sequence: Synthetic polypeptide
  VL of XENP021558

SEQ ID NO: 31601 - protein, 15 aa, Artificial Sequence
  Description of Artificial Sequence: Synthetic peptide
  XENP021558 vlCDR1
KASQSVDYDGDSYMN

SEQ ID NO: 31602 - protein, 7 aa, Artificial Sequence
  Description of Artificial Sequence: Synthetic peptide
  XENP021558 vlCDR2
AASELES

SEQ ID NO: 31603 - protein, 9 aa, Artificial Sequence
  Description of Artificial Sequence: Synthetic peptide
  XENP021558 vlCDR3
QQSNEDPFT

SEQ ID NO: 31604 - protein, 226 aa, Artificial Sequence; identical to SEQ ID NO: 28974
  Description of Artificial Sequence: Synthetic polypeptide
  XENP021559 7G8_H3.4_L0.59_Fab Heavy Chain

SEQ ID NO: 31605 - protein, 121 aa, Artificial Sequence; identical to SEQ ID NO: 28975
  Description of Artificial Sequence: Synthetic polypeptide
  VH of XENP021559

SEQ ID NO: 31606 - protein, 5 aa, Artificial Sequence
  Description of Artificial Sequence: Synthetic peptide
  XENP021559 vhCDR1
DAWMD

SEQ ID NO: 31607 - protein, 19 aa, Artificial Sequence
  Description of Artificial Sequence: Synthetic peptide
  XENP021559 vhCDR2
EIRTKANNHATYYAESVKG

SEQ ID NO: 31608 - protein, 10 aa, Artificial Sequence
  Description of Artificial Sequence: Synthetic peptide
  XENP021559 vhCDR3
LATWDWYFDV

SEQ ID NO: 31609 - protein, 218 aa, Artificial Sequence; identical to SEQ ID NO: 20280
  Description of Artificial Sequence: Synthetic polypeptide
  XENP021559 7G8_H3.4_L0.59_Fab Light Chain

SEQ ID NO: 31610 - protein, 111 aa, Artificial Sequence; identical to SEQ ID NO: 20281
  Description of Artificial Sequence: Synthetic polypeptide
  VL of XENP021559

SEQ ID NO: 31611 - protein, 15 aa, Artificial Sequence
  Description of Artificial Sequence: Synthetic peptide
  XENP021559 vlCDR1
KASQSVDYDGDSYMN

SEQ ID NO: 31612 - protein, 7 aa, Artificial Sequence
  Description of Artificial Sequence: Synthetic peptide
  XENP021559 vlCDR2
AASELES

SEQ ID NO: 31613 - protein, 9 aa, Artificial Sequence
  Description of Artificial Sequence: Synthetic peptide
  XENP021559 vlCDR3
QQSNEDPFT

SEQ ID NO: 31614 - protein, 226 aa, Artificial Sequence; identical to SEQ ID NO: 30404
  Description of Artificial Sequence: Synthetic polypeptide
  XENP021560 7G8_H0.129_L0.59_Fab Heavy Chain

SEQ ID NO: 31615 - protein, 121 aa, Artificial Sequence; identical to SEQ ID NO: 19496
  Description of Artificial Sequence: Synthetic polypeptide
  VH of XENP021560

SEQ ID NO: 31616 - protein, 5 aa, Artificial Sequence
  Description of Artificial Sequence: Synthetic peptide
  XENP021560 vhCDR1
DAWMD

SEQ ID NO: 31617 - protein, 19 aa, Artificial Sequence
  Description of Artificial Sequence: Synthetic peptide
  XENP021560 vhCDR2
EIRTKANNHATYYAESVKG

SEQ ID NO: 31618 - protein, 10 aa, Artificial Sequence
  Description of Artificial Sequence: Synthetic peptide
  XENP021560 vhCDR3
LATWDWYFDV

SEQ ID NO: 31619 - protein, 218 aa, Artificial Sequence; identical to SEQ ID NO: 20280
  Description of Artificial Sequence: Synthetic polypeptide
  XENP021560 7G8_H0.129_L0.59_Fab Light Chain

SEQ ID NO: 31620 - protein, 111 aa, Artificial Sequence; identical to SEQ ID NO: 20281
  Description of Artificial Sequence: Synthetic polypeptide
  VL of XENP021560

SEQ ID NO: 31621 - protein, 15 aa, Artificial Sequence
  Description of Artificial Sequence: Synthetic peptide
  XENP021560 vlCDR1
KASQSVDYDGDSYMN

SEQ ID NO: 31622 - protein, 7 aa, Artificial Sequence
  Description of Artificial Sequence: Synthetic peptide
  XENP021560 vlCDR2
AASELES

SEQ ID NO: 31623 - protein, 9 aa, Artificial Sequence
  Description of Artificial Sequence: Synthetic peptide
  XENP021560 vlCDR3
QQSNEDPFT

SEQ ID NO: 31624 - protein, 226 aa, Artificial Sequence; identical to SEQ ID NO: 29454
  Description of Artificial Sequence: Synthetic polypeptide
  XENP021561 7G8_H0.31_L0.59_Fab Heavy Chain

SEQ ID NO: 31625 - protein, 121 aa, Artificial Sequence; identical to SEQ ID NO: 18516
  Description of Artificial Sequence: Synthetic polypeptide
  VH of XENP021561

SEQ ID NO: 31626 - protein, 5 aa, Artificial Sequence
  Description of Artificial Sequence: Synthetic peptide
  XENP021561 vhCDR1
DAWMD

SEQ ID NO: 31627 - protein, 19 aa, Artificial Sequence
  Description of Artificial Sequence: Synthetic peptide
  XENP021561 vhCDR2
EISTKANNHATYYAESVKG

SEQ ID NO: 31628 - protein, 10 aa, Artificial Sequence
  Description of Artificial Sequence: Synthetic peptide
  XENP021561 vhCDR3
LANWDWYFDV

SEQ ID NO: 31629 - protein, 218 aa, Artificial Sequence; identical to SEQ ID NO: 20280
  Description of Artificial Sequence: Synthetic polypeptide
  XENP021561 7G8_H0.31_L0.59_Fab Light Chain

SEQ ID NO: 31630 - protein, 111 aa, Artificial Sequence; identical to SEQ ID NO: 20281
  Description of Artificial Sequence: Synthetic polypeptide
  VL of XENP021561

SEQ ID NO: 31631 - protein, 15 aa, Artificial Sequence
  Description of Artificial Sequence: Synthetic peptide
  XENP021561 vlCDR1
KASQSVDYDGDSYMN

SEQ ID NO: 31632 - protein, 7 aa, Artificial Sequence
  Description of Artificial Sequence: Synthetic peptide
  XENP021561 vlCDR2
AASELES

SEQ ID NO: 31633 - protein, 9 aa, Artificial Sequence
  Description of Artificial Sequence: Synthetic peptide
  XENP021561 vlCDR3
QQSNEDPFT

SEQ ID NO: 31634 - protein, 226 aa, Artificial Sequence; identical to SEQ ID NO: 30174
  Description of Artificial Sequence: Synthetic polypeptide
  XENP021562 7G8_H0.103_L0.59_Fab Heavy Chain

SEQ ID NO: 31635 - protein, 121 aa, Artificial Sequence; identical to SEQ ID NO: 19236
  Description of Artificial Sequence: Synthetic polypeptide
  VH of XENP021562

SEQ ID NO: 31636 - protein, 5 aa, Artificial Sequence
  Description of Artificial Sequence: Synthetic peptide
  XENP021562 vhCDR1
DAWMD

SEQ ID NO: 31637 - protein, 19 aa, Artificial Sequence
  Description of Artificial Sequence: Synthetic peptide
  XENP021562 vhCDR2
EIRTKANNHATDYAESVKG

SEQ ID NO: 31638 - protein, 10 aa, Artificial Sequence
  Description of Artificial Sequence: Synthetic peptide
  XENP021562 vhCDR3
LANWDWYFDV

SEQ ID NO: 31639 - protein, 218 aa, Artificial Sequence; identical to SEQ ID NO: 20280
  Description of Artificial Sequence: Synthetic polypeptide
  XENP021562 7G8_H0.103_L0.59_Fab Light Chain

SEQ ID NO: 31640 - protein, 111 aa, Artificial Sequence; identical to SEQ ID NO: 20281
  Description of Artificial Sequence: Synthetic polypeptide
  VL of XENP021562

SEQ ID NO: 31641 - protein, 15 aa, Artificial Sequence
  Description of Artificial Sequence: Synthetic peptide
  XENP021562 vlCDR1
KASQSVDYDGDSYMN

SEQ ID NO: 31642 - protein, 7 aa, Artificial Sequence
  Description of Artificial Sequence: Synthetic peptide
  XENP021562 vlCDR2
AASELES

SEQ ID NO: 31643 - protein, 9 aa, Artificial Sequence
  Description of Artificial Sequence: Synthetic peptide
  XENP021562 vlCDR3
QQSNEDPFT

SEQ ID NO: 31644 - protein, 226 aa, Artificial Sequence; identical to SEQ ID NO: 29854
  Description of Artificial Sequence: Synthetic polypeptide
  XENP021563 7G8_H0.71_L0.59_Fab Heavy Chain

SEQ ID NO: 31645 - protein, 121 aa, Artificial Sequence; identical to SEQ ID NO: 18916
  Description of Artificial Sequence: Synthetic polypeptide
  VH of XENP021563

SEQ ID NO: 31646 - protein, 5 aa, Artificial Sequence
  Description of Artificial Sequence: Synthetic peptide
  XENP021563 vhCDR1
DAWMD

SEQ ID NO: 31647 - protein, 19 aa, Artificial Sequence
  Description of Artificial Sequence: Synthetic peptide
  XENP021563 vhCDR2
EIRTKAYNHATYYAESVKG

SEQ ID NO: 31648 - protein, 10 aa, Artificial Sequence
  Description of Artificial Sequence: Synthetic peptide
  XENP021563 vhCDR3
LANWDWYFDV

SEQ ID NO: 31649 - protein, 218 aa, Artificial Sequence; identical to SEQ ID NO: 20280
  Description of Artificial Sequence: Synthetic polypeptide
  XENP021563 7G8_H0.71_L0.59_Fab Light Chain

SEQ ID NO: 31650 - protein, 111 aa, Artificial Sequence; identical to SEQ ID NO: 20281
  Description of Artificial Sequence: Synthetic polypeptide
  VL of XENP021563

SEQ ID NO: 31651 - protein, 15 aa, Artificial Sequence
  Description of Artificial Sequence: Synthetic peptide
  XENP021563 vlCDR1
KASQSVDYDGDSYMN

SEQ ID NO: 31652 - protein, 7 aa, Artificial Sequence
  Description of Artificial Sequence: Synthetic peptide
  XENP021563 vlCDR2
AASELES

SEQ ID NO: 31653 - protein, 9 aa, Artificial Sequence
  Description of Artificial Sequence: Synthetic peptide
  XENP021563 vlCDR3
QQSNEDPFT

SEQ ID NO: 31654 - protein, 226 aa, Artificial Sequence; identical to SEQ ID NO: 28944
  Description of Artificial Sequence: Synthetic polypeptide
  XENP021564 7G8_H3.1_L0_Fab Heavy Chain

SEQ ID NO: 31655 - protein, 121 aa, Artificial Sequence; identical to SEQ ID NO: 28945
  Description of Artificial Sequence: Synthetic polypeptide
  VH of XENP021564

SEQ ID NO: 31656 - protein, 5 aa, Artificial Sequence
  Description of Artificial Sequence: Synthetic peptide
  XENP021564 vhCDR1
DAWMD

SEQ ID NO: 31657 - protein, 19 aa, Artificial Sequence
  Description of Artificial Sequence: Synthetic peptide
  XENP021564 vhCDR2
EIRTKANNHATYYAESVKG

SEQ ID NO: 31658 - protein, 10 aa, Artificial Sequence
  Description of Artificial Sequence: Synthetic peptide
  XENP021564 vhCDR3
LATWDWYFDV

SEQ ID NO: 31659 - protein, 218 aa, Artificial Sequence; identical to SEQ ID NO: 17590
  Description of Artificial Sequence: Synthetic polypeptide
  XENP021564 7G8_H3.1_L0_Fab Light Chain

SEQ ID NO: 31660 - protein, 111 aa, Artificial Sequence; identical to SEQ ID NO: 17591
  Description of Artificial Sequence: Synthetic polypeptide
  VL of XENP021564

SEQ ID NO: 31661 - protein, 15 aa, Artificial Sequence
  Description of Artificial Sequence: Synthetic peptide
  XENP021564 vlCDR1
KASQSVDYDGDSYMN

SEQ ID NO: 31662 - protein, 7 aa, Artificial Sequence
  Description of Artificial Sequence: Synthetic peptide
  XENP021564 vlCDR2
AASNLES

SEQ ID NO: 31663 - protein, 9 aa, Artificial Sequence
  Description of Artificial Sequence: Synthetic peptide
  XENP021564 vlCDR3
QQSNEDPFT

SEQ ID NO: 31664 - protein, 226 aa, Artificial Sequence; identical to SEQ ID NO: 28974
  Description of Artificial Sequence: Synthetic polypeptide
  XENP021565 7G8_H3.4_L0_Fab Heavy Chain

SEQ ID NO: 31665 - protein, 121 aa, Artificial Sequence; identical to SEQ ID NO: 28975
  Description of Artificial Sequence: Synthetic polypeptide
  VH of XENP021565

SEQ ID NO: 31666 - protein, 5 aa, Artificial Sequence
  Description of Artificial Sequence: Synthetic peptide
  XENP021565 vhCDR1
DAWMD

SEQ ID NO: 31667 - protein, 19 aa, Artificial Sequence
  Description of Artificial Sequence: Synthetic peptide
  XENP021565 vhCDR2
EIRTKANNHATYYAESVKG

SEQ ID NO: 31668 - protein, 10 aa, Artificial Sequence
  Description of Artificial Sequence: Synthetic peptide
  XENP021565 vhCDR3
LATWDWYFDV

SEQ ID NO: 31669 - protein, 218 aa, Artificial Sequence; identical to SEQ ID NO: 17590
  Description of Artificial Sequence: Synthetic polypeptide
  XENP021565 7G8_H3.4_L0_Fab Light Chain

SEQ ID NO: 31670 - protein, 111 aa, Artificial Sequence; identical to SEQ ID NO: 17591
  Description of Artificial Sequence: Synthetic polypeptide
  VL of XENP021565

SEQ ID NO: 31671 - protein, 15 aa, Artificial Sequence
  Description of Artificial Sequence: Synthetic peptide
  XENP021565 vlCDR1
KASQSVDYDGDSYMN

SEQ ID NO: 31672 - protein, 7 aa, Artificial Sequence
  Description of Artificial Sequence: Synthetic peptide
  XENP021565 vlCDR2
AASNLES

SEQ ID NO: 31673 - protein, 9 aa, Artificial Sequence
  Description of Artificial Sequence: Synthetic peptide
  XENP021565 vlCDR3
QQSNEDPFT

SEQ ID NO: 31674 - protein, 226 aa, Artificial Sequence; identical to SEQ ID NO: 28944
  Description of Artificial Sequence: Synthetic polypeptide
  XENP021566 7G8_H3.1_L0.11_Fab Heavy Chain

SEQ ID NO: 31675 - protein, 121 aa, Artificial Sequence; identical to SEQ ID NO: 28945
  Description of Artificial Sequence: Synthetic polypeptide
  VH of XENP021566

SEQ ID NO: 31676 - protein, 5 aa, Artificial Sequence
  Description of Artificial Sequence: Synthetic peptide
  XENP021566 vhCDR1
DAWMD

SEQ ID NO: 31677 - protein, 19 aa, Artificial Sequence
  Description of Artificial Sequence: Synthetic peptide
  XENP021566 vhCDR2
EIRTKANNHATYYAESVKG

SEQ ID NO: 31678 - protein, 10 aa, Artificial Sequence
  Description of Artificial Sequence: Synthetic peptide
  XENP021566 vhCDR3
LATWDWYFDV

SEQ ID NO: 31679 - protein, 218 aa, Artificial Sequence; identical to SEQ ID NO: 19800
  Description of Artificial Sequence: Synthetic polypeptide
  XENP021566 7G8_H3.1_L0.11_Fab Light Chain

SEQ ID NO: 31680 - protein, 111 aa, Artificial Sequence; identical to SEQ ID NO: 19801
  Description of Artificial Sequence: Synthetic polypeptide
  VL of XENP021566

SEQ ID NO: 31681 - protein, 15 aa, Artificial Sequence
  Description of Artificial Sequence: Synthetic peptide
  XENP021566 vlCDR1
KASQSVDHDGDSYMN

SEQ ID NO: 31682 - protein, 7 aa, Artificial Sequence
  Description of Artificial Sequence: Synthetic peptide
  XENP021566 vlCDR2
AASNLES

SEQ ID NO: 31683 - protein, 9 aa, Artificial Sequence
  Description of Artificial Sequence: Synthetic peptide
  XENP021566 vlCDR3
QQSNEDPFT

SEQ ID NO: 31684 - protein, 226 aa, Artificial Sequence; identical to SEQ ID NO: 28974
  Description of Artificial Sequence: Synthetic polypeptide
  XENP021567 7G8_H3.4_L0.11_Fab Heavy Chain

SEQ ID NO: 31685 - protein, 121 aa, Artificial Sequence; identical to SEQ ID NO: 28975
  Description of Artificial Sequence: Synthetic polypeptide
  VH of XENP021567

SEQ ID NO: 31686 - protein, 5 aa, Artificial Sequence
  Description of Artificial Sequence: Synthetic peptide
  XENP021567 vhCDR1
DAWMD

SEQ ID NO: 31687 - protein, 19 aa, Artificial Sequence
  Description of Artificial Sequence: Synthetic peptide
  XENP021567 vhCDR2
EIRTKANNHATYYAESVKG

SEQ ID NO: 31688 - protein, 10 aa, Artificial Sequence
  Description of Artificial Sequence: Synthetic peptide
  XENP021567 vhCDR3
LATWDWYFDV

SEQ ID NO: 31689 - protein, 218 aa, Artificial Sequence; identical to SEQ ID NO: 19800
  Description of Artificial Sequence: Synthetic polypeptide
  XENP021567 7G8_H3.4_L0.11_Fab Light Chain

SEQ ID NO: 31690 - protein, 111 aa, Artificial Sequence; identical to SEQ ID NO: 19801
  Description of Artificial Sequence: Synthetic polypeptide
  VL of XENP021567

SEQ ID NO: 31691 - protein, 15 aa, Artificial Sequence
  Description of Artificial Sequence: Synthetic peptide
  XENP021567 vlCDR1
KASQSVDHDGDSYMN

SEQ ID NO: 31692 - protein, 7 aa, Artificial Sequence
  Description of Artificial Sequence: Synthetic peptide
  XENP021567 vlCDR2
AASNLES

SEQ ID NO: 31693 - protein, 9 aa, Artificial Sequence
  Description of Artificial Sequence: Synthetic peptide
  XENP021567 vlCDR3
QQSNEDPFT

SEQ ID NO: 31694 - protein, 226 aa, Artificial Sequence; identical to SEQ ID NO: 30404
  Description of Artificial Sequence: Synthetic polypeptide
  XENP021568 7G8_H0.129_L0.11_Fab Heavy Chain

SEQ ID NO: 31695 - protein, 121 aa, Artificial Sequence; identical to SEQ ID NO: 19496
  Description of Artificial Sequence: Synthetic polypeptide
  VH of XENP021568

SEQ ID NO: 31696 - protein, 5 aa, Artificial Sequence
  Description of Artificial Sequence: Synthetic peptide
  XENP021568 vhCDR1
DAWMD

SEQ ID NO: 31697 - protein, 19 aa, Artificial Sequence
  Description of Artificial Sequence: Synthetic peptide
  XENP021568 vhCDR2
EIRTKANNHATYYAESVKG

SEQ ID NO: 31698 - protein, 10 aa, Artificial Sequence
  Description of Artificial Sequence: Synthetic peptide
  XENP021568 vhCDR3
LATWDWYFDV

SEQ ID NO: 31699 - protein, 218 aa, Artificial Sequence; identical to SEQ ID NO: 19800
  Description of Artificial Sequence: Synthetic polypeptide
  XENP021568 7G8_H0.129_L0.11_Fab Light Chain

SEQ ID NO: 31700 - protein, 111 aa, Artificial Sequence; identical to SEQ ID NO: 19801
  Description of Artificial Sequence: Synthetic polypeptide
  VL of XENP021568

SEQ ID NO: 31701 - protein, 15 aa, Artificial Sequence
  Description of Artificial Sequence: Synthetic peptide
  XENP021568 vlCDR1
KASQSVDHDGDSYMN

SEQ ID NO: 31702 - protein, 7 aa, Artificial Sequence
  Description of Artificial Sequence: Synthetic peptide
  XENP021568 vlCDR2
AASNLES

SEQ ID NO: 31703 - protein, 9 aa, Artificial Sequence
  Description of Artificial Sequence: Synthetic peptide
  XENP021568 vlCDR3
QQSNEDPFT

SEQ ID NO: 31704 - protein, 226 aa, Artificial Sequence; identical to SEQ ID NO: 28944
  Description of Artificial Sequence: Synthetic polypeptide
  XENP021569 7G8_H3.1_L0.34_Fab Heavy Chain

SEQ ID NO: 31705 - protein, 121 aa, Artificial Sequence; identical to SEQ ID NO: 28945
  Description of Artificial Sequence: Synthetic polypeptide
  VH of XENP021569

SEQ ID NO: 31706 - protein, 5 aa, Artificial Sequence
  Description of Artificial Sequence: Synthetic peptide
  XENP021569 vhCDR1
DAWMD

SEQ ID NO: 31707 - protein, 19 aa, Artificial Sequence
  Description of Artificial Sequence: Synthetic peptide
  XENP021569 vhCDR2
EIRTKANNHATYYAESVKG

SEQ ID NO: 31708 - protein, 10 aa, Artificial Sequence
  Description of Artificial Sequence: Synthetic peptide
  XENP021569 vhCDR3
LATWDWYFDV

SEQ ID NO: 31709 - protein, 218 aa, Artificial Sequence; identical to SEQ ID NO: 20030
  Description of Artificial Sequence: Synthetic polypeptide
  XENP021569 7G8_H3.1_L0.34_Fab Light Chain

SEQ ID NO: 31710 - protein, 111 aa, Artificial Sequence; identical to SEQ ID NO: 20031
  Description of Artificial Sequence: Synthetic polypeptide
  VL of XENP021569

SEQ ID NO: 31711 - protein, 15 aa, Artificial Sequence
  Description of Artificial Sequence: Synthetic peptide
  XENP021569 vlCDR1
KASQSVDYDDDSYMN

SEQ ID NO: 31712 - protein, 7 aa, Artificial Sequence
  Description of Artificial Sequence: Synthetic peptide
  XENP021569 vlCDR2
AASNLES

SEQ ID NO: 31713 - protein, 9 aa, Artificial Sequence
  Description of Artificial Sequence: Synthetic peptide
  XENP021569 vlCDR3
QQSNEDPFT

SEQ ID NO: 31714 - protein, 226 aa, Artificial Sequence; identical to SEQ ID NO: 28974
  Description of Artificial Sequence: Synthetic polypeptide
  XENP021570 7G8_H3.4_L0.34_Fab Heavy Chain

SEQ ID NO: 31715 - protein, 121 aa, Artificial Sequence; identical to SEQ ID NO: 28975
  Description of Artificial Sequence: Synthetic polypeptide
  VH of XENP021570

SEQ ID NO: 31716 - protein, 5 aa, Artificial Sequence
  Description of Artificial Sequence: Synthetic peptide
  XENP021570 vhCDR1
DAWMD

SEQ ID NO: 31717 - protein, 19 aa, Artificial Sequence
  Description of Artificial Sequence: Synthetic peptide
  XENP021570 vhCDR2
EIRTKANNHATYYAESVKG

SEQ ID NO: 31718 - protein, 10 aa, Artificial Sequence
  Description of Artificial Sequence: Synthetic peptide
  XENP021570 vhCDR3
LATWDWYFDV

SEQ ID NO: 31719 - protein, 218 aa, Artificial Sequence; identical to SEQ ID NO: 20030
  Description of Artificial Sequence: Synthetic polypeptide
  XENP021570 7G8_H3.4_L0.34_Fab Light Chain

SEQ ID NO: 31720 - protein, 111 aa, Artificial Sequence; identical to SEQ ID NO: 20031
  Description of Artificial Sequence: Synthetic polypeptide
  VL of XENP021570

SEQ ID NO: 31721 - protein, 15 aa, Artificial Sequence
  Description of Artificial Sequence: Synthetic peptide
  XENP021570 vlCDR1
KASQSVDYDDDSYMN

SEQ ID NO: 31722 - protein, 7 aa, Artificial Sequence
  Description of Artificial Sequence: Synthetic peptide
  XENP021570 vlCDR2
AASNLES

SEQ ID NO: 31723 - protein, 9 aa, Artificial Sequence
  Description of Artificial Sequence: Synthetic peptide
  XENP021570 vlCDR3
QQSNEDPFT

SEQ ID NO: 31724 - protein, 226 aa, Artificial Sequence; identical to SEQ ID NO: 30404
  Description of Artificial Sequence: Synthetic polypeptide
  XENP021571 7G8_H0.129_L0.34_Fab Heavy Chain

SEQ ID NO: 31725 - protein, 121 aa, Artificial Sequence; identical to SEQ ID NO: 19496
  Description of Artificial Sequence: Synthetic polypeptide
  VH of XENP021571

SEQ ID NO: 31726 - protein, 5 aa, Artificial Sequence
  Description of Artificial Sequence: Synthetic peptide
  XENP021571 vhCDR1
DAWMD

SEQ ID NO: 31727 - protein, 19 aa, Artificial Sequence
  Description of Artificial Sequence: Synthetic peptide
  XENP021571 vhCDR2
EIRTKANNHATYYAESVKG

SEQ ID NO: 31728 - protein, 10 aa, Artificial Sequence
  Description of Artificial Sequence: Synthetic peptide
  XENP021571 vhCDR3
LATWDWYFDV

SEQ ID NO: 31729 - protein, 218 aa, Artificial Sequence; identical to SEQ ID NO: 20030
  Description of Artificial Sequence: Synthetic polypeptide
  XENP021571 7G8_H0.129_L0.34_Fab Light Chain

SEQ ID NO: 31730 - protein, 111 aa, Artificial Sequence; identical to SEQ ID NO: 20031
  Description of Artificial Sequence: Synthetic polypeptide
  VL of XENP021571

SEQ ID NO: 31731 - protein, 15 aa, Artificial Sequence
  Description of Artificial Sequence: Synthetic peptide
  XENP021571 vlCDR1
KASQSVDYDDDSYMN

SEQ ID NO: 31732 - protein, 7 aa, Artificial Sequence
  Description of Artificial Sequence: Synthetic peptide
  XENP021571 vlCDR2
AASNLES

SEQ ID NO: 31733 - protein, 9 aa, Artificial Sequence
  Description of Artificial Sequence: Synthetic peptide
  XENP021571 vlCDR3
QQSNEDPFT

SEQ ID NO: 31734 - protein, 226 aa, Artificial Sequence
  Description of Artificial Sequence: Synthetic polypeptide
  XENP021662 7G8_H3.18_L1_Fab Heavy Chain
EVQLVESGGGLVQPGGSLRLSCAASGFTFDDAWMDWVRQAPGKGLEWVAEISTKANNHATYYAESVKGRFTISRDDSKSSVYLQMNSLRAEDTAVYYCTRLATWDWYFDVWGQGTTVTVSSASTKGPSVFPLAPSSKSTSGGTAALGCLVKDYFPEPVTVSWNSGALTSGVHTFPAVLQSSGLYSLSSVVTVPSSSLGTQTYICNVNHKPSNTKVDKKVEPKSCGS

SEQ ID NO: 31735 - protein, 121 aa, Artificial Sequence; identical to SEQ ID NO: 22325
  Description of Artificial Sequence: Synthetic polypeptide
  VH of XENP021662

SEQ ID NO: 31736 - protein, 5 aa, Artificial Sequence
  Description of Artificial Sequence: Synthetic peptide
  XENP021662 vhCDR1
DAWMD

SEQ ID NO: 31737 - protein, 19 aa, Artificial Sequence
  Description of Artificial Sequence: Synthetic peptide
  XENP021662 vhCDR2
EISTKANNHATYYAESVKG

SEQ ID NO: 31738 - protein, 10 aa, Artificial Sequence
  Description of Artificial Sequence: Synthetic peptide
  XENP021662 vhCDR3
LATWDWYFDV

SEQ ID NO: 31739 - protein, 218 aa, Artificial Sequence; identical to SEQ ID NO: 17600
  Description of Artificial Sequence: Synthetic polypeptide
  XENP021662 7G8_H3.18_L1_Fab Light Chain

SEQ ID NO: 31740 - protein, 111 aa, Artificial Sequence; identical to SEQ ID NO: 17601
  Description of Artificial Sequence: Synthetic polypeptide
  VL of XENP021662

SEQ ID NO: 31741 - protein, 15 aa, Artificial Sequence
  Description of Artificial Sequence: Synthetic peptide
  XENP021662 vlCDR1
RASQSVDYDGDSYMN

SEQ ID NO: 31742 - protein, 7 aa, Artificial Sequence
  Description of Artificial Sequence: Synthetic peptide
  XENP021662 vlCDR2
AASNLES

SEQ ID NO: 31743 - protein, 9 aa, Artificial Sequence
  Description of Artificial Sequence: Synthetic peptide
  XENP021662 vlCDR3
QQSNEDPFT

SEQ ID NO: 31744 - protein, 226 aa, Artificial Sequence
  Description of Artificial Sequence: Synthetic polypeptide
  XENP021663 7G8_H3.15_L1_Fab Heavy Chain
EVQLVESGGGLVQPGGSLRLSCAASGDTFDDAWMDWVRQAPGKGLEWVAEISTKANNHATYYAESVKGRFTISRDDSKSSVYLQMNSLRAEDTAVYYCTRLATWDWYFDVWGQGTTVTVSSASTKGPSVFPLAPSSKSTSGGTAALGCLVKDYFPEPVTVSWNSGALTSGVHTFPAVLQSSGLYSLSSVVTVPSSSLGTQTYICNVNHKPSNTKVDKKVEPKSCGS

SEQ ID NO: 31745 - protein, 121 aa, Artificial Sequence; identical to SEQ ID NO: 22365
  Description of Artificial Sequence: Synthetic polypeptide
  VH of XENP021663

SEQ ID NO: 31746 - protein, 5 aa, Artificial Sequence
  Description of Artificial Sequence: Synthetic peptide
  XENP021663 vhCDR1
DAWMD

SEQ ID NO: 31747 - protein, 19 aa, Artificial Sequence
  Description of Artificial Sequence: Synthetic peptide
  XENP021663 vhCDR2
EISTKANNHATYYAESVKG

SEQ ID NO: 31748 - protein, 10 aa, Artificial Sequence
  Description of Artificial Sequence: Synthetic peptide
  XENP021663 vhCDR3
LATWDWYFDV

SEQ ID NO: 31749 - protein, 218 aa, Artificial Sequence; identical to SEQ ID NO: 17600
  Description of Artificial Sequence: Synthetic polypeptide
  XENP021663 7G8_H3.15_L1_Fab Light Chain

SEQ ID NO: 31750 - protein, 111 aa, Artificial Sequence; identical to SEQ ID NO: 17601
  Description of Artificial Sequence: Synthetic polypeptide
  VL of XENP021663

SEQ ID NO: 31751 - protein, 15 aa, Artificial Sequence
  Description of Artificial Sequence: Synthetic peptide
  XENP021663 vlCDR1
RASQSVDYDGDSYMN

SEQ ID NO: 31752 - protein, 7 aa, Artificial Sequence
  Description of Artificial Sequence: Synthetic peptide
  XENP021663 vlCDR2
AASNLES

SEQ ID NO: 31753 - protein, 9 aa, Artificial Sequence
  Description of Artificial Sequence: Synthetic peptide
  XENP021663 vlCDR3
QQSNEDPFT

SEQ ID NO: 31754 - protein, 226 aa, Artificial Sequence
  Description of Artificial Sequence: Synthetic polypeptide
  XENP021664 7G8_H3.19_L1_Fab Heavy Chain
EVQLVESGGGLVQPGGSLRLSCAASGFTFDDAWMDWVRQAPGKGLEWVAEIRTKAYNHATYYAESVKGRFTISRDDSKSSVYLQMNSLRAEDTAVYYCTRLATWDWYFDVWGQGTTVTVSSASTKGPSVFPLAPSSKSTSGGTAALGCLVKDYFPEPVTVSWNSGALTSGVHTFPAVLQSSGLYSLSSVVTVPSSSLGTQTYICNVNHKPSNTKVDKKVEPKSCGS

SEQ ID NO: 31755 - protein, 121 aa, Artificial Sequence
  Description of Artificial Sequence: Synthetic polypeptide
  VH of XENP021664
EVQLVESGGGLVQPGGSLRLSCAASGFTFDDAWMDWVRQAPGKGLEWVAEIRTKAYNHATYYAESVKGRFTISRDDSKSSVYLQMNSLRAEDTAVYYCTRLATWDWYFDVWGQGTTVTVSS

SEQ ID NO: 31756 - protein, 5 aa, Artificial Sequence
  Description of Artificial Sequence: Synthetic peptide
  XENP021664 vhCDR1
DAWMD

SEQ ID NO: 31757 - protein, 19 aa, Artificial Sequence
  Description of Artificial Sequence: Synthetic peptide
  XENP021664 vhCDR2
EIRTKAYNHATYYAESVKG

SEQ ID NO: 31758 - protein, 10 aa, Artificial Sequence
  Description of Artificial Sequence: Synthetic peptide
  XENP021664 vhCDR3
LATWDWYFDV

SEQ ID NO: 31759 - protein, 218 aa, Artificial Sequence; identical to SEQ ID NO: 17600
  Description of Artificial Sequence: Synthetic polypeptide
  XENP021664 7G8_H3.19_L1_Fab Light Chain

SEQ ID NO: 31760 - protein, 111 aa, Artificial Sequence; identical to SEQ ID NO: 17601
  Description of Artificial Sequence: Synthetic polypeptide
  VL of XENP021664

SEQ ID NO: 31761 - protein, 15 aa, Artificial Sequence
  Description of Artificial Sequence: Synthetic peptide
  XENP021664 vlCDR1
RASQSVDYDGDSYMN

SEQ ID NO: 31762 - protein, 7 aa, Artificial Sequence
  Description of Artificial Sequence: Synthetic peptide
  XENP021664 vlCDR2
AASNLES

SEQ ID NO: 31763 - protein, 9 aa, Artificial Sequence
  Description of Artificial Sequence: Synthetic peptide
  XENP021664 vlCDR3
QQSNEDPFT

SEQ ID NO: 31764 - protein, 226 aa, Artificial Sequence
  Description of Artificial Sequence: Synthetic polypeptide
  XENP021665 7G8_H3.17_L1_Fab Heavy Chain
EVQLVESGGGLVQPGGSLRLSCAASGDTFDDAWMDWVRQAPGKGLEWVAEIRTKAYNHATYYAESVKGRFTISRDDSKSSVYLQMNSLRAEDTAVYYCTRLATWDWYFDVWGQGTTVTVSSASTKGPSVFPLAPSSKSTSGGTAALGCLVKDYFPEPVTVSWNSGALTSGVHTFPAVLQSSGLYSLSSVVTVPSSSLGTQTYICNVNHKPSNTKVDKKVEPKSCGS

SEQ ID NO: 31765 - protein, 121 aa, Artificial Sequence
  Description of Artificial Sequence: Synthetic polypeptide
  VH of XENP021665
EVQLVESGGGLVQPGGSLRLSCAASGDTFDDAWMDWVRQAPGKGLEWVAEIRTKAYNHATYYAESVKGRFTISRDDSKSSVYLQMNSLRAEDTAVYYCTRLATWDWYFDVWGQGTTVTVSS

SEQ ID NO: 31766 - protein, 5 aa, Artificial Sequence
  Description of Artificial Sequence: Synthetic peptide
  XENP021665 vhCDR1
DAWMD

SEQ ID NO: 31767 - protein, 19 aa, Artificial Sequence
  Description of Artificial Sequence: Synthetic peptide
  XENP021665 vhCDR2
EIRTKAYNHATYYAESVKG

SEQ ID NO: 31768 - protein, 10 aa, Artificial Sequence
  Description of Artificial Sequence: Synthetic peptide
  XENP021665 vhCDR3
LATWDWYFDV

SEQ ID NO: 31769 - protein, 218 aa, Artificial Sequence; identical to SEQ ID NO: 17600
  Description of Artificial Sequence: Synthetic polypeptide
  XENP021665 7G8_H3.17_L1_Fab Light Chain

SEQ ID NO: 31770 - protein, 111 aa, Artificial Sequence; identical to SEQ ID NO: 17601
  Description of Artificial Sequence: Synthetic polypeptide
  VL of XENP021665

SEQ ID NO: 31771 - protein, 15 aa, Artificial Sequence
  Description of Artificial Sequence: Synthetic peptide
  XENP021665 vlCDR1
RASQSVDYDGDSYMN

SEQ ID NO: 31772 - protein, 7 aa, Artificial Sequence
  Description of Artificial Sequence: Synthetic peptide
  XENP021665 vlCDR2
AASNLES

SEQ ID NO: 31773 - protein, 9 aa, Artificial Sequence
  Description of Artificial Sequence: Synthetic peptide
  XENP021665 vlCDR3
QQSNEDPFT

SEQ ID NO: 31774 - protein, 226 aa, Artificial Sequence
  Description of Artificial Sequence: Synthetic polypeptide
  XENP021666 7G8_H3.16_L1_Fab Heavy Chain
EVQLVESGGGLVQPGGSLRLSCAASGDTFDDAWMDWVRQAPGKGLEWVAEIRTKANNHATDYAESVKGRFTISRDDSKSSVYLQMNSLRAEDTAVYYCTRLATWDWYFDVWGQGTTVTVSSASTKGPSVFPLAPSSKSTSGGTAALGCLVKDYFPEPVTVSWNSGALTSGVHTFPAVLQSSGLYSLSSVVTVPSSSLGTQTYICNVNHKPSNTKVDKKVEPKSCGS

SEQ ID NO: 31775 - protein, 121 aa, Artificial Sequence
  Description of Artificial Sequence: Synthetic polypeptide
  VH of XENP021666
EVQLVESGGGLVQPGGSLRLSCAASGDTFDDAWMDWVRQAPGKGLEWVAEIRTKANNHATDYAESVKGRFTISRDDSKSSVYLQMNSLRAEDTAVYYCTRLATWDWYFDVWGQGTTVTVSS

SEQ ID NO: 31776 - protein, 5 aa, Artificial Sequence
  Description of Artificial Sequence: Synthetic peptide
  XENP021666 vhCDR1
DAWMD

SEQ ID NO: 31777 - protein, 19 aa, Artificial Sequence
  Description of Artificial Sequence: Synthetic peptide
  XENP021666 vhCDR2
EIRTKANNHATDYAESVKG

SEQ ID NO: 31778 - protein, 10 aa, Artificial Sequence
  Description of Artificial Sequence: Synthetic peptide
  XENP021666 vhCDR3
LATWDWYFDV

SEQ ID NO: 31779 - protein, 218 aa, Artificial Sequence; identical to SEQ ID NO: 17600
  Description of Artificial Sequence: Synthetic polypeptide
  XENP021666 7G8_H3.16_L1_Fab Light Chain

SEQ ID NO: 31780 - protein, 111 aa, Artificial Sequence; identical to SEQ ID NO: 17601
  Description of Artificial Sequence: Synthetic polypeptide
  VL of XENP021666

SEQ ID NO: 31781 - protein, 15 aa, Artificial Sequence
  Description of Artificial Sequence: Synthetic peptide
  XENP021666 vlCDR1
RASQSVDYDGDSYMN

SEQ ID NO: 31782 - protein, 7 aa, Artificial Sequence
  Description of Artificial Sequence: Synthetic peptide
  XENP021666 vlCDR2
AASNLES

SEQ ID NO: 31783 - protein, 9 aa, Artificial Sequence
  Description of Artificial Sequence: Synthetic peptide
  XENP021666 vlCDR3
QQSNEDPFT

SEQ ID NO: 31784 - protein, 226 aa, Artificial Sequence
  Description of Artificial Sequence: Synthetic polypeptide
  XENP021667 7G8_H3.21_L1_Fab Heavy Chain
EVQLVESGGGLVQPGGSLRLSCAASGDTFDDAWMDWVRQAPGKGLEWVAEISTKAYNHATDYAESVKGRFTISRDDSKSSVYLQMNSLRAEDTAVYYCTRLATWDWYFDVWGQGTTVTVSSASTKGPSVFPLAPSSKSTSGGTAALGCLVKDYFPEPVTVSWNSGALTSGVHTFPAVLQSSGLYSLSSVVTVPSSSLGTQTYICNVNHKPSNTKVDKKVEPKSCGS

SEQ ID NO: 31785 - protein, 121 aa, Artificial Sequence
  Description of Artificial Sequence: Synthetic polypeptide
  VH of XENP021667
EVQLVESGGGLVQPGGSLRLSCAASGDTFDDAWMDWVRQAPGKGLEWVAEISTKAYNHATDYAESVKGRFTISRDDSKSSVYLQMNSLRAEDTAVYYCTRLATWDWYFDVWGQGTTVTVSS

SEQ ID NO: 31786 - protein, 5 aa, Artificial Sequence
  Description of Artificial Sequence: Synthetic peptide
  XENP021667 vhCDR1
DAWMD

SEQ ID NO: 31787 - protein, 19 aa, Artificial Sequence
  Description of Artificial Sequence: Synthetic peptide
  XENP021667 vhCDR2
EISTKAYNHATDYAESVKG

SEQ ID NO: 31788 - protein, 10 aa, Artificial Sequence
  Description of Artificial Sequence: Synthetic peptide
  XENP021667 vhCDR3
LATWDWYFDV

SEQ ID NO: 31789 - protein, 218 aa, Artificial Sequence; identical to SEQ ID NO: 17600
  Description of Artificial Sequence: Synthetic polypeptide
  XENP021667 7G8_H3.21_L1_Fab Light Chain

SEQ ID NO: 31790 - protein, 111 aa, Artificial Sequence; identical to SEQ ID NO: 17601
  Description of Artificial Sequence: Synthetic polypeptide
  VL of XENP021667

SEQ ID NO: 31791 - protein, 15 aa, Artificial Sequence
  Description of Artificial Sequence: Synthetic peptide
  XENP021667 vlCDR1
RASQSVDYDGDSYMN

SEQ ID NO: 31792 - protein, 7 aa, Artificial Sequence
  Description of Artificial Sequence: Synthetic peptide
  XENP021667 vlCDR2
AASNLES

SEQ ID NO: 31793 - protein, 9 aa, Artificial Sequence
  Description of Artificial Sequence: Synthetic peptide
  XENP021667 vlCDR3
QQSNEDPFT

SEQ ID NO: 31794 - protein, 226 aa, Artificial Sequence
  Description of Artificial Sequence: Synthetic polypeptide
  XENP021668 7G8_H3.22_L1_Fab Heavy Chain
EVQLVESGGGLVQPGGSLRLSCAASGFTFDDAWMDWVRQAPGKGLEWVAEISTKAYNHATDYAESVKGRFTISRDDSKSSVYLQMNSLRAEDTAVYYCTRLATWDWYFDVWGQGTTVTVSSASTKGPSVFPLAPSSKSTSGGTAALGCLVKDYFPEPVTVSWNSGALTSGVHTFPAVLQSSGLYSLSSVVTVPSSSLGTQTYICNVNHKPSNTKVDKKVEPKSCGS

SEQ ID NO: 31795 - protein, 121 aa, Artificial Sequence
  Description of Artificial Sequence: Synthetic polypeptide
  VH of XENP021668
EVQLVESGGGLVQPGGSLRLSCAASGFTFDDAWMDWVRQAPGKGLEWVAEISTKAYNHATDYAESVKGRFTISRDDSKSSVYLQMNSLRAEDTAVYYCTRLATWDWYFDVWGQGTTVTVSS

SEQ ID NO: 31796 - protein, 5 aa, Artificial Sequence
  Description of Artificial Sequence: Synthetic peptide
  XENP021668 vhCDR1
DAWMD

SEQ ID NO: 31797 - protein, 19 aa, Artificial Sequence
  Description of Artificial Sequence: Synthetic peptide
  XENP021668 vhCDR2
EISTKAYNHATDYAESVKG

SEQ ID NO: 31798 - protein, 10 aa, Artificial Sequence
  Description of Artificial Sequence: Synthetic peptide
  XENP021668 vhCDR3
LATWDWYFDV

SEQ ID NO: 31799 - protein, 218 aa, Artificial Sequence; identical to SEQ ID NO: 17600
  Description of Artificial Sequence: Synthetic polypeptide
  XENP021668 7G8_H3.22_L1_Fab Light Chain

SEQ ID NO: 31800 - protein, 111 aa, Artificial Sequence; identical to SEQ ID NO: 17601
  Description of Artificial Sequence: Synthetic polypeptide
  VL of XENP021668

SEQ ID NO: 31801 - protein, 15 aa, Artificial Sequence
  Description of Artificial Sequence: Synthetic peptide
  XENP021668 vlCDR1
RASQSVDYDGDSYMN

SEQ ID NO: 31802 - protein, 7 aa, Artificial Sequence
  Description of Artificial Sequence: Synthetic peptide
  XENP021668 vlCDR2
AASNLES

SEQ ID NO: 31803 - protein, 9 aa, Artificial Sequence
  Description of Artificial Sequence: Synthetic peptide
  XENP021668 vlCDR3
QQSNEDPFT

SEQ ID NO: 31804 - protein, 226 aa, Artificial Sequence
  Description of Artificial Sequence: Synthetic polypeptide
  XENP021669 7G8_H3.23_L1_Fab Heavy Chain
EVQLVESGGGLVQPGGSLRLSCAASGFTFSDAWMDWVRQAPGKGLEWVAEISTKANNHATYYAESVKGRFTISRDDSKSSVYLQMNSLRAEDTAVYYCTRLATWDWYFDVWGQGTTVTVSSASTKGPSVFPLAPSSKSTSGGTAALGCLVKDYFPEPVTVSWNSGALTSGVHTFPAVLQSSGLYSLSSVVTVPSSSLGTQTYICNVNHKPSNTKVDKKVEPKSCGS

SEQ ID NO: 31805 - protein, 121 aa, Artificial Sequence; identical to SEQ ID NO: 22385
  Description of Artificial Sequence: Synthetic polypeptide
  VH of XENP021669

SEQ ID NO: 31806 - protein, 5 aa, Artificial Sequence
  Description of Artificial Sequence: Synthetic peptide
  XENP021669 vhCDR1
DAWMD

SEQ ID NO: 31807 - protein, 19 aa, Artificial Sequence
  Description of Artificial Sequence: Synthetic peptide
  XENP021669 vhCDR2
EISTKANNHATYYAESVKG

SEQ ID NO: 31808 - protein, 10 aa, Artificial Sequence
  Description of Artificial Sequence: Synthetic peptide
  XENP021669 vhCDR3
LATWDWYFDV

SEQ ID NO: 31809 - protein, 218 aa, Artificial Sequence; identical to SEQ ID NO: 17600
  Description of Artificial Sequence: Synthetic polypeptide
  XENP021669 7G8_H3.23_L1_Fab Light Chain

SEQ ID NO: 31810 - protein, 111 aa, Artificial Sequence; identical to SEQ ID NO: 17601
  Description of Artificial Sequence: Synthetic polypeptide
  VL of XENP021669

SEQ ID NO: 31811 - protein, 15 aa, Artificial Sequence
  Description of Artificial Sequence: Synthetic peptide
  XENP021669 vlCDR1
RASQSVDYDGDSYMN

SEQ ID NO: 31812 - protein, 7 aa, Artificial Sequence
  Description of Artificial Sequence: Synthetic peptide
  XENP021669 vlCDR2
AASNLES

SEQ ID NO: 31813 - protein, 9 aa, Artificial Sequence
  Description of Artificial Sequence: Synthetic peptide
  XENP021669 vlCDR3
QQSNEDPFT

SEQ ID NO: 31814 - protein, 226 aa, Artificial Sequence; identical to SEQ ID NO: 31734
  Description of Artificial Sequence: Synthetic polypeptide
  XENP021670 7G8_H3.18_L1.11_Fab Heavy Chain

SEQ ID NO: 31815 - protein, 121 aa, Artificial Sequence; identical to SEQ ID NO: 22325
  Description of Artificial Sequence: Synthetic polypeptide
  VH of XENP021670

SEQ ID NO: 31816 - protein, 5 aa, Artificial Sequence
  Description of Artificial Sequence: Synthetic peptide
  XENP021670 vhCDR1
DAWMD

SEQ ID NO: 31817 - protein, 19 aa, Artificial Sequence
  Description of Artificial Sequence: Synthetic peptide
  XENP021670 vhCDR2
EISTKANNHATYYAESVKG

SEQ ID NO: 31818 - protein, 10 aa, Artificial Sequence
  Description of Artificial Sequence: Synthetic peptide
  XENP021670 vhCDR3
LATWDWYFDV

SEQ ID NO: 31819 - protein, 218 aa, Artificial Sequence; identical to SEQ ID NO: 22359
  Description of Artificial Sequence: Synthetic polypeptide
  XENP021670 7G8_H3.18_L1.11_Fab Light Chain

SEQ ID NO: 31820 - protein, 111 aa, Artificial Sequence; identical to SEQ ID NO: 22360
  Description of Artificial Sequence: Synthetic polypeptide
  VL of XENP021670

SEQ ID NO: 31821 - protein, 15 aa, Artificial Sequence
  Description of Artificial Sequence: Synthetic peptide
  XENP021670 vlCDR1
RASQSVDYDGDSYMN

SEQ ID NO: 31822 - protein, 7 aa, Artificial Sequence
  Description of Artificial Sequence: Synthetic peptide
  XENP021670 vlCDR2
AASELES

SEQ ID NO: 31823 - protein, 9 aa, Artificial Sequence
  Description of Artificial Sequence: Synthetic peptide
  XENP021670 vlCDR3
QQSNEDPFT

SEQ ID NO: 31824 - protein, 226 aa, Artificial Sequence; identical to SEQ ID NO: 31744
  Description of Artificial Sequence: Synthetic polypeptide
  XENP021671 7G8_H3.15_L1.11_Fab Heavy Chain

SEQ ID NO: 31825 - protein, 121 aa, Artificial Sequence; identical to SEQ ID NO: 22365
  Description of Artificial Sequence: Synthetic polypeptide
  VH of XENP021671

SEQ ID NO: 31826 - protein, 5 aa, Artificial Sequence
  Description of Artificial Sequence: Synthetic peptide
  XENP021671 vhCDR1
DAWMD

SEQ ID NO: 31827 - protein, 19 aa, Artificial Sequence
  Description of Artificial Sequence: Synthetic peptide
  XENP021671 vhCDR2
EISTKANNHATYYAESVKG

SEQ ID NO: 31828 - protein, 10 aa, Artificial Sequence
  Description of Artificial Sequence: Synthetic peptide
  XENP021671 vhCDR3
LATWDWYFDV

SEQ ID NO: 31829 - protein, 218 aa, Artificial Sequence; identical to SEQ ID NO: 22359
  Description of Artificial Sequence: Synthetic polypeptide
  XENP021671 7G8_H3.15_L1.11_Fab Light Chain

SEQ ID NO: 31830 - protein, 111 aa, Artificial Sequence; identical to SEQ ID NO: 22360
  Description of Artificial Sequence: Synthetic polypeptide
  VL of XENP021671

SEQ ID NO: 31831 - protein, 15 aa, Artificial Sequence
  Description of Artificial Sequence: Synthetic peptide
  XENP021671 vlCDR1
RASQSVDYDGDSYMN

SEQ ID NO: 31832 - protein, 7 aa, Artificial Sequence
  Description of Artificial Sequence: Synthetic peptide
  XENP021671 vlCDR2
AASELES

SEQ ID NO: 31833 - protein, 9 aa, Artificial Sequence
  Description of Artificial Sequence: Synthetic peptide
  XENP021671 vlCDR3
QQSNEDPFT

SEQ ID NO: 31834 - protein, 226 aa, Artificial Sequence; identical to SEQ ID NO: 31754
  Description of Artificial Sequence: Synthetic polypeptide
  XENP021672 7G8_H3.19_L1.11_Fab Heavy Chain

SEQ ID NO: 31835 - protein, 121 aa, Artificial Sequence; identical to SEQ ID NO: 31755
  Description of Artificial Sequence: Synthetic polypeptide
  VH of XENP021672

SEQ ID NO: 31836 - protein, 5 aa, Artificial Sequence
  Description of Artificial Sequence: Synthetic peptide
  XENP021672 vhCDR1
DAWMD

SEQ ID NO: 31837 - protein, 19 aa, Artificial Sequence
  Description of Artificial Sequence: Synthetic peptide
  XENP021672 vhCDR2
EIRTKAYNHATYYAESVKG

SEQ ID NO: 31838 - protein, 10 aa, Artificial Sequence
  Description of Artificial Sequence: Synthetic peptide
  XENP021672 vhCDR3
LATWDWYFDV

SEQ ID NO: 31839 - protein, 218 aa, Artificial Sequence; identical to SEQ ID NO: 22359
  Description of Artificial Sequence: Synthetic polypeptide
  XENP021672 7G8_H3.19_L1.11_Fab Light Chain

SEQ ID NO: 31840 - protein, 111 aa, Artificial Sequence; identical to SEQ ID NO: 22360
  Description of Artificial Sequence: Synthetic polypeptide
  VL of XENP021672

SEQ ID NO: 31841 - protein, 15 aa, Artificial Sequence
  Description of Artificial Sequence: Synthetic peptide
  XENP021672 vlCDR1
RASQSVDYDGDSYMN

SEQ ID NO: 31842 - protein, 7 aa, Artificial Sequence
  Description of Artificial Sequence: Synthetic peptide
  XENP021672 vlCDR2
AASELES

SEQ ID NO: 31843 - protein, 9 aa, Artificial Sequence
  Description of Artificial Sequence: Synthetic peptide
  XENP021672 vlCDR3
QQSNEDPFT

SEQ ID NO: 31844 - protein, 226 aa, Artificial Sequence; identical to SEQ ID NO: 31764
  Description of Artificial Sequence: Synthetic polypeptide
  XENP021673 7G8_H3.17_L1.11_Fab Heavy Chain

SEQ ID NO: 31845 - protein, 121 aa, Artificial Sequence; identical to SEQ ID NO: 31765
  Description of Artificial Sequence: Synthetic polypeptide
  VH of XENP021673

SEQ ID NO: 31846 - protein, 5 aa, Artificial Sequence
  Description of Artificial Sequence: Synthetic peptide
  XENP021673 vhCDR1
DAWMD

SEQ ID NO: 31847 - protein, 19 aa, Artificial Sequence
  Description of Artificial Sequence: Synthetic peptide
  XENP021673 vhCDR2
EIRTKAYNHATYYAESVKG

SEQ ID NO: 31848 - protein, 10 aa, Artificial Sequence
  Description of Artificial Sequence: Synthetic peptide
  XENP021673 vhCDR3
LATWDWYFDV

SEQ ID NO: 31849 - protein, 218 aa, Artificial Sequence; identical to SEQ ID NO: 22359
  Description of Artificial Sequence: Synthetic polypeptide
  XENP021673 7G8_H3.17_L1.11_Fab Light Chain

SEQ ID NO: 31850 - protein, 111 aa, Artificial Sequence; identical to SEQ ID NO: 22360
  Description of Artificial Sequence: Synthetic polypeptide
  VL of XENP021673

SEQ ID NO: 31851 - protein, 15 aa, Artificial Sequence
  Description of Artificial Sequence: Synthetic peptide
  XENP021673 vlCDR1
RASQSVDYDGDSYMN

SEQ ID NO: 31852 - protein, 7 aa, Artificial Sequence
  Description of Artificial Sequence: Synthetic peptide
  XENP021673 vlCDR2
AASELES

SEQ ID NO: 31853 - protein, 9 aa, Artificial Sequence
  Description of Artificial Sequence: Synthetic peptide
  XENP021673 vlCDR3
QQSNEDPFT

SEQ ID NO: 31854 - protein, 226 aa, Artificial Sequence; identical to SEQ ID NO: 31774
  Description of Artificial Sequence: Synthetic polypeptide
  XENP021674 7G8_H3.16_L1.11_Fab Heavy Chain

SEQ ID NO: 31855 - protein, 121 aa, Artificial Sequence; identical to SEQ ID NO: 31775
  Description of Artificial Sequence: Synthetic polypeptide
  VH of XENP021674

SEQ ID NO: 31856 - protein, 5 aa, Artificial Sequence
  Description of Artificial Sequence: Synthetic peptide
  XENP021674 vhCDR1
DAWMD

SEQ ID NO: 31857 - protein, 19 aa, Artificial Sequence
  Description of Artificial Sequence: Synthetic peptide
  XENP021674 vhCDR2
EIRTKANNHATDYAESVKG

SEQ ID NO: 31858 - protein, 10 aa, Artificial Sequence
  Description of Artificial Sequence: Synthetic peptide
  XENP021674 vhCDR3
LATWDWYFDV

SEQ ID NO: 31859 - protein, 218 aa, Artificial Sequence; identical to SEQ ID NO: 22359
  Description of Artificial Sequence: Synthetic polypeptide
  XENP021674 7G8_H3.16_L1.11_Fab Light Chain

SEQ ID NO: 31860 - protein, 111 aa, Artificial Sequence; identical to SEQ ID NO: 22360
  Description of Artificial Sequence: Synthetic polypeptide
  VL of XENP021674

SEQ ID NO: 31861 - protein, 15 aa, Artificial Sequence
  Description of Artificial Sequence: Synthetic peptide
  XENP021674 vlCDR1
RASQSVDYDGDSYMN

SEQ ID NO: 31862 - protein, 7 aa, Artificial Sequence
  Description of Artificial Sequence: Synthetic peptide
  XENP021674 vlCDR2
AASELES

SEQ ID NO: 31863 - protein, 9 aa, Artificial Sequence
  Description of Artificial Sequence: Synthetic peptide
  XENP021674 vlCDR3
QQSNEDPFT

SEQ ID NO: 31864 - protein, 226 aa, Artificial Sequence; identical to SEQ ID NO: 31784
  Description of Artificial Sequence: Synthetic polypeptide
  XENP021675 7G8_H3.21_L1.11_Fab Heavy Chain

SEQ ID NO: 31865 - protein, 121 aa, Artificial Sequence; identical to SEQ ID NO: 31785
  Description of Artificial Sequence: Synthetic polypeptide
  VH of XENP021675

SEQ ID NO: 31866 - protein, 5 aa, Artificial Sequence
  Description of Artificial Sequence: Synthetic peptide
  XENP021675 vhCDR1
DAWMD

SEQ ID NO: 31867 - protein, 19 aa, Artificial Sequence
  Description of Artificial Sequence: Synthetic peptide
  XENP021675 vhCDR2
EISTKAYNHATDYAESVKG

SEQ ID NO: 31868 - protein, 10 aa, Artificial Sequence
  Description of Artificial Sequence: Synthetic peptide
  XENP021675 vhCDR3
LATWDWYFDV

SEQ ID NO: 31869 - protein, 218 aa, Artificial Sequence; identical to SEQ ID NO: 22359
  Description of Artificial Sequence: Synthetic polypeptide
  XENP021675 7G8_H3.21_L1.11_Fab Light Chain

SEQ ID NO: 31870 - protein, 111 aa, Artificial Sequence; identical to SEQ ID NO: 22360
  Description of Artificial Sequence: Synthetic polypeptide
  VL of XENP021675

SEQ ID NO: 31871 - protein, 15 aa, Artificial Sequence
  Description of Artificial Sequence: Synthetic peptide
  XENP021675 vlCDR1
RASQSVDYDGDSYMN

SEQ ID NO: 31872 - protein, 7 aa, Artificial Sequence
  Description of Artificial Sequence: Synthetic peptide
  XENP021675 vlCDR2
AASELES

SEQ ID NO: 31873 - protein, 9 aa, Artificial Sequence
  Description of Artificial Sequence: Synthetic peptide
  XENP021675 vlCDR3
QQSNEDPFT

SEQ ID NO: 31874 - protein, 226 aa, Artificial Sequence; identical to SEQ ID NO: 31794
  Description of Artificial Sequence: Synthetic polypeptide
  XENP021676 7G8_H3.22_L1.11_Fab Heavy Chain

SEQ ID NO: 31875 - protein, 121 aa, Artificial Sequence; identical to SEQ ID NO: 31795
  Description of Artificial Sequence: Synthetic polypeptide
  VH of XENP021676

SEQ ID NO: 31876 - protein, 5 aa, Artificial Sequence
  Description of Artificial Sequence: Synthetic peptide
  XENP021676 vhCDR1
DAWMD

SEQ ID NO: 31877 - protein, 19 aa, Artificial Sequence
  Description of Artificial Sequence: Synthetic peptide
  XENP021676 vhCDR2
EISTKAYNHATDYAESVKG

SEQ ID NO: 31878 - protein, 10 aa, Artificial Sequence
  Description of Artificial Sequence: Synthetic peptide
  XENP021676 vhCDR3
LATWDWYFDV

SEQ ID NO: 31879 - protein, 218 aa, Artificial Sequence; identical to SEQ ID NO: 22359
  Description of Artificial Sequence: Synthetic polypeptide
  XENP021676 7G8_H3.22_L1.11_Fab Light Chain

SEQ ID NO: 31880 - protein, 111 aa, Artificial Sequence; identical to SEQ ID NO: 22360
  Description of Artificial Sequence: Synthetic polypeptide
  VL of XENP021676

SEQ ID NO: 31881 - protein, 15 aa, Artificial Sequence
  Description of Artificial Sequence: Synthetic peptide
  XENP021676 vlCDR1
RASQSVDYDGDSYMN

SEQ ID NO: 31882 - protein, 7 aa, Artificial Sequence
  Description of Artificial Sequence: Synthetic peptide
  XENP021676 vlCDR2
AASELES

SEQ ID NO: 31883 - protein, 9 aa, Artificial Sequence
  Description of Artificial Sequence: Synthetic peptide
  XENP021676 vlCDR3
QQSNEDPFT

SEQ ID NO: 31884 - protein, 226 aa, Artificial Sequence; identical to SEQ ID NO: 31804
  Description of Artificial Sequence: Synthetic polypeptide
  XENP021677 7G8_H3.23_L1.11_Fab Heavy Chain

SEQ ID NO: 31885 - protein, 121 aa, Artificial Sequence; identical to SEQ ID NO: 22385
  Description of Artificial Sequence: Synthetic polypeptide
  VH of XENP021677

SEQ ID NO: 31886 - protein, 5 aa, Artificial Sequence
  Description of Artificial Sequence: Synthetic peptide
  XENP021677 vhCDR1
DAWMD

SEQ ID NO: 31887 - protein, 19 aa, Artificial Sequence
  Description of Artificial Sequence: Synthetic peptide
  XENP021677 vhCDR2
EISTKANNHATYYAESVKG

SEQ ID NO: 31888 - protein, 10 aa, Artificial Sequence
  Description of Artificial Sequence: Synthetic peptide
  XENP021677 vhCDR3
LATWDWYFDV

SEQ ID NO: 31889 - protein, 218 aa, Artificial Sequence; identical to SEQ ID NO: 22359
  Description of Artificial Sequence: Synthetic polypeptide
  XENP021677 7G8_H3.23_L1.11_Fab Light Chain

SEQ ID NO: 31890 - protein, 111 aa, Artificial Sequence; identical to SEQ ID NO: 22360
  Description of Artificial Sequence: Synthetic polypeptide
  VL of XENP021677

SEQ ID NO: 31891 - protein, 15 aa, Artificial Sequence
  Description of Artificial Sequence: Synthetic peptide
  XENP021677 vlCDR1
RASQSVDYDGDSYMN

SEQ ID NO: 31892 - protein, 7 aa, Artificial Sequence
  Description of Artificial Sequence: Synthetic peptide
  XENP021677 vlCDR2
AASELES

SEQ ID NO: 31893 - protein, 9 aa, Artificial Sequence
  Description of Artificial Sequence: Synthetic peptide
  XENP021677 vlCDR3
QQSNEDPFT

SEQ ID NO: 31894 - protein, 226 aa, Artificial Sequence; identical to SEQ ID NO: 31734
  Description of Artificial Sequence: Synthetic polypeptide
  XENP021678 7G8_H3.18_L1.13_Fab Heavy Chain

SEQ ID NO: 31895 - protein, 121 aa, Artificial Sequence; identical to SEQ ID NO: 22325
  Description of Artificial Sequence: Synthetic polypeptide
  VH of XENP021678

SEQ ID NO: 31896 - protein, 5 aa, Artificial Sequence
  Description of Artificial Sequence: Synthetic peptide
  XENP021678 vhCDR1
DAWMD

SEQ ID NO: 31897 - protein, 19 aa, Artificial Sequence
  Description of Artificial Sequence: Synthetic peptide
  XENP021678 vhCDR2
EISTKANNHATYYAESVKG

SEQ ID NO: 31898 - protein, 10 aa, Artificial Sequence
  Description of Artificial Sequence: Synthetic peptide
  XENP021678 vhCDR3
LATWDWYFDV

SEQ ID NO: 31899 - protein, 218 aa, Artificial Sequence; identical to SEQ ID NO: 22419
  Description of Artificial Sequence: Synthetic polypeptide
  XENP021678 7G8_H3.18_L1.13_Fab Light Chain

SEQ ID NO: 31900 - protein, 111 aa, Artificial Sequence; identical to SEQ ID NO: 22420
  Description of Artificial Sequence: Synthetic polypeptide
  VL of XENP021678

SEQ ID NO: 31901 - protein, 15 aa, Artificial Sequence
  Description of Artificial Sequence: Synthetic peptide
  XENP021678 vlCDR1
RASQSVDHDGDSYMN

SEQ ID NO: 31902 - protein, 7 aa, Artificial Sequence
  Description of Artificial Sequence: Synthetic peptide
  XENP021678 vlCDR2
AASELES

SEQ ID NO: 31903 - protein, 9 aa, Artificial Sequence
  Description of Artificial Sequence: Synthetic peptide
  XENP021678 vlCDR3
QQSNEDPFT

SEQ ID NO: 31904 - protein, 226 aa, Artificial Sequence; identical to SEQ ID NO: 31744
  Description of Artificial Sequence: Synthetic polypeptide
  XENP021679 7G8_H3.15_L1.13_Fab Heavy Chain

SEQ ID NO: 31905 - protein, 121 aa, Artificial Sequence; identical to SEQ ID NO: 22365
  Description of Artificial Sequence: Synthetic polypeptide
  VH of XENP021679

SEQ ID NO: 31906 - protein, 5 aa, Artificial Sequence
  Description of Artificial Sequence: Synthetic peptide
  XENP021679 vhCDR1
DAWMD

SEQ ID NO: 31907 - protein, 19 aa, Artificial Sequence
  Description of Artificial Sequence: Synthetic peptide
  XENP021679 vhCDR2
EISTKANNHATYYAESVKG

SEQ ID NO: 31908 - protein, 10 aa, Artificial Sequence
  Description of Artificial Sequence: Synthetic peptide
  XENP021679 vhCDR3
LATWDWYFDV

SEQ ID NO: 31909 - protein, 218 aa, Artificial Sequence; identical to SEQ ID NO: 22419
  Description of Artificial Sequence: Synthetic polypeptide
  XENP021679 7G8_H3.15_L1.13_Fab Light Chain

SEQ ID NO: 31910 - protein, 111 aa, Artificial Sequence; identical to SEQ ID NO: 22420
  Description of Artificial Sequence: Synthetic polypeptide
  VL of XENP021679

SEQ ID NO: 31911 - protein, 15 aa, Artificial Sequence
  Description of Artificial Sequence: Synthetic peptide
  XENP021679 vlCDR1
RASQSVDHDGDSYMN

SEQ ID NO: 31912 - protein, 7 aa, Artificial Sequence
  Description of Artificial Sequence: Synthetic peptide
  XENP021679 vlCDR2
AASELES

SEQ ID NO: 31913 - protein, 9 aa, Artificial Sequence
  Description of Artificial Sequence: Synthetic peptide
  XENP021679 vlCDR3
QQSNEDPFT

SEQ ID NO: 31914 - protein, 226 aa, Artificial Sequence; identical to SEQ ID NO: 31754
  Description of Artificial Sequence: Synthetic polypeptide
  XENP021680 7G8_H3.19_L1.13_Fab Heavy Chain

SEQ ID NO: 31915 - protein, 121 aa, Artificial Sequence; identical to SEQ ID NO: 31755
  Description of Artificial Sequence: Synthetic polypeptide
  VH of XENP021680

SEQ ID NO: 31916 - protein, 5 aa, Artificial Sequence
  Description of Artificial Sequence: Synthetic peptide
  XENP021680 vhCDR1
DAWMD

SEQ ID NO: 31917 - protein, 19 aa, Artificial Sequence
  Description of Artificial Sequence: Synthetic peptide
  XENP021680 vhCDR2
EIRTKAYNHATYYAESVKG

SEQ ID NO: 31918 - protein, 10 aa, Artificial Sequence
  Description of Artificial Sequence: Synthetic peptide
  XENP021680 vhCDR3
LATWDWYFDV

SEQ ID NO: 31919 - protein, 218 aa, Artificial Sequence; identical to SEQ ID NO: 22419
  Description of Artificial Sequence: Synthetic polypeptide
  XENP021680 7G8_H3.19_L1.13_Fab Light Chain

SEQ ID NO: 31920 - protein, 111 aa, Artificial Sequence; identical to SEQ ID NO: 22420
  Description of Artificial Sequence: Synthetic polypeptide
  VL of XENP021680

SEQ ID NO: 31921 - protein, 15 aa, Artificial Sequence
  Description of Artificial Sequence: Synthetic peptide
  XENP021680 vlCDR1
RASQSVDHDGDSYMN

SEQ ID NO: 31922 - protein, 7 aa, Artificial Sequence
  Description of Artificial Sequence: Synthetic peptide
  XENP021680 vlCDR2
AASELES

SEQ ID NO: 31923 - protein, 9 aa, Artificial Sequence
  Description of Artificial Sequence: Synthetic peptide
  XENP021680 vlCDR3
QQSNEDPFT

SEQ ID NO: 31924 - protein, 226 aa, Artificial Sequence; identical to SEQ ID NO: 31764
  Description of Artificial Sequence: Synthetic polypeptide
  XENP021681 7G8_H3.17_L1.13_Fab Heavy Chain

SEQ ID NO: 31925 - protein, 121 aa, Artificial Sequence; identical to SEQ ID NO: 31765
  Description of Artificial Sequence: Synthetic polypeptide
  VH of XENP021681

SEQ ID NO: 31926 - protein, 5 aa, Artificial Sequence
  Description of Artificial Sequence: Synthetic peptide
  XENP021681 vhCDR1
DAWMD

SEQ ID NO: 31927 - protein, 19 aa, Artificial Sequence
  Description of Artificial Sequence: Synthetic peptide
  XENP021681 vhCDR2
EIRTKAYNHATYYAESVKG

SEQ ID NO: 31928 - protein, 10 aa, Artificial Sequence
  Description of Artificial Sequence: Synthetic peptide
  XENP021681 vhCDR3
LATWDWYFDV

SEQ ID NO: 31929 - protein, 218 aa, Artificial Sequence; identical to SEQ ID NO: 22419
  Description of Artificial Sequence: Synthetic polypeptide
  XENP021681 7G8_H3.17_L1.13_Fab Light Chain

SEQ ID NO: 31930 - protein, 111 aa, Artificial Sequence; identical to SEQ ID NO: 22420
  Description of Artificial Sequence: Synthetic polypeptide
  VL of XENP021681

SEQ ID NO: 31931 - protein, 15 aa, Artificial Sequence
  Description of Artificial Sequence: Synthetic peptide
  XENP021681 vlCDR1
RASQSVDHDGDSYMN

SEQ ID NO: 31932 - protein, 7 aa, Artificial Sequence
  Description of Artificial Sequence: Synthetic peptide
  XENP021681 vlCDR2
AASELES

SEQ ID NO: 31933 - protein, 9 aa, Artificial Sequence
  Description of Artificial Sequence: Synthetic peptide
  XENP021681 vlCDR3
QQSNEDPFT

SEQ ID NO: 31934 - protein, 226 aa, Artificial Sequence; identical to SEQ ID NO: 31774
  Description of Artificial Sequence: Synthetic polypeptide
  XENP021682 7G8_H3.16_L1.13_Fab Heavy Chain

SEQ ID NO: 31935 - protein, 121 aa, Artificial Sequence; identical to SEQ ID NO: 31775
  Description of Artificial Sequence: Synthetic polypeptide
  VH of XENP021682

SEQ ID NO: 31936 - protein, 5 aa, Artificial Sequence
  Description of Artificial Sequence: Synthetic peptide
  XENP021682 vhCDR1
DAWMD

SEQ ID NO: 31937 - protein, 19 aa, Artificial Sequence
  Description of Artificial Sequence: Synthetic peptide
  XENP021682 vhCDR2
EIRTKANNHATDYAESVKG

SEQ ID NO: 31938 - protein, 10 aa, Artificial Sequence
  Description of Artificial Sequence: Synthetic peptide
  XENP021682 vhCDR3
LATWDWYFDV

SEQ ID NO: 31939 - protein, 218 aa, Artificial Sequence; identical to SEQ ID NO: 22419
  Description of Artificial Sequence: Synthetic polypeptide
  XENP021682 7G8_H3.16_L1.13_Fab Light Chain

SEQ ID NO: 31940 - protein, 111 aa, Artificial Sequence; identical to SEQ ID NO: 22420
  Description of Artificial Sequence: Synthetic polypeptide
  VL of XENP021682

SEQ ID NO: 31941 - protein, 15 aa, Artificial Sequence
  Description of Artificial Sequence: Synthetic peptide
  XENP021682 vlCDR1
RASQSVDHDGDSYMN

SEQ ID NO: 31942 - protein, 7 aa, Artificial Sequence
  Description of Artificial Sequence: Synthetic peptide
  XENP021682 vlCDR2
AASELES

SEQ ID NO: 31943 - protein, 9 aa, Artificial Sequence
  Description of Artificial Sequence: Synthetic peptide
  XENP021682 vlCDR3
QQSNEDPFT

SEQ ID NO: 31944 - protein, 226 aa, Artificial Sequence; identical to SEQ ID NO: 31784
  Description of Artificial Sequence: Synthetic polypeptide
  XENP021683 7G8_H3.21_L1.13_Fab Heavy Chain

SEQ ID NO: 31945 - protein, 121 aa, Artificial Sequence; identical to SEQ ID NO: 31785
  Description of Artificial Sequence: Synthetic polypeptide
  VH of XENP021683

SEQ ID NO: 31946 - protein, 5 aa, Artificial Sequence
  Description of Artificial Sequence: Synthetic peptide
  XENP021683 vhCDR1
DAWMD

SEQ ID NO: 31947 - protein, 19 aa, Artificial Sequence
  Description of Artificial Sequence: Synthetic peptide
  XENP021683 vhCDR2
EISTKAYNHATDYAESVKG

SEQ ID NO: 31948 - protein, 10 aa, Artificial Sequence
  Description of Artificial Sequence: Synthetic peptide
  XENP021683 vhCDR3
LATWDWYFDV

SEQ ID NO: 31949 - protein, 218 aa, Artificial Sequence; identical to SEQ ID NO: 22419
  Description of Artificial Sequence: Synthetic polypeptide
  XENP021683 7G8_H3.21_L1.13_Fab Light Chain

SEQ ID NO: 31950 - protein, 111 aa, Artificial Sequence; identical to SEQ ID NO: 22420
  Description of Artificial Sequence: Synthetic polypeptide
  VL of XENP021683

SEQ ID NO: 31951 - protein, 15 aa, Artificial Sequence
  Description of Artificial Sequence: Synthetic peptide
  XENP021683 vlCDR1
RASQSVDHDGDSYMN

SEQ ID NO: 31952 - protein, 7 aa, Artificial Sequence
  Description of Artificial Sequence: Synthetic peptide
  XENP021683 vlCDR2
AASELES

SEQ ID NO: 31953 - protein, 9 aa, Artificial Sequence
  Description of Artificial Sequence: Synthetic peptide
  XENP021683 vlCDR3
QQSNEDPFT

SEQ ID NO: 31954 - protein, 226 aa, Artificial Sequence; identical to SEQ ID NO: 31794
  Description of Artificial Sequence: Synthetic polypeptide
  XENP021684 7G8_H3.22_L1.13_Fab Heavy Chain

SEQ ID NO: 31955 - protein, 121 aa, Artificial Sequence; identical to SEQ ID NO: 31795
  Description of Artificial Sequence: Synthetic polypeptide
  VH of XENP021684

SEQ ID NO: 31956 - protein, 5 aa, Artificial Sequence
  Description of Artificial Sequence: Synthetic peptide
  XENP021684 vhCDR1
DAWMD

SEQ ID NO: 31957 - protein, 19 aa, Artificial Sequence
  Description of Artificial Sequence: Synthetic peptide
  XENP021684 vhCDR2
EISTKAYNHATDYAESVKG

SEQ ID NO: 31958 - protein, 10 aa, Artificial Sequence
  Description of Artificial Sequence: Synthetic peptide
  XENP021684 vhCDR3
LATWDWYFDV

SEQ ID NO: 31959 - protein, 218 aa, Artificial Sequence; identical to SEQ ID NO: 22419
  Description of Artificial Sequence: Synthetic polypeptide
  XENP021684 7G8_H3.22_L1.13_Fab Light Chain

SEQ ID NO: 31960 - protein, 111 aa, Artificial Sequence; identical to SEQ ID NO: 22420
  Description of Artificial Sequence: Synthetic polypeptide
  VL of XENP021684

SEQ ID NO: 31961 - protein, 15 aa, Artificial Sequence
  Description of Artificial Sequence: Synthetic peptide
  XENP021684 vlCDR1
RASQSVDHDGDSYMN

SEQ ID NO: 31962 - protein, 7 aa, Artificial Sequence
  Description of Artificial Sequence: Synthetic peptide
  XENP021684 vlCDR2
AASELES

SEQ ID NO: 31963 - protein, 9 aa, Artificial Sequence
  Description of Artificial Sequence: Synthetic peptide
  XENP021684 vlCDR3
QQSNEDPFT

SEQ ID NO: 31964 - protein, 226 aa, Artificial Sequence; identical to SEQ ID NO: 31804
  Description of Artificial Sequence: Synthetic polypeptide
  XENP021685 7G8_H3.23_L1.13_Fab Heavy Chain

SEQ ID NO: 31965 - protein, 121 aa, Artificial Sequence; identical to SEQ ID NO: 22385
  Description of Artificial Sequence: Synthetic polypeptide
  VH of XENP021685

SEQ ID NO: 31966 - protein, 5 aa, Artificial Sequence
  Description of Artificial Sequence: Synthetic peptide
  XENP021685 vhCDR1
DAWMD

SEQ ID NO: 31967 - protein, 19 aa, Artificial Sequence
  Description of Artificial Sequence: Synthetic peptide
  XENP021685 vhCDR2
EISTKANNHATYYAESVKG

SEQ ID NO: 31968 - protein, 10 aa, Artificial Sequence
  Description of Artificial Sequence: Synthetic peptide
  XENP021685 vhCDR3
LATWDWYFDV

SEQ ID NO: 31969 - protein, 218 aa, Artificial Sequence; identical to SEQ ID NO: 22419
  Description of Artificial Sequence: Synthetic polypeptide
  XENP021685 7G8_H3.23_L1.13_Fab Light Chain

SEQ ID NO: 31970 - protein, 111 aa, Artificial Sequence; identical to SEQ ID NO: 22420
  Description of Artificial Sequence: Synthetic polypeptide
  VL of XENP021685

SEQ ID NO: 31971 - protein, 15 aa, Artificial Sequence
  Description of Artificial Sequence: Synthetic peptide
  XENP021685 vlCDR1
RASQSVDHDGDSYMN

SEQ ID NO: 31972 - protein, 7 aa, Artificial Sequence
  Description of Artificial Sequence: Synthetic peptide
  XENP021685 vlCDR2
AASELES

SEQ ID NO: 31973 - protein, 9 aa, Artificial Sequence
  Description of Artificial Sequence: Synthetic peptide
  XENP021685 vlCDR3
QQSNEDPFT

SEQ ID NO: 31974 - protein, 226 aa, Artificial Sequence; identical to SEQ ID NO: 31734
  Description of Artificial Sequence: Synthetic polypeptide
  XENP021686 7G8_H3.18_L1.15_Fab Heavy Chain

SEQ ID NO: 31975 - protein, 121 aa, Artificial Sequence; identical to SEQ ID NO: 22325
  Description of Artificial Sequence: Synthetic polypeptide
  VH of XENP021686

SEQ ID NO: 31976 - protein, 5 aa, Artificial Sequence
  Description of Artificial Sequence: Synthetic peptide
  XENP021686 vhCDR1
DAWMD

SEQ ID NO: 31977 - protein, 19 aa, Artificial Sequence
  Description of Artificial Sequence: Synthetic peptide
  XENP021686 vhCDR2
EISTKANNHATYYAESVKG

SEQ ID NO: 31978 - protein, 10 aa, Artificial Sequence
  Description of Artificial Sequence: Synthetic peptide
  XENP021686 vhCDR3
LATWDWYFDV

SEQ ID NO: 31979 - protein, 218 aa, Artificial Sequence
  Description of Artificial Sequence: Synthetic polypeptide
  XENP021686 7G8_H3.18_L1.15_Fab Light Chain
DTVLTQSPSSLSASVGDRVTITCRASQSVDHDDDSYMNWYQQKPGKPPKLLIYAASELESGIPARLSGSGSGTDFTLTISSLQPEDFATYYCQQSNEDPFTFGSGTKLEIKRTVAAPSVFIFPPSDEQLKSGTASVVCLLNNFYPREAKVQWKVDNALQSGNSQESVTEQDSKDSTYSLSSTLTLSKADYEKHKVYACEVTHQGLSSPVTKSFNRGEC

SEQ ID NO: 31980 - protein, 111 aa, Artificial Sequence
  Description of Artificial Sequence: Synthetic polypeptide
  VL of XENP021686
DTVLTQSPSSLSASVGDRVTITCRASQSVDHDDDSYMNWYQQKPGKPPKLLIYAASELESGIPARLSGSGSGTDFTLTISSLQPEDFATYYCQQSNEDPFTFGSGTKLEIK

SEQ ID NO: 31981 - protein, 15 aa, Artificial Sequence
  Description of Artificial Sequence: Synthetic peptide
  XENP021686 vlCDR1
RASQSVDHDDDSYMN

SEQ ID NO: 31982 - protein, 7 aa, Artificial Sequence
  Description of Artificial Sequence: Synthetic peptide
  XENP021686 vlCDR2
AASELES

SEQ ID NO: 31983 - protein, 9 aa, Artificial Sequence
  Description of Artificial Sequence: Synthetic peptide
  XENP021686 vlCDR3
QQSNEDPFT

SEQ ID NO: 31984 - protein, 226 aa, Artificial Sequence; identical to SEQ ID NO: 31744
  Description of Artificial Sequence: Synthetic polypeptide
  XENP021687 7G8_H3.15_L1.15_Fab Heavy Chain

SEQ ID NO: 31985 - protein, 121 aa, Artificial Sequence; identical to SEQ ID NO: 22365
  Description of Artificial Sequence: Synthetic polypeptide
  VH of XENP021687

SEQ ID NO: 31986 - protein, 5 aa, Artificial Sequence
  Description of Artificial Sequence: Synthetic peptide
  XENP021687 vhCDR1
DAWMD

SEQ ID NO: 31987 - protein, 19 aa, Artificial Sequence
  Description of Artificial Sequence: Synthetic peptide
  XENP021687 vhCDR2
EISTKANNHATYYAESVKG

SEQ ID NO: 31988 - protein, 10 aa, Artificial Sequence
  Description of Artificial Sequence: Synthetic peptide
  XENP021687 vhCDR3
LATWDWYFDV

SEQ ID NO: 31989 - protein, 218 aa, Artificial Sequence; identical to SEQ ID NO: 31979
  Description of Artificial Sequence: Synthetic polypeptide
  XENP021687 7G8_H3.15_L1.15_Fab Light Chain

SEQ ID NO: 31990 - protein, 111 aa, Artificial Sequence; identical to SEQ ID NO: 31980
  Description of Artificial Sequence: Synthetic polypeptide
  VL of XENP021687

SEQ ID NO: 31991 - protein, 15 aa, Artificial Sequence
  Description of Artificial Sequence: Synthetic peptide
  XENP021687 vlCDR1
RASQSVDHDDDSYMN

SEQ ID NO: 31992 - protein, 7 aa, Artificial Sequence
  Description of Artificial Sequence: Synthetic peptide
  XENP021687 vlCDR2
AASELES

SEQ ID NO: 31993 - protein, 9 aa, Artificial Sequence
  Description of Artificial Sequence: Synthetic peptide
  XENP021687 vlCDR3
QQSNEDPFT

SEQ ID NO: 31994 - protein, 226 aa, Artificial Sequence; identical to SEQ ID NO: 31754
  Description of Artificial Sequence: Synthetic polypeptide
  XENP021688 7G8_H3.19_L1.15_Fab Heavy Chain

SEQ ID NO: 31995 - protein, 121 aa, Artificial Sequence; identical to SEQ ID NO: 31755
  Description of Artificial Sequence: Synthetic polypeptide
  VH of XENP021688

SEQ ID NO: 31996 - protein, 5 aa, Artificial Sequence
  Description of Artificial Sequence: Synthetic peptide
  XENP021688 vhCDR1
DAWMD

SEQ ID NO: 31997 - protein, 19 aa, Artificial Sequence
  Description of Artificial Sequence: Synthetic peptide
  XENP021688 vhCDR2
EIRTKAYNHATYYAESVKG

SEQ ID NO: 31998 - protein, 10 aa, Artificial Sequence
  Description of Artificial Sequence: Synthetic peptide
  XENP021688 vhCDR3
LATWDWYFDV

SEQ ID NO: 31999 - protein, 218 aa, Artificial Sequence; identical to SEQ ID NO: 31979
  Description of Artificial Sequence: Synthetic polypeptide
  XENP021688 7G8_H3.19_L1.15_Fab Light Chain

SEQ ID NO: 32000 - protein, 111 aa, Artificial Sequence; identical to SEQ ID NO: 31980
  Description of Artificial Sequence: Synthetic polypeptide
  VL of XENP021688

SEQ ID NO: 32001 - protein, 15 aa, Artificial Sequence
  Description of Artificial Sequence: Synthetic peptide
  XENP021688 vlCDR1
RASQSVDHDDDSYMN

SEQ ID NO: 32002 - protein, 7 aa, Artificial Sequence
  Description of Artificial Sequence: Synthetic peptide
  XENP021688 vlCDR2
AASELES

SEQ ID NO: 32003 - protein, 9 aa, Artificial Sequence
  Description of Artificial Sequence: Synthetic peptide
  XENP021688 vlCDR3
QQSNEDPFT

SEQ ID NO: 32004 - protein, 226 aa, Artificial Sequence; identical to SEQ ID NO: 31764
  Description of Artificial Sequence: Synthetic polypeptide
  XENP021689 7G8_H3.17_L1.15_Fab Heavy Chain

SEQ ID NO: 32005 - protein, 121 aa, Artificial Sequence; identical to SEQ ID NO: 31765
  Description of Artificial Sequence: Synthetic polypeptide
  VH of XENP021689

SEQ ID NO: 32006 - protein, 5 aa, Artificial Sequence
  Description of Artificial Sequence: Synthetic peptide
  XENP021689 vhCDR1
DAWMD

SEQ ID NO: 32007 - protein, 19 aa, Artificial Sequence
  Description of Artificial Sequence: Synthetic peptide
  XENP021689 vhCDR2
EIRTKAYNHATYYAESVKG

SEQ ID NO: 32008 - protein, 10 aa, Artificial Sequence
  Description of Artificial Sequence: Synthetic peptide
  XENP021689 vhCDR3
LATWDWYFDV

SEQ ID NO: 32009 - protein, 218 aa, Artificial Sequence; identical to SEQ ID NO: 31979
  Description of Artificial Sequence: Synthetic polypeptide
  XENP021689 7G8_H3.17_L1.15_Fab Light Chain

SEQ ID NO: 32010 - protein, 111 aa, Artificial Sequence; identical to SEQ ID NO: 31980
  Description of Artificial Sequence: Synthetic polypeptide
  VL of XENP021689

SEQ ID NO: 32011 - protein, 15 aa, Artificial Sequence
  Description of Artificial Sequence: Synthetic peptide
  XENP021689 vlCDR1
RASQSVDHDDDSYMN

SEQ ID NO: 32012 - protein, 7 aa, Artificial Sequence
  Description of Artificial Sequence: Synthetic peptide
  XENP021689 vlCDR2
AASELES

SEQ ID NO: 32013 - protein, 9 aa, Artificial Sequence
  Description of Artificial Sequence: Synthetic peptide
  XENP021689 vlCDR3
QQSNEDPFT

SEQ ID NO: 32014 - protein, 226 aa, Artificial Sequence; identical to SEQ ID NO: 31774
  Description of Artificial Sequence: Synthetic polypeptide
  XENP021690 7G8_H3.16_L1.15_Fab Heavy Chain

SEQ ID NO: 32015 - protein, 121 aa, Artificial Sequence; identical to SEQ ID NO: 31775
  Description of Artificial Sequence: Synthetic polypeptide
  VH of XENP021690

SEQ ID NO: 32016 - protein, 5 aa, Artificial Sequence
  Description of Artificial Sequence: Synthetic peptide
  XENP021690 vhCDR1
DAWMD

SEQ ID NO: 32017 - protein, 19 aa, Artificial Sequence
  Description of Artificial Sequence: Synthetic peptide
  XENP021690 vhCDR2
EIRTKANNHATDYAESVKG

SEQ ID NO: 32018 - protein, 10 aa, Artificial Sequence
  Description of Artificial Sequence: Synthetic peptide
  XENP021690 vhCDR3
LATWDWYFDV

SEQ ID NO: 32019 - protein, 218 aa, Artificial Sequence; identical to SEQ ID NO: 31979
  Description of Artificial Sequence: Synthetic polypeptide
  XENP021690 7G8_H3.16_L1.15_Fab Light Chain

SEQ ID NO: 32020 - protein, 111 aa, Artificial Sequence; identical to SEQ ID NO: 31980
  Description of Artificial Sequence: Synthetic polypeptide
  VL of XENP021690

SEQ ID NO: 32021 - protein, 15 aa, Artificial Sequence
  Description of Artificial Sequence: Synthetic peptide
  XENP021690 vlCDR1
RASQSVDHDDDSYMN

SEQ ID NO: 32022 - protein, 7 aa, Artificial Sequence
  Description of Artificial Sequence: Synthetic peptide
  XENP021690 vlCDR2
AASELES

SEQ ID NO: 32023 - protein, 9 aa, Artificial Sequence
  Description of Artificial Sequence: Synthetic peptide
  XENP021690 vlCDR3
QQSNEDPFT

SEQ ID NO: 32024 - protein, 226 aa, Artificial Sequence; identical to SEQ ID NO: 31784
  Description of Artificial Sequence: Synthetic polypeptide
  XENP021691 7G8_H3.21_L1.15_Fab Heavy Chain

SEQ ID NO: 32025 - protein, 121 aa, Artificial Sequence; identical to SEQ ID NO: 31785
  Description of Artificial Sequence: Synthetic polypeptide
  VH of XENP021691

SEQ ID NO: 32026 - protein, 5 aa, Artificial Sequence
  Description of Artificial Sequence: Synthetic peptide
  XENP021691 vhCDR1
DAWMD

SEQ ID NO: 32027 - protein, 19 aa, Artificial Sequence
  Description of Artificial Sequence: Synthetic peptide
  XENP021691 vhCDR2
EISTKAYNHATDYAESVKG

SEQ ID NO: 32028 - protein, 10 aa, Artificial Sequence
  Description of Artificial Sequence: Synthetic peptide
  XENP021691 vhCDR3
LATWDWYFDV

SEQ ID NO: 32029 - protein, 218 aa, Artificial Sequence; identical to SEQ ID NO: 31979
  Description of Artificial Sequence: Synthetic polypeptide
  XENP021691 7G8_H3.21_L1.15_Fab Light Chain

SEQ ID NO: 32030 - protein, 111 aa, Artificial Sequence; identical to SEQ ID NO: 31980
  Description of Artificial Sequence: Synthetic polypeptide
  VL of XENP021691

SEQ ID NO: 32031 - protein, 15 aa, Artificial Sequence
  Description of Artificial Sequence: Synthetic peptide
  XENP021691 vlCDR1
RASQSVDHDDDSYMN

SEQ ID NO: 32032 - protein, 7 aa, Artificial Sequence
  Description of Artificial Sequence: Synthetic peptide
  XENP021691 vlCDR2
AASELES

SEQ ID NO: 32033 - protein, 9 aa, Artificial Sequence
  Description of Artificial Sequence: Synthetic peptide
  XENP021691 vlCDR3
QQSNEDPFT

SEQ ID NO: 32034 - protein, 226 aa, Artificial Sequence; identical to SEQ ID NO: 31794
  Description of Artificial Sequence: Synthetic polypeptide
  XENP021692 7G8_H3.22_L1.15_Fab Heavy Chain

SEQ ID NO: 32035 - protein, 121 aa, Artificial Sequence; identical to SEQ ID NO: 31795
  Description of Artificial Sequence: Synthetic polypeptide
  VH of XENP021692

SEQ ID NO: 32036 - protein, 5 aa, Artificial Sequence
  Description of Artificial Sequence: Synthetic peptide
  XENP021692 vhCDR1
DAWMD

SEQ ID NO: 32037 - protein, 19 aa, Artificial Sequence
  Description of Artificial Sequence: Synthetic peptide
  XENP021692 vhCDR2
EISTKAYNHATDYAESVKG

SEQ ID NO: 32038 - protein, 10 aa, Artificial Sequence
  Description of Artificial Sequence: Synthetic peptide
  XENP021692 vhCDR3
LATWDWYFDV

SEQ ID NO: 32039 - protein, 218 aa, Artificial Sequence; identical to SEQ ID NO: 31979
  Description of Artificial Sequence: Synthetic polypeptide
  XENP021692 7G8_H3.22_L1.15_Fab Light Chain

SEQ ID NO: 32040 - protein, 111 aa, Artificial Sequence; identical to SEQ ID NO: 31980
  Description of Artificial Sequence: Synthetic polypeptide
  VL of XENP021692

SEQ ID NO: 32041 - protein, 15 aa, Artificial Sequence
  Description of Artificial Sequence: Synthetic peptide
  XENP021692 vlCDR1
RASQSVDHDDDSYMN

SEQ ID NO: 32042 - protein, 7 aa, Artificial Sequence
  Description of Artificial Sequence: Synthetic peptide
  XENP021692 vlCDR2
AASELES

SEQ ID NO: 32043 - protein, 9 aa, Artificial Sequence
  Description of Artificial Sequence: Synthetic peptide
  XENP021692 vlCDR3
QQSNEDPFT

SEQ ID NO: 32044 - protein, 226 aa, Artificial Sequence; identical to SEQ ID NO: 31804
  Description of Artificial Sequence: Synthetic polypeptide
  XENP021693 7G8_H3.23_L1.15_Fab Heavy Chain

SEQ ID NO: 32045 - protein, 121 aa, Artificial Sequence; identical to SEQ ID NO: 22385
  Description of Artificial Sequence: Synthetic polypeptide
  VH of XENP021693

SEQ ID NO: 32046 - protein, 5 aa, Artificial Sequence
  Description of Artificial Sequence: Synthetic peptide
  XENP021693 vhCDR1
DAWMD

SEQ ID NO: 32047 - protein, 19 aa, Artificial Sequence
  Description of Artificial Sequence: Synthetic peptide
  XENP021693 vhCDR2
EISTKANNHATYYAESVKG

SEQ ID NO: 32048 - protein, 10 aa, Artificial Sequence
  Description of Artificial Sequence: Synthetic peptide
  XENP021693 vhCDR3
LATWDWYFDV

SEQ ID NO: 32049 - protein, 218 aa, Artificial Sequence; identical to SEQ ID NO: 31979
  Description of Artificial Sequence: Synthetic polypeptide
  XENP021693 7G8_H3.23_L1.15_Fab Light Chain

SEQ ID NO: 32050 - protein, 111 aa, Artificial Sequence; identical to SEQ ID NO: 31980
  Description of Artificial Sequence: Synthetic polypeptide
  VL of XENP021693

SEQ ID NO: 32051 - protein, 15 aa, Artificial Sequence
  Description of Artificial Sequence: Synthetic peptide
  XENP021693 vlCDR1
RASQSVDHDDDSYMN

SEQ ID NO: 32052 - protein, 7 aa, Artificial Sequence
  Description of Artificial Sequence: Synthetic peptide
  XENP021693 vlCDR2
AASELES

SEQ ID NO: 32053 - protein, 9 aa, Artificial Sequence
  Description of Artificial Sequence: Synthetic peptide
  XENP021693 vlCDR3
QQSNEDPFT

SEQ ID NO: 32054 - protein, 226 aa, Artificial Sequence; identical to SEQ ID NO: 28934
  Description of Artificial Sequence: Synthetic polypeptide
  XENP021694 7G8_H3_L1.9_Fab Heavy Chain

SEQ ID NO: 32055 - protein, 121 aa, Artificial Sequence; identical to SEQ ID NO: 17806
  Description of Artificial Sequence: Synthetic polypeptide
  VH of XENP021694

SEQ ID NO: 32056 - protein, 5 aa, Artificial Sequence
  Description of Artificial Sequence: Synthetic peptide
  XENP021694 vhCDR1
DAWMD

SEQ ID NO: 32057 - protein, 19 aa, Artificial Sequence
  Description of Artificial Sequence: Synthetic peptide
  XENP021694 vhCDR2
EIRTKANNHATYYAESVKG

SEQ ID NO: 32058 - protein, 10 aa, Artificial Sequence
  Description of Artificial Sequence: Synthetic peptide
  XENP021694 vhCDR3
LANWDWYFDV

SEQ ID NO: 32059 - protein, 218 aa, Artificial Sequence
  Description of Artificial Sequence: Synthetic polypeptide
  XENP021694 7G8_H3_L1.9_Fab Light Chain
DTVLTQSPSSLSASVGDRVTITCRASQSVDHDGDSYMNWYQQKPGKPPKLLIYAASNLESGIPARLSGSGSGTDFTLTISSLQPEDFATYYCQQSNEDPFTFGSGTKLEIKRTVAAPSVFIFPPSDEQLKSGTASVVCLLNNFYPREAKVQWKVDNALQSGNSQESVTEQDSKDSTYSLSSTLTLSKADYEKHKVYACEVTHQGLSSPVTKSFNRGEC

SEQ ID NO: 32060 - protein, 111 aa, Artificial Sequence
  Description of Artificial Sequence: Synthetic polypeptide
  VL of XENP021694
DTVLTQSPSSLSASVGDRVTITCRASQSVDHDGDSYMNWYQQKPGKPPKLLIYAASNLESGIPARLSGSGSGTDFTLTISSLQPEDFATYYCQQSNEDPFTFGSGTKLEIK

SEQ ID NO: 32061 - protein, 15 aa, Artificial Sequence
  Description of Artificial Sequence: Synthetic peptide
  XENP021694 vlCDR1
RASQSVDHDGDSYMN

SEQ ID NO: 32062 - protein, 7 aa, Artificial Sequence
  Description of Artificial Sequence: Synthetic peptide
  XENP021694 vlCDR2
AASNLES

SEQ ID NO: 32063 - protein, 9 aa, Artificial Sequence
  Description of Artificial Sequence: Synthetic peptide
  XENP021694 vlCDR3
QQSNEDPFT

SEQ ID NO: 32064 - protein, 226 aa, Artificial Sequence; identical to SEQ ID NO: 28934
  Description of Artificial Sequence: Synthetic polypeptide
  XENP021695 7G8_H3_L1.10_Fab Heavy Chain

SEQ ID NO: 32065 - protein, 121 aa, Artificial Sequence; identical to SEQ ID NO: 17806
  Description of Artificial Sequence: Synthetic polypeptide
  VH of XENP021695

SEQ ID NO: 32066 - protein, 5 aa, Artificial Sequence
  Description of Artificial Sequence: Synthetic peptide
  XENP021695 vhCDR1
DAWMD

SEQ ID NO: 32067 - protein, 19 aa, Artificial Sequence
  Description of Artificial Sequence: Synthetic peptide
  XENP021695 vhCDR2
EIRTKANNHATYYAESVKG

SEQ ID NO: 32068 - protein, 10 aa, Artificial Sequence
  Description of Artificial Sequence: Synthetic peptide
  XENP021695 vhCDR3
LANWDWYFDV

SEQ ID NO: 32069 - protein, 218 aa, Artificial Sequence
  Description of Artificial Sequence: Synthetic polypeptide
  XENP021695 7G8_H3_L1.10_Fab Light Chain
DTVLTQSPSSLSASVGDRVTITCRASQSVDYDDDSYMNWYQQKPGKPPKLLIYAASNLESGIPARLSGSGSGTDFTLTISSLQPEDFATYYCQQSNEDPFTFGSGTKLEIKRTVAAPSVFIFPPSDEQLKSGTASVVCLLNNFYPREAKVQWKVDNALQSGNSQESVTEQDSKDSTYSLSSTLTLSKADYEKHKVYACEVTHQGLSSPVTKSFNRGEC

SEQ ID NO: 32070 - protein, 111 aa, Artificial Sequence
  Description of Artificial Sequence: Synthetic polypeptide
  VL of XENP021695
DTVLTQSPSSLSASVGDRVTITCRASQSVDYDDDSYMNWYQQKPGKPPKLLIYAASNLESGIPARLSGSGSGTDFTLTISSLQPEDFATYYCQQSNEDPFTFGSGTKLEIK

SEQ ID NO: 32071 - protein, 15 aa, Artificial Sequence
  Description of Artificial Sequence: Synthetic peptide
  XENP021695 vlCDR1
RASQSVDYDDDSYMN

SEQ ID NO: 32072 - protein, 7 aa, Artificial Sequence
  Description of Artificial Sequence: Synthetic peptide
  XENP021695 vlCDR2
AASNLES

SEQ ID NO: 32073 - protein, 9 aa, Artificial Sequence
  Description of Artificial Sequence: Synthetic peptide
  XENP021695 vlCDR3
QQSNEDPFT

SEQ ID NO: 32074 - protein, 226 aa, Artificial Sequence; identical to SEQ ID NO: 28934
  Description of Artificial Sequence: Synthetic polypeptide
  XENP021696 7G8_H3_L1.11_Fab Heavy Chain

SEQ ID NO: 32075 - protein, 121 aa, Artificial Sequence; identical to SEQ ID NO: 17806
  Description of Artificial Sequence: Synthetic polypeptide
  VH of XENP021696

SEQ ID NO: 32076 - protein, 5 aa, Artificial Sequence
  Description of Artificial Sequence: Synthetic peptide
  XENP021696 vhCDR1
DAWMD

SEQ ID NO: 32077 - protein, 19 aa, Artificial Sequence
  Description of Artificial Sequence: Synthetic peptide
  XENP021696 vhCDR2
EIRTKANNHATYYAESVKG

SEQ ID NO: 32078 - protein, 10 aa, Artificial Sequence
  Description of Artificial Sequence: Synthetic peptide
  XENP021696 vhCDR3
LANWDWYFDV

SEQ ID NO: 32079 - protein, 218 aa, Artificial Sequence; identical to SEQ ID NO: 22359
  Description of Artificial Sequence: Synthetic polypeptide
  XENP021696 7G8_H3_L1.11_Fab Light Chain

SEQ ID NO: 32080 - protein, 111 aa, Artificial Sequence; identical to SEQ ID NO: 22360
  Description of Artificial Sequence: Synthetic polypeptide
  VL of XENP021696

SEQ ID NO: 32081 - protein, 15 aa, Artificial Sequence
  Description of Artificial Sequence: Synthetic peptide
  XENP021696 vlCDR1
RASQSVDYDGDSYMN

SEQ ID NO: 32082 - protein, 7 aa, Artificial Sequence
  Description of Artificial Sequence: Synthetic peptide
  XENP021696 vlCDR2
AASELES

SEQ ID NO: 32083 - protein, 9 aa, Artificial Sequence
  Description of Artificial Sequence: Synthetic peptide
  XENP021696 vlCDR3
QQSNEDPFT

SEQ ID NO: 32084 - protein, 226 aa, Artificial Sequence; identical to SEQ ID NO: 28934
  Description of Artificial Sequence: Synthetic polypeptide
  XENP021701 7G8_H3_L1.12_Fab Heavy Chain

SEQ ID NO: 32085 - protein, 121 aa, Artificial Sequence; identical to SEQ ID NO: 17806
  Description of Artificial Sequence: Synthetic polypeptide
  VH of XENP021701

SEQ ID NO: 32086 - protein, 5 aa, Artificial Sequence
  Description of Artificial Sequence: Synthetic peptide
  XENP021701 vhCDR1
DAWMD

SEQ ID NO: 32087 - protein, 19 aa, Artificial Sequence
  Description of Artificial Sequence: Synthetic peptide
  XENP021701 vhCDR2
EIRTKANNHATYYAESVKG

SEQ ID NO: 32088 - protein, 10 aa, Artificial Sequence
  Description of Artificial Sequence: Synthetic peptide
  XENP021701 vhCDR3
LANWDWYFDV

SEQ ID NO: 32089 - protein, 218 aa, Artificial Sequence
  Description of Artificial Sequence: Synthetic polypeptide
  XENP021701 7G8_H3_L1.12_Fab Light Chain
DTVLTQSPSSLSASVGDRVTITCRASQSVDHDDDSYMNWYQQKPGKPPKLLIYAASNLESGIPARLSGSGSGTDFTLTISSLQPEDFATYYCQQSNEDPFTFGSGTKLEIKRTVAAPSVFIFPPSDEQLKSGTASVVCLLNNFYPREAKVQWKVDNALQSGNSQESVTEQDSKDSTYSLSSTLTLSKADYEKHKVYACEVTHQGLSSPVTKSFNRGEC

SEQ ID NO: 32090 - protein, 111 aa, Artificial Sequence
  Description of Artificial Sequence: Synthetic polypeptide
  VL of XENP021701
DTVLTQSPSSLSASVGDRVTITCRASQSVDHDDDSYMNWYQQKPGKPPKLLIYAASNLESGIPARLSGSGSGTDFTLTISSLQPEDFATYYCQQSNEDPFTFGSGTKLEIK

SEQ ID NO: 32091 - protein, 15 aa, Artificial Sequence
  Description of Artificial Sequence: Synthetic peptide
  XENP021701 vlCDR1
RASQSVDHDDDSYMN

SEQ ID NO: 32092 - protein, 7 aa, Artificial Sequence
  Description of Artificial Sequence: Synthetic peptide
  XENP021701 vlCDR2
AASNLES

SEQ ID NO: 32093 - protein, 9 aa, Artificial Sequence
  Description of Artificial Sequence: Synthetic peptide
  XENP021701 vlCDR3
QQSNEDPFT

SEQ ID NO: 32094 - protein, 226 aa, Artificial Sequence; identical to SEQ ID NO: 28934
  Description of Artificial Sequence: Synthetic polypeptide
  XENP021702 7G8_H3_L1.13_Fab Heavy Chain

SEQ ID NO: 32095 - protein, 121 aa, Artificial Sequence; identical to SEQ ID NO: 17806
  Description of Artificial Sequence: Synthetic polypeptide
  VH of XENP021702

SEQ ID NO: 32096 - protein, 5 aa, Artificial Sequence
  Description of Artificial Sequence: Synthetic peptide
  XENP021702 vhCDR1
DAWMD

SEQ ID NO: 32097 - protein, 19 aa, Artificial Sequence
  Description of Artificial Sequence: Synthetic peptide
  XENP021702 vhCDR2
EIRTKANNHATYYAESVKG

SEQ ID NO: 32098 - protein, 10 aa, Artificial Sequence
  Description of Artificial Sequence: Synthetic peptide
  XENP021702 vhCDR3
LANWDWYFDV

SEQ ID NO: 32099 - protein, 218 aa, Artificial Sequence; identical to SEQ ID NO: 22419
  Description of Artificial Sequence: Synthetic polypeptide
  XENP021702 7G8_H3_L1.13_Fab Light Chain

SEQ ID NO: 32100 - protein, 111 aa, Artificial Sequence; identical to SEQ ID NO: 22420
  Description of Artificial Sequence: Synthetic polypeptide
  VL of XENP021702

SEQ ID NO: 32101 - protein, 15 aa, Artificial Sequence
  Description of Artificial Sequence: Synthetic peptide
  XENP021702 vlCDR1
RASQSVDHDGDSYMN

SEQ ID NO: 32102 - protein, 7 aa, Artificial Sequence
  Description of Artificial Sequence: Synthetic peptide
  XENP021702 vlCDR2
AASELES

SEQ ID NO: 32103 - protein, 9 aa, Artificial Sequence
  Description of Artificial Sequence: Synthetic peptide
  XENP021702 vlCDR3
QQSNEDPFT

SEQ ID NO: 32104 - protein, 226 aa, Artificial Sequence; identical to SEQ ID NO: 28934
  Description of Artificial Sequence: Synthetic polypeptide
  XENP021703 7G8_H3_L1.14_Fab Heavy Chain

SEQ ID NO: 32105 - protein, 121 aa, Artificial Sequence; identical to SEQ ID NO: 17806
  Description of Artificial Sequence: Synthetic polypeptide
  VH of XENP021703

SEQ ID NO: 32106 - protein, 5 aa, Artificial Sequence
  Description of Artificial Sequence: Synthetic peptide
  XENP021703 vhCDR1
DAWMD

SEQ ID NO: 32107 - protein, 19 aa, Artificial Sequence
  Description of Artificial Sequence: Synthetic peptide
  XENP021703 vhCDR2
EIRTKANNHATYYAESVKG

SEQ ID NO: 32108 - protein, 10 aa, Artificial Sequence
  Description of Artificial Sequence: Synthetic peptide
  XENP021703 vhCDR3
LANWDWYFDV

SEQ ID NO: 32109 - protein, 218 aa, Artificial Sequence; identical to SEQ ID NO: 29039
  Description of Artificial Sequence: Synthetic polypeptide
  XENP021703 7G8_H3_L1.14_Fab Light Chain

SEQ ID NO: 32110 - protein, 111 aa, Artificial Sequence; identical to SEQ ID NO: 29040
  Description of Artificial Sequence: Synthetic polypeptide
  VL of XENP021703

SEQ ID NO: 32111 - protein, 15 aa, Artificial Sequence
  Description of Artificial Sequence: Synthetic peptide
  XENP021703 vlCDR1
RASQSVDYDDDSYMN

SEQ ID NO: 32112 - protein, 7 aa, Artificial Sequence
  Description of Artificial Sequence: Synthetic peptide
  XENP021703 vlCDR2
AASELES

SEQ ID NO: 32113 - protein, 9 aa, Artificial Sequence
  Description of Artificial Sequence: Synthetic peptide
  XENP021703 vlCDR3
QQSNEDPFT

SEQ ID NO: 32114 - protein, 226 aa, Artificial Sequence; identical to SEQ ID NO: 28934
  Description of Artificial Sequence: Synthetic polypeptide
  XENP021704 7G8_H3_L1.15_Fab Heavy Chain

SEQ ID NO: 32115 - protein, 121 aa, Artificial Sequence; identical to SEQ ID NO: 17806
  Description of Artificial Sequence: Synthetic polypeptide
  VH of XENP021704

SEQ ID NO: 32116 - protein, 5 aa, Artificial Sequence
  Description of Artificial Sequence: Synthetic peptide
  XENP021704 vhCDR1
DAWMD

SEQ ID NO: 32117 - protein, 19 aa, Artificial Sequence
  Description of Artificial Sequence: Synthetic peptide
  XENP021704 vhCDR2
EIRTKANNHATYYAESVKG

SEQ ID NO: 32118 - protein, 10 aa, Artificial Sequence
  Description of Artificial Sequence: Synthetic peptide
  XENP021704 vhCDR3
LANWDWYFDV

SEQ ID NO: 32119 - protein, 218 aa, Artificial Sequence; identical to SEQ ID NO: 31979
  Description of Artificial Sequence: Synthetic polypeptide
  XENP021704 7G8_H3_L1.15_Fab Light Chain

SEQ ID NO: 32120 - protein, 111 aa, Artificial Sequence; identical to SEQ ID NO: 31980
  Description of Artificial Sequence: Synthetic polypeptide
  VL of XENP021704

SEQ ID NO: 32121 - protein, 15 aa, Artificial Sequence
  Description of Artificial Sequence: Synthetic peptide
  XENP021704 vlCDR1
RASQSVDHDDDSYMN

SEQ ID NO: 32122 - protein, 7 aa, Artificial Sequence
  Description of Artificial Sequence: Synthetic peptide
  XENP021704 vlCDR2
AASELES

SEQ ID NO: 32123 - protein, 9 aa, Artificial Sequence
  Description of Artificial Sequence: Synthetic peptide
  XENP021704 vlCDR3
QQSNEDPFT

SEQ ID NO: 32124 - protein, 226 aa, Artificial Sequence
  Description of Artificial Sequence: Synthetic polypeptide
  XENP021742 7G8_H3.11_L1.13_Fab Heavy Chain
EVQLVESGGGLVQPGGSLRLSCAASGFTFSDAWMDWVRQAPGKGLEWVAEISTKANNHATYYAESVKGRFTISRDDSKSSVYLQMNSLRAEDTAVYYCTRLANWDWYFDVWGQGTTVTVSSASTKGPSVFPLAPSSKSTSGGTAALGCLVKDYFPEPVTVSWNSGALTSGVHTFPAVLQSSGLYSLSSVVTVPSSSLGTQTYICNVNHKPSNTKVDKKVEPKSCGS

SEQ ID NO: 32125 - protein, 121 aa, Artificial Sequence
  Description of Artificial Sequence: Synthetic polypeptide
  VH of XENP021742
EVQLVESGGGLVQPGGSLRLSCAASGFTFSDAWMDWVRQAPGKGLEWVAEISTKANNHATYYAESVKGRFTISRDDSKSSVYLQMNSLRAEDTAVYYCTRLANWDWYFDVWGQGTTVTVSS

SEQ ID NO: 32126 - protein, 5 aa, Artificial Sequence
  Description of Artificial Sequence: Synthetic peptide
  XENP021742 vhCDR1
DAWMD

SEQ ID NO: 32127 - protein, 19 aa, Artificial Sequence
  Description of Artificial Sequence: Synthetic peptide
  XENP021742 vhCDR2
EISTKANNHATYYAESVKG

SEQ ID NO: 32128 - protein, 10 aa, Artificial Sequence
  Description of Artificial Sequence: Synthetic peptide
  XENP021742 vhCDR3
LANWDWYFDV

SEQ ID NO: 32129 - protein, 218 aa, Artificial Sequence; identical to SEQ ID NO: 22419
  Description of Artificial Sequence: Synthetic polypeptide
  XENP021742 7G8_H3.11_L1.13_Fab Light Chain

SEQ ID NO: 32130 - protein, 111 aa, Artificial Sequence; identical to SEQ ID NO: 22420
  Description of Artificial Sequence: Synthetic polypeptide
  VL of XENP021742

SEQ ID NO: 32131 - protein, 15 aa, Artificial Sequence
  Description of Artificial Sequence: Synthetic peptide
  XENP021742 vlCDR1
RASQSVDHDGDSYMN

SEQ ID NO: 32132 - protein, 7 aa, Artificial Sequence
  Description of Artificial Sequence: Synthetic peptide
  XENP021742 vlCDR2
AASELES

SEQ ID NO: 32133 - protein, 9 aa, Artificial Sequence
  Description of Artificial Sequence: Synthetic peptide
  XENP021742 vlCDR3
QQSNEDPFT

SEQ ID NO: 32134 - protein, 226 aa, Artificial Sequence; identical to SEQ ID NO: 28974
  Description of Artificial Sequence: Synthetic polypeptide
  XENP021743 7G8_H3.4_L1.13_Fab Heavy Chain

SEQ ID NO: 32135 - protein, 121 aa, Artificial Sequence; identical to SEQ ID NO: 28975
  Description of Artificial Sequence: Synthetic polypeptide
  VH of XENP021743

SEQ ID NO: 32136 - protein, 5 aa, Artificial Sequence
  Description of Artificial Sequence: Synthetic peptide
  XENP021743 vhCDR1
DAWMD

SEQ ID NO: 32137 - protein, 19 aa, Artificial Sequence
  Description of Artificial Sequence: Synthetic peptide
  XENP021743 vhCDR2
EIRTKANNHATYYAESVKG

SEQ ID NO: 32138 - protein, 10 aa, Artificial Sequence
  Description of Artificial Sequence: Synthetic peptide
  XENP021743 vhCDR3
LATWDWYFDV

SEQ ID NO: 32139 - protein, 218 aa, Artificial Sequence; identical to SEQ ID NO: 22419
  Description of Artificial Sequence: Synthetic polypeptide
  XENP021743 7G8_H3.4_L1.13_Fab Light Chain

SEQ ID NO: 32140 - protein, 111 aa, Artificial Sequence; identical to SEQ ID NO: 22420
  Description of Artificial Sequence: Synthetic polypeptide
  VL of XENP021743

SEQ ID NO: 32141 - protein, 15 aa, Artificial Sequence
  Description of Artificial Sequence: Synthetic peptide
  XENP021743 vlCDR1
RASQSVDHDGDSYMN

SEQ ID NO: 32142 - protein, 7 aa, Artificial Sequence
  Description of Artificial Sequence: Synthetic peptide
  XENP021743 vlCDR2
AASELES

SEQ ID NO: 32143 - protein, 9 aa, Artificial Sequence
  Description of Artificial Sequence: Synthetic peptide
  XENP021743 vlCDR3
QQSNEDPFT

SEQ ID NO: 32144 - protein, 226 aa, Artificial Sequence; identical to SEQ ID NO: 28944
  Description of Artificial Sequence: Synthetic polypeptide
  XENP021744 7G8_H3.1_L1.13_Fab Heavy Chain

SEQ ID NO: 32145 - protein, 121 aa, Artificial Sequence; identical to SEQ ID NO: 28945
  Description of Artificial Sequence: Synthetic polypeptide
  VH of XENP021744

SEQ ID NO: 32146 - protein, 5 aa, Artificial Sequence
  Description of Artificial Sequence: Synthetic peptide
  XENP021744 vhCDR1
DAWMD

SEQ ID NO: 32147 - protein, 19 aa, Artificial Sequence
  Description of Artificial Sequence: Synthetic peptide
  XENP021744 vhCDR2
EIRTKANNHATYYAESVKG

SEQ ID NO: 32148 - protein, 10 aa, Artificial Sequence
  Description of Artificial Sequence: Synthetic peptide
  XENP021744 vhCDR3
LATWDWYFDV

SEQ ID NO: 32149 - protein, 218 aa, Artificial Sequence; identical to SEQ ID NO: 22419
  Description of Artificial Sequence: Synthetic polypeptide
  XENP021744 7G8_H3.1_L1.13_Fab Light Chain

SEQ ID NO: 32150 - protein, 111 aa, Artificial Sequence; identical to SEQ ID NO: 22420
  Description of Artificial Sequence: Synthetic polypeptide
  VL of XENP021744

SEQ ID NO: 32151 - protein, 15 aa, Artificial Sequence
  Description of Artificial Sequence: Synthetic peptide
  XENP021744 vlCDR1
RASQSVDHDGDSYMN

SEQ ID NO: 32152 - protein, 7 aa, Artificial Sequence
  Description of Artificial Sequence: Synthetic peptide
  XENP021744 vlCDR2
AASELES

SEQ ID NO: 32153 - protein, 9 aa, Artificial Sequence
  Description of Artificial Sequence: Synthetic peptide
  XENP021744 vlCDR3
QQSNEDPFT

SEQ ID NO: 32154 - protein, 226 aa, Artificial Sequence; identical to SEQ ID NO: 32124
  Description of Artificial Sequence: Synthetic polypeptide
  XENP021745 7G8_H3.11_L1.15_Fab Heavy Chain

SEQ ID NO: 32155 - protein, 121 aa, Artificial Sequence; identical to SEQ ID NO: 32125
  Description of Artificial Sequence: Synthetic polypeptide
  VH of XENP021745

SEQ ID NO: 32156 - protein, 5 aa, Artificial Sequence
  Description of Artificial Sequence: Synthetic peptide
  XENP021745 vhCDR1
DAWMD

SEQ ID NO: 32157 - protein, 19 aa, Artificial Sequence
  Description of Artificial Sequence: Synthetic peptide
  XENP021745 vhCDR2
EISTKANNHATYYAESVKG

SEQ ID NO: 32158 - protein, 10 aa, Artificial Sequence
  Description of Artificial Sequence: Synthetic peptide
  XENP021745 vhCDR3
LANWDWYFDV

SEQ ID NO: 32159 - protein, 218 aa, Artificial Sequence; identical to SEQ ID NO: 31979
  Description of Artificial Sequence: Synthetic polypeptide
  XENP021745 7G8_H3.11_L1.15_Fab Light Chain

SEQ ID NO: 32160 - protein, 111 aa, Artificial Sequence; identical to SEQ ID NO: 31980
  Description of Artificial Sequence: Synthetic polypeptide
  VL of XENP021745

SEQ ID NO: 32161 - protein, 15 aa, Artificial Sequence
  Description of Artificial Sequence: Synthetic peptide
  XENP021745 vlCDR1
RASQSVDHDDDSYMN

SEQ ID NO: 32162 - protein, 7 aa, Artificial Sequence
  Description of Artificial Sequence: Synthetic peptide
  XENP021745 vlCDR2
AASELES

SEQ ID NO: 32163 - protein, 9 aa, Artificial Sequence
  Description of Artificial Sequence: Synthetic peptide
  XENP021745 vlCDR3
QQSNEDPFT

SEQ ID NO: 32164 - protein, 226 aa, Artificial Sequence; identical to SEQ ID NO: 28974
  Description of Artificial Sequence: Synthetic polypeptide
  XENP021746 7G8_H3.4_L1.15_Fab Heavy Chain

SEQ ID NO: 32165 - protein, 121 aa, Artificial Sequence; identical to SEQ ID NO: 28975
  Description of Artificial Sequence: Synthetic polypeptide
  VH of XENP021746

SEQ ID NO: 32166 - protein, 5 aa, Artificial Sequence
  Description of Artificial Sequence: Synthetic peptide
  XENP021746 vhCDR1
DAWMD

SEQ ID NO: 32167 - protein, 19 aa, Artificial Sequence
  Description of Artificial Sequence: Synthetic peptide
  XENP021746 vhCDR2
EIRTKANNHATYYAESVKG

SEQ ID NO: 32168 - protein, 10 aa, Artificial Sequence
  Description of Artificial Sequence: Synthetic peptide
  XENP021746 vhCDR3
LATWDWYFDV

SEQ ID NO: 32169 - protein, 218 aa, Artificial Sequence; identical to SEQ ID NO: 31979
  Description of Artificial Sequence: Synthetic polypeptide
  XENP021746 7G8_H3.4_L1.15_Fab Light Chain

SEQ ID NO: 32170 - protein, 111 aa, Artificial Sequence; identical to SEQ ID NO: 31980
  Description of Artificial Sequence: Synthetic polypeptide
  VL of XENP021746

SEQ ID NO: 32171 - protein, 15 aa, Artificial Sequence
  Description of Artificial Sequence: Synthetic peptide
  XENP021746 vlCDR1
RASQSVDHDDDSYMN

SEQ ID NO: 32172 - protein, 7 aa, Artificial Sequence
  Description of Artificial Sequence: Synthetic peptide
  XENP021746 vlCDR2
AASELES

SEQ ID NO: 32173 - protein, 9 aa, Artificial Sequence
  Description of Artificial Sequence: Synthetic peptide
  XENP021746 vlCDR3
QQSNEDPFT

SEQ ID NO: 32174 - protein, 226 aa, Artificial Sequence; identical to SEQ ID NO: 28944
  Description of Artificial Sequence: Synthetic polypeptide
  XENP021747 7G8_H3.1_L1.15_Fab Heavy Chain

SEQ ID NO: 32175 - protein, 121 aa, Artificial Sequence; identical to SEQ ID NO: 28945
  Description of Artificial Sequence: Synthetic polypeptide
  VH of XENP021747

SEQ ID NO: 32176 - protein, 5 aa, Artificial Sequence
  Description of Artificial Sequence: Synthetic peptide
  XENP021747 vhCDR1
DAWMD

SEQ ID NO: 32177 - protein, 19 aa, Artificial Sequence
  Description of Artificial Sequence: Synthetic peptide
  XENP021747 vhCDR2
EIRTKANNHATYYAESVKG

SEQ ID NO: 32178 - protein, 10 aa, Artificial Sequence
  Description of Artificial Sequence: Synthetic peptide
  XENP021747 vhCDR3
LATWDWYFDV

SEQ ID NO: 32179 - protein, 218 aa, Artificial Sequence; identical to SEQ ID NO: 31979
  Description of Artificial Sequence: Synthetic polypeptide
  XENP021747 7G8_H3.1_L1.15_Fab Light Chain

SEQ ID NO: 32180 - protein, 111 aa, Artificial Sequence; identical to SEQ ID NO: 31980
  Description of Artificial Sequence: Synthetic polypeptide
  VL of XENP021747

SEQ ID NO: 32181 - protein, 15 aa, Artificial Sequence
  Description of Artificial Sequence: Synthetic peptide
  XENP021747 vlCDR1
RASQSVDHDDDSYMN

SEQ ID NO: 32182 - protein, 7 aa, Artificial Sequence
  Description of Artificial Sequence: Synthetic peptide
  XENP021747 vlCDR2
AASELES

SEQ ID NO: 32183 - protein, 9 aa, Artificial Sequence
  Description of Artificial Sequence: Synthetic peptide
  XENP021747 vlCDR3
QQSNEDPFT

SEQ ID NO: 32184 - protein, 226 aa, Artificial Sequence
  Description of Artificial Sequence: Synthetic polypeptide
  XENP021889 7G8_H3.27_L1_Fab Heavy Chain
EVQLVESGGGLVQPGGSLRLSCAASGDTFDDAWMDWVRQAPGKGLEWVAEISTKAYNHATYYAESVKGRFTISRDDSKSSVYLQMNSLRAEDTAVYYCTRLATWDWYFDVWGQGTTVTVSSASTKGPSVFPLAPSSKSTSGGTAALGCLVKDYFPEPVTVSWNSGALTSGVHTFPAVLQSSGLYSLSSVVTVPSSSLGTQTYICNVNHKPSDTKVDKKVEPKSCGS

SEQ ID NO: 32185 - protein, 121 aa, Artificial Sequence
  Description of Artificial Sequence: Synthetic polypeptide
  VH of XENP021889
EVQLVESGGGLVQPGGSLRLSCAASGDTFDDAWMDWVRQAPGKGLEWVAEISTKAYNHATYYAESVKGRFTISRDDSKSSVYLQMNSLRAEDTAVYYCTRLATWDWYFDVWGQGTTVTVSS

SEQ ID NO: 32186 - protein, 5 aa, Artificial Sequence
  Description of Artificial Sequence: Synthetic peptide
  XENP021889 vhCDR1
DAWMD

SEQ ID NO: 32187 - protein, 19 aa, Artificial Sequence
  Description of Artificial Sequence: Synthetic peptide
  XENP021889 vhCDR2
EISTKAYNHATYYAESVKG

SEQ ID NO: 32188 - protein, 10 aa, Artificial Sequence
  Description of Artificial Sequence: Synthetic peptide
  XENP021889 vhCDR3
LATWDWYFDV

SEQ ID NO: 32189 - protein, 218 aa, Artificial Sequence; identical to SEQ ID NO: 17600
  Description of Artificial Sequence: Synthetic polypeptide
  XENP021889 7G8_H3.27_L1_Fab Light Chain

SEQ ID NO: 32190 - protein, 111 aa, Artificial Sequence; identical to SEQ ID NO: 17601
  Description of Artificial Sequence: Synthetic polypeptide
  VL of XENP021889

SEQ ID NO: 32191 - protein, 15 aa, Artificial Sequence
  Description of Artificial Sequence: Synthetic peptide
  XENP021889 vlCDR1
RASQSVDYDGDSYMN

SEQ ID NO: 32192 - protein, 7 aa, Artificial Sequence
  Description of Artificial Sequence: Synthetic peptide
  XENP021889 vlCDR2
AASNLES

SEQ ID NO: 32193 - protein, 9 aa, Artificial Sequence
  Description of Artificial Sequence: Synthetic peptide
  XENP021889 vlCDR3
QQSNEDPFT

SEQ ID NO: 32194 - protein, 226 aa, Artificial Sequence; identical to SEQ ID NO: 32184
  Description of Artificial Sequence: Synthetic polypeptide
  XENP021890 7G8_H3.27_L1.11_Fab Heavy Chain

SEQ ID NO: 32195 - protein, 121 aa, Artificial Sequence; identical to SEQ ID NO: 32185
  Description of Artificial Sequence: Synthetic polypeptide
  VH of XENP021890

SEQ ID NO: 32196 - protein, 5 aa, Artificial Sequence
  Description of Artificial Sequence: Synthetic peptide
  XENP021890 vhCDR1
DAWMD

SEQ ID NO: 32197 - protein, 19 aa, Artificial Sequence
  Description of Artificial Sequence: Synthetic peptide
  XENP021890 vhCDR2
EISTKAYNHATYYAESVKG

SEQ ID NO: 32198 - protein, 10 aa, Artificial Sequence
  Description of Artificial Sequence: Synthetic peptide
  XENP021890 vhCDR3
LATWDWYFDV

SEQ ID NO: 32199 - protein, 218 aa, Artificial Sequence; identical to SEQ ID NO: 22359
  Description of Artificial Sequence: Synthetic polypeptide
  XENP021890 7G8_H3.27_L1.11_Fab Light Chain

SEQ ID NO: 32200 - protein, 111 aa, Artificial Sequence; identical to SEQ ID NO: 22360
  Description of Artificial Sequence: Synthetic polypeptide
  VL of XENP021890

SEQ ID NO: 32201 - protein, 15 aa, Artificial Sequence
  Description of Artificial Sequence: Synthetic peptide
  XENP021890 vlCDR1
RASQSVDYDGDSYMN

SEQ ID NO: 32202 - protein, 7 aa, Artificial Sequence
  Description of Artificial Sequence: Synthetic peptide
  XENP021890 vlCDR2
AASELES

SEQ ID NO: 32203 - protein, 9 aa, Artificial Sequence
  Description of Artificial Sequence: Synthetic peptide
  XENP021890 vlCDR3
QQSNEDPFT

SEQ ID NO: 32204 - protein, 226 aa, Artificial Sequence; identical to SEQ ID NO: 32184
  Description of Artificial Sequence: Synthetic polypeptide
  XENP021891 7G8_H3.27_L1.13_Fab Heavy Chain

SEQ ID NO: 32205 - protein, 121 aa, Artificial Sequence; identical to SEQ ID NO: 32185
  Description of Artificial Sequence: Synthetic polypeptide
  VH of XENP021891

SEQ ID NO: 32206 - protein, 5 aa, Artificial Sequence
  Description of Artificial Sequence: Synthetic peptide
  XENP021891 vhCDR1
DAWMD

SEQ ID NO: 32207 - protein, 19 aa, Artificial Sequence
  Description of Artificial Sequence: Synthetic peptide
  XENP021891 vhCDR2
EISTKAYNHATYYAESVKG

SEQ ID NO: 32208 - protein, 10 aa, Artificial Sequence
  Description of Artificial Sequence: Synthetic peptide
  XENP021891 vhCDR3
LATWDWYFDV

SEQ ID NO: 32209 - protein, 218 aa, Artificial Sequence; identical to SEQ ID NO: 22419
  Description of Artificial Sequence: Synthetic polypeptide
  XENP021891 7G8_H3.27_L1.13_Fab Light Chain

SEQ ID NO: 32210 - protein, 111 aa, Artificial Sequence; identical to SEQ ID NO: 22420
  Description of Artificial Sequence: Synthetic polypeptide
  VL of XENP021891

SEQ ID NO: 32211 - protein, 15 aa, Artificial Sequence
  Description of Artificial Sequence: Synthetic peptide
  XENP021891 vlCDR1
RASQSVDHDGDSYMN

SEQ ID NO: 32212 - protein, 7 aa, Artificial Sequence
  Description of Artificial Sequence: Synthetic peptide
  XENP021891 vlCDR2
AASELES

SEQ ID NO: 32213 - protein, 9 aa, Artificial Sequence
  Description of Artificial Sequence: Synthetic peptide
  XENP021891 vlCDR3
QQSNEDPFT

SEQ ID NO: 32214 - protein, 226 aa, Artificial Sequence
  Description of Artificial Sequence: Synthetic polypeptide
  XENP021892 7G8_H3.28_L1_Fab Heavy Chain
EVQLVESGGGLVQPGGSLRLSCAASGFTFDDAWMDWVRQAPGKGLEWVAEISTKAYNHATYYAESVKGRFTISRDDSKSSVYLQMNSLRAEDTAVYYCTRLATWDWYFDVWGQGTTVTVSSASTKGPSVFPLAPSSKSTSGGTAALGCLVKDYFPEPVTVSWNSGALTSGVHTFPAVLQSSGLYSLSSVVTVPSSSLGTQTYICNVNHKPSDTKVDKKVEPKSCGS

SEQ ID NO: 32215 - protein, 121 aa, Artificial Sequence; identical to SEQ ID NO: 22425
  Description of Artificial Sequence: Synthetic polypeptide
  VH of XENP021892

SEQ ID NO: 32216 - protein, 5 aa, Artificial Sequence
  Description of Artificial Sequence: Synthetic peptide
  XENP021892 vhCDR1
DAWMD

SEQ ID NO: 32217 - protein, 19 aa, Artificial Sequence
  Description of Artificial Sequence: Synthetic peptide
  XENP021892 vhCDR2
EISTKAYNHATYYAESVKG

SEQ ID NO: 32218 - protein, 10 aa, Artificial Sequence
  Description of Artificial Sequence: Synthetic peptide
  XENP021892 vhCDR3
LATWDWYFDV

SEQ ID NO: 32219 - protein, 218 aa, Artificial Sequence; identical to SEQ ID NO: 17600
  Description of Artificial Sequence: Synthetic polypeptide
  XENP021892 7G8_H3.28_L1_Fab Light Chain

SEQ ID NO: 32220 - protein, 111 aa, Artificial Sequence; identical to SEQ ID NO: 17601
  Description of Artificial Sequence: Synthetic polypeptide
  VL of XENP021892

SEQ ID NO: 32221 - protein, 15 aa, Artificial Sequence
  Description of Artificial Sequence: Synthetic peptide
  XENP021892 vlCDR1
RASQSVDYDGDSYMN

SEQ ID NO: 32222 - protein, 7 aa, Artificial Sequence
  Description of Artificial Sequence: Synthetic peptide
  XENP021892 vlCDR2
AASNLES

SEQ ID NO: 32223 - protein, 9 aa, Artificial Sequence
  Description of Artificial Sequence: Synthetic peptide
  XENP021892 vlCDR3
QQSNEDPFT

SEQ ID NO: 32224 - protein, 226 aa, Artificial Sequence; identical to SEQ ID NO: 32214
  Description of Artificial Sequence: Synthetic polypeptide
  XENP021893 7G8_H3.28_L1.11_Fab Heavy Chain

SEQ ID NO: 32225 - protein, 121 aa, Artificial Sequence; identical to SEQ ID NO: 22425
  Description of Artificial Sequence: Synthetic polypeptide
  VH of XENP021893

SEQ ID NO: 32226 - protein, 5 aa, Artificial Sequence
  Description of Artificial Sequence: Synthetic peptide
  XENP021893 vhCDR1
DAWMD

SEQ ID NO: 32227 - protein, 19 aa, Artificial Sequence
  Description of Artificial Sequence: Synthetic peptide
  XENP021893 vhCDR2
EISTKAYNHATYYAESVKG

SEQ ID NO: 32228 - protein, 10 aa, Artificial Sequence
  Description of Artificial Sequence: Synthetic peptide
  XENP021893 vhCDR3
LATWDWYFDV

SEQ ID NO: 32229 - protein, 218 aa, Artificial Sequence; identical to SEQ ID NO: 22359
  Description of Artificial Sequence: Synthetic polypeptide
  XENP021893 7G8_H3.28_L1.11_Fab Light Chain

SEQ ID NO: 32230 - protein, 111 aa, Artificial Sequence; identical to SEQ ID NO: 22360
  Description of Artificial Sequence: Synthetic polypeptide
  VL of XENP021893

SEQ ID NO: 32231 - protein, 15 aa, Artificial Sequence
  Description of Artificial Sequence: Synthetic peptide
  XENP021893 vlCDR1
RASQSVDYDGDSYMN

SEQ ID NO: 32232 - protein, 7 aa, Artificial Sequence
  Description of Artificial Sequence: Synthetic peptide
  XENP021893 vlCDR2
AASELES

SEQ ID NO: 32233 - protein, 9 aa, Artificial Sequence
  Description of Artificial Sequence: Synthetic peptide
  XENP021893 vlCDR3
QQSNEDPFT

SEQ ID NO: 32234 - protein, 226 aa, Artificial Sequence; identical to SEQ ID NO: 32214
  Description of Artificial Sequence: Synthetic polypeptide
  XENP021894 7G8_H3.28_L1.13_Fab Heavy Chain

SEQ ID NO: 32235 - protein, 121 aa, Artificial Sequence; identical to SEQ ID NO: 22425
  Description of Artificial Sequence: Synthetic polypeptide
  VH of XENP021894

SEQ ID NO: 32236 - protein, 5 aa, Artificial Sequence
  Description of Artificial Sequence: Synthetic peptide
  XENP021894 vhCDR1
DAWMD

SEQ ID NO: 32237 - protein, 19 aa, Artificial Sequence
  Description of Artificial Sequence: Synthetic peptide
  XENP021894 vhCDR2
EISTKAYNHATYYAESVKG

SEQ ID NO: 32238 - protein, 10 aa, Artificial Sequence
  Description of Artificial Sequence: Synthetic peptide
  XENP021894 vhCDR3
LATWDWYFDV

SEQ ID NO: 32239 - protein, 218 aa, Artificial Sequence; identical to SEQ ID NO: 22419
  Description of Artificial Sequence: Synthetic polypeptide
  XENP021894 7G8_H3.28_L1.13_Fab Light Chain

SEQ ID NO: 32240 - protein, 111 aa, Artificial Sequence; identical to SEQ ID NO: 22420
  Description of Artificial Sequence: Synthetic polypeptide
  VL of XENP021894

SEQ ID NO: 32241 - protein, 15 aa, Artificial Sequence
  Description of Artificial Sequence: Synthetic peptide
  XENP021894 vlCDR1
RASQSVDHDGDSYMN

SEQ ID NO: 32242 - protein, 7 aa, Artificial Sequence
  Description of Artificial Sequence: Synthetic peptide
  XENP021894 vlCDR2
AASELES

SEQ ID NO: 32243 - protein, 9 aa, Artificial Sequence
  Description of Artificial Sequence: Synthetic peptide
  XENP021894 vlCDR3
QQSNEDPFT

SEQ ID NO: 32244 - protein, 226 aa, Artificial Sequence
  Description of Artificial Sequence: Synthetic polypeptide
  XENP022379 7G8_H3.29_L1.11_Fab Heavy Chain
EVQLVESGGGLVQPGGSLRLSCAASGFTFDDAWMHWVRQAPGKGLEWVAEISTKANNHATYYAESVKGRFTISRDDSKSSVYLQMNSLRAEDTAVYYCTRLATWDWYFDVWGQGTTVTVSSASTKGPSVFPLAPSSKSTSGGTAALGCLVKDYFPEPVTVSWNSGALTSGVHTFPAVLQSSGLYSLSSVVTVPSSSLGTQTYICNVNHKPSNTKVDKKVEPKSCGS

SEQ ID NO: 32245 - protein, 121 aa, Artificial Sequence
  Description of Artificial Sequence: Synthetic polypeptide
  VH of XENP022379
EVQLVESGGGLVQPGGSLRLSCAASGFTFDDAWMHWVRQAPGKGLEWVAEISTKANNHATYYAESVKGRFTISRDDSKSSVYLQMNSLRAEDTAVYYCTRLATWDWYFDVWGQGTTVTVSS

SEQ ID NO: 32246 - protein, 5 aa, Artificial Sequence
  Description of Artificial Sequence: Synthetic peptide
  XENP022379 vhCDR1
DAWMH

SEQ ID NO: 32247 - protein, 19 aa, Artificial Sequence
  Description of Artificial Sequence: Synthetic peptide
  XENP022379 vhCDR2
EISTKANNHATYYAESVKG

SEQ ID NO: 32248 - protein, 10 aa, Artificial Sequence
  Description of Artificial Sequence: Synthetic peptide
  XENP022379 vhCDR3
LATWDWYFDV

SEQ ID NO: 32249 - protein, 218 aa, Artificial Sequence; identical to SEQ ID NO: 22359
  Description of Artificial Sequence: Synthetic polypeptide
  XENP022379 7G8_H3.29_L1.11_Fab Light Chain

SEQ ID NO: 32250 - protein, 111 aa, Artificial Sequence; identical to SEQ ID NO: 22360
  Description of Artificial Sequence: Synthetic polypeptide
  VL of XENP022379

SEQ ID NO: 32251 - protein, 15 aa, Artificial Sequence
  Description of Artificial Sequence: Synthetic peptide
  XENP022379 vlCDR1
RASQSVDYDGDSYMN

SEQ ID NO: 32252 - protein, 7 aa, Artificial Sequence
  Description of Artificial Sequence: Synthetic peptide
  XENP022379 vlCDR2
AASELES

SEQ ID NO: 32253 - protein, 9 aa, Artificial Sequence
  Description of Artificial Sequence: Synthetic peptide
  XENP022379 vlCDR3
QQSNEDPFT

SEQ ID NO: 32254 - protein, 226 aa, Artificial Sequence
  Description of Artificial Sequence: Synthetic polypeptide
  XENP022380 7G8_H3.30_L1.11_Fab Heavy Chain
EVQLVESGGGLVQPGGSLRLSCAASGFTFDDAWMSWVRQAPGKGLEWVAEISTKANNHATYYAESVKGRFTISRDDSKSSVYLQMNSLRAEDTAVYYCTRLATWDWYFDVWGQGTTVTVSSASTKGPSVFPLAPSSKSTSGGTAALGCLVKDYFPEPVTVSWNSGALTSGVHTFPAVLQSSGLYSLSSVVTVPSSSLGTQTYICNVNHKPSNTKVDKKVEPKSCGS

SEQ ID NO: 32255 - protein, 121 aa, Artificial Sequence; identical to SEQ ID NO: 22485
  Description of Artificial Sequence: Synthetic polypeptide
  VH of XENP022380

SEQ ID NO: 32256 - protein, 5 aa, Artificial Sequence
  Description of Artificial Sequence: Synthetic peptide
  XENP022380 vhCDR1
DAWMS

SEQ ID NO: 32257 - protein, 19 aa, Artificial Sequence
  Description of Artificial Sequence: Synthetic peptide
  XENP022380 vhCDR2
EISTKANNHATYYAESVKG

SEQ ID NO: 32258 - protein, 10 aa, Artificial Sequence
  Description of Artificial Sequence: Synthetic peptide
  XENP022380 vhCDR3
LATWDWYFDV

SEQ ID NO: 32259 - protein, 218 aa, Artificial Sequence; identical to SEQ ID NO: 22359
  Description of Artificial Sequence: Synthetic polypeptide
  XENP022380 7G8_H3.30_L1.11_Fab Light Chain

SEQ ID NO: 32260 - protein, 111 aa, Artificial Sequence; identical to SEQ ID NO: 22360
  Description of Artificial Sequence: Synthetic polypeptide
  VL of XENP022380

SEQ ID NO: 32261 - protein, 15 aa, Artificial Sequence
  Description of Artificial Sequence: Synthetic peptide
  XENP022380 vlCDR1
RASQSVDYDGDSYMN

SEQ ID NO: 32262 - protein, 7 aa, Artificial Sequence
  Description of Artificial Sequence: Synthetic peptide
  XENP022380 vlCDR2
AASELES

SEQ ID NO: 32263 - protein, 9 aa, Artificial Sequence
  Description of Artificial Sequence: Synthetic peptide
  XENP022380 vlCDR3
QQSNEDPFT

SEQ ID NO: 32264 - protein, 226 aa, Artificial Sequence
  Description of Artificial Sequence: Synthetic polypeptide
  XENP022381 7G8_H3.31_L1.11_Fab Heavy Chain
EVQLVESGGGLVQPGGSLRLSCAASGFTFDDAWMNWVRQAPGKGLEWVAEISTKANNHATYYAESVKGRFTISRDDSKSSVYLQMNSLRAEDTAVYYCTRLATWDWYFDVWGQGTTVTVSSASTKGPSVFPLAPSSKSTSGGTAALGCLVKDYFPEPVTVSWNSGALTSGVHTFPAVLQSSGLYSLSSVVTVPSSSLGTQTYICNVNHKPSNTKVDKKVEPKSCGS

SEQ ID NO: 32265 - protein, 121 aa, Artificial Sequence
  Description of Artificial Sequence: Synthetic polypeptide
  VH of XENP022381
EVQLVESGGGLVQPGGSLRLSCAASGFTFDDAWMNWVRQAPGKGLEWVAEISTKANNHATYYAESVKGRFTISRDDSKSSVYLQMNSLRAEDTAVYYCTRLATWDWYFDVWGQGTTVTVSS

SEQ ID NO: 32266 - protein, 5 aa, Artificial Sequence
  Description of Artificial Sequence: Synthetic peptide
  XENP022381 vhCDR1
DAWMN

SEQ ID NO: 32267 - protein, 19 aa, Artificial Sequence
  Description of Artificial Sequence: Synthetic peptide
  XENP022381 vhCDR2
EISTKANNHATYYAESVKG

SEQ ID NO: 32268 - protein, 10 aa, Artificial Sequence
  Description of Artificial Sequence: Synthetic peptide
  XENP022381 vhCDR3
LATWDWYFDV

SEQ ID NO: 32269 - protein, 218 aa, Artificial Sequence; identical to SEQ ID NO: 22359
  Description of Artificial Sequence: Synthetic polypeptide
  XENP022381 7G8_H3.31_L1.11_Fab Light Chain

SEQ ID NO: 32270 - protein, 111 aa, Artificial Sequence; identical to SEQ ID NO: 22360
  Description of Artificial Sequence: Synthetic polypeptide
  VL of XENP022381

SEQ ID NO: 32271 - protein, 15 aa, Artificial Sequence
  Description of Artificial Sequence: Synthetic peptide
  XENP022381 vlCDR1
RASQSVDYDGDSYMN

SEQ ID NO: 32272 - protein, 7 aa, Artificial Sequence
  Description of Artificial Sequence: Synthetic peptide
  XENP022381 vlCDR2
AASELES

SEQ ID NO: 32273 - protein, 9 aa, Artificial Sequence
  Description of Artificial Sequence: Synthetic peptide
  XENP022381 vlCDR3
QQSNEDPFT

SEQ ID NO: 32274 - protein, 226 aa, Artificial Sequence
  Description of Artificial Sequence: Synthetic polypeptide
  XENP022382 7G8_H3.32_L1.11_Fab Heavy Chain
EVQLVESGGGLVQPGGSLRLSCAASGFTFDDAWMQWVRQAPGKGLEWVAEISTKANNHATYYAESVKGRFTISRDDSKSSVYLQMNSLRAEDTAVYYCTRLATWDWYFDVWGQGTTVTVSSASTKGPSVFPLAPSSKSTSGGTAALGCLVKDYFPEPVTVSWNSGALTSGVHTFPAVLQSSGLYSLSSVVTVPSSSLGTQTYICNVNHKPSNTKVDKKVEPKSCGS

SEQ ID NO: 32275 - protein, 121 aa, Artificial Sequence
  Description of Artificial Sequence: Synthetic polypeptide
  VH of XENP022382
EVQLVESGGGLVQPGGSLRLSCAASGFTFDDAWMQWVRQAPGKGLEWVAEISTKANNHATYYAESVKGRFTISRDDSKSSVYLQMNSLRAEDTAVYYCTRLATWDWYFDVWGQGTTVTVSS

SEQ ID NO: 32276 - protein, 5 aa, Artificial Sequence
  Description of Artificial Sequence: Synthetic peptide
  XENP022382 vhCDR1
DAWMQ

SEQ ID NO: 32277 - protein, 19 aa, Artificial Sequence
  Description of Artificial Sequence: Synthetic peptide
  XENP022382 vhCDR2
EISTKANNHATYYAESVKG

SEQ ID NO: 32278 - protein, 10 aa, Artificial Sequence
  Description of Artificial Sequence: Synthetic peptide
  XENP022382 vhCDR3
LATWDWYFDV

SEQ ID NO: 32279 - protein, 218 aa, Artificial Sequence; identical to SEQ ID NO: 22359
  Description of Artificial Sequence: Synthetic polypeptide
  XENP022382 7G8_H3.32_L1.11_Fab Light Chain

SEQ ID NO: 32280 - protein, 111 aa, Artificial Sequence; identical to SEQ ID NO: 22360
  Description of Artificial Sequence: Synthetic polypeptide
  VL of XENP022382

SEQ ID NO: 32281 - protein, 15 aa, Artificial Sequence
  Description of Artificial Sequence: Synthetic peptide
  XENP022382 vlCDR1
RASQSVDYDGDSYMN

SEQ ID NO: 32282 - protein, 7 aa, Artificial Sequence
  Description of Artificial Sequence: Synthetic peptide
  XENP022382 vlCDR2
AASELES

SEQ ID NO: 32283 - protein, 9 aa, Artificial Sequence
  Description of Artificial Sequence: Synthetic peptide
  XENP022382 vlCDR3
QQSNEDPFT

SEQ ID NO: 32284 - protein, 226 aa, Artificial Sequence
  Description of Artificial Sequence: Synthetic polypeptide
  XENP022383 7G8_H3.33_L1.11_Fab Heavy Chain
EVQLVESGGGLVQPGGSLRLSCAASGFTFDDAWMGWVRQAPGKGLEWVAEISTKANNHATYYAESVKGRFTISRDDSKSSVYLQMNSLRAEDTAVYYCTRLATWDWYFDVWGQGTTVTVSSASTKGPSVFPLAPSSKSTSGGTAALGCLVKDYFPEPVTVSWNSGALTSGVHTFPAVLQSSGLYSLSSVVTVPSSSLGTQTYICNVNHKPSNTKVDKKVEPKSCGS

SEQ ID NO: 32285 - protein, 121 aa, Artificial Sequence; identical to SEQ ID NO: 22505
  Description of Artificial Sequence: Synthetic polypeptide
  VH of XENP022383

SEQ ID NO: 32286 - protein, 5 aa, Artificial Sequence
  Description of Artificial Sequence: Synthetic peptide
  XENP022383 vhCDR1
DAWMG

SEQ ID NO: 32287 - protein, 19 aa, Artificial Sequence
  Description of Artificial Sequence: Synthetic peptide
  XENP022383 vhCDR2
EISTKANNHATYYAESVKG

SEQ ID NO: 32288 - protein, 10 aa, Artificial Sequence
  Description of Artificial Sequence: Synthetic peptide
  XENP022383 vhCDR3
LATWDWYFDV

SEQ ID NO: 32289 - protein, 218 aa, Artificial Sequence; identical to SEQ ID NO: 22359
  Description of Artificial Sequence: Synthetic polypeptide
  XENP022383 7G8_H3.33_L1.11_Fab Light Chain

SEQ ID NO: 32290 - protein, 111 aa, Artificial Sequence; identical to SEQ ID NO: 22360
  Description of Artificial Sequence: Synthetic polypeptide
  VL of XENP022383

SEQ ID NO: 32291 - protein, 15 aa, Artificial Sequence
  Description of Artificial Sequence: Synthetic peptide
  XENP022383 vlCDR1
RASQSVDYDGDSYMN

SEQ ID NO: 32292 - protein, 7 aa, Artificial Sequence
  Description of Artificial Sequence: Synthetic peptide
  XENP022383 vlCDR2
AASELES

SEQ ID NO: 32293 - protein, 9 aa, Artificial Sequence
  Description of Artificial Sequence: Synthetic peptide
  XENP022383 vlCDR3
QQSNEDPFT

SEQ ID NO: 32294 - protein, 226 aa, Artificial Sequence
  Description of Artificial Sequence: Synthetic polypeptide
  XENP022384 7G8_H3.34_L1.11_Fab Heavy Chain
EVQLVESGGGLVQPGGSLRLSCAASGFTFDDAWMDWVRQAPGKGLEWVAEISTKANNHATYYAQSVKGRFTISRDDSKSSVYLQMNSLRAEDTAVYYCTRLATWDWYFDVWGQGTTVTVSSASTKGPSVFPLAPSSKSTSGGTAALGCLVKDYFPEPVTVSWNSGALTSGVHTFPAVLQSSGLYSLSSVVTVPSSSLGTQTYICNVNHKPSNTKVDKKVEPKSCGS

SEQ ID NO: 32295 - protein, 121 aa, Artificial Sequence
  Description of Artificial Sequence: Synthetic polypeptide
  VH of XENP022384
EVQLVESGGGLVQPGGSLRLSCAASGFTFDDAWMDWVRQAPGKGLEWVAEISTKANNHATYYAQSVKGRFTISRDDSKSSVYLQMNSLRAEDTAVYYCTRLATWDWYFDVWGQGTTVTVSS

SEQ ID NO: 32296 - protein, 5 aa, Artificial Sequence
  Description of Artificial Sequence: Synthetic peptide
  XENP022384 vhCDR1
DAWMD

SEQ ID NO: 32297 - protein, 19 aa, Artificial Sequence
  Description of Artificial Sequence: Synthetic peptide
  XENP022384 vhCDR2
EISTKANNHATYYAQSVKG

SEQ ID NO: 32298 - protein, 10 aa, Artificial Sequence
  Description of Artificial Sequence: Synthetic peptide
  XENP022384 vhCDR3
LATWDWYFDV

SEQ ID NO: 32299 - protein, 218 aa, Artificial Sequence; identical to SEQ ID NO: 22359
  Description of Artificial Sequence: Synthetic polypeptide
  XENP022384 7G8_H3.34_L1.11_Fab Light Chain

SEQ ID NO: 32300 - protein, 111 aa, Artificial Sequence; identical to SEQ ID NO: 22360
  Description of Artificial Sequence: Synthetic polypeptide
  VL of XENP022384

SEQ ID NO: 32301 - protein, 15 aa, Artificial Sequence
  Description of Artificial Sequence: Synthetic peptide
  XENP022384 vlCDR1
RASQSVDYDGDSYMN

SEQ ID NO: 32302 - protein, 7 aa, Artificial Sequence
  Description of Artificial Sequence: Synthetic peptide
  XENP022384 vlCDR2
AASELES

SEQ ID NO: 32303 - protein, 9 aa, Artificial Sequence
  Description of Artificial Sequence: Synthetic peptide
  XENP022384 vlCDR3
QQSNEDPFT

SEQ ID NO: 32304 - protein, 226 aa, Artificial Sequence
  Description of Artificial Sequence: Synthetic polypeptide
  XENP022385 7G8_H3.35_L1.11_Fab Heavy Chain
EVQLVESGGGLVQPGGSLRLSCAASGFTFDDAWMDWVRQAPGKGLEWVAEISTKANNHATYYAPSVKGRFTISRDDSKSSVYLQMNSLRAEDTAVYYCTRLATWDWYFDVWGQGTTVTVSSASTKGPSVFPLAPSSKSTSGGTAALGCLVKDYFPEPVTVSWNSGALTSGVHTFPAVLQSSGLYSLSSVVTVPSSSLGTQTYICNVNHKPSNTKVDKKVEPKSCGS

SEQ ID NO: 32305 - protein, 121 aa, Artificial Sequence
  Description of Artificial Sequence: Synthetic polypeptide
  VH of XENP022385
EVQLVESGGGLVQPGGSLRLSCAASGFTFDDAWMDWVRQAPGKGLEWVAEISTKANNHATYYAPSVKGRFTISRDDSKSSVYLQMNSLRAEDTAVYYCTRLATWDWYFDVWGQGTTVTVSS

SEQ ID NO: 32306 - protein, 5 aa, Artificial Sequence
  Description of Artificial Sequence: Synthetic peptide
  XENP022385 vhCDR1
DAWMD

SEQ ID NO: 32307 - protein, 19 aa, Artificial Sequence
  Description of Artificial Sequence: Synthetic peptide
  XENP022385 vhCDR2
EISTKANNHATYYAPSVKG

SEQ ID NO: 32308 - protein, 10 aa, Artificial Sequence
  Description of Artificial Sequence: Synthetic peptide
  XENP022385 vhCDR3
LATWDWYFDV

SEQ ID NO: 32309 - protein, 218 aa, Artificial Sequence; identical to SEQ ID NO: 22359
  Description of Artificial Sequence: Synthetic polypeptide
  XENP022385 7G8_H3.35_L1.11_Fab Light Chain

SEQ ID NO: 32310 - protein, 111 aa, Artificial Sequence; identical to SEQ ID NO: 22360
  Description of Artificial Sequence: Synthetic polypeptide
  VL of XENP022385

SEQ ID NO: 32311 - protein, 15 aa, Artificial Sequence
  Description of Artificial Sequence: Synthetic peptide
  XENP022385 vlCDR1
RASQSVDYDGDSYMN

SEQ ID NO: 32312 - protein, 7 aa, Artificial Sequence
  Description of Artificial Sequence: Synthetic peptide
  XENP022385 vlCDR2
AASELES

SEQ ID NO: 32313 - protein, 9 aa, Artificial Sequence
  Description of Artificial Sequence: Synthetic peptide
  XENP022385 vlCDR3
QQSNEDPFT

SEQ ID NO: 32314 - protein, 226 aa, Artificial Sequence
  Description of Artificial Sequence: Synthetic polypeptide
  XENP022386 7G8_H3.36_L1.11_Fab Heavy Chain
EVQLVESGGGLVQPGGSLRLSCAASGFTFDDAWMDWVRQAPGKGLEWVAEISTKANNHATYYATSVKGRFTISRDDSKSSVYLQMNSLRAEDTAVYYCTRLATWDWYFDVWGQGTTVTVSSASTKGPSVFPLAPSSKSTSGGTAALGCLVKDYFPEPVTVSWNSGALTSGVHTFPAVLQSSGLYSLSSVVTVPSSSLGTQTYICNVNHKPSNTKVDKKVEPKSCGS

SEQ ID NO: 32315 - protein, 121 aa, Artificial Sequence
  Description of Artificial Sequence: Synthetic polypeptide
  VH of XENP022386
EVQLVESGGGLVQPGGSLRLSCAASGFTFDDAWMDWVRQAPGKGLEWVAEISTKANNHATYYATSVKGRFTISRDDSKSSVYLQMNSLRAEDTAVYYCTRLATWDWYFDVWGQGTTVTVSS

SEQ ID NO: 32316 - protein, 5 aa, Artificial Sequence
  Description of Artificial Sequence: Synthetic peptide
  XENP022386 vhCDR1
DAWMD

SEQ ID NO: 32317 - protein, 19 aa, Artificial Sequence
  Description of Artificial Sequence: Synthetic peptide
  XENP022386 vhCDR2
EISTKANNHATYYATSVKG

SEQ ID NO: 32318 - protein, 10 aa, Artificial Sequence
  Description of Artificial Sequence: Synthetic peptide
  XENP022386 vhCDR3
LATWDWYFDV

SEQ ID NO: 32319 - protein, 218 aa, Artificial Sequence; identical to SEQ ID NO: 22359
  Description of Artificial Sequence: Synthetic polypeptide
  XENP022386 7G8_H3.36_L1.11_Fab Light Chain

SEQ ID NO: 32320 - protein, 111 aa, Artificial Sequence; identical to SEQ ID NO: 22360
  Description of Artificial Sequence: Synthetic polypeptide
  VL of XENP022386

SEQ ID NO: 32321 - protein, 15 aa, Artificial Sequence
  Description of Artificial Sequence: Synthetic peptide
  XENP022386 vlCDR1
RASQSVDYDGDSYMN

SEQ ID NO: 32322 - protein, 7 aa, Artificial Sequence
  Description of Artificial Sequence: Synthetic peptide
  XENP022386 vlCDR2
AASELES

SEQ ID NO: 32323 - protein, 9 aa, Artificial Sequence
  Description of Artificial Sequence: Synthetic peptide
  XENP022386 vlCDR3
QQSNEDPFT

SEQ ID NO: 32324 - protein, 226 aa, Artificial Sequence
  Description of Artificial Sequence: Synthetic polypeptide
  XENP022387 7G8_H3.37_L1.11_Fab Heavy Chain
EVQLVESGGGLVQPGGSLRLSCAASGFTFDDAWMDWVRQAPGKGLEWVAEISTKANNHATYYADSVKGRFTISRDDSKSSVYLQMNSLRAEDTAVYYCTRLATWDWYFDVWGQGTTVTVSSASTKGPSVFPLAPSSKSTSGGTAALGCLVKDYFPEPVTVSWNSGALTSGVHTFPAVLQSSGLYSLSSVVTVPSSSLGTQTYICNVNHKPSNTKVDKKVEPKSCGS

SEQ ID NO: 32325 - protein, 121 aa, Artificial Sequence
  Description of Artificial Sequence: Synthetic polypeptide
  VH of XENP022387
EVQLVESGGGLVQPGGSLRLSCAASGFTFDDAWMDWVRQAPGKGLEWVAEISTKANNHATYYADSVKGRFTISRDDSKSSVYLQMNSLRAEDTAVYYCTRLATWDWYFDVWGQGTTVTVSS

SEQ ID NO: 32326 - protein, 5 aa, Artificial Sequence
  Description of Artificial Sequence: Synthetic peptide
  XENP022387 vhCDR1
DAWMD

SEQ ID NO: 32327 - protein, 19 aa, Artificial Sequence
  Description of Artificial Sequence: Synthetic peptide
  XENP022387 vhCDR2
EISTKANNHATYYADSVKG

SEQ ID NO: 32328 - protein, 10 aa, Artificial Sequence
  Description of Artificial Sequence: Synthetic peptide
  XENP022387 vhCDR3
LATWDWYFDV

SEQ ID NO: 32329 - protein, 218 aa, Artificial Sequence; identical to SEQ ID NO: 22359
  Description of Artificial Sequence: Synthetic polypeptide
  XENP022387 7G8_H3.37_L1.11_Fab Light Chain

SEQ ID NO: 32330 - protein, 111 aa, Artificial Sequence; identical to SEQ ID NO: 22360
  Description of Artificial Sequence: Synthetic polypeptide
  VL of XENP022387

SEQ ID NO: 32331 - protein, 15 aa, Artificial Sequence
  Description of Artificial Sequence: Synthetic peptide
  XENP022387 vlCDR1
RASQSVDYDGDSYMN

SEQ ID NO: 32332 - protein, 7 aa, Artificial Sequence
  Description of Artificial Sequence: Synthetic peptide
  XENP022387 vlCDR2
AASELES

SEQ ID NO: 32333 - protein, 9 aa, Artificial Sequence
  Description of Artificial Sequence: Synthetic peptide
  XENP022387 vlCDR3
QQSNEDPFT

SEQ ID NO: 32334 - protein, 226 aa, Artificial Sequence
  Description of Artificial Sequence: Synthetic polypeptide
  XENP022388 7G8_H3.38_L1.11_Fab Heavy Chain
EVQLVESGGGLVQPGGSLRLSCAASGFTFDDAWMDWVRQAPGKGLEWVAEISTKANNHATYYAGSVKGRFTISRDDSKSSVYLQMNSLRAEDTAVYYCTRLATWDWYFDVWGQGTTVTVSSASTKGPSVFPLAPSSKSTSGGTAALGCLVKDYFPEPVTVSWNSGALTSGVHTFPAVLQSSGLYSLSSVVTVPSSSLGTQTYICNVNHKPSNTKVDKKVEPKSCGS

SEQ ID NO: 32335 - protein, 121 aa, Artificial Sequence
  Description of Artificial Sequence: Synthetic polypeptide
  VH of XENP022388
EVQLVESGGGLVQPGGSLRLSCAASGFTFDDAWMDWVRQAPGKGLEWVAEISTKANNHATYYAGSVKGRFTISRDDSKSSVYLQMNSLRAEDTAVYYCTRLATWDWYFDVWGQGTTVTVSS

SEQ ID NO: 32336 - protein, 5 aa, Artificial Sequence
  Description of Artificial Sequence: Synthetic peptide
  XENP022388 vhCDR1
DAWMD

SEQ ID NO: 32337 - protein, 19 aa, Artificial Sequence
  Description of Artificial Sequence: Synthetic peptide
  XENP022388 vhCDR2
EISTKANNHATYYAGSVKG

SEQ ID NO: 32338 - protein, 10 aa, Artificial Sequence
  Description of Artificial Sequence: Synthetic peptide
  XENP022388 vhCDR3
LATWDWYFDV

SEQ ID NO: 32339 - protein, 218 aa, Artificial Sequence; identical to SEQ ID NO: 22359
  Description of Artificial Sequence: Synthetic polypeptide
  XENP022388 7G8_H3.38_L1.11_Fab Light Chain

SEQ ID NO: 32340 - protein, 111 aa, Artificial Sequence; identical to SEQ ID NO: 22360
  Description of Artificial Sequence: Synthetic polypeptide
  VL of XENP022388

SEQ ID NO: 32341 - protein, 15 aa, Artificial Sequence
  Description of Artificial Sequence: Synthetic peptide
  XENP022388 vlCDR1
RASQSVDYDGDSYMN

SEQ ID NO: 32342 - protein, 7 aa, Artificial Sequence
  Description of Artificial Sequence: Synthetic peptide
  XENP022388 vlCDR2
AASELES

SEQ ID NO: 32343 - protein, 9 aa, Artificial Sequence
  Description of Artificial Sequence: Synthetic peptide
  XENP022388 vlCDR3
QQSNEDPFT

SEQ ID NO: 32344 - protein, 226 aa, Artificial Sequence
  Description of Artificial Sequence: Synthetic polypeptide
  XENP022389 7G8_H3.39_L1.11_Fab Heavy Chain
EVQLVESGGGLVQPGGSLRLSCAASGFTFDDAWMDWVRQAPGKGLEWVAEISTKANNHATYYAASVKGRFTISRDDSKSSVYLQMNSLRAEDTAVYYCTRLATWDWYFDVWGQGTTVTVSSASTKGPSVFPLAPSSKSTSGGTAALGCLVKDYFPEPVTVSWNSGALTSGVHTFPAVLQSSGLYSLSSVVTVPSSSLGTQTYICNVNHKPSNTKVDKKVEPKSCGS

SEQ ID NO: 32345 - protein, 121 aa, Artificial Sequence
  Description of Artificial Sequence: Synthetic polypeptide
  VH of XENP022389
EVQLVESGGGLVQPGGSLRLSCAASGFTFDDAWMDWVRQAPGKGLEWVAEISTKANNHATYYAASVKGRFTISRDDSKSSVYLQMNSLRAEDTAVYYCTRLATWDWYFDVWGQGTTVTVSS

SEQ ID NO: 32346 - protein, 5 aa, Artificial Sequence
  Description of Artificial Sequence: Synthetic peptide
  XENP022389 vhCDR1
DAWMD

SEQ ID NO: 32347 - protein, 19 aa, Artificial Sequence
  Description of Artificial Sequence: Synthetic peptide
  XENP022389 vhCDR2
EISTKANNHATYYAASVKG

SEQ ID NO: 32348 - protein, 10 aa, Artificial Sequence
  Description of Artificial Sequence: Synthetic peptide
  XENP022389 vhCDR3
LATWDWYFDV

SEQ ID NO: 32349 - protein, 218 aa, Artificial Sequence; identical to SEQ ID NO: 22359
  Description of Artificial Sequence: Synthetic polypeptide
  XENP022389 7G8_H3.39_L1.11_Fab Light Chain

SEQ ID NO: 32350 - protein, 111 aa, Artificial Sequence; identical to SEQ ID NO: 22360
  Description of Artificial Sequence: Synthetic polypeptide
  VL of XENP022389

SEQ ID NO: 32351 - protein, 15 aa, Artificial Sequence
  Description of Artificial Sequence: Synthetic peptide
  XENP022389 vlCDR1
RASQSVDYDGDSYMN

SEQ ID NO: 32352 - protein, 7 aa, Artificial Sequence
  Description of Artificial Sequence: Synthetic peptide
  XENP022389 vlCDR2
AASELES

SEQ ID NO: 32353 - protein, 9 aa, Artificial Sequence
  Description of Artificial Sequence: Synthetic peptide
  XENP022389 vlCDR3
QQSNEDPFT

SEQ ID NO: 32354 - protein, 226 aa, Artificial Sequence
  Description of Artificial Sequence: Synthetic polypeptide
  XENP022390 7G8_H3.40_L1.11_Fab Heavy Chain
EVQLVESGGGLVQPGGSLRLSCAASGFTFDDAWMDWVRQAPGKGLEWVAEISTKANNHATYYAVSVKGRFTISRDDSKSSVYLQMNSLRAEDTAVYYCTRLATWDWYFDVWGQGTTVTVSSASTKGPSVFPLAPSSKSTSGGTAALGCLVKDYFPEPVTVSWNSGALTSGVHTFPAVLQSSGLYSLSSVVTVPSSSLGTQTYICNVNHKPSNTKVDKKVEPKSCGS

SEQ ID NO: 32355 - protein, 121 aa, Artificial Sequence
  Description of Artificial Sequence: Synthetic polypeptide
  VH of XENP022390
EVQLVESGGGLVQPGGSLRLSCAASGFTFDDAWMDWVRQAPGKGLEWVAEISTKANNHATYYAVSVKGRFTISRDDSKSSVYLQMNSLRAEDTAVYYCTRLATWDWYFDVWGQGTTVTVSS

SEQ ID NO: 32356 - protein, 5 aa, Artificial Sequence
  Description of Artificial Sequence: Synthetic peptide
  XENP022390 vhCDR1
DAWMD

SEQ ID NO: 32357 - protein, 19 aa, Artificial Sequence
  Description of Artificial Sequence: Synthetic peptide
  XENP022390 vhCDR2
EISTKANNHATYYAVSVKG

SEQ ID NO: 32358 - protein, 10 aa, Artificial Sequence
  Description of Artificial Sequence: Synthetic peptide
  XENP022390 vhCDR3
LATWDWYFDV

SEQ ID NO: 32359 - protein, 218 aa, Artificial Sequence; identical to SEQ ID NO: 22359
  Description of Artificial Sequence: Synthetic polypeptide
  XENP022390 7G8_H3.40_L1.11_Fab Light Chain

SEQ ID NO: 32360 - protein, 111 aa, Artificial Sequence; identical to SEQ ID NO: 22360
  Description of Artificial Sequence: Synthetic polypeptide
  VL of XENP022390

SEQ ID NO: 32361 - protein, 15 aa, Artificial Sequence
  Description of Artificial Sequence: Synthetic peptide
  XENP022390 vlCDR1
RASQSVDYDGDSYMN

SEQ ID NO: 32362 - protein, 7 aa, Artificial Sequence
  Description of Artificial Sequence: Synthetic peptide
  XENP022390 vlCDR2
AASELES

SEQ ID NO: 32363 - protein, 9 aa, Artificial Sequence
  Description of Artificial Sequence: Synthetic peptide
  XENP022390 vlCDR3
QQSNEDPFT

SEQ ID NO: 32364 - protein, 226 aa, Artificial Sequence
  Description of Artificial Sequence: Synthetic polypeptide
  XENP022391 7G8_H3.41_L1.11_Fab Heavy Chain
EVQLVESGGGLVQPGGSLRLSCAASGFTFDDAWMDWVRQAPGKGLEWVAEISTKANNHATYYAESVKGRFTISRDTSKSSVYLQMNSLRAEDTAVYYCTRLATWDWYFDVWGQGTTVTVSSASTKGPSVFPLAPSSKSTSGGTAALGCLVKDYFPEPVTVSWNSGALTSGVHTFPAVLQSSGLYSLSSVVTVPSSSLGTQTYICNVNHKPSNTKVDKKVEPKSCGS

SEQ ID NO: 32365 - protein, 121 aa, Artificial Sequence
  Description of Artificial Sequence: Synthetic polypeptide
  VH of XENP022391
EVQLVESGGGLVQPGGSLRLSCAASGFTFDDAWMDWVRQAPGKGLEWVAEISTKANNHATYYAESVKGRFTISRDTSKSSVYLQMNSLRAEDTAVYYCTRLATWDWYFDVWGQGTTVTVSS

SEQ ID NO: 32366 - protein, 5 aa, Artificial Sequence
  Description of Artificial Sequence: Synthetic peptide
  XENP022391 vhCDR1
DAWMD

SEQ ID NO: 32367 - protein, 19 aa, Artificial Sequence
  Description of Artificial Sequence: Synthetic peptide
  XENP022391 vhCDR2
EISTKANNHATYYAESVKG

SEQ ID NO: 32368 - protein, 10 aa, Artificial Sequence
  Description of Artificial Sequence: Synthetic peptide
  XENP022391 vhCDR3
LATWDWYFDV

SEQ ID NO: 32369 - protein, 218 aa, Artificial Sequence; identical to SEQ ID NO: 22359
  Description of Artificial Sequence: Synthetic polypeptide
  XENP022391 7G8_H3.41_L1.11_Fab Light Chain

SEQ ID NO: 32370 - protein, 111 aa, Artificial Sequence; identical to SEQ ID NO: 22360
  Description of Artificial Sequence: Synthetic polypeptide
  VL of XENP022391

SEQ ID NO: 32371 - protein, 15 aa, Artificial Sequence
  Description of Artificial Sequence: Synthetic peptide
  XENP022391 vlCDR1
RASQSVDYDGDSYMN

SEQ ID NO: 32372 - protein, 7 aa, Artificial Sequence
  Description of Artificial Sequence: Synthetic peptide
  XENP022391 vlCDR2
AASELES

SEQ ID NO: 32373 - protein, 9 aa, Artificial Sequence
  Description of Artificial Sequence: Synthetic peptide
  XENP022391 vlCDR3
QQSNEDPFT

SEQ ID NO: 32374 - protein, 226 aa, Artificial Sequence
  Description of Artificial Sequence: Synthetic polypeptide
  XENP022392 7G8_H3.42_L1.11_Fab Heavy Chain
EVQLVESGGGLVQPGGSLRLSCAASGFTFDDAWMDWVRQAPGKGLEWVAEISTKANNHATYYAESVKGRFTISRDRSKSSVYLQMNSLRAEDTAVYYCTRLATWDWYFDVWGQGTTVTVSSASTKGPSVFPLAPSSKSTSGGTAALGCLVKDYFPEPVTVSWNSGALTSGVHTFPAVLQSSGLYSLSSVVTVPSSSLGTQTYICNVNHKPSNTKVDKKVEPKSCGS

SEQ ID NO: 32375 - protein, 121 aa, Artificial Sequence
  Description of Artificial Sequence: Synthetic polypeptide
  VH of XENP022392
EVQLVESGGGLVQPGGSLRLSCAASGFTFDDAWMDWVRQAPGKGLEWVAEISTKANNHATYYAESVKGRFTISRDRSKSSVYLQMNSLRAEDTAVYYCTRLATWDWYFDVWGQGTTVTVSS

SEQ ID NO: 32376 - protein, 5 aa, Artificial Sequence
  Description of Artificial Sequence: Synthetic peptide
  XENP022392 vhCDR1
DAWMD

SEQ ID NO: 32377 - protein, 19 aa, Artificial Sequence
  Description of Artificial Sequence: Synthetic peptide
  XENP022392 vhCDR2
EISTKANNHATYYAESVKG

SEQ ID NO: 32378 - protein, 10 aa, Artificial Sequence
  Description of Artificial Sequence: Synthetic peptide
  XENP022392 vhCDR3
LATWDWYFDV

SEQ ID NO: 32379 - protein, 218 aa, Artificial Sequence; identical to SEQ ID NO: 22359
  Description of Artificial Sequence: Synthetic polypeptide
  XENP022392 7G8_H3.42_L1.11_Fab Light Chain

SEQ ID NO: 32380 - protein, 111 aa, Artificial Sequence; identical to SEQ ID NO: 22360
  Description of Artificial Sequence: Synthetic polypeptide
  VL of XENP022392

SEQ ID NO: 32381 - protein, 15 aa, Artificial Sequence
  Description of Artificial Sequence: Synthetic peptide
  XENP022392 vlCDR1
RASQSVDYDGDSYMN

SEQ ID NO: 32382 - protein, 7 aa, Artificial Sequence
  Description of Artificial Sequence: Synthetic peptide
  XENP022392 vlCDR2
AASELES

SEQ ID NO: 32383 - protein, 9 aa, Artificial Sequence
  Description of Artificial Sequence: Synthetic peptide
  XENP022392 vlCDR3
QQSNEDPFT

SEQ ID NO: 32384 - protein, 226 aa, Artificial Sequence
  Description of Artificial Sequence: Synthetic polypeptide
  XENP022393 7G8_H3.43_L1.11_Fab Heavy Chain
EVQLVESGGGLVQPGGSLRLSCAASGFTFDDAWMDWVRQAPGKGLEWVAEISTKANNHATYYAESVKGRFTISRDMSKSSVYLQMNSLRAEDTAVYYCTRLATWDWYFDVWGQGTTVTVSSASTKGPSVFPLAPSSKSTSGGTAALGCLVKDYFPEPVTVSWNSGALTSGVHTFPAVLQSSGLYSLSSVVTVPSSSLGTQTYICNVNHKPSNTKVDKKVEPKSCGS

SEQ ID NO: 32385 - protein, 121 aa, Artificial Sequence
  Description of Artificial Sequence: Synthetic polypeptide
  VH of XENP022393
EVQLVESGGGLVQPGGSLRLSCAASGFTFDDAWMDWVRQAPGKGLEWVAEISTKANNHATYYAESVKGRFTISRDMSKSSVYLQMNSLRAEDTAVYYCTRLATWDWYFDVWGQGTTVTVSS

SEQ ID NO: 32386 - protein, 5 aa, Artificial Sequence
  Description of Artificial Sequence: Synthetic peptide
  XENP022393 vhCDR1
DAWMD

SEQ ID NO: 32387 - protein, 19 aa, Artificial Sequence
  Description of Artificial Sequence: Synthetic peptide
  XENP022393 vhCDR2
EISTKANNHATYYAESVKG

SEQ ID NO: 32388 - protein, 10 aa, Artificial Sequence
  Description of Artificial Sequence: Synthetic peptide
  XENP022393 vhCDR3
LATWDWYFDV

SEQ ID NO: 32389 - protein, 218 aa, Artificial Sequence; identical to SEQ ID NO: 22359
  Description of Artificial Sequence: Synthetic polypeptide
  XENP022393 7G8_H3.43_L1.11_Fab Light Chain

SEQ ID NO: 32390 - protein, 111 aa, Artificial Sequence; identical to SEQ ID NO: 22360
  Description of Artificial Sequence: Synthetic polypeptide
  VL of XENP022393

SEQ ID NO: 32391 - protein, 15 aa, Artificial Sequence
  Description of Artificial Sequence: Synthetic peptide
  XENP022393 vlCDR1
RASQSVDYDGDSYMN

SEQ ID NO: 32392 - protein, 7 aa, Artificial Sequence
  Description of Artificial Sequence: Synthetic peptide
  XENP022393 vlCDR2
AASELES

SEQ ID NO: 32393 - protein, 9 aa, Artificial Sequence
  Description of Artificial Sequence: Synthetic peptide
  XENP022393 vlCDR3
QQSNEDPFT

SEQ ID NO: 32394 - protein, 226 aa, Artificial Sequence
  Description of Artificial Sequence: Synthetic polypeptide
  XENP022394 7G8_H3.44_L1.11_Fab Heavy Chain
EVQLVESGGGLVQPGGSLRLSCAASGFTFDDAWMDWVRQAPGKGLEWVAEISTKANNHATYYAESVKGRFTISRDESKSSVYLQMNSLRAEDTAVYYCTRLATWDWYFDVWGQGTTVTVSSASTKGPSVFPLAPSSKSTSGGTAALGCLVKDYFPEPVTVSWNSGALTSGVHTFPAVLQSSGLYSLSSVVTVPSSSLGTQTYICNVNHKPSNTKVDKKVEPKSCGS

SEQ ID NO: 32395 - protein, 121 aa, Artificial Sequence
  Description of Artificial Sequence: Synthetic polypeptide
  VH of XENP022394
EVQLVESGGGLVQPGGSLRLSCAASGFTFDDAWMDWVRQAPGKGLEWVAEISTKANNHATYYAESVKGRFTISRDESKSSVYLQMNSLRAEDTAVYYCTRLATWDWYFDVWGQGTTVTVSS

SEQ ID NO: 32396 - protein, 5 aa, Artificial Sequence
  Description of Artificial Sequence: Synthetic peptide
  XENP022394 vhCDR1
DAWMD

SEQ ID NO: 32397 - protein, 19 aa, Artificial Sequence
  Description of Artificial Sequence: Synthetic peptide
  XENP022394 vhCDR2
EISTKANNHATYYAESVKG

SEQ ID NO: 32398 - protein, 10 aa, Artificial Sequence
  Description of Artificial Sequence: Synthetic peptide
  XENP022394 vhCDR3
LATWDWYFDV

SEQ ID NO: 32399 - protein, 218 aa, Artificial Sequence; identical to SEQ ID NO: 22359
  Description of Artificial Sequence: Synthetic polypeptide
  XENP022394 7G8_H3.44_L1.11_Fab Light Chain

SEQ ID NO: 32400 - protein, 111 aa, Artificial Sequence; identical to SEQ ID NO: 22360
  Description of Artificial Sequence: Synthetic polypeptide
  VL of XENP022394

SEQ ID NO: 32401 - protein, 15 aa, Artificial Sequence
  Description of Artificial Sequence: Synthetic peptide
  XENP022394 vlCDR1
RASQSVDYDGDSYMN

SEQ ID NO: 32402 - protein, 7 aa, Artificial Sequence
  Description of Artificial Sequence: Synthetic peptide
  XENP022394 vlCDR2
AASELES

SEQ ID NO: 32403 - protein, 9 aa, Artificial Sequence
  Description of Artificial Sequence: Synthetic peptide
  XENP022394 vlCDR3
QQSNEDPFT

SEQ ID NO: 32404 - protein, 226 aa, Artificial Sequence
  Description of Artificial Sequence: Synthetic polypeptide
  XENP022395 7G8_H3.45_L1.11_Fab Heavy Chain
EVQLVESGGGLVQPGGSLRLSCAASGFTFDDAWMDWVRQAPGKGLEWVAEISTKANNHATYYAESVKGRFTISRDNSKSSVYLQMNSLRAEDTAVYYCTRLATWDWYFDVWGQGTTVTVSSASTKGPSVFPLAPSSKSTSGGTAALGCLVKDYFPEPVTVSWNSGALTSGVHTFPAVLQSSGLYSLSSVVTVPSSSLGTQTYICNVNHKPSNTKVDKKVEPKSCGS

SEQ ID NO: 32405 - protein, 121 aa, Artificial Sequence
  Description of Artificial Sequence: Synthetic polypeptide
  VH of XENP022395
EVQLVESGGGLVQPGGSLRLSCAASGFTFDDAWMDWVRQAPGKGLEWVAEISTKANNHATYYAESVKGRFTISRDNSKSSVYLQMNSLRAEDTAVYYCTRLATWDWYFDVWGQGTTVTVSS

SEQ ID NO: 32406 - protein, 5 aa, Artificial Sequence
  Description of Artificial Sequence: Synthetic peptide
  XENP022395 vhCDR1
DAWMD

SEQ ID NO: 32407 - protein, 19 aa, Artificial Sequence
  Description of Artificial Sequence: Synthetic peptide
  XENP022395 vhCDR2
EISTKANNHATYYAESVKG

SEQ ID NO: 32408 - protein, 10 aa, Artificial Sequence
  Description of Artificial Sequence: Synthetic peptide
  XENP022395 vhCDR3
LATWDWYFDV

SEQ ID NO: 32409 - protein, 218 aa, Artificial Sequence; identical to SEQ ID NO: 22359
  Description of Artificial Sequence: Synthetic polypeptide
  XENP022395 7G8_H3.45_L1.11_Fab Light Chain

SEQ ID NO: 32410 - protein, 111 aa, Artificial Sequence; identical to SEQ ID NO: 22360
  Description of Artificial Sequence: Synthetic polypeptide
  VL of XENP022395

SEQ ID NO: 32411 - protein, 15 aa, Artificial Sequence
  Description of Artificial Sequence: Synthetic peptide
  XENP022395 vlCDR1
RASQSVDYDGDSYMN

SEQ ID NO: 32412 - protein, 7 aa, Artificial Sequence
  Description of Artificial Sequence: Synthetic peptide
  XENP022395 vlCDR2
AASELES

SEQ ID NO: 32413 - protein, 9 aa, Artificial Sequence
  Description of Artificial Sequence: Synthetic peptide
  XENP022395 vlCDR3
QQSNEDPFT

SEQ ID NO: 32414 - protein, 226 aa, Artificial Sequence
  Description of Artificial Sequence: Synthetic polypeptide
  XENP022396 7G8_H3.46_L1.11_Fab Heavy Chain
EVQLVESGGGLVQPGGSLRLSCAASGFTFDDAWMDWVRQAPGKGLEWVAEISTKANNHATYYAESVKGRFTISRDKSKSSVYLQMNSLRAEDTAVYYCTRLATWDWYFDVWGQGTTVTVSSASTKGPSVFPLAPSSKSTSGGTAALGCLVKDYFPEPVTVSWNSGALTSGVHTFPAVLQSSGLYSLSSVVTVPSSSLGTQTYICNVNHKPSNTKVDKKVEPKSCGS

SEQ ID NO: 32415 - protein, 121 aa, Artificial Sequence
  Description of Artificial Sequence: Synthetic polypeptide
  VH of XENP022396
EVQLVESGGGLVQPGGSLRLSCAASGFTFDDAWMDWVRQAPGKGLEWVAEISTKANNHATYYAESVKGRFTISRDKSKSSVYLQMNSLRAEDTAVYYCTRLATWDWYFDVWGQGTTVTVSS

SEQ ID NO: 32416 - protein, 5 aa, Artificial Sequence
  Description of Artificial Sequence: Synthetic peptide
  XENP022396 vhCDR1
DAWMD

SEQ ID NO: 32417 - protein, 19 aa, Artificial Sequence
  Description of Artificial Sequence: Synthetic peptide
  XENP022396 vhCDR2
EISTKANNHATYYAESVKG

SEQ ID NO: 32418 - protein, 10 aa, Artificial Sequence
  Description of Artificial Sequence: Synthetic peptide
  XENP022396 vhCDR3
LATWDWYFDV

SEQ ID NO: 32419 - protein, 218 aa, Artificial Sequence; identical to SEQ ID NO: 22359
  Description of Artificial Sequence: Synthetic polypeptide
  XENP022396 7G8_H3.46_L1.11_Fab Light Chain

SEQ ID NO: 32420 - protein, 111 aa, Artificial Sequence; identical to SEQ ID NO: 22360
  Description of Artificial Sequence: Synthetic polypeptide
  VL of XENP022396

SEQ ID NO: 32421 - protein, 15 aa, Artificial Sequence
  Description of Artificial Sequence: Synthetic peptide
  XENP022396 vlCDR1
RASQSVDYDGDSYMN

SEQ ID NO: 32422 - protein, 7 aa, Artificial Sequence
  Description of Artificial Sequence: Synthetic peptide
  XENP022396 vlCDR2
AASELES

SEQ ID NO: 32423 - protein, 9 aa, Artificial Sequence
  Description of Artificial Sequence: Synthetic peptide
  XENP022396 vlCDR3
QQSNEDPFT

SEQ ID NO: 32424 - protein, 226 aa, Artificial Sequence
  Description of Artificial Sequence: Synthetic polypeptide
  XENP022401 7G8_H3.47_L1.11_Fab Heavy Chain
EVQLVESGGGLVQPGGSLRLSCAASGFTFDDAWMDWVRQAPGKGLEWVAEISTKANNHATYYAESVKGRFTISRDDSKSTVYLQMNSLRAEDTAVYYCTRLATWDWYFDVWGQGTTVTVSSASTKGPSVFPLAPSSKSTSGGTAALGCLVKDYFPEPVTVSWNSGALTSGVHTFPAVLQSSGLYSLSSVVTVPSSSLGTQTYICNVNHKPSNTKVDKKVEPKSCGS

SEQ ID NO: 32425 - protein, 121 aa, Artificial Sequence
  Description of Artificial Sequence: Synthetic polypeptide
  VH of XENP022401
EVQLVESGGGLVQPGGSLRLSCAASGFTFDDAWMDWVRQAPGKGLEWVAEISTKANNHATYYAESVKGRFTISRDDSKSTVYLQMNSLRAEDTAVYYCTRLATWDWYFDVWGQGTTVTVSS

SEQ ID NO: 32426 - protein, 5 aa, Artificial Sequence
  Description of Artificial Sequence: Synthetic peptide
  XENP022401 vhCDR1
DAWMD

SEQ ID NO: 32427 - protein, 19 aa, Artificial Sequence
  Description of Artificial Sequence: Synthetic peptide
  XENP022401 vhCDR2
EISTKANNHATYYAESVKG

SEQ ID NO: 32428 - protein, 10 aa, Artificial Sequence
  Description of Artificial Sequence: Synthetic peptide
  XENP022401 vhCDR3
LATWDWYFDV

SEQ ID NO: 32429 - protein, 218 aa, Artificial Sequence; identical to SEQ ID NO: 22359
  Description of Artificial Sequence: Synthetic polypeptide
  XENP022401 7G8_H3.47_L1.11_Fab Light Chain

SEQ ID NO: 32430 - protein, 111 aa, Artificial Sequence; identical to SEQ ID NO: 22360
  Description of Artificial Sequence: Synthetic polypeptide
  VL of XENP022401

SEQ ID NO: 32431 - protein, 15 aa, Artificial Sequence
  Description of Artificial Sequence: Synthetic peptide
  XENP022401 vlCDR1
RASQSVDYDGDSYMN

SEQ ID NO: 32432 - protein, 7 aa, Artificial Sequence
  Description of Artificial Sequence: Synthetic peptide
  XENP022401 vlCDR2
AASELES

SEQ ID NO: 32433 - protein, 9 aa, Artificial Sequence
  Description of Artificial Sequence: Synthetic peptide
  XENP022401 vlCDR3
QQSNEDPFT

SEQ ID NO: 32434 - protein, 226 aa, Artificial Sequence
  Description of Artificial Sequence: Synthetic polypeptide
  XENP022402 7G8_H3.48_L1.11_Fab Heavy Chain
EVQLVESGGGLVQPGGSLRLSCAASGFTFDDAWMDWVRQAPGKGLEWVAEISTKANNHATYYAESVKGRFTISRDDSKSQVYLQMNSLRAEDTAVYYCTRLATWDWYFDVWGQGTTVTVSSASTKGPSVFPLAPSSKSTSGGTAALGCLVKDYFPEPVTVSWNSGALTSGVHTFPAVLQSSGLYSLSSVVTVPSSSLGTQTYICNVNHKPSNTKVDKKVEPKSCGS

SEQ ID NO: 32435 - protein, 121 aa, Artificial Sequence
  Description of Artificial Sequence: Synthetic polypeptide
  VH of XENP022402
EVQLVESGGGLVQPGGSLRLSCAASGFTFDDAWMDWVRQAPGKGLEWVAEISTKANNHATYYAESVKGRFTISRDDSKSQVYLQMNSLRAEDTAVYYCTRLATWDWYFDVWGQGTTVTVSS

SEQ ID NO: 32436 - protein, 5 aa, Artificial Sequence
  Description of Artificial Sequence: Synthetic peptide
  XENP022402 vhCDR1
DAWMD

SEQ ID NO: 32437 - protein, 19 aa, Artificial Sequence
  Description of Artificial Sequence: Synthetic peptide
  XENP022402 vhCDR2
EISTKANNHATYYAESVKG

SEQ ID NO: 32438 - protein, 10 aa, Artificial Sequence
  Description of Artificial Sequence: Synthetic peptide
  XENP022402 vhCDR3
LATWDWYFDV

SEQ ID NO: 32439 - protein, 218 aa, Artificial Sequence; identical to SEQ ID NO: 22359
  Description of Artificial Sequence: Synthetic polypeptide
  XENP022402 7G8_H3.48_L1.11_Fab Light Chain

SEQ ID NO: 32440 - protein, 111 aa, Artificial Sequence; identical to SEQ ID NO: 22360
  Description of Artificial Sequence: Synthetic polypeptide
  VL of XENP022402

SEQ ID NO: 32441 - protein, 15 aa, Artificial Sequence
  Description of Artificial Sequence: Synthetic peptide
  XENP022402 vlCDR1
RASQSVDYDGDSYMN

SEQ ID NO: 32442 - protein, 7 aa, Artificial Sequence
  Description of Artificial Sequence: Synthetic peptide
  XENP022402 vlCDR2
AASELES

SEQ ID NO: 32443 - protein, 9 aa, Artificial Sequence
  Description of Artificial Sequence: Synthetic peptide
  XENP022402 vlCDR3
QQSNEDPFT

SEQ ID NO: 32444 - protein, 226 aa, Artificial Sequence
  Description of Artificial Sequence: Synthetic polypeptide
  XENP022403 7G8_H3.49_L1.11_Fab Heavy Chain
EVQLVESGGGLVQPGGSLRLSCAASGFTFDDAWMDWVRQAPGKGLEWVAEISTKANNHATYYAESVKGRFTISRDDSKSIVYLQMNSLRAEDTAVYYCTRLATWDWYFDVWGQGTTVTVSSASTKGPSVFPLAPSSKSTSGGTAALGCLVKDYFPEPVTVSWNSGALTSGVHTFPAVLQSSGLYSLSSVVTVPSSSLGTQTYICNVNHKPSNTKVDKKVEPKSCGS

SEQ ID NO: 32445 - protein, 121 aa, Artificial Sequence
  Description of Artificial Sequence: Synthetic polypeptide
  VH of XENP022403
EVQLVESGGGLVQPGGSLRLSCAASGFTFDDAWMDWVRQAPGKGLEWVAEISTKANNHATYYAESVKGRFTISRDDSKSIVYLQMNSLRAEDTAVYYCTRLATWDWYFDVWGQGTTVTVSS

SEQ ID NO: 32446 - protein, 5 aa, Artificial Sequence
  Description of Artificial Sequence: Synthetic peptide
  XENP022403 vhCDR1
DAWMD

SEQ ID NO: 32447 - protein, 19 aa, Artificial Sequence
  Description of Artificial Sequence: Synthetic peptide
  XENP022403 vhCDR2
EISTKANNHATYYAESVKG

SEQ ID NO: 32448 - protein, 10 aa, Artificial Sequence
  Description of Artificial Sequence: Synthetic peptide
  XENP022403 vhCDR3
LATWDWYFDV

SEQ ID NO: 32449 - protein, 218 aa, Artificial Sequence; identical to SEQ ID NO: 22359
  Description of Artificial Sequence: Synthetic polypeptide
  XENP022403 7G8_H3.49_L1.11_Fab Light Chain

SEQ ID NO: 32450 - protein, 111 aa, Artificial Sequence; identical to SEQ ID NO: 22360
  Description of Artificial Sequence: Synthetic polypeptide
  VL of XENP022403

SEQ ID NO: 32451 - protein, 15 aa, Artificial Sequence
  Description of Artificial Sequence: Synthetic peptide
  XENP022403 vlCDR1
RASQSVDYDGDSYMN

SEQ ID NO: 32452 - protein, 7 aa, Artificial Sequence
  Description of Artificial Sequence: Synthetic peptide
  XENP022403 vlCDR2
AASELES

SEQ ID NO: 32453 - protein, 9 aa, Artificial Sequence
  Description of Artificial Sequence: Synthetic peptide
  XENP022403 vlCDR3
QQSNEDPFT

SEQ ID NO: 32454 - protein, 226 aa, Artificial Sequence
  Description of Artificial Sequence: Synthetic polypeptide
  XENP022404 7G8_H3.50_L1.11_Fab Heavy Chain
EVQLVESGGGLVQPGGSLRLSCAASGFTFDDAWMDWVRQAPGKGLEWVAEISTKANNHATYYAESVKGRFTISRDDSKSSAYLQMNSLRAEDTAVYYCTRLATWDWYFDVWGQGTTVTVSSASTKGPSVFPLAPSSKSTSGGTAALGCLVKDYFPEPVTVSWNSGALTSGVHTFPAVLQSSGLYSLSSVVTVPSSSLGTQTYICNVNHKPSNTKVDKKVEPKSCGS

SEQ ID NO: 32455 - protein, 121 aa, Artificial Sequence
  Description of Artificial Sequence: Synthetic polypeptide
  VH of XENP022404
EVQLVESGGGLVQPGGSLRLSCAASGFTFDDAWMDWVRQAPGKGLEWVAEISTKANNHATYYAESVKGRFTISRDDSKSSAYLQMNSLRAEDTAVYYCTRLATWDWYFDVWGQGTTVTVSS

SEQ ID NO: 32456 - protein, 5 aa, Artificial Sequence
  Description of Artificial Sequence: Synthetic peptide
  XENP022404 vhCDR1
DAWMD

SEQ ID NO: 32457 - protein, 19 aa, Artificial Sequence
  Description of Artificial Sequence: Synthetic peptide
  XENP022404 vhCDR2
EISTKANNHATYYAESVKG

SEQ ID NO: 32458 - protein, 10 aa, Artificial Sequence
  Description of Artificial Sequence: Synthetic peptide
  XENP022404 vhCDR3
LATWDWYFDV

SEQ ID NO: 32459 - protein, 218 aa, Artificial Sequence; identical to SEQ ID NO: 22359
  Description of Artificial Sequence: Synthetic polypeptide
  XENP022404 7G8_H3.50_L1.11_Fab Light Chain

SEQ ID NO: 32460 - protein, 111 aa, Artificial Sequence; identical to SEQ ID NO: 22360
  Description of Artificial Sequence: Synthetic polypeptide
  VL of XENP022404

SEQ ID NO: 32461 - protein, 15 aa, Artificial Sequence
  Description of Artificial Sequence: Synthetic peptide
  XENP022404 vlCDR1
RASQSVDYDGDSYMN

SEQ ID NO: 32462 - protein, 7 aa, Artificial Sequence
  Description of Artificial Sequence: Synthetic peptide
  XENP022404 vlCDR2
AASELES

SEQ ID NO: 32463 - protein, 9 aa, Artificial Sequence
  Description of Artificial Sequence: Synthetic peptide
  XENP022404 vlCDR3
QQSNEDPFT

SEQ ID NO: 32464 - protein, 226 aa, Artificial Sequence
  Description of Artificial Sequence: Synthetic polypeptide
  XENP022405 7G8_H3.51_L1.11_Fab Heavy Chain
EVQLVESGGGLVQPGGSLRLSCAASGFTFDDAWMDWVRQAPGKGLEWVAEISTKANNHATYYAESVKGRFTISRDDSKSSLYLQMNSLRAEDTAVYYCTRLATWDWYFDVWGQGTTVTVSSASTKGPSVFPLAPSSKSTSGGTAALGCLVKDYFPEPVTVSWNSGALTSGVHTFPAVLQSSGLYSLSSVVTVPSSSLGTQTYICNVNHKPSNTKVDKKVEPKSCGS

SEQ ID NO: 32465 - protein, 121 aa, Artificial Sequence
  Description of Artificial Sequence: Synthetic polypeptide
  VH of XENP022405
EVQLVESGGGLVQPGGSLRLSCAASGFTFDDAWMDWVRQAPGKGLEWVAEISTKANNHATYYAESVKGRFTISRDDSKSSLYLQMNSLRAEDTAVYYCTRLATWDWYFDVWGQGTTVTVSS

SEQ ID NO: 32466 - protein, 5 aa, Artificial Sequence
  Description of Artificial Sequence: Synthetic peptide
  XENP022405 vhCDR1
DAWMD

SEQ ID NO: 32467 - protein, 19 aa, Artificial Sequence
  Description of Artificial Sequence: Synthetic peptide
  XENP022405 vhCDR2
EISTKANNHATYYAESVKG

SEQ ID NO: 32468 - protein, 10 aa, Artificial Sequence
  Description of Artificial Sequence: Synthetic peptide
  XENP022405 vhCDR3
LATWDWYFDV

SEQ ID NO: 32469 - protein, 218 aa, Artificial Sequence; identical to SEQ ID NO: 22359
  Description of Artificial Sequence: Synthetic polypeptide
  XENP022405 7G8_H3.51_L1.11_Fab Light Chain

SEQ ID NO: 32470 - protein, 111 aa, Artificial Sequence; identical to SEQ ID NO: 22360
  Description of Artificial Sequence: Synthetic polypeptide
  VL of XENP022405

SEQ ID NO: 32471 - protein, 15 aa, Artificial Sequence
  Description of Artificial Sequence: Synthetic peptide
  XENP022405 vlCDR1
RASQSVDYDGDSYMN

SEQ ID NO: 32472 - protein, 7 aa, Artificial Sequence
  Description of Artificial Sequence: Synthetic peptide
  XENP022405 vlCDR2
AASELES

SEQ ID NO: 32473 - protein, 9 aa, Artificial Sequence
  Description of Artificial Sequence: Synthetic peptide
  XENP022405 vlCDR3
QQSNEDPFT

SEQ ID NO: 32474 - protein, 226 aa, Artificial Sequence
  Description of Artificial Sequence: Synthetic polypeptide
  XENP022406 7G8_H3.52_L1.11_Fab Heavy Chain
EVQLVESGGGLVQPGGSLRLSCAASGFTFDDAWMDWVRQAPGKGLEWVAEISTKANNHATYYAESVKGRFTISRDDSKSSFYLQMNSLRAEDTAVYYCTRLATWDWYFDVWGQGTTVTVSSASTKGPSVFPLAPSSKSTSGGTAALGCLVKDYFPEPVTVSWNSGALTSGVHTFPAVLQSSGLYSLSSVVTVPSSSLGTQTYICNVNHKPSNTKVDKKVEPKSCGS

SEQ ID NO: 32475 - protein, 121 aa, Artificial Sequence
  Description of Artificial Sequence: Synthetic polypeptide
  VH of XENP022406
EVQLVESGGGLVQPGGSLRLSCAASGFTFDDAWMDWVRQAPGKGLEWVAEISTKANNHATYYAESVKGRFTISRDDSKSSFYLQMNSLRAEDTAVYYCTRLATWDWYFDVWGQGTTVTVSS

SEQ ID NO: 32476 - protein, 5 aa, Artificial Sequence
  Description of Artificial Sequence: Synthetic peptide
  XENP022406 vhCDR1
DAWMD

SEQ ID NO: 32477 - protein, 19 aa, Artificial Sequence
  Description of Artificial Sequence: Synthetic peptide
  XENP022406 vhCDR2
EISTKANNHATYYAESVKG

SEQ ID NO: 32478 - protein, 10 aa, Artificial Sequence
  Description of Artificial Sequence: Synthetic peptide
  XENP022406 vhCDR3
LATWDWYFDV

SEQ ID NO: 32479 - protein, 218 aa, Artificial Sequence; identical to SEQ ID NO: 22359
  Description of Artificial Sequence: Synthetic polypeptide
  XENP022406 7G8_H3.52_L1.11_Fab Light Chain

SEQ ID NO: 32480 - protein, 111 aa, Artificial Sequence; identical to SEQ ID NO: 22360
  Description of Artificial Sequence: Synthetic polypeptide
  VL of XENP022406

SEQ ID NO: 32481 - protein, 15 aa, Artificial Sequence
  Description of Artificial Sequence: Synthetic peptide
  XENP022406 vlCDR1
RASQSVDYDGDSYMN

SEQ ID NO: 32482 - protein, 7 aa, Artificial Sequence
  Description of Artificial Sequence: Synthetic peptide
  XENP022406 vlCDR2
AASELES

SEQ ID NO: 32483 - protein, 9 aa, Artificial Sequence
  Description of Artificial Sequence: Synthetic peptide
  XENP022406 vlCDR3
QQSNEDPFT

SEQ ID NO: 32484 - protein, 226 aa, Artificial Sequence
  Description of Artificial Sequence: Synthetic polypeptide
  XENP022407 7G8_H3.53_L1.11_Fab Heavy Chain
EVQLVESGGGLVQPGGSLRLSCAASGFTFDDAWMDWVRQAPGKGLEWVAEISTKANNHATYYAESVKGRFTISRDDSKSSVYLQMNSLRAEDTAVYYCARLATWDWYFDVWGQGTTVTVSSASTKGPSVFPLAPSSKSTSGGTAALGCLVKDYFPEPVTVSWNSGALTSGVHTFPAVLQSSGLYSLSSVVTVPSSSLGTQTYICNVNHKPSNTKVDKKVEPKSCGS

SEQ ID NO: 32485 - protein, 121 aa, Artificial Sequence
  Description of Artificial Sequence: Synthetic polypeptide
  VH of XENP022407
EVQLVESGGGLVQPGGSLRLSCAASGFTFDDAWMDWVRQAPGKGLEWVAEISTKANNHATYYAESVKGRFTISRDDSKSSVYLQMNSLRAEDTAVYYCARLATWDWYFDVWGQGTTVTVSS

SEQ ID NO: 32486 - protein, 5 aa, Artificial Sequence
  Description of Artificial Sequence: Synthetic peptide
  XENP022407 vhCDR1
DAWMD

SEQ ID NO: 32487 - protein, 19 aa, Artificial Sequence
  Description of Artificial Sequence: Synthetic peptide
  XENP022407 vhCDR2
EISTKANNHATYYAESVKG

SEQ ID NO: 32488 - protein, 10 aa, Artificial Sequence
  Description of Artificial Sequence: Synthetic peptide
  XENP022407 vhCDR3
LATWDWYFDV

SEQ ID NO: 32489 - protein, 218 aa, Artificial Sequence; identical to SEQ ID NO: 22359
  Description of Artificial Sequence: Synthetic polypeptide
  XENP022407 7G8_H3.53_L1.11_Fab Light Chain

SEQ ID NO: 32490 - protein, 111 aa, Artificial Sequence; identical to SEQ ID NO: 22360
  Description of Artificial Sequence: Synthetic polypeptide
  VL of XENP022407

SEQ ID NO: 32491 - protein, 15 aa, Artificial Sequence
  Description of Artificial Sequence: Synthetic peptide
  XENP022407 vlCDR1
RASQSVDYDGDSYMN

SEQ ID NO: 32492 - protein, 7 aa, Artificial Sequence
  Description of Artificial Sequence: Synthetic peptide
  XENP022407 vlCDR2
AASELES

SEQ ID NO: 32493 - protein, 9 aa, Artificial Sequence
  Description of Artificial Sequence: Synthetic peptide
  XENP022407 vlCDR3
QQSNEDPFT

SEQ ID NO: 32494 - protein, 226 aa, Artificial Sequence; identical to SEQ ID NO: 31734
  Description of Artificial Sequence: Synthetic polypeptide
  XENP022408 7G8_H3.18_L1.16_Fab Heavy Chain

SEQ ID NO: 32495 - protein, 121 aa, Artificial Sequence; identical to SEQ ID NO: 22325
  Description of Artificial Sequence: Synthetic polypeptide
  VH of XENP022408

SEQ ID NO: 32496 - protein, 5 aa, Artificial Sequence
  Description of Artificial Sequence: Synthetic peptide
  XENP022408 vhCDR1
DAWMD

SEQ ID NO: 32497 - protein, 19 aa, Artificial Sequence
  Description of Artificial Sequence: Synthetic peptide
  XENP022408 vhCDR2
EISTKANNHATYYAESVKG

SEQ ID NO: 32498 - protein, 10 aa, Artificial Sequence
  Description of Artificial Sequence: Synthetic peptide
  XENP022408 vhCDR3
LATWDWYFDV

SEQ ID NO: 32499 - protein, 218 aa, Artificial Sequence
  Description of Artificial Sequence: Synthetic polypeptide
  XENP022408 7G8_H3.18_L1.16_Fab Light Chain
DIVLTQSPSSLSASVGDRVTITCRASQSVDYDGDSYMNWYQQKPGKPPKLLIYAASELESGIPARLSGSGSGTDFTLTISSLQPEDFATYYCQQSNEDPFTFGSGTKLEIKRTVAAPSVFIFPPSDEQLKSGTASVVCLLNNFYPREAKVQWKVDNALQSGNSQESVTEQDSKDSTYSLSSTLTLSKADYEKHKVYACEVTHQGLSSPVTKSFNRGEC

SEQ ID NO: 32500 - protein, 111 aa, Artificial Sequence
  Description of Artificial Sequence: Synthetic polypeptide
  VL of XENP022408
DIVLTQSPSSLSASVGDRVTITCRASQSVDYDGDSYMNWYQQKPGKPPKLLIYAASELESGIPARLSGSGSGTDFTLTISSLQPEDFATYYCQQSNEDPFTFGSGTKLEIK

SEQ ID NO: 32501 - protein, 15 aa, Artificial Sequence
  Description of Artificial Sequence: Synthetic peptide
  XENP022408 vlCDR1
RASQSVDYDGDSYMN

SEQ ID NO: 32502 - protein, 7 aa, Artificial Sequence
  Description of Artificial Sequence: Synthetic peptide
  XENP022408 vlCDR2
AASELES

SEQ ID NO: 32503 - protein, 9 aa, Artificial Sequence
  Description of Artificial Sequence: Synthetic peptide
  XENP022408 vlCDR3
QQSNEDPFT

SEQ ID NO: 32504 - protein, 226 aa, Artificial Sequence; identical to SEQ ID NO: 31734
  Description of Artificial Sequence: Synthetic polypeptide
  XENP022409 7G8_H3.18_L1.17_Fab Heavy Chain

SEQ ID NO: 32505 - protein, 121 aa, Artificial Sequence; identical to SEQ ID NO: 22325
  Description of Artificial Sequence: Synthetic polypeptide
  VH of XENP022409

SEQ ID NO: 32506 - protein, 5 aa, Artificial Sequence
  Description of Artificial Sequence: Synthetic peptide
  XENP022409 vhCDR1
DAWMD

SEQ ID NO: 32507 - protein, 19 aa, Artificial Sequence
  Description of Artificial Sequence: Synthetic peptide
  XENP022409 vhCDR2
EISTKANNHATYYAESVKG

SEQ ID NO: 32508 - protein, 10 aa, Artificial Sequence
  Description of Artificial Sequence: Synthetic peptide
  XENP022409 vhCDR3
LATWDWYFDV

SEQ ID NO: 32509 - protein, 218 aa, Artificial Sequence
  Description of Artificial Sequence: Synthetic polypeptide
  XENP022409 7G8_H3.18_L1.17_Fab Light Chain
DVVLTQSPSSLSASVGDRVTITCRASQSVDYDGDSYMNWYQQKPGKPPKLLIYAASELESGIPARLSGSGSGTDFTLTISSLQPEDFATYYCQQSNEDPFTFGSGTKLEIKRTVAAPSVFIFPPSDEQLKSGTASVVCLLNNFYPREAKVQWKVDNALQSGNSQESVTEQDSKDSTYSLSSTLTLSKADYEKHKVYACEVTHQGLSSPVTKSFNRGEC

SEQ ID NO: 32510 - protein, 111 aa, Artificial Sequence
  Description of Artificial Sequence: Synthetic polypeptide
  VL of XENP022409
DVVLTQSPSSLSASVGDRVTITCRASQSVDYDGDSYMNWYQQKPGKPPKLLIYAASELESGIPARLSGSGSGTDFTLTISSLQPEDFATYYCQQSNEDPFTFGSGTKLEIK

SEQ ID NO: 32511 - protein, 15 aa, Artificial Sequence
  Description of Artificial Sequence: Synthetic peptide
  XENP022409 vlCDR1
RASQSVDYDGDSYMN

SEQ ID NO: 32512 - protein, 7 aa, Artificial Sequence
  Description of Artificial Sequence: Synthetic peptide
  XENP022409 vlCDR2
AASELES

SEQ ID NO: 32513 - protein, 9 aa, Artificial Sequence
  Description of Artificial Sequence: Synthetic peptide
  XENP022409 vlCDR3
QQSNEDPFT

SEQ ID NO: 32514 - protein, 226 aa, Artificial Sequence; identical to SEQ ID NO: 31734
  Description of Artificial Sequence: Synthetic polypeptide
  XENP022410 7G8_H3.18_L1.18_Fab Heavy Chain

SEQ ID NO: 32515 - protein, 121 aa, Artificial Sequence; identical to SEQ ID NO: 22325
  Description of Artificial Sequence: Synthetic polypeptide
  VH of XENP022410

SEQ ID NO: 32516 - protein, 5 aa, Artificial Sequence
  Description of Artificial Sequence: Synthetic peptide
  XENP022410 vhCDR1
DAWMD

SEQ ID NO: 32517 - protein, 19 aa, Artificial Sequence
  Description of Artificial Sequence: Synthetic peptide
  XENP022410 vhCDR2
EISTKANNHATYYAESVKG

SEQ ID NO: 32518 - protein, 10 aa, Artificial Sequence
  Description of Artificial Sequence: Synthetic peptide
  XENP022410 vhCDR3
LATWDWYFDV

SEQ ID NO: 32519 - protein, 218 aa, Artificial Sequence
  Description of Artificial Sequence: Synthetic polypeptide
  XENP022410 7G8_H3.18_L1.18_Fab Light Chain
DTVMTQSPSSLSASVGDRVTITCRASQSVDYDGDSYMNWYQQKPGKPPKLLIYAASELESGIPARLSGSGSGTDFTLTISSLQPEDFATYYCQQSNEDPFTFGSGTKLEIKRTVAAPSVFIFPPSDEQLKSGTASVVCLLNNFYPREAKVQWKVDNALQSGNSQESVTEQDSKDSTYSLSSTLTLSKADYEKHKVYACEVTHQGLSSPVTKSFNRGEC

SEQ ID NO: 32520 - protein, 111 aa, Artificial Sequence
  Description of Artificial Sequence: Synthetic polypeptide
  VL of XENP022410
DTVMTQSPSSLSASVGDRVTITCRASQSVDYDGDSYMNWYQQKPGKPPKLLIYAASELESGIPARLSGSGSGTDFTLTISSLQPEDFATYYCQQSNEDPFTFGSGTKLEIK

SEQ ID NO: 32521 - protein, 15 aa, Artificial Sequence
  Description of Artificial Sequence: Synthetic peptide
  XENP022410 vlCDR1
RASQSVDYDGDSYMN

SEQ ID NO: 32522 - protein, 7 aa, Artificial Sequence
  Description of Artificial Sequence: Synthetic peptide
  XENP022410 vlCDR2
AASELES

SEQ ID NO: 32523 - protein, 9 aa, Artificial Sequence
  Description of Artificial Sequence: Synthetic peptide
  XENP022410 vlCDR3
QQSNEDPFT

SEQ ID NO: 32524 - protein, 226 aa, Artificial Sequence; identical to SEQ ID NO: 31734
  Description of Artificial Sequence: Synthetic polypeptide
  XENP022411 7G8_H3.18_L1.19_Fab Heavy Chain

SEQ ID NO: 32525 - protein, 121 aa, Artificial Sequence; identical to SEQ ID NO: 22325
  Description of Artificial Sequence: Synthetic polypeptide
  VH of XENP022411

SEQ ID NO: 32526 - protein, 5 aa, Artificial Sequence
  Description of Artificial Sequence: Synthetic peptide
  XENP022411 vhCDR1
DAWMD

SEQ ID NO: 32527 - protein, 19 aa, Artificial Sequence
  Description of Artificial Sequence: Synthetic peptide
  XENP022411 vhCDR2
EISTKANNHATYYAESVKG

SEQ ID NO: 32528 - protein, 10 aa, Artificial Sequence
  Description of Artificial Sequence: Synthetic peptide
  XENP022411 vhCDR3
LATWDWYFDV

SEQ ID NO: 32529 - protein, 218 aa, Artificial Sequence
  Description of Artificial Sequence: Synthetic polypeptide
  XENP022411 7G8_H3.18_L1.19_Fab Light Chain
DTVLTQSPSSLSASVGDRVTITCRASQSVDYDGDSYLNWYQQKPGKPPKLLIYAASELESGIPARLSGSGSGTDFTLTISSLQPEDFATYYCQQSNEDPFTFGSGTKLEIKRTVAAPSVFIFPPSDEQLKSGTASVVCLLNNFYPREAKVQWKVDNALQSGNSQESVTEQDSKDSTYSLSSTLTLSKADYEKHKVYACEVTHQGLSSPVTKSFNRGEC

SEQ ID NO: 32530 - protein, 111 aa, Artificial Sequence
  Description of Artificial Sequence: Synthetic polypeptide
  VL of XENP022411
DTVLTQSPSSLSASVGDRVTITCRASQSVDYDGDSYLNWYQQKPGKPPKLLIYAASELESGIPARLSGSGSGTDFTLTISSLQPEDFATYYCQQSNEDPFTFGSGTKLEIK

SEQ ID NO: 32531 - protein, 15 aa, Artificial Sequence
  Description of Artificial Sequence: Synthetic peptide
  XENP022411 vlCDR1
RASQSVDYDGDSYLN

SEQ ID NO: 32532 - protein, 7 aa, Artificial Sequence
  Description of Artificial Sequence: Synthetic peptide
  XENP022411 vlCDR2
AASELES

SEQ ID NO: 32533 - protein, 9 aa, Artificial Sequence
  Description of Artificial Sequence: Synthetic peptide
  XENP022411 vlCDR3
QQSNEDPFT

SEQ ID NO: 32534 - protein, 226 aa, Artificial Sequence; identical to SEQ ID NO: 31734
  Description of Artificial Sequence: Synthetic polypeptide
  XENP022412 7G8_H3.18_L1.20_Fab Heavy Chain

SEQ ID NO: 32535 - protein, 121 aa, Artificial Sequence; identical to SEQ ID NO: 22325
  Description of Artificial Sequence: Synthetic polypeptide
  VH of XENP022412

SEQ ID NO: 32536 - protein, 5 aa, Artificial Sequence
  Description of Artificial Sequence: Synthetic peptide
  XENP022412 vhCDR1
DAWMD

SEQ ID NO: 32537 - protein, 19 aa, Artificial Sequence
  Description of Artificial Sequence: Synthetic peptide
  XENP022412 vhCDR2
EISTKANNHATYYAESVKG

SEQ ID NO: 32538 - protein, 10 aa, Artificial Sequence
  Description of Artificial Sequence: Synthetic peptide
  XENP022412 vhCDR3
LATWDWYFDV

SEQ ID NO: 32539 - protein, 218 aa, Artificial Sequence
  Description of Artificial Sequence: Synthetic polypeptide
  XENP022412 7G8_H3.18_L1.20_Fab Light Chain
DTVLTQSPSSLSASVGDRVTITCRASQSVDYDGDSYMNWYQQKPGQPPKLLIYAASELESGIPARLSGSGSGTDFTLTISSLQPEDFATYYCQQSNEDPFTFGSGTKLEIKRTVAAPSVFIFPPSDEQLKSGTASVVCLLNNFYPREAKVQWKVDNALQSGNSQESVTEQDSKDSTYSLSSTLTLSKADYEKHKVYACEVTHQGLSSPVTKSFNRGEC

SEQ ID NO: 32540 - protein, 111 aa, Artificial Sequence
  Description of Artificial Sequence: Synthetic polypeptide
  VL of XENP022412
DTVLTQSPSSLSASVGDRVTITCRASQSVDYDGDSYMNWYQQKPGQPPKLLIYAASELESGIPARLSGSGSGTDFTLTISSLQPEDFATYYCQQSNEDPFTFGSGTKLEIK

SEQ ID NO: 32541 - protein, 15 aa, Artificial Sequence
  Description of Artificial Sequence: Synthetic peptide
  XENP022412 vlCDR1
RASQSVDYDGDSYMN

SEQ ID NO: 32542 - protein, 7 aa, Artificial Sequence
  Description of Artificial Sequence: Synthetic peptide
  XENP022412 vlCDR2
AASELES

SEQ ID NO: 32543 - protein, 9 aa, Artificial Sequence
  Description of Artificial Sequence: Synthetic peptide
  XENP022412 vlCDR3
QQSNEDPFT

SEQ ID NO: 32544 - protein, 226 aa, Artificial Sequence; identical to SEQ ID NO: 31734
  Description of Artificial Sequence: Synthetic polypeptide
  XENP022413 7G8_H3.18_L1.21_Fab Heavy Chain

SEQ ID NO: 32545 - protein, 121 aa, Artificial Sequence; identical to SEQ ID NO: 22325
  Description of Artificial Sequence: Synthetic polypeptide
  VH of XENP022413

SEQ ID NO: 32546 - protein, 5 aa, Artificial Sequence
  Description of Artificial Sequence: Synthetic peptide
  XENP022413 vhCDR1
DAWMD

SEQ ID NO: 32547 - protein, 19 aa, Artificial Sequence
  Description of Artificial Sequence: Synthetic peptide
  XENP022413 vhCDR2
EISTKANNHATYYAESVKG

SEQ ID NO: 32548 - protein, 10 aa, Artificial Sequence
  Description of Artificial Sequence: Synthetic peptide
  XENP022413 vhCDR3
LATWDWYFDV

SEQ ID NO: 32549 - protein, 218 aa, Artificial Sequence
  Description of Artificial Sequence: Synthetic polypeptide
  XENP022413 7G8_H3.18_L1.21_Fab Light Chain
DTVLTQSPSSLSASVGDRVTITCRASQSVDYDGDSYMNWYQQKPGLPPKLLIYAASELESGIPARLSGSGSGTDFTLTISSLQPEDFATYYCQQSNEDPFTFGSGTKLEIKRTVAAPSVFIFPPSDEQLKSGTASVVCLLNNFYPREAKVQWKVDNALQSGNSQESVTEQDSKDSTYSLSSTLTLSKADYEKHKVYACEVTHQGLSSPVTKSFNRGEC

SEQ ID NO: 32550 - protein, 111 aa, Artificial Sequence
  Description of Artificial Sequence: Synthetic polypeptide
  VL of XENP022413
DTVLTQSPSSLSASVGDRVTITCRASQSVDYDGDSYMNWYQQKPGLPPKLLIYAASELESGIPARLSGSGSGTDFTLTISSLQPEDFATYYCQQSNEDPFTFGSGTKLEIK

SEQ ID NO: 32551 - protein, 15 aa, Artificial Sequence
  Description of Artificial Sequence: Synthetic peptide
  XENP022413 vlCDR1
RASQSVDYDGDSYMN

SEQ ID NO: 32552 - protein, 7 aa, Artificial Sequence
  Description of Artificial Sequence: Synthetic peptide
  XENP022413 vlCDR2
AASELES

SEQ ID NO: 32553 - protein, 9 aa, Artificial Sequence
  Description of Artificial Sequence: Synthetic peptide
  XENP022413 vlCDR3
QQSNEDPFT

SEQ ID NO: 32554 - protein, 226 aa, Artificial Sequence; identical to SEQ ID NO: 31734
  Description of Artificial Sequence: Synthetic polypeptide
  XENP022414 7G8_H3.18_L1.22_Fab Heavy Chain

SEQ ID NO: 32555 - protein, 121 aa, Artificial Sequence; identical to SEQ ID NO: 22325
  Description of Artificial Sequence: Synthetic polypeptide
  VH of XENP022414

SEQ ID NO: 32556 - protein, 5 aa, Artificial Sequence
  Description of Artificial Sequence: Synthetic peptide
  XENP022414 vhCDR1
DAWMD

SEQ ID NO: 32557 - protein, 19 aa, Artificial Sequence
  Description of Artificial Sequence: Synthetic peptide
  XENP022414 vhCDR2
EISTKANNHATYYAESVKG

SEQ ID NO: 32558 - protein, 10 aa, Artificial Sequence
  Description of Artificial Sequence: Synthetic peptide
  XENP022414 vhCDR3
LATWDWYFDV

SEQ ID NO: 32559 - protein, 218 aa, Artificial Sequence
  Description of Artificial Sequence: Synthetic polypeptide
  XENP022414 7G8_H3.18_L1.22_Fab Light Chain
DTVLTQSPSSLSASVGDRVTITCRASQSVDYDGDSYMNWYQQKPGEPPKLLIYAASELESGIPARLSGSGSGTDFTLTISSLQPEDFATYYCQQSNEDPFTFGSGTKLEIKRTVAAPSVFIFPPSDEQLKSGTASVVCLLNNFYPREAKVQWKVDNALQSGNSQESVTEQDSKDSTYSLSSTLTLSKADYEKHKVYACEVTHQGLSSPVTKSFNRGEC

SEQ ID NO: 32560 - protein, 111 aa, Artificial Sequence
  Description of Artificial Sequence: Synthetic polypeptide
  VL of XENP022414
DTVLTQSPSSLSASVGDRVTITCRASQSVDYDGDSYMNWYQQKPGEPPKLLIYAASELESGIPARLSGSGSGTDFTLTISSLQPEDFATYYCQQSNEDPFTFGSGTKLEIK

SEQ ID NO: 32561 - protein, 15 aa, Artificial Sequence
  Description of Artificial Sequence: Synthetic peptide
  XENP022414 vlCDR1
RASQSVDYDGDSYMN

SEQ ID NO: 32562 - protein, 7 aa, Artificial Sequence
  Description of Artificial Sequence: Synthetic peptide
  XENP022414 vlCDR2
AASELES

SEQ ID NO: 32563 - protein, 9 aa, Artificial Sequence
  Description of Artificial Sequence: Synthetic peptide
  XENP022414 vlCDR3
QQSNEDPFT

SEQ ID NO: 32564 - protein, 226 aa, Artificial Sequence; identical to SEQ ID NO: 31734
  Description of Artificial Sequence: Synthetic polypeptide
  XENP022415 7G8_H3.18_L1.23_Fab Heavy Chain

SEQ ID NO: 32565 - protein, 121 aa, Artificial Sequence; identical to SEQ ID NO: 22325
  Description of Artificial Sequence: Synthetic polypeptide
  VH of XENP022415

SEQ ID NO: 32566 - protein, 5 aa, Artificial Sequence
  Description of Artificial Sequence: Synthetic peptide
  XENP022415 vhCDR1
DAWMD

SEQ ID NO: 32567 - protein, 19 aa, Artificial Sequence
  Description of Artificial Sequence: Synthetic peptide
  XENP022415 vhCDR2
EISTKANNHATYYAESVKG

SEQ ID NO: 32568 - protein, 10 aa, Artificial Sequence
  Description of Artificial Sequence: Synthetic peptide
  XENP022415 vhCDR3
LATWDWYFDV

SEQ ID NO: 32569 - protein, 218 aa, Artificial Sequence
  Description of Artificial Sequence: Synthetic polypeptide
  XENP022415 7G8_H3.18_L1.23_Fab Light Chain
DTVLTQSPSSLSASVGDRVTITCRASQSVDYDGDSYMNWYQQKPGKVPKLLIYAASELESGIPARLSGSGSGTDFTLTISSLQPEDFATYYCQQSNEDPFTFGSGTKLEIKRTVAAPSVFIFPPSDEQLKSGTASVVCLLNNFYPREAKVQWKVDNALQSGNSQESVTEQDSKDSTYSLSSTLTLSKADYEKHKVYACEVTHQGLSSPVTKSFNRGEC

SEQ ID NO: 32570 - protein, 111 aa, Artificial Sequence
  Description of Artificial Sequence: Synthetic polypeptide
  VL of XENP022415
DTVLTQSPSSLSASVGDRVTITCRASQSVDYDGDSYMNWYQQKPGKVPKLLIYAASELESGIPARLSGSGSGTDFTLTISSLQPEDFATYYCQQSNEDPFTFGSGTKLEIK

SEQ ID NO: 32571 - protein, 15 aa, Artificial Sequence
  Description of Artificial Sequence: Synthetic peptide
  XENP022415 vlCDR1
RASQSVDYDGDSYMN

SEQ ID NO: 32572 - protein, 7 aa, Artificial Sequence
  Description of Artificial Sequence: Synthetic peptide
  XENP022415 vlCDR2
AASELES

SEQ ID NO: 32573 - protein, 9 aa, Artificial Sequence
  Description of Artificial Sequence: Synthetic peptide
  XENP022415 vlCDR3
QQSNEDPFT

SEQ ID NO: 32574 - protein, 226 aa, Artificial Sequence; identical to SEQ ID NO: 31734
  Description of Artificial Sequence: Synthetic polypeptide
  XENP022416 7G8_H3.18_L1.24_Fab Heavy Chain

SEQ ID NO: 32575 - protein, 121 aa, Artificial Sequence; identical to SEQ ID NO: 22325
  Description of Artificial Sequence: Synthetic polypeptide
  VH of XENP022416

SEQ ID NO: 32576 - protein, 5 aa, Artificial Sequence
  Description of Artificial Sequence: Synthetic peptide
  XENP022416 vhCDR1
DAWMD

SEQ ID NO: 32577 - protein, 19 aa, Artificial Sequence
  Description of Artificial Sequence: Synthetic peptide
  XENP022416 vhCDR2
EISTKANNHATYYAESVKG

SEQ ID NO: 32578 - protein, 10 aa, Artificial Sequence
  Description of Artificial Sequence: Synthetic peptide
  XENP022416 vhCDR3
LATWDWYFDV

SEQ ID NO: 32579 - protein, 218 aa, Artificial Sequence
  Description of Artificial Sequence: Synthetic polypeptide
  XENP022416 7G8_H3.18_L1.24_Fab Light Chain
DTVLTQSPSSLSASVGDRVTITCRASQSVDYDGDSYMNWYQQKPGKAPKLLIYAASELESGIPARLSGSGSGTDFTLTISSLQPEDFATYYCQQSNEDPFTFGSGTKLEIKRTVAAPSVFIFPPSDEQLKSGTASVVCLLNNFYPREAKVQWKVDNALQSGNSQESVTEQDSKDSTYSLSSTLTLSKADYEKHKVYACEVTHQGLSSPVTKSFNRGEC

SEQ ID NO: 32580 - protein, 111 aa, Artificial Sequence
  Description of Artificial Sequence: Synthetic polypeptide
  VL of XENP022416
DTVLTQSPSSLSASVGDRVTITCRASQSVDYDGDSYMNWYQQKPGKAPKLLIYAASELESGIPARLSGSGSGTDFTLTISSLQPEDFATYYCQQSNEDPFTFGSGTKLEIK

SEQ ID NO: 32581 - protein, 15 aa, Artificial Sequence
  Description of Artificial Sequence: Synthetic peptide
  XENP022416 vlCDR1
RASQSVDYDGDSYMN

SEQ ID NO: 32582 - protein, 7 aa, Artificial Sequence
  Description of Artificial Sequence: Synthetic peptide
  XENP022416 vlCDR2
AASELES

SEQ ID NO: 32583 - protein, 9 aa, Artificial Sequence
  Description of Artificial Sequence: Synthetic peptide
  XENP022416 vlCDR3
QQSNEDPFT

SEQ ID NO: 32584 - protein, 226 aa, Artificial Sequence; identical to SEQ ID NO: 31734
  Description of Artificial Sequence: Synthetic polypeptide
  XENP022417 7G8_H3.18_L1.25_Fab Heavy Chain

SEQ ID NO: 32585 - protein, 121 aa, Artificial Sequence; identical to SEQ ID NO: 22325
  Description of Artificial Sequence: Synthetic polypeptide
  VH of XENP022417

SEQ ID NO: 32586 - protein, 5 aa, Artificial Sequence
  Description of Artificial Sequence: Synthetic peptide
  XENP022417 vhCDR1
DAWMD

SEQ ID NO: 32587 - protein, 19 aa, Artificial Sequence
  Description of Artificial Sequence: Synthetic peptide
  XENP022417 vhCDR2
EISTKANNHATYYAESVKG

SEQ ID NO: 32588 - protein, 10 aa, Artificial Sequence
  Description of Artificial Sequence: Synthetic peptide
  XENP022417 vhCDR3
LATWDWYFDV

SEQ ID NO: 32589 - protein, 218 aa, Artificial Sequence
  Description of Artificial Sequence: Synthetic polypeptide
  XENP022417 7G8_H3.18_L1.25_Fab Light Chain
DTVLTQSPSSLSASVGDRVTITCRASQSVDYDGDSYMNWYQQKPGKSPKLLIYAASELESGIPARLSGSGSGTDFTLTISSLQPEDFATYYCQQSNEDPFTFGSGTKLEIKRTVAAPSVFIFPPSDEQLKSGTASVVCLLNNFYPREAKVQWKVDNALQSGNSQESVTEQDSKDSTYSLSSTLTLSKADYEKHKVYACEVTHQGLSSPVTKSFNRGEC

SEQ ID NO: 32590 - protein, 111 aa, Artificial Sequence
  Description of Artificial Sequence: Synthetic polypeptide
  VL of XENP022417
DTVLTQSPSSLSASVGDRVTITCRASQSVDYDGDSYMNWYQQKPGKSPKLLIYAASELESGIPARLSGSGSGTDFTLTISSLQPEDFATYYCQQSNEDPFTFGSGTKLEIK

SEQ ID NO: 32591 - protein, 15 aa, Artificial Sequence
  Description of Artificial Sequence: Synthetic peptide
  XENP022417 vlCDR1
RASQSVDYDGDSYMN

SEQ ID NO: 32592 - protein, 7 aa, Artificial Sequence
  Description of Artificial Sequence: Synthetic peptide
  XENP022417 vlCDR2
AASELES

SEQ ID NO: 32593 - protein, 9 aa, Artificial Sequence
  Description of Artificial Sequence: Synthetic peptide
  XENP022417 vlCDR3
QQSNEDPFT

SEQ ID NO: 32594 - protein, 226 aa, Artificial Sequence; identical to SEQ ID NO: 31734
  Description of Artificial Sequence: Synthetic polypeptide
  XENP022418 7G8_H3.18_L1.26_Fab Heavy Chain

SEQ ID NO: 32595 - protein, 121 aa, Artificial Sequence; identical to SEQ ID NO: 22325
  Description of Artificial Sequence: Synthetic polypeptide
  VH of XENP022418

SEQ ID NO: 32596 - protein, 5 aa, Artificial Sequence
  Description of Artificial Sequence: Synthetic peptide
  XENP022418 vhCDR1
DAWMD

SEQ ID NO: 32597 - protein, 19 aa, Artificial Sequence
  Description of Artificial Sequence: Synthetic peptide
  XENP022418 vhCDR2
EISTKANNHATYYAESVKG

SEQ ID NO: 32598 - protein, 10 aa, Artificial Sequence
  Description of Artificial Sequence: Synthetic peptide
  XENP022418 vhCDR3
LATWDWYFDV

SEQ ID NO: 32599 - protein, 218 aa, Artificial Sequence
  Description of Artificial Sequence: Synthetic polypeptide
  XENP022418 7G8_H3.18_L1.26_Fab Light Chain
DTVLTQSPSSLSASVGDRVTITCRASQSVDYDGDSYMNWYQQKPGKPPKLLIYAASELESGVPARLSGSGSGTDFTLTISSLQPEDFATYYCQQSNEDPFTFGSGTKLEIKRTVAAPSVFIFPPSDEQLKSGTASVVCLLNNFYPREAKVQWKVDNALQSGNSQESVTEQDSKDSTYSLSSTLTLSKADYEKHKVYACEVTHQGLSSPVTKSFNRGEC

SEQ ID NO: 32600 - protein, 111 aa, Artificial Sequence
  Description of Artificial Sequence: Synthetic polypeptide
  VL of XENP022418
DTVLTQSPSSLSASVGDRVTITCRASQSVDYDGDSYMNWYQQKPGKPPKLLIYAASELESGVPARLSGSGSGTDFTLTISSLQPEDFATYYCQQSNEDPFTFGSGTKLEIK

SEQ ID NO: 32601 - protein, 15 aa, Artificial Sequence
  Description of Artificial Sequence: Synthetic peptide
  XENP022418 vlCDR1
RASQSVDYDGDSYMN

SEQ ID NO: 32602 - protein, 7 aa, Artificial Sequence
  Description of Artificial Sequence: Synthetic peptide
  XENP022418 vlCDR2
AASELES

SEQ ID NO: 32603 - protein, 9 aa, Artificial Sequence
  Description of Artificial Sequence: Synthetic peptide
  XENP022418 vlCDR3
QQSNEDPFT

SEQ ID NO: 32604 - protein, 226 aa, Artificial Sequence; identical to SEQ ID NO: 31734
  Description of Artificial Sequence: Synthetic polypeptide
  XENP022419 7G8_H3.18_L1.27_Fab Heavy Chain

SEQ ID NO: 32605 - protein, 121 aa, Artificial Sequence; identical to SEQ ID NO: 22325
  Description of Artificial Sequence: Synthetic polypeptide
  VH of XENP022419

SEQ ID NO: 32606 - protein, 5 aa, Artificial Sequence
  Description of Artificial Sequence: Synthetic peptide
  XENP022419 vhCDR1
DAWMD

SEQ ID NO: 32607 - protein, 19 aa, Artificial Sequence
  Description of Artificial Sequence: Synthetic peptide
  XENP022419 vhCDR2
EISTKANNHATYYAESVKG

SEQ ID NO: 32608 - protein, 10 aa, Artificial Sequence
  Description of Artificial Sequence: Synthetic peptide
  XENP022419 vhCDR3
LATWDWYFDV

SEQ ID NO: 32609 - protein, 218 aa, Artificial Sequence
  Description of Artificial Sequence: Synthetic polypeptide
  XENP022419 7G8_H3.18_L1.27_Fab Light Chain
DTVLTQSPSSLSASVGDRVTITCRASQSVDYDGDSYMNWYQQKPGKPPKLLIYAASELESGIPSRLSGSGSGTDFTLTISSLQPEDFATYYCQQSNEDPFTFGSGTKLEIKRTVAAPSVFIFPPSDEQLKSGTASVVCLLNNFYPREAKVQWKVDNALQSGNSQESVTEQDSKDSTYSLSSTLTLSKADYEKHKVYACEVTHQGLSSPVTKSFNRGEC

SEQ ID NO: 32610 - protein, 111 aa, Artificial Sequence
  Description of Artificial Sequence: Synthetic polypeptide
  VL of XENP022419
DTVLTQSPSSLSASVGDRVTITCRASQSVDYDGDSYMNWYQQKPGKPPKLLIYAASELESGIPSRLSGSGSGTDFTLTISSLQPEDFATYYCQQSNEDPFTFGSGTKLEIK

SEQ ID NO: 32611 - protein, 15 aa, Artificial Sequence
  Description of Artificial Sequence: Synthetic peptide
  XENP022419 vlCDR1
RASQSVDYDGDSYMN

SEQ ID NO: 32612 - protein, 7 aa, Artificial Sequence
  Description of Artificial Sequence: Synthetic peptide
  XENP022419 vlCDR2
AASELES

SEQ ID NO: 32613 - protein, 9 aa, Artificial Sequence
  Description of Artificial Sequence: Synthetic peptide
  XENP022419 vlCDR3
QQSNEDPFT

SEQ ID NO: 32614 - protein, 226 aa, Artificial Sequence; identical to SEQ ID NO: 31734
  Description of Artificial Sequence: Synthetic polypeptide
  XENP022420 7G8_H3.18_L1.28_Fab Heavy Chain

SEQ ID NO: 32615 - protein, 121 aa, Artificial Sequence; identical to SEQ ID NO: 22325
  Description of Artificial Sequence: Synthetic polypeptide
  VH of XENP022420

SEQ ID NO: 32616 - protein, 5 aa, Artificial Sequence
  Description of Artificial Sequence: Synthetic peptide
  XENP022420 vhCDR1
DAWMD

SEQ ID NO: 32617 - protein, 19 aa, Artificial Sequence
  Description of Artificial Sequence: Synthetic peptide
  XENP022420 vhCDR2
EISTKANNHATYYAESVKG

SEQ ID NO: 32618 - protein, 10 aa, Artificial Sequence
  Description of Artificial Sequence: Synthetic peptide
  XENP022420 vhCDR3
LATWDWYFDV

SEQ ID NO: 32619 - protein, 218 aa, Artificial Sequence
  Description of Artificial Sequence: Synthetic polypeptide
  XENP022420 7G8_H3.18_L1.28_Fab Light Chain
DTVLTQSPSSLSASVGDRVTITCRASQSVDYDGDSYMNWYQQKPGKPPKLLIYAASELESGIPDRLSGSGSGTDFTLTISSLQPEDFATYYCQQSNEDPFTFGSGTKLEIKRTVAAPSVFIFPPSDEQLKSGTASVVCLLNNFYPREAKVQWKVDNALQSGNSQESVTEQDSKDSTYSLSSTLTLSKADYEKHKVYACEVTHQGLSSPVTKSFNRGEC

SEQ ID NO: 32620 - protein, 111 aa, Artificial Sequence
  Description of Artificial Sequence: Synthetic polypeptide
  VL of XENP022420
DTVLTQSPSSLSASVGDRVTITCRASQSVDYDGDSYMNWYQQKPGKPPKLLIYAASELESGIPDRLSGSGSGTDFTLTISSLQPEDFATYYCQQSNEDPFTFGSGTKLEIK

SEQ ID NO: 32621 - protein, 15 aa, Artificial Sequence
  Description of Artificial Sequence: Synthetic peptide
  XENP022420 vlCDR1
RASQSVDYDGDSYMN

SEQ ID NO: 32622 - protein, 7 aa, Artificial Sequence
  Description of Artificial Sequence: Synthetic peptide
  XENP022420 vlCDR2
AASELES

SEQ ID NO: 32623 - protein, 9 aa, Artificial Sequence
  Description of Artificial Sequence: Synthetic peptide
  XENP022420 vlCDR3
QQSNEDPFT

SEQ ID NO: 32624 - protein, 226 aa, Artificial Sequence; identical to SEQ ID NO: 31734
  Description of Artificial Sequence: Synthetic polypeptide
  XENP022421 7G8_H3.18_L1.29_Fab Heavy Chain

SEQ ID NO: 32625 - protein, 121 aa, Artificial Sequence; identical to SEQ ID NO: 22325
  Description of Artificial Sequence: Synthetic polypeptide
  VH of XENP022421

SEQ ID NO: 32626 - protein, 5 aa, Artificial Sequence
  Description of Artificial Sequence: Synthetic peptide
  XENP022421 vhCDR1
DAWMD

SEQ ID NO: 32627 - protein, 19 aa, Artificial Sequence
  Description of Artificial Sequence: Synthetic peptide
  XENP022421 vhCDR2
EISTKANNHATYYAESVKG

SEQ ID NO: 32628 - protein, 10 aa, Artificial Sequence
  Description of Artificial Sequence: Synthetic peptide
  XENP022421 vhCDR3
LATWDWYFDV

SEQ ID NO: 32629 - protein, 218 aa, Artificial Sequence
  Description of Artificial Sequence: Synthetic polypeptide
  XENP022421 7G8_H3.18_L1.29_Fab Light Chain
DTVLTQSPSSLSASVGDRVTITCRASQSVDYDGDSYMNWYQQKPGKPPKLLIYAASELESGIPPRLSGSGSGTDFTLTISSLQPEDFATYYCQQSNEDPFTFGSGTKLEIKRTVAAPSVFIFPPSDEQLKSGTASVVCLLNNFYPREAKVQWKVDNALQSGNSQESVTEQDSKDSTYSLSSTLTLSKADYEKHKVYACEVTHQGLSSPVTKSFNRGEC

SEQ ID NO: 32630 - protein, 111 aa, Artificial Sequence
  Description of Artificial Sequence: Synthetic polypeptide
  VL of XENP022421
DTVLTQSPSSLSASVGDRVTITCRASQSVDYDGDSYMNWYQQKPGKPPKLLIYAASELESGIPPRLSGSGSGTDFTLTISSLQPEDFATYYCQQSNEDPFTFGSGTKLEIK

SEQ ID NO: 32631 - protein, 15 aa, Artificial Sequence
  Description of Artificial Sequence: Synthetic peptide
  XENP022421 vlCDR1
RASQSVDYDGDSYMN

SEQ ID NO: 32632 - protein, 7 aa, Artificial Sequence
  Description of Artificial Sequence: Synthetic peptide
  XENP022421 vlCDR2
AASELES

SEQ ID NO: 32633 - protein, 9 aa, Artificial Sequence
  Description of Artificial Sequence: Synthetic peptide
  XENP022421 vlCDR3
QQSNEDPFT

SEQ ID NO: 32634 - protein, 226 aa, Artificial Sequence; identical to SEQ ID NO: 31734
  Description of Artificial Sequence: Synthetic polypeptide
  XENP022422 7G8_H3.18_L1.30_Fab Heavy Chain

SEQ ID NO: 32635 - protein, 121 aa, Artificial Sequence; identical to SEQ ID NO: 22325
  Description of Artificial Sequence: Synthetic polypeptide
  VH of XENP022422

SEQ ID NO: 32636 - protein, 5 aa, Artificial Sequence
  Description of Artificial Sequence: Synthetic peptide
  XENP022422 vhCDR1
DAWMD

SEQ ID NO: 32637 - protein, 19 aa, Artificial Sequence
  Description of Artificial Sequence: Synthetic peptide
  XENP022422 vhCDR2
EISTKANNHATYYAESVKG

SEQ ID NO: 32638 - protein, 10 aa, Artificial Sequence
  Description of Artificial Sequence: Synthetic peptide
  XENP022422 vhCDR3
LATWDWYFDV

SEQ ID NO: 32639 - protein, 218 aa, Artificial Sequence; identical to SEQ ID NO: 22539
  Description of Artificial Sequence: Synthetic polypeptide
  XENP022422 7G8_H3.18_L1.30_Fab Light Chain

SEQ ID NO: 32640 - protein, 111 aa, Artificial Sequence; identical to SEQ ID NO: 22540
  Description of Artificial Sequence: Synthetic polypeptide
  VL of XENP022422

SEQ ID NO: 32641 - protein, 15 aa, Artificial Sequence
  Description of Artificial Sequence: Synthetic peptide
  XENP022422 vlCDR1
RASQSVDYDGDSYMN

SEQ ID NO: 32642 - protein, 7 aa, Artificial Sequence
  Description of Artificial Sequence: Synthetic peptide
  XENP022422 vlCDR2
AASELES

SEQ ID NO: 32643 - protein, 9 aa, Artificial Sequence
  Description of Artificial Sequence: Synthetic peptide
  XENP022422 vlCDR3
QQSNEDPFT

SEQ ID NO: 32644 - protein, 226 aa, Artificial Sequence; identical to SEQ ID NO: 31734
  Description of Artificial Sequence: Synthetic polypeptide
  XENP022423 7G8_H3.18_L1.31_Fab Heavy Chain

SEQ ID NO: 32645 - protein, 121 aa, Artificial Sequence; identical to SEQ ID NO: 22325
  Description of Artificial Sequence: Synthetic polypeptide
  VH of XENP022423

SEQ ID NO: 32646 - protein, 5 aa, Artificial Sequence
  Description of Artificial Sequence: Synthetic peptide
  XENP022423 vhCDR1
DAWMD

SEQ ID NO: 32647 - protein, 19 aa, Artificial Sequence
  Description of Artificial Sequence: Synthetic peptide
  XENP022423 vhCDR2
EISTKANNHATYYAESVKG

SEQ ID NO: 32648 - protein, 10 aa, Artificial Sequence
  Description of Artificial Sequence: Synthetic peptide
  XENP022423 vhCDR3
LATWDWYFDV

SEQ ID NO: 32649 - protein, 218 aa, Artificial Sequence
  Description of Artificial Sequence: Synthetic polypeptide
  XENP022423 7G8_H3.18_L1.31_Fab Light Chain
DTVLTQSPSSLSASVGDRVTITCRASQSVDYDGDSYMNWYQQKPGKPPKLLIYAASELESGIPARLSGSGSGTDFTLTISSLQPEDFATYYCQQSNEDPFTFGQGTKLEIKRTVAAPSVFIFPPSDEQLKSGTASVVCLLNNFYPREAKVQWKVDNALQSGNSQESVTEQDSKDSTYSLSSTLTLSKADYEKHKVYACEVTHQGLSSPVTKSFNRGEC

SEQ ID NO: 32650 - protein, 111 aa, Artificial Sequence
  Description of Artificial Sequence: Synthetic polypeptide
  VL of XENP022423
DTVLTQSPSSLSASVGDRVTITCRASQSVDYDGDSYMNWYQQKPGKPPKLLIYAASELESGIPARLSGSGSGTDFTLTISSLQPEDFATYYCQQSNEDPFTFGQGTKLEIK

SEQ ID NO: 32651 - protein, 15 aa, Artificial Sequence
  Description of Artificial Sequence: Synthetic peptide
  XENP022423 vlCDR1
RASQSVDYDGDSYMN

SEQ ID NO: 32652 - protein, 7 aa, Artificial Sequence
  Description of Artificial Sequence: Synthetic peptide
  XENP022423 vlCDR2
AASELES

SEQ ID NO: 32653 - protein, 9 aa, Artificial Sequence
  Description of Artificial Sequence: Synthetic peptide
  XENP022423 vlCDR3
QQSNEDPFT

SEQ ID NO: 32654 - protein, 226 aa, Artificial Sequence; identical to SEQ ID NO: 31734
  Description of Artificial Sequence: Synthetic polypeptide
  XENP022424 7G8_H3.18_L1.32_Fab Heavy Chain

SEQ ID NO: 32655 - protein, 121 aa, Artificial Sequence; identical to SEQ ID NO: 22325
  Description of Artificial Sequence: Synthetic polypeptide
  VH of XENP022424

SEQ ID NO: 32656 - protein, 5 aa, Artificial Sequence
  Description of Artificial Sequence: Synthetic peptide
  XENP022424 vhCDR1
DAWMD

SEQ ID NO: 32657 - protein, 19 aa, Artificial Sequence
  Description of Artificial Sequence: Synthetic peptide
  XENP022424 vhCDR2
EISTKANNHATYYAESVKG

SEQ ID NO: 32658 - protein, 10 aa, Artificial Sequence
  Description of Artificial Sequence: Synthetic peptide
  XENP022424 vhCDR3
LATWDWYFDV

SEQ ID NO: 32659 - protein, 218 aa, Artificial Sequence
  Description of Artificial Sequence: Synthetic polypeptide
  XENP022424 7G8_H3.18_L1.32_Fab Light Chain
DTVLTQSPSSLSASVGDRVTITCRASQSVDYDGDSYMNWYQQKPGKPPKLLIYAASELESGIPARLSGSGSGTDFTLTISSLQPEDFATYYCQQSNEDPFTFGPGTKLEIKRTVAAPSVFIFPPSDEQLKSGTASVVCLLNNFYPREAKVQWKVDNALQSGNSQESVTEQDSKDSTYSLSSTLTLSKADYEKHKVYACEVTHQGLSSPVTKSFNRGEC

SEQ ID NO: 32660 - protein, 111 aa, Artificial Sequence
  Description of Artificial Sequence: Synthetic polypeptide
  VL of XENP022424
DTVLTQSPSSLSASVGDRVTITCRASQSVDYDGDSYMNWYQQKPGKPPKLLIYAASELESGIPARLSGSGSGTDFTLTISSLQPEDFATYYCQQSNEDPFTFGPGTKLEIK

SEQ ID NO: 32661 - protein, 15 aa, Artificial Sequence
  Description of Artificial Sequence: Synthetic peptide
  XENP022424 vlCDR1
RASQSVDYDGDSYMN

SEQ ID NO: 32662 - protein, 7 aa, Artificial Sequence
  Description of Artificial Sequence: Synthetic peptide
  XENP022424 vlCDR2
AASELES

SEQ ID NO: 32663 - protein, 9 aa, Artificial Sequence
  Description of Artificial Sequence: Synthetic peptide
  XENP022424 vlCDR3
QQSNEDPFT

SEQ ID NO: 32664 - protein, 226 aa, Artificial Sequence; identical to SEQ ID NO: 31734
  Description of Artificial Sequence: Synthetic polypeptide
  XENP022425 7G8_H3.18_L1.33_Fab Heavy Chain

SEQ ID NO: 32665 - protein, 121 aa, Artificial Sequence; identical to SEQ ID NO: 22325
  Description of Artificial Sequence: Synthetic polypeptide
  VH of XENP022425

SEQ ID NO: 32666 - protein, 5 aa, Artificial Sequence
  Description of Artificial Sequence: Synthetic peptide
  XENP022425 vhCDR1
DAWMD

SEQ ID NO: 32667 - protein, 19 aa, Artificial Sequence
  Description of Artificial Sequence: Synthetic peptide
  XENP022425 vhCDR2
EISTKANNHATYYAESVKG

SEQ ID NO: 32668 - protein, 10 aa, Artificial Sequence
  Description of Artificial Sequence: Synthetic peptide
  XENP022425 vhCDR3
LATWDWYFDV

SEQ ID NO: 32669 - protein, 218 aa, Artificial Sequence
  Description of Artificial Sequence: Synthetic polypeptide
  XENP022425 7G8_H3.18_L1.33_Fab Light Chain
DTVLTQSPSSLSASVGDRVTITCRASQSVDYDGDSYMNWYQQKPGKPPKLLIYAASELESGIPARLSGSGSGTDFTLTISSLQPEDFATYYCQQSNEDPFTFGGGTKLEIKRTVAAPSVFIFPPSDEQLKSGTASVVCLLNNFYPREAKVQWKVDNALQSGNSQESVTEQDSKDSTYSLSSTLTLSKADYEKHKVYACEVTHQGLSSPVTKSFNRGEC

SEQ ID NO: 32670 - protein, 111 aa, Artificial Sequence
  Description of Artificial Sequence: Synthetic polypeptide
  VL of XENP022425
DTVLTQSPSSLSASVGDRVTITCRASQSVDYDGDSYMNWYQQKPGKPPKLLIYAASELESGIPARLSGSGSGTDFTLTISSLQPEDFATYYCQQSNEDPFTFGGGTKLEIK

SEQ ID NO: 32671 - protein, 15 aa, Artificial Sequence
  Description of Artificial Sequence: Synthetic peptide
  XENP022425 vlCDR1
RASQSVDYDGDSYMN

SEQ ID NO: 32672 - protein, 7 aa, Artificial Sequence
  Description of Artificial Sequence: Synthetic peptide
  XENP022425 vlCDR2
AASELES

SEQ ID NO: 32673 - protein, 9 aa, Artificial Sequence
  Description of Artificial Sequence: Synthetic peptide
  XENP022425 vlCDR3
QQSNEDPFT

SEQ ID NO: 32674 - protein, 226 aa, Artificial Sequence; identical to SEQ ID NO: 32254
  Description of Artificial Sequence: Synthetic polypeptide
  XENP022582 7G8_H3.30_L1.30_Fab Heavy Chain

SEQ ID NO: 32675 - protein, 121 aa, Artificial Sequence; identical to SEQ ID NO: 22485
  Description of Artificial Sequence: Synthetic polypeptide
  VH of XENP022582

SEQ ID NO: 32676 - protein, 5 aa, Artificial Sequence
  Description of Artificial Sequence: Synthetic peptide
  XENP022582 vhCDR1
DAWMS

SEQ ID NO: 32677 - protein, 19 aa, Artificial Sequence
  Description of Artificial Sequence: Synthetic peptide
  XENP022582 vhCDR2
EISTKANNHATYYAESVKG

SEQ ID NO: 32678 - protein, 10 aa, Artificial Sequence
  Description of Artificial Sequence: Synthetic peptide
  XENP022582 vhCDR3
LATWDWYFDV

SEQ ID NO: 32679 - protein, 218 aa, Artificial Sequence; identical to SEQ ID NO: 22539
  Description of Artificial Sequence: Synthetic polypeptide
  XENP022582 7G8_H3.30_L1.30_Fab Light Chain

SEQ ID NO: 32680 - protein, 111 aa, Artificial Sequence; identical to SEQ ID NO: 22540
  Description of Artificial Sequence: Synthetic polypeptide
  VL of XENP022582

SEQ ID NO: 32681 - protein, 15 aa, Artificial Sequence
  Description of Artificial Sequence: Synthetic peptide
  XENP022582 vlCDR1
RASQSVDYDGDSYMN

SEQ ID NO: 32682 - protein, 7 aa, Artificial Sequence
  Description of Artificial Sequence: Synthetic peptide
  XENP022582 vlCDR2
AASELES

SEQ ID NO: 32683 - protein, 9 aa, Artificial Sequence
  Description of Artificial Sequence: Synthetic peptide
  XENP022582 vlCDR3
QQSNEDPFT

SEQ ID NO: 32684 - protein, 226 aa, Artificial Sequence; identical to SEQ ID NO: 32284
  Description of Artificial Sequence: Synthetic polypeptide
  XENP022583 7G8_H3.33_L1.30_Fab Heavy Chain

SEQ ID NO: 32685 - protein, 121 aa, Artificial Sequence; identical to SEQ ID NO: 22505
  Description of Artificial Sequence: Synthetic polypeptide
  VH of XENP022583

SEQ ID NO: 32686 - protein, 5 aa, Artificial Sequence
  Description of Artificial Sequence: Synthetic peptide
  XENP022583 vhCDR1
DAWMG

SEQ ID NO: 32687 - protein, 19 aa, Artificial Sequence
  Description of Artificial Sequence: Synthetic peptide
  XENP022583 vhCDR2
EISTKANNHATYYAESVKG

SEQ ID NO: 32688 - protein, 10 aa, Artificial Sequence
  Description of Artificial Sequence: Synthetic peptide
  XENP022583 vhCDR3
LATWDWYFDV

SEQ ID NO: 32689 - protein, 218 aa, Artificial Sequence; identical to SEQ ID NO: 22539
  Description of Artificial Sequence: Synthetic polypeptide
  XENP022583 7G8_H3.33_L1.30_Fab Light Chain

SEQ ID NO: 32690 - protein, 111 aa, Artificial Sequence; identical to SEQ ID NO: 22540
  Description of Artificial Sequence: Synthetic polypeptide
  VL of XENP022583

SEQ ID NO: 32691 - protein, 15 aa, Artificial Sequence
  Description of Artificial Sequence: Synthetic peptide
  XENP022583 vlCDR1
RASQSVDYDGDSYMN

SEQ ID NO: 32692 - protein, 7 aa, Artificial Sequence
  Description of Artificial Sequence: Synthetic peptide
  XENP022583 vlCDR2
AASELES

SEQ ID NO: 32693 - protein, 9 aa, Artificial Sequence
  Description of Artificial Sequence: Synthetic peptide
  XENP022583 vlCDR3
QQSNEDPFT

SEQ ID NO: 32694 - protein, 226 aa, Artificial Sequence
  Description of Artificial Sequence: Synthetic polypeptide
  XENP022588 7G8_H3.54_L1.30_Fab Heavy Chain
EVQLVESGGGLVQPGGSLRLSCAASGFTFDDAWMSWVRQAPGKGLEWVAEISTKANNHATYYAPSVKGRFTISRDDSKSSVYLQMNSLRAEDTAVYYCTRLATWDWYFDVWGQGTTVTVSSASTKGPSVFPLAPSSKSTSGGTAALGCLVKDYFPEPVTVSWNSGALTSGVHTFPAVLQSSGLYSLSSVVTVPSSSLGTQTYICNVNHKPSNTKVDKKVEPKSCGS

SEQ ID NO: 32695 - protein, 121 aa, Artificial Sequence
  Description of Artificial Sequence: Synthetic polypeptide
  VH of XENP022588
EVQLVESGGGLVQPGGSLRLSCAASGFTFDDAWMSWVRQAPGKGLEWVAEISTKANNHATYYAPSVKGRFTISRDDSKSSVYLQMNSLRAEDTAVYYCTRLATWDWYFDVWGQGTTVTVSS

SEQ ID NO: 32696 - protein, 5 aa, Artificial Sequence
  Description of Artificial Sequence: Synthetic peptide
  XENP022588 vhCDR1
DAWMS

SEQ ID NO: 32697 - protein, 19 aa, Artificial Sequence
  Description of Artificial Sequence: Synthetic peptide
  XENP022588 vhCDR2
EISTKANNHATYYAPSVKG

SEQ ID NO: 32698 - protein, 10 aa, Artificial Sequence
  Description of Artificial Sequence: Synthetic peptide
  XENP022588 vhCDR3
LATWDWYFDV

SEQ ID NO: 32699 - protein, 218 aa, Artificial Sequence; identical to SEQ ID NO: 22539
  Description of Artificial Sequence: Synthetic polypeptide
  XENP022588 7G8_H3.54_L1.30_Fab Light Chain

SEQ ID NO: 32700 - protein, 111 aa, Artificial Sequence; identical to SEQ ID NO: 22540
  Description of Artificial Sequence: Synthetic polypeptide
  VL of XENP022588

SEQ ID NO: 32701 - protein, 15 aa, Artificial Sequence
  Description of Artificial Sequence: Synthetic peptide
  XENP022588 vlCDR1
RASQSVDYDGDSYMN

SEQ ID NO: 32702 - protein, 7 aa, Artificial Sequence
  Description of Artificial Sequence: Synthetic peptide
  XENP022588 vlCDR2
AASELES

SEQ ID NO: 32703 - protein, 9 aa, Artificial Sequence
  Description of Artificial Sequence: Synthetic peptide
  XENP022588 vlCDR3
QQSNEDPFT

SEQ ID NO: 32704 - protein, 226 aa, Artificial Sequence
  Description of Artificial Sequence: Synthetic polypeptide
  XENP022589 7G8_H3.55_L1.30_Fab Heavy Chain
EVQLVESGGGLVQPGGSLRLSCAASGFTFDDAWMGWVRQAPGKGLEWVAEISTKANNHATYYAPSVKGRFTISRDDSKSSVYLQMNSLRAEDTAVYYCTRLATWDWYFDVWGQGTTVTVSSASTKGPSVFPLAPSSKSTSGGTAALGCLVKDYFPEPVTVSWNSGALTSGVHTFPAVLQSSGLYSLSSVVTVPSSSLGTQTYICNVNHKPSNTKVDKKVEPKSCGS

SEQ ID NO: 32705 - protein, 121 aa, Artificial Sequence
  Description of Artificial Sequence: Synthetic polypeptide
  VH of XENP022589
EVQLVESGGGLVQPGGSLRLSCAASGFTFDDAWMGWVRQAPGKGLEWVAEISTKANNHATYYAPSVKGRFTISRDDSKSSVYLQMNSLRAEDTAVYYCTRLATWDWYFDVWGQGTTVTVSS

SEQ ID NO: 32706 - protein, 5 aa, Artificial Sequence
  Description of Artificial Sequence: Synthetic peptide
  XENP022589 vhCDR1
DAWMG

SEQ ID NO: 32707 - protein, 19 aa, Artificial Sequence
  Description of Artificial Sequence: Synthetic peptide
  XENP022589 vhCDR2
EISTKANNHATYYAPSVKG

SEQ ID NO: 32708 - protein, 10 aa, Artificial Sequence
  Description of Artificial Sequence: Synthetic peptide
  XENP022589 vhCDR3
LATWDWYFDV

SEQ ID NO: 32709 - protein, 218 aa, Artificial Sequence; identical to SEQ ID NO: 22539
  Description of Artificial Sequence: Synthetic polypeptide
  XENP022589 7G8_H3.55_L1.30_Fab Light Chain

SEQ ID NO: 32710 - protein, 111 aa, Artificial Sequence; identical to SEQ ID NO: 22540
  Description of Artificial Sequence: Synthetic polypeptide
  VL of XENP022589

SEQ ID NO: 32711 - protein, 15 aa, Artificial Sequence
  Description of Artificial Sequence: Synthetic peptide
  XENP022589 vlCDR1
RASQSVDYDGDSYMN

SEQ ID NO: 32712 - protein, 7 aa, Artificial Sequence
  Description of Artificial Sequence: Synthetic peptide
  XENP022589 vlCDR2
AASELES

SEQ ID NO: 32713 - protein, 9 aa, Artificial Sequence
  Description of Artificial Sequence: Synthetic peptide
  XENP022589 vlCDR3
QQSNEDPFT

SEQ ID NO: 32714 - protein, 226 aa, Artificial Sequence
  Description of Artificial Sequence: Synthetic polypeptide
  XENP022590 7G8_H3.56_L1.30_Fab Heavy Chain
EVQLVESGGGLVQPGGSLRLSCAASGFTFDDAWMSWVRQAPGKGLEWVAEISTKANNHATYYAESVKGRFTISRDDSKSTVYLQMNSLRAEDTAVYYCTRLATWDWYFDVWGQGTTVTVSSASTKGPSVFPLAPSSKSTSGGTAALGCLVKDYFPEPVTVSWNSGALTSGVHTFPAVLQSSGLYSLSSVVTVPSSSLGTQTYICNVNHKPSNTKVDKKVEPKSCGS

SEQ ID NO: 32715 - protein, 121 aa, Artificial Sequence
  Description of Artificial Sequence: Synthetic polypeptide
  VH of XENP022590
EVQLVESGGGLVQPGGSLRLSCAASGFTFDDAWMSWVRQAPGKGLEWVAEISTKANNHATYYAESVKGRFTISRDDSKSTVYLQMNSLRAEDTAVYYCTRLATWDWYFDVWGQGTTVTVSS

SEQ ID NO: 32716 - protein, 5 aa, Artificial Sequence
  Description of Artificial Sequence: Synthetic peptide
  XENP022590 vhCDR1
DAWMS

SEQ ID NO: 32717 - protein, 19 aa, Artificial Sequence
  Description of Artificial Sequence: Synthetic peptide
  XENP022590 vhCDR2
EISTKANNHATYYAESVKG

SEQ ID NO: 32718 - protein, 10 aa, Artificial Sequence
  Description of Artificial Sequence: Synthetic peptide
  XENP022590 vhCDR3
LATWDWYFDV

SEQ ID NO: 32719 - protein, 218 aa, Artificial Sequence; identical to SEQ ID NO: 22539
  Description of Artificial Sequence: Synthetic polypeptide
  XENP022590 7G8_H3.56_L1.30_Fab Light Chain

SEQ ID NO: 32720 - protein, 111 aa, Artificial Sequence; identical to SEQ ID NO: 22540
  Description of Artificial Sequence: Synthetic polypeptide
  VL of XENP022590

SEQ ID NO: 32721 - protein, 15 aa, Artificial Sequence
  Description of Artificial Sequence: Synthetic peptide
  XENP022590 vlCDR1
RASQSVDYDGDSYMN

SEQ ID NO: 32722 - protein, 7 aa, Artificial Sequence
  Description of Artificial Sequence: Synthetic peptide
  XENP022590 vlCDR2
AASELES

SEQ ID NO: 32723 - protein, 9 aa, Artificial Sequence
  Description of Artificial Sequence: Synthetic peptide
  XENP022590 vlCDR3
QQSNEDPFT

SEQ ID NO: 32724 - protein, 226 aa, Artificial Sequence
  Description of Artificial Sequence: Synthetic polypeptide
  XENP022591 7G8_H3.57_L1.30_Fab Heavy Chain
EVQLVESGGGLVQPGGSLRLSCAASGFTFDDAWMGWVRQAPGKGLEWVAEISTKANNHATYYAESVKGRFTISRDDSKSTVYLQMNSLRAEDTAVYYCTRLATWDWYFDVWGQGTTVTVSSASTKGPSVFPLAPSSKSTSGGTAALGCLVKDYFPEPVTVSWNSGALTSGVHTFPAVLQSSGLYSLSSVVTVPSSSLGTQTYICNVNHKPSNTKVDKKVEPKSCGS

SEQ ID NO: 32725 - protein, 121 aa, Artificial Sequence
  Description of Artificial Sequence: Synthetic polypeptide
  VH of XENP022591
EVQLVESGGGLVQPGGSLRLSCAASGFTFDDAWMGWVRQAPGKGLEWVAEISTKANNHATYYAESVKGRFTISRDDSKSTVYLQMNSLRAEDTAVYYCTRLATWDWYFDVWGQGTTVTVSS

SEQ ID NO: 32726 - protein, 5 aa, Artificial Sequence
  Description of Artificial Sequence: Synthetic peptide
  XENP022591 vhCDR1
DAWMG

SEQ ID NO: 32727 - protein, 19 aa, Artificial Sequence
  Description of Artificial Sequence: Synthetic peptide
  XENP022591 vhCDR2
EISTKANNHATYYAESVKG

SEQ ID NO: 32728 - protein, 10 aa, Artificial Sequence
  Description of Artificial Sequence: Synthetic peptide
  XENP022591 vhCDR3
LATWDWYFDV

SEQ ID NO: 32729 - protein, 218 aa, Artificial Sequence; identical to SEQ ID NO: 22539
  Description of Artificial Sequence: Synthetic polypeptide
  XENP022591 7G8_H3.57_L1.30_Fab Light Chain

SEQ ID NO: 32730 - protein, 111 aa, Artificial Sequence; identical to SEQ ID NO: 22540
  Description of Artificial Sequence: Synthetic polypeptide
  VL of XENP022591

SEQ ID NO: 32731 - protein, 15 aa, Artificial Sequence
  Description of Artificial Sequence: Synthetic peptide
  XENP022591 vlCDR1
RASQSVDYDGDSYMN

SEQ ID NO: 32732 - protein, 7 aa, Artificial Sequence
  Description of Artificial Sequence: Synthetic peptide
  XENP022591 vlCDR2
AASELES

SEQ ID NO: 32733 - protein, 9 aa, Artificial Sequence
  Description of Artificial Sequence: Synthetic peptide
  XENP022591 vlCDR3
QQSNEDPFT

SEQ ID NO: 32734 - protein, 226 aa, Artificial Sequence
  Description of Artificial Sequence: Synthetic polypeptide
  XENP022592 7G8_H3.58_L1.30_Fab Heavy Chain
EVQLVESGGGLVQPGGSLRLSCAASGFTFDDAWMSWVRQAPGKGLEWVAEISTKANNHATYYAPSVKGRFTISRDDSKSTVYLQMNSLRAEDTAVYYCTRLATWDWYFDVWGQGTTVTVSSASTKGPSVFPLAPSSKSTSGGTAALGCLVKDYFPEPVTVSWNSGALTSGVHTFPAVLQSSGLYSLSSVVTVPSSSLGTQTYICNVNHKPSNTKVDKKVEPKSCGS

SEQ ID NO: 32735 - protein, 121 aa, Artificial Sequence
  Description of Artificial Sequence: Synthetic polypeptide
  VH of XENP022592
EVQLVESGGGLVQPGGSLRLSCAASGFTFDDAWMSWVRQAPGKGLEWVAEISTKANNHATYYAPSVKGRFTISRDDSKSTVYLQMNSLRAEDTAVYYCTRLATWDWYFDVWGQGTTVTVSS

SEQ ID NO: 32736 - protein, 5 aa, Artificial Sequence
  Description of Artificial Sequence: Synthetic peptide
  XENP022592 vhCDR1
DAWMS

SEQ ID NO: 32737 - protein, 19 aa, Artificial Sequence
  Description of Artificial Sequence: Synthetic peptide
  XENP022592 vhCDR2
EISTKANNHATYYAPSVKG

SEQ ID NO: 32738 - protein, 10 aa, Artificial Sequence
  Description of Artificial Sequence: Synthetic peptide
  XENP022592 vhCDR3
LATWDWYFDV

SEQ ID NO: 32739 - protein, 218 aa, Artificial Sequence; identical to SEQ ID NO: 22539
  Description of Artificial Sequence: Synthetic polypeptide
  XENP022592 7G8_H3.58_L1.30_Fab Light Chain

SEQ ID NO: 32740 - protein, 111 aa, Artificial Sequence; identical to SEQ ID NO: 22540
  Description of Artificial Sequence: Synthetic polypeptide
  VL of XENP022592

SEQ ID NO: 32741 - protein, 15 aa, Artificial Sequence
  Description of Artificial Sequence: Synthetic peptide
  XENP022592 vlCDR1
RASQSVDYDGDSYMN

SEQ ID NO: 32742 - protein, 7 aa, Artificial Sequence
  Description of Artificial Sequence: Synthetic peptide
  XENP022592 vlCDR2
AASELES

SEQ ID NO: 32743 - protein, 9 aa, Artificial Sequence
  Description of Artificial Sequence: Synthetic peptide
  XENP022592 vlCDR3
QQSNEDPFT

SEQ ID NO: 32744 - protein, 226 aa, Artificial Sequence
  Description of Artificial Sequence: Synthetic polypeptide
  XENP022593 7G8_H3.59_L1.30_Fab Heavy Chain
EVQLVESGGGLVQPGGSLRLSCAASGFTFDDAWMGWVRQAPGKGLEWVAEISTKANNHATYYAPSVKGRFTISRDDSKSTVYLQMNSLRAEDTAVYYCTRLATWDWYFDVWGQGTTVTVSSASTKGPSVFPLAPSSKSTSGGTAALGCLVKDYFPEPVTVSWNSGALTSGVHTFPAVLQSSGLYSLSSVVTVPSSSLGTQTYICNVNHKPSNTKVDKKVEPKSCGS

SEQ ID NO: 32745 - protein, 121 aa, Artificial Sequence
  Description of Artificial Sequence: Synthetic polypeptide
  VH of XENP022593
EVQLVESGGGLVQPGGSLRLSCAASGFTFDDAWMGWVRQAPGKGLEWVAEISTKANNHATYYAPSVKGRFTISRDDSKSTVYLQMNSLRAEDTAVYYCTRLATWDWYFDVWGQGTTVTVSS

SEQ ID NO: 32746 - protein, 5 aa, Artificial Sequence
  Description of Artificial Sequence: Synthetic peptide
  XENP022593 vhCDR1
DAWMG

SEQ ID NO: 32747 - protein, 19 aa, Artificial Sequence
  Description of Artificial Sequence: Synthetic peptide
  XENP022593 vhCDR2
EISTKANNHATYYAPSVKG

SEQ ID NO: 32748 - protein, 10 aa, Artificial Sequence
  Description of Artificial Sequence: Synthetic peptide
  XENP022593 vhCDR3
LATWDWYFDV

SEQ ID NO: 32749 - protein, 218 aa, Artificial Sequence; identical to SEQ ID NO: 22539
  Description of Artificial Sequence: Synthetic polypeptide
  XENP022593 7G8_H3.59_L1.30_Fab Light Chain

SEQ ID NO: 32750 - protein, 111 aa, Artificial Sequence; identical to SEQ ID NO: 22540
  Description of Artificial Sequence: Synthetic polypeptide
  VL of XENP022593

SEQ ID NO: 32751 - protein, 15 aa, Artificial Sequence
  Description of Artificial Sequence: Synthetic peptide
  XENP022593 vlCDR1
RASQSVDYDGDSYMN

SEQ ID NO: 32752 - protein, 7 aa, Artificial Sequence
  Description of Artificial Sequence: Synthetic peptide
  XENP022593 vlCDR2
AASELES

SEQ ID NO: 32753 - protein, 9 aa, Artificial Sequence
  Description of Artificial Sequence: Synthetic peptide
  XENP022593 vlCDR3
QQSNEDPFT

SEQ ID NO: 32754 - protein, 226 aa, Artificial Sequence; identical to SEQ ID NO: 32254
  Description of Artificial Sequence: Synthetic polypeptide
  XENP022594 7G8_H3.30_L1.34_Fab Heavy Chain

SEQ ID NO: 32755 - protein, 121 aa, Artificial Sequence; identical to SEQ ID NO: 22485
  Description of Artificial Sequence: Synthetic polypeptide
  VH of XENP022594

SEQ ID NO: 32756 - protein, 5 aa, Artificial Sequence
  Description of Artificial Sequence: Synthetic peptide
  XENP022594 vhCDR1
DAWMS

SEQ ID NO: 32757 - protein, 19 aa, Artificial Sequence
  Description of Artificial Sequence: Synthetic peptide
  XENP022594 vhCDR2
EISTKANNHATYYAESVKG

SEQ ID NO: 32758 - protein, 10 aa, Artificial Sequence
  Description of Artificial Sequence: Synthetic peptide
  XENP022594 vhCDR3
LATWDWYFDV

SEQ ID NO: 32759 - protein, 218 aa, Artificial Sequence; identical to SEQ ID NO: 22599
  Description of Artificial Sequence: Synthetic polypeptide
  XENP022594 7G8_H3.30_L1.34_Fab Light Chain

SEQ ID NO: 32760 - protein, 111 aa, Artificial Sequence; identical to SEQ ID NO: 22600
  Description of Artificial Sequence: Synthetic polypeptide
  VL of XENP022594

SEQ ID NO: 32761 - protein, 15 aa, Artificial Sequence
  Description of Artificial Sequence: Synthetic peptide
  XENP022594 vlCDR1
RASQSVDYDGDSYMN

SEQ ID NO: 32762 - protein, 7 aa, Artificial Sequence
  Description of Artificial Sequence: Synthetic peptide
  XENP022594 vlCDR2
AASELES

SEQ ID NO: 32763 - protein, 9 aa, Artificial Sequence
  Description of Artificial Sequence: Synthetic peptide
  XENP022594 vlCDR3
QQSNEDPFT

SEQ ID NO: 32764 - protein, 226 aa, Artificial Sequence; identical to SEQ ID NO: 32254
  Description of Artificial Sequence: Synthetic polypeptide
  XENP022595 7G8_H3.30_L1.36_Fab Heavy Chain

SEQ ID NO: 32765 - protein, 121 aa, Artificial Sequence; identical to SEQ ID NO: 22485
  Description of Artificial Sequence: Synthetic polypeptide
  VH of XENP022595

SEQ ID NO: 32766 - protein, 5 aa, Artificial Sequence
  Description of Artificial Sequence: Synthetic peptide
  XENP022595 vhCDR1
DAWMS

SEQ ID NO: 32767 - protein, 19 aa, Artificial Sequence
  Description of Artificial Sequence: Synthetic peptide
  XENP022595 vhCDR2
EISTKANNHATYYAESVKG

SEQ ID NO: 32768 - protein, 10 aa, Artificial Sequence
  Description of Artificial Sequence: Synthetic peptide
  XENP022595 vhCDR3
LATWDWYFDV

SEQ ID NO: 32769 - protein, 218 aa, Artificial Sequence; identical to SEQ ID NO: 22619
  Description of Artificial Sequence: Synthetic polypeptide
  XENP022595 7G8_H3.30_L1.36_Fab Light Chain

SEQ ID NO: 32770 - protein, 111 aa, Artificial Sequence; identical to SEQ ID NO: 22620
  Description of Artificial Sequence: Synthetic polypeptide
  VL of XENP022595

SEQ ID NO: 32771 - protein, 15 aa, Artificial Sequence
  Description of Artificial Sequence: Synthetic peptide
  XENP022595 vlCDR1
RASQSVDHDGDSYMN

SEQ ID NO: 32772 - protein, 7 aa, Artificial Sequence
  Description of Artificial Sequence: Synthetic peptide
  XENP022595 vlCDR2
AASELES

SEQ ID NO: 32773 - protein, 9 aa, Artificial Sequence
  Description of Artificial Sequence: Synthetic peptide
  XENP022595 vlCDR3
QQSNEDPFT

SEQ ID NO: 32774 - protein, 226 aa, Artificial Sequence; identical to SEQ ID NO: 32284
  Description of Artificial Sequence: Synthetic polypeptide
  XENP022596 7G8_H3.33_L1.34_Fab Heavy Chain

SEQ ID NO: 32775 - protein, 121 aa, Artificial Sequence; identical to SEQ ID NO: 22505
  Description of Artificial Sequence: Synthetic polypeptide
  VH of XENP022596

SEQ ID NO: 32776 - protein, 5 aa, Artificial Sequence
  Description of Artificial Sequence: Synthetic peptide
  XENP022596 vhCDR1
DAWMG

SEQ ID NO: 32777 - protein, 19 aa, Artificial Sequence
  Description of Artificial Sequence: Synthetic peptide
  XENP022596 vhCDR2
EISTKANNHATYYAESVKG

SEQ ID NO: 32778 - protein, 10 aa, Artificial Sequence
  Description of Artificial Sequence: Synthetic peptide
  XENP022596 vhCDR3
LATWDWYFDV

SEQ ID NO: 32779 - protein, 218 aa, Artificial Sequence; identical to SEQ ID NO: 22599
  Description of Artificial Sequence: Synthetic polypeptide
  XENP022596 7G8_H3.33_L1.34_Fab Light Chain

SEQ ID NO: 32780 - protein, 111 aa, Artificial Sequence; identical to SEQ ID NO: 22600
  Description of Artificial Sequence: Synthetic polypeptide
  VL of XENP022596

SEQ ID NO: 32781 - protein, 15 aa, Artificial Sequence
  Description of Artificial Sequence: Synthetic peptide
  XENP022596 vlCDR1
RASQSVDYDGDSYMN

SEQ ID NO: 32782 - protein, 7 aa, Artificial Sequence
  Description of Artificial Sequence: Synthetic peptide
  XENP022596 vlCDR2
AASELES

SEQ ID NO: 32783 - protein, 9 aa, Artificial Sequence
  Description of Artificial Sequence: Synthetic peptide
  XENP022596 vlCDR3
QQSNEDPFT

SEQ ID NO: 32784 - protein, 226 aa, Artificial Sequence; identical to SEQ ID NO: 32284
  Description of Artificial Sequence: Synthetic polypeptide
  XENP022601 7G8_H3.33_L1.36_Fab Heavy Chain

SEQ ID NO: 32785 - protein, 121 aa, Artificial Sequence; identical to SEQ ID NO: 22505
  Description of Artificial Sequence: Synthetic polypeptide
  VH of XENP022601

SEQ ID NO: 32786 - protein, 5 aa, Artificial Sequence
  Description of Artificial Sequence: Synthetic peptide
  XENP022601 vhCDR1
DAWMG

SEQ ID NO: 32787 - protein, 19 aa, Artificial Sequence
  Description of Artificial Sequence: Synthetic peptide
  XENP022601 vhCDR2
EISTKANNHATYYAESVKG

SEQ ID NO: 32788 - protein, 10 aa, Artificial Sequence
  Description of Artificial Sequence: Synthetic peptide
  XENP022601 vhCDR3
LATWDWYFDV

SEQ ID NO: 32789 - protein, 218 aa, Artificial Sequence; identical to SEQ ID NO: 22619
  Description of Artificial Sequence: Synthetic polypeptide
  XENP022601 7G8_H3.33_L1.36_Fab Light Chain

SEQ ID NO: 32790 - protein, 111 aa, Artificial Sequence; identical to SEQ ID NO: 22620
  Description of Artificial Sequence: Synthetic polypeptide
  VL of XENP022601

SEQ ID NO: 32791 - protein, 15 aa, Artificial Sequence
  Description of Artificial Sequence: Synthetic peptide
  XENP022601 vlCDR1
RASQSVDHDGDSYMN

SEQ ID NO: 32792 - protein, 7 aa, Artificial Sequence
  Description of Artificial Sequence: Synthetic peptide
  XENP022601 vlCDR2
AASELES

SEQ ID NO: 32793 - protein, 9 aa, Artificial Sequence
  Description of Artificial Sequence: Synthetic peptide
  XENP022601 vlCDR3
QQSNEDPFT

SEQ ID NO: 32794 - protein, 447 aa, Artificial Sequence; identical to SEQ ID NO: 22064
  Description of Artificial Sequence: Synthetic polypeptide
  XENP022511 2A11_H1.125_L2.113-one-arm Fab-Fc Heavy Chain

SEQ ID NO: 32795 - protein, 118 aa, Artificial Sequence; identical to SEQ ID NO: 22065
  Description of Artificial Sequence: Synthetic polypeptide
  VH of XENP022511

SEQ ID NO: 32796 - protein, 5 aa, Artificial Sequence
  Description of Artificial Sequence: Synthetic peptide
  XENP022511 vhCDR1
HYFMH

SEQ ID NO: 32797 - protein, 17 aa, Artificial Sequence
  Description of Artificial Sequence: Synthetic peptide
  XENP022511 vhCDR2
WIDPYLGDTEYAPKFQG

SEQ ID NO: 32798 - protein, 9 aa, Artificial Sequence
  Description of Artificial Sequence: Synthetic peptide
  XENP022511 vhCDR3
RGVYQALDY

SEQ ID NO: 32799 - protein, 231 aa, Artificial Sequence
  Description of Artificial Sequence: Synthetic polypeptide
  XENP022511 2A11_H1.125_L2.113-one-arm Fc only Heavy Chain
ERKSSDKTHTCPRCPAPPVAGPSVFLFPPKPKDTLMISRTPEVTCVVVDVKHEDPEVKFKWYVDGVEVHNAKTKPREEQYNSTYRVVSVLTVLHQDWLNGKEYKCKVSNKALPAPIEKTISKAKGQPREPQVYTLPPSREQMTKNQVKLTCLVKGFYPSDIAVEWESNGQPENNYKTTPPVLDSDGSFFLYSKLTVDKSRWQQGNVFSCSVMHEALHNHYTQKSLSLSPGK

SEQ ID NO: 32800 - protein, 214 aa, Artificial Sequence; identical to SEQ ID NO: 22079
  Description of Artificial Sequence: Synthetic polypeptide
  XENP022511 2A11_H1.125_L2.113-one-arm Light Chain

SEQ ID NO: 32801 - protein, 107 aa, Artificial Sequence; identical to SEQ ID NO: 22080
  Description of Artificial Sequence: Synthetic polypeptide
  VL of XENP022511

SEQ ID NO: 32802 - protein, 11 aa, Artificial Sequence
  Description of Artificial Sequence: Synthetic peptide
  XENP022511 vlCDR1
QASQDIGNYLN

SEQ ID NO: 32803 - protein, 7 aa, Artificial Sequence
  Description of Artificial Sequence: Synthetic peptide
  XENP022511 vlCDR2
FTSYLHS

SEQ ID NO: 32804 - protein, 9 aa, Artificial Sequence
  Description of Artificial Sequence: Synthetic peptide
  XENP022511 vlCDR3
QQGNTLPYT

SEQ ID NO: 32805 - protein, 447 aa, Artificial Sequence; identical to SEQ ID NO: 22084
  Description of Artificial Sequence: Synthetic polypeptide
  XENP022512 2A11_H1.144_L2.113-one-arm Fab-Fc Heavy Chain

SEQ ID NO: 32806 - protein, 118 aa, Artificial Sequence; identical to SEQ ID NO: 22085
  Description of Artificial Sequence: Synthetic polypeptide
  VH of XENP022512

SEQ ID NO: 32807 - protein, 5 aa, Artificial Sequence
  Description of Artificial Sequence: Synthetic peptide
  XENP022512 vhCDR1
DYFMH

SEQ ID NO: 32808 - protein, 17 aa, Artificial Sequence
  Description of Artificial Sequence: Synthetic peptide
  XENP022512 vhCDR2
WIDPELGDTEYAPKFQG

SEQ ID NO: 32809 - protein, 9 aa, Artificial Sequence
  Description of Artificial Sequence: Synthetic peptide
  XENP022512 vhCDR3
RGVYQALDY

SEQ ID NO: 32810 - protein, 231 aa, Artificial Sequence; identical to SEQ ID NO: 32799
  Description of Artificial Sequence: Synthetic polypeptide
  XENP022512 2A11_H1.144_L2.113-one-arm Fc only Heavy Chain

SEQ ID NO: 32811 - protein, 214 aa, Artificial Sequence; identical to SEQ ID NO: 22079
  Description of Artificial Sequence: Synthetic polypeptide
  XENP022512 2A11_H1.144_L2.113-one-arm Light Chain

SEQ ID NO: 32812 - protein, 107 aa, Artificial Sequence; identical to SEQ ID NO: 22080
  Description of Artificial Sequence: Synthetic polypeptide
  VL of XENP022512

SEQ ID NO: 32813 - protein, 11 aa, Artificial Sequence
  Description of Artificial Sequence: Synthetic peptide
  XENP022512 vlCDR1
QASQDIGNYLN

SEQ ID NO: 32814 - protein, 7 aa, Artificial Sequence
  Description of Artificial Sequence: Synthetic peptide
  XENP022512 vlCDR2
FTSYLHS

SEQ ID NO: 32815 - protein, 9 aa, Artificial Sequence
  Description of Artificial Sequence: Synthetic peptide
  XENP022512 vlCDR3
QQGNTLPYT

SEQ ID NO: 32816 - protein, 447 aa, Artificial Sequence; identical to SEQ ID NO: 22104
  Description of Artificial Sequence: Synthetic polypeptide
  XENP022513 2A11_H1.117_L2.116-one-arm Fab-Fc Heavy Chain

SEQ ID NO: 32817 - protein, 118 aa, Artificial Sequence; identical to SEQ ID NO: 22105
  Description of Artificial Sequence: Synthetic polypeptide
  VH of XENP022513

SEQ ID NO: 32818 - protein, 5 aa, Artificial Sequence
  Description of Artificial Sequence: Synthetic peptide
  XENP022513 vhCDR1
HYFMH

SEQ ID NO: 32819 - protein, 17 aa, Artificial Sequence
  Description of Artificial Sequence: Synthetic peptide
  XENP022513 vhCDR2
WIDPYLGDTEYAPKFQG

SEQ ID NO: 32820 - protein, 9 aa, Artificial Sequence
  Description of Artificial Sequence: Synthetic peptide
  XENP022513 vhCDR3
RGVRQALDY

SEQ ID NO: 32821 - protein, 231 aa, Artificial Sequence; identical to SEQ ID NO: 32799
  Description of Artificial Sequence: Synthetic polypeptide
  XENP022513 2A11_H1.117_L2.116-one-arm Fc only Heavy Chain

SEQ ID NO: 32822 - protein, 214 aa, Artificial Sequence; identical to SEQ ID NO: 22119
  Description of Artificial Sequence: Synthetic polypeptide
  XENP022513 2A11_H1.117_L2.116-one-arm Light Chain

SEQ ID NO: 32823 - protein, 107 aa, Artificial Sequence; identical to SEQ ID NO: 22120
  Description of Artificial Sequence: Synthetic polypeptide
  VL of XENP022513

SEQ ID NO: 32824 - protein, 11 aa, Artificial Sequence
  Description of Artificial Sequence: Synthetic peptide
  XENP022513 vlCDR1
QASQDIGNYLN

SEQ ID NO: 32825 - protein, 7 aa, Artificial Sequence
  Description of Artificial Sequence: Synthetic peptide
  XENP022513 vlCDR2
FTSHLHS

SEQ ID NO: 32826 - protein, 9 aa, Artificial Sequence
  Description of Artificial Sequence: Synthetic peptide
  XENP022513 vlCDR3
QQGHQLPYT

SEQ ID NO: 32827 - protein, 447 aa, Artificial Sequence; identical to SEQ ID NO: 22084
  Description of Artificial Sequence: Synthetic polypeptide
  XENP022514 2A11_H1.144_L2-one-arm Fab-Fc Heavy Chain

SEQ ID NO: 32828 - protein, 118 aa, Artificial Sequence; identical to SEQ ID NO: 22085
  Description of Artificial Sequence: Synthetic polypeptide
  VH of XENP022514

SEQ ID NO: 32829 - protein, 5 aa, Artificial Sequence
  Description of Artificial Sequence: Synthetic peptide
  XENP022514 vhCDR1
DYFMH

SEQ ID NO: 32830 - protein, 17 aa, Artificial Sequence
  Description of Artificial Sequence: Synthetic peptide
  XENP022514 vhCDR2
WIDPELGDTEYAPKFQG

SEQ ID NO: 32831 - protein, 9 aa, Artificial Sequence
  Description of Artificial Sequence: Synthetic peptide
  XENP022514 vhCDR3
RGVYQALDY

SEQ ID NO: 32832 - protein, 231 aa, Artificial Sequence; identical to SEQ ID NO: 32799
  Description of Artificial Sequence: Synthetic polypeptide
  XENP022514 2A11_H1.144_L2-one-arm Fc only Heavy Chain

SEQ ID NO: 32833 - protein, 214 aa, Artificial Sequence; identical to SEQ ID NO: 17250
  Description of Artificial Sequence: Synthetic polypeptide
  XENP022514 2A11_H1.144_L2-one-arm Light Chain

SEQ ID NO: 32834 - protein, 107 aa, Artificial Sequence; identical to SEQ ID NO: 17251
  Description of Artificial Sequence: Synthetic polypeptide
  VL of XENP022514

SEQ ID NO: 32835 - protein, 11 aa, Artificial Sequence
  Description of Artificial Sequence: Synthetic peptide
  XENP022514 vlCDR1
QASQDIGNYLN

SEQ ID NO: 32836 - protein, 7 aa, Artificial Sequence
  Description of Artificial Sequence: Synthetic peptide
  XENP022514 vlCDR2
YTSRLHS

SEQ ID NO: 32837 - protein, 9 aa, Artificial Sequence
  Description of Artificial Sequence: Synthetic peptide
  XENP022514 vlCDR3
QQGNTLPYT

SEQ ID NO: 32838 - protein, 447 aa, Artificial Sequence; identical to SEQ ID NO: 17235
  Description of Artificial Sequence: Synthetic polypeptide
  XENP022515 2A11_H1_L2.113-one-arm Fab-Fc Heavy Chain

SEQ ID NO: 32839 - protein, 118 aa, Artificial Sequence; identical to SEQ ID NO: 17236
  Description of Artificial Sequence: Synthetic polypeptide
  VH of XENP022515

SEQ ID NO: 32840 - protein, 5 aa, Artificial Sequence
  Description of Artificial Sequence: Synthetic peptide
  XENP022515 vhCDR1
DYYMH

SEQ ID NO: 32841 - protein, 17 aa, Artificial Sequence
  Description of Artificial Sequence: Synthetic peptide
  XENP022515 vhCDR2
WIDPENGDTEYAPKFQG

SEQ ID NO: 32842 - protein, 9 aa, Artificial Sequence
  Description of Artificial Sequence: Synthetic peptide
  XENP022515 vhCDR3
RGVRQALDY

SEQ ID NO: 32843 - protein, 231 aa, Artificial Sequence; identical to SEQ ID NO: 32799
  Description of Artificial Sequence: Synthetic polypeptide
  XENP022515 2A11_H1_L2.113-one-arm Fc only Heavy Chain

SEQ ID NO: 32844 - protein, 214 aa, Artificial Sequence; identical to SEQ ID NO: 22079
  Description of Artificial Sequence: Synthetic polypeptide
  XENP022515 2A11_H1_L2.113-one-arm Light Chain

SEQ ID NO: 32845 - protein, 107 aa, Artificial Sequence; identical to SEQ ID NO: 22080
  Description of Artificial Sequence: Synthetic polypeptide
  VL of XENP022515

SEQ ID NO: 32846 - protein, 11 aa, Artificial Sequence
  Description of Artificial Sequence: Synthetic peptide
  XENP022515 vlCDR1
QASQDIGNYLN

SEQ ID NO: 32847 - protein, 7 aa, Artificial Sequence
  Description of Artificial Sequence: Synthetic peptide
  XENP022515 vlCDR2
FTSYLHS

SEQ ID NO: 32848 - protein, 9 aa, Artificial Sequence
  Description of Artificial Sequence: Synthetic peptide
  XENP022515 vlCDR3
QQGNTLPYT

SEQ ID NO: 32849 - protein, 447 aa, Artificial Sequence; identical to SEQ ID NO: 17235
  Description of Artificial Sequence: Synthetic polypeptide
  XENP022516 2A11_H1L2-one-arm Fab-Fc Heavy Chain

SEQ ID NO: 32850 - protein, 118 aa, Artificial Sequence; identical to SEQ ID NO: 17236
  Description of Artificial Sequence: Synthetic polypeptide
  VH of XENP022516

SEQ ID NO: 32851 - protein, 5 aa, Artificial Sequence
  Description of Artificial Sequence: Synthetic peptide
  XENP022516 vhCDR1
DYYMH

SEQ ID NO: 32852 - protein, 17 aa, Artificial Sequence
  Description of Artificial Sequence: Synthetic peptide
  XENP022516 vhCDR2
WIDPENGDTEYAPKFQG

SEQ ID NO: 32853 - protein, 9 aa, Artificial Sequence
  Description of Artificial Sequence: Synthetic peptide
  XENP022516 vhCDR3
RGVRQALDY

SEQ ID NO: 32854 - protein, 231 aa, Artificial Sequence; identical to SEQ ID NO: 32799
  Description of Artificial Sequence: Synthetic polypeptide
  XENP022516 2A11_H1L2-one-arm Fc only Heavy Chain

SEQ ID NO: 32855 - protein, 214 aa, Artificial Sequence; identical to SEQ ID NO: 17250
  Description of Artificial Sequence: Synthetic polypeptide
  XENP022516 2A11_H1L2-one-arm Light Chain

SEQ ID NO: 32856 - protein, 107 aa, Artificial Sequence; identical to SEQ ID NO: 17251
  Description of Artificial Sequence: Synthetic polypeptide
  VL of XENP022516

SEQ ID NO: 32857 - protein, 11 aa, Artificial Sequence
  Description of Artificial Sequence: Synthetic peptide
  XENP022516 vlCDR1
QASQDIGNYLN

SEQ ID NO: 32858 - protein, 7 aa, Artificial Sequence
  Description of Artificial Sequence: Synthetic peptide
  XENP022516 vlCDR2
YTSRLHS

SEQ ID NO: 32859 - protein, 9 aa, Artificial Sequence
  Description of Artificial Sequence: Synthetic peptide
  XENP022516 vlCDR3
QQGNTLPYT

SEQ ID NO: 32860 - protein, 447 aa, Artificial Sequence; identical to SEQ ID NO: 17235
  Description of Artificial Sequence: Synthetic polypeptide
  XENP022517 2A11_H1_L2.25-one-arm Fab-Fc Heavy Chain

SEQ ID NO: 32861 - protein, 118 aa, Artificial Sequence; identical to SEQ ID NO: 17236
  Description of Artificial Sequence: Synthetic polypeptide
  VH of XENP022517

SEQ ID NO: 32862 - protein, 5 aa, Artificial Sequence
  Description of Artificial Sequence: Synthetic peptide
  XENP022517 vhCDR1
DYYMH

SEQ ID NO: 32863 - protein, 17 aa, Artificial Sequence
  Description of Artificial Sequence: Synthetic peptide
  XENP022517 vhCDR2
WIDPENGDTEYAPKFQG

SEQ ID NO: 32864 - protein, 9 aa, Artificial Sequence
  Description of Artificial Sequence: Synthetic peptide
  XENP022517 vhCDR3
RGVRQALDY

SEQ ID NO: 32865 - protein, 231 aa, Artificial Sequence; identical to SEQ ID NO: 32799
  Description of Artificial Sequence: Synthetic polypeptide
  XENP022517 2A11_H1_L2.25-one-arm Fc only Heavy Chain

SEQ ID NO: 32866 - protein, 214 aa, Artificial Sequence; identical to SEQ ID NO: 22179
  Description of Artificial Sequence: Synthetic polypeptide
  XENP022517 2A11_H1_L2.25-one-arm Light Chain

SEQ ID NO: 32867 - protein, 107 aa, Artificial Sequence; identical to SEQ ID NO: 22180
  Description of Artificial Sequence: Synthetic polypeptide
  VL of XENP022517

SEQ ID NO: 32868 - protein, 11 aa, Artificial Sequence
  Description of Artificial Sequence: Synthetic peptide
  XENP022517 vlCDR1
QASQDIGNHLN

SEQ ID NO: 32869 - protein, 7 aa, Artificial Sequence
  Description of Artificial Sequence: Synthetic peptide
  XENP022517 vlCDR2
YTSRLHS

SEQ ID NO: 32870 - protein, 9 aa, Artificial Sequence
  Description of Artificial Sequence: Synthetic peptide
  XENP022517 vlCDR3
QQGNTLPYT

SEQ ID NO: 32871 - protein, 447 aa, Artificial Sequence; identical to SEQ ID NO: 22064
  Description of Artificial Sequence: Synthetic polypeptide
  XENP022674 2A11_H1.125_L2.126-one-arm Fab-Fc Heavy Chain

SEQ ID NO: 32872 - protein, 118 aa, Artificial Sequence; identical to SEQ ID NO: 22065
  Description of Artificial Sequence: Synthetic polypeptide
  VH of XENP022674

SEQ ID NO: 32873 - protein, 5 aa, Artificial Sequence
  Description of Artificial Sequence: Synthetic peptide
  XENP022674 vhCDR1
HYFMH

SEQ ID NO: 32874 - protein, 17 aa, Artificial Sequence
  Description of Artificial Sequence: Synthetic peptide
  XENP022674 vhCDR2
WIDPYLGDTEYAPKFQG

SEQ ID NO: 32875 - protein, 9 aa, Artificial Sequence
  Description of Artificial Sequence: Synthetic peptide
  XENP022674 vhCDR3
RGVYQALDY

SEQ ID NO: 32876 - protein, 231 aa, Artificial Sequence; identical to SEQ ID NO: 32799
  Description of Artificial Sequence: Synthetic polypeptide
  XENP022674 2A11_H1.125_L2.126-one-arm Fc only Heavy Chain

SEQ ID NO: 32877 - protein, 214 aa, Artificial Sequence; identical to SEQ ID NO: 22259
  Description of Artificial Sequence: Synthetic polypeptide
  XENP022674 2A11_H1.125_L2.126-one-arm Light Chain

SEQ ID NO: 32878 - protein, 107 aa, Artificial Sequence; identical to SEQ ID NO: 22260
  Description of Artificial Sequence: Synthetic polypeptide
  VL of XENP022674

SEQ ID NO: 32879 - protein, 11 aa, Artificial Sequence
  Description of Artificial Sequence: Synthetic peptide
  XENP022674 vlCDR1
QASQDIGNYLN

SEQ ID NO: 32880 - protein, 7 aa, Artificial Sequence
  Description of Artificial Sequence: Synthetic peptide
  XENP022674 vlCDR2
FTSYLHS

SEQ ID NO: 32881 - protein, 9 aa, Artificial Sequence
  Description of Artificial Sequence: Synthetic peptide
  XENP022674 vlCDR3
QEGNTLPYT

SEQ ID NO: 32882 - protein, 447 aa, Artificial Sequence; identical to SEQ ID NO: 22084
  Description of Artificial Sequence: Synthetic polypeptide
  XENP022676 2A11_H1.144_L2.142-one-arm Fab-Fc Heavy Chain

SEQ ID NO: 32883 - protein, 118 aa, Artificial Sequence; identical to SEQ ID NO: 22085
  Description of Artificial Sequence: Synthetic polypeptide
  VH of XENP022676

SEQ ID NO: 32884 - protein, 5 aa, Artificial Sequence
  Description of Artificial Sequence: Synthetic peptide
  XENP022676 vhCDR1
DYFMH

SEQ ID NO: 32885 - protein, 17 aa, Artificial Sequence
  Description of Artificial Sequence: Synthetic peptide
  XENP022676 vhCDR2
WIDPELGDTEYAPKFQG

SEQ ID NO: 32886 - protein, 9 aa, Artificial Sequence
  Description of Artificial Sequence: Synthetic peptide
  XENP022676 vhCDR3
RGVYQALDY

SEQ ID NO: 32887 - protein, 231 aa, Artificial Sequence; identical to SEQ ID NO: 32799
  Description of Artificial Sequence: Synthetic polypeptide
  XENP022676 2A11_H1.144_L2.142-one-arm Fc only Heavy Chain

SEQ ID NO: 32888 - protein, 214 aa, Artificial Sequence; identical to SEQ ID NO: 22279
  Description of Artificial Sequence: Synthetic polypeptide
  XENP022676 2A11_H1.144_L2.142-one-arm Light Chain

SEQ ID NO: 32889 - protein, 107 aa, Artificial Sequence; identical to SEQ ID NO: 22280
  Description of Artificial Sequence: Synthetic polypeptide
  VL of XENP022676

SEQ ID NO: 32890 - protein, 11 aa, Artificial Sequence
  Description of Artificial Sequence: Synthetic peptide
  XENP022676 vlCDR1
QASQDIGNYLN

SEQ ID NO: 32891 - protein, 7 aa, Artificial Sequence
  Description of Artificial Sequence: Synthetic peptide
  XENP022676 vlCDR2
FTSYLHS

SEQ ID NO: 32892 - protein, 9 aa, Artificial Sequence
  Description of Artificial Sequence: Synthetic peptide
  XENP022676 vlCDR3
QQGNTLPYT

SEQ ID NO: 32893 - protein, 450 aa, Artificial Sequence; identical to SEQ ID NO: 22324
  Description of Artificial Sequence: Synthetic polypeptide
  XENP022519 7G8_H3.18_L1.11-one-arm Fab-Fc Heavy Chain

SEQ ID NO: 32894 - protein, 121 aa, Artificial Sequence; identical to SEQ ID NO: 22325
  Description of Artificial Sequence: Synthetic polypeptide
  VH of XENP022519

SEQ ID NO: 32895 - protein, 5 aa, Artificial Sequence
  Description of Artificial Sequence: Synthetic peptide
  XENP022519 vhCDR1
DAWMD

SEQ ID NO: 32896 - protein, 19 aa, Artificial Sequence
  Description of Artificial Sequence: Synthetic peptide
  XENP022519 vhCDR2
EISTKANNHATYYAESVKG

SEQ ID NO: 32897 - protein, 10 aa, Artificial Sequence
  Description of Artificial Sequence: Synthetic peptide
  XENP022519 vhCDR3
LATWDWYFDV

SEQ ID NO: 32898 - protein, 231 aa, Artificial Sequence; identical to SEQ ID NO: 32799
  Description of Artificial Sequence: Synthetic polypeptide
  XENP022519 7G8_H3.18_L1.11-one-arm Fc-only Heavy Chain

SEQ ID NO: 32899 - protein, 218 aa, Artificial Sequence; identical to SEQ ID NO: 22359
  Description of Artificial Sequence: Synthetic polypeptide
  XENP022519 7G8_H3.18_L1.11-one-arm Light Chain

SEQ ID NO: 32900 - protein, 111 aa, Artificial Sequence; identical to SEQ ID NO: 22360
  Description of Artificial Sequence: Synthetic polypeptide
  VL of XENP022519

SEQ ID NO: 32901 - protein, 15 aa, Artificial Sequence
  Description of Artificial Sequence: Synthetic peptide
  XENP022519 vlCDR1
RASQSVDYDGDSYMN

SEQ ID NO: 32902 - protein, 7 aa, Artificial Sequence
  Description of Artificial Sequence: Synthetic peptide
  XENP022519 vlCDR2
AASELES

SEQ ID NO: 32903 - protein, 9 aa, Artificial Sequence
  Description of Artificial Sequence: Synthetic peptide
  XENP022519 vlCDR3
QQSNEDPFT

SEQ ID NO: 32904 - protein, 450 aa, Artificial Sequence; identical to SEQ ID NO: 22424
  Description of Artificial Sequence: Synthetic polypeptide
  XENP022520 7G8_H3.28_L1.13-one-arm Fab-Fc Heavy Chain

SEQ ID NO: 32905 - protein, 121 aa, Artificial Sequence; identical to SEQ ID NO: 22425
  Description of Artificial Sequence: Synthetic polypeptide
  VH of XENP022520

SEQ ID NO: 32906 - protein, 5 aa, Artificial Sequence
  Description of Artificial Sequence: Synthetic peptide
  XENP022520 vhCDR1
DAWMD

SEQ ID NO: 32907 - protein, 19 aa, Artificial Sequence
  Description of Artificial Sequence: Synthetic peptide
  XENP022520 vhCDR2
EISTKAYNHATYYAESVKG

SEQ ID NO: 32908 - protein, 10 aa, Artificial Sequence
  Description of Artificial Sequence: Synthetic peptide
  XENP022520 vhCDR3
LATWDWYFDV

SEQ ID NO: 32909 - protein, 231 aa, Artificial Sequence; identical to SEQ ID NO: 32799
  Description of Artificial Sequence: Synthetic polypeptide
  XENP022520 7G8_H3.28_L1.13-one-arm Fc-only Heavy Chain

SEQ ID NO: 32910 - protein, 218 aa, Artificial Sequence; identical to SEQ ID NO: 22419
  Description of Artificial Sequence: Synthetic polypeptide
  XENP022520 7G8_H3.28_L1.13-one-arm Light Chain

SEQ ID NO: 32911 - protein, 111 aa, Artificial Sequence; identical to SEQ ID NO: 22420
  Description of Artificial Sequence: Synthetic polypeptide
  VL of XENP022520

SEQ ID NO: 32912 - protein, 15 aa, Artificial Sequence
  Description of Artificial Sequence: Synthetic peptide
  XENP022520 vlCDR1
RASQSVDHDGDSYMN

SEQ ID NO: 32913 - protein, 7 aa, Artificial Sequence
  Description of Artificial Sequence: Synthetic peptide
  XENP022520 vlCDR2
AASELES

SEQ ID NO: 32914 - protein, 9 aa, Artificial Sequence
  Description of Artificial Sequence: Synthetic peptide
  XENP022520 vlCDR3
QQSNEDPFT

SEQ ID NO: 32915 - protein, 450 aa, Artificial Sequence; identical to SEQ ID NO: 22484
  Description of Artificial Sequence: Synthetic polypeptide
  XENP022560 7G8_H3.30_L1.11-one-arm Fab-Fc Heavy Chain

SEQ ID NO: 32916 - protein, 121 aa, Artificial Sequence; identical to SEQ ID NO: 22485
  Description of Artificial Sequence: Synthetic polypeptide
  VH of XENP022560

SEQ ID NO: 32917 - protein, 5 aa, Artificial Sequence
  Description of Artificial Sequence: Synthetic peptide
  XENP022560 vhCDR1
DAWMS

SEQ ID NO: 32918 - protein, 19 aa, Artificial Sequence
  Description of Artificial Sequence: Synthetic peptide
  XENP022560 vhCDR2
EISTKANNHATYYAESVKG

SEQ ID NO: 32919 - protein, 10 aa, Artificial Sequence
  Description of Artificial Sequence: Synthetic peptide
  XENP022560 vhCDR3
LATWDWYFDV

SEQ ID NO: 32920 - protein, 231 aa, Artificial Sequence; identical to SEQ ID NO: 32799
  Description of Artificial Sequence: Synthetic polypeptide
  XENP022560 7G8_H3.30_L1.11-one-arm Fc-only Heavy Chain

SEQ ID NO: 32921 - protein, 218 aa, Artificial Sequence; identical to SEQ ID NO: 22359
  Description of Artificial Sequence: Synthetic polypeptide
  XENP022560 7G8_H3.30_L1.11-one-arm Light Chain

SEQ ID NO: 32922 - protein, 111 aa, Artificial Sequence; identical to SEQ ID NO: 22360
  Description of Artificial Sequence: Synthetic polypeptide
  VL of XENP022560

SEQ ID NO: 32923 - protein, 15 aa, Artificial Sequence
  Description of Artificial Sequence: Synthetic peptide
  XENP022560 vlCDR1
RASQSVDYDGDSYMN

SEQ ID NO: 32924 - protein, 7 aa, Artificial Sequence
  Description of Artificial Sequence: Synthetic peptide
  XENP022560 vlCDR2
AASELES

SEQ ID NO: 32925 - protein, 9 aa, Artificial Sequence
  Description of Artificial Sequence: Synthetic peptide
  XENP022560 vlCDR3
QQSNEDPFT

SEQ ID NO: 32926 - protein, 450 aa, Artificial Sequence; identical to SEQ ID NO: 22504
  Description of Artificial Sequence: Synthetic polypeptide
  XENP022561 7G8_H3.33_L1.11-one-arm Fab-Fc Heavy Chain

SEQ ID NO: 32927 - protein, 121 aa, Artificial Sequence; identical to SEQ ID NO: 22505
  Description of Artificial Sequence: Synthetic polypeptide
  VH of XENP022561

SEQ ID NO: 32928 - protein, 5 aa, Artificial Sequence
  Description of Artificial Sequence: Synthetic peptide
  XENP022561 vhCDR1
DAWMG

SEQ ID NO: 32929 - protein, 19 aa, Artificial Sequence
  Description of Artificial Sequence: Synthetic peptide
  XENP022561 vhCDR2
EISTKANNHATYYAESVKG

SEQ ID NO: 32930 - protein, 10 aa, Artificial Sequence
  Description of Artificial Sequence: Synthetic peptide
  XENP022561 vhCDR3
LATWDWYFDV

SEQ ID NO: 32931 - protein, 231 aa, Artificial Sequence; identical to SEQ ID NO: 32799
  Description of Artificial Sequence: Synthetic polypeptide
  XENP022561 7G8_H3.33_L1.11-one-arm Fc-only Heavy Chain

SEQ ID NO: 32932 - protein, 218 aa, Artificial Sequence; identical to SEQ ID NO: 22359
  Description of Artificial Sequence: Synthetic polypeptide
  XENP022561 7G8_H3.33_L1.11-one-arm Light Chain

SEQ ID NO: 32933 - protein, 111 aa, Artificial Sequence; identical to SEQ ID NO: 22360
  Description of Artificial Sequence: Synthetic polypeptide
  VL of XENP022561

SEQ ID NO: 32934 - protein, 15 aa, Artificial Sequence
  Description of Artificial Sequence: Synthetic peptide
  XENP022561 vlCDR1
RASQSVDYDGDSYMN

SEQ ID NO: 32935 - protein, 7 aa, Artificial Sequence
  Description of Artificial Sequence: Synthetic peptide
  XENP022561 vlCDR2
AASELES

SEQ ID NO: 32936 - protein, 9 aa, Artificial Sequence
  Description of Artificial Sequence: Synthetic peptide
  XENP022561 vlCDR3
QQSNEDPFT

SEQ ID NO: 32937 - protein, 450 aa, Artificial Sequence; identical to SEQ ID NO: 22324
  Description of Artificial Sequence: Synthetic polypeptide
  XENP022562 7G8_H3.18_L1.30-one-arm Fab-Fc Heavy Chain

SEQ ID NO: 32938 - protein, 121 aa, Artificial Sequence; identical to SEQ ID NO: 22325
  Description of Artificial Sequence: Synthetic polypeptide
  VH of XENP022562

SEQ ID NO: 32939 - protein, 5 aa, Artificial Sequence
  Description of Artificial Sequence: Synthetic peptide
  XENP022562 vhCDR1
DAWMD

SEQ ID NO: 32940 - protein, 19 aa, Artificial Sequence
  Description of Artificial Sequence: Synthetic peptide
  XENP022562 vhCDR2
EISTKANNHATYYAESVKG

SEQ ID NO: 32941 - protein, 10 aa, Artificial Sequence
  Description of Artificial Sequence: Synthetic peptide
  XENP022562 vhCDR3
LATWDWYFDV

SEQ ID NO: 32942 - protein, 231 aa, Artificial Sequence; identical to SEQ ID NO: 32799
  Description of Artificial Sequence: Synthetic polypeptide
  XENP022562 7G8_H3.18_L1.30_[Anti-LAG-3]_Fab-empty_Fc(216)_Ig G1_PVA_/S267K_pI(-)_Isosteric_A_L368D/K370S-IgG1_ISO(+RR)_C220S /S364K/E357Q Heavy-scFv Chain

SEQ ID NO: 32943 - protein, 218 aa, Artificial Sequence; identical to SEQ ID NO: 22539
  Description of Artificial Sequence: Synthetic polypeptide
  XENP022562 7G8_H3.18_L1.30-one-arm Light Chain

SEQ ID NO: 32944 - protein, 111 aa, Artificial Sequence; identical to SEQ ID NO: 22540
  Description of Artificial Sequence: Synthetic polypeptide
  VL of XENP022562

SEQ ID NO: 32945 - protein, 15 aa, Artificial Sequence
  Description of Artificial Sequence: Synthetic peptide
  XENP022562 vlCDR1
RASQSVDYDGDSYMN

SEQ ID NO: 32946 - protein, 7 aa, Artificial Sequence
  Description of Artificial Sequence: Synthetic peptide
  XENP022562 vlCDR2
AASELES

SEQ ID NO: 32947 - protein, 9 aa, Artificial Sequence
  Description of Artificial Sequence: Synthetic peptide
  XENP022562 vlCDR3
QQSNEDPFT

SEQ ID NO: 32948 - protein, 450 aa, Artificial Sequence; identical to SEQ ID NO: 22484
  Description of Artificial Sequence: Synthetic polypeptide
  XENP022563 7G8_H3.30_L1.30-one-arm Fab-Fc Heavy Chain

SEQ ID NO: 32949 - protein, 121 aa, Artificial Sequence; identical to SEQ ID NO: 22485
  Description of Artificial Sequence: Synthetic polypeptide
  VH of XENP022563

SEQ ID NO: 32950 - protein, 5 aa, Artificial Sequence
  Description of Artificial Sequence: Synthetic peptide
  XENP022563 vhCDR1
DAWMS

SEQ ID NO: 32951 - protein, 19 aa, Artificial Sequence
  Description of Artificial Sequence: Synthetic peptide
  XENP022563 vhCDR2
EISTKANNHATYYAESVKG

SEQ ID NO: 32952 - protein, 10 aa, Artificial Sequence
  Description of Artificial Sequence: Synthetic peptide
  XENP022563 vhCDR3
LATWDWYFDV

SEQ ID NO: 32953 - protein, 231 aa, Artificial Sequence; identical to SEQ ID NO: 32799
  Description of Artificial Sequence: Synthetic polypeptide
  XENP022563 7G8_H3.30_L1.30-one-arm Fc-only Heavy Chain

SEQ ID NO: 32954 - protein, 218 aa, Artificial Sequence; identical to SEQ ID NO: 22539
  Description of Artificial Sequence: Synthetic polypeptide
  XENP022563 7G8_H3.30_L1.30-one-arm Light Chain

SEQ ID NO: 32955 - protein, 111 aa, Artificial Sequence; identical to SEQ ID NO: 22540
  Description of Artificial Sequence: Synthetic polypeptide
  VL of XENP022563

SEQ ID NO: 32956 - protein, 15 aa, Artificial Sequence
  Description of Artificial Sequence: Synthetic peptide
  XENP022563 vlCDR1
RASQSVDYDGDSYMN

SEQ ID NO: 32957 - protein, 7 aa, Artificial Sequence
  Description of Artificial Sequence: Synthetic peptide
  XENP022563 vlCDR2
AASELES

SEQ ID NO: 32958 - protein, 9 aa, Artificial Sequence
  Description of Artificial Sequence: Synthetic peptide
  XENP022563 vlCDR3
QQSNEDPFT

SEQ ID NO: 32959 - protein, 450 aa, Artificial Sequence; identical to SEQ ID NO: 22504
  Description of Artificial Sequence: Synthetic polypeptide
  XENP022564 7G8_H3.33_L1.30-one-arm Fab-Fc Heavy Chain

SEQ ID NO: 32960 - protein, 121 aa, Artificial Sequence; identical to SEQ ID NO: 22505
  Description of Artificial Sequence: Synthetic polypeptide
  VH of XENP022564

SEQ ID NO: 32961 - protein, 5 aa, Artificial Sequence
  Description of Artificial Sequence: Synthetic peptide
  XENP022564 vhCDR1
DAWMG

SEQ ID NO: 32962 - protein, 19 aa, Artificial Sequence
  Description of Artificial Sequence: Synthetic peptide
  XENP022564 vhCDR2
EISTKANNHATYYAESVKG

SEQ ID NO: 32963 - protein, 10 aa, Artificial Sequence
  Description of Artificial Sequence: Synthetic peptide
  XENP022564 vhCDR3
LATWDWYFDV

SEQ ID NO: 32964 - protein, 231 aa, Artificial Sequence; identical to SEQ ID NO: 32799
  Description of Artificial Sequence: Synthetic polypeptide
  XENP022564 7G8_H3.33_L1.30-one-arm Fc-only Heavy Chain

SEQ ID NO: 32965 - protein, 218 aa, Artificial Sequence; identical to SEQ ID NO: 22539
  Description of Artificial Sequence: Synthetic polypeptide
  XENP022564 7G8_H3.33_L1.30-one-arm Light Chain

SEQ ID NO: 32966 - protein, 111 aa, Artificial Sequence; identical to SEQ ID NO: 22540
  Description of Artificial Sequence: Synthetic polypeptide
  VL of XENP022564

SEQ ID NO: 32967 - protein, 15 aa, Artificial Sequence
  Description of Artificial Sequence: Synthetic peptide
  XENP022564 vlCDR1
RASQSVDYDGDSYMN

SEQ ID NO: 32968 - protein, 7 aa, Artificial Sequence
  Description of Artificial Sequence: Synthetic peptide
  XENP022564 vlCDR2
AASELES

SEQ ID NO: 32969 - protein, 9 aa, Artificial Sequence
  Description of Artificial Sequence: Synthetic peptide
  XENP022564 vlCDR3
QQSNEDPFT

SEQ ID NO: 32970 - protein, 450 aa, Artificial Sequence; identical to SEQ ID NO: 22484
  Description of Artificial Sequence: Synthetic polypeptide
  XENP022606 7G8_H3.30_L1.34-one-arm Fab-Fc Heavy Chain

SEQ ID NO: 32971 - protein, 121 aa, Artificial Sequence; identical to SEQ ID NO: 22485
  Description of Artificial Sequence: Synthetic polypeptide
  VH of XENP022606

SEQ ID NO: 32972 - protein, 5 aa, Artificial Sequence
  Description of Artificial Sequence: Synthetic peptide
  XENP022606 vhCDR1
DAWMS

SEQ ID NO: 32973 - protein, 19 aa, Artificial Sequence
  Description of Artificial Sequence: Synthetic peptide
  XENP022606 vhCDR2
EISTKANNHATYYAESVKG

SEQ ID NO: 32974 - protein, 10 aa, Artificial Sequence
  Description of Artificial Sequence: Synthetic peptide
  XENP022606 vhCDR3
LATWDWYFDV

SEQ ID NO: 32975 - protein, 231 aa, Artificial Sequence; identical to SEQ ID NO: 32799
  Description of Artificial Sequence: Synthetic polypeptide
  XENP022606 7G8_H3.30_L1.34-one-arm Fc-only Heavy Chain

SEQ ID NO: 32976 - protein, 218 aa, Artificial Sequence; identical to SEQ ID NO: 22599
  Description of Artificial Sequence: Synthetic polypeptide
  XENP022606 7G8_H3.30_L1.34-one-arm Light Chain

SEQ ID NO: 32977 - protein, 111 aa, Artificial Sequence; identical to SEQ ID NO: 22600
  Description of Artificial Sequence: Synthetic polypeptide
  VL of XENP022606

SEQ ID NO: 32978 - protein, 15 aa, Artificial Sequence
  Description of Artificial Sequence: Synthetic peptide
  XENP022606 vlCDR1
RASQSVDYDGDSYMN

SEQ ID NO: 32979 - protein, 7 aa, Artificial Sequence
  Description of Artificial Sequence: Synthetic peptide
  XENP022606 vlCDR2
AASELES

SEQ ID NO: 32980 - protein, 9 aa, Artificial Sequence
  Description of Artificial Sequence: Synthetic peptide
  XENP022606 vlCDR3
QQSNEDPFT

SEQ ID NO: 32981 - protein, 450 aa, Artificial Sequence; identical to SEQ ID NO: 22484
  Description of Artificial Sequence: Synthetic polypeptide
  XENP022607 7G8_H3.30_L1.36-one-arm Fab-Fc Heavy Chain

SEQ ID NO: 32982 - protein, 121 aa, Artificial Sequence; identical to SEQ ID NO: 22485
  Description of Artificial Sequence: Synthetic polypeptide
  VH of XENP022607

SEQ ID NO: 32983 - protein, 5 aa, Artificial Sequence
  Description of Artificial Sequence: Synthetic peptide
  XENP022607 vhCDR1
DAWMS

SEQ ID NO: 32984 - protein, 19 aa, Artificial Sequence
  Description of Artificial Sequence: Synthetic peptide
  XENP022607 vhCDR2
EISTKANNHATYYAESVKG

SEQ ID NO: 32985 - protein, 10 aa, Artificial Sequence
  Description of Artificial Sequence: Synthetic peptide
  XENP022607 vhCDR3
LATWDWYFDV

SEQ ID NO: 32986 - protein, 231 aa, Artificial Sequence; identical to SEQ ID NO: 32799
  Description of Artificial Sequence: Synthetic polypeptide
  XENP022607 7G8_H3.30_L1.36-one-arm Fc-only Heavy Chain

SEQ ID NO: 32987 - protein, 218 aa, Artificial Sequence; identical to SEQ ID NO: 22619
  Description of Artificial Sequence: Synthetic polypeptide
  XENP022607 7G8_H3.30_L1.36-one-arm Light Chain

SEQ ID NO: 32988 - protein, 111 aa, Artificial Sequence; identical to SEQ ID NO: 22620
  Description of Artificial Sequence: Synthetic polypeptide
  VL of XENP022607

SEQ ID NO: 32989 - protein, 15 aa, Artificial Sequence
  Description of Artificial Sequence: Synthetic peptide
  XENP022607 vlCDR1
RASQSVDHDGDSYMN

SEQ ID NO: 32990 - protein, 7 aa, Artificial Sequence
  Description of Artificial Sequence: Synthetic peptide
  XENP022607 vlCDR2
AASELES

SEQ ID NO: 32991 - protein, 9 aa, Artificial Sequence
  Description of Artificial Sequence: Synthetic peptide
  XENP022607 vlCDR3
QQSNEDPFT

SEQ ID NO: 32992 - protein, 450 aa, Artificial Sequence; identical to SEQ ID NO: 22304
  Description of Artificial Sequence: Synthetic polypeptide
  XENP022608 7G8_H3L1-one-arm Fab-Fc Heavy Chain

SEQ ID NO: 32993 - protein, 121 aa, Artificial Sequence; identical to SEQ ID NO: 17806
  Description of Artificial Sequence: Synthetic polypeptide
  VH of XENP022608

SEQ ID NO: 32994 - protein, 5 aa, Artificial Sequence
  Description of Artificial Sequence: Synthetic peptide
  XENP022608 vhCDR1
DAWMD

SEQ ID NO: 32995 - protein, 19 aa, Artificial Sequence
  Description of Artificial Sequence: Synthetic peptide
  XENP022608 vhCDR2
EIRTKANNHATYYAESVKG

SEQ ID NO: 32996 - protein, 10 aa, Artificial Sequence
  Description of Artificial Sequence: Synthetic peptide
  XENP022608 vhCDR3
LANWDWYFDV

SEQ ID NO: 32997 - protein, 231 aa, Artificial Sequence; identical to SEQ ID NO: 32799
  Description of Artificial Sequence: Synthetic polypeptide
  XENP022608 7G8_H3L1-one-arm Fc-only Heavy Chain

SEQ ID NO: 32998 - protein, 218 aa, Artificial Sequence; identical to SEQ ID NO: 17600
  Description of Artificial Sequence: Synthetic polypeptide
  XENP022608 7G8_H3L1-one-arm Light Chain

SEQ ID NO: 32999 - protein, 111 aa, Artificial Sequence; identical to SEQ ID NO: 17601
  Description of Artificial Sequence: Synthetic polypeptide
  VL of XENP022608

SEQ ID NO: 33000 - protein, 15 aa, Artificial Sequence
  Description of Artificial Sequence: Synthetic peptide
  XENP022608 vlCDR1
RASQSVDYDGDSYMN

SEQ ID NO: 33001 - protein, 7 aa, Artificial Sequence
  Description of Artificial Sequence: Synthetic peptide
  XENP022608 vlCDR2
AASNLES

SEQ ID NO: 33002 - protein, 9 aa, Artificial Sequence
  Description of Artificial Sequence: Synthetic peptide
  XENP022608 vlCDR3
QQSNEDPFT

SEQ ID NO: 33003 - protein, 222 aa, Artificial Sequence
  Description of Artificial Sequence: Synthetic polypeptide
  XENP022721 1C11_H1L3_Fab Heavy Chain
QIQLVQSGAEVKKPGASVKVSCKASGYTFTHYGMNWVRQAPGQGLEWMGWINTYTGEPTYADKFQGRVTMTLDTSTSTAYMELSSLRSEDTAVYFCARDYYGSSPYWGQGTLVTVSSASTKGPSVFPLAPSSKSTSGGTAALGCLVKDYFPEPVTVSWNSGALTSGVHTFPAVLQSSGLYSLSSVVTVPSSSLGTQTYICNVNHKPSNTKVDKKVEPKSCGS

SEQ ID NO: 33004 - protein, 117 aa, Artificial Sequence
  Description of Artificial Sequence: Synthetic polypeptide
  VH of XENP022721
QIQLVQSGAEVKKPGASVKVSCKASGYTFTHYGMNWVRQAPGQGLEWMGWINTYTGEPTYADKFQGRVTMTLDTSTSTAYMELSSLRSEDTAVYFCARDYYGSSPYWGQGTLVTVSS

SEQ ID NO: 33005 - protein, 5 aa, Artificial Sequence
  Description of Artificial Sequence: Synthetic peptide
  XENP022721 vhCDR1
HYGMN

SEQ ID NO: 33006 - protein, 17 aa, Artificial Sequence
  Description of Artificial Sequence: Synthetic peptide
  XENP022721 vhCDR2
WINTYTGEPTYADKFQG

SEQ ID NO: 33007 - protein, 8 aa, Artificial Sequence
  Description of Artificial Sequence: Synthetic peptide
  XENP022721 vhCDR3
DYYGSSPY

SEQ ID NO: 33008 - protein, 219 aa, Artificial Sequence
  Description of Artificial Sequence: Synthetic polypeptide
  XENP022721 1C11_H1L3_Fab Light Chain
DVLMTQSPDSLAVSLGERATINCKSSQSIVHSNGNTYLEWYQQKPGQSPKLLIYKVSNRFSGVPDRFSGSGSGTDFTLTISSLQAEDVAVYYCFQGSHVPNTFGGGTKVEIKRTVAAPSVFIFPPSDEQLKSGTASVVCLLNNFYPREAKVQWKVDNALQSGNSQESVTEQDSKDSTYSLSSTLTLSKADYEKHKVYACEVTHQGLSSPVTKSFNRGEC

SEQ ID NO: 33009 - protein, 112 aa, Artificial Sequence
  Description of Artificial Sequence: Synthetic polypeptide
  VL of XENP022721
DVLMTQSPDSLAVSLGERATINCKSSQSIVHSNGNTYLEWYQQKPGQSPKLLIYKVSNRFSGVPDRFSGSGSGTDFTLTISSLQAEDVAVYYCFQGSHVPNTFGGGTKVEIK

SEQ ID NO: 33010 - protein, 16 aa, Artificial Sequence
  Description of Artificial Sequence: Synthetic peptide
  XENP022721 vlCDR1
KSSQSIVHSNGNTYLE

SEQ ID NO: 33011 - protein, 7 aa, Artificial Sequence
  Description of Artificial Sequence: Synthetic peptide
  XENP022721 vlCDR2
KVSNRFS

SEQ ID NO: 33012 - protein, 9 aa, Artificial Sequence
  Description of Artificial Sequence: Synthetic peptide
  XENP022721 vlCDR3
FQGSHVPNT

SEQ ID NO: 33013 - protein, 222 aa, Artificial Sequence
  Description of Artificial Sequence: Synthetic polypeptide
  XENP022722 1C11_H2L1_Fab Heavy Chain
EIQLLESGGGLVQPGGSLRLSCAASGYTFTHYGMNWVRQAPGKGLEWVSWINTYTGEPTYADSVKGRFTISLDTSKSTAYLQMNSLRAEDTAVYFCARDYYGSSPYWGQGTLVTVSSASTKGPSVFPLAPSSKSTSGGTAALGCLVKDYFPEPVTVSWNSGALTSGVHTFPAVLQSSGLYSLSSVVTVPSSSLGTQTYICNVNHKPSNTKVDKKVEPKSCGS

SEQ ID NO: 33014 - protein, 117 aa, Artificial Sequence
  Description of Artificial Sequence: Synthetic polypeptide
  VH of XENP022722
EIQLLESGGGLVQPGGSLRLSCAASGYTFTHYGMNWVRQAPGKGLEWVSWINTYTGEPTYADSVKGRFTISLDTSKSTAYLQMNSLRAEDTAVYFCARDYYGSSPYWGQGTLVTVSS

SEQ ID NO: 33015 - protein, 5 aa, Artificial Sequence
  Description of Artificial Sequence: Synthetic peptide
  XENP022722 vhCDR1
HYGMN

SEQ ID NO: 33016 - protein, 17 aa, Artificial Sequence
  Description of Artificial Sequence: Synthetic peptide
  XENP022722 vhCDR2
WINTYTGEPTYADSVKG

SEQ ID NO: 33017 - protein, 8 aa, Artificial Sequence
  Description of Artificial Sequence: Synthetic peptide
  XENP022722 vhCDR3
DYYGSSPY

SEQ ID NO: 33018 - protein, 219 aa, Artificial Sequence
  Description of Artificial Sequence: Synthetic polypeptide
  XENP022722 1C11_H2L1_Fab Light Chain
DVLMTQSPLSLPVTPGEPASISCRSSQSIVHSNGNTYLEWYLQKPGQSPQLLIYKVSNRFSGVPDRFSGSGSGTDFTLKISRVEAEDVGVYYCFQGSHVPNTFGGGTKVEIKRTVAAPSVFIFPPSDEQLKSGTASVVCLLNNFYPREAKVQWKVDNALQSGNSQESVTEQDSKDSTYSLSSTLTLSKADYEKHKVYACEVTHQGLSSPVTKSFNRGEC

SEQ ID NO: 33019 - protein, 112 aa, Artificial Sequence
  Description of Artificial Sequence: Synthetic polypeptide
  VL of XENP022722
DVLMTQSPLSLPVTPGEPASISCRSSQSIVHSNGNTYLEWYLQKPGQSPQLLIYKVSNRFSGVPDRFSGSGSGTDFTLKISRVEAEDVGVYYCFQGSHVPNTFGGGTKVEIK

SEQ ID NO: 33020 - protein, 16 aa, Artificial Sequence
  Description of Artificial Sequence: Synthetic peptide
  XENP022722 vlCDR1
RSSQSIVHSNGNTYLE

SEQ ID NO: 33021 - protein, 7 aa, Artificial Sequence
  Description of Artificial Sequence: Synthetic peptide
  XENP022722 vlCDR2
KVSNRFS

SEQ ID NO: 33022 - protein, 9 aa, Artificial Sequence
  Description of Artificial Sequence: Synthetic peptide
  XENP022722 vlCDR3
FQGSHVPNT

SEQ ID NO: 33023 - protein, 222 aa, Artificial Sequence; identical to SEQ ID NO: 33013
  Description of Artificial Sequence: Synthetic polypeptide
  XENP022723 1C11_H2L2_Fab Heavy Chain

SEQ ID NO: 33024 - protein, 117 aa, Artificial Sequence; identical to SEQ ID NO: 33014
  Description of Artificial Sequence: Synthetic polypeptide
  VH of XENP022723

SEQ ID NO: 33025 - protein, 5 aa, Artificial Sequence
  Description of Artificial Sequence: Synthetic peptide
  XENP022723 vhCDR1
HYGMN

SEQ ID NO: 33026 - protein, 17 aa, Artificial Sequence
  Description of Artificial Sequence: Synthetic peptide
  XENP022723 vhCDR2
WINTYTGEPTYADSVKG

SEQ ID NO: 33027 - protein, 8 aa, Artificial Sequence
  Description of Artificial Sequence: Synthetic peptide
  XENP022723 vhCDR3
DYYGSSPY

SEQ ID NO: 33028 - protein, 219 aa, Artificial Sequence
  Description of Artificial Sequence: Synthetic polypeptide
  XENP022723 1C11_H2L2_Fab Light Chain
DVLMTQSPLSLPVTLGQPASISCRSSQSIVHSNGNTYLEWYQQRPGQSPRLLIYKVSNRFSGVPDRFSGSGSGTDFTLKISRVEAEDVGVYYCFQGSHVPNTFGGGTKVEIKRTVAAPSVFIFPPSDEQLKSGTASVVCLLNNFYPREAKVQWKVDNALQSGNSQESVTEQDSKDSTYSLSSTLTLSKADYEKHKVYACEVTHQGLSSPVTKSFNRGEC

SEQ ID NO: 33029 - protein, 112 aa, Artificial Sequence
  Description of Artificial Sequence: Synthetic polypeptide
  VL of XENP022723
DVLMTQSPLSLPVTLGQPASISCRSSQSIVHSNGNTYLEWYQQRPGQSPRLLIYKVSNRFSGVPDRFSGSGSGTDFTLKISRVEAEDVGVYYCFQGSHVPNTFGGGTKVEIK

SEQ ID NO: 33030 - protein, 16 aa, Artificial Sequence
  Description of Artificial Sequence: Synthetic peptide
  XENP022723 vlCDR1
RSSQSIVHSNGNTYLE

SEQ ID NO: 33031 - protein, 7 aa, Artificial Sequence
  Description of Artificial Sequence: Synthetic peptide
  XENP022723 vlCDR2
KVSNRFS

SEQ ID NO: 33032 - protein, 9 aa, Artificial Sequence
  Description of Artificial Sequence: Synthetic peptide
  XENP022723 vlCDR3
FQGSHVPNT

SEQ ID NO: 33033 - protein, 222 aa, Artificial Sequence
  Description of Artificial Sequence: Synthetic polypeptide
  XENP022724 1C11_H3L3_Fab Heavy Chain
QIQLVQSGSELKKPGASVKVSCKASGYTFTHYGMNWVRQAPGQGLEWMGWINTYTGEPTYADGFTGRFVFSLDTSVSTAYLQISSLKAEDTAVYFCARDYYGSSPYWGQGTLVTVSSASTKGPSVFPLAPSSKSTSGGTAALGCLVKDYFPEPVTVSWNSGALTSGVHTFPAVLQSSGLYSLSSVVTVPSSSLGTQTYICNVNHKPSNTKVDKKVEPKSCGS

SEQ ID NO: 33034 - protein, 117 aa, Artificial Sequence
  Description of Artificial Sequence: Synthetic polypeptide
  VH of XENP022724
QIQLVQSGSELKKPGASVKVSCKASGYTFTHYGMNWVRQAPGQGLEWMGWINTYTGEPTYADGFTGRFVFSLDTSVSTAYLQISSLKAEDTAVYFCARDYYGSSPYWGQGTLVTVSS

SEQ ID NO: 33035 - protein, 5 aa, Artificial Sequence
  Description of Artificial Sequence: Synthetic peptide
  XENP022724 vhCDR1
HYGMN

SEQ ID NO: 33036 - protein, 17 aa, Artificial Sequence
  Description of Artificial Sequence: Synthetic peptide
  XENP022724 vhCDR2
WINTYTGEPTYADGFTG

SEQ ID NO: 33037 - protein, 8 aa, Artificial Sequence
  Description of Artificial Sequence: Synthetic peptide
  XENP022724 vhCDR3
DYYGSSPY

SEQ ID NO: 33038 - protein, 219 aa, Artificial Sequence; identical to SEQ ID NO: 33008
  Description of Artificial Sequence: Synthetic polypeptide
  XENP022724 1C11_H3L3_Fab Light Chain

SEQ ID NO: 33039 - protein, 112 aa, Artificial Sequence; identical to SEQ ID NO: 33009
  Description of Artificial Sequence: Synthetic polypeptide
  VL of XENP022724

SEQ ID NO: 33040 - protein, 16 aa, Artificial Sequence
  Description of Artificial Sequence: Synthetic peptide
  XENP022724 vlCDR1
KSSQSIVHSNGNTYLE

SEQ ID NO: 33041 - protein, 7 aa, Artificial Sequence
  Description of Artificial Sequence: Synthetic peptide
  XENP022724 vlCDR2
KVSNRFS

SEQ ID NO: 33042 - protein, 9 aa, Artificial Sequence
  Description of Artificial Sequence: Synthetic peptide
  XENP022724 vlCDR3
FQGSHVPNT

SEQ ID NO: 33043 - protein, 222 aa, Artificial Sequence
  Description of Artificial Sequence: Synthetic polypeptide
  XENP022725 1C11_H0L0_Fab Heavy Chain
QIQLVQSGPELKKPGETVKISCRASGYTFTHYGMNWVKQAPGKGLKWMGWINTYTGEPTYADDFKGRFAFSLETSASTAYLQINNLKNEDTATYFCARDYYGSSPYWGQGTTLTVSSASTKGPSVFPLAPSSKSTSGGTAALGCLVKDYFPEPVTVSWNSGALTSGVHTFPAVLQSSGLYSLSSVVTVPSSSLGTQTYICNVNHKPSNTKVDKKVEPKSCGS

SEQ ID NO: 33044 - protein, 117 aa, Artificial Sequence
  Description of Artificial Sequence: Synthetic polypeptide
  VH of XENP022725
QIQLVQSGPELKKPGETVKISCRASGYTFTHYGMNWVKQAPGKGLKWMGWINTYTGEPTYADDFKGRFAFSLETSASTAYLQINNLKNEDTATYFCARDYYGSSPYWGQGTTLTVSS

SEQ ID NO: 33045 - protein, 5 aa, Artificial Sequence
  Description of Artificial Sequence: Synthetic peptide
  XENP022725 vhCDR1
HYGMN

SEQ ID NO: 33046 - protein, 17 aa, Artificial Sequence
  Description of Artificial Sequence: Synthetic peptide
  XENP022725 vhCDR2
WINTYTGEPTYADDFKG

SEQ ID NO: 33047 - protein, 8 aa, Artificial Sequence
  Description of Artificial Sequence: Synthetic peptide
  XENP022725 vhCDR3
DYYGSSPY

SEQ ID NO: 33048 - protein, 219 aa, Artificial Sequence
  Description of Artificial Sequence: Synthetic polypeptide
  XENP022725 1C11_H0L0_Fab Light Chain
DVLMTQTPLSLPVSLGDQASISCRSSQSIVHSNGNTYLEWYLQKPGQSPKLLIYKVSNRFSGVPDRFSGSGSGTDFTLKISRVEAEDLGVYYCFQGSHVPNTFGGGTKLEIKRTVAAPSVFIFPPSDEQLKSGTASVVCLLNNFYPREAKVQWKVDNALQSGNSQESVTEQDSKDSTYSLSSTLTLSKADYEKHKVYACEVTHQGLSSPVTKSFNRGEC

SEQ ID NO: 33049 - protein, 112 aa, Artificial Sequence
  Description of Artificial Sequence: Synthetic polypeptide
  VL of XENP022725
DVLMTQTPLSLPVSLGDQASISCRSSQSIVHSNGNTYLEWYLQKPGQSPKLLIYKVSNRFSGVPDRFSGSGSGTDFTLKISRVEAEDLGVYYCFQGSHVPNTFGGGTKLEIK

SEQ ID NO: 33050 - protein, 16 aa, Artificial Sequence
  Description of Artificial Sequence: Synthetic peptide
  XENP022725 vlCDR1
RSSQSIVHSNGNTYLE

SEQ ID NO: 33051 - protein, 7 aa, Artificial Sequence
  Description of Artificial Sequence: Synthetic peptide
  XENP022725 vlCDR2
KVSNRFS

SEQ ID NO: 33052 - protein, 9 aa, Artificial Sequence
  Description of Artificial Sequence: Synthetic peptide
  XENP022725 vlCDR3
FQGSHVPNT

SEQ ID NO: 33053 - protein, 222 aa, Artificial Sequence; identical to SEQ ID NO: 33033
  Description of Artificial Sequence: Synthetic polypeptide
  XENP022991 1C11_H3L1_Fab Heavy Chain

SEQ ID NO: 33054 - protein, 117 aa, Artificial Sequence; identical to SEQ ID NO: 33034
  Description of Artificial Sequence: Synthetic polypeptide
  VH of XENP022991

SEQ ID NO: 33055 - protein, 5 aa, Artificial Sequence
  Description of Artificial Sequence: Synthetic peptide
  XENP022991 vhCDR1
HYGMN

SEQ ID NO: 33056 - protein, 17 aa, Artificial Sequence
  Description of Artificial Sequence: Synthetic peptide
  XENP022991 vhCDR2
WINTYTGEPTYADGFTG

SEQ ID NO: 33057 - protein, 8 aa, Artificial Sequence
  Description of Artificial Sequence: Synthetic peptide
  XENP022991 vhCDR3
DYYGSSPY

SEQ ID NO: 33058 - protein, 219 aa, Artificial Sequence; identical to SEQ ID NO: 33018
  Description of Artificial Sequence: Synthetic polypeptide
  XENP022991 1C11_H3L1_Fab Light Chain

SEQ ID NO: 33059 - protein, 112 aa, Artificial Sequence; identical to SEQ ID NO: 33019
  Description of Artificial Sequence: Synthetic polypeptide
  VL of XENP022991

SEQ ID NO: 33060 - protein, 16 aa, Artificial Sequence
  Description of Artificial Sequence: Synthetic peptide
  XENP022991 vlCDR1
RSSQSIVHSNGNTYLE

SEQ ID NO: 33061 - protein, 7 aa, Artificial Sequence
  Description of Artificial Sequence: Synthetic peptide
  XENP022991 vlCDR2
KVSNRFS

SEQ ID NO: 33062 - protein, 9 aa, Artificial Sequence
  Description of Artificial Sequence: Synthetic peptide
  XENP022991 vlCDR3
FQGSHVPNT

SEQ ID NO: 33063 - protein, 222 aa, Artificial Sequence; identical to SEQ ID NO: 33033
  Description of Artificial Sequence: Synthetic polypeptide
  XENP022992 1C11_H3L2_Fab Heavy Chain

SEQ ID NO: 33064 - protein, 117 aa, Artificial Sequence; identical to SEQ ID NO: 33034
  Description of Artificial Sequence: Synthetic polypeptide
  VH of XENP022992

SEQ ID NO: 33065 - protein, 5 aa, Artificial Sequence
  Description of Artificial Sequence: Synthetic peptide
  XENP022992 vhCDR1
HYGMN

SEQ ID NO: 33066 - protein, 17 aa, Artificial Sequence
  Description of Artificial Sequence: Synthetic peptide
  XENP022992 vhCDR2
WINTYTGEPTYADGFTG

SEQ ID NO: 33067 - protein, 8 aa, Artificial Sequence
  Description of Artificial Sequence: Synthetic peptide
  XENP022992 vhCDR3
DYYGSSPY

SEQ ID NO: 33068 - protein, 219 aa, Artificial Sequence; identical to SEQ ID NO: 33028
  Description of Artificial Sequence: Synthetic polypeptide
  XENP022992 1C11_H3L2_Fab Light Chain

SEQ ID NO: 33069 - protein, 112 aa, Artificial Sequence; identical to SEQ ID NO: 33029
  Description of Artificial Sequence: Synthetic polypeptide
  VL of XENP022992

SEQ ID NO: 33070 - protein, 16 aa, Artificial Sequence
  Description of Artificial Sequence: Synthetic peptide
  XENP022992 vlCDR1
RSSQSIVHSNGNTYLE

SEQ ID NO: 33071 - protein, 7 aa, Artificial Sequence
  Description of Artificial Sequence: Synthetic peptide
  XENP022992 vlCDR2
KVSNRFS

SEQ ID NO: 33072 - protein, 9 aa, Artificial Sequence
  Description of Artificial Sequence: Synthetic peptide
  XENP022992 vlCDR3
FQGSHVPNT

SEQ ID NO: 33073 - protein, 251 aa, Artificial Sequence
  Description of Artificial Sequence: Synthetic polypeptide
  XENP023574 1C11_L1H3_scFv
DVLMTQSPLSLPVTPGEPASISCRSSQSIVHSNGNTYLEWYLQKPGQSPQLLIYKVSNRFSGVPDRFSGSGSGTDFTLKISRVEAEDVGVYYCFQGSHVPNTFGGGTKVEIKGKPGSGKPGSGKPGSGKPGSQIQLVQSGSELKKPGASVKVSCKASGYTFTHYGMNWVRQAPGQGLEWMGWINTYTGEPTYADGFTGRFVFSLDTSVSTAYLQISSLKAEDTAVYFCARDYYGSSPYWGQGTLVTVSSGS

SEQ ID NO: 33074 - protein, 112 aa, Artificial Sequence; identical to SEQ ID NO: 33019
  Description of Artificial Sequence: Synthetic polypeptide
  VH of XENP023574

SEQ ID NO: 33075 - protein, 119 aa, Artificial Sequence
  Description of Artificial Sequence: Synthetic polypeptide
  VL of XENP023574
QIQLVQSGSELKKPGASVKVSCKASGYTFTHYGMNWVRQAPGQGLEWMGWINTYTGEPTYADGFTGRFVFSLDTSVSTAYLQISSLKAEDTAVYFCARDYYGSSPYWGQGTLVTVSSGS

SEQ ID NO: 33076 - protein, 16 aa, Artificial Sequence
  Description of Artificial Sequence: Synthetic peptide
  XENP023574 vhCDR1
RSSQSIVHSNGNTYLE

SEQ ID NO: 33077 - protein, 7 aa, Artificial Sequence
  Description of Artificial Sequence: Synthetic peptide
  XENP023574 vhCDR2
KVSNRFS

SEQ ID NO: 33078 - protein, 9 aa, Artificial Sequence
  Description of Artificial Sequence: Synthetic peptide
  XENP023574 vhCDR3
FQGSHVPNT

SEQ ID NO: 33079 - protein, 5 aa, Artificial Sequence
  Description of Artificial Sequence: Synthetic peptide
  XENP023574 vlCDR1
HYGMN

SEQ ID NO: 33080 - protein, 17 aa, Artificial Sequence
  Description of Artificial Sequence: Synthetic peptide
  XENP023574 vlCDR2
WINTYTGEPTYADGFTG

SEQ ID NO: 33081 - protein, 8 aa, Artificial Sequence
  Description of Artificial Sequence: Synthetic peptide
  XENP023574 vlCDR3
DYYGSSPY

SEQ ID NO: 33082 - protein, 251 aa, Artificial Sequence
  Description of Artificial Sequence: Synthetic polypeptide
  XENP023575 1C11_L2H3_scFv
DVLMTQSPLSLPVTLGQPASISCRSSQSIVHSNGNTYLEWYQQRPGQSPRLLIYKVSNRFSGVPDRFSGSGSGTDFTLKISRVEAEDVGVYYCFQGSHVPNTFGGGTKVEIKGKPGSGKPGSGKPGSGKPGSQIQLVQSGSELKKPGASVKVSCKASGYTFTHYGMNWVRQAPGQGLEWMGWINTYTGEPTYADGFTGRFVFSLDTSVSTAYLQISSLKAEDTAVYFCARDYYGSSPYWGQGTLVTVSSGS

SEQ ID NO: 33083 - protein, 112 aa, Artificial Sequence; identical to SEQ ID NO: 33029
  Description of Artificial Sequence: Synthetic polypeptide
  VH of XENP023575

SEQ ID NO: 33084 - protein, 119 aa, Artificial Sequence; identical to SEQ ID NO: 33075
  Description of Artificial Sequence: Synthetic polypeptide
  VL of XENP023575

SEQ ID NO: 33085 - protein, 16 aa, Artificial Sequence
  Description of Artificial Sequence: Synthetic peptide
  XENP023575 vhCDR1
RSSQSIVHSNGNTYLE

SEQ ID NO: 33086 - protein, 7 aa, Artificial Sequence
  Description of Artificial Sequence: Synthetic peptide
  XENP023575 vhCDR2
KVSNRFS

SEQ ID NO: 33087 - protein, 9 aa, Artificial Sequence
  Description of Artificial Sequence: Synthetic peptide
  XENP023575 vhCDR3
FQGSHVPNT

SEQ ID NO: 33088 - protein, 5 aa, Artificial Sequence
  Description of Artificial Sequence: Synthetic peptide
  XENP023575 vlCDR1
HYGMN

SEQ ID NO: 33089 - protein, 17 aa, Artificial Sequence
  Description of Artificial Sequence: Synthetic peptide
  XENP023575 vlCDR2
WINTYTGEPTYADGFTG

SEQ ID NO: 33090 - protein, 8 aa, Artificial Sequence
  Description of Artificial Sequence: Synthetic peptide
  XENP023575 vlCDR3
DYYGSSPY

SEQ ID NO: 33091 - protein, 251 aa, Artificial Sequence
  Description of Artificial Sequence: Synthetic polypeptide
  XENP023576 1C11_L3H3_scFv
DVLMTQSPDSLAVSLGERATINCKSSQSIVHSNGNTYLEWYQQKPGQSPKLLIYKVSNRFSGVPDRFSGSGSGTDFTLTISSLQAEDVAVYYCFQGSHVPNTFGGGTKVEIKGKPGSGKPGSGKPGSGKPGSQIQLVQSGSELKKPGASVKVSCKASGYTFTHYGMNWVRQAPGQGLEWMGWINTYTGEPTYADGFTGRFVFSLDTSVSTAYLQISSLKAEDTAVYFCARDYYGSSPYWGQGTLVTVSSGS

SEQ ID NO: 33092 - protein, 112 aa, Artificial Sequence; identical to SEQ ID NO: 33009
  Description of Artificial Sequence: Synthetic polypeptide
  VH of XENP023576

SEQ ID NO: 33093 - protein, 119 aa, Artificial Sequence; identical to SEQ ID NO: 33075
  Description of Artificial Sequence: Synthetic polypeptide
  VL of XENP023576

SEQ ID NO: 33094 - protein, 16 aa, Artificial Sequence
  Description of Artificial Sequence: Synthetic peptide
  XENP023576 vhCDR1
KSSQSIVHSNGNTYLE

SEQ ID NO: 33095 - protein, 7 aa, Artificial Sequence
  Description of Artificial Sequence: Synthetic peptide
  XENP023576 vhCDR2
KVSNRFS

SEQ ID NO: 33096 - protein, 9 aa, Artificial Sequence
  Description of Artificial Sequence: Synthetic peptide
  XENP023576 vhCDR3
FQGSHVPNT

SEQ ID NO: 33097 - protein, 5 aa, Artificial Sequence
  Description of Artificial Sequence: Synthetic peptide
  XENP023576 vlCDR1
HYGMN

SEQ ID NO: 33098 - protein, 17 aa, Artificial Sequence
  Description of Artificial Sequence: Synthetic peptide
  XENP023576 vlCDR2
WINTYTGEPTYADGFTG

SEQ ID NO: 33099 - protein, 8 aa, Artificial Sequence
  Description of Artificial Sequence: Synthetic peptide
  XENP023576 vlCDR3
DYYGSSPY

SEQ ID NO: 33100 - protein, 251 aa, Artificial Sequence
  Description of Artificial Sequence: Synthetic polypeptide
  XENP023577 1C11_H3_L3.1_scFv
QIQLVQSGSELKKPGASVKVSCKASGYTFTHYGMNWVRQAPGQGLEWMGWINTYTGEPTYADGFTGRFVFSLDTSVSTAYLQISSLKAEDTAVYFCARDYYGSSPYWGQGTLVTVSSGKPGSGKPGSGKPGSGKPGSDILMTQSPDSLAVSLGERATINCKSSQSIVHSNGNTYLEWYQQKPGQSPKLLIYKVSNRFSGVPDRFSGSGSGTDFTLTISSLQAEDVAVYYCFQGSHVPNTFGGGTKVEIKGS

SEQ ID NO: 33101 - protein, 117 aa, Artificial Sequence; identical to SEQ ID NO: 33034
  Description of Artificial Sequence: Synthetic polypeptide
  VH of XENP023577

SEQ ID NO: 33102 - protein, 114 aa, Artificial Sequence
  Description of Artificial Sequence: Synthetic polypeptide
  VL of XENP023577
DILMTQSPDSLAVSLGERATINCKSSQSIVHSNGNTYLEWYQQKPGQSPKLLIYKVSNRFSGVPDRFSGSGSGTDFTLTISSLQAEDVAVYYCFQGSHVPNTFGGGTKVEIKGS

SEQ ID NO: 33103 - protein, 5 aa, Artificial Sequence
  Description of Artificial Sequence: Synthetic peptide
  XENP023577 vhCDR1
HYGMN

SEQ ID NO: 33104 - protein, 17 aa, Artificial Sequence
  Description of Artificial Sequence: Synthetic peptide
  XENP023577 vhCDR2
WINTYTGEPTYADGFTG

SEQ ID NO: 33105 - protein, 8 aa, Artificial Sequence
  Description of Artificial Sequence: Synthetic peptide
  XENP023577 vhCDR3
DYYGSSPY

SEQ ID NO: 33106 - protein, 16 aa, Artificial Sequence
  Description of Artificial Sequence: Synthetic peptide
  XENP023577 vlCDR1
KSSQSIVHSNGNTYLE

SEQ ID NO: 33107 - protein, 7 aa, Artificial Sequence
  Description of Artificial Sequence: Synthetic peptide
  XENP023577 vlCDR2
KVSNRFS

SEQ ID NO: 33108 - protein, 9 aa, Artificial Sequence
  Description of Artificial Sequence: Synthetic peptide
  XENP023577 vlCDR3
FQGSHVPNT

SEQ ID NO: 33109 - protein, 251 aa, Artificial Sequence
  Description of Artificial Sequence: Synthetic polypeptide
  XENP023578 1C11_H3_L3.2_scFv
QIQLVQSGSELKKPGASVKVSCKASGYTFTHYGMNWVRQAPGQGLEWMGWINTYTGEPTYADGFTGRFVFSLDTSVSTAYLQISSLKAEDTAVYFCARDYYGSSPYWGQGTLVTVSSGKPGSGKPGSGKPGSGKPGSDLLMTQSPDSLAVSLGERATINCKSSQSIVHSNGNTYLEWYQQKPGQSPKLLIYKVSNRFSGVPDRFSGSGSGTDFTLTISSLQAEDVAVYYCFQGSHVPNTFGGGTKVEIKGS

SEQ ID NO: 33110 - protein, 117 aa, Artificial Sequence; identical to SEQ ID NO: 33034
  Description of Artificial Sequence: Synthetic polypeptide
  VH of XENP023578

SEQ ID NO: 33111 - protein, 114 aa, Artificial Sequence
  Description of Artificial Sequence: Synthetic polypeptide
  VL of XENP023578
DLLMTQSPDSLAVSLGERATINCKSSQSIVHSNGNTYLEWYQQKPGQSPKLLIYKVSNRFSGVPDRFSGSGSGTDFTLTISSLQAEDVAVYYCFQGSHVPNTFGGGTKVEIKGS

SEQ ID NO: 33112 - protein, 5 aa, Artificial Sequence
  Description of Artificial Sequence: Synthetic peptide
  XENP023578 vhCDR1
HYGMN

SEQ ID NO: 33113 - protein, 17 aa, Artificial Sequence
  Description of Artificial Sequence: Synthetic peptide
  XENP023578 vhCDR2
WINTYTGEPTYADGFTG

SEQ ID NO: 33114 - protein, 8 aa, Artificial Sequence
  Description of Artificial Sequence: Synthetic peptide
  XENP023578 vhCDR3
DYYGSSPY

SEQ ID NO: 33115 - protein, 16 aa, Artificial Sequence
  Description of Artificial Sequence: Synthetic peptide
  XENP023578 vlCDR1
KSSQSIVHSNGNTYLE

SEQ ID NO: 33116 - protein, 7 aa, Artificial Sequence
  Description of Artificial Sequence: Synthetic peptide
  XENP023578 vlCDR2
KVSNRFS

SEQ ID NO: 33117 - protein, 9 aa, Artificial Sequence
  Description of Artificial Sequence: Synthetic peptide
  XENP023578 vlCDR3
FQGSHVPNT

SEQ ID NO: 33118 - protein, 251 aa, Artificial Sequence
  Description of Artificial Sequence: Synthetic polypeptide
  XENP023579 1C11_H3_L3.3_scFv
QIQLVQSGSELKKPGASVKVSCKASGYTFTHYGMNWVRQAPGQGLEWMGWINTYTGEPTYADGFTGRFVFSLDTSVSTAYLQISSLKAEDTAVYFCARDYYGSSPYWGQGTLVTVSSGKPGSGKPGSGKPGSGKPGSDVVMTQSPDSLAVSLGERATINCKSSQSIVHSNGNTYLEWYQQKPGQSPKLLIYKVSNRFSGVPDRFSGSGSGTDFTLTISSLQAEDVAVYYCFQGSHVPNTFGGGTKVEIKGS

SEQ ID NO: 33119 - protein, 117 aa, Artificial Sequence; identical to SEQ ID NO: 33034
  Description of Artificial Sequence: Synthetic polypeptide
  VH of XENP023579

SEQ ID NO: 33120 - protein, 114 aa, Artificial Sequence
  Description of Artificial Sequence: Synthetic polypeptide
  VL of XENP023579
DVVMTQSPDSLAVSLGERATINCKSSQSIVHSNGNTYLEWYQQKPGQSPKLLIYKVSNRFSGVPDRFSGSGSGTDFTLTISSLQAEDVAVYYCFQGSHVPNTFGGGTKVEIKGS

SEQ ID NO: 33121 - protein, 5 aa, Artificial Sequence
  Description of Artificial Sequence: Synthetic peptide
  XENP023579 vhCDR1
HYGMN

SEQ ID NO: 33122 - protein, 17 aa, Artificial Sequence
  Description of Artificial Sequence: Synthetic peptide
  XENP023579 vhCDR2
WINTYTGEPTYADGFTG

SEQ ID NO: 33123 - protein, 8 aa, Artificial Sequence
  Description of Artificial Sequence: Synthetic peptide
  XENP023579 vhCDR3
DYYGSSPY

SEQ ID NO: 33124 - protein, 16 aa, Artificial Sequence
  Description of Artificial Sequence: Synthetic peptide
  XENP023579 vlCDR1
KSSQSIVHSNGNTYLE

SEQ ID NO: 33125 - protein, 7 aa, Artificial Sequence
  Description of Artificial Sequence: Synthetic peptide
  XENP023579 vlCDR2
KVSNRFS

SEQ ID NO: 33126 - protein, 9 aa, Artificial Sequence
  Description of Artificial Sequence: Synthetic peptide
  XENP023579 vlCDR3
FQGSHVPNT

SEQ ID NO: 33127 - protein, 251 aa, Artificial Sequence
  Description of Artificial Sequence: Synthetic polypeptide
  XENP023580 1C11_H3_L3.4_scFv
QIQLVQSGSELKKPGASVKVSCKASGYTFTHYGMNWVRQAPGQGLEWMGWINTYTGEPTYADGFTGRFVFSLDTSVSTAYLQISSLKAEDTAVYFCARDYYGSSPYWGQGTLVTVSSGKPGSGKPGSGKPGSGKPGSDVEMTQSPDSLAVSLGERATINCKSSQSIVHSNGNTYLEWYQQKPGQSPKLLIYKVSNRFSGVPDRFSGSGSGTDFTLTISSLQAEDVAVYYCFQGSHVPNTFGGGTKVEIKGS

SEQ ID NO: 33128 - protein, 117 aa, Artificial Sequence; identical to SEQ ID NO: 33034
  Description of Artificial Sequence: Synthetic polypeptide
  VH of XENP023580

SEQ ID NO: 33129 - protein, 114 aa, Artificial Sequence
  Description of Artificial Sequence: Synthetic polypeptide
  VL of XENP023580
DVEMTQSPDSLAVSLGERATINCKSSQSIVHSNGNTYLEWYQQKPGQSPKLLIYKVSNRFSGVPDRFSGSGSGTDFTLTISSLQAEDVAVYYCFQGSHVPNTFGGGTKVEIKGS

SEQ ID NO: 33130 - protein, 5 aa, Artificial Sequence
  Description of Artificial Sequence: Synthetic peptide
  XENP023580 vhCDR1
HYGMN

SEQ ID NO: 33131 - protein, 17 aa, Artificial Sequence
  Description of Artificial Sequence: Synthetic peptide
  XENP023580 vhCDR2
WINTYTGEPTYADGFTG

SEQ ID NO: 33132 - protein, 8 aa, Artificial Sequence
  Description of Artificial Sequence: Synthetic peptide
  XENP023580 vhCDR3
DYYGSSPY

SEQ ID NO: 33133 - protein, 16 aa, Artificial Sequence
  Description of Artificial Sequence: Synthetic peptide
  XENP023580 vlCDR1
KSSQSIVHSNGNTYLE

SEQ ID NO: 33134 - protein, 7 aa, Artificial Sequence
  Description of Artificial Sequence: Synthetic peptide
  XENP023580 vlCDR2
KVSNRFS

SEQ ID NO: 33135 - protein, 9 aa, Artificial Sequence
  Description of Artificial Sequence: Synthetic peptide
  XENP023580 vlCDR3
FQGSHVPNT

SEQ ID NO: 33136 - protein, 251 aa, Artificial Sequence
  Description of Artificial Sequence: Synthetic polypeptide
  XENP023581 1C11_H3_L3.5_scFv
QIQLVQSGSELKKPGASVKVSCKASGYTFTHYGMNWVRQAPGQGLEWMGWINTYTGEPTYADGFTGRFVFSLDTSVSTAYLQISSLKAEDTAVYFCARDYYGSSPYWGQGTLVTVSSGKPGSGKPGSGKPGSGKPGSDVQMTQSPDSLAVSLGERATINCKSSQSIVHSNGNTYLEWYQQKPGQSPKLLIYKVSNRFSGVPDRFSGSGSGTDFTLTISSLQAEDVAVYYCFQGSHVPNTFGGGTKVEIKGS

SEQ ID NO: 33137 - protein, 117 aa, Artificial Sequence; identical to SEQ ID NO: 33034
  Description of Artificial Sequence: Synthetic polypeptide
  VH of XENP023581

SEQ ID NO: 33138 - protein, 114 aa, Artificial Sequence
  Description of Artificial Sequence: Synthetic polypeptide
  VL of XENP023581
DVQMTQSPDSLAVSLGERATINCKSSQSIVHSNGNTYLEWYQQKPGQSPKLLIYKVSNRFSGVPDRFSGSGSGTDFTLTISSLQAEDVAVYYCFQGSHVPNTFGGGTKVEIKGS

SEQ ID NO: 33139 - protein, 5 aa, Artificial Sequence
  Description of Artificial Sequence: Synthetic peptide
  XENP023581 vhCDR1
HYGMN

SEQ ID NO: 33140 - protein, 17 aa, Artificial Sequence
  Description of Artificial Sequence: Synthetic peptide
  XENP023581 vhCDR2
WINTYTGEPTYADGFTG

SEQ ID NO: 33141 - protein, 8 aa, Artificial Sequence
  Description of Artificial Sequence: Synthetic peptide
  XENP023581 vhCDR3
DYYGSSPY

SEQ ID NO: 33142 - protein, 16 aa, Artificial Sequence
  Description of Artificial Sequence: Synthetic peptide
  XENP023581 vlCDR1
KSSQSIVHSNGNTYLE

SEQ ID NO: 33143 - protein, 7 aa, Artificial Sequence
  Description of Artificial Sequence: Synthetic peptide
  XENP023581 vlCDR2
KVSNRFS

SEQ ID NO: 33144 - protein, 9 aa, Artificial Sequence
  Description of Artificial Sequence: Synthetic peptide
  XENP023581 vlCDR3
FQGSHVPNT

SEQ ID NO: 33145 - protein, 251 aa, Artificial Sequence
  Description of Artificial Sequence: Synthetic polypeptide
  XENP023582 1C11_H3_L3.6_scFv
QIQLVQSGSELKKPGASVKVSCKASGYTFTHYGMNWVRQAPGQGLEWMGWINTYTGEPTYADGFTGRFVFSLDTSVSTAYLQISSLKAEDTAVYFCARDYYGSSPYWGQGTLVTVSSGKPGSGKPGSGKPGSGKPGSDVDMTQSPDSLAVSLGERATINCKSSQSIVHSNGNTYLEWYQQKPGQSPKLLIYKVSNRFSGVPDRFSGSGSGTDFTLTISSLQAEDVAVYYCFQGSHVPNTFGGGTKVEIKGS

SEQ ID NO: 33146 - protein, 117 aa, Artificial Sequence; identical to SEQ ID NO: 33034
  Description of Artificial Sequence: Synthetic polypeptide
  VH of XENP023582

SEQ ID NO: 33147 - protein, 114 aa, Artificial Sequence
  Description of Artificial Sequence: Synthetic polypeptide
  VL of XENP023582
DVDMTQSPDSLAVSLGERATINCKSSQSIVHSNGNTYLEWYQQKPGQSPKLLIYKVSNRFSGVPDRFSGSGSGTDFTLTISSLQAEDVAVYYCFQGSHVPNTFGGGTKVEIKGS

SEQ ID NO: 33148 - protein, 5 aa, Artificial Sequence
  Description of Artificial Sequence: Synthetic peptide
  XENP023582 vhCDR1
HYGMN

SEQ ID NO: 33149 - protein, 17 aa, Artificial Sequence
  Description of Artificial Sequence: Synthetic peptide
  XENP023582 vhCDR2
WINTYTGEPTYADGFTG

SEQ ID NO: 33150 - protein, 8 aa, Artificial Sequence
  Description of Artificial Sequence: Synthetic peptide
  XENP023582 vhCDR3
DYYGSSPY

SEQ ID NO: 33151 - protein, 16 aa, Artificial Sequence
  Description of Artificial Sequence: Synthetic peptide
  XENP023582 vlCDR1
KSSQSIVHSNGNTYLE

SEQ ID NO: 33152 - protein, 7 aa, Artificial Sequence
  Description of Artificial Sequence: Synthetic peptide
  XENP023582 vlCDR2
KVSNRFS

SEQ ID NO: 33153 - protein, 9 aa, Artificial Sequence
  Description of Artificial Sequence: Synthetic peptide
  XENP023582 vlCDR3
FQGSHVPNT

SEQ ID NO: 33154 - protein, 251 aa, Artificial Sequence
  Description of Artificial Sequence: Synthetic polypeptide
  XENP023583 1C11_H3_L3.7_scFv
QIQLVQSGSELKKPGASVKVSCKASGYTFTHYGMNWVRQAPGQGLEWMGWINTYTGEPTYADGFTGRFVFSLDTSVSTAYLQISSLKAEDTAVYFCARDYYGSSPYWGQGTLVTVSSGKPGSGKPGSGKPGSGKPGSDIQMTQSPDSLAVSLGERATINCKSSQSIVHSNGNTYLEWYQQKPGQSPKLLIYKVSNRFSGVPDRFSGSGSGTDFTLTISSLQAEDVAVYYCFQGSHVPNTFGGGTKVEIKGS

SEQ ID NO: 33155 - protein, 117 aa, Artificial Sequence; identical to SEQ ID NO: 33034
  Description of Artificial Sequence: Synthetic polypeptide
  VH of XENP023583

SEQ ID NO: 33156 - protein, 114 aa, Artificial Sequence
  Description of Artificial Sequence: Synthetic polypeptide
  VL of XENP023583
DIQMTQSPDSLAVSLGERATINCKSSQSIVHSNGNTYLEWYQQKPGQSPKLLIYKVSNRFSGVPDRFSGSGSGTDFTLTISSLQAEDVAVYYCFQGSHVPNTFGGGTKVEIKGS

SEQ ID NO: 33157 - protein, 5 aa, Artificial Sequence
  Description of Artificial Sequence: Synthetic peptide
  XENP023583 vhCDR1
HYGMN

SEQ ID NO: 33158 - protein, 17 aa, Artificial Sequence
  Description of Artificial Sequence: Synthetic peptide
  XENP023583 vhCDR2
WINTYTGEPTYADGFTG

SEQ ID NO: 33159 - protein, 8 aa, Artificial Sequence
  Description of Artificial Sequence: Synthetic peptide
  XENP023583 vhCDR3
DYYGSSPY

SEQ ID NO: 33160 - protein, 16 aa, Artificial Sequence
  Description of Artificial Sequence: Synthetic peptide
  XENP023583 vlCDR1
KSSQSIVHSNGNTYLE

SEQ ID NO: 33161 - protein, 7 aa, Artificial Sequence
  Description of Artificial Sequence: Synthetic peptide
  XENP023583 vlCDR2
KVSNRFS

SEQ ID NO: 33162 - protein, 9 aa, Artificial Sequence
  Description of Artificial Sequence: Synthetic peptide
  XENP023583 vlCDR3
FQGSHVPNT

SEQ ID NO: 33163 - protein, 251 aa, Artificial Sequence
  Description of Artificial Sequence: Synthetic polypeptide
  XENP023584 1C11_H3_L3.9_scFv
QIQLVQSGSELKKPGASVKVSCKASGYTFTHYGMNWVRQAPGQGLEWMGWINTYTGEPTYADGFTGRFVFSLDTSVSTAYLQISSLKAEDTAVYFCARDYYGSSPYWGQGTLVTVSSGKPGSGKPGSGKPGSGKPGSDVLMTQSPKSLAVSLGERATINCKSSQSIVHSNGNTYLEWYQQKPGQSPKLLIYKVSNRFSGVPDRFSGSGSGTDFTLTISSLQAEDVAVYYCFQGSHVPNTFGGGTKVEIKGS

SEQ ID NO: 33164 - protein, 117 aa, Artificial Sequence; identical to SEQ ID NO: 33034
  Description of Artificial Sequence: Synthetic polypeptide
  VH of XENP023584

SEQ ID NO: 33165 - protein, 114 aa, Artificial Sequence
  Description of Artificial Sequence: Synthetic polypeptide
  VL of XENP023584
DVLMTQSPKSLAVSLGERATINCKSSQSIVHSNGNTYLEWYQQKPGQSPKLLIYKVSNRFSGVPDRFSGSGSGTDFTLTISSLQAEDVAVYYCFQGSHVPNTFGGGTKVEIKGS

SEQ ID NO: 33166 - protein, 5 aa, Artificial Sequence
  Description of Artificial Sequence: Synthetic peptide
  XENP023584 vhCDR1
HYGMN

SEQ ID NO: 33167 - protein, 17 aa, Artificial Sequence
  Description of Artificial Sequence: Synthetic peptide
  XENP023584 vhCDR2
WINTYTGEPTYADGFTG

SEQ ID NO: 33168 - protein, 8 aa, Artificial Sequence
  Description of Artificial Sequence: Synthetic peptide
  XENP023584 vhCDR3
DYYGSSPY

SEQ ID NO: 33169 - protein, 16 aa, Artificial Sequence
  Description of Artificial Sequence: Synthetic peptide
  XENP023584 vlCDR1
KSSQSIVHSNGNTYLE

SEQ ID NO: 33170 - protein, 7 aa, Artificial Sequence
  Description of Artificial Sequence: Synthetic peptide
  XENP023584 vlCDR2
KVSNRFS

SEQ ID NO: 33171 - protein, 9 aa, Artificial Sequence
  Description of Artificial Sequence: Synthetic peptide
  XENP023584 vlCDR3
FQGSHVPNT

SEQ ID NO: 33172 - protein, 251 aa, Artificial Sequence
  Description of Artificial Sequence: Synthetic polypeptide
  XENP023585 1C11_H3_L3.10_scFv
QIQLVQSGSELKKPGASVKVSCKASGYTFTHYGMNWVRQAPGQGLEWMGWINTYTGEPTYADGFTGRFVFSLDTSVSTAYLQISSLKAEDTAVYFCARDYYGSSPYWGQGTLVTVSSGKPGSGKPGSGKPGSGKPGSDVLMTQSPLSLAVSLGERATINCKSSQSIVHSNGNTYLEWYQQKPGQSPKLLIYKVSNRFSGVPDRFSGSGSGTDFTLTISSLQAEDVAVYYCFQGSHVPNTFGGGTKVEIKGS

SEQ ID NO: 33173 - protein, 117 aa, Artificial Sequence; identical to SEQ ID NO: 33034
  Description of Artificial Sequence: Synthetic polypeptide
  VH of XENP023585

SEQ ID NO: 33174 - protein, 114 aa, Artificial Sequence
  Description of Artificial Sequence: Synthetic polypeptide
  VL of XENP023585
DVLMTQSPLSLAVSLGERATINCKSSQSIVHSNGNTYLEWYQQKPGQSPKLLIYKVSNRFSGVPDRFSGSGSGTDFTLTISSLQAEDVAVYYCFQGSHVPNTFGGGTKVEIKGS

SEQ ID NO: 33175 - protein, 5 aa, Artificial Sequence
  Description of Artificial Sequence: Synthetic peptide
  XENP023585 vhCDR1
HYGMN

SEQ ID NO: 33176 - protein, 17 aa, Artificial Sequence
  Description of Artificial Sequence: Synthetic peptide
  XENP023585 vhCDR2
WINTYTGEPTYADGFTG

SEQ ID NO: 33177 - protein, 8 aa, Artificial Sequence
  Description of Artificial Sequence: Synthetic peptide
  XENP023585 vhCDR3
DYYGSSPY

SEQ ID NO: 33178 - protein, 16 aa, Artificial Sequence
  Description of Artificial Sequence: Synthetic peptide
  XENP023585 vlCDR1
KSSQSIVHSNGNTYLE

SEQ ID NO: 33179 - protein, 7 aa, Artificial Sequence
  Description of Artificial Sequence: Synthetic peptide
  XENP023585 vlCDR2
KVSNRFS

SEQ ID NO: 33180 - protein, 9 aa, Artificial Sequence
  Description of Artificial Sequence: Synthetic peptide
  XENP023585 vlCDR3
FQGSHVPNT

SEQ ID NO: 33181 - protein, 251 aa, Artificial Sequence
  Description of Artificial Sequence: Synthetic polypeptide
  XENP023586 1C11_H3_L3.11_scFv
QIQLVQSGSELKKPGASVKVSCKASGYTFTHYGMNWVRQAPGQGLEWMGWINTYTGEPTYADGFTGRFVFSLDTSVSTAYLQISSLKAEDTAVYFCARDYYGSSPYWGQGTLVTVSSGKPGSGKPGSGKPGSGKPGSDVLMTQSPSSLAVSLGERATINCKSSQSIVHSNGNTYLEWYQQKPGQSPKLLIYKVSNRFSGVPDRFSGSGSGTDFTLTISSLQAEDVAVYYCFQGSHVPNTFGGGTKVEIKGS

SEQ ID NO: 33182 - protein, 117 aa, Artificial Sequence; identical to SEQ ID NO: 33034
  Description of Artificial Sequence: Synthetic polypeptide
  VH of XENP023586

SEQ ID NO: 33183 - protein, 114 aa, Artificial Sequence
  Description of Artificial Sequence: Synthetic polypeptide
  VL of XENP023586
DVLMTQSPSSLAVSLGERATINCKSSQSIVHSNGNTYLEWYQQKPGQSPKLLIYKVSNRFSGVPDRFSGSGSGTDFTLTISSLQAEDVAVYYCFQGSHVPNTFGGGTKVEIKGS

SEQ ID NO: 33184 - protein, 5 aa, Artificial Sequence
  Description of Artificial Sequence: Synthetic peptide
  XENP023586 vhCDR1
HYGMN

SEQ ID NO: 33185 - protein, 17 aa, Artificial Sequence
  Description of Artificial Sequence: Synthetic peptide
  XENP023586 vhCDR2
WINTYTGEPTYADGFTG

SEQ ID NO: 33186 - protein, 8 aa, Artificial Sequence
  Description of Artificial Sequence: Synthetic peptide
  XENP023586 vhCDR3
DYYGSSPY

SEQ ID NO: 33187 - protein, 16 aa, Artificial Sequence
  Description of Artificial Sequence: Synthetic peptide
  XENP023586 vlCDR1
KSSQSIVHSNGNTYLE

SEQ ID NO: 33188 - protein, 7 aa, Artificial Sequence
  Description of Artificial Sequence: Synthetic peptide
  XENP023586 vlCDR2
KVSNRFS

SEQ ID NO: 33189 - protein, 9 aa, Artificial Sequence
  Description of Artificial Sequence: Synthetic peptide
  XENP023586 vlCDR3
FQGSHVPNT

SEQ ID NO: 33190 - protein, 251 aa, Artificial Sequence
  Description of Artificial Sequence: Synthetic polypeptide
  XENP023587 1C11_H3_L3.12_scFv
QIQLVQSGSELKKPGASVKVSCKASGYTFTHYGMNWVRQAPGQGLEWMGWINTYTGEPTYADGFTGRFVFSLDTSVSTAYLQISSLKAEDTAVYFCARDYYGSSPYWGQGTLVTVSSGKPGSGKPGSGKPGSGKPGSDVLMTQSPGSLAVSLGERATINCKSSQSIVHSNGNTYLEWYQQKPGQSPKLLIYKVSNRFSGVPDRFSGSGSGTDFTLTISSLQAEDVAVYYCFQGSHVPNTFGGGTKVEIKGS

SEQ ID NO: 33191 - protein, 117 aa, Artificial Sequence; identical to SEQ ID NO: 33034
  Description of Artificial Sequence: Synthetic polypeptide
  VH of XENP023587

SEQ ID NO: 33192 - protein, 114 aa, Artificial Sequence
  Description of Artificial Sequence: Synthetic polypeptide
  VL of XENP023587
DVLMTQSPGSLAVSLGERATINCKSSQSIVHSNGNTYLEWYQQKPGQSPKLLIYKVSNRFSGVPDRFSGSGSGTDFTLTISSLQAEDVAVYYCFQGSHVPNTFGGGTKVEIKGS

SEQ ID NO: 33193 - protein, 5 aa, Artificial Sequence
  Description of Artificial Sequence: Synthetic peptide
  XENP023587 vhCDR1
HYGMN

SEQ ID NO: 33194 - protein, 17 aa, Artificial Sequence
  Description of Artificial Sequence: Synthetic peptide
  XENP023587 vhCDR2
WINTYTGEPTYADGFTG

SEQ ID NO: 33195 - protein, 8 aa, Artificial Sequence
  Description of Artificial Sequence: Synthetic peptide
  XENP023587 vhCDR3
DYYGSSPY

SEQ ID NO: 33196 - protein, 16 aa, Artificial Sequence
  Description of Artificial Sequence: Synthetic peptide
  XENP023587 vlCDR1
KSSQSIVHSNGNTYLE

SEQ ID NO: 33197 - protein, 7 aa, Artificial Sequence
  Description of Artificial Sequence: Synthetic peptide
  XENP023587 vlCDR2
KVSNRFS

SEQ ID NO: 33198 - protein, 9 aa, Artificial Sequence
  Description of Artificial Sequence: Synthetic peptide
  XENP023587 vlCDR3
FQGSHVPNT

SEQ ID NO: 33199 - protein, 251 aa, Artificial Sequence
  Description of Artificial Sequence: Synthetic polypeptide
  XENP023588 1C11_H3_L3.14_scFv
QIQLVQSGSELKKPGASVKVSCKASGYTFTHYGMNWVRQAPGQGLEWMGWINTYTGEPTYADGFTGRFVFSLDTSVSTAYLQISSLKAEDTAVYFCARDYYGSSPYWGQGTLVTVSSGKPGSGKPGSGKPGSGKPGSDVLMTQSPDSLPVSLGERATINCKSSQSIVHSNGNTYLEWYQQKPGQSPKLLIYKVSNRFSGVPDRFSGSGSGTDFTLTISSLQAEDVAVYYCFQGSHVPNTFGGGTKVEIKGS

SEQ ID NO: 33200 - protein, 117 aa, Artificial Sequence; identical to SEQ ID NO: 33034
  Description of Artificial Sequence: Synthetic polypeptide
  VH of XENP023588

SEQ ID NO: 33201 - protein, 114 aa, Artificial Sequence
  Description of Artificial Sequence: Synthetic polypeptide
  VL of XENP023588
DVLMTQSPDSLPVSLGERATINCKSSQSIVHSNGNTYLEWYQQKPGQSPKLLIYKVSNRFSGVPDRFSGSGSGTDFTLTISSLQAEDVAVYYCFQGSHVPNTFGGGTKVEIKGS

SEQ ID NO: 33202 - protein, 5 aa, Artificial Sequence
  Description of Artificial Sequence: Synthetic peptide
  XENP023588 vhCDR1
HYGMN

SEQ ID NO: 33203 - protein, 17 aa, Artificial Sequence
  Description of Artificial Sequence: Synthetic peptide
  XENP023588 vhCDR2
WINTYTGEPTYADGFTG

SEQ ID NO: 33204 - protein, 8 aa, Artificial Sequence
  Description of Artificial Sequence: Synthetic peptide
  XENP023588 vhCDR3
DYYGSSPY

SEQ ID NO: 33205 - protein, 16 aa, Artificial Sequence
  Description of Artificial Sequence: Synthetic peptide
  XENP023588 vlCDR1
KSSQSIVHSNGNTYLE

SEQ ID NO: 33206 - protein, 7 aa, Artificial Sequence
  Description of Artificial Sequence: Synthetic peptide
  XENP023588 vlCDR2
KVSNRFS

SEQ ID NO: 33207 - protein, 9 aa, Artificial Sequence
  Description of Artificial Sequence: Synthetic peptide
  XENP023588 vlCDR3
FQGSHVPNT

SEQ ID NO: 33208 - protein, 251 aa, Artificial Sequence
  Description of Artificial Sequence: Synthetic polypeptide
  XENP023589 1C11_H3_L3.15_scFv
QIQLVQSGSELKKPGASVKVSCKASGYTFTHYGMNWVRQAPGQGLEWMGWINTYTGEPTYADGFTGRFVFSLDTSVSTAYLQISSLKAEDTAVYFCARDYYGSSPYWGQGTLVTVSSGKPGSGKPGSGKPGSGKPGSDVLMTQSPDSLSVSLGERATINCKSSQSIVHSNGNTYLEWYQQKPGQSPKLLIYKVSNRFSGVPDRFSGSGSGTDFTLTISSLQAEDVAVYYCFQGSHVPNTFGGGTKVEIKGS

SEQ ID NO: 33209 - protein, 117 aa, Artificial Sequence; identical to SEQ ID NO: 33034
  Description of Artificial Sequence: Synthetic polypeptide
  VH of XENP023589

SEQ ID NO: 33210 - protein, 114 aa, Artificial Sequence
  Description of Artificial Sequence: Synthetic polypeptide
  VL of XENP023589
DVLMTQSPDSLSVSLGERATINCKSSQSIVHSNGNTYLEWYQQKPGQSPKLLIYKVSNRFSGVPDRFSGSGSGTDFTLTISSLQAEDVAVYYCFQGSHVPNTFGGGTKVEIKGS

SEQ ID NO: 33211 - protein, 5 aa, Artificial Sequence
  Description of Artificial Sequence: Synthetic peptide
  XENP023589 vhCDR1
HYGMN

SEQ ID NO: 33212 - protein, 17 aa, Artificial Sequence
  Description of Artificial Sequence: Synthetic peptide
  XENP023589 vhCDR2
WINTYTGEPTYADGFTG

SEQ ID NO: 33213 - protein, 8 aa, Artificial Sequence
  Description of Artificial Sequence: Synthetic peptide
  XENP023589 vhCDR3
DYYGSSPY

SEQ ID NO: 33214 - protein, 16 aa, Artificial Sequence
  Description of Artificial Sequence: Synthetic peptide
  XENP023589 vlCDR1
KSSQSIVHSNGNTYLE

SEQ ID NO: 33215 - protein, 7 aa, Artificial Sequence
  Description of Artificial Sequence: Synthetic peptide
  XENP023589 vlCDR2
KVSNRFS

SEQ ID NO: 33216 - protein, 9 aa, Artificial Sequence
  Description of Artificial Sequence: Synthetic peptide
  XENP023589 vlCDR3
FQGSHVPNT

SEQ ID NO: 33217 - protein, 251 aa, Artificial Sequence
  Description of Artificial Sequence: Synthetic polypeptide
  XENP023590 1C11_H3_L3.16_scFv
QIQLVQSGSELKKPGASVKVSCKASGYTFTHYGMNWVRQAPGQGLEWMGWINTYTGEPTYADGFTGRFVFSLDTSVSTAYLQISSLKAEDTAVYFCARDYYGSSPYWGQGTLVTVSSGKPGSGKPGSGKPGSGKPGSDVLMTQSPDSLTVSLGERATINCKSSQSIVHSNGNTYLEWYQQKPGQSPKLLIYKVSNRFSGVPDRFSGSGSGTDFTLTISSLQAEDVAVYYCFQGSHVPNTFGGGTKVEIKGS

SEQ ID NO: 33218 - protein, 117 aa, Artificial Sequence; identical to SEQ ID NO: 33034
  Description of Artificial Sequence: Synthetic polypeptide
  VH of XENP023590

SEQ ID NO: 33219 - protein, 114 aa, Artificial Sequence
  Description of Artificial Sequence: Synthetic polypeptide
  VL of XENP023590
DVLMTQSPDSLTVSLGERATINCKSSQSIVHSNGNTYLEWYQQKPGQSPKLLIYKVSNRFSGVPDRFSGSGSGTDFTLTISSLQAEDVAVYYCFQGSHVPNTFGGGTKVEIKGS

SEQ ID NO: 33220 - protein, 5 aa, Artificial Sequence
  Description of Artificial Sequence: Synthetic peptide
  XENP023590 vhCDR1
HYGMN

SEQ ID NO: 33221 - protein, 17 aa, Artificial Sequence
  Description of Artificial Sequence: Synthetic peptide
  XENP023590 vhCDR2
WINTYTGEPTYADGFTG

SEQ ID NO: 33222 - protein, 8 aa, Artificial Sequence
  Description of Artificial Sequence: Synthetic peptide
  XENP023590 vhCDR3
DYYGSSPY

SEQ ID NO: 33223 - protein, 16 aa, Artificial Sequence
  Description of Artificial Sequence: Synthetic peptide
  XENP023590 vlCDR1
KSSQSIVHSNGNTYLE

SEQ ID NO: 33224 - protein, 7 aa, Artificial Sequence
  Description of Artificial Sequence: Synthetic peptide
  XENP023590 vlCDR2
KVSNRFS

SEQ ID NO: 33225 - protein, 9 aa, Artificial Sequence
  Description of Artificial Sequence: Synthetic peptide
  XENP023590 vlCDR3
FQGSHVPNT

SEQ ID NO: 33226 - protein, 251 aa, Artificial Sequence
  Description of Artificial Sequence: Synthetic polypeptide
  XENP023591 1C11_H3_L3.17_scFv
QIQLVQSGSELKKPGASVKVSCKASGYTFTHYGMNWVRQAPGQGLEWMGWINTYTGEPTYADGFTGRFVFSLDTSVSTAYLQISSLKAEDTAVYFCARDYYGSSPYWGQGTLVTVSSGKPGSGKPGSGKPGSGKPGSDVLMTQSPDSLSASVGERATINCKSSQSIVHSNGNTYLEWYQQKPGQSPKLLIYKVSNRFSGVPDRFSGSGSGTDFTLTISSLQAEDVAVYYCFQGSHVPNTFGGGTKVEIKGS

SEQ ID NO: 33227 - protein, 117 aa, Artificial Sequence; identical to SEQ ID NO: 33034
  Description of Artificial Sequence: Synthetic polypeptide
  VH of XENP023591

SEQ ID NO: 33228 - protein, 114 aa, Artificial Sequence
  Description of Artificial Sequence: Synthetic polypeptide
  VL of XENP023591
DVLMTQSPDSLSASVGERATINCKSSQSIVHSNGNTYLEWYQQKPGQSPKLLIYKVSNRFSGVPDRFSGSGSGTDFTLTISSLQAEDVAVYYCFQGSHVPNTFGGGTKVEIKGS

SEQ ID NO: 33229 - protein, 5 aa, Artificial Sequence
  Description of Artificial Sequence: Synthetic peptide
  XENP023591 vhCDR1
HYGMN

SEQ ID NO: 33230 - protein, 17 aa, Artificial Sequence
  Description of Artificial Sequence: Synthetic peptide
  XENP023591 vhCDR2
WINTYTGEPTYADGFTG

SEQ ID NO: 33231 - protein, 8 aa, Artificial Sequence
  Description of Artificial Sequence: Synthetic peptide
  XENP023591 vhCDR3
DYYGSSPY

SEQ ID NO: 33232 - protein, 16 aa, Artificial Sequence
  Description of Artificial Sequence: Synthetic peptide
  XENP023591 vlCDR1
KSSQSIVHSNGNTYLE

SEQ ID NO: 33233 - protein, 7 aa, Artificial Sequence
  Description of Artificial Sequence: Synthetic peptide
  XENP023591 vlCDR2
KVSNRFS

SEQ ID NO: 33234 - protein, 9 aa, Artificial Sequence
  Description of Artificial Sequence: Synthetic peptide
  XENP023591 vlCDR3
FQGSHVPNT

SEQ ID NO: 33235 - protein, 251 aa, Artificial Sequence
  Description of Artificial Sequence: Synthetic polypeptide
  XENP023592 1C11_H3_L3.18_scFv
QIQLVQSGSELKKPGASVKVSCKASGYTFTHYGMNWVRQAPGQGLEWMGWINTYTGEPTYADGFTGRFVFSLDTSVSTAYLQISSLKAEDTAVYFCARDYYGSSPYWGQGTLVTVSSGKPGSGKPGSGKPGSGKPGSDVLMTQSPDSLSVSPGERATINCKSSQSIVHSNGNTYLEWYQQKPGQSPKLLIYKVSNRFSGVPDRFSGSGSGTDFTLTISSLQAEDVAVYYCFQGSHVPNTFGGGTKVEIKGS

SEQ ID NO: 33236 - protein, 117 aa, Artificial Sequence; identical to SEQ ID NO: 33034
  Description of Artificial Sequence: Synthetic polypeptide
  VH of XENP023592

SEQ ID NO: 33237 - protein, 114 aa, Artificial Sequence
  Description of Artificial Sequence: Synthetic polypeptide
  VL of XENP023592
DVLMTQSPDSLSVSPGERATINCKSSQSIVHSNGNTYLEWYQQKPGQSPKLLIYKVSNRFSGVPDRFSGSGSGTDFTLTISSLQAEDVAVYYCFQGSHVPNTFGGGTKVEIKGS

SEQ ID NO: 33238 - protein, 5 aa, Artificial Sequence
  Description of Artificial Sequence: Synthetic peptide
  XENP023592 vhCDR1
HYGMN

SEQ ID NO: 33239 - protein, 17 aa, Artificial Sequence
  Description of Artificial Sequence: Synthetic peptide
  XENP023592 vhCDR2
WINTYTGEPTYADGFTG

SEQ ID NO: 33240 - protein, 8 aa, Artificial Sequence
  Description of Artificial Sequence: Synthetic peptide
  XENP023592 vhCDR3
DYYGSSPY

SEQ ID NO: 33241 - protein, 16 aa, Artificial Sequence
  Description of Artificial Sequence: Synthetic peptide
  XENP023592 vlCDR1
KSSQSIVHSNGNTYLE

SEQ ID NO: 33242 - protein, 7 aa, Artificial Sequence
  Description of Artificial Sequence: Synthetic peptide
  XENP023592 vlCDR2
KVSNRFS

SEQ ID NO: 33243 - protein, 9 aa, Artificial Sequence
  Description of Artificial Sequence: Synthetic peptide
  XENP023592 vlCDR3
FQGSHVPNT

SEQ ID NO: 33244 - protein, 251 aa, Artificial Sequence
  Description of Artificial Sequence: Synthetic polypeptide
  XENP023593 1C11_H3_L3.19_scFv
QIQLVQSGSELKKPGASVKVSCKASGYTFTHYGMNWVRQAPGQGLEWMGWINTYTGEPTYADGFTGRFVFSLDTSVSTAYLQISSLKAEDTAVYFCARDYYGSSPYWGQGTLVTVSSGKPGSGKPGSGKPGSGKPGSDVLMTQSPDSLSLSPGERATINCKSSQSIVHSNGNTYLEWYQQKPGQSPKLLIYKVSNRFSGVPDRFSGSGSGTDFTLTISSLQAEDVAVYYCFQGSHVPNTFGGGTKVEIKGS

SEQ ID NO: 33245 - protein, 117 aa, Artificial Sequence; identical to SEQ ID NO: 33034
  Description of Artificial Sequence: Synthetic polypeptide
  VH of XENP023593

SEQ ID NO: 33246 - protein, 114 aa, Artificial Sequence
  Description of Artificial Sequence: Synthetic polypeptide
  VL of XENP023593
DVLMTQSPDSLSLSPGERATINCKSSQSIVHSNGNTYLEWYQQKPGQSPKLLIYKVSNRFSGVPDRFSGSGSGTDFTLTISSLQAEDVAVYYCFQGSHVPNTFGGGTKVEIKGS

SEQ ID NO: 33247 - protein, 5 aa, Artificial Sequence
  Description of Artificial Sequence: Synthetic peptide
  XENP023593 vhCDR1
HYGMN

SEQ ID NO: 33248 - protein, 17 aa, Artificial Sequence
  Description of Artificial Sequence: Synthetic peptide
  XENP023593 vhCDR2
WINTYTGEPTYADGFTG

SEQ ID NO: 33249 - protein, 8 aa, Artificial Sequence
  Description of Artificial Sequence: Synthetic peptide
  XENP023593 vhCDR3
DYYGSSPY

SEQ ID NO: 33250 - protein, 16 aa, Artificial Sequence
  Description of Artificial Sequence: Synthetic peptide
  XENP023593 vlCDR1
KSSQSIVHSNGNTYLE

SEQ ID NO: 33251 - protein, 7 aa, Artificial Sequence
  Description of Artificial Sequence: Synthetic peptide
  XENP023593 vlCDR2
KVSNRFS

SEQ ID NO: 33252 - protein, 9 aa, Artificial Sequence
  Description of Artificial Sequence: Synthetic peptide
  XENP023593 vlCDR3
FQGSHVPNT

SEQ ID NO: 33253 - protein, 251 aa, Artificial Sequence
  Description of Artificial Sequence: Synthetic polypeptide
  XENP023594 1C11_H3_L3.20_scFv
QIQLVQSGSELKKPGASVKVSCKASGYTFTHYGMNWVRQAPGQGLEWMGWINTYTGEPTYADGFTGRFVFSLDTSVSTAYLQISSLKAEDTAVYFCARDYYGSSPYWGQGTLVTVSSGKPGSGKPGSGKPGSGKPGSDVLMTQSPDSLAVSSGERATINCKSSQSIVHSNGNTYLEWYQQKPGQSPKLLIYKVSNRFSGVPDRFSGSGSGTDFTLTISSLQAEDVAVYYCFQGSHVPNTFGGGTKVEIKGS

SEQ ID NO: 33254 - protein, 117 aa, Artificial Sequence; identical to SEQ ID NO: 33034
  Description of Artificial Sequence: Synthetic polypeptide
  VH of XENP023594

SEQ ID NO: 33255 - protein, 114 aa, Artificial Sequence
  Description of Artificial Sequence: Synthetic polypeptide
  VL of XENP023594
DVLMTQSPDSLAVSSGERATINCKSSQSIVHSNGNTYLEWYQQKPGQSPKLLIYKVSNRFSGVPDRFSGSGSGTDFTLTISSLQAEDVAVYYCFQGSHVPNTFGGGTKVEIKGS

SEQ ID NO: 33256 - protein, 5 aa, Artificial Sequence
  Description of Artificial Sequence: Synthetic peptide
  XENP023594 vhCDR1
HYGMN

SEQ ID NO: 33257 - protein, 17 aa, Artificial Sequence
  Description of Artificial Sequence: Synthetic peptide
  XENP023594 vhCDR2
WINTYTGEPTYADGFTG

SEQ ID NO: 33258 - protein, 8 aa, Artificial Sequence
  Description of Artificial Sequence: Synthetic peptide
  XENP023594 vhCDR3
DYYGSSPY

SEQ ID NO: 33259 - protein, 16 aa, Artificial Sequence
  Description of Artificial Sequence: Synthetic peptide
  XENP023594 vlCDR1
KSSQSIVHSNGNTYLE

SEQ ID NO: 33260 - protein, 7 aa, Artificial Sequence
  Description of Artificial Sequence: Synthetic peptide
  XENP023594 vlCDR2
KVSNRFS

SEQ ID NO: 33261 - protein, 9 aa, Artificial Sequence
  Description of Artificial Sequence: Synthetic peptide
  XENP023594 vlCDR3
FQGSHVPNT

SEQ ID NO: 33262 - protein, 251 aa, Artificial Sequence
  Description of Artificial Sequence: Synthetic polypeptide
  XENP023595 1C11_H3_L3.21_scFv
QIQLVQSGSELKKPGASVKVSCKASGYTFTHYGMNWVRQAPGQGLEWMGWINTYTGEPTYADGFTGRFVFSLDTSVSTAYLQISSLKAEDTAVYFCARDYYGSSPYWGQGTLVTVSSGKPGSGKPGSGKPGSGKPGSDVLMTQSPDSLAVSTGERATINCKSSQSIVHSNGNTYLEWYQQKPGQSPKLLIYKVSNRFSGVPDRFSGSGSGTDFTLTISSLQAEDVAVYYCFQGSHVPNTFGGGTKVEIKGS

SEQ ID NO: 33263 - protein, 117 aa, Artificial Sequence; identical to SEQ ID NO: 33034
  Description of Artificial Sequence: Synthetic polypeptide
  VH of XENP023595

SEQ ID NO: 33264 - protein, 114 aa, Artificial Sequence
  Description of Artificial Sequence: Synthetic polypeptide
  VL of XENP023595
DVLMTQSPDSLAVSTGERATINCKSSQSIVHSNGNTYLEWYQQKPGQSPKLLIYKVSNRFSGVPDRFSGSGSGTDFTLTISSLQAEDVAVYYCFQGSHVPNTFGGGTKVEIKGS

SEQ ID NO: 33265 - protein, 5 aa, Artificial Sequence
  Description of Artificial Sequence: Synthetic peptide
  XENP023595 vhCDR1
HYGMN

SEQ ID NO: 33266 - protein, 17 aa, Artificial Sequence
  Description of Artificial Sequence: Synthetic peptide
  XENP023595 vhCDR2
WINTYTGEPTYADGFTG

SEQ ID NO: 33267 - protein, 8 aa, Artificial Sequence
  Description of Artificial Sequence: Synthetic peptide
  XENP023595 vhCDR3
DYYGSSPY

SEQ ID NO: 33268 - protein, 16 aa, Artificial Sequence
  Description of Artificial Sequence: Synthetic peptide
  XENP023595 vlCDR1
KSSQSIVHSNGNTYLE

SEQ ID NO: 33269 - protein, 7 aa, Artificial Sequence
  Description of Artificial Sequence: Synthetic peptide
  XENP023595 vlCDR2
KVSNRFS

SEQ ID NO: 33270 - protein, 9 aa, Artificial Sequence
  Description of Artificial Sequence: Synthetic peptide
  XENP023595 vlCDR3
FQGSHVPNT

SEQ ID NO: 33271 - protein, 251 aa, Artificial Sequence
  Description of Artificial Sequence: Synthetic polypeptide
  XENP023596 1C11_H3_L3.22_scFv
QIQLVQSGSELKKPGASVKVSCKASGYTFTHYGMNWVRQAPGQGLEWMGWINTYTGEPTYADGFTGRFVFSLDTSVSTAYLQISSLKAEDTAVYFCARDYYGSSPYWGQGTLVTVSSGKPGSGKPGSGKPGSGKPGSDVLMTQSPDSLAVSLGERITINCKSSQSIVHSNGNTYLEWYQQKPGQSPKLLIYKVSNRFSGVPDRFSGSGSGTDFTLTISSLQAEDVAVYYCFQGSHVPNTFGGGTKVEIKGS

SEQ ID NO: 33272 - protein, 117 aa, Artificial Sequence; identical to SEQ ID NO: 33034
  Description of Artificial Sequence: Synthetic polypeptide
  VH of XENP023596

SEQ ID NO: 33273 - protein, 114 aa, Artificial Sequence
  Description of Artificial Sequence: Synthetic polypeptide
  VL of XENP023596
DVLMTQSPDSLAVSLGERITINCKSSQSIVHSNGNTYLEWYQQKPGQSPKLLIYKVSNRFSGVPDRFSGSGSGTDFTLTISSLQAEDVAVYYCFQGSHVPNTFGGGTKVEIKGS

SEQ ID NO: 33274 - protein, 5 aa, Artificial Sequence
  Description of Artificial Sequence: Synthetic peptide
  XENP023596 vhCDR1
HYGMN

SEQ ID NO: 33275 - protein, 17 aa, Artificial Sequence
  Description of Artificial Sequence: Synthetic peptide
  XENP023596 vhCDR2
WINTYTGEPTYADGFTG

SEQ ID NO: 33276 - protein, 8 aa, Artificial Sequence
  Description of Artificial Sequence: Synthetic peptide
  XENP023596 vhCDR3
DYYGSSPY

SEQ ID NO: 33277 - protein, 16 aa, Artificial Sequence
  Description of Artificial Sequence: Synthetic peptide
  XENP023596 vlCDR1
KSSQSIVHSNGNTYLE

SEQ ID NO: 33278 - protein, 7 aa, Artificial Sequence
  Description of Artificial Sequence: Synthetic peptide
  XENP023596 vlCDR2
KVSNRFS

SEQ ID NO: 33279 - protein, 9 aa, Artificial Sequence
  Description of Artificial Sequence: Synthetic peptide
  XENP023596 vlCDR3
FQGSHVPNT

SEQ ID NO: 33280 - protein, 251 aa, Artificial Sequence
  Description of Artificial Sequence: Synthetic polypeptide
  XENP023601 1C11_H3_L3.23_scFv
QIQLVQSGSELKKPGASVKVSCKASGYTFTHYGMNWVRQAPGQGLEWMGWINTYTGEPTYADGFTGRFVFSLDTSVSTAYLQISSLKAEDTAVYFCARDYYGSSPYWGQGTLVTVSSGKPGSGKPGSGKPGSGKPGSDVLMTQSPDSLAVSLGERVTINCKSSQSIVHSNGNTYLEWYQQKPGQSPKLLIYKVSNRFSGVPDRFSGSGSGTDFTLTISSLQAEDVAVYYCFQGSHVPNTFGGGTKVEIKGS

SEQ ID NO: 33281 - protein, 117 aa, Artificial Sequence; identical to SEQ ID NO: 33034
  Description of Artificial Sequence: Synthetic polypeptide
  VH of XENP023601

SEQ ID NO: 33282 - protein, 114 aa, Artificial Sequence
  Description of Artificial Sequence: Synthetic polypeptide
  VL of XENP023601
DVLMTQSPDSLAVSLGERVTINCKSSQSIVHSNGNTYLEWYQQKPGQSPKLLIYKVSNRFSGVPDRFSGSGSGTDFTLTISSLQAEDVAVYYCFQGSHVPNTFGGGTKVEIKGS

SEQ ID NO: 33283 - protein, 5 aa, Artificial Sequence
  Description of Artificial Sequence: Synthetic peptide
  XENP023601 vhCDR1
HYGMN

SEQ ID NO: 33284 - protein, 17 aa, Artificial Sequence
  Description of Artificial Sequence: Synthetic peptide
  XENP023601 vhCDR2
WINTYTGEPTYADGFTG

SEQ ID NO: 33285 - protein, 8 aa, Artificial Sequence
  Description of Artificial Sequence: Synthetic peptide
  XENP023601 vhCDR3
DYYGSSPY

SEQ ID NO: 33286 - protein, 16 aa, Artificial Sequence
  Description of Artificial Sequence: Synthetic peptide
  XENP023601 vlCDR1
KSSQSIVHSNGNTYLE

SEQ ID NO: 33287 - protein, 7 aa, Artificial Sequence
  Description of Artificial Sequence: Synthetic peptide
  XENP023601 vlCDR2
KVSNRFS

SEQ ID NO: 33288 - protein, 9 aa, Artificial Sequence
  Description of Artificial Sequence: Synthetic peptide
  XENP023601 vlCDR3
FQGSHVPNT

SEQ ID NO: 33289 - protein, 251 aa, Artificial Sequence
  Description of Artificial Sequence: Synthetic polypeptide
  XENP023602 1C11_H3_L3.25_scFv
QIQLVQSGSELKKPGASVKVSCKASGYTFTHYGMNWVRQAPGQGLEWMGWINTYTGEPTYADGFTGRFVFSLDTSVSTAYLQISSLKAEDTAVYFCARDYYGSSPYWGQGTLVTVSSGKPGSGKPGSGKPGSGKPGSDVLMTQSPDSLAVSLGERATISCKSSQSIVHSNGNTYLEWYQQKPGQSPKLLIYKVSNRFSGVPDRFSGSGSGTDFTLTISSLQAEDVAVYYCFQGSHVPNTFGGGTKVEIKGS

SEQ ID NO: 33290 - protein, 117 aa, Artificial Sequence; identical to SEQ ID NO: 33034
  Description of Artificial Sequence: Synthetic polypeptide
  VH of XENP023602

SEQ ID NO: 33291 - protein, 114 aa, Artificial Sequence
  Description of Artificial Sequence: Synthetic polypeptide
  VL of XENP023602
DVLMTQSPDSLAVSLGERATISCKSSQSIVHSNGNTYLEWYQQKPGQSPKLLIYKVSNRFSGVPDRFSGSGSGTDFTLTISSLQAEDVAVYYCFQGSHVPNTFGGGTKVEIKGS

SEQ ID NO: 33292 - protein, 5 aa, Artificial Sequence
  Description of Artificial Sequence: Synthetic peptide
  XENP023602 vhCDR1
HYGMN

SEQ ID NO: 33293 - protein, 17 aa, Artificial Sequence
  Description of Artificial Sequence: Synthetic peptide
  XENP023602 vhCDR2
WINTYTGEPTYADGFTG

SEQ ID NO: 33294 - protein, 8 aa, Artificial Sequence
  Description of Artificial Sequence: Synthetic peptide
  XENP023602 vhCDR3
DYYGSSPY

SEQ ID NO: 33295 - protein, 16 aa, Artificial Sequence
  Description of Artificial Sequence: Synthetic peptide
  XENP023602 vlCDR1
KSSQSIVHSNGNTYLE

SEQ ID NO: 33296 - protein, 7 aa, Artificial Sequence
  Description of Artificial Sequence: Synthetic peptide
  XENP023602 vlCDR2
KVSNRFS

SEQ ID NO: 33297 - protein, 9 aa, Artificial Sequence
  Description of Artificial Sequence: Synthetic peptide
  XENP023602 vlCDR3
FQGSHVPNT

SEQ ID NO: 33298 - protein, 251 aa, Artificial Sequence
  Description of Artificial Sequence: Synthetic polypeptide
  XENP023603 1C11_H3_L3.26_scFv
QIQLVQSGSELKKPGASVKVSCKASGYTFTHYGMNWVRQAPGQGLEWMGWINTYTGEPTYADGFTGRFVFSLDTSVSTAYLQISSLKAEDTAVYFCARDYYGSSPYWGQGTLVTVSSGKPGSGKPGSGKPGSGKPGSDVLMTQSPDSLAVSLGERATITCKSSQSIVHSNGNTYLEWYQQKPGQSPKLLIYKVSNRFSGVPDRFSGSGSGTDFTLTISSLQAEDVAVYYCFQGSHVPNTFGGGTKVEIKGS

SEQ ID NO: 33299 - protein, 117 aa, Artificial Sequence; identical to SEQ ID NO: 33034
  Description of Artificial Sequence: Synthetic polypeptide
  VH of XENP023603

SEQ ID NO: 33300 - protein, 114 aa, Artificial Sequence
  Description of Artificial Sequence: Synthetic polypeptide
  VL of XENP023603
DVLMTQSPDSLAVSLGERATITCKSSQSIVHSNGNTYLEWYQQKPGQSPKLLIYKVSNRFSGVPDRFSGSGSGTDFTLTISSLQAEDVAVYYCFQGSHVPNTFGGGTKVEIKGS

SEQ ID NO: 33301 - protein, 5 aa, Artificial Sequence
  Description of Artificial Sequence: Synthetic peptide
  XENP023603 vhCDR1
HYGMN

SEQ ID NO: 33302 - protein, 17 aa, Artificial Sequence
  Description of Artificial Sequence: Synthetic peptide
  XENP023603 vhCDR2
WINTYTGEPTYADGFTG

SEQ ID NO: 33303 - protein, 8 aa, Artificial Sequence
  Description of Artificial Sequence: Synthetic peptide
  XENP023603 vhCDR3
DYYGSSPY

SEQ ID NO: 33304 - protein, 16 aa, Artificial Sequence
  Description of Artificial Sequence: Synthetic peptide
  XENP023603 vlCDR1
KSSQSIVHSNGNTYLE

SEQ ID NO: 33305 - protein, 7 aa, Artificial Sequence
  Description of Artificial Sequence: Synthetic peptide
  XENP023603 vlCDR2
KVSNRFS

SEQ ID NO: 33306 - protein, 9 aa, Artificial Sequence
  Description of Artificial Sequence: Synthetic peptide
  XENP023603 vlCDR3
FQGSHVPNT

SEQ ID NO: 33307 - protein, 251 aa, Artificial Sequence
  Description of Artificial Sequence: Synthetic polypeptide
  XENP023604 1C11_H3_L3.27_scFv
QIQLVQSGSELKKPGASVKVSCKASGYTFTHYGMNWVRQAPGQGLEWMGWINTYTGEPTYADGFTGRFVFSLDTSVSTAYLQISSLKAEDTAVYFCARDYYGSSPYWGQGTLVTVSSGKPGSGKPGSGKPGSGKPGSDVLMTQSPDSLAVSLGERATINCQSSQSIVHSNGNTYLEWYQQKPGQSPKLLIYKVSNRFSGVPDRFSGSGSGTDFTLTISSLQAEDVAVYYCFQGSHVPNTFGGGTKVEIKGS

SEQ ID NO: 33308 - protein, 117 aa, Artificial Sequence; identical to SEQ ID NO: 33034
  Description of Artificial Sequence: Synthetic polypeptide
  VH of XENP023604

SEQ ID NO: 33309 - protein, 114 aa, Artificial Sequence
  Description of Artificial Sequence: Synthetic polypeptide
  VL of XENP023604
DVLMTQSPDSLAVSLGERATINCQSSQSIVHSNGNTYLEWYQQKPGQSPKLLIYKVSNRFSGVPDRFSGSGSGTDFTLTISSLQAEDVAVYYCFQGSHVPNTFGGGTKVEIKGS

SEQ ID NO: 33310 - protein, 5 aa, Artificial Sequence
  Description of Artificial Sequence: Synthetic peptide
  XENP023604 vhCDR1
HYGMN

SEQ ID NO: 33311 - protein, 17 aa, Artificial Sequence
  Description of Artificial Sequence: Synthetic peptide
  XENP023604 vhCDR2
WINTYTGEPTYADGFTG

SEQ ID NO: 33312 - protein, 8 aa, Artificial Sequence
  Description of Artificial Sequence: Synthetic peptide
  XENP023604 vhCDR3
DYYGSSPY

SEQ ID NO: 33313 - protein, 16 aa, Artificial Sequence
  Description of Artificial Sequence: Synthetic peptide
  XENP023604 vlCDR1
QSSQSIVHSNGNTYLE

SEQ ID NO: 33314 - protein, 7 aa, Artificial Sequence
  Description of Artificial Sequence: Synthetic peptide
  XENP023604 vlCDR2
KVSNRFS

SEQ ID NO: 33315 - protein, 9 aa, Artificial Sequence
  Description of Artificial Sequence: Synthetic peptide
  XENP023604 vlCDR3
FQGSHVPNT

SEQ ID NO: 33316 - protein, 251 aa, Artificial Sequence
  Description of Artificial Sequence: Synthetic polypeptide
  XENP023605 1C11_H3_L3.28_scFv
QIQLVQSGSELKKPGASVKVSCKASGYTFTHYGMNWVRQAPGQGLEWMGWINTYTGEPTYADGFTGRFVFSLDTSVSTAYLQISSLKAEDTAVYFCARDYYGSSPYWGQGTLVTVSSGKPGSGKPGSGKPGSGKPGSDVLMTQSPDSLAVSLGERATINCRSSQSIVHSNGNTYLEWYQQKPGQSPKLLIYKVSNRFSGVPDRFSGSGSGTDFTLTISSLQAEDVAVYYCFQGSHVPNTFGGGTKVEIKGS

SEQ ID NO: 33317 - protein, 117 aa, Artificial Sequence; identical to SEQ ID NO: 33034
  Description of Artificial Sequence: Synthetic polypeptide
  VH of XENP023605

SEQ ID NO: 33318 - protein, 114 aa, Artificial Sequence
  Description of Artificial Sequence: Synthetic polypeptide
  VL of XENP023605
DVLMTQSPDSLAVSLGERATINCRSSQSIVHSNGNTYLEWYQQKPGQSPKLLIYKVSNRFSGVPDRFSGSGSGTDFTLTISSLQAEDVAVYYCFQGSHVPNTFGGGTKVEIKGS

SEQ ID NO: 33319 - protein, 5 aa, Artificial Sequence
  Description of Artificial Sequence: Synthetic peptide
  XENP023605 vhCDR1
HYGMN

SEQ ID NO: 33320 - protein, 17 aa, Artificial Sequence
  Description of Artificial Sequence: Synthetic peptide
  XENP023605 vhCDR2
WINTYTGEPTYADGFTG

SEQ ID NO: 33321 - protein, 8 aa, Artificial Sequence
  Description of Artificial Sequence: Synthetic peptide
  XENP023605 vhCDR3
DYYGSSPY

SEQ ID NO: 33322 - protein, 16 aa, Artificial Sequence
  Description of Artificial Sequence: Synthetic peptide
  XENP023605 vlCDR1
RSSQSIVHSNGNTYLE

SEQ ID NO: 33323 - protein, 7 aa, Artificial Sequence
  Description of Artificial Sequence: Synthetic peptide
  XENP023605 vlCDR2
KVSNRFS

SEQ ID NO: 33324 - protein, 9 aa, Artificial Sequence
  Description of Artificial Sequence: Synthetic peptide
  XENP023605 vlCDR3
FQGSHVPNT

SEQ ID NO: 33325 - protein, 251 aa, Artificial Sequence
  Description of Artificial Sequence: Synthetic polypeptide
  XENP023606 1C11_H3_L3.29_scFv
QIQLVQSGSELKKPGASVKVSCKASGYTFTHYGMNWVRQAPGQGLEWMGWINTYTGEPTYADGFTGRFVFSLDTSVSTAYLQISSLKAEDTAVYFCARDYYGSSPYWGQGTLVTVSSGKPGSGKPGSGKPGSGKPGSDVLMTQSPDSLAVSLGERATINCSSSQSIVHSNGNTYLEWYQQKPGQSPKLLIYKVSNRFSGVPDRFSGSGSGTDFTLTISSLQAEDVAVYYCFQGSHVPNTFGGGTKVEIKGS

SEQ ID NO: 33326 - protein, 117 aa, Artificial Sequence; identical to SEQ ID NO: 33034
  Description of Artificial Sequence: Synthetic polypeptide
  VH of XENP023606

SEQ ID NO: 33327 - protein, 114 aa, Artificial Sequence
  Description of Artificial Sequence: Synthetic polypeptide
  VL of XENP023606
DVLMTQSPDSLAVSLGERATINCSSSQSIVHSNGNTYLEWYQQKPGQSPKLLIYKVSNRFSGVPDRFSGSGSGTDFTLTISSLQAEDVAVYYCFQGSHVPNTFGGGTKVEIKGS

SEQ ID NO: 33328 - protein, 5 aa, Artificial Sequence
  Description of Artificial Sequence: Synthetic peptide
  XENP023606 vhCDR1
HYGMN

SEQ ID NO: 33329 - protein, 17 aa, Artificial Sequence
  Description of Artificial Sequence: Synthetic peptide
  XENP023606 vhCDR2
WINTYTGEPTYADGFTG

SEQ ID NO: 33330 - protein, 8 aa, Artificial Sequence
  Description of Artificial Sequence: Synthetic peptide
  XENP023606 vhCDR3
DYYGSSPY

SEQ ID NO: 33331 - protein, 16 aa, Artificial Sequence
  Description of Artificial Sequence: Synthetic peptide
  XENP023606 vlCDR1
SSSQSIVHSNGNTYLE

SEQ ID NO: 33332 - protein, 7 aa, Artificial Sequence
  Description of Artificial Sequence: Synthetic peptide
  XENP023606 vlCDR2
KVSNRFS

SEQ ID NO: 33333 - protein, 9 aa, Artificial Sequence
  Description of Artificial Sequence: Synthetic peptide
  XENP023606 vlCDR3
FQGSHVPNT

SEQ ID NO: 33334 - protein, 251 aa, Artificial Sequence
  Description of Artificial Sequence: Synthetic polypeptide
  XENP023607 1C11_H3_L3.30_scFv
QIQLVQSGSELKKPGASVKVSCKASGYTFTHYGMNWVRQAPGQGLEWMGWINTYTGEPTYADGFTGRFVFSLDTSVSTAYLQISSLKAEDTAVYFCARDYYGSSPYWGQGTLVTVSSGKPGSGKPGSGKPGSGKPGSDVLMTQSPDSLAVSLGERATINCTSSQSIVHSNGNTYLEWYQQKPGQSPKLLIYKVSNRFSGVPDRFSGSGSGTDFTLTISSLQAEDVAVYYCFQGSHVPNTFGGGTKVEIKGS

SEQ ID NO: 33335 - protein, 117 aa, Artificial Sequence; identical to SEQ ID NO: 33034
  Description of Artificial Sequence: Synthetic polypeptide
  VH of XENP023607

SEQ ID NO: 33336 - protein, 114 aa, Artificial Sequence
  Description of Artificial Sequence: Synthetic polypeptide
  VL of XENP023607
DVLMTQSPDSLAVSLGERATINCTSSQSIVHSNGNTYLEWYQQKPGQSPKLLIYKVSNRFSGVPDRFSGSGSGTDFTLTISSLQAEDVAVYYCFQGSHVPNTFGGGTKVEIKGS

SEQ ID NO: 33337 - protein, 5 aa, Artificial Sequence
  Description of Artificial Sequence: Synthetic peptide
  XENP023607 vhCDR1
HYGMN

SEQ ID NO: 33338 - protein, 17 aa, Artificial Sequence
  Description of Artificial Sequence: Synthetic peptide
  XENP023607 vhCDR2
WINTYTGEPTYADGFTG

SEQ ID NO: 33339 - protein, 8 aa, Artificial Sequence
  Description of Artificial Sequence: Synthetic peptide
  XENP023607 vhCDR3
DYYGSSPY

SEQ ID NO: 33340 - protein, 16 aa, Artificial Sequence
  Description of Artificial Sequence: Synthetic peptide
  XENP023607 vlCDR1
TSSQSIVHSNGNTYLE

SEQ ID NO: 33341 - protein, 7 aa, Artificial Sequence
  Description of Artificial Sequence: Synthetic peptide
  XENP023607 vlCDR2
KVSNRFS

SEQ ID NO: 33342 - protein, 9 aa, Artificial Sequence
  Description of Artificial Sequence: Synthetic peptide
  XENP023607 vlCDR3
FQGSHVPNT

SEQ ID NO: 33343 - protein, 251 aa, Artificial Sequence
  Description of Artificial Sequence: Synthetic polypeptide
  XENP023608 1C11_H3_L3.31_scFv
QIQLVQSGSELKKPGASVKVSCKASGYTFTHYGMNWVRQAPGQGLEWMGWINTYTGEPTYADGFTGRFVFSLDTSVSTAYLQISSLKAEDTAVYFCARDYYGSSPYWGQGTLVTVSSGKPGSGKPGSGKPGSGKPGSDVLMTQSPDSLAVSLGERATINCKTSQSIVHSNGNTYLEWYQQKPGQSPKLLIYKVSNRFSGVPDRFSGSGSGTDFTLTISSLQAEDVAVYYCFQGSHVPNTFGGGTKVEIKGS

SEQ ID NO: 33344 - protein, 117 aa, Artificial Sequence; identical to SEQ ID NO: 33034
  Description of Artificial Sequence: Synthetic polypeptide
  VH of XENP023608

SEQ ID NO: 33345 - protein, 114 aa, Artificial Sequence
  Description of Artificial Sequence: Synthetic polypeptide
  VL of XENP023608
DVLMTQSPDSLAVSLGERATINCKTSQSIVHSNGNTYLEWYQQKPGQSPKLLIYKVSNRFSGVPDRFSGSGSGTDFTLTISSLQAEDVAVYYCFQGSHVPNTFGGGTKVEIKGS

SEQ ID NO: 33346 - protein, 5 aa, Artificial Sequence
  Description of Artificial Sequence: Synthetic peptide
  XENP023608 vhCDR1
HYGMN

SEQ ID NO: 33347 - protein, 17 aa, Artificial Sequence
  Description of Artificial Sequence: Synthetic peptide
  XENP023608 vhCDR2
WINTYTGEPTYADGFTG

SEQ ID NO: 33348 - protein, 8 aa, Artificial Sequence
  Description of Artificial Sequence: Synthetic peptide
  XENP023608 vhCDR3
DYYGSSPY

SEQ ID NO: 33349 - protein, 16 aa, Artificial Sequence
  Description of Artificial Sequence: Synthetic peptide
  XENP023608 vlCDR1
KTSQSIVHSNGNTYLE

SEQ ID NO: 33350 - protein, 7 aa, Artificial Sequence
  Description of Artificial Sequence: Synthetic peptide
  XENP023608 vlCDR2
KVSNRFS

SEQ ID NO: 33351 - protein, 9 aa, Artificial Sequence
  Description of Artificial Sequence: Synthetic peptide
  XENP023608 vlCDR3
FQGSHVPNT

SEQ ID NO: 33352 - protein, 251 aa, Artificial Sequence
  Description of Artificial Sequence: Synthetic polypeptide
  XENP023609 1C11_H3_L3.32_scFv
QIQLVQSGSELKKPGASVKVSCKASGYTFTHYGMNWVRQAPGQGLEWMGWINTYTGEPTYADGFTGRFVFSLDTSVSTAYLQISSLKAEDTAVYFCARDYYGSSPYWGQGTLVTVSSGKPGSGKPGSGKPGSGKPGSDVLMTQSPDSLAVSLGERATINCKASQSIVHSNGNTYLEWYQQKPGQSPKLLIYKVSNRFSGVPDRFSGSGSGTDFTLTISSLQAEDVAVYYCFQGSHVPNTFGGGTKVEIKGS

SEQ ID NO: 33353 - protein, 117 aa, Artificial Sequence; identical to SEQ ID NO: 33034
  Description of Artificial Sequence: Synthetic polypeptide
  VH of XENP023609

SEQ ID NO: 33354 - protein, 114 aa, Artificial Sequence
  Description of Artificial Sequence: Synthetic polypeptide
  VL of XENP023609
DVLMTQSPDSLAVSLGERATINCKASQSIVHSNGNTYLEWYQQKPGQSPKLLIYKVSNRFSGVPDRFSGSGSGTDFTLTISSLQAEDVAVYYCFQGSHVPNTFGGGTKVEIKGS

SEQ ID NO: 33355 - protein, 5 aa, Artificial Sequence
  Description of Artificial Sequence: Synthetic peptide
  XENP023609 vhCDR1
HYGMN

SEQ ID NO: 33356 - protein, 17 aa, Artificial Sequence
  Description of Artificial Sequence: Synthetic peptide
  XENP023609 vhCDR2
WINTYTGEPTYADGFTG

SEQ ID NO: 33357 - protein, 8 aa, Artificial Sequence
  Description of Artificial Sequence: Synthetic peptide
  XENP023609 vhCDR3
DYYGSSPY

SEQ ID NO: 33358 - protein, 16 aa, Artificial Sequence
  Description of Artificial Sequence: Synthetic peptide
  XENP023609 vlCDR1
KASQSIVHSNGNTYLE

SEQ ID NO: 33359 - protein, 7 aa, Artificial Sequence
  Description of Artificial Sequence: Synthetic peptide
  XENP023609 vlCDR2
KVSNRFS

SEQ ID NO: 33360 - protein, 9 aa, Artificial Sequence
  Description of Artificial Sequence: Synthetic peptide
  XENP023609 vlCDR3
FQGSHVPNT

SEQ ID NO: 33361 - protein, 251 aa, Artificial Sequence
  Description of Artificial Sequence: Synthetic polypeptide
  XENP023610 1C11_H3_L3.34_scFv
QIQLVQSGSELKKPGASVKVSCKASGYTFTHYGMNWVRQAPGQGLEWMGWINTYTGEPTYADGFTGRFVFSLDTSVSTAYLQISSLKAEDTAVYFCARDYYGSSPYWGQGTLVTVSSGKPGSGKPGSGKPGSGKPGSDVLMTQSPDSLAVSLGERATINCKSSQSVVHSNGNTYLEWYQQKPGQSPKLLIYKVSNRFSGVPDRFSGSGSGTDFTLTISSLQAEDVAVYYCFQGSHVPNTFGGGTKVEIKGS

SEQ ID NO: 33362 - protein, 117 aa, Artificial Sequence; identical to SEQ ID NO: 33034
  Description of Artificial Sequence: Synthetic polypeptide
  VH of XENP023610

SEQ ID NO: 33363 - protein, 114 aa, Artificial Sequence
  Description of Artificial Sequence: Synthetic polypeptide
  VL of XENP023610
DVLMTQSPDSLAVSLGERATINCKSSQSVVHSNGNTYLEWYQQKPGQSPKLLIYKVSNRFSGVPDRFSGSGSGTDFTLTISSLQAEDVAVYYCFQGSHVPNTFGGGTKVEIKGS

SEQ ID NO: 33364 - protein, 5 aa, Artificial Sequence
  Description of Artificial Sequence: Synthetic peptide
  XENP023610 vhCDR1
HYGMN

SEQ ID NO: 33365 - protein, 17 aa, Artificial Sequence
  Description of Artificial Sequence: Synthetic peptide
  XENP023610 vhCDR2
WINTYTGEPTYADGFTG

SEQ ID NO: 33366 - protein, 8 aa, Artificial Sequence
  Description of Artificial Sequence: Synthetic peptide
  XENP023610 vhCDR3
DYYGSSPY

SEQ ID NO: 33367 - protein, 16 aa, Artificial Sequence
  Description of Artificial Sequence: Synthetic peptide
  XENP023610 vlCDR1
KSSQSVVHSNGNTYLE

SEQ ID NO: 33368 - protein, 7 aa, Artificial Sequence
  Description of Artificial Sequence: Synthetic peptide
  XENP023610 vlCDR2
KVSNRFS

SEQ ID NO: 33369 - protein, 9 aa, Artificial Sequence
  Description of Artificial Sequence: Synthetic peptide
  XENP023610 vlCDR3
FQGSHVPNT

SEQ ID NO: 33370 - protein, 251 aa, Artificial Sequence
  Description of Artificial Sequence: Synthetic polypeptide
  XENP023611 1C11_H3_L3.35_scFv
QIQLVQSGSELKKPGASVKVSCKASGYTFTHYGMNWVRQAPGQGLEWMGWINTYTGEPTYADGFTGRFVFSLDTSVSTAYLQISSLKAEDTAVYFCARDYYGSSPYWGQGTLVTVSSGKPGSGKPGSGKPGSGKPGSDVLMTQSPDSLAVSLGERATINCKSSQSAVHSNGNTYLEWYQQKPGQSPKLLIYKVSNRFSGVPDRFSGSGSGTDFTLTISSLQAEDVAVYYCFQGSHVPNTFGGGTKVEIKGS

SEQ ID NO: 33371 - protein, 117 aa, Artificial Sequence; identical to SEQ ID NO: 33034
  Description of Artificial Sequence: Synthetic polypeptide
  VH of XENP023611

SEQ ID NO: 33372 - protein, 114 aa, Artificial Sequence
  Description of Artificial Sequence: Synthetic polypeptide
  VL of XENP023611
DVLMTQSPDSLAVSLGERATINCKSSQSAVHSNGNTYLEWYQQKPGQSPKLLIYKVSNRFSGVPDRFSGSGSGTDFTLTISSLQAEDVAVYYCFQGSHVPNTFGGGTKVEIKGS

SEQ ID NO: 33373 - protein, 5 aa, Artificial Sequence
  Description of Artificial Sequence: Synthetic peptide
  XENP023611 vhCDR1
HYGMN

SEQ ID NO: 33374 - protein, 17 aa, Artificial Sequence
  Description of Artificial Sequence: Synthetic peptide
  XENP023611 vhCDR2
WINTYTGEPTYADGFTG

SEQ ID NO: 33375 - protein, 8 aa, Artificial Sequence
  Description of Artificial Sequence: Synthetic peptide
  XENP023611 vhCDR3
DYYGSSPY

SEQ ID NO: 33376 - protein, 16 aa, Artificial Sequence
  Description of Artificial Sequence: Synthetic peptide
  XENP023611 vlCDR1
KSSQSAVHSNGNTYLE

SEQ ID NO: 33377 - protein, 7 aa, Artificial Sequence
  Description of Artificial Sequence: Synthetic peptide
  XENP023611 vlCDR2
KVSNRFS

SEQ ID NO: 33378 - protein, 9 aa, Artificial Sequence
  Description of Artificial Sequence: Synthetic peptide
  XENP023611 vlCDR3
FQGSHVPNT

SEQ ID NO: 33379 - protein, 251 aa, Artificial Sequence
  Description of Artificial Sequence: Synthetic polypeptide
  XENP023612 1C11_H3_L3.36_scFv
QIQLVQSGSELKKPGASVKVSCKASGYTFTHYGMNWVRQAPGQGLEWMGWINTYTGEPTYADGFTGRFVFSLDTSVSTAYLQISSLKAEDTAVYFCARDYYGSSPYWGQGTLVTVSSGKPGSGKPGSGKPGSGKPGSDVLMTQSPDSLAVSLGERATINCKSSQSIVHSSNNTYLEWYQQKPGQSPKLLIYKVSNRFSGVPDRFSGSGSGTDFTLTISSLQAEDVAVYYCFQGSHVPNTFGGGTKVEIKGS

SEQ ID NO: 33380 - protein, 117 aa, Artificial Sequence; identical to SEQ ID NO: 33034
  Description of Artificial Sequence: Synthetic polypeptide
  VH of XENP023612

SEQ ID NO: 33381 - protein, 114 aa, Artificial Sequence
  Description of Artificial Sequence: Synthetic polypeptide
  VL of XENP023612
DVLMTQSPDSLAVSLGERATINCKSSQSIVHSSNNTYLEWYQQKPGQSPKLLIYKVSNRFSGVPDRFSGSGSGTDFTLTISSLQAEDVAVYYCFQGSHVPNTFGGGTKVEIKGS

SEQ ID NO: 33382 - protein, 5 aa, Artificial Sequence
  Description of Artificial Sequence: Synthetic peptide
  XENP023612 vhCDR1
HYGMN

SEQ ID NO: 33383 - protein, 17 aa, Artificial Sequence
  Description of Artificial Sequence: Synthetic peptide
  XENP023612 vhCDR2
WINTYTGEPTYADGFTG

SEQ ID NO: 33384 - protein, 8 aa, Artificial Sequence
  Description of Artificial Sequence: Synthetic peptide
  XENP023612 vhCDR3
DYYGSSPY

SEQ ID NO: 33385 - protein, 16 aa, Artificial Sequence
  Description of Artificial Sequence: Synthetic peptide
  XENP023612 vlCDR1
KSSQSIVHSSNNTYLE

SEQ ID NO: 33386 - protein, 7 aa, Artificial Sequence
  Description of Artificial Sequence: Synthetic peptide
  XENP023612 vlCDR2
KVSNRFS

SEQ ID NO: 33387 - protein, 9 aa, Artificial Sequence
  Description of Artificial Sequence: Synthetic peptide
  XENP023612 vlCDR3
FQGSHVPNT

SEQ ID NO: 33388 - protein, 251 aa, Artificial Sequence
  Description of Artificial Sequence: Synthetic polypeptide
  XENP023613 1C11_H3_L3.37_scFv
QIQLVQSGSELKKPGASVKVSCKASGYTFTHYGMNWVRQAPGQGLEWMGWINTYTGEPTYADGFTGRFVFSLDTSVSTAYLQISSLKAEDTAVYFCARDYYGSSPYWGQGTLVTVSSGKPGSGKPGSGKPGSGKPGSDVLMTQSPDSLAVSLGERATINCKSSQSIVHSNGNSYLEWYQQKPGQSPKLLIYKVSNRFSGVPDRFSGSGSGTDFTLTISSLQAEDVAVYYCFQGSHVPNTFGGGTKVEIKGS

SEQ ID NO: 33389 - protein, 117 aa, Artificial Sequence; identical to SEQ ID NO: 33034
  Description of Artificial Sequence: Synthetic polypeptide
  VH of XENP023613

SEQ ID NO: 33390 - protein, 114 aa, Artificial Sequence
  Description of Artificial Sequence: Synthetic polypeptide
  VL of XENP023613
DVLMTQSPDSLAVSLGERATINCKSSQSIVHSNGNSYLEWYQQKPGQSPKLLIYKVSNRFSGVPDRFSGSGSGTDFTLTISSLQAEDVAVYYCFQGSHVPNTFGGGTKVEIKGS

SEQ ID NO: 33391 - protein, 5 aa, Artificial Sequence
  Description of Artificial Sequence: Synthetic peptide
  XENP023613 vhCDR1
HYGMN

SEQ ID NO: 33392 - protein, 17 aa, Artificial Sequence
  Description of Artificial Sequence: Synthetic peptide
  XENP023613 vhCDR2
WINTYTGEPTYADGFTG

SEQ ID NO: 33393 - protein, 8 aa, Artificial Sequence
  Description of Artificial Sequence: Synthetic peptide
  XENP023613 vhCDR3
DYYGSSPY

SEQ ID NO: 33394 - protein, 16 aa, Artificial Sequence
  Description of Artificial Sequence: Synthetic peptide
  XENP023613 vlCDR1
KSSQSIVHSNGNSYLE

SEQ ID NO: 33395 - protein, 7 aa, Artificial Sequence
  Description of Artificial Sequence: Synthetic peptide
  XENP023613 vlCDR2
KVSNRFS

SEQ ID NO: 33396 - protein, 9 aa, Artificial Sequence
  Description of Artificial Sequence: Synthetic peptide
  XENP023613 vlCDR3
FQGSHVPNT

SEQ ID NO: 33397 - protein, 251 aa, Artificial Sequence
  Description of Artificial Sequence: Synthetic polypeptide
  XENP023614 1C11_H3_L3.38_scFv
QIQLVQSGSELKKPGASVKVSCKASGYTFTHYGMNWVRQAPGQGLEWMGWINTYTGEPTYADGFTGRFVFSLDTSVSTAYLQISSLKAEDTAVYFCARDYYGSSPYWGQGTLVTVSSGKPGSGKPGSGKPGSGKPGSDVLMTQSPDSLAVSLGERATINCKSSQSIVHSNGNNYLEWYQQKPGQSPKLLIYKVSNRFSGVPDRFSGSGSGTDFTLTISSLQAEDVAVYYCFQGSHVPNTFGGGTKVEIKGS

SEQ ID NO: 33398 - protein, 117 aa, Artificial Sequence; identical to SEQ ID NO: 33034
  Description of Artificial Sequence: Synthetic polypeptide
  VH of XENP023614

SEQ ID NO: 33399 - protein, 114 aa, Artificial Sequence
  Description of Artificial Sequence: Synthetic polypeptide
  VL of XENP023614
DVLMTQSPDSLAVSLGERATINCKSSQSIVHSNGNNYLEWYQQKPGQSPKLLIYKVSNRFSGVPDRFSGSGSGTDFTLTISSLQAEDVAVYYCFQGSHVPNTFGGGTKVEIKGS

SEQ ID NO: 33400 - protein, 5 aa, Artificial Sequence
  Description of Artificial Sequence: Synthetic peptide
  XENP023614 vhCDR1
HYGMN

SEQ ID NO: 33401 - protein, 17 aa, Artificial Sequence
  Description of Artificial Sequence: Synthetic peptide
  XENP023614 vhCDR2
WINTYTGEPTYADGFTG

SEQ ID NO: 33402 - protein, 8 aa, Artificial Sequence
  Description of Artificial Sequence: Synthetic peptide
  XENP023614 vhCDR3
DYYGSSPY

SEQ ID NO: 33403 - protein, 16 aa, Artificial Sequence
  Description of Artificial Sequence: Synthetic peptide
  XENP023614 vlCDR1
KSSQSIVHSNGNNYLE

SEQ ID NO: 33404 - protein, 7 aa, Artificial Sequence
  Description of Artificial Sequence: Synthetic peptide
  XENP023614 vlCDR2
KVSNRFS

SEQ ID NO: 33405 - protein, 9 aa, Artificial Sequence
  Description of Artificial Sequence: Synthetic peptide
  XENP023614 vlCDR3
FQGSHVPNT

SEQ ID NO: 33406 - protein, 251 aa, Artificial Sequence
  Description of Artificial Sequence: Synthetic polypeptide
  XENP023615 1C11_H3_L3.46_scFv
QIQLVQSGSELKKPGASVKVSCKASGYTFTHYGMNWVRQAPGQGLEWMGWINTYTGEPTYADGFTGRFVFSLDTSVSTAYLQISSLKAEDTAVYFCARDYYGSSPYWGQGTLVTVSSGKPGSGKPGSGKPGSGKPGSDVLMTQSPDSLAVSLGERATINCKSSQSIVHSNGNTYLEWYQQKPGQPPKLLIYKVSNRFSGVPDRFSGSGSGTDFTLTISSLQAEDVAVYYCFQGSHVPNTFGGGTKVEIKGS

SEQ ID NO: 33407 - protein, 117 aa, Artificial Sequence; identical to SEQ ID NO: 33034
  Description of Artificial Sequence: Synthetic polypeptide
  VH of XENP023615

SEQ ID NO: 33408 - protein, 114 aa, Artificial Sequence
  Description of Artificial Sequence: Synthetic polypeptide
  VL of XENP023615
DVLMTQSPDSLAVSLGERATINCKSSQSIVHSNGNTYLEWYQQKPGQPPKLLIYKVSNRFSGVPDRFSGSGSGTDFTLTISSLQAEDVAVYYCFQGSHVPNTFGGGTKVEIKGS

SEQ ID NO: 33409 - protein, 5 aa, Artificial Sequence
  Description of Artificial Sequence: Synthetic peptide
  XENP023615 vhCDR1
HYGMN

SEQ ID NO: 33410 - protein, 17 aa, Artificial Sequence
  Description of Artificial Sequence: Synthetic peptide
  XENP023615 vhCDR2
WINTYTGEPTYADGFTG

SEQ ID NO: 33411 - protein, 8 aa, Artificial Sequence
  Description of Artificial Sequence: Synthetic peptide
  XENP023615 vhCDR3
DYYGSSPY

SEQ ID NO: 33412 - protein, 16 aa, Artificial Sequence
  Description of Artificial Sequence: Synthetic peptide
  XENP023615 vlCDR1
KSSQSIVHSNGNTYLE

SEQ ID NO: 33413 - protein, 7 aa, Artificial Sequence
  Description of Artificial Sequence: Synthetic peptide
  XENP023615 vlCDR2
KVSNRFS

SEQ ID NO: 33414 - protein, 9 aa, Artificial Sequence
  Description of Artificial Sequence: Synthetic peptide
  XENP023615 vlCDR3
FQGSHVPNT

SEQ ID NO: 33415 - protein, 251 aa, Artificial Sequence
  Description of Artificial Sequence: Synthetic polypeptide
  XENP023616 1C11_H3_L3.47_scFv
QIQLVQSGSELKKPGASVKVSCKASGYTFTHYGMNWVRQAPGQGLEWMGWINTYTGEPTYADGFTGRFVFSLDTSVSTAYLQISSLKAEDTAVYFCARDYYGSSPYWGQGTLVTVSSGKPGSGKPGSGKPGSGKPGSDVLMTQSPDSLAVSLGERATINCKSSQSIVHSNGNTYLEWYQQKPGQAPKLLIYKVSNRFSGVPDRFSGSGSGTDFTLTISSLQAEDVAVYYCFQGSHVPNTFGGGTKVEIKGS

SEQ ID NO: 33416 - protein, 117 aa, Artificial Sequence; identical to SEQ ID NO: 33034
  Description of Artificial Sequence: Synthetic polypeptide
  VH of XENP023616

SEQ ID NO: 33417 - protein, 114 aa, Artificial Sequence
  Description of Artificial Sequence: Synthetic polypeptide
  VL of XENP023616
DVLMTQSPDSLAVSLGERATINCKSSQSIVHSNGNTYLEWYQQKPGQAPKLLIYKVSNRFSGVPDRFSGSGSGTDFTLTISSLQAEDVAVYYCFQGSHVPNTFGGGTKVEIKGS

SEQ ID NO: 33418 - protein, 5 aa, Artificial Sequence
  Description of Artificial Sequence: Synthetic peptide
  XENP023616 vhCDR1
HYGMN

SEQ ID NO: 33419 - protein, 17 aa, Artificial Sequence
  Description of Artificial Sequence: Synthetic peptide
  XENP023616 vhCDR2
WINTYTGEPTYADGFTG

SEQ ID NO: 33420 - protein, 8 aa, Artificial Sequence
  Description of Artificial Sequence: Synthetic peptide
  XENP023616 vhCDR3
DYYGSSPY

SEQ ID NO: 33421 - protein, 16 aa, Artificial Sequence
  Description of Artificial Sequence: Synthetic peptide
  XENP023616 vlCDR1
KSSQSIVHSNGNTYLE

SEQ ID NO: 33422 - protein, 7 aa, Artificial Sequence
  Description of Artificial Sequence: Synthetic peptide
  XENP023616 vlCDR2
KVSNRFS

SEQ ID NO: 33423 - protein, 9 aa, Artificial Sequence
  Description of Artificial Sequence: Synthetic peptide
  XENP023616 vlCDR3
FQGSHVPNT

SEQ ID NO: 33424 - protein, 251 aa, Artificial Sequence
  Description of Artificial Sequence: Synthetic polypeptide
  XENP023617 1C11_H3_L3.49_scFv
QIQLVQSGSELKKPGASVKVSCKASGYTFTHYGMNWVRQAPGQGLEWMGWINTYTGEPTYADGFTGRFVFSLDTSVSTAYLQISSLKAEDTAVYFCARDYYGSSPYWGQGTLVTVSSGKPGSGKPGSGKPGSGKPGSDVLMTQSPDSLAVSLGERATINCKSSQSIVHSNGNTYLEWYQQKPGQSPKLLIYGVSNRFSGVPDRFSGSGSGTDFTLTISSLQAEDVAVYYCFQGSHVPNTFGGGTKVEIKGS

SEQ ID NO: 33425 - protein, 117 aa, Artificial Sequence; identical to SEQ ID NO: 33034
  Description of Artificial Sequence: Synthetic polypeptide
  VH of XENP023617

SEQ ID NO: 33426 - protein, 114 aa, Artificial Sequence
  Description of Artificial Sequence: Synthetic polypeptide
  VL of XENP023617
DVLMTQSPDSLAVSLGERATINCKSSQSIVHSNGNTYLEWYQQKPGQSPKLLIYGVSNRFSGVPDRFSGSGSGTDFTLTISSLQAEDVAVYYCFQGSHVPNTFGGGTKVEIKGS

SEQ ID NO: 33427 - protein, 5 aa, Artificial Sequence
  Description of Artificial Sequence: Synthetic peptide
  XENP023617 vhCDR1
HYGMN

SEQ ID NO: 33428 - protein, 17 aa, Artificial Sequence
  Description of Artificial Sequence: Synthetic peptide
  XENP023617 vhCDR2
WINTYTGEPTYADGFTG

SEQ ID NO: 33429 - protein, 8 aa, Artificial Sequence
  Description of Artificial Sequence: Synthetic peptide
  XENP023617 vhCDR3
DYYGSSPY

SEQ ID NO: 33430 - protein, 16 aa, Artificial Sequence
  Description of Artificial Sequence: Synthetic peptide
  XENP023617 vlCDR1
KSSQSIVHSNGNTYLE

SEQ ID NO: 33431 - protein, 7 aa, Artificial Sequence
  Description of Artificial Sequence: Synthetic peptide
  XENP023617 vlCDR2
GVSNRFS

SEQ ID NO: 33432 - protein, 9 aa, Artificial Sequence
  Description of Artificial Sequence: Synthetic peptide
  XENP023617 vlCDR3
FQGSHVPNT

SEQ ID NO: 33433 - protein, 251 aa, Artificial Sequence
  Description of Artificial Sequence: Synthetic polypeptide
  XENP023618 1C11_H3_L3.50_scFv
QIQLVQSGSELKKPGASVKVSCKASGYTFTHYGMNWVRQAPGQGLEWMGWINTYTGEPTYADGFTGRFVFSLDTSVSTAYLQISSLKAEDTAVYFCARDYYGSSPYWGQGTLVTVSSGKPGSGKPGSGKPGSGKPGSDVLMTQSPDSLAVSLGERATINCKSSQSIVHSNGNTYLEWYQQKPGQSPKLLIYSVSNRFSGVPDRFSGSGSGTDFTLTISSLQAEDVAVYYCFQGSHVPNTFGGGTKVEIKGS

SEQ ID NO: 33434 - protein, 117 aa, Artificial Sequence; identical to SEQ ID NO: 33034
  Description of Artificial Sequence: Synthetic polypeptide
  VH of XENP023618

SEQ ID NO: 33435 - protein, 114 aa, Artificial Sequence
  Description of Artificial Sequence: Synthetic polypeptide
  VL of XENP023618
DVLMTQSPDSLAVSLGERATINCKSSQSIVHSNGNTYLEWYQQKPGQSPKLLIYSVSNRFSGVPDRFSGSGSGTDFTLTISSLQAEDVAVYYCFQGSHVPNTFGGGTKVEIKGS

SEQ ID NO: 33436 - protein, 5 aa, Artificial Sequence
  Description of Artificial Sequence: Synthetic peptide
  XENP023618 vhCDR1
HYGMN

SEQ ID NO: 33437 - protein, 17 aa, Artificial Sequence
  Description of Artificial Sequence: Synthetic peptide
  XENP023618 vhCDR2
WINTYTGEPTYADGFTG

SEQ ID NO: 33438 - protein, 8 aa, Artificial Sequence
  Description of Artificial Sequence: Synthetic peptide
  XENP023618 vhCDR3
DYYGSSPY

SEQ ID NO: 33439 - protein, 16 aa, Artificial Sequence
  Description of Artificial Sequence: Synthetic peptide
  XENP023618 vlCDR1
KSSQSIVHSNGNTYLE

SEQ ID NO: 33440 - protein, 7 aa, Artificial Sequence
  Description of Artificial Sequence: Synthetic peptide
  XENP023618 vlCDR2
SVSNRFS

SEQ ID NO: 33441 - protein, 9 aa, Artificial Sequence
  Description of Artificial Sequence: Synthetic peptide
  XENP023618 vlCDR3
FQGSHVPNT

SEQ ID NO: 33442 - protein, 251 aa, Artificial Sequence
  Description of Artificial Sequence: Synthetic polypeptide
  XENP023619 1C11_H3_L3.51_scFv
QIQLVQSGSELKKPGASVKVSCKASGYTFTHYGMNWVRQAPGQGLEWMGWINTYTGEPTYADGFTGRFVFSLDTSVSTAYLQISSLKAEDTAVYFCARDYYGSSPYWGQGTLVTVSSGKPGSGKPGSGKPGSGKPGSDVLMTQSPDSLAVSLGERATINCKSSQSIVHSNGNTYLEWYQQKPGQSPKLLIYKASNRFSGVPDRFSGSGSGTDFTLTISSLQAEDVAVYYCFQGSHVPNTFGGGTKVEIKGS

SEQ ID NO: 33443 - protein, 117 aa, Artificial Sequence; identical to SEQ ID NO: 33034
  Description of Artificial Sequence: Synthetic polypeptide
  VH of XENP023619

SEQ ID NO: 33444 - protein, 114 aa, Artificial Sequence
  Description of Artificial Sequence: Synthetic polypeptide
  VL of XENP023619
DVLMTQSPDSLAVSLGERATINCKSSQSIVHSNGNTYLEWYQQKPGQSPKLLIYKASNRFSGVPDRFSGSGSGTDFTLTISSLQAEDVAVYYCFQGSHVPNTFGGGTKVEIKGS

SEQ ID NO: 33445 - protein, 5 aa, Artificial Sequence
  Description of Artificial Sequence: Synthetic peptide
  XENP023619 vhCDR1
HYGMN

SEQ ID NO: 33446 - protein, 17 aa, Artificial Sequence
  Description of Artificial Sequence: Synthetic peptide
  XENP023619 vhCDR2
WINTYTGEPTYADGFTG

SEQ ID NO: 33447 - protein, 8 aa, Artificial Sequence
  Description of Artificial Sequence: Synthetic peptide
  XENP023619 vhCDR3
DYYGSSPY

SEQ ID NO: 33448 - protein, 16 aa, Artificial Sequence
  Description of Artificial Sequence: Synthetic peptide
  XENP023619 vlCDR1
KSSQSIVHSNGNTYLE

SEQ ID NO: 33449 - protein, 7 aa, Artificial Sequence
  Description of Artificial Sequence: Synthetic peptide
  XENP023619 vlCDR2
KASNRFS

SEQ ID NO: 33450 - protein, 9 aa, Artificial Sequence
  Description of Artificial Sequence: Synthetic peptide
  XENP023619 vlCDR3
FQGSHVPNT

SEQ ID NO: 33451 - protein, 251 aa, Artificial Sequence
  Description of Artificial Sequence: Synthetic polypeptide
  XENP023620 1C11_H3_L3.52_scFv
QIQLVQSGSELKKPGASVKVSCKASGYTFTHYGMNWVRQAPGQGLEWMGWINTYTGEPTYADGFTGRFVFSLDTSVSTAYLQISSLKAEDTAVYFCARDYYGSSPYWGQGTLVTVSSGKPGSGKPGSGKPGSGKPGSDVLMTQSPDSLAVSLGERATINCKSSQSIVHSNGNTYLEWYQQKPGQSPKLLIYKTSNRFSGVPDRFSGSGSGTDFTLTISSLQAEDVAVYYCFQGSHVPNTFGGGTKVEIKGS

SEQ ID NO: 33452 - protein, 117 aa, Artificial Sequence; identical to SEQ ID NO: 33034
  Description of Artificial Sequence: Synthetic polypeptide
  VH of XENP023620

SEQ ID NO: 33453 - protein, 114 aa, Artificial Sequence
  Description of Artificial Sequence: Synthetic polypeptide
  VL of XENP023620
DVLMTQSPDSLAVSLGERATINCKSSQSIVHSNGNTYLEWYQQKPGQSPKLLIYKTSNRFSGVPDRFSGSGSGTDFTLTISSLQAEDVAVYYCFQGSHVPNTFGGGTKVEIKGS

SEQ ID NO: 33454 - protein, 5 aa, Artificial Sequence
  Description of Artificial Sequence: Synthetic peptide
  XENP023620 vhCDR1
HYGMN

SEQ ID NO: 33455 - protein, 17 aa, Artificial Sequence
  Description of Artificial Sequence: Synthetic peptide
  XENP023620 vhCDR2
WINTYTGEPTYADGFTG

SEQ ID NO: 33456 - protein, 8 aa, Artificial Sequence
  Description of Artificial Sequence: Synthetic peptide
  XENP023620 vhCDR3
DYYGSSPY

SEQ ID NO: 33457 - protein, 16 aa, Artificial Sequence
  Description of Artificial Sequence: Synthetic peptide
  XENP023620 vlCDR1
KSSQSIVHSNGNTYLE

SEQ ID NO: 33458 - protein, 7 aa, Artificial Sequence
  Description of Artificial Sequence: Synthetic peptide
  XENP023620 vlCDR2
KTSNRFS

SEQ ID NO: 33459 - protein, 9 aa, Artificial Sequence
  Description of Artificial Sequence: Synthetic peptide
  XENP023620 vlCDR3
FQGSHVPNT

SEQ ID NO: 33460 - protein, 251 aa, Artificial Sequence
  Description of Artificial Sequence: Synthetic polypeptide
  XENP023621 1C11_H3_L3.53_scFv
QIQLVQSGSELKKPGASVKVSCKASGYTFTHYGMNWVRQAPGQGLEWMGWINTYTGEPTYADGFTGRFVFSLDTSVSTAYLQISSLKAEDTAVYFCARDYYGSSPYWGQGTLVTVSSGKPGSGKPGSGKPGSGKPGSDVLMTQSPDSLAVSLGERATINCKSSQSIVHSNGNTYLEWYQQKPGQSPKLLIYKGSNRFSGVPDRFSGSGSGTDFTLTISSLQAEDVAVYYCFQGSHVPNTFGGGTKVEIKGS

SEQ ID NO: 33461 - protein, 117 aa, Artificial Sequence; identical to SEQ ID NO: 33034
  Description of Artificial Sequence: Synthetic polypeptide
  VH of XENP023621

SEQ ID NO: 33462 - protein, 114 aa, Artificial Sequence
  Description of Artificial Sequence: Synthetic polypeptide
  VL of XENP023621
DVLMTQSPDSLAVSLGERATINCKSSQSIVHSNGNTYLEWYQQKPGQSPKLLIYKGSNRFSGVPDRFSGSGSGTDFTLTISSLQAEDVAVYYCFQGSHVPNTFGGGTKVEIKGS

SEQ ID NO: 33463 - protein, 5 aa, Artificial Sequence
  Description of Artificial Sequence: Synthetic peptide
  XENP023621 vhCDR1
HYGMN

SEQ ID NO: 33464 - protein, 17 aa, Artificial Sequence
  Description of Artificial Sequence: Synthetic peptide
  XENP023621 vhCDR2
WINTYTGEPTYADGFTG

SEQ ID NO: 33465 - protein, 8 aa, Artificial Sequence
  Description of Artificial Sequence: Synthetic peptide
  XENP023621 vhCDR3
DYYGSSPY

SEQ ID NO: 33466 - protein, 16 aa, Artificial Sequence
  Description of Artificial Sequence: Synthetic peptide
  XENP023621 vlCDR1
KSSQSIVHSNGNTYLE

SEQ ID NO: 33467 - protein, 7 aa, Artificial Sequence
  Description of Artificial Sequence: Synthetic peptide
  XENP023621 vlCDR2
KGSNRFS

SEQ ID NO: 33468 - protein, 9 aa, Artificial Sequence
  Description of Artificial Sequence: Synthetic peptide
  XENP023621 vlCDR3
FQGSHVPNT

SEQ ID NO: 33469 - protein, 251 aa, Artificial Sequence
  Description of Artificial Sequence: Synthetic polypeptide
  XENP023622 1C11_H3_L3.54_scFv
QIQLVQSGSELKKPGASVKVSCKASGYTFTHYGMNWVRQAPGQGLEWMGWINTYTGEPTYADGFTGRFVFSLDTSVSTAYLQISSLKAEDTAVYFCARDYYGSSPYWGQGTLVTVSSGKPGSGKPGSGKPGSGKPGSDVLMTQSPDSLAVSLGERATINCKSSQSIVHSNGNTYLEWYQQKPGQSPKLLIYKMSNRFSGVPDRFSGSGSGTDFTLTISSLQAEDVAVYYCFQGSHVPNTFGGGTKVEIKGS

SEQ ID NO: 33470 - protein, 117 aa, Artificial Sequence; identical to SEQ ID NO: 33034
  Description of Artificial Sequence: Synthetic polypeptide
  VH of XENP023622

SEQ ID NO: 33471 - protein, 114 aa, Artificial Sequence
  Description of Artificial Sequence: Synthetic polypeptide
  VL of XENP023622
DVLMTQSPDSLAVSLGERATINCKSSQSIVHSNGNTYLEWYQQKPGQSPKLLIYKMSNRFSGVPDRFSGSGSGTDFTLTISSLQAEDVAVYYCFQGSHVPNTFGGGTKVEIKGS

SEQ ID NO: 33472 - protein, 5 aa, Artificial Sequence
  Description of Artificial Sequence: Synthetic peptide
  XENP023622 vhCDR1
HYGMN

SEQ ID NO: 33473 - protein, 17 aa, Artificial Sequence
  Description of Artificial Sequence: Synthetic peptide
  XENP023622 vhCDR2
WINTYTGEPTYADGFTG

SEQ ID NO: 33474 - protein, 8 aa, Artificial Sequence
  Description of Artificial Sequence: Synthetic peptide
  XENP023622 vhCDR3
DYYGSSPY

SEQ ID NO: 33475 - protein, 16 aa, Artificial Sequence
  Description of Artificial Sequence: Synthetic peptide
  XENP023622 vlCDR1
KSSQSIVHSNGNTYLE

SEQ ID NO: 33476 - protein, 7 aa, Artificial Sequence
  Description of Artificial Sequence: Synthetic peptide
  XENP023622 vlCDR2
KMSNRFS

SEQ ID NO: 33477 - protein, 9 aa, Artificial Sequence
  Description of Artificial Sequence: Synthetic peptide
  XENP023622 vlCDR3
FQGSHVPNT

SEQ ID NO: 33478 - protein, 251 aa, Artificial Sequence
  Description of Artificial Sequence: Synthetic polypeptide
  XENP023623 1C11_H3_L3.56_scFv
QIQLVQSGSELKKPGASVKVSCKASGYTFTHYGMNWVRQAPGQGLEWMGWINTYTGEPTYADGFTGRFVFSLDTSVSTAYLQISSLKAEDTAVYFCARDYYGSSPYWGQGTLVTVSSGKPGSGKPGSGKPGSGKPGSDVLMTQSPDSLAVSLGERATINCKSSQSIVHSNGNTYLEWYQQKPGQSPKLLIYKVSNRASGVPDRFSGSGSGTDFTLTISSLQAEDVAVYYCFQGSHVPNTFGGGTKVEIKGS

SEQ ID NO: 33479 - protein, 117 aa, Artificial Sequence; identical to SEQ ID NO: 33034
  Description of Artificial Sequence: Synthetic polypeptide
  VH of XENP023623

SEQ ID NO: 33480 - protein, 114 aa, Artificial Sequence
  Description of Artificial Sequence: Synthetic polypeptide
  VL of XENP023623
DVLMTQSPDSLAVSLGERATINCKSSQSIVHSNGNTYLEWYQQKPGQSPKLLIYKVSNRASGVPDRFSGSGSGTDFTLTISSLQAEDVAVYYCFQGSHVPNTFGGGTKVEIKGS

SEQ ID NO: 33481 - protein, 5 aa, Artificial Sequence
  Description of Artificial Sequence: Synthetic peptide
  XENP023623 vhCDR1
HYGMN

SEQ ID NO: 33482 - protein, 17 aa, Artificial Sequence
  Description of Artificial Sequence: Synthetic peptide
  XENP023623 vhCDR2
WINTYTGEPTYADGFTG

SEQ ID NO: 33483 - protein, 8 aa, Artificial Sequence
  Description of Artificial Sequence: Synthetic peptide
  XENP023623 vhCDR3
DYYGSSPY

SEQ ID NO: 33484 - protein, 16 aa, Artificial Sequence
  Description of Artificial Sequence: Synthetic peptide
  XENP023623 vlCDR1
KSSQSIVHSNGNTYLE

SEQ ID NO: 33485 - protein, 7 aa, Artificial Sequence
  Description of Artificial Sequence: Synthetic peptide
  XENP023623 vlCDR2
KVSNRAS

SEQ ID NO: 33486 - protein, 9 aa, Artificial Sequence
  Description of Artificial Sequence: Synthetic peptide
  XENP023623 vlCDR3
FQGSHVPNT

SEQ ID NO: 33487 - protein, 251 aa, Artificial Sequence
  Description of Artificial Sequence: Synthetic polypeptide
  XENP023624 1C11_H3_L3.57_scFv
QIQLVQSGSELKKPGASVKVSCKASGYTFTHYGMNWVRQAPGQGLEWMGWINTYTGEPTYADGFTGRFVFSLDTSVSTAYLQISSLKAEDTAVYFCARDYYGSSPYWGQGTLVTVSSGKPGSGKPGSGKPGSGKPGSDVLMTQSPDSLAVSLGERATINCKSSQSIVHSNGNTYLEWYQQKPGQSPKLLIYKVSNRFTGVPDRFSGSGSGTDFTLTISSLQAEDVAVYYCFQGSHVPNTFGGGTKVEIKGS

SEQ ID NO: 33488 - protein, 117 aa, Artificial Sequence; identical to SEQ ID NO: 33034
  Description of Artificial Sequence: Synthetic polypeptide
  VH of XENP023624

SEQ ID NO: 33489 - protein, 114 aa, Artificial Sequence
  Description of Artificial Sequence: Synthetic polypeptide
  VL of XENP023624
DVLMTQSPDSLAVSLGERATINCKSSQSIVHSNGNTYLEWYQQKPGQSPKLLIYKVSNRFTGVPDRFSGSGSGTDFTLTISSLQAEDVAVYYCFQGSHVPNTFGGGTKVEIKGS

SEQ ID NO: 33490 - protein, 5 aa, Artificial Sequence
  Description of Artificial Sequence: Synthetic peptide
  XENP023624 vhCDR1
HYGMN

SEQ ID NO: 33491 - protein, 17 aa, Artificial Sequence
  Description of Artificial Sequence: Synthetic peptide
  XENP023624 vhCDR2
WINTYTGEPTYADGFTG

SEQ ID NO: 33492 - protein, 8 aa, Artificial Sequence
  Description of Artificial Sequence: Synthetic peptide
  XENP023624 vhCDR3
DYYGSSPY

SEQ ID NO: 33493 - protein, 16 aa, Artificial Sequence
  Description of Artificial Sequence: Synthetic peptide
  XENP023624 vlCDR1
KSSQSIVHSNGNTYLE

SEQ ID NO: 33494 - protein, 7 aa, Artificial Sequence
  Description of Artificial Sequence: Synthetic peptide
  XENP023624 vlCDR2
KVSNRFT

SEQ ID NO: 33495 - protein, 9 aa, Artificial Sequence
  Description of Artificial Sequence: Synthetic peptide
  XENP023624 vlCDR3
FQGSHVPNT

SEQ ID NO: 33496 - protein, 251 aa, Artificial Sequence
  Description of Artificial Sequence: Synthetic polypeptide
  XENP023625 1C11_H3_L3.58_scFv
QIQLVQSGSELKKPGASVKVSCKASGYTFTHYGMNWVRQAPGQGLEWMGWINTYTGEPTYADGFTGRFVFSLDTSVSTAYLQISSLKAEDTAVYFCARDYYGSSPYWGQGTLVTVSSGKPGSGKPGSGKPGSGKPGSDVLMTQSPDSLAVSLGERATINCKSSQSIVHSNGNTYLEWYQQKPGQSPKLLIYKVSNRFSGVPDRFSGSGSGTDFTLTISGLQAEDVAVYYCFQGSHVPNTFGGGTKVEIKGS

SEQ ID NO: 33497 - protein, 117 aa, Artificial Sequence; identical to SEQ ID NO: 33034
  Description of Artificial Sequence: Synthetic polypeptide
  VH of XENP023625

SEQ ID NO: 33498 - protein, 114 aa, Artificial Sequence
  Description of Artificial Sequence: Synthetic polypeptide
  VL of XENP023625
DVLMTQSPDSLAVSLGERATINCKSSQSIVHSNGNTYLEWYQQKPGQSPKLLIYKVSNRFSGVPDRFSGSGSGTDFTLTISGLQAEDVAVYYCFQGSHVPNTFGGGTKVEIKGS

SEQ ID NO: 33499 - protein, 5 aa, Artificial Sequence
  Description of Artificial Sequence: Synthetic peptide
  XENP023625 vhCDR1
HYGMN

SEQ ID NO: 33500 - protein, 17 aa, Artificial Sequence
  Description of Artificial Sequence: Synthetic peptide
  XENP023625 vhCDR2
WINTYTGEPTYADGFTG

SEQ ID NO: 33501 - protein, 8 aa, Artificial Sequence
  Description of Artificial Sequence: Synthetic peptide
  XENP023625 vhCDR3
DYYGSSPY

SEQ ID NO: 33502 - protein, 16 aa, Artificial Sequence
  Description of Artificial Sequence: Synthetic peptide
  XENP023625 vlCDR1
KSSQSIVHSNGNTYLE

SEQ ID NO: 33503 - protein, 7 aa, Artificial Sequence
  Description of Artificial Sequence: Synthetic peptide
  XENP023625 vlCDR2
KVSNRFS

SEQ ID NO: 33504 - protein, 9 aa, Artificial Sequence
  Description of Artificial Sequence: Synthetic peptide
  XENP023625 vlCDR3
FQGSHVPNT

SEQ ID NO: 33505 - protein, 251 aa, Artificial Sequence
  Description of Artificial Sequence: Synthetic polypeptide
  XENP023626 1C11_H3_L3.59_scFv
QIQLVQSGSELKKPGASVKVSCKASGYTFTHYGMNWVRQAPGQGLEWMGWINTYTGEPTYADGFTGRFVFSLDTSVSTAYLQISSLKAEDTAVYFCARDYYGSSPYWGQGTLVTVSSGKPGSGKPGSGKPGSGKPGSDVLMTQSPDSLAVSLGERATINCKSSQSIVHSNGNTYLEWYQQKPGQSPKLLIYKVSNRFSGVPDRFSGSGSGTDFTLTISRLQAEDVAVYYCFQGSHVPNTFGGGTKVEIKGS

SEQ ID NO: 33506 - protein, 117 aa, Artificial Sequence; identical to SEQ ID NO: 33034
  Description of Artificial Sequence: Synthetic polypeptide
  VH of XENP023626

SEQ ID NO: 33507 - protein, 114 aa, Artificial Sequence
  Description of Artificial Sequence: Synthetic polypeptide
  VL of XENP023626
DVLMTQSPDSLAVSLGERATINCKSSQSIVHSNGNTYLEWYQQKPGQSPKLLIYKVSNRFSGVPDRFSGSGSGTDFTLTISRLQAEDVAVYYCFQGSHVPNTFGGGTKVEIKGS

SEQ ID NO: 33508 - protein, 5 aa, Artificial Sequence
  Description of Artificial Sequence: Synthetic peptide
  XENP023626 vhCDR1
HYGMN

SEQ ID NO: 33509 - protein, 17 aa, Artificial Sequence
  Description of Artificial Sequence: Synthetic peptide
  XENP023626 vhCDR2
WINTYTGEPTYADGFTG

SEQ ID NO: 33510 - protein, 8 aa, Artificial Sequence
  Description of Artificial Sequence: Synthetic peptide
  XENP023626 vhCDR3
DYYGSSPY

SEQ ID NO: 33511 - protein, 16 aa, Artificial Sequence
  Description of Artificial Sequence: Synthetic peptide
  XENP023626 vlCDR1
KSSQSIVHSNGNTYLE

SEQ ID NO: 33512 - protein, 7 aa, Artificial Sequence
  Description of Artificial Sequence: Synthetic peptide
  XENP023626 vlCDR2
KVSNRFS

SEQ ID NO: 33513 - protein, 9 aa, Artificial Sequence
  Description of Artificial Sequence: Synthetic peptide
  XENP023626 vlCDR3
FQGSHVPNT

SEQ ID NO: 33514 - protein, 251 aa, Artificial Sequence
  Description of Artificial Sequence: Synthetic polypeptide
  XENP023627 1C11_H3_L3.60_scFv
QIQLVQSGSELKKPGASVKVSCKASGYTFTHYGMNWVRQAPGQGLEWMGWINTYTGEPTYADGFTGRFVFSLDTSVSTAYLQISSLKAEDTAVYFCARDYYGSSPYWGQGTLVTVSSGKPGSGKPGSGKPGSGKPGSDVLMTQSPDSLAVSLGERATINCKSSQSIVHSNGNTYLEWYQQKPGQSPKLLIYKVSNRFSGVPDRFSGSGSGTDFTLTISNLQAEDVAVYYCFQGSHVPNTFGGGTKVEIKGS

SEQ ID NO: 33515 - protein, 117 aa, Artificial Sequence; identical to SEQ ID NO: 33034
  Description of Artificial Sequence: Synthetic polypeptide
  VH of XENP023627

SEQ ID NO: 33516 - protein, 114 aa, Artificial Sequence
  Description of Artificial Sequence: Synthetic polypeptide
  VL of XENP023627
DVLMTQSPDSLAVSLGERATINCKSSQSIVHSNGNTYLEWYQQKPGQSPKLLIYKVSNRFSGVPDRFSGSGSGTDFTLTISNLQAEDVAVYYCFQGSHVPNTFGGGTKVEIKGS

SEQ ID NO: 33517 - protein, 5 aa, Artificial Sequence
  Description of Artificial Sequence: Synthetic peptide
  XENP023627 vhCDR1
HYGMN

SEQ ID NO: 33518 - protein, 17 aa, Artificial Sequence
  Description of Artificial Sequence: Synthetic peptide
  XENP023627 vhCDR2
WINTYTGEPTYADGFTG

SEQ ID NO: 33519 - protein, 8 aa, Artificial Sequence
  Description of Artificial Sequence: Synthetic peptide
  XENP023627 vhCDR3
DYYGSSPY

SEQ ID NO: 33520 - protein, 16 aa, Artificial Sequence
  Description of Artificial Sequence: Synthetic peptide
  XENP023627 vlCDR1
KSSQSIVHSNGNTYLE

SEQ ID NO: 33521 - protein, 7 aa, Artificial Sequence
  Description of Artificial Sequence: Synthetic peptide
  XENP023627 vlCDR2
KVSNRFS

SEQ ID NO: 33522 - protein, 9 aa, Artificial Sequence
  Description of Artificial Sequence: Synthetic peptide
  XENP023627 vlCDR3
FQGSHVPNT

SEQ ID NO: 33523 - protein, 251 aa, Artificial Sequence
  Description of Artificial Sequence: Synthetic polypeptide
  XENP023628 1C11_H3_L3.62_scFv
QIQLVQSGSELKKPGASVKVSCKASGYTFTHYGMNWVRQAPGQGLEWMGWINTYTGEPTYADGFTGRFVFSLDTSVSTAYLQISSLKAEDTAVYFCARDYYGSSPYWGQGTLVTVSSGKPGSGKPGSGKPGSGKPGSDVLMTQSPDSLAVSLGERATINCKSSQSIVHSNGNTYLEWYQQKPGQSPKLLIYKVSNRFSGVPDRFSGSGSGTDFTLTISSMQAEDVAVYYCFQGSHVPNTFGGGTKVEIKGS

SEQ ID NO: 33524 - protein, 117 aa, Artificial Sequence; identical to SEQ ID NO: 33034
  Description of Artificial Sequence: Synthetic polypeptide
  VH of XENP023628

SEQ ID NO: 33525 - protein, 114 aa, Artificial Sequence
  Description of Artificial Sequence: Synthetic polypeptide
  VL of XENP023628
DVLMTQSPDSLAVSLGERATINCKSSQSIVHSNGNTYLEWYQQKPGQSPKLLIYKVSNRFSGVPDRFSGSGSGTDFTLTISSMQAEDVAVYYCFQGSHVPNTFGGGTKVEIKGS

SEQ ID NO: 33526 - protein, 5 aa, Artificial Sequence
  Description of Artificial Sequence: Synthetic peptide
  XENP023628 vhCDR1
HYGMN

SEQ ID NO: 33527 - protein, 17 aa, Artificial Sequence
  Description of Artificial Sequence: Synthetic peptide
  XENP023628 vhCDR2
WINTYTGEPTYADGFTG

SEQ ID NO: 33528 - protein, 8 aa, Artificial Sequence
  Description of Artificial Sequence: Synthetic peptide
  XENP023628 vhCDR3
DYYGSSPY

SEQ ID NO: 33529 - protein, 16 aa, Artificial Sequence
  Description of Artificial Sequence: Synthetic peptide
  XENP023628 vlCDR1
KSSQSIVHSNGNTYLE

SEQ ID NO: 33530 - protein, 7 aa, Artificial Sequence
  Description of Artificial Sequence: Synthetic peptide
  XENP023628 vlCDR2
KVSNRFS

SEQ ID NO: 33531 - protein, 9 aa, Artificial Sequence
  Description of Artificial Sequence: Synthetic peptide
  XENP023628 vlCDR3
FQGSHVPNT

SEQ ID NO: 33532 - protein, 251 aa, Artificial Sequence
  Description of Artificial Sequence: Synthetic polypeptide
  XENP023629 1C11_H3_L3.63_scFv
QIQLVQSGSELKKPGASVKVSCKASGYTFTHYGMNWVRQAPGQGLEWMGWINTYTGEPTYADGFTGRFVFSLDTSVSTAYLQISSLKAEDTAVYFCARDYYGSSPYWGQGTLVTVSSGKPGSGKPGSGKPGSGKPGSDVLMTQSPDSLAVSLGERATINCKSSQSIVHSNGNTYLEWYQQKPGQSPKLLIYKVSNRFSGVPDRFSGSGSGTDFTLTISSVQAEDVAVYYCFQGSHVPNTFGGGTKVEIKGS

SEQ ID NO: 33533 - protein, 117 aa, Artificial Sequence; identical to SEQ ID NO: 33034
  Description of Artificial Sequence: Synthetic polypeptide
  VH of XENP023629

SEQ ID NO: 33534 - protein, 114 aa, Artificial Sequence
  Description of Artificial Sequence: Synthetic polypeptide
  VL of XENP023629
DVLMTQSPDSLAVSLGERATINCKSSQSIVHSNGNTYLEWYQQKPGQSPKLLIYKVSNRFSGVPDRFSGSGSGTDFTLTISSVQAEDVAVYYCFQGSHVPNTFGGGTKVEIKGS

SEQ ID NO: 33535 - protein, 5 aa, Artificial Sequence
  Description of Artificial Sequence: Synthetic peptide
  XENP023629 vhCDR1
HYGMN

SEQ ID NO: 33536 - protein, 17 aa, Artificial Sequence
  Description of Artificial Sequence: Synthetic peptide
  XENP023629 vhCDR2
WINTYTGEPTYADGFTG

SEQ ID NO: 33537 - protein, 8 aa, Artificial Sequence
  Description of Artificial Sequence: Synthetic peptide
  XENP023629 vhCDR3
DYYGSSPY

SEQ ID NO: 33538 - protein, 16 aa, Artificial Sequence
  Description of Artificial Sequence: Synthetic peptide
  XENP023629 vlCDR1
KSSQSIVHSNGNTYLE

SEQ ID NO: 33539 - protein, 7 aa, Artificial Sequence
  Description of Artificial Sequence: Synthetic peptide
  XENP023629 vlCDR2
KVSNRFS

SEQ ID NO: 33540 - protein, 9 aa, Artificial Sequence
  Description of Artificial Sequence: Synthetic peptide
  XENP023629 vlCDR3
FQGSHVPNT

SEQ ID NO: 33541 - protein, 251 aa, Artificial Sequence
  Description of Artificial Sequence: Synthetic polypeptide
  XENP023630 1C11_H3_L3.64_scFv
QIQLVQSGSELKKPGASVKVSCKASGYTFTHYGMNWVRQAPGQGLEWMGWINTYTGEPTYADGFTGRFVFSLDTSVSTAYLQISSLKAEDTAVYFCARDYYGSSPYWGQGTLVTVSSGKPGSGKPGSGKPGSGKPGSDVLMTQSPDSLAVSLGERATINCKSSQSIVHSNGNTYLEWYQQKPGQSPKLLIYKVSNRFSGVPDRFSGSGSGTDFTLTISSAQAEDVAVYYCFQGSHVPNTFGGGTKVEIKGS

SEQ ID NO: 33542 - protein, 117 aa, Artificial Sequence; identical to SEQ ID NO: 33034
  Description of Artificial Sequence: Synthetic polypeptide
  VH of XENP023630
